(19) United States
(12) Patent Application Publication
(10) Pub. No.: US 2021/0199660 A1
(43) Pub. Date: Jul. 1, 2021

(54) BIOMARKERS OF BREAST CANCER

(71) Applicant: 10x Genomics, Inc., Pleasanton, CA (US)

(72) Inventors: Stephen R. Williams, Pleasanton, CA (US); Cedric Uytingco, Pleasanton, CA (US); Zachary Bent, Pleasanton, CA (US); Jennifer Chew, Pleasanton, CA (US)

(21) Appl. No.: 17/100,106

(22) Filed: Nov. 20, 2020

Related U.S. Application Data
(60) Provisional application No. 63/035,324, filed on Jun. 5, 2020.
(60) Provisional application No. 62/980,116, filed on Feb. 21, 2020.
(60) Provisional application No. 62/979,681, filed on Feb. 21, 2020.
(60) Provisional application No. 62/939,517, filed on Nov. 22, 2019.

(51) Int. Cl. G01N 33/574; A61K 45/06; A61K 31/704; A61K 31/337

(52) U.S. Cl. CPC G01N 33/57415; A61K 45/06; G01N 2496/00; A61K 31/337; A61K 31/704

(57) ABSTRACT

Provided herein are methods of determining a location of one or more analytes of interest in a cancer sample. Also provided herein are methods of detecting expression of one or more analytes in a cancer (e.g., breast cancer) sample. Further provided are methods of diagnosing and treating breast cancer.

### CROSS-REFERENCE TO RELATED APPLICATIONS

[0001] This application claims priority and benefit from U.S. Provisional Patent Application 62/939,517, filed Nov. 22, 2019, U.S. Provisional Patent Application 62/979,681, filed Feb. 21, 2020, U.S. Provisional Patent Application 62/980,116, filed Feb. 21, 2020, and U.S. Provisional Patent Application 63/035,324, filed Jun. 5, 2020, the contents and disclosures of which are incorporated herein by reference in their entireties.

### BACKGROUND

[0002] Cells within a tissue of a subject have differences in cell morphology and/or function due to varied analyte levels (e.g., gene and/or protein expression) within the different cells. The specific position of a cell within a tissue (e.g., the cell's position relative to neighboring cells or the cell's position relative to the tissue microenvironment) can affect, e.g., the cell's morphology, differentiation, fate, viability, proliferation, behavior, and signaling and cross-talk with other cells in the tissue.

[0003] Spatial heterogeneity has been previously studied using techniques that only provide data for a small handful of analytes in the context of an intact tissue or a portion of a tissue, or provide a lot of analyte data for single cells, but fail to provide information regarding the position of the single cell in a parent biological sample (e.g., tissue sample).

[0004] Tumors can be heterogeneous, with different regions within a tumor sample demonstrating different gene expression. A particular cancer, triple negative breast cancer (TNBC), accounts for 10-20% of all diagnosed breast cancer cases in the United States. TNBC is aggressive and exhibits poor prognosis due to resistance to traditional therapies and lack of identification of therapeutic targets. The lack of therapeutic targets, as well as the complexity of the disease, make it critical to further investigate the underlying biology in order to improve diagnosis and therapeutic outcome. TNBC is extremely complex, making it critical to understand the underlying biology to improve outcomes.

### SEQUENCE LISTING

[0005] The instant application contains a Sequence Listing which has been submitted on a compact disc and is hereby incorporated by reference in its entirety. Said compact disc, created on Nov. 18, 2020, is includes a txt file named Sequence_Listing_47706-0199001.ba which is 308.869 megabytes in size. 3 copies of the compact discs are submitted.

### INCORPORATION BY REFERENCE OF TABLES SUBMITTED AS TEXT FILE VIA EFS-WEB

[0006] The instant application contains Tables 1a-4a, which have been submitted via EFS-Web and are hereby incorporated in their entirety by reference herein. The text files, creation date of Feb. 20, 2020, are named 47706_0198P01_0199P01_Table_1_pan_cancer.txt (referred to in the present disclosure as “Table 1a”), 47706_0198P01_0199P01_Table_2_immunology.txt (referred to in the present disclosure as “Table 2a”), 47706_0198P01_0199P01_Table_3_pathway.txt (referred to in the present disclosure as “Table 3a”), and 47706_0198P01_0199P01_Table_4_neuro.txt (referred to in the present disclosure as “Table 4a”), and are respectively 1818 kilobytes, 1034 kilobytes, 1448 kilobytes, and 1724 kilobytes in size.

LENGTHY TABLES
The patent application contains a lengthy table section. A copy of the table is available in electronic form from the USPTO web site (https://seqdata.uspto.gov/?pageRequest=docDetail&DocID=US20210199660A1). An electronic copy of the table will also be available from the USPTO upon request and payment of the fee set forth in 37 CFR 1.19(b)(3).

### SUMMARY

[0007] Featured herein is a method of assessing expression levels in a subject having breast cancer. In some instances, the method includes obtaining a biological sample from the subject; and determining an expression level of one or more analytes selected from the group consisting of centromere protein W (CENPW), alpha-2-macroglobulin like 1 (A2ML1), very low density lipoprotein receptor (VLDLR), Scrapie-responsive protein 1 (SCRG1), RNA 3′-terminal phosphate cyclase-like protein (RCL1), fatty acid binding protein 7 (FABP7), cyclin E1 (CCNE1), migration and invasion enhancer 1 (MIEN1), cell division cycle 37 like 1 (CDC37L1), endoplasmic reticulum metallopeptidase 1 (ERMP1), tumor necrosis factor (ligand) superfamily, member 10 (TNFSF10), actin gamma 2, smooth muscle (ACTG2), dermokine (DMKN), calmodulin like 3 (CALML3), collagen type XVII alpha 1 chain (COL17A1), Melanoma-associated antigen D1 (MAGED1), pleiotrophin (PTN), transmembrane protein 98 (TMEM98), lymphocyte antigen 6 family member D (LY6D), tenascin C (TNC), and reticulon 4 interacting protein 1 (RTN4IP1), immunoglobulin lambda constant 2 (IGLC2), immunoglobulin heavy constant gamma 3 (IGHG), immunoglobulin kappa constant (IGKC), immunoglobulin heavy constant gamma 1 (IGHG1), immunoglobulin lambda constant 3 (IGLC3), immunoglobulin heavy constant alpha 1 (IGHA1), Immunoglobulin Heavy Constant Gamma 2 (G2m Marker) (IGHG2), Immunoglobulin Heavy Constant Mu (IGHM), Immunoglobulin Heavy Constant Gamma 4 (G4m Marker) (IGHG4), Joining Chain Of Multimeric IgA And IgM (JCHAIN), Inhibitor Of DNA Binding 3, HLH Protein (ID3), Class II Major Histocompatibility Complex Transactivator (CIITA), Cystatin F (CST7), Interferon Alpha Inducible Protein 27 Like 2 (IFI27L2), FYN Proto-Oncogene, Src Family Tyrosine Kinase (FYN), Microtubule Associated Monooxygenase, Calponin And LIM Domain Containing (MICAL1), Heme Oxygenase 1 (HMOX1), CD7 Molecule (CD7), Rho Guanine Nucleotide Exchange Factor 1 (ARHGEF1), and Complement Factor H (CFH), Metastasis Associated Lung Adenocarcinoma Transcript 1 (MALAT1), Cathepsin D (CTSD), Thymidine Phosphorylase (TYMP), SAM and HD Domain Containing Deoxynucleoside Triphosphate Triphosphohydrolase 1 (SAMHD1), Cytochrome B-245 Alpha Chain (CYBA), ISG15 Ubiquitin Like Modifier (ISG15), Complement C1q A Chain (C1QA), Ribosomal Protein S9 (RPS9), H2A.J Histone (H2AFJ), Adipogenesis Regulatory Factor (ADIRF), Rho GDP Dissociation Inhibitor Alpha (ARHGDIA), Adenine Phosphoribosyltransferase (APRT), AE Binding Protein 1 (AEBP1), Plectin (PLEC), Apolipoprotein E (APOE), Fc Fragment Of IgG Receptor And Transporte (FCGRT), NADH:Ubiquinone Oxidoreductase Subunit B7 (NDUFB7), Methyl-CpG Binding Domain Protein 3 (MBD3), Elastin Microfibril Interfacer 1 (EMILIN1), and GADD45G Interacting Protein 1 (GADD45GIP1), C—X—C Motif Chemokine Ligand 14 (CXCL14), Tubulin Tyrosine Ligase Like 12 (TTLL12), GDNF Family Receptor Alpha 1 (GFRA1), Delta 4-Desaturase, Sphingolipid 1 (DEGS1), Anterior Gradient 2, Protein Disulphide Isomerase Family Member (AGR2), Acidic Residue Methyltransferase 1 (ARMT1), Cyclin D1 (CCND1), CAMP Regulated Phosphoprotein 21 (ARPP21), Carnitine 0-Acetyltransferase (CRAT), Protein Kinase CAMP-Activated Catalytic Subunit Beta (PRKACB), Nuclear Receptor Binding SET Domain Protein 3 (NSD3), Plasminogen Activator, Urokinase Receptor (PLAUR), Cyclin Dependent Kinase Inhibitor 2C (CDKN2C), Factor Interacting With PAPOLA And CPSF1 (F1P1L1), Transmembrane Protein 159 (TMEM159), Transmembrane Protein 141 (TMEM141), Lin-7 Homolog C, Crumbs Cell Polarity Complex Component (LIN7C), Rho Guanine Nucleotide Exchange Factor 39 (ARHGEF39), ARFGEF Family Member 3 (ARFGEF3), and Epithelial Membrane Protein 2 (EMP2), Carboxypeptidase B1 (CPB1), Fc Fragment Of IgG Receptor IIIb (FCGR3B), Kelch Domain Containing 7B (KLHDC7B), Secretoglobin Family 1D Member 2 (SCGB1D2), Signal Peptide, CUB Domain And EGF Like Domain Containing 3 (SCUBE3), C—X—C Motif Chemokine Ligand 9 (CXCL9), Cytochrome C Oxidase Subunit 6C (COX6C), Complement Factor B (CFB), Secretoglobin Family 2A Member 2 (SCGB2A2), Neuropeptide Y Receptor Y1 (NPY1R), ENSG00000262580 (AC087741.1), Guanylate Binding Protein 5 (GBP5), Intraflagellar Transport 27 (IFT27), Neuralized E3 Ubiquitin Protein Ligase 4 (NEURL4), Empty Spiracles Homeobox 1 (EMX1), Solute Carrier Family 13 Member 2 (SLC13A2), Family With Sequence Similarity 110 Member A (FAM110A), Signal Peptidase Complex Subunit 1 (SPCS1), Homogentisate 1,2-Dioxygenase (HGD), and Zinc Finger Protein 587 (ZNF587), Cysteine Rich Secretory Protein 3 (CRISP3), SLIT And NTRK Like Family Member 6 (SLITRK6), Chromosome 6 Open Reading Frame 141 (C6orf141), V-Set Domain Containing T Cell Activation Inhibitor 1 (VTCN1), Serine Hydrolase Like 2 (SERHL2), CEA Cell Adhesion Molecule 6 (CEACAM6), ATP Binding Cassette Subfamily C Member 11 (ABCC11), Shisa Family Member 2 (SHISA2), Chromosome 2 open reading frame 54 (C2orf54), PDZ and LIM Domain 1 (PDLIM1), Zinc Finger CCCH-Type Containing 12A (ZC3H12A), VPS37B Subunit Of ESCRT-I (VPS37B), Interferon Regulatory Factor 2 Binding Protein 2 (IRF2BP2), Ras Association (RalGDS/AF-6) And Pleckstrin Homology Domains 1 (RAPH1), NFKB Inhibitor Alpha (NFKBIA), Eukaryotic Translation Initiation Factor 2 Alpha Kinase 1 (EIF2AK1), Tripartite Motif Containing 33 (TRIM33), Splicing Factor Proline And Glutamine Rich (SFPQ), Coagulation Factor VII (F7), and Trafficking Protein Particle Complex 3 (TRAPPC3), Long Intergenic Non-Protein Coding RNA 52 (LINC00052), Cytochrome C Oxidase Subunit 6C (COX6C), Synuclein Gamma (SNCG), WAP Four-Disulfide Core Domain 2 (WFDC2), Solute Carrier Family 39 Member 6 (SLC39A6), Microsomal Glutathione S-Transferase 1 (MGST1), Mitochondrial Coiled-Coil Domain 1 (MCCD1), Cystatin A (CSTA), Phosphodiesterase 5A (PDE5A), Mitochondrially Encoded NADH:Ubiquinone Oxidoreductase Core Subunit 1 (MT-ND1), Signal Recognition Particle 14 (SRP14), Trafficking Protein Particle Complex 1 (TRAPPC1), Small Nuclear Ribonucleoprotein D3 Polypeptide (SNRPD3), Methionine Adenosyltransferase 2 (MAT2A), Solute Carrier Family 7 Member 8 (SLC7A8), RNA Polymerase II Subunit K (POLR2K), Transmembrane BAX Inhibitor Motif Containing 6 (TMBIM6), OCIA Domain Containing 1 (OCIAD1), Exosome Component 3 (EXOSC3), and Carbonic Anhydrase 1 (CA14), Atypical Chemokine Receptor 1 (Duffy Blood Group) (ACKR1), Insulin Like Growth Factor Binding Protein 7 (IGFBP7), Aquaporin 1 (Colton Blood Group) (AQP1), Von Willebrand Factor (VWF), Metastasis Associated Lung Adenocarcinoma Transcript 1 (MALAT1), SPARC Like 1 (SPARCL1), Transgelin (TAGLN), C—C Motif Chemokine Ligand 21 (CCL21), Actin Alpha 2, Smooth Muscle (ACTA2), Coiled-Coil Domain Containing 80 (CCDC₈₀), Cytochrome B5 Reductase 3 (CYB5R3), Plexin D1 (PLXND1), Dual Specificity Phosphatase 1 (DUSP1), Ribosomal Protein S6 (RPS6), Complement C1q A Chain (C1QA), Heart Development Protein with EGF Like Domains 1 (HEG1), ETS Proto-Oncogene 2, Transcription Factor (ETS2), A-Kinase Anchoring Protein 9 (AKAP9), Cell Division Cycle and Apoptosis Regulator 1 (CCAR1), and Tripartite Motif Containing 47 (TRIM47), Albumin (ALB), Matrix Gla Protein (MGP), ZNF350 Antisense RNA 1 (ZNF350-AS1), S100 Calcium Binding Protein G (S100G), Stanniocalcin 2 (STC2), CART Prepropeptide (CARTPT), Uncharacterized LOC102724957 (AC087379.2), Glypican 3 (GPC3), Endoplasmic Reticulum Protein 27 (ERP27), and Apolipoprotein D (APOD), CDV3 Homolog (CDV3), Triosephosphate Isomerase 1 (TPI1), TSPY Like 5 (TSPYL5), Phosphofructokinase, Platelet (PFKP), Cysteine Rich Transmembrane BMP Regulator 1 (CRIM1), Palmitoyl-Protein Thioesterase 1 (PPT1), ENSG00000259457 (AC100826.1), Aldolase, Fructose-Bisphosphate A (ALDOA), Leucine Rich Repeat Containing G Protein-Coupled Receptor 4 (LGR4), and Glutaredoxin 2 (GLRX2), Uncharacterized LOC102724957 (AC087379.2), S100 Calcium Binding Protein G (S100G), Secretoglobin Family 2A Member 2 (SCGB2A2), PGM5 Antisense RNA 1 (PGM5-AS1), Heme Binding Protein 1 (HEBP1), Adhesion Molecule With Ig Like Domain 2 (AMIGO2), PC-Esterase Domain Containing 1B (PCED1B), Secretoglobin Family 1D Member 2 (SCGB1D2), Inositol 1,4,5-Trisphosphate Receptor Type 1 (ITPR1), Intraflagellar Transport 122 (IFT122); GABA Type A Receptor Associated Protein Like 1 (GABARAPL1), Glucose-6-Phosphatase Catalytic Subunit 3 (G6PC3), Inositol Polyphosphate-5-Phosphatase K (INPP5K), Stanniocalcin 2 (STC2), HEXIM P-TEFb Complex Subunit 2 (HEXIM2), Reactive Intermediate Imine Deaminase A Homolog (RIDA), LDL Receptor Related Protein 2 (LRP2), Hexokinase 2 (HK2), Interleukin 1 Receptor Type 2 (IL1R2), and Glutamic-Oxaloacetic Transaminase 2 (GOT2), Albumin (ALB), Mitochondrially Encoded NADH:Ubiquinone Oxidoreductase Core Subunit 2 (MT-ND2), Mitochondrially Encoded NADH:Ubiquinone Oxidoreductase Core Subunit 1 (MT-ND1), Mitochondrially Encoded NADH:Ubiquinone Oxidoreductase Core Subunit 3 (MT-ND3), Mitochondrially Encoded ATP Synthase Membrane Subunit 6 (MT-ATP6), Mitochondrially Encoded NADH:Ubiquinone Oxidoreductase Core Subunit 4 (MT-ND4), Mitochondrially Encoded Cytochrome C Oxidase I (MT-CO1), Mitochondrially Encoded Cytochrome C Oxidase III (MT-CO3), Mitochondrially Encoded ATP Synthase Membrane Subunit 8 (MT-ATPS), Mitochondrially Encoded NADH:Ubiquinone Oxidoreductase Core Subunit 5 (MT-ND5), Glyoxalase I (GLO1), Abhydrolase Domain Containing 2 (ABHD2), Long Intergenic Non-Protein Coding RNA 52 (LINC00052), RAS Like Estrogen Regulated Growth Inhibitor (RERG), Stanniocalcin 2 (STC2), Metastasis Associated Lung Adenocarcinoma Transcript 1 (MALAT1), SRY-Box Transcription Factor 4 (SOX4), Carbonic Anhydrase 12 (CA12), Zinc Finger Protein 703 (ZNF703), and Mitochondrial Coiled-Coil Domain 1 (MCCD1), Long Intergenic Non-Protein Coding RNA 645 (LINC00645), Solute Carrier Family 30 Member 8 (SLC30A8), Mucin 5B, Oligomeric Mucus/Gel-Forming (MUC5B), Collectin Subfamily Member 12 (COLEC12), Parvalbumin (PVALB), Carboxypeptidase B1 (CPB1), Exocyst Complex Component 2 (EXOC2), ENSG00000278621 (AC037198.2), V-Set And Transmembrane Domain Containing 2A (VSTM2A), Fibrous Sheath Interacting Protein 1 (FSIP1); Kinesin Family Member 16B (KIF16B), Spermatogenesis Associated 20 (SPATA20), Tetraspanin 9 (TSPAN9), Calcium Voltage-Gated Channel Auxiliary Subunit Beta 3 (CACNB3), Calcium/Calmodulin Dependent Protein Kinase II Inhibitor 1 (CAMK2N1), Intraflagellar Transport 27 (IFT27), Neuralized E3 Ubiquitin Protein Ligase 1 (NEURL1), Tripartite Motif Containing 3 (TRIM3), Solute Carrier Family 46 Member 1 (SLC46A1), and Enoyl-CoA Delta Isomerase 2 (ECI2), Matrix Gla Protein (MGP), Trefoil Factor 1 (TFF1), Keratin 14 (KRT14), S100 Calcium Binding Protein A9 (S100A9), Keratin 17 (KRT17), S100 Calcium Binding Protein G (S100G), S100 Calcium Binding Protein A2 (S100A2), ZNF350 Antisense RNA 1 (ZNF350-AS1), Keratin 5 (KRT5), S100 Calcium Binding Protein A8 (S100A8), MN1 Proto-Oncogene, Transcriptional Regulator (MN1), Transmembrane Protein 45A (TMEM45A), Dynein Axonemal Light Intermediate Chain 1 (DNALI1), Chromosome 3 Open Reading Frame 14 (C3orf14), TSR1 Ribosome Maturation Factor (TSR1), ENSG00000233461 (AL445524.1) Semaphorin 3C (SEMA3C), NADH:Ubiquinone Oxidoreductase Complex Assembly Factor 2 (NDUFAF2), Achaete-Scute Family BHLH Transcription Factor 1 (ASCL1), and Grainyhead Like Transcription Factor 2 (GRHL2), Serum Amyloid A1 (SAA1), Fatty Acid Binding Protein 4 (FABP4), Glutathione Peroxidase 3 (GPX3), Pleckstrin Homology Domain Containing A8 (PIP), Alcohol Dehydrogenase 1B (Class I), Beta Polypeptide (ADH1B), Perilipin 1 (PLIN1), Collagen Type II Alpha 1 Chain (COL2A1), SH3 Domain Binding Glutamate Rich Protein Like (SH3BGRL), Adiponectin, C1Q And Collagen Domain Containing (ADIPOQ), Perilipin 4 (PLIN4), Heterogeneous Nuclear Ribonucleoprotein A0 (HNRNPA0), Ribosomal Protein L11 (RPL11), Solute Carrier Family 40 Member 1 (SLC40A1), Ribosomal Protein Lateral Stalk Subunit P2 (RPLP2), CTD Small Phosphatase 2 (CTDSP2), Sortilin Related Receptor 1 (SORL1), Ribosomal Protein L31 (RPL31), Endothelin Converting Enzyme 1 (ECE1), Secreted Frizzled Related Protein 2 (SFRP2), and Cyclin D1 (CCND1), Phosphodiesterase 5A (PDE5A), Matrix Gla Protein (MGP), WAP Four-Disulfide Core Domain 2 (WFDC2), MRPS30 Divergent Transcript (MRPS30-DT), RNA Binding Motif Protein 20 (RBM20), Mitochondrial Ribosomal Protein S30 (MRPS30), Autocrine Motility Factor Receptor (AMFR), Stanniocalcin 2 (STC2), Potassium Voltage-Gated Channel Subfamily E Regulatory Subunit 4 (KCNE4), Discoidin Domain Receptor Tyrosine Kinase 1 (DDR1), Methylcrotonoyl-CoA Carboxylase 1 (MCCC1), Pyruvate Dehydrogenase Phosphatase Regulatory Subunit (PDPR), Archaelysin Family Metallopeptidase 2 (AMZ2), Chromosome 5 Open Reading Frame 15 (C5orf15), TBC1 Domain Family Member 9 (TBC1D9), SRSF Protein Kinase 1 (SRPK1), Long Intergenic Non-Protein Coding RNA 1488 (LINC01488), Tumor Susceptibility 101 (TSG101), Cytochrome C Oxidase Assembly Factor 3 (COA3), and NFKB Inhibitor Epsilon (NFKBIE), immunoglobulin lambda constant 2 (IGLC2), C—C motif chemokine ligand 19 (CCL19), immunoglobulin heavy constant alpha 2 (A2m marker) (IGHA2), migration and invasion enhancer 1 (MIEN1), secretory leukocyte peptidase inhibitor (SLPI), Suppressor Of Cytokine Signaling 2 (SOCS2), BMP And Activin Membrane Bound Inhibitor (BAMBI), WD Repeat Domain, Phosphoinositide Interacting 1 (WIPI1), Prolactin Receptor (PRLR), B-cell lymphoma 2 (BCL2), Zinc finger protein 3 (ZNF03), Interleukin 6 signal transducer (IL6ST), Secreted Phosphoprotein 1 (SPP1), Fibroblast Growth Factor Receptor 1 (FGFR1), Vascular Endothelial Growth Factor A (VEGFA), fibronectin-1 (FN-1), hairy and enhancer of split 6 (1-1ES6), 5100 Calcium Binding Protein A11 (S100A11), and H2A histone family member X (H2AFX), and byproducts, precursors, and degradation products thereof, in the biological sample obtained from the subject. In some instances, the method includes obtaining a biological sample from the subject; and determining an expression level of one or more analytes selected from the group consisting of IGLC2, CCL19, IGHA2, MIEN1, SLPI, SOCS2), BAMBI, WIPI1, PRLR, BCL2, ZNF03, IL6ST, SPP1, FGFR1, VEGFA, FN-1, HES6, S100A11, and H2AFX, and byproducts, precursors, and degradation products thereof, in the biological sample obtained from the subject.

[0008] In some instances, the one or more biomarkers is centromere protein W (CENPW), alpha-2-macroglobulin like 1 (A2ML1), very low density lipoprotein receptor (VLDLR), Scrapie-responsive protein 1 (SCRG1), RNA 3′-terminal phosphate cyclase-like protein (RCL1), fatty acid binding protein 7 (FABP7), cyclin E1 (CCNE1), migration and invasion enhancer 1 (MIEN1), cell division cycle 37 like 1 (CDC37L1), endoplasmic reticulum metallopeptidase 1 (ERMP1), actin gamma 2, smooth muscle (ACTG2), dermokine (DMKN), calmodulin like 3 (CALML3), collagen type XVII alpha 1 chain (COL17A1), Melanoma-associated antigen D1 (MAGED1), pleiotrophin (PTN), transmembrane protein 98 (TMEM98), lymphocyte antigen 6 family member D (LY6D), tenascin C (TNC), and reticulon 4 interacting protein 1 (RTN4IP1), byproducts, precursors, and degradation products thereof, or any combination thereof.

[0009] In some instances, the one or more biomarkers is immunoglobulin lambda constant 2 (IGLC2), immunoglobulin heavy constant gamma 3 (IGHG), immunoglobulin kappa constant (IGKC), immunoglobulin heavy constant gamma 1 (IGHG1), immunoglobulin lambda constant 3 (IGLC3), immunoglobulin heavy constant alpha 1 (IGHA1), Immunoglobulin Heavy Constant Gamma 2 (G2m Marker) (IGHG2), Immunoglobulin Heavy Constant Mu (IGHM), Immunoglobulin Heavy Constant Gamma 4 (G4m Marker) (IGHG4), Joining Chain Of Multimeric IgA And IgM (JCHAIN), Inhibitor Of DNA Binding 3, HLH Protein (ID3), Class II Major Histocompatibility Complex Transactivator (CIITA), Cystatin F (CST7), Interferon Alpha Inducible Protein 27 Like 2 (IFI27L2), FYN Proto-Oncogene, Src Family Tyrosine Kinase (FYN), Microtubule Associated Monooxygenase, Calponin And LIM Domain Containing (MICAL1), Heme Oxygenase 1 (HMOX1), CD7 Molecule (CD7), Rho Guanine Nucleotide Exchange Factor 1 (ARHGEF1), Complement Factor H (CFH), Metastasis Associated Lung Adenocarcinoma Transcript 1 (MALAT1), Cathepsin D (CTSD), Thymidine Phosphorylase (TYMP), SAM and HD Domain Containing Deoxynucleoside Triphosphate Triphosphohydrolase 1 (SAMHD1), Cytochrome B-245 Alpha Chain (CYBA), ISG15 Ubiquitin Like Modifier (ISG15), Complement C1q A Chain (C1QA), Ribosomal Protein S9 (RPS9), H2A.J Histone (H2AFJ), Adipogenesis Regulatory Factor (ADIRF), Rho GDP Dissociation Inhibitor Alpha (ARHGDIA), Adenine Phosphoribosyltransferase (APRT), AE Binding Protein 1 (AEBP1), Plectin (PLEC), Apolipoprotein E (APOE), Fc Fragment Of IgG Receptor And Transporte (FCGRT), NADH:Ubiquinone Oxidoreductase Subunit B7 (NDUFB7), Methyl-CpG Binding Domain Protein 3 (MBD3), Elastin Microfibril Interfacer 1 (EMILIN1), GADD45G Interacting Protein 1 (GADD45GIP1), C—X—C Motif Chemokine Ligand 14 (CXCL14), Tubulin Tyrosine Ligase Like 12 (TTLL12), GDNF Family Receptor Alpha 1 (GFRA1), Delta 4-Desaturase, Sphingolipid 1 (DEGS1), Anterior Gradient 2, Protein Disulphide Isomerase Family Member (AGR2), Acidic Residue Methyltransferase 1 (ARMT1), Cyclin D1 (CCND1), CAMP Regulated Phosphoprotein 21 (ARPP21), Carnitine 0-Acetyltransferase (CRAT), Protein Kinase CAMP-Activated Catalytic Subunit Beta (PRKACB), Nuclear Receptor Binding SET Domain Protein 3 (NSD3), Plasminogen Activator, Urokinase Receptor (PLAUR), Cyclin Dependent Kinase Inhibitor 2C (CDKN2C), Factor Interacting With PAPOLA And CPSF1 (FIP1L1), Transmembrane Protein 159 (TMEM159), Transmembrane Protein 141 (TMEM141), Lin-7 Homolog C, Crumbs Cell Polarity Complex Component (LIN7C), Rho Guanine Nucleotide Exchange Factor 39 (ARHGEF39), ARFGEF Family Member 3 (ARFGEF3), Epithelial Membrane Protein 2 (EMP2), Carboxypeptidase B1 (CPB1), Fc Fragment Of IgG Receptor IIIb (FCGR3B), Kelch Domain Containing 7B (KLHDC7B), Secretoglobin Family 1D Member 2 (SCGB1D2), Signal Peptide, CUB Domain And EGF Like Domain Containing 3 (SCUBE3), C—X—C Motif Chemokine Ligand 9 (CXCL9), Cytochrome C Oxidase Subunit 6C (COX6C), Complement Factor B (CFB), Secretoglobin Family 2A Member 2 (SCGB2A2), Neuropeptide Y Receptor Y1 (NPY1R), ENSG00000262580 (AC087741.1), Guanylate Binding Protein 5 (GBP5), Intraflagellar Transport 27 (IFT27), Neuralized E3 Ubiquitin Protein Ligase 4 (NEURL4), Empty Spiracles Homeobox 1 (EMX1), Solute Carrier Family 13 Member 2 (SLC13A2), Family With Sequence Similarity 110 Member A (FAM110A), Signal Peptidase Complex Subunit 1 (SPCS1), Homogentisate 1,2-Dioxygenase (HGD), Zinc Finger Protein 587 (ZNF587), Cysteine Rich Secretory Protein 3 (CRISP3), SLIT And NTRK Like Family Member 6 (SLITRK6), Chromosome 6 Open Reading Frame 141 (C6orf141), V-Set Domain Containing T Cell Activation Inhibitor 1 (VTCN1), Serine Hydrolase Like 2 (SERHL2), CEA Cell Adhesion Molecule 6 (CEACAM6), ATP Binding Cassette Subfamily C Member 11 (ABCC11), Shisa Family Member 2 (SHISA2), Chromosome 2 open reading frame 54 (C2orf54), PDZ and LIM Domain 1 (PDLIM1), Zinc Finger CCCH-Type Containing 12A (ZC3H12A), VPS37B Subunit Of ESCRT-I (VPS37B), Interferon Regulatory Factor 2 Binding Protein 2 (IRF2BP2), Ras Association (RalGDS/AF-6) And Pleckstrin Homology Domains 1 (RAPH1), NFKB Inhibitor Alpha (NFKBIA), Eukaryotic Translation Initiation Factor 2 Alpha Kinase 1 (EIF2AK1), Tripartite Motif Containing 33 (TRIM33), Splicing Factor Proline And Glutamine Rich (SFPQ), Coagulation Factor VII (F7), Trafficking Protein Particle Complex 3 (TRAPPC3), Long Intergenic Non-Protein Coding RNA 52 (LINC00052), Cytochrome C Oxidase Subunit 6C (COX6C), Synuclein Gamma (SNCG), WAP Four-Disulfide Core Domain 2 (WFDC2), Solute Carrier Family 39 Member 6 (SLC39A6), Microsomal Glutathione S-Transferase 1 (MGST1), Mitochondrial Coiled-Coil Domain 1 (MCCD1), Cystatin A (CSTA), Phosphodiesterase 5A (PDE5A), Mitochondrially Encoded NADH:Ubiquinone Oxidoreductase Core Subunit 1 (MT-ND1), Signal Recognition Particle 14 (SRP14), Trafficking Protein Particle Complex 1 (TRAPPC1), Small Nuclear Ribonucleoprotein D3 Polypeptide (SNRPD3), Methionine Adenosyltransferase 2 (MAT2A), Solute Carrier Family 7 Member 8 (SLC7A8), RNA Polymerase II Subunit K (POLR2K), Transmembrane BAX Inhibitor Motif Containing 6 (TMBIM6), OCIA Domain Containing 1 (OCIAD1), Exosome Component 3 (EXOSC3), Carbonic Anhydrase 1 (CA14), Atypical Chemokine Receptor 1 (Duffy Blood Group) (ACKR1), Insulin Like Growth Factor Binding Protein 7 (IGFBP7), Aquaporin 1 (Colton Blood Group) (AQP1), Von Willebrand Factor (VWF), Metastasis Associated Lung Adenocarcinoma Transcript 1 (MALAT1), SPARC Like 1 (SPARCL1), Transgelin (TAGLN), C—C Motif Chemokine Ligand 21 (CCL21), Actin Alpha 2, Smooth Muscle (ACTA2), Coiled-Coil Domain Containing 80 (CCDC₈₀), Cytochrome B5 Reductase 3 (CYB5R3), Plexin D1 (PLXND1), Dual Specificity Phosphatase 1 (DUSP1), Ribosomal Protein S6 (RPS6), Complement C1q A Chain (C1QA), Heart Development Protein with EGF Like Domains 1 (HEG1), ETS Proto-Oncogene 2, Transcription Factor (ETS2), A-Kinase Anchoring Protein 9 (AKAP9), Cell Division Cycle and Apoptosis Regulator 1 (CCAR1), Tripartite Motif Containing 47 (TRIM47), Albumin (ALB), Matrix Gla Protein (MGP), ZNF350 Antisense RNA 1 (ZNF350-AS1), 5100 Calcium Binding Protein G (S100G), Stanniocalcin 2 (STC2), CART Prepropeptide (CARTPT), Uncharacterized LOC102724957 (AC087379.2), Glypican 3 (GPC3), Endoplasmic Reticulum Protein 27 (ERP27), and Apolipoprotein D (APOD), CDV3 Homolog (CDV3), Triosephosphate Isomerase 1 (TPI1), TSPY Like 5 (TSPYL5), Phosphofructokinase, Platelet (PFKP), Cysteine Rich Transmembrane BMP Regulator 1 (CRIM1), Palmitoyl-Protein Thioesterase 1 (PPT1), ENSG00000259457 (AC100826.1), Aldolase, Fructose-Bisphosphate A (ALDOA), Leucine Rich Repeat Containing G Protein-Coupled Receptor 4 (LGR4), Glutaredoxin 2 (GLRX2), Uncharacterized LOC102724957 (AC087379.2), S100 Calcium Binding Protein G (S100G), Secretoglobin Family 2A Member 2 (SCGB2A2), PGM5 Antisense RNA 1 (PGM5-AS1), Heme Binding Protein 1 (HEBP1), Adhesion Molecule With Ig Like Domain 2 (AMIGO2), PC-Esterase Domain Containing 1B (PCED1B), Secretoglobin Family 1D Member 2 (SCGB1D2), Inositol 1,4,5-Trisphosphate Receptor Type 1 (ITPR1), Intraflagellar Transport 122 (IFT122); GABA Type A Receptor Associated Protein Like 1 (GABARAPL1), Glucose-6-Phosphatase Catalytic Subunit 3 (G6PC3), Inositol Polyphosphate-5-Phosphatase K (INPP5K), Stanniocalcin 2 (STC2), HEXIM P-TEFb Complex Subunit 2 (HEXIM2), Reactive Intermediate Imine Deaminase A Homolog (RIDA), LDL Receptor Related Protein 2 (LRP2), Hexokinase 2 (HK2), Interleukin 1 Receptor Type 2 (IL1R2), and Glutamic-Oxaloacetic Transaminase 2 (GOT2), Albumin (ALB), Mitochondrially Encoded NADH:Ubiquinone Oxidoreductase Core Subunit 2 (MT-ND2), Mitochondrially Encoded NADH:Ubiquinone Oxidoreductase Core Subunit 1 (MT-ND1), Mitochondrially Encoded NADH:Ubiquinone Oxidoreductase Core Subunit 3 (MT-ND3), Mitochondrially Encoded ATP Synthase Membrane Subunit 6 (MT-ATP6), Mitochondrially Encoded NADH:Ubiquinone Oxidoreductase Core Subunit 4 (MT-ND4), Mitochondrially Encoded Cytochrome C Oxidase I (MT-CO1), Mitochondrially Encoded Cytochrome C Oxidase III (MT-CO3), Mitochondrially Encoded ATP Synthase Membrane Subunit 8 (MT-ATPS), Mitochondrially Encoded NADH:Ubiquinone Oxidoreductase Core Subunit 5 (MT-ND5), Glyoxalase I (GLO1), Abhydrolase Domain Containing 2 (ABHD2), Long Intergenic Non-Protein Coding RNA 52 (LINC00052), RAS Like Estrogen Regulated Growth Inhibitor (RERG), Stanniocalcin 2 (STC2), Metastasis Associated Lung Adenocarcinoma Transcript 1 (MALAT1), SRY-Box Transcription Factor 4 (SOX4), Carbonic Anhydrase 12 (CA12), Zinc Finger Protein 703 (ZNF703), Mitochondrial Coiled-Coil Domain 1 (MCCD1), Long Intergenic Non-Protein Coding RNA 645 (LINC00645), Solute Carrier Family 30 Member 8 (SLC30A8), Mucin 5B, Oligomeric Mucus/Gel-Forming (MUC5B), Collectin Subfamily Member 12 (COLEC12), Parvalbumin (PVALB), Carboxypeptidase B1 (CPB1), Exocyst Complex Component 2 (EXOC2), ENSG00000278621 (AC037198.2), V-Set And Transmembrane Domain Containing 2A (VSTM2A), Fibrous Sheath Interacting Protein 1 (FSIP1); Kinesin Family Member 16B (KIF16B), Spermatogenesis Associated 20 (SPATA20), Tetraspanin 9 (TSPAN9), Calcium Voltage-Gated Channel Auxiliary Subunit Beta 3 (CACNB3), Calcium/Calmodulin Dependent Protein Kinase II Inhibitor 1 (CAMK2N1), Intraflagellar Transport 27 (IFT27), Neuralized E3 Ubiquitin Protein Ligase 1 (NEURL1), Tripartite Motif Containing 3 (TRIM3), Solute Carrier Family 46 Member 1 (SLC46A1), Enoyl-CoA Delta Isomerase 2 (ECI2), Matrix Gla Protein (MGP), Trefoil Factor 1 (TFF1), Keratin 14 (KRT14), S100 Calcium Binding Protein A9 (S100A9), Keratin 17 (KRT17), 5100 Calcium Binding Protein G (S100G), 5100 Calcium Binding Protein A2 (S100A2), ZNF350 Antisense RNA 1 (ZNF350-AS1), Keratin 5 (KRT5), S100 Calcium Binding Protein A8 (S100A8), MN1 Proto-Oncogene, Transcriptional Regulator (MN1), Transmembrane Protein 45A (TMEM45A), Dynein Axonemal Light Intermediate Chain 1 (DNALI1), Chromosome 3 Open Reading Frame 14 (C3orf14), TSR1 Ribosome Maturation Factor (TSR1), ENSG00000233461 (AL445524.1) Semaphorin 3C (SEMA3C), NADH:Ubiquinone Oxidoreductase Complex Assembly Factor 2 (NDUFAF2), Achaete-Scute Family BHLH Transcription Factor 1 (ASCL1), Grainyhead Like Transcription Factor 2 (GRHL2), Serum Amyloid A1 (SAA1), Fatty Acid Binding Protein 4 (FABP4), Glutathione Peroxidase 3 (GPX3), Pleckstrin Homology Domain Containing A8 (PIP), Alcohol Dehydrogenase 1B (Class I), Beta Polypeptide (ADH1B), Perilipin 1 (PLIN1), Collagen Type II Alpha 1 Chain (COL2A1), SH3 Domain Binding Glutamate Rich Protein Like (SH3BGRL), Adiponectin, C1Q And Collagen Domain Containing (ADIPOQ), Perilipin 4 (PLIN4), Heterogeneous Nuclear Ribonucleoprotein A0 (HNRNPA0), Ribosomal Protein L11 (RPL11), Solute Carrier Family 40 Member 1 (SLC40A1), Ribosomal Protein Lateral Stalk Subunit P2 (RPLP2), CTD Small Phosphatase 2 (CTDSP2), Sortilin Related Receptor 1 (SORL1), Ribosomal Protein L31 (RPL31), Endothelin Converting Enzyme 1 (ECE1), Secreted Frizzled Related Protein 2 (SFRP2), Cyclin D1 (CCND1), Phosphodiesterase 5A (PDE5A), Matrix Gla Protein (MGP), WAP Four-Disulfide Core Domain 2 (WFDC2), MRPS30 Divergent Transcript (MRPS30-DT), RNA Binding Motif Protein 20 (RBM20), Mitochondrial Ribosomal Protein S30 (MRPS30), Autocrine Motility Factor Receptor (AMFR), Stanniocalcin 2 (STC2), Potassium Voltage-Gated Channel Subfamily E Regulatory Subunit 4 (KCNE4), Discoidin Domain Receptor Tyrosine Kinase 1 (DDR1), Methylcrotonoyl-CoA Carboxylase 1 (MCCC1), Pyruvate Dehydrogenase Phosphatase Regulatory Subunit (PDPR), Archaelysin Family Metallopeptidase 2 (AMZ2), Chromosome 5 Open Reading Frame 15 (C5orf15), TBC1 Domain Family Member 9 (TBC1D9), SRSF Protein Kinase 1 (SRPK1), Long Intergenic Non-Protein Coding RNA 1488 (LINC01488), Tumor Susceptibility 101 (TSG101), Cytochrome C Oxidase Assembly Factor 3 (COA3), NFKB Inhibitor Epsilon (NFKBIE), byproducts, precursors, and degradation products thereof, or any combination thereof.

[0010] In some instances, the one or more biomarkers is immunoglobulin lambda constant 2 (IGLC2), C—C motif chemokine ligand 19 (CCL19), immunoglobulin heavy constant alpha 2 (A2m marker) (IGHA2), migration and invasion enhancer 1 (MIEN1), secretory leukocyte peptidase inhibitor (SLPI), Suppressor Of Cytokine Signaling 2 (SOCS2), BMP And Activin Membrane Bound Inhibitor (BAMBI), WD Repeat Domain, Phosphoinositide Interacting 1 (WIPI1), Prolactin Receptor (PRLR), B-cell lymphoma 2 (BCL2), Zinc finger protein 3 (ZNF03), Interleukin 6 signal transducer (IL6ST), Secreted Phosphoprotein 1 (SPP1), Fibroblast Growth Factor Receptor 1 (FGFR1), Vascular Endothelial Growth Factor A (VEGFA), fibronectin-1 (FN-1), hairy and enhancer of split 6 (HES6), S100 Calcium Binding Protein A11 (S100A11), and H2A histone family member X (H2AFX), and byproducts, precursors, and degradation products thereof, or any combination thereof.

[0011] In some instances, the method further includes serially obtaining a biological sample from the subject at a plurality of time points. In some instances, the method also includes determining the expression levels of the one or more analytes in the serially obtained biological samples from the subject.

[0012] Also featured herein is a method of determining the expression levels of the one or more analytes wherein the determining step comprises: (a) contacting the biological sample with an substrate comprising a plurality of attached capture probes, wherein a capture probe of the plurality comprises (i) the spatial barcode and (ii) a capture domain that binds specifically to a sequence present in the one or more analytes; and (b) hybridizing an analyte of the one or more analytes to the capture domain. In some instances, the method further comprises extending a 3′ end of the capture probe using the analyte that is specifically bound to the capture domain as a template to generate an extended capture probe. In some instances, the method further comprises amplifying the extended capture probe to produce a nucleic acid. In some embodiments, the determining step comprises determining (i) all or a portion of the sequence of the spatial barcode or the complement thereof, and (ii) all or a portion of the sequence of the analyte from the biological sample, and using the determined sequences of (i) and (ii) to identify the location of the analyte in the biological sample.

[0013] In some instances, the analytes is determined by in situ sequencing. The in situ sequencing is selected from the group consisting of sequencing-by-synthesis (SBS), sequential fluorescence hybridization, sequencing by ligation, nucleic acid hybridization, hybridization chain reaction amplification, sequencing via rolling circle amplification, and high-throughput digital sequencing techniques.

[0014] Also disclosed herein is a method for identifying a location of an analyte in a biological sample comprising breast tissue from a subject diagnosed or suspected of having a breast cancer, the method comprising: (a) contacting a plurality of nucleic acids with a plurality of bait oligonucleotides, wherein: a nucleic acid of the plurality of nucleic acids comprises (i) a spatial barcode or a complement thereof, and (ii) a portion of a sequence of an analyte from a biological sample, or a complement thereof; and a bait oligonucleotide of the plurality of bait oligonucleotides comprises: a domain that binds specifically to (i) all or a portion of the spatial barcode or a complement thereof, and/or (ii) all or a portion of the sequence of the analyte from the biological sample, or a complement thereof, and a molecular tag; (b) enriching a complex of the bait oligonucleotide specifically bound to the nucleic acid using a substrate comprising an agent that binds specifically to the molecular tag; and (c) determining (i) all or a portion of the sequence of the spatial barcode or the complement thereof, and (ii) all or a portion of the sequence of the analyte from the biological sample, and using the determined sequences of (i) and (ii) to identify the location of the analyte in the biological sample. In some embodiments, the determining step comprises in situ sequencing. In some embodiments, the in situ sequencing is selected from the group consisting of sequencing-by-synthesis (SBS), sequential fluorescence hybridization, sequencing by ligation, nucleic acid hybridization, hybridization chain reaction amplification, sequencing via rolling circle amplification, and high-throughput digital sequencing techniques.

[0015] In some instances, the plurality of nucleic acids in (a) are generated by: (1) contacting the biological sample with an substrate comprising a plurality of attached capture probes, wherein a capture probe of the plurality comprises (i) the spatial barcode and (ii) a capture domain that binds specifically to a sequence present in the one or more analytes; and (2) hybridizing an analyte of the one or more analytes to the capture domain. In some embodiments, the method further comprises extending a 3′ end of the capture probe using the analyte that is specifically bound to the capture domain as a template to generate an extended capture probe. In some embodiments, the method further comprises amplifying the extended capture probe to produce the nucleic acid.

[0016] In some embodiments, the domain of the bait oligonucleotide binds specifically to all or a portion of the spatial barcode or a complement thereof. In some embodiments, the domain of the bait oligonucleotide binds specifically to all or a portion of the sequence of the analyte from the biological sample. In some embodiments, the domain of the bait oligonucleotide binds specifically to a 3′ portion of the sequence of the analyte from the biological sample or a complement thereof. In some embodiments, the domain of the bait oligonucleotide binds specifically to a 5′ portion of the sequence of the analyte from the biological sample or a complement thereof. In some embodiments, the domain of the bait oligonucleotide binds specifically to an intron in the sequence of the analyte from the biological sample or a complement thereof. In some embodiments, the domain of the bait oligonucleotide binds specifically to an exon in the sequence of the analyte from the biological sample or a complement thereof. In some embodiments, the domain of the bait oligonucleotide binds specifically to an untranslated 3′ region of the analyte from the biological sample or a complement thereof. In some embodiments, the domain of the bait oligonucleotide binds specifically to an untranslated 5′ region of the analyte from the biological sample or a complement thereof. In some embodiments, the analyte from the biological sample is associated with a disease or condition. In some embodiments, the analyte from the biological sample comprises a mutation. In some embodiments, the analyte from the biological sample comprises a single nucleotide polymorphism (SNP). In some embodiments, the analyte from the biological sample comprises a trinucleotide repeat. In some embodiments, the domain of the bait oligonucleotide comprises a total of about 10 nucleotides to about 300 nucleotides.

[0017] In some embodiments, the molecular tag comprises a moiety. In some embodiments, the moiety is streptavidin, avidin, biotin, or a fluorophore. In some embodiments, the molecular tag comprises a streptavidin molecule, an avidin molecule, a biotin molecule, or a fluorophore and/or a small molecule, a nucleic acid, a carbohydrate, or a combination thereof. In some embodiments, the molecular tag is positioned 5′ to the domain in the bait oligonucleotide. In some embodiments, the molecular tag is position 3′ to the domain in the bait oligonucleotide. In some embodiments, the agent that binds specifically to the molecular tag comprises a protein. In some embodiments, the protein is an antibody. In some embodiments, the agent that binds specifically to the molecular tag comprises a nucleic acid. In some embodiments, the agent that binds specifically to the molecular tag comprises a small molecule. In some embodiments, the agent that binds specifically to the molecular tag is attached to a substrate. In some embodiments, the substrate is a bead. In some embodiments, the substrate is a well. In some embodiments, the substrate is a slide. In some embodiments, the nucleic acid is DNA.

[0018] In some embodiments, the nucleic acid further comprises a functional sequence, wherein the functional sequence is a primer sequence or a complement thereof. In some embodiments, the nucleic acid further comprises a unique molecular sequence or a complement thereof. In some embodiments, the nucleic acid further comprises an additional primer binding sequence or a complement thereof. In some embodiments, the nucleic acid further comprises one or more functional domains, a unique molecular identifier, a cleavage domain, and combinations thereof.

[0019] In some embodiments, the biological sample is a tissue sample. In some embodiments, the biological sample is a solid tissue sample. In some embodiments, the tissue sample is a formalin-fixed, paraffin-embedded (FFPE) tissue sample or a frozen tissue sample. In some embodiments, the biological sample was previously stained using a detectable label. In some embodiments, the biological sample was previously stained using hematoxylin and eosin (H&E). In some embodiments, the biological sample is a breast tissue sample. In some embodiments, the biological sample is a permeabilized biological sample. In some embodiments, the permeabilized biological sample has been permeabilized with a permeabilization agent. In some embodiments, the permeabilization agent is selected from an organic solvent, a cross-linking agent, a detergent, and an enzyme, or a combination thereof. In some embodiments, the permeabilization agent is selected from an organic solvent, a cross-linking agent, a detergent, and an enzyme, or a combination thereof. In some embodiments, the analyte is an RNA molecule. In some embodiments, the RNA molecule is an mRNA molecule. In some embodiments, the analyte is a protein.

[0020] In some embodiments, the analyte from the one or more analytes is detected by the steps comprising: attaching the biological sample with a plurality of analyte capture agents, wherein an analyte capture agent of the plurality of analyte capture agents comprises: (i) an analyte binding moiety that binds specifically to the analyte; (ii) an analyte binding moiety barcode; and (iii) an analyte capture sequence, wherein the analyte capture sequence binds specifically to a capture domain; contacting the biological sample with a substrate, wherein the substrate comprises a plurality of capture probes, wherein a capture probe of the plurality of capture probes comprises (i) the capture domain and (ii) a spatial barcode; hybridizing the analyte to the capture probe; and determining (i) all or a part of a sequence corresponding to the analyte, and (ii) all or a part of a sequence corresponding to the spatial barcode, or a complement thereof, and using the determined sequence of (i) and (ii) to identify the abundance and/or spatial location of the analyte in the biological sample. In some embodiments, the determining step further comprises sequencing (i) all or a part of a sequence corresponding to the analyte, and (ii) all or a part of a sequence corresponding to the spatial barcode, or a complement thereof, and using the determined sequence of (i) and (ii) to identify the abundance and/or spatial location of the analyte in the biological sample. In some instances, the analyte binding moiety is an antibody or antigen-binding fragment thereof, a cell surface receptor binding molecule, a receptor ligand, a small molecule, a T-cell receptor engager, a B-cell receptor engager, a pro-body, an aptamer, a monobody, an affimer, or a darpin.

[0021] In some instances of any of the above methods, the analyte is detected using an antibody and/or contacting the biological sample with one or more stains. In some instances, the one or more stains comprises hematoxylin and eosin. In some instances, the one or more stains comprise one or more optical labels selected from the group consisting of: fluorescent, radioactive, chemiluminescent, calorimetric, or colorimetric labels. In some instances of any of the above methods, the biological sample is imaged.

[0022] In some embodiments, the determining in step (c) comprises sequencing (i) all or a portion of the sequence of the spatial barcode or the complement thereof, and (ii) all or a portion of the sequence of the analyte from the biological sample. In some embodiments, the sequencing is high throughput sequencing. In some embodiments, the sequencing comprises ligating an adapter to the nucleic acid.

[0023] In some embodiments, the method further comprises generating the plurality of nucleic acids comprises: (a) contacting the biological sample with an substrate comprising a plurality of attached capture probes, wherein a capture probe of the plurality comprises (i) the spatial barcode and (ii) a capture domain that binds specifically to a sequence present in the analyte; (b) extending a 3′ end of the capture probe using the analyte that is specifically bound to the capture domain as a template to generate an extended capture probe; and (c) amplifying the extended capture probe to produce the nucleic acid. In some embodiments, the amplifying is isothermal. In some embodiments, the produced nucleic acid is released from the extended capture probe.

[0024] In some embodiments, the breast cancer is ductal carcinoma in situ (DCIS). In some embodiments, the breast cancer is carcinoma. In some embodiments, the breast cancer is invasive carcinoma. In some embodiments, the breast cancer is triple negative breast cancer. In some embodiments, the breast cancer is an estrogen receptor positive (ER+), progesterone receptor negative (PR−), human epidermal growth factor receptor 2 positive (HER2+) breast cancer. In some embodiments, the plurality of capture probes comprise capture domains that bind specifically to nucleic acid analytes associated with breast cancer. In some embodiments, the methods further include diagnosing or confirming a diagnosis of breast cancer in the subject based on the location and optionally the abundance of the analyte in the biological sample. In some embodiments, the methods further comprise determining a location of a cancer cell in the biological sample based on the location and optionally the abundance of the analyte, in the biological sample. In some embodiments, the methods further comprise comparing the location and optionally the abundance of the analyte in the biological sample with a control sample.

[0025] In some embodiments, the capture probe binds specifically to CENPW, A2ML1, VLDLR, SCRG1, RCL1, FABP7, CCNE1, MIEN1, CDC37L1, ERMP1, TNFSF10, ACTG2, DMKN, CALML3, COL17A1, MAGED1, PTN, TMEM98, LY6D, TNC, RTN4IP1, IGLC2, IGHG, IGKC, IGHG1, IGLC3, IGHA1, G2m Marker, IGHG2, IGHM, G4m Marker, IGHG4, JCHAIN, ID3, CIITA, CST7, IFI27L2, FYN, MICAL1, HMOX1, CD7, ARHGEF1, CFH, MALAT1, CTSD, TYMP, SAMHD1, CYBA, ISG15, C1QA, RPS9, H2AFJ, ADIRF, ARHGDIA, APRT, AEBP1, PLEC, APOE, FCGRT, NDUFB7, MBD3, EMILIN1, GADD45G, GADD45GIP1, CXCL14, TTLL12, GFRA1, DEGS1, AGR2, ARMT1, CCND1, CAMP, ARPP21, CRAT, PRKACB, NSD3, PLAUR, CDKN2C, FIP1L1, TMEM159, TMEM141, LIN7C, ARHGEF39, ARFGEF3, EMP2, CPB1, FCGR3B, KLHDC7B, SCGB1D2, SCUBE3, CXCL9, COX6C, CFB, SCGB2A2, NPY1R, AC087741.1, GBP5, IFT27, NEURL4, EMX1, SLC13A2, FAM110A, SPCS1, HGD, ZNF587, CRISP3, SLITRK6, C6orf141, VTCN1, SERHL2, CEACAM6, ABCC11, SHISA2, C2orf54, PDLIM1, ZC3H12A, VPS37B, IRF2BP2, RalGDS/AF-6, RAPH1, NFKBIA, EIF2AK1, TRIM33, SFPQ, F7, TRAPPC3, LINC00052, COX6C, SNCG, WFDC2, SLC39A6, MGST1, MCCD1, CSTA, PDE5A, MT-ND1, SRP14, TRAPPC1, SNRPD3, MAT2A, SLC7A8, POLR2K, TMBIM6, OCIAD1, EXOSC3, CA14, ACKR1, IGFBP7, AQP1, VWF, MALAT1, SPARCL1, TAGLN, CCL21, ACTA2, CCDC₈₀, CYB5R3, PLXND1, DUSP1, RPS6, C1QA, HEG1, ETS2, AKAP9, CCAR1, TRIM47, ALB, MGP, ZNF350-AS1, S100G, STC2, CARTPT, AC087379.2, GPC3, ERP27, APOD, CDV3, TPI1, TSPYL5, PFKP, CRIM1, PPT1, AC100826.1, ALDOA, LGR4, GLRX2, AC087379.2, S100G, SCGB2A2, PGM5-AS1, HEBP1, AMIGO2, PCED1B, SCGB1D2, ITPR1, IFT122, GABARAPL1, G6PC3, INPP5K, STC2, HEXIM2, RIDA, LRP2, HK2, IL1R2, GOT2, ALB, MT-ND2, MT-ND1, MT-ND3, MT-ATP6, MT-ND4, MT-CO1, MT-CO3, MT-ATPS, MT-ND5), GLO1, ABHD2, LINC00052, RERG, STC2, MALAT1, SOX4, CA12, ZNF703, MCCD1, LINC00645, SLC30A8, MUC5B, COLEC12, PVALB, CPB1, EXOC2, AC037198.2, VSTM2A), FSIP1, KIF16B, SPATA20, TSPAN9, CACNB3, CAMK2N1, IFT27, NEURL1, TRIM3, SLC46A1, ECI2, MGP, TFF1, KRT14, S100A9, KRT17, S100G, S100A2, ZNF350-AS1, KRT5, S100A8, MN1, TMEM45A, DNALI1, C3orf14, TSR1, AL445524.1, SEMA3C, NDUFAF2, ASCL1, GRHL2, SAA1, FABP4, GPX3, PIP, ADH1B, PLIN1, COL2A1, SH3BGRL, ADIPOQ, PLIN, HNRNPA0, RPL11, SLC40A1, RPLP2, CTDSP2, SORL1, RPL31, ECE1, SFRP2, CCND1, PDE5A, MGP, WFDC2, MRPS30-DT, RBM20, MRPS30, AMFR, STC2, KCNE4, DDR1, MCCC1, PDPR, AMZ2, C5orf15, TBC1D9, SRPK1, LINC01488, TSG101, COA3, NFKBIE, IGLC2, CCL19, A2m marker, IGHA2, MIEN1, SLPI, BAMBI, WIPI1, PRLR, BCL2, ZNF03, IL6ST, SPP1, FGFR1, FN-1, HES6, S100A11, H2AFX or a byproduct, precursor, or degradation product thereof.

[0026] In some embodiments, the capture probe binds specifically to IGLC2, CCL19, A2m marker, IGHA2, MIEN1, SLPI, BAMBI, WIPI1, PRLR, BCL2, ZNF03, IL6ST, SPP1, FGFR1, VEGFA, FN-1, HES6, S100A11, or H2AFX or a byproduct, precursor, or degradation product thereof.

[0027] In some embodiments, the capture domain binds specifically to centromere protein W (CENPW), alpha-2-macroglobulin like 1 (A2ML1), very low density lipoprotein receptor (VLDLR), Scrapie-responsive protein 1 (SCRG1), RNA 3′-terminal phosphate cyclase-like protein (RCL1), fatty acid binding protein 7 (FABP7), cyclin E1 (CCNE1), migration and invasion enhancer 1 (MIEN1), cell division cycle 37 like 1 (CDC37L1), endoplasmic reticulum metallopeptidase 1 (ERMP1), actin gamma 2, smooth muscle (ACTG2), dermokine (DMKN), calmodulin like 3 (CALML3), collagen type XVII alpha 1 chain (COL17A1), Melanoma-associated antigen D1 (MAGED1), pleiotrophin (PTN), transmembrane protein 98 (TMEM98), lymphocyte antigen 6 family member D (LY6D), tenascin C (TNC), or reticulon 4 interacting protein 1 (RTN4IP1).

[0028] In some embodiments, the capture domain binds specifically to ALB, SOCS2, CSTA, BAMBI, WIPI1, PRLR, BCL2, ZNF03, IL6ST, PRKACB, SPP1, CCND1, FGFR1, VEGFA, FN1, HES6, S100A11, or H2AFX, or a byproduct, precursor, or degradation product thereof.

[0029] In some embodiments, the plurality of capture probes comprise capture domains that bind specifically to two or more of: CENPW, A2ML1, VLDLR, SCRG1, RCL1, FABP7, CCNE1, MIEN1, CDC37L1, ERMP1, ACTG2, DMKN, CALML3, COL17A1, MAGED1, PTN, TMEM98, LY6D, TNC, or RTN4IP1. In some embodiments, the plurality of capture probes comprise capture domains that bind specifically to ten or more of: CENPW, A2ML1, VLDLR, SCRG1, RCL1, FABP7, CCNE1, MIEN1, CDC37L1, ERMP1, ACTG2, DMKN, CALML3, COL17A1, MAGED1, PTN, TMEM98, LY6D, TNC, or RTN4IP1. In some embodiments, the plurality of capture probes comprise capture domains that bind specifically to two or more of: ALB, SOCS2, CSTA, BAMBI, WIPI1, PRLR, BCL2, ZNF03, IL6ST, PRKACB, SPP1, CCND1, FGFR1, VEGFA, FN1, HES6, S100A11, or H2AFX. In some embodiments, the plurality of capture probes comprise capture domains that bind specifically to ten or more of: ALB, SOCS2, CSTA, BAMBI, WIPI1, PRLR, BCL2, ZNF03, IL6ST, PRKACB, SPP1, CCND1, FGFR1, VEGFA, FN1, HES6, S100A11, or H2AFX.

[0030] In some embodiments, the plurality of capture probes comprise capture domains that bind specifically to nucleic acid analytes associated immune cells or immune function. In some embodiments, the methods further comprise determining a location of an immune cell based on the location and optionally the abundance of the analyte in the biological sample. In some embodiments, the immune cell is selected from a T-cell, a B-cell, a macrophage, a dendritic cell, or a NK cell. In some embodiments, the methods further comprise comparing the location and optionally the abundance of the analyte in the biological sample with a control sample. In some embodiments, the plurality of capture probes comprise capture domains that bind specifically to nucleic acid analytes encoding transcription factors. In some embodiments, the methods further comprise identifying a cell having aberrant cell signaling or gene expression based on the location and optionally the abundance of the analyte in the biological sample.

[0031] In some embodiments, the cell having aberrant cell signaling or gene expression is a cancer cell. In some embodiments, the methods further comprise comparing the location and optionally the abundance of the analyte in the biological sample with a control sample. In some embodiments, the methods further comprise determining one or more cellular areas of the biological sample. In some embodiments, the methods further comprise determining one or more non-cellular areas of the biological sample. In some embodiments, the one or more non-cellular areas include fat, fibrous tissue, glands, or a combination thereof.

[0032] In some embodiments, the methods further comprise imaging the tissue sample. In some embodiments, the imaging comprises the use of immunofluorescence microscopy. In some embodiments, the imaging comprises the use of immunohistochemistry. In some embodiments, the analyte is a nucleic acid. In some embodiments, the nucleic acid is DNA. In some embodiments, the nucleic acid is RNA. In some embodiments, the RNA is mRNA.

[0033] In some embodiments, disclosed herein is a substrate comprising a plurality of capture probes, wherein a capture probe of the plurality comprises (i) a capture domain that binds specifically to an analyte in the biological sample, and (ii) a spatial barcode; wherein capture probes of the plurality comprise capture domains that bind specifically to two or more of CENPW, A2ML1, VLDLR, SCRG1, RCL1, FABP7, CCNE1, MIEN1, CDC37L1, ERMP1, ACTG2, DMKN, CALML3, COL17A1, MAGED1, PTN, TMEM98, LY6D, TNC, or RTN4IP1.

[0034] In some embodiments, the capture probes of the plurality comprise capture domains that bind specifically to ten or more of CENPW, A2ML1, VLDLR, SCRG1, RCL1, FABP7, CCNE1, MIEN1, CDC37L1, ERMP1, ACTG2, DMKN, CALML3, COL17A1, MAGED1, PTN, TMEM98, LY6D, TNC, or RTN4IP1. In some embodiments, the capture probes of the plurality comprise capture domains that bind specifically to CENPW, A2ML1, VLDLR, SCRG1, RCL1, FABP7, CCNE1, MIEN1, CDC37L1, ERMP1, ACTG2, DMKN, CALML3, COL17A1, MAGED1, PTN, TMEM98, LY6D, TNC, or RTN4IP1. In some embodiments, the nucleic acid further comprises a functional sequence, wherein the functional sequence is a primer sequence or a complement thereof.

[0035] In some embodiments, disclosed herein is a method of diagnosing a subject as having breast cancer, wherein the method comprises: (a) determining an abundance of one or more of:

[0036] (1) CENPW, or a byproduct or precursor or degradation product thereof;

[0037] (2) A2ML1, or a byproduct or precursor or degradation product thereof;

[0038] (3) VLDLR, or a byproduct or precursor or degradation product thereof;

[0039] (4) SCRG1, or a byproduct or precursor or degradation product thereof;

[0040] (5) RCL1, or a byproduct or precursor or degradation product thereof;

[0041] (6) FABP7, or a byproduct or precursor or degradation product thereof;

[0042] (7) CCNE1, or a byproduct or precursor or degradation product thereof;

[0043] (8) MIEN1, or a byproduct or precursor or degradation product thereof;

[0044] (9) CDC37L1, or a byproduct or precursor or degradation product thereof;

[0045] (10) ERMP1, or a byproduct or precursor or degradation product thereof;

[0046] (11) TNFSF10, or a byproduct or precursor or degradation product thereof;

[0047] (12) ACTG2, or a byproduct or precursor or degradation product thereof;

[0048] (13) DMKN, or a byproduct or precursor or degradation product thereof;

[0049] (14) CALML3, or a byproduct or precursor or degradation product thereof;

[0050] (15) COL17A1, or a byproduct or precursor or degradation product thereof;

[0051] (16) MAGED1, or a byproduct or precursor or degradation product thereof;

[0052] (17) PTN, or a byproduct or precursor or degradation product thereof;

[0053] (18) TMEM98, or a byproduct or precursor or degradation product thereof;

[0054] (19) LY6D, or a byproduct or precursor or degradation product thereof;

[0055] (20) TNC, or a byproduct or precursor or degradation product thereof; and

[0056] (21) RTN4IP1, or a byproduct or precursor or degradation product thereof; and

[0057] (b) identifying a subject having increased abundance(s) of one or more of (1)-(21), in the biological sample as compared to reference sample(s) of the one or more of (1)-(21), as having breast cancer. In some embodiments, the method further comprises confirming a diagnosis of breast cancer in the subject by obtaining an image of the subject's breast. In some embodiments, the method further comprises administering a treatment of breast cancer to the subject.

[0058] In some embodiments, the subject is diagnosed as having invasive carcinoma, when the subject has increased abundance(s) of one or more analytes (1)-(11) and byproducts, precursors, and degradation products thereof. In some embodiments, the subject is diagnosed as having ductal carcinoma, when the subject has increased abundance(s) of one or more analytes (12)-(21) and byproducts, precursors, and degradation products thereof.

[0059] In some embodiments, disclosed herein is a method of diagnosing a subject as having breast cancer, wherein the method comprises: (a) determining an abundance of one or more analytes selected from the group consisting of: ALB, SOCS2, CSTA, BAMBI, WIPI1, PRLR, BCL2, ZNF03, IL6ST, PRKACB, SPP1, CCND1, FGFR1, VEGFA, FN1, HES6, S100A11, H2AFX, and byproducts, precursors, and degradation products thereof; and (b) identifying a subject having increased abundance(s) of one or more analytes ALB, SOCS2, CSTA, BAMBI, WIPI1, PRLR, BCL2, ZNF03, IL6ST, PRKACB, SPP1, CCND1, FGFR1, VEGFA, FN1, HES6, S100A11, H2AFX, and byproducts, precursors, and degradation products thereof, in the biological sample as compared to reference abundance(s) of the one or more analytes ALB, SOCS2, CSTA, BAMBI, WIPI1, PRLR, BCL2, ZNF03, IL6ST, PRKACB, SPP1, CCND1, FGFR1, VEGFA, FN1, HES6, S100A11, H2AFX, and byproducts, precursors, and degradation products thereof, as having breast cancer.

[0060] In some embodiments, the subject is diagnosed as having ductal carcinoma, when the subject has increased abundance(s) of one or more analytes ALB, SOCS2, CSTA, BAMBI, WIPI1, PRLR, BCL2, ZNF03, IL6ST and byproducts, precursors, and degradation products thereof. In some embodiments, the subject is diagnosed as having invasive carcinoma, when the subject has increased abundance(s) of one or more analytes PRKACB, SPP1, CCND1, FGFR1, VEGFA, FN1, HES6, S100A11, and H2AFX, and byproducts, precursors, and degradation products thereof.

[0061] Also featured herein is a method of diagnosing a subject as having breast cancer or having an increased likelihood of developing breast cancer, wherein the method comprises: (a) determining an abundance of one or more of

[0062] (1) CENPW, or a byproduct or precursor or degradation product thereof;

[0063] (2) A2ML1, or a byproduct or precursor or degradation product thereof;

[0064] (3) VLDLR, or a byproduct or precursor or degradation product thereof;

[0065] (4) SCRG1, or a byproduct or precursor or degradation product thereof;

[0066] (5) RCL1, or a byproduct or precursor or degradation product thereof;

[0067] (6) FABP7, or a byproduct or precursor or degradation product thereof;

[0068] (7) CCNE1, or a byproduct or precursor or degradation product thereof;

[0069] (8) MIEN1, or a byproduct or precursor or degradation product thereof;

[0070] (9) CDC37L1, or a byproduct or precursor or degradation product thereof;

[0071] (10) ERMP1, or a byproduct or precursor or degradation product thereof;

[0072] (11) TNFSF10, or a byproduct or precursor or degradation product thereof;

[0073] (12) ACTG2, or a byproduct or precursor or degradation product thereof;

[0074] (13) DMKN, or a byproduct or precursor or degradation product thereof;

[0075] (14) CALML3, or a byproduct or precursor or degradation product thereof;

[0076] (15) COL17A1, or a byproduct or precursor or degradation product thereof;

[0077] (16) MAGED1, or a byproduct or precursor or degradation product thereof;

[0078] (17) PTN, or a byproduct or precursor or degradation product thereof;

[0079] (18) TMEM98, or a byproduct or precursor or degradation product thereof;

[0080] (19) LY6D, or a byproduct or precursor or degradation product thereof;

[0081] (20) TNC, or a byproduct or precursor or degradation product thereof; and

[0082] (21) RTN4IP1, or a byproduct or precursor or degradation product thereof; and

[0083] (b) identifying a subject having increased abundance(s) of one or more of (1)-(21), in the biological sample as compared to reference abundance(s) of the one or more of (1)-(21), as having breast cancer or an increased likelihood of developing breast cancer.

[0084] Also disclosed herein is a method of diagnosing a subject as having breast cancer, wherein the method comprises (a) determining an abundance of one or more of: (i) one or more analytes selected from the group consisting of IGLC2, IGHG3, IGKC, IGHG1, IGLC3, IGHA1, IGHG2, IGHM, IGHG4, JCHAIN, ID3, CITTA, CST7, IFI27L2, FYN, MICAL1, HMOX1, CD7, ARHGEF1, and CFH and byproducts, precursors, and degradation products thereof; (ii) one or more analytes selected from the group consisting of MALAT1, CTSD, TYMP, SAMHD1, CYBA, ISG15, C1QA, RPS9, H2AFJ, ADIRF, ARHGDIA, APRT, AEBP1, PLEC, APOE, FCGRT, NDUFB7, MBD3, EMILIN1, and GADD45GIP1 and byproducts, precursors, and degradation products thereof; (iii) one or more analytes selected from the group consisting of CXCL14, TTLL12, GFRA1, DEGS1, AGR2, ARMT1, CCND1, ARPP21, CRAT, PRKACB, NSD3, PLAUR, CDKN2C, FIP1L1, TMEM159, TMEM141, LIN7C, ARHGEF39, ARFGEF3, and EMP2 and byproducts, precursors, and degradation products thereof; (iv) one or more analytes selected from the group consisting of CPB1, FCGR3B, KLHDC7B, SCGB1D2, SCUBE3, CXCL9, COX6C, CFB, SCGB2A2, NPY1R, AC087741.1, GBP5, IFT27, NEURL4, EMX1, SLC13A2, FAM110A, SPCS1, HGD, and ZNF587 and byproducts, precursors, and degradation products thereof; (v) one or more analytes selected from the group consisting of CRISP3, SLITRK6, C6orf141, VTCN1, SERHL2, CEACAM6, ABCC11, SHISA2, C2orf54, PDLIM1, ZC3H12A, VPS37B, IRF2BP2, RAPH1, NFKBIA, EIF2AK1, TRIM33, SFPQ, F7, and TRAPPC3 and byproducts, precursors, and degradation products thereof; (vi) one or more analytes selected from the group consisting of LINC00052, COX6C, SNCG, WFDC2, SLC39A6, MGST1, MCCD1, CSTA, PDE5A, MT-ND1, SRP14, TRAPPC1, SNRPD3, MAT2A, SLC7A8, POLR2K, TMBIM6, OCIAD1, EXOSC3, and CA14 and byproducts, precursors, and degradation products thereof; (vii) one or more analytes selected from the group consisting of ACKR1, IGFBP7, AQP1, VWF, MALAT1, SPARCL1, TAGLN, CCL21, ACTA2, CCDC₈₀, CYB5R3, PLXND1, DUSP1, RPS6, C1QA, HEG1, ETS2, AKAP9, CCAR1, and TRIM47 and byproducts, precursors, and degradation products thereof; (viii) one or more analytes selected from the group consisting of ALB, MGP, ZNF350-AS1, S100G, STC2, CARTPT, AC087379.2, GPC3, ERP27, APOD, CDV3, TPI1, TSPYL5, PFKP, CRIM1, PPT1, AC100826.1, ALDOA, LGR4, and GLRX2 and byproducts, precursors, and degradation products thereof; (ix) one or more analytes selected from the group consisting of AC087379.2, S100G, SCGB2A2, PGM5-AS1, HEBP1, AMIGO2, PCED1B, SCGB1D2, ITPR1, IFT122, GABARAPL1, G6PC3, INPP5K, STC2, HEXIM2, RIDA, LRP2, HK2, IL1R2, and GOT2 and byproducts, precursors, and degradation products thereof; (x) one or more analytes selected from the group consisting of ALB, MT-ND2, MT-ND1, MT-ND3, MT-ATP6, MT-ND4, MT-CO1, MT-CO3, MT-ATPS, MT-ND5, GLO1, ABHD2, LINC00052, RERG, STC2, MALAT1, SOX4, CA12, ZNF703, and MCCD1 and byproducts, precursors, and degradation products thereof; (xi) one or more analytes selected from the group consisting of LINC00645, SLC30A8, MUC5B, COLEC12, PVALB, CPB1, EXOC2, AC037198.2, VSTM2A, FSIP1, KIF16B, SPATA20, TSPAN9, CACNB3, CAMK2N1, IFT27, NEURL1, TRIM3, SLC46A1, and ECI2 and byproducts, precursors, and degradation products thereof; (xii) one or more analytes selected from the group consisting of MGP, TFF1, KRT14, S100A9, KRT17, S100G, S100A2, ZNF350-AS1, KRT5, S100A8, MN1, TMEM45A, DNALI1, C3orf14, TSR1, AL445524.1, SEMA3C, NDUFAF2, ASCL1, and GRHL2 and byproducts, precursors, and degradation products thereof; (xiii) one or more analytes selected from the group consisting of SAA1, FABP4, GPX3, PIP, ADH1B, PLIN1, COL2A1, SH3BGRL, ADIPOQ, PLIN4, HNRNPA0, RPL11, SLC40A1, RPLP2, CTDSP2, SORL1, RPL31, ECE1, SFRP2, and CCND1 and byproducts, precursors, and degradation products thereof; or (xiv) one or more analytes selected from the group consisting of PDE5A, MGP, WFDC2, MRPS30-DT, RBM20, MRPS30, AMFR, STC2, KCNE4, DDR1, MCCC1, PDPR, AMZ2, C5orf15, TBC1D9, SRPK1, LINC01488, TSG101, COA3, and NFKBIE and byproducts, precursors, and degradation products thereof; and (b) identifying a subject having dysregulated abundance(s) of one or more analytes (i)-(xiv) and byproducts, precursors, and degradation products thereof, in the biological sample as compared to reference abundance(s) of the one or more analytes (i)-(xiv) and byproducts, precursors, and degradation products thereof, as having breast cancer.

[0085] In some embodiments, the method comprises: (a) determining an abundance of one or more of: (i) one or more analytes selected from the group consisting of IGLC2, IGHG3, IGKC, IGHG1, IGLC3, IGHA1, IGHG2, IGHM, IGHG4, JCHAIN, and byproducts, precursors, and degradation products thereof; (ii) one or more analytes selected from the group consisting of MALAT1, CTSD, TYMP, SAMHD1, CYBA, ISG15, C1QA, RPS9, H2AFJ, ADIRF, and byproducts, precursors, and degradation products thereof; (iii) one or more analytes selected from the group consisting of CXCL14, TTLL12, GFRA1, DEGS1, AGR2, ARMT1, CCND1, ARPP21, CRAT, PRKACB, and byproducts, precursors, and degradation products thereof; (iv) one or more analytes selected from the group consisting of CPB1, FCGR3B, KLHDC7B, SCGB1D2, SCUBE3, CXCL9, COX6C, CFB, SCGB2A2, NPY1R, and byproducts, precursors, and degradation products thereof; (v) one or more analytes selected from the group consisting of CRISP3, SLITRK6, C6orf141, VTCN1, SERHL2, CEACAM6, ABCC11, SHISA2, C2orf54, PDLIM1, and byproducts, precursors, and degradation products thereof; (vi) one or more analytes selected from the group consisting of LINC00052, COX6C, SNCG, WFDC2, SLC39A6, MGST1, MCCD1, CSTA, PDE5A, MT-ND1, and byproducts, precursors, and degradation products thereof; (vii) one or more analytes selected from the group consisting of ACKR1, IGFBP7, AQP1, VWF, MALAT1, SPARCL1, TAGLN, CCL21, ACTA2, CCDC₈₀, and byproducts, precursors, and degradation products thereof; (viii) one or more analytes selected from the group consisting of ALB, MGP, ZNF350-AS1, S100G, STC2, CARTPT, AC087379.2, GPC3, ERP27, APOD, and byproducts, precursors, and degradation products thereof; (ix) one or more analytes selected from the group consisting of AC087379.2, S100G, SCGB2A2, PGM5-AS1, HEBP1, AMIGO2, PCED1B, SCGB1D2, ITPR1, IFT122, and byproducts, precursors, and degradation products thereof; (x) one or more analytes selected from the group consisting of ALB, MT-ND2, MT-ND1, MT-ND3, MT-ATP6, MT-ND4, MT-CO1, MT-CO3, MT-ATPS, MT-ND5, and byproducts, precursors, and degradation products thereof; (xi) one or more analytes selected from the group consisting of LINC00645, SLC30A8, MUC5B, COLEC12, PVALB, CPB1, EXOC2, AC037198.2, VSTM2A, FSIP1, and byproducts, precursors, and degradation products thereof; (xii) one or more analytes selected from the group consisting of MGP, TFF1, KRT14, S100A9, KRT17, S100G, S100A2, ZNF350-AS1, KRT5, S100A8, and byproducts, precursors, and degradation products thereof; (xiii) one or more analytes selected from the group consisting of SAA1, FABP4, GPX3, PIP, ADH1B, PLIN1, COL2A1, SH3BGRL, ADIPOQ, PLIN4, and byproducts, precursors, and degradation products thereof; or (xiv) one or more analytes selected from the group consisting of PDE5A, MGP, WFDC2, MRPS30-DT, RBM20, MRPS30, AMFR, STC2, KCNE4, DDR1, and byproducts, precursors, and degradation products thereof; and (b) identifying a subject having increased abundance(s) of one or more analytes (i)-(xiv) and byproducts, precursors, and degradation products thereof, in the biological sample as compared to reference abundance(s) of the one or more analytes (i)-(xiv) and byproducts, precursors, and degradation products thereof, as having breast cancer.

[0086] In some embodiments, the method comprises: (a) determining an abundance of one or more of: (i) one or more analytes selected from the group consisting of ID3, CIITA, CST7, IFI27L2, FYN, MICAL1, HMOX1. CD7. ARHGEF1, and CFH and byproducts, precursors, and degradation products thereof; (ii) one or more analytes selected from the group consisting of ARHGDIA, APRT, AEBP1, PLEC, APOE, FCGRT, NDUFB7, MBD3, EMILIN1, and GADD45GIP1 and byproducts, precursors, and degradation products thereof; (iii) one or more analytes selected from the group consisting of NSD3, PLAUR, CDKN2C, FIP1L1, TMEM159, TMEM141, LIN7C, ARHGEF39, ARFGEF3, and EMP2 and byproducts, precursors, and degradation products thereof; (iv) one or more analytes selected from the group consisting of AC087741.1, GBP5, IFT27, NEURL4, EMX1, SLC13A2, FAM110A, SPCS1, HGD, and ZNF587 and byproducts, precursors, and degradation products thereof; (v) one or more analytes selected from the group consisting of ZC3H12A, VPS37B, IRF2BP2, RAPH1, NFKBIA, EIF2AK1, TRIM33, SFPQ, F7, and TRAPPC3 and byproducts, precursors, and degradation products thereof; (vi) one or more analytes selected from the group consisting of SRP14, TRAPPC1, SNRPD3, MAT2A, SLC7A8, POLR2K, TMBIM6, OCIAD1, EXOSC3, and CA14 and byproducts, precursors, and degradation products thereof; (vii) one or more analytes selected from the group consisting of CYB5R3, PLXND1, DUSP1, RPS6, C1QA, HEG1, ETS2, AKAP9, CCAR1, and TRIM47 and byproducts, precursors, and degradation products thereof; (viii) one or more analytes selected from the group consisting of CDV3, TPI1, TSPYL5, PFKP, CRIM1, PPT1, AC100826.1, ALDOA, LGR4, and GLRX2 and byproducts, precursors, and degradation products thereof; (ix) one or more analytes selected from the group consisting of GABARAPL1, G6PC3, INPP5K, STC2, HEXIM2, RIDA, LRP2, HK2, IL1R2, and GOT2 and byproducts, precursors, and degradation products thereof; (x) one or more analytes selected from the group consisting of GLO1, ABHD2, LINC00052, RERG, STC2, MALAT1, SOX4, CA12, ZNF703, and MCCD1 and byproducts, precursors, and degradation products thereof; (xi) one or more analytes selected from the group consisting of KIF16B, SPATA20, TSPAN9, CACNB3, CAMK2N1, IFT27, NEURL1, TRIMS, SLC46A1, and ECI2 and byproducts, precursors, and degradation products thereof; (xii) one or more analytes selected from the group consisting of MN1, TMEM45A, DNALI1, C3orf14, TSR1, AL445524.1, SEMA3C, NDUFAF2, ASCL1, and GRHL2 and byproducts, precursors, and degradation products thereof; (xiii) one or more analytes selected from the group consisting of HNRNPA0, RPL11, SLC40A1, RPLP2, CTDSP2, SORL1, RPL31, ECE1, SFRP2, and CCND1 and byproducts, precursors, and degradation products thereof; or (xiv) one or more analytes selected from the group consisting of MCCC1, PDPR, AMZ2, C5orf15, TBC1D9, SRPK1, LINC01488, TSG101, COA3, and NFKBIE and byproducts, precursors, and degradation products thereof; and (b) identifying a subject having decreased abundance(s) of one or more analytes (i)-(xiv) and byproducts, precursors, and degradation products thereof, in the biological sample as compared to reference abundance(s) of the one or more analytes (i)-(xiv) and byproducts, precursors, and degradation products thereof, as having breast cancer.

[0087] In some embodiments, the methods disclosed herein further comprise obtaining an image of the biological sample. In some instances, the methods further comprises obtaining a biological sample from the subject.

[0088] In some embodiments, the methods further comprise administering a treatment of breast cancer to the subject, adjusting a dosage of a treatment of breast cancer for the subject, or adjusting a treatment of breast cancer for the subject. In some instances, the treatment comprises administering one or more therapies selected from the group consisting of an endocrine therapy, a chemotherapy a hormonal therapy, and a surgical resection. In some instances, endocrine therapy is one or more agents selected from the group consisting of tamoxifen, raloxifene, megestrol, toremifene, and an aromatase inhibitor. In some instances, the aromatase inhibitor is one or more agents selected from the group consisting of anastrozole, letrozole, or exemestane. In some instances, the chemotherapy is neoadjuvant chemotherapy. In some instances, the neoadjuvant chemotherapy is one or more agents selected from a taxane derivative, an anthracycline derivative, and a topoisomerase inhibitors. In some instances, the taxane derivative is one or more agents selected from docetaxel and paclitaxel; and the anthracycline derivative is doxorubicin. In some instances, the surgical resection is surgery for breast tissue and/or lymph node tissue. In some instances, the breast tissue surgery is selected from the group comprising lumpectomy, quadrantectomy, partial mastectomy, segmental mastectomy, complete mastectomy, and the lymph node tissue surgery is selected from the group consisting of sentinel lymph node biopsy and axillary lymph node dissection.

[0089] In some embodiments, the methods further comprise monitoring the identified subject for the development of symptoms of breast cancer. In some embodiments, the methods further comprise recording in the identified subject's clinical record that the subject has an increased likelihood of developing breast cancer. In some embodiments, the methods further comprise notifying the subject's family that the subject has an increased likelihood of developing breast cancer. In some embodiments, the methods further comprise administering to the subject a treatment for decreasing the likelihood of developing breast cancer. In some embodiments, the methods further comprise obtaining the biological sample from the subject. In some embodiments, the abundance is an abundance of protein or a byproduct or precursor or degradation product thereof. In some embodiments, the abundance is an abundance of mRNA or a fragment thereof. All publications, patents, patent applications, and information available on the internet and mentioned in this specification are herein incorporated by reference to the same extent as if each individual publication, patent, patent application, or item of information was specifically and individually indicated to be incorporated by reference. To the extent publications, patents, patent applications, and items of information incorporated by reference contradict the disclosure contained in the specification, the specification is intended to supersede and/or take precedence over any such contradictory material.

[0090] Where values are described in terms of ranges, it should be understood that the description includes the disclosure of all possible sub-ranges within such ranges, as well as specific numerical values that fall within such ranges irrespective of whether a specific numerical value or specific sub-range is expressly stated.

[0091] The term “each,” when used in reference to a collection of items, is intended to identify an individual item in the collection but does not necessarily refer to every item in the collection, unless expressly stated otherwise, or unless the context of the usage clearly indicates otherwise.

[0092] Various embodiments of the features of this disclosure are described herein. However, it should be understood that such embodiments are provided merely by way of example, and numerous variations, changes, and substitutions can occur to those skilled in the art without departing from the scope of this disclosure. It should also be understood that various alternatives to the specific embodiments described herein are also within the scope of this disclosure.

### DESCRIPTION OF DRAWINGS

[0093] The patent or application file contains at least one drawing executed in color. Copies of this patent or patent application publication with color drawing(s) will be provided by the Office upon request and payment of the necessary fee.

[0094] The following drawings illustrate certain embodiments of the features and advantages of this disclosure. These embodiments are not intended to limit the scope of the appended claims in any manner. Like reference symbols in the drawings indicate like elements.

[0095] FIG. 1 shows an exemplary spatial analysis workflow.

[0096] FIG. 2 shows an exemplary spatial analysis workflow.

[0097] FIG. 3 shows an exemplary spatial analysis workflow.

[0098] FIG. 4 shows an exemplary spatial analysis workflow.

[0099] FIG. 5 shows an exemplary spatial analysis workflow.

[0100] FIG. 6 is a schematic diagram showing an example of a barcoded capture probe, as described herein.

[0101] FIG. 7 is a schematic illustrating a cleavable capture probe, wherein the cleaved capture probe can enter into a non-permeabilized cell and bind to target analytes within the sample.

[0102] FIG. 8 is a schematic diagram of an exemplary multiplexed spatially-barcoded feature.

[0103] FIG. 9 is a schematic diagram of an exemplary analyte capture agent.

[0104] FIG. 10 is a schematic diagram depicting an exemplary interaction between a feature-immobilized capture probe 1024 and an analyte capture agent 1026.

[0105] FIGS. 11A, 11B, and 11C are schematics illustrating how streptavidin cell tags can be utilized in an array-based system to produce a spatially-barcoded cells or cellular contents.

[0106] FIG. 12 is a schematic showing the arrangement of barcoded features within an array.

[0107] FIG. 13 is a schematic illustrating a side view of a diffusion-resistant medium, e.g., a lid.

[0108] FIGS. 14A and 14B are schematics illustrating expanded FIG. 14A and side views FIG. 14B of an electrophoretic transfer system configured to direct transcript analytes toward a spatially-barcoded capture probe array.

[0109] FIG. 15 is a schematic illustrating an exemplary workflow protocol utilizing an electrophoretic transfer system.

[0110] FIG. 16 shows an example of a microfluidic channel structure 1600 for partitioning dissociated sample (e.g., biological particles or individual cells from a sample).

[0111] FIG. 17A shows an example of a microfluidic channel structure 1700 for delivering spatial barcode carrying beads to droplets.

[0112] FIG. 17B shows a cross-section view of another example of a microfluidic channel structure 1750 with a geometric feature for controlled partitioning.

[0113] FIG. 17C shows an example of a workflow schematic.

[0114] FIG. 18 is a schematic depicting cell tagging using either covalent conjugation of the analyte binding moiety to the cell surface or non-covalent interactions with cell membrane elements.

[0115] FIG. 19 is a schematic depicting cell tagging using either cell-penetrating peptides or delivery systems.

[0116] FIG. 20A is a workflow schematic illustrating exemplary, non-limiting, non-exhaustive steps for “pixelating” a sample, wherein the sample is cut, stamped, microdissected, or transferred by hollow-needle or microneedle, moving a small portion of the sample into an individual partition or well.

[0117] FIG. 20B is a schematic depicting multi-needle pixilation, wherein an array of needles punched through a sample on a scaffold and into nanowells containing gel beads and reagents below. Once the needle is in the nanowell, the cell(s) are ejected.

[0118] FIG. 21 shows a workflow schematic illustrating exemplary, non-limiting, non-exhaustive steps for dissociating a spatially-barcoded sample for analysis via droplet or flow cell analysis methods.

[0119] FIG. 22A is a schematic diagram showing an example sample handling apparatus that can be used to implement various steps and methods described herein.

[0120] FIG. 22B is a schematic diagram showing an example imaging apparatus that can be used to obtain images of biological samples, analytes, and arrays of features.

[0121] FIG. 22C is a schematic diagram of an example of a control unit of the apparatus of FIGS. 22A and 22B.

[0122] FIG. 23A shows a histological section of an invasive ductal carcinoma annotated by a pathologist.

[0123] FIG. 23B shows a tissue plot with spots colored by unsupervised clustering.

[0124] FIG. 23C is a tSNE plot of spots colored by unsupervised clustering.

[0125] FIG. 23D shows a gene expression heat map of the most variable genes between 9 clusters.

[0126] FIG. 23E shows the expression levels of genes corresponding to human epidermal growth factor receptor 2 (Her2), estrogen receptor (ER), and progesterone receptor (PR) in the tissue section.

[0127] FIG. 23F shows the expression levels of genes of top differentially expressed genes from each of the 9 clusters on individual plots.

[0128] FIG. 23G shows the expression levels of genes of top differentially expressed genes from each of the 9 clusters on a single plot.

[0129] FIG. 23H is a plot of the expression levels of the top differentially expressed genes from each of the 9 clusters in invasive ductal cell carcinoma (IDC) and normal breast tissue.

[0130] FIG. 23I shows the expression of KRT14 in IDC and match normal tissue.

[0131] FIG. 23J is a plot of the expression levels of extracellular matrix genes in IDC and normal tissue.

[0132] FIG. 24A shows a schematic of an example analytical workflow in which electrophoretic migration of analytes is performed after permeabilization.

[0133] FIG. 24B shows a schematic of an example analytical workflow in which electrophoretic migration of analytes and permeabilization are performed simultaneously.

[0134] FIG. 25A shows an example perpendicular, single slide configuration for use during electrophoresis.

[0135] FIG. 25B shows an example parallel, single slide configuration for use during electrophoresis

[0136] FIG. 25C shows an example multi-slide configuration for use during electrophoresis.

[0137] FIG. 26A shows detection of cancer-related genes using probes for the entire transcriptome in a triple-negative breast cancer sample.

[0138] FIG. 26B shows detection of cancer-related genes using probes from a cancer-specific panel in the triple-negative breast cancer sample as in FIG. 26A.

[0139] FIG. 26C shows the correlation of expression detection using probes for the entire transcriptome from FIG. 26A (x-axis) versus probes from a cancer-specific panel from FIG. 26B (y-axis) in the triple-negative breast cancer sample.

[0140] FIG. 27A shows detection of immune-related genes using probes for the entire transcriptome in a triple-negative breast cancer sample.

[0141] FIG. 27B shows detection of immune-related genes using probes from an immune-specific panel in the triple-negative breast cancer sample as in FIG. 27A.

[0142] FIG. 27C shows the correlation of expression detection using probes for the entire transcriptome from FIG. 27A (x-axis) versus probes from an immune-specific panel from FIG. 27B (y-axis) in the triple-negative breast cancer sample.

[0143] FIG. 28A shows detection of pathway-related genes using probes for the entire transcriptome in a triple-negative breast cancer sample.

[0144] FIG. 28B shows detection of immune-related genes using probes from a pathway-specific panel in the triple-negative breast cancer sample as in FIG. 28A.

[0145] FIG. 28C shows the correlation of expression detection using probes for the entire transcriptome from FIG. 28A (x-axis) versus probes from a pathway-specific panel from FIG. 28B (y-axis) in the triple-negative breast cancer sample.

[0146] FIGS. 29A and 29B show identification of cellular and non-cellular areas of a triple negative breast cancer tissue sample using Soup or Cell Cluster Assignment.

[0147] FIGS. 30A and 30B show identification of cellular and non-cellular areas of a triple negative breast cancer tissue sample by examining the inflammation signal in each area.

[0148] FIGS. 30C and 30D show quantification of the inflammation score for each gene cluster.

[0149] FIG. 31 shows identification of areas of a triple negative breast cancer tissue sample using panel data.

[0150] FIGS. 32A and 32B show identification of B-cells in a triple negative breast cancer tissue sample.

[0151] FIGS. 33A and 33B show infiltration of particular cells in a triple negative breast cancer tissue sample.

[0152] FIGS. 34A-34C show immunohistochemical detection of CD3 (FIG. 34B) and intensity of CD3 protein expression (FIG. 34C). FIG. 34A: merged image.

[0153] FIG. 34D shows mRNA quantification of T-cells.

[0154] FIG. 34E shows protein quantification of CD3.

[0155] FIG. 34F shows mRNA quantification of T-cells.

[0156] FIG. 34G shows spots clustered on CD3 protein expression fluorescence intensity (High>0.3<Low).

[0157] FIG. 34H shows differential expression CD3 High vs Low (log fold change).

[0158] FIG. 35A shows a pathologist annotation of areas of a breast cancer sample, identifying areas having invasive cancer (IC), fibrous tissue, or ductal cancer in situ (DCIS).

[0159] FIG. 35B shows a Uniform Manifold Approximation and Projection (UMAP) graph of 14 clusters (clusters 0-13) identified using Seurat.

[0160] FIG. 35C shows spatial expression of 14 clusters (clusters 0-13) identified using Seurat.

[0161] FIG. 36 shows localized expression of the most upregulated individual genes in the breast cancer sample of FIG. 35A.

[0162] FIG. 37 shows localized expression of the most downregulated individual genes in the breast cancer sample of FIG. 35A.

[0163] FIG. 38A shows a brightfield image showing H&E staining of TNBC tissue section.

[0164] FIG. 38B shows a pathologist annotations of TNBC tissue section overlaid on H&E staining.

[0165] FIG. 38C shows classification as defined by pathologist annotations were assigned to each barcoded spot and overlaid on H&E staining of the tissue section.

[0166] FIG. 38D shows an overlay of H&E staining and graph-based cluster assignment.

[0167] FIG. 38E shows a UMAP projection of graph-based clustering of the section in FIG. 38A.

[0168] FIG. 38F shows targeted gene expression analysis of a second section of the same TNBC sample with the cancer panel.

[0169] FIG. 39A shows a UMAP projection of graph-based clustering of the single cell sample.

[0170] FIG. 39B shows regions of specific T-cell subtype infiltration in the section.

[0171] FIG. 39C shows localization of mammary stem cells, identified by CD39f^{hi} expression in snRNA-seq data and visualized over an H&E image.

[0172] FIG. 39D shows an image inferring each spot as either tumor or normal.

[0173] FIGS. 39E, 39F, and 39G show mutant variable load in three serial sections of a TNBC sample.

[0174] FIG. 40A shows a UMAP projection of graph-based clustering of expression of IGLC2.

[0175] FIG. 40B shows spatial expression of IGLC2 in a TNBC sample.

[0176] FIG. 40C shows spatial expression of CCL19 in a TNBC sample.

[0177] FIG. 40D shows spatial expression of IGHA2 in a TNBC sample.

[0178] FIG. 40E shows spatial expression of MIEN1 in a TNBC sample.

[0179] FIG. 40F shows spatial expression of SLPI in a TNBC sample.

[0180] FIG. 41 shows regions of specific T-cell subtype infiltration in the section.

[0181] FIG. 42 shows regions of specific B-cell subtype infiltration in the section.

[0182] FIG. 43 shows regions of specific tumor cell infiltration in the section.

[0183] FIG. 44 shows localization of mammary stem cells, identified by CD39f^{hi} expression in snRNA-seq data and visualized over an H&E image.

[0184] FIG. 45 shows regions of luminal progenitor cells (i.e., cancer stem cells (“csc”)) in the section.

[0185] FIG. 46A shows targeted gene expression (pan-cancer markers) analysis of a breast invasive ductal carcinoma (IDC) tissue section overlaid on a brightfield image showing H&E staining of the same tissue section.

[0186] FIG. 46B shows targeted gene expression (immunology markers) analysis of a breast IDC tissue section overlaid on a brightfield image showing H&E staining of the same tissue section.

[0187] FIG. 46C shows targeted gene expression (gene-signature (i.e., transcription factor panel) markers) analysis of a breast IDC tissue section overlaid on a brightfield image showing H&E staining of the same tissue section.

[0188] FIG. 46D shows targeted gene expression (unbiased markers) analysis of a breast IDC tissue section overlaid on a brightfield image showing H&E staining of the same tissue section.

[0189] FIG. 47A shows a graph of universal molecular identifiers (UMIs) per gene in a parent sample (x axis) vs UMIs per gene in a targeted sample (y axis) for the pan-cancer markers.

[0190] FIG. 47B shows a graph of universal molecular identifiers (UMIs) per gene in a parent sample (x axis) vs UMIs per gene in a targeted sample (y axis) for the immunology markers.

[0191] FIG. 47C shows a graph of universal molecular identifiers (UMIs) per gene in a parent sample (x axis) vs UMIs per gene in a targeted sample (y axis) for the gene signature markers.

[0192] FIG. 48A shows identification of areas of a breast IDC tissue sample using panel data.

[0193] FIG. 48B shows multi-section aggregation of detected analytes.

[0194] FIG. 49A shows targeted gene expression (B-cells, immunology targeted) analysis of a breast IDC tissue section overlaid on a brightfield image showing H&E staining of the same tissue section.

[0195] FIG. 49B shows targeted gene expression (monocytes, immunology targeted) analysis of a breast IDC tissue section overlaid on a brightfield image showing H&E staining of the same tissue section.

[0196] FIG. 49C shows targeted gene expression (T-cells, immunology targeted) analysis of a breast IDC tissue section overlaid on a brightfield image showing H&E staining of the same tissue section.

[0197] FIG. 49D shows targeted gene expression (lymphocytes, immunology targeted) analysis of a breast IDC tissue section overlaid on a brightfield image showing H&E staining of the same tissue section.

### DETAILED DESCRIPTION

### I. Introduction

[0198] Spatial analysis methodologies can provide a vast amount of analyte level and/or expression data for a variety of multiple analytes within a sample at high spatial resolution, e.g., while retaining the native spatial context. Spatial analysis methods can include, e.g., the use of a capture probe including a spatial barcode (e.g., a nucleic acid sequence that provides information as to the position of the capture probe within a cell or a tissue sample (e.g., mammalian cell or a mammalian tissue sample) and a capture domain that is capable of binding to an analyte (e.g., a protein and/or nucleic acid) produced by and/or present in a cell.

[0199] Tissues and cells can be obtained from any source. For example, tissues and cells can be obtained from single-cell or multicellular organisms (e.g., a mammal). Tissues and cells obtained from a mammal, e.g., a human, often have varied analyte levels (e.g., gene and/or protein expression) which can result in differences in cell morphology and/or function. The position of a cell or a subset of cells (e.g., neighboring cells and/or non-neighboring cells) within a tissue can affect, e.g., the cell's fate, behavior, morphology, and signaling and cross-talk with other cells in the tissue. Information regarding the differences in analyte levels (gene and/or protein expression) within different cells in a tissue of a mammal can also help physicians select or administer a treatment that will be effective and can allow researchers to identify and elucidate differences in cell morphology and/or cell function in the single-cell or multicellular organisms (e.g., a mammal) based on the detected differences in analyte levels within different cells in the tissue. Differences in analyte levels within different cells in a tissue of a mammal can also provide information on how tissues (e.g., healthy and diseased tissues) function and/or develop.

[0200] Non-limiting aspects of spatial analysis methodologies are described in WO 2011/127099, WO 2014/210233, WO 2014/210225, WO 2016/162309, WO 2018/091676, WO 2012/140224, WO 2014/060483, WO 2020/176788 U.S. Pat. Nos. 10,002,316, 9,727,810, U.S. Patent Application Publication No. 2020/0277663, U.S. Patent Application Publication No. 2017/0016053, Rodrigues et al., Science 363(6434):1463-1467, 2019; WO 2018/045186, Lee et al., Nat. Protoc. 10(3):442-458, 2015; WO 2016/007839, WO 2018/045181, WO 2014/163886, Trejo et al., PLoS ONE 14(2):e0212031, 2019, U.S. Patent Application Publication No. 2018/0245142, Chen et al., Science 348(6233):aaa6090, 2015, Gao et al., BMC Biol. 15:50, 2017, WO 2017/144338, WO 2018/107054, WO 2017/222453, WO 2019/068880, WO 2011/094669, U.S. Pat. Nos. 7,709,198, 8,604,182, 8,951,726, 9,783,841, 10,041,949, WO 2016/057552, WO 2017/147483, WO 2018/022809, WO 2016/166128, WO 2017/027367, WO 2017/027368, WO 2018/136856, WO 2019/075091, U.S. Pat. No. 10,059,990, WO 2018/057999, WO 2015/161173, and Gupta et al., Nature Biotechnol. 36:1197-1202, 2018, each of which is incorporated by reference in its entirety, and can be used herein in any combination. Further non-limiting aspects of spatial analysis methodologies are described herein.

[0201] Some general terminology that may be used in this disclosure can be found in Section (I)(b) of WO 2020/176788 and/or U.S. Patent Application Publication No. 2020/0277663, each of which is incorporated by reference in its entirety. Typically, a “barcode” is a label, or identifier, that conveys or is capable of conveying information (e.g., information about an analyte in a sample, a bead, and/or a capture probe). A barcode can be part of an analyte, or independent of an analyte. A barcode can be attached to an analyte. A particular barcode can be unique relative to other barcodes. For the purpose of this disclosure, an “analyte” can include any biological substance, structure, moiety, or component to be analyzed. The term “target” can similarly refer to an analyte of interest. Analytes can be broadly classified into one of two groups: nucleic acid analytes, and non-nucleic acid analytes. Examples of non-nucleic acid analytes include, but are not limited to, lipids, carbohydrates, peptides, proteins, glycoproteins (N-linked or O-linked), lipoproteins, phosphoproteins, specific phosphorylated or acetylated variants of proteins, amidation variants of proteins, hydroxylation variants of proteins, methylation variants of proteins, ubiquitylation variants of proteins, sulfation variants of proteins, viral coat proteins, extracellular and intracellular proteins, antibodies, and antigen binding fragments. In some embodiments, the analyte(s) can be localized to subcellular location(s), including, for example, organelles, e.g., mitochondria, Golgi apparatus, endoplasmic reticulum, chloroplasts, endocytic vesicles, exocytic vesicles, vacuoles, lysosomes, etc. In some embodiments, analyte(s) can be peptides or proteins, including without limitation antibodies and enzymes. Additional examples of analytes can be found in Section (I)(c) of WO 2020/176788 and/or U.S. Patent Application Publication No. 2020/0277663, each of which is incorporated by reference in its entirety. In some embodiments, an analyte is a biomarker disclosed herein.

[0202] Spatial detection compositions and methods are disclosed in FIGS. 1-22C and 24A-25C, which are described in further detail in priority documents U.S. Ser. Nos. 62/979,681; 62/980,116; and 63/035,324, each of which is incorporated by reference in its entirety.

[0203] A “biological sample” is typically obtained from the subject for analysis using any of a variety of techniques including, but not limited to, biopsy, surgery, and laser capture microscopy (LCM), and generally includes cells and/or other biological material from the subject. In some embodiments, a biological sample can be a tissue section. In some embodiments, a biological sample can be a fixed and/or stained biological sample (e.g., a fixed and/or stained tissue section). In some embodiments biological sample can be a cell culture sample. In some embodiments, a biological sample can be nervous tissue, blood, serum, plasma, cerebrospinal fluid, or bone marrow aspirate. Biological samples are also described in Section (I)(d) of WO 2020/176788 and/or U.S. Patent Application Publication No. 2020/0277663, each of which is incorporated by reference in its entirety.

[0204] In addition, spatial analysis methods can be performed on various types of samples, including tissues (e.g., tissue slices) or single cells (e.g., cultured cells). Exemplary methods and compositions relating to tissue or single-cell spatial analysis is found at least in WO 2020/176788 and/or U.S. Patent Application Publication No. 2020/0277663, each of which is incorporated by reference in its entirety. In some instances, one biological sample can be used for tissue and single cell analysis. For example, multiple serial slices (e.g., 10 μm in thickness) of a tissue can be cut. A first slice can be placed on an array and analyte capture as described herein can be performed. In some instances, a second slice of tissue can further undergo cellular dissociation, creating a sample with isolated cells that can be analyzed using spatial analysis methods. Briefly, in some instances, a tissue is minced into small pieces and treated with lysis buffer to homogenize the sample. The homogenous resultant can be filtered and centrifuged to collect a pellet of nuclei. The nuclei can be resuspended and used for single cell analysis methods described herein. Data captured from the second slice (i.e., the single nuclei data) could then be combined with the data from the first slice (i.e., the whole tissue data) to gain a higher cell type understanding and potentially deconvolve the cell type identity within each spot on the array. Additional methods of single cell isolation is found in Hu et al., Mol Cell. 2017 Dec. 7; 68(5):1006-1015.e7; Habib et al., Science, 2016 Aug. 26; 353(6302):925-8; Habib et al., Nat Methods, 2017 October; 14(10):955-958; Lake et al., Science, 2016 Jun. 24; 352(6293):1586-90; and Lacar et al., Nat Commun, 2016 Apr. 19; 7:11022; each of which is incorporated by reference in its entirety.

[0205] In another embodiment, two different samples are collected, whereby one sample is analyzed with intact tissue and a second tissue undergoes cell dissociation. Results from each biological sample can be compared to gain a higher cell type understanding and potentially deconvolve the cell type identity within each spot on the array. Array-based spatial analysis methods involve the transfer of one or more analytes from a biological sample to an array of features on a substrate, where each feature is associated with a unique spatial location on the array. Subsequent analysis of the transferred analytes includes determining the identity of the analytes and the spatial location of each analyte within the biological sample. The spatial location of each analyte within the biological sample is determined based on the feature to which each analyte is bound on the array, and the feature's relative spatial location within the array.

[0206] A “capture probe” refers to any molecule capable of capturing (directly or indirectly) and/or labelling an analyte (e.g., an analyte of interest) in a biological sample. In some embodiments, the capture probe is a nucleic acid or a polypeptide. In some embodiments, the capture probe includes a barcode (e.g., a spatial barcode and/or a unique molecular identifier (UMI)) and a capture domain. In some instances, the capture probe can include functional sequences that are useful for subsequent processing, such as functional sequence 604, which can include a sequencer specific flow cell attachment sequence, e.g., a P5 or P7 sequence, as well as functional sequence 606, which can include sequencing primer sequences, e.g., a R1 primer binding site, a R2 primer binding site. In some embodiments, sequence 604 is a P7 sequence and sequence 606 is a R2 primer binding site. Additional features of capture probes are described in Section (II)(b) of WO 2020/176788 and/or U.S. Patent Application Publication No. 2020/0277663, each of which is incorporated by reference in its entirety. Generation of capture probes can be achieved by any appropriate method, including those described in Section (II)(d)(ii) of WO 2020/176788 and/or U.S. Patent Application Publication No. 2020/0277663, each of which is incorporated by reference in its entirety.

[0207] In some embodiments, more than one analyte type from a biological sample can be detected (e.g., simultaneously or sequentially) using any appropriate multiplexing technique, such as those described in Section (IV) of WO 2020/176788 and/or U.S. Patent Application Publication No. 2020/0277663, each of which is incorporated by reference in its entirety.

[0208] In some embodiments, detection of one or more analytes (e.g., protein analytes) can be performed using one or more analyte capture agents. As used herein, an “analyte capture agent” refers to an agent that interacts with an analyte (e.g., an analyte in a sample) and with a capture probe (e.g., a capture probe attached to a substrate) to identify the analyte. In some embodiments, the analyte capture agent includes an analyte binding moiety and a capture agent barcode domain. Additional description of analyte capture agents can be found in Section (II)(b)(viii) of WO 2020/176788 and/or U.S. Patent Application Publication No. 2020/0277663, each of which is incorporated by reference in its entirety.

[0209] There are at least two general methods to associate a spatial barcode with one or more neighboring cells, such that the spatial barcode identifies the one or more cells, and/or contents of the one or more cells, as associated with a particular spatial location. One general method is to promote analytes out of a cell and towards a spatially-barcoded array (e.g., including spatially-barcoded capture probes). Another general method is to cleave spatially-barcoded capture probes from an array and promote the spatially-barcoded capture probes towards and/or into or onto the biological sample.

[0210] In some cases, capture probes may be configured to prime, replicate, and consequently yield optionally barcoded extension products from a template (e.g., a DNA or RNA template), or derivatives thereof (see, e.g., Section (II)(b)(ii) of WO 2020/176788 and/or U.S. Patent Application Publication No. 2020/0277663 regarding extended capture probes, the references of which are incorporated by reference in their entireties.). For example, in some cases, the capture probes may include mRNA specific priming sequences, e.g., poly-T primer segments that allow priming and replication of mRNA in a reverse transcription reaction or other targeted priming sequences. Alternatively or additionally, random RNA priming may be carried out using random N-mer primer segments of the barcoded oligonucleotides. Reverse transcriptases (RTs) can use an RNA template and a primer complementary to the 3′ end of the RNA template to direct the synthesis of the first strand complementary DNA (cDNA). Additional variants of spatial analysis methods, including in some embodiment's, an imaging step, are described in Section (II)(a) of WO 2020/176788 and/or U.S. Patent Application Publication No. 2020/0277663, each of which is incorporated by reference in its entirety. Analysis of captured analytes, for example, including sample removal, extension of capture probes, sequencing (e.g., of a cleaved extended capture probe and/or a cDNA molecule complementary to an extended capture probe), sequencing on the array (e.g., using in situ hybridization approaches), temporal analysis, and/or proximity capture, is described in Section (II)(g) of WO 2020/176788 and/or U.S. Patent Application Publication No. 2020/0277663. Some quality control measures are described in Section (II)(h) of WO 2020/176788 and/or U.S. Patent Application Publication No. 2020/0277663, each of which is incorporated by reference in its entirety.

[0211] Typically, for spatial array-based analytical methods, a substrate functions as a support for direct or indirect attachment of capture probes to features of the array. A “feature” is an entity that acts as a support or repository for various molecular entities used in sample analysis. In some embodiments, some or all of the features in an array are functionalized for analyte capture. Exemplary substrates are described in Section (II)(c) of WO 2020/176788 and/or U.S. Patent Application Publication No. 2020/0277663, each of which is incorporated by reference in its entirety. Exemplary features and geometric attributes of an array can be found in Sections (II)(d)(i), (II)(d)(iii), and (II)(d)(iv) of WO 2020/176788 and/or U.S. Patent Application Publication No. 2020/0277663, each of which is incorporated by reference in its entirety.

[0212] Generally, analytes can be captured when contacting a biological sample with a substrate including capture probes (e.g., substrate with capture probes embedded, spotted, printed on the substrate or a substrate with features (e.g., beads, wells) comprising capture probes). As used herein, “contact,” “contacted,” and/or “contacting,” a biological sample with a substrate refers to any contact (e.g., direct or indirect) such that capture probes can interact (e.g., bind covalently or non-covalently (e.g., hybridize)) with analytes from the biological sample. Capture can be achieved actively (e.g., using electrophoresis) or passively (e.g., using diffusion). Analyte capture is further described in Section (II)(e) of WO 2020/176788 and/or U.S. Patent Application Publication No. 2020/0277663, each of which is incorporated by reference in its entirety.

[0213] In some cases, a spatial analysis can be performed by attaching and/or introducing a molecule (e.g., a peptide, a lipid, or a nucleic acid molecule) having a barcode (e.g., a spatial barcode) to a biological sample (e.g., to a cell in a biological sample). In some embodiments, a plurality of molecules (e.g., a plurality of nucleic acid molecules) having a plurality of barcodes (e.g., a plurality of spatial barcodes) are introduced to a biological sample (e.g., to a plurality of cells in a biological sample) for use in spatial analysis. In some embodiments, after attaching and/or introducing a molecule having a barcode to a biological sample, the biological sample can be separated into single cells or cell groups for analysis. Some such methods of spatial analysis are described in Section (III) of WO 2020/176788 and/or U.S. Patent Application Publication No. 2020/0277663, each of which is incorporated by reference in its entirety.

[0214] Some exemplary particular spatial analysis workflows are described in the Exemplary Embodiments section of WO 2020/176788 and/or U.S. Patent Application Publication No. 2020/0277663, each of which is incorporated by reference in its entirety.

[0215] In some embodiments, a spatial analysis can be performed using dedicated hardware and/or software, such as any of the systems described in Sections (II)(e)(ii) and/or (V) of WO 2020/176788 and/or U.S. Patent Application Publication No. 2020/0277663, each of which is incorporated by reference in its entirety.

### II. Targeted Spatial Gene Expression Profiling by Hybridization and Capture of Spatial cDNA

[0216] Disclosed herein are methods to enhance detection of one or more target analytes. The methods disclosed herein may combine methods of spatial detection while enhancing detection of particular analytes of interest. In some embodiments, the methods of spatial detection include contacting a capture probe comprising a spatial barcode and a capture domain (e.g., an analyte-binding sequence) to an analyte. In some embodiments, the capture probe hybridized to the analyte can be extended using a polymerase (e.g., a reverse transcriptase) using the hybridized analyte as a template, to generate an extended capture probe. In some embodiments, a 3′ end of the capture probe hybridized to the analyte can be extended using a polymerase (e.g., a reverse transcriptase) using the hybridized analyte as a template, to generate an extended capture probe. In some embodiments, a 5′ end of the capture probe hybridized to the analyte can be extended using a polymerase (e.g., a reverse transcriptase) using the hybridized analyte as a template, to generate an extended capture probe. The extended capture probe can be amplified (e.g., via second strand synthesis) to generate a single-stranded nucleic acid comprising a sequence that is complementary to the extended capture probe. The single-stranded nucleic acid comprising a sequence that is complementary to the extended capture probe can be used to generate or can be a part of a nucleic acid library. A subset of nucleic acids in the nucleic acid library can be enriched using any of the exemplary enrichment methods described herein (e.g., hybridization using any of the oligonucleotides including a bait domain described herein). Compared to methods involving whole genome analysis (e.g., whole transcriptome sequencing), targeted spatial gene expression profiling as described herein can, in some cases, reduce sequencing costs by avoiding the sequencing and/or detection of analytes that are not of interest (e.g., ribosomal, mitochondrial, or house-keeping transcripts).

[0217] The methods disclosed herein include identifying a location of an analyte in a biological sample. In some embodiments, the methods include (a) contacting a plurality of nucleic acids with a plurality of bait oligonucleotides, where a nucleic acid of the plurality of nucleic acids comprises (i) a spatial barcode or a complement thereof, and (ii) a portion of a sequence of an analyte from a biological sample, or a complement thereof; and a bait oligonucleotide of the plurality of bait oligonucleotides comprises a domain that binds specifically to (i) all or a portion of the spatial barcode or a complement thereof, and/or (ii) all or a portion of the sequence of the analyte from the biological sample, or a complement thereof, and a molecular tag; (b) enriching a complex of the bait oligonucleotide specifically bound to the nucleic acid using a substrate comprising an agent that binds specifically to the molecular tag; and (c) determining (i) all or a portion of the sequence of the spatial barcode or the complement thereof, and (ii) all or a portion of the sequence of the analyte from the biological sample, and using the determined sequences of (i) and (ii) to identify the location of the analyte in the biological sample. In some embodiments, the methods further include generating the plurality of nucleic acids prior to the steps of (a)-(c) above. In some embodiments, for example, the methods further include generating the plurality of nucleic acids by contacting the biological sample with a substrate comprising a plurality of attached capture probes, wherein a capture probe of the plurality comprises (i) the spatial barcode and (ii) a capture domain that binds specifically to a sequence present in the analyte. Then, in some embodiments, the capture probe is extended using the analyte that is specifically bound to the capture domain as a template to generate an extended capture probe. In some embodiments, the 3′ end of the capture probe is extended using the analyte that is specifically bound to the capture domain as a template to generate an extended capture probe. In some embodiments, the 5′ end of the capture probe is extended using the analyte that is specifically bound to the capture domain as a template to generate an extended capture probe. In some embodiments, the extended capture probe is amplified to produce the nucleic acid.

[0218] (a) Nucleic Acid Detection and Library Preparation

[0219] Also disclosed herein are methods of preparing a library of nucleic acids (e.g., a plurality of nucleic acids). In some embodiments, the library of nucleic acids (e.g., a plurality of nucleic acids) include one or more nucleic acids of interest, whose detection can be enhanced using hybridization methods. Some embodiments of any of the methods described herein can include contacting a biological sample with a substrate comprising a plurality of attached capture probes, wherein a capture probe of the plurality comprises (i) a spatial barcode and (ii) a capture domain that binds specifically to a sequence present in a analyte; extending a 3′ end of the capture probe using the analyte that is specifically bound to the capture domain as a template to generate an extended capture probe; and amplifying the extended capture probe to produce a nucleic acid.

[0220] In some embodiments, the biological sample is a tissue sample. In some embodiments, the biological sample is a section of a tissue sample. In some embodiments, the biological sample is a fresh tissue sample. In some embodiments, the biological sample is a fresh-frozen tissue sample. In some embodiments, the biological sample is a tissue sample that has been formalin-fixed and paraffin-embedded (FFPE) (i.e., an FFPE sample). In some embodiments, the biological sample is a tissue sample embedded in optimal cutting temperature (OCT) compound. In some embodiments, the biological sample has been previously stained (e.g., immunohistochemistry (IHC) or histological staining) and imaged, and optionally, destained. In some embodiments, the analyte is a nucleic acid. In some embodiments, the nucleic acid is DNA (e.g., genomic DNA, mitochondrial DNA, or exosomal DNA). In some embodiments, the nucleic acid is RNA. In some embodiments, the RNA is mRNA. In some embodiments, the nucleic acid comprises DNA.

[0221] In some embodiments, the biological sample is permeabilized. In some examples, a biological sample is permeabilized to allow analytes to be released from one or more cells within the biological sample. In some embodiments, analytes released from the one or more cells can be amplified before they are contacted with a capture probe.

[0222] In some embodiments, the amplification of the extended capture probe results in the production of a single-stranded nucleic acid including a sequence that is complementary to all or a portion of the sequence of the extended capture probe. In some examples, the single-stranded nucleic acid can be denatured or dissociated from the extended capture probe.

[0223] In some embodiments, the biological sample is affixed to a slide. In some embodiments, the sample is stained prior to creation of the library of nucleic acids (e.g., plurality of nucleic acids). In some embodiments, the biological sample is stained while the biological sample is on the slide. In some embodiments, the stained biological sample is imaged prior to creation of the library of nucleic acids (e.g., plurality of nucleic acids).

[0224] In some embodiments, staining includes biological staining techniques such as H&E staining. In some embodiments, staining includes identifying analytes using fluorescently conjugated antibodies (e.g., immunofluorescence). In some embodiments, a biological sample is stained using two or more different types of stains, or two or more different staining techniques (e.g., IF, IHC, and/or H&E staining). For example, a biological sample can be prepared by staining and imaging using one technique (e.g., H&E staining and bright field imaging), destained (e.g., quenching or photobleaching), followed by staining and imaging using another technique (e.g., IHC/IF staining and fluorescence microscopy) for the same biological sample.

[0225] In some embodiments, biological samples can be destained prior to creation of the spatial library of nucleic acids. Methods of destaining or discoloring a biological sample are known in the art, and generally depend on the nature of the stain(s) applied to the biological sample.

[0226] In some embodiments, after creation of the library of nucleic acids (e.g., plurality of nucleic acids), one or more bait oligonucleotides (e.g., from one or more panels as described herein) are hybridized to a plurality of nucleic acids. In some embodiments, the nucleic acids include all or a portion of a sequence of an analyte of interest or a complement thereof and/or include all or a portion of a spatial barcode of interest or a complement thereof. In some embodiments, one or more bait oligonucleotides are hybridized to the nucleic acid including all or a portion of a sequence of analyte of interest or a complement thereof, and/or all or a portion of a spatial barcode of interest, or a complement thereof, before additional sequences, such as an adaptor (or a complement thereof), a primer binding site (or a complement thereof), and/or a poly(G/I) sequence are ligated or added to the nucleic acid (e.g., using a splint oligonucleotide).

[0227] In other embodiments, the library, the nucleic acid(s), or the enriched nucleic acid(s) can be quantified using quantitative PCT (qPCR). In some embodiments, the library, the nucleic acid(s), or the enriched nucleic acid(s) can be fragmented. In some embodiments, the library, the nucleic acid(s), or the enriched nucleic acid(s) can be fragmented by enzyme-based methods (e.g., by restriction enzymes, nicking enzymes and/or transposases). In some embodiments, the library, the nucleic acid(s), or the enriched nucleic acid(s) can be fragmented by endonucleases. In some embodiments, the library, the nucleic acid(s), or the enriched nucleic acid(s) can be fragmented by mechanical shearing (e.g., acoustic shearing, hydrodynamic shearing, and/or nebulization). In some embodiments, the library, the nucleic acid(s), or the enriched nucleic acid(s) can be fragmented by combined enzyme-based methods and mechanical shearing. In some embodiments, the library, the nucleic acid(s), or the enriched nucleic acid(s) can be further processed via end-repair, poly-A tailing, or a combination thereof. In some embodiments, adaptors are ligated to each nucleic acid or enriched nucleic acid sequence. In some embodiments, the adaptors can be ligated to the 3′ end of the nucleic acid or enriched nucleic acid sequence. In some embodiments, the adaptors can be ligated to the 5′ end of the nucleic acid sequence or enriched nucleic acid sequence. In some embodiments, the adaptors can be nucleic acid sequences that add a function, e.g., spacer sequences, primer sequences/sites, barcode sequences, unique molecular identifier (UMI) sequences, linkers, and/or sequencing adaptors.

[0228] In some embodiments, the methods disclosed herein include sample index (SI) PCR, which adds nucleic acid sequences (e.g., barcodes) to the 5′ and/or 3′ ends of a nucleic acid sequence or an enriched nucleic acid sequence. In some embodiments, SI-PCR is a PCR reaction that introduces sample index sequences (e.g., i5 and i7) to the 5′ and/or 3′ ends of a nucleic acid sequence or an enriched nucleic acid sequence. In some embodiments, methods for SI-PCR add the i5 sample index sequence. In some embodiments, methods for SI-PCR add the i7 sample index sequence. In some embodiments, a P5 adapter is added to a nucleic acid sequence or an enriched nucleic acid sequence. In some embodiments, a P7 adapter is added to a nucleic acid sequence or an enriched nucleic acid sequence. In some embodiments, SI-PCR is performed before bait oligonucleotide enrichment of a nucleic acid of interest. In some embodiments, SI-PCR is performed after bait oligonucleotide enrichment of a nucleic acid of interest.

[0229] In some embodiments, the nucleic acid of interest (before or after enrichment using a bait oligonucleotide) or a library generated from the same can be dried. In some embodiments, drying includes a dehydrating process such as heat, a vacuum, lyophilization, desiccation, filtration, and air-drying. In some embodiments, drying can be performed for at least 1 hour, at least 2 hours, at least 3 hours or at least 4 hours. In some embodiments, the nucleic acid of interest (before or after enrichment using a bait oligonucleotide) or a library generated from the same is not dried.

[0230] In alternative embodiments, combined with (1) capture of an analyte on an array and/or (2) target enrichment, or independent of (i.e., methods do not include) capture and target enrichment methods, additional methods are provided herein for analyzing an analyte using in situ methods. In some instances, the methods include amplifying an analyte using in situ methods. For instance, in some embodiments where an analyte is amplified, the amplification is performed by rolling circle amplification. In some embodiments, the capture probe to be amplified includes sequences (e.g., docking sequences, functional sequences, and/or primer sequences) that enable rolling circle amplification. In one example, the capture probe can include a functional sequence that is capable of binding to a primer used for amplification. In another example, the capture probe can include one or more docking sequences (e.g., a first docking sequence and a second docking sequence) that can hybridize to one or more oligonucleotides (e.g., a padlock probe(s)) used for rolling circle amplification. In some embodiments, additional probes are affixed to the substrate, where the additional probes include sequences (e.g., a docking sequence(s), a functional sequence(s), and/or a primer sequence(s)) that enable rolling circle amplification. In some embodiments, the spatial array is contacted with an oligonucleotide (e.g., a padlock probe). As used herein, a “padlock probe” refers to an oligonucleotide that has, at its 5′ and 3′ ends, sequences that are complementary to adjacent or nearby target sequences (e.g., docking sequences) on a capture probe. Upon hybridization to the target sequences (e.g., docking sequences), the two ends of the padlock probe are either brought into contact or an end is extended until the two ends are brought into contact, allowing circularization of the padlock probe by ligation (e.g., ligation using any of the methods described herein). In some embodiments, after circularization of the oligonucleotide, rolling circle amplification can be used to amplify the ligation product, which includes at least a capture domain and a spatial barcode from the capture probe. In some embodiments, amplification of the capture probe using a padlock oligonucleotide and rolling circle amplification increases the number of capture domains and the number of spatial barcodes on the spatial array. Padlock probes are disclosed in U.S. Pat. No. 8,551,710 and US-2020-0224244-A1, each of which is incorporated by reference in its entirety.

[0231] In some embodiments, the one or more additional biomarkers are detected using in situ sequencing. In situ sequencing typically involves incorporation of a labeled nucleotide (e.g., fluorescently labeled mononucleotides or dinucleotides) in a sequential, template-dependent manner or hybridization of a labeled primer (e.g., a labeled random hexamer) to a nucleic acid template such that the identities (i.e., nucleotide sequence) of the incorporated nucleotides or labeled primer extension products can be determined, and consequently, the nucleotide sequence of the corresponding template nucleic acid. Aspects of in situ sequencing are described, for example, in Mitra et al., (2003) Anal. Biochem. 320, 55-65, and Lee et al., (2014) Science, 343(6177), 1360-1363, the entire contents of each of which are incorporated herein by reference.

[0232] In addition, examples of methods and systems for performing in situ sequencing are described in PCT Patent Application Publication Nos. WO2014/163886, WO2018/045181, WO2018/045186, and in U.S. Pat. Nos. 10,138,509 and 10,179,932, the entire contents of each of which are incorporated herein by reference. Exemplary techniques for in situ sequencing include, but are not limited to, STARmap (described for example in Wang et al., (2018) Science, 361(6499) 5691), MERFISH (described for example in 2017/0220733 and in Moffitt, (2016) Methods in Enzymology, 572, 1-49), SeqFISH (described for example in U.S. Pat. No. 10,457,980), hybridization chain reaction amplification (described in U.S. Pat. No. 8,507,204) and FISSEQ (described for example in U.S. Patent Application Publication No. 2019/0032121). The entire contents of each of the foregoing references are incorporated herein by reference.

[0233] (b) Targeted Capture of Analytes Using Hybridization of Bait Oligonucleotides

[0234] (i) Design of Bait Oligonucleotides

[0235] In some embodiments, bait oligonucleotide sets are designed to target and hybridize to a plurality of nucleic acids (e.g., to prepared spatial libraries; e.g., to prepared cDNA libraries). In some embodiments, bait oligonucleotide sets hybridize to targeted nucleic acids (e.g., cDNA) in a library. In some embodiments, the hybridized product (e.g., the bait oligonucleotide and hybridized nucleic acid) are then captured by avidin beads. In some embodiments, the hybridized product (e.g., the bait oligonucleotide and hybridized nucleic acid) are then captured by streptavidin beads. Unhybridized nucleic acids are washed away. Then, the targeted product is reamplified and sequenced. In some embodiments, the reamplifed targeted product can be fragmented, ligated with adaptor sequences, and amplified by SI-PCR.

[0236] In some embodiments, disclosed herein are methods to design and test candidate bait oligonucleotide sequences. Candidate bait oligonucleotide sequences are designed so that each bait oligonucleotide sequence theoretically hybridizes to a unique target of interest. Accordingly, in some embodiment, the designed bait oligonucleotides are at least 40 nucleotides in length. To identify a bait oligonucleotide of interest, at unique 40 nucleotide sections of the human transcriptome are identified and aligned to the genome using an aligner designed for aligning RNA-seq data. In some embodiments, bait oligonucleotides are designed to hybridize to a particular exon. In some embodiments, bait oligonucleotides are designed to span an exon-exon junction. In some embodiments, bait oligonucleotides can hybridize to a target, allowing for identification of splicing and alternative splicing transcripts in the transcriptome. Using the alignments, sequences that align to the genome one or more times are identified and cataloged. Each bait designed can be tested against (i.e., compared to) a sequence identified in the genome. If the sequences in the bait oligonucleotide and in the genome do not match, then the bait can be tested and/or in one or more panels as disclosed herein.

[0237] However, if the sequences in the bait oligonucleotide and in the genome match, then in some embodiments, a modified bait is designed. To prepare a modified bait, one can slide the initial sequence+/−40 bp from the original position to identify a potentially new bait oligonucleotide. With each design, the new bait oligonucleotide is tested against the genome. After all such candidates are cataloged, the bait oligonucleotides that are ultimately included in one or more panels described herein are ordered (i.e., ranked) based on the bait oligonucleotide length (i.e. a longer bait is prioritized) and then by distance to the original intended position (with priority to sequences closer to the original intended position). However, if no bait meets the required criteria, that bait is dropped and no bait is designed at that position.

[0238] In some embodiments, the bait oligonucleotide sequence is 40 nucleotides long. In some embodiments, the bait oligonucleotide sequence is between 40 and 160 nucleotides long. In some embodiments, the bait oligonucleotide sequence is between 40 and 120 nucleotides long. In some embodiments, the bait oligonucleotide sequence is about 40, about 41, about 42, about 43, about 44, about 45, about 46, about 47, about 48, about 49, about 50, about 51, about 52 about 53, about 54, about 55, about 56, about 57, about 58, about 59, about 60, about 61, about 62, about 63, about 64, about 65, about 66, about 67, about 68, about 69, about 70, about 71, about 72, about 73, about 74, about 75, about 76, about 77, about 78, about 79, about 80, about 81, about 82, about 83, about 84, about 85, about 86, about 87, about 88, about 89, about 90, about 91, about 92, about 93, about 94, about 95, about 96, about 97, about 98, about 99, about 100, about 101, about 102, about 103, about 104, about 105, about 106, about 107, about 108, about 109, about 110, about 111, about 112, about 113, about 114, about 115, about 116, about 117, about 118, about 119, about 120, about 121, about 122, about 123, about 124, about 125, about 126, about 127, about 128, about 129, about 130, about 131, about 132, about 133, about 134, about 135, about 136, about 137, about 138, about 139, about 140, about 141, about 142, about 143, about 144, about 145, about 146, about 147, about 148, about 149, about 150, about 151, about 152, about 153, about 154, about 155, about 156, about 157, about 158, about 159, or about 160 nucleotides long.

[0239] In some embodiments, a bait oligonucleotide of the plurality of bait oligonucleotides includes a domain that binds specifically to all or a portion of the spatial barcode or a complement thereof. In some embodiments, a bait oligonucleotide of the plurality of bait oligonucleotides includes a domain that binds specifically to all or a portion of the sequence of the analyte from the biological sample, or a complement thereof. In some embodiments, a bait oligonucleotide of the plurality of bait oligonucleotides includes a domain that binds specifically to all or a portion of the spatial barcode or a complement thereof and all or a portion of the sequence of the analyte from the biological sample, or a complement thereof. In some embodiments, the domain of the bait oligonucleotide hybridizes to an analyte of interest. In some embodiments, the domain of the bait oligonucleotide binds specifically to an analyte of interest. In some embodiments, the domain of the bait oligonucleotide binds specifically to all or a portion of the spatial barcode or a complement thereof. In some embodiments, the domain of the bait oligonucleotide binds specifically to all or a portion of the sequence of the analyte from the biological sample. In some embodiments, the domain of the bait oligonucleotide binds specifically to a 3′ portion of the sequence of the analyte from the biological sample or a complement thereof. In some embodiments, the domain of the bait oligonucleotide binds specifically to a 5′ portion of the sequence of the analyte from the biological sample or a complement thereof. In some embodiments, the domain of the bait oligonucleotide binds specifically to an intron in the sequence of the analyte from the biological sample or a complement thereof. In some embodiments, the domain of the bait oligonucleotide binds specifically to an exon in the sequence of the analyte from the biological sample or a complement thereof. In some embodiments, the domain of the bait oligonucleotide binds specifically to an untranslated 3′ region of the analyte from the biological sample or a complement thereof. In some embodiments, the domain of the bait oligonucleotide binds specifically to an untranslated 5′ region of the analyte from the biological sample or a complement thereof.

[0240] In some embodiments, the domain of the bait oligonucleotide sequence is 40 nucleotides long. In some embodiments, the domain of the bait oligonucleotide sequence is between 40 and 160 nucleotides long. In some embodiments, the domain of the bait oligonucleotide sequence is between 40 and 120 nucleotides long. In some embodiments, the domain of the bait oligonucleotide sequence is about 40, about 41, about 42, about 43, about 44, about 45, about 46, about 47, about 48, about 49, about 50, about 51, about 52 about 53, about 54, about 55, about 56, about 57, about 58, about 59, about 60, about 61, about 62, about 63, about 64, about 65, about 66, about 67, about 68, about 69, about 70, about 71, about 72, about 73, about 74, about 75, about 76, about 77, about 78, about 79, about 80, about 81, about 82, about 83, about 84, about 85, about 86, about 87, about 88, about 89, about 90, about 91, about 92, about 93, about 94, about 95, about 96, about 97, about 98, about 99, about 100, about 101, about 102, about 103, about 104, about 105, about 106, about 107, about 108, about 109, about 110, about 111, about 112, about 113, about 114, about 115, about 116, about 117, about 118, about 119, about 120, about 121, about 122, about 123, about 124, about 125, about 126, about 127, about 128, about 129, about 130, about 131, about 132, about 133, about 134, about 135, about 136, about 137, about 138, about 139, about 140, about 141, about 142, about 143, about 144, about 145, about 146, about 147, about 148, about 149, about 150, about 151, about 152, about 153, about 154, about 155, about 156, about 157, about 158, about 159, or about 160 nucleotides long.

[0241] In some embodiments, the analyte from the biological sample is associated with a disease or condition. In some embodiments, the analyte from the biological sample comprises a mutation. In some embodiments, the analyte from the biological sample comprises a single nucleotide polymorphism (SNP). In some embodiments, the analyte from the biological sample comprises a trinucleotide repeat.

[0242] In some embodiments, the domain of the bait oligonucleotide hybridizes to a particular exon of a transcript (i.e., an mRNA molecule). For example, a transcript can be processed such that an exon that would otherwise be excised during a normal setting is included in the mature mRNA product in a different setting (e.g., a pathological setting such as cancer). In some embodiments, the domain of the bait oligonucleotide identifies (e.g., hybridizes to) one or more isoforms or an analyte, but not others. In some embodiments, for example, a bait oligonucleotide hybridizes to a particular exon that is detected in a pathological setting (e.g., cancer).

[0243] In some embodiments, there is more than one bait oligonucleotide for a particular analyte of interest in a panel. For example, an analyte can undergo alternate splicing (e.g., as in an mRNA molecule). In some embodiments, different baits could detect and enhance particular transcripts, thereby detecting whether a particular exon is included in an analyte. Thus, in some embodiments, a panel will include at least 2, at least 3, at least 4, at least 5, at least 6, at least 7, at least 8, at least 9, at least 10, or more bait oligonucleotides for one analyte.

[0244] In some embodiments, a bait oligonucleotide is fully complementary (i.e., 100% complementary) to a portion of a target analyte. In some embodiments, a bait oligonucleotide is partially complementary (i.e., less than 100% complementary) to a portion of a target analyte. In some embodiments, a bait oligonucleotide has at least 75%, at least 80%, at least 85%, at least 90%, at least 91%, at least 92%, at least 93%, at least 94%, at least 95%, at least 96°/o, at least 97%, at least 98%, or at least 99% sequence identity to a portion of a target analyte.

[0245] In some embodiments, a bait oligonucleotide is partially complementary (i.e., less than 100% complementary) to a portion of a target analyte. In some embodiments, a bait oligonucleotide is partially complementary (i.e., less than 100% complementary) to a portion of a target analyte. In some embodiments, part of the bait oligonucleotide hybridizes to a portion of a target analyte. In some embodiments, part of the bait oligonucleotide has at least 75%, at least 80%, at least 85%, at least 90%, at least 91%, at least 92%, at least 93%, at least 94%, at least 95%, at least 96%, at least 97%, at least 98%, or at least 99% sequence identity to a portion of a target analyte.

[0246] Bait oligonucleotides are included in one or more panels (e.g., cohorts). Panels include groups of bait oligonucleotides that target a particular cohort of analytes. For example, a panel can include a set of bait oligonucleotides that is particular to a pathological setting. In some embodiments, more than one panel (e.g., set of bait oligonucleotides) can be used to enhance detection of analytes. For example, in some embodiments, at least 1, at least 2, at least 3, at least 4, at least 5, or more panels (e.g., set of bait oligonucleotides) can be used to enhance detection of analytes. The bait oligonucleotides and target analytes for all panels disclosed are provided in the accompanying sequencing listing disclosed herein.

[0247] In some embodiments, a panel includes bait oligonucleotides that hybridize and enhance detection of analytes dysregulated in cancer (e.g., a cancer panel). In some embodiments, the cancer panel allows for quantitative analysis of analytes aberrantly expressed in the cancer transcriptome while avoiding the excess costs and time associated with sequencing an entire transcriptome. The bait oligonucleotides and target analytes for an exemplary cancer panel are provided in Table 1a and in the accompanying sequencing listing disclosed herein. In some embodiments, the bait oligonucleotides in the cancer panel can include detection of dysregulated analytes associated with biological processes such as apoptosis, metabolism, cell cycle (e.g., checkpoint analytes), DNA damage and repair, hypoxia, and stress toxicity. More specifically, the bait oligonucleotides in the cancer panel target cancer-specific analytes such as analytes that function in pathways that include but are not limited to the Myc pathway, Hippo pathway, RTK/RAS pathway, TP53 and TP53-associate pathway, TFGβ pathway, and Wnt pathway. The bait oligonucleotides in the cancer panel also can detect cancer hot spots, tumor suppressor analytes, and immune-dysregulated analytes. The bait oligonucleotides and target analytes for an exemplary cancer panel were disclosed in U.S. Appl. No. 62/970,066 (Titled “Capturing Targeted Genetic Targets Using A Hybridization/Capture Approach”) and U.S. Appl. No. 62/929,686, (Titled “Capturing Targeted Genetic Targets Using A Hybridization/Capture Approach”), each of which is incorporated by reference in its entirety.

[0248] In some embodiments, a panel includes bait oligonucleotides that hybridize and enhance detection of analytes associated with immunological dysregulation (e.g., an immunology panel). In some embodiments, the immunology panel allows for quantitative analysis of analytes associated with immune-dysregulation while avoiding the excess costs and time associated with sequencing an entire transcriptome. The bait oligonucleotides and target analytes for an exemplary immunology panel are provided in Table 2a and in the accompanying sequencing listing disclosed herein. In some embodiments, the bait oligonucleotides in the immunology panel can include detection of dysregulated analytes associated with biological processes such as B cell function, T cell function, cell cycle, cell signaling, interleukin signaling, and metabolism. More specifically, bait oligonucleotides target analytes that include but are not limited to transcription factors, T cell activation markers, antigen presentation genes, metabolic genes, and SIRP family members. In some embodiments, the immunology panel has applications to detect associated with immunological dysregulation to examine innate immunity, adaptive immunity, one or more inflammatory responses, detection of one or more infectious diseases (e.g., a bacterial infection; a viral infection), and immune response in a transplant recipient. More specifically, the bait oligonucleotides in the immunology panel target immuno-specific biomarkers that include but are not limited to lineage markers, tissue markers, and cancer markers. In some embodiments, the bait oligonucleotides enhance detection of analytes expressed in bone marrow, gut, lung, salivary gland, intestine, lymph node, stem cells, or a combination thereof. The bait oligonucleotides and target analytes for an exemplary immunology panel were disclosed in U.S. Appl. No. 62/970,066 (Titled “Capturing Targeted Genetic Targets Using A Hybridization/Capture Approach”) and U.S. Appl. No. 62/929,686, (Titled “Capturing Targeted Genetic Targets Using A Hybridization/Capture Approach”), each of which is incorporated by reference in its entirety.

[0249] In some embodiments, a panel includes bait oligonucleotides that hybridize and enhance detection of analytes that detect pathway dysregulation (e.g., a pathway panel). In some embodiments, the pathway panel allows for quantitative analysis of analytes associated with pathway dysregulation while avoiding the excess costs and time associated with sequencing an entire transcriptome. The bait oligonucleotides and target analytes for an exemplary pathway panel are provided in Table 3a and in the accompanying sequencing listing disclosed herein. In some embodiments, the bait oligonucleotides in the pathway panel can include detection of dysregulated analytes associated with complex signal transduction pathways. The target analytes include analytes specific to disease or drug targets; G-protein coupled receptors (GPCRs), one or more kinases; one or more epigenetic markers; or one or more checkpoint analytes. Analytes detected by bait oligonucleotides in the pathway panel include but are not limited to tissue markers of cancer dysregulation, central nervous system dysregulation, inflammation dysregulation, metabolic dysregulation, cardiovascular dysregulation, respiratory dysregulation, and reproductive dysregulation. The bait oligonucleotides and target analytes for an exemplary pathway panel were disclosed in U.S. Appl. No. 62/970,066 (Titled “Capturing Targeted Genetic Targets Using A Hybridization/Capture Approach”) and U.S. Appl. No. 62/929,686, (Titled “Capturing Targeted Genetic Targets Using A Hybridization/Capture Approach”), each of which is incorporated by reference in its entirety.

[0250] In some embodiments, a panel includes bait oligonucleotides that hybridize and enhance detection of analytes that detect neurological development and/or dysregulation. In some embodiments, a panel includes bait oligonucleotides that hybridize and enhance detection of analytes that detect neurological development. In some embodiments, a panel includes bait oligonucleotides that hybridize and enhance detection of analytes that detect neurological dysregulation. In some embodiments, a panel includes bait oligonucleotides that hybridize and enhance detection of analytes that detect neurological development and dysregulation. In some embodiments, the neurological panel allows for quantitative analysis of analytes associated with pathway dysregulation while avoiding the excess costs and time associated with sequencing an entire transcriptome. The bait oligonucleotides and target analytes for an exemplary neurological panel are provided in Table 4a and in the accompanying sequencing listing disclosed herein. In some embodiments, the bait oligonucleotides in the neurological panel can include detection of dysregulated analytes associated with axonal targeting, hypoxia, and glioblastoma. In some embodiments, the bait oligonucleotides in the neurological panel can include detection of dysregulated analytes associated with axonal targeting. In some embodiments, the bait oligonucleotides in the neurological panel can include detection of dysregulated analytes associated with hypoxia. In some embodiments, the bait oligonucleotides in the neurological panel can include detection of dysregulated analytes associated with glioblastoma. In some embodiments, the bait oligonucleotides in the neurological panel can include detection of mitochondrial protein-coding genes. In some embodiments, the bait oligonucleotides in the neurological panel can include detection of mitochondrial protein-coding genes in order to evaluate energy metabolism.

[0251] In some embodiments, any one of the panels disclosed herein include bait oligonucleotides that can enhance detection of at least about 100 analytes, about 200 analytes, about 300 analytes, about 400 analytes, about 500 analytes, about 600 analytes, about 700 analytes, about 800 analytes, about 900 analytes, about 1000 analytes, about 1100 analytes, about 1200 analytes, about 1300 analytes, about 1400 analytes, about 1500 analytes, about 1600 analytes, about 1700 analytes, about 1800 analytes, about 1900 analytes, about 2000 analytes or more.

[0252] In some embodiments, a bait oligonucleotide enhances detection of an analyte of interest by about 1.5 fold, about 2 fold, about 3 fold, about 4 fold, about 5 fold, about 6 fold, about 7 fold, about 8 fold, about 9 fold, about 10 fold, about 20 fold, about 50 fold, about 100 fold, 500 fold, 1000 fold, or greater in comparison to analytes that are not detected using a bait oligonucleotide.

[0253] In some embodiments, a bait oligonucleotide includes a molecular tag. As disclosed herein, a molecular tag of a bait oligonucleotide is affixed to (e.g., conjugated to) the nucleic acid sequence of the bait oligonucleotide. In some embodiments, the molecular tag includes one or more moieties. In some embodiments, the moiety includes a label as described herein. The label can allow detection of the hybridization of a bait oligonucleotide to an analyte. In some embodiments, the label is directly associated with (i.e., conjugated to) the bait oligonucleotide. The detectable label can be directly detectable by itself (e.g., radioisotope labels or fluorescent labels) or, in the case of an enzymatic label, can be indirectly detectable, e.g., by catalyzing chemical alterations of a chemical substrate compound or composition, which chemical substrate compound or composition is directly detectable. Detectable labels can be suitable for small scale detection and/or suitable for high-throughput screening. As such, suitable detectable labels include, but are not limited to, radioisotopes, fluorophores, chemiluminescent compounds, bioluminescent compounds, and dyes.

[0254] In some embodiments, the molecular tag includes a small molecule. In some embodiments, the molecular tag includes a nucleic acid. In some embodiments, the nucleic acid is single-stranded. In some embodiments, the nucleic acid is double-stranded. In some embodiments, the nucleic acid is RNA. In some embodiments, the nucleic acid is DNA. In some embodiments, the molecular tag includes a carbohydrate. In some embodiments, the molecular tag is positioned 5′ to the domain in the bait oligonucleotide. In some embodiments, the molecular tag is position 3′ to the domain in the bait oligonucleotide.

[0255] In some embodiments, the agent that binds specifically to the molecular tag includes a protein. In some embodiments, the protein is an antibody. In some embodiments, the agent that binds specifically to the molecular tag comprises a nucleic acid. In some embodiments, the agent that binds specifically to the molecular tag comprises a small molecule. In some embodiments, the agent that binds specifically to the molecular tag is attached to a substrate. In some embodiments, the substrate is a bead. In some embodiments, the substrate is a well. In some embodiments, the substrate is a slide.

[0256] In some embodiments, the moiety is biotin. In some embodiments, a biotin molecule is directly associated with (i.e., conjugated to) the bait oligonucleotide at the 3′ end. In some embodiments, a biotin molecule is directly associated with (i.e., conjugated to) the bait oligonucleotide at the 5′ end. In some embodiments, and as disclosed below, the biotin molecule can be associated to (e.g. conjugated to) an avidin molecule, allowing pulldown of an analyte. In some embodiments, and as disclosed below, the biotin molecule can be associated to (e.g. conjugated to) a streptavidin molecule, allowing pulldown of an analyte.

[0257] In some embodiments, the bait oligonucleotide does not include a moiety affixed to the sequence (i.e., the bait oligonucleotide is a naked bait oligonucleotide).

[0258] (ii) Hybridization Methods

[0259] (1) Hybridization of Bait Oligonucleotides Directly

[0260] After creation of the nucleic acid (e.g., cDNA) library as disclosed above, the methods disclosed herein include denaturation of the nucleic acid (e.g., cDNA) strands, creating single-stranded nucleic acid (e.g., cDNA) molecules. In some embodiments, the nucleic acid (e.g., cDNA) library includes transcripts from the entire transcriptome.

[0261] In some embodiments, bait oligonucleotides are added to a plurality of nucleic acids (e.g., a library of nucleic acids). In some embodiments, the plurality of nucleic acids includes nucleic acids that have a spatial barcode or a complement thereof, and a portion of a sequence of an analyte from a biological sample, or a complement thereof. In some embodiments, the spatial barcode includes a sequence that corresponds to a region of interest in the biological sample. In some embodiments, the spatial barcode allows detection of and association with a particular region of interest in the biological sample. In some embodiments, the methods disclosed herein include identifying the region of interest. In some embodiments, the spatial barcode provides information about the location of an analyte in a biological sample. In some embodiments, the methods disclosed herein include identifying the location and/or abundance of an analyte in the biological sample.

[0262] In some embodiments, the bait oligonucleotides are added to a plurality of nucleic acids. In some embodiments, bait oligonucleotides include a domain that binds specifically to all or a portion of a spatial barcode or a complement thereof, and/or all or a portion of a sequence of an analyte or a complement thereof. In some embodiments, a complex of a bait oligonucleotide specifically bound to the nucleic acid can be enriched. For example, a bait oligonucleotide can include a molecular tag, and a complex of a bait oligonucleotide specifically bound to the nucleic acid can be enriched using an agent that binds specifically to the molecular tag. In some embodiments, the molecular tag can be attached (directly or indirectly) to a substrate (e.g., a slide, a well, or a bead). In some embodiments, a molecular tag can include a protein, a nucleic acid, a carbohydrate, a small molecule, or any combination thereof. In some embodiments, an agent that binds specifically to a molecular tag can be a protein, a nucleic acid, a carbohydrate, a small molecule, or any combination thereof. In some embodiments, a molecular tag can be avidin and an agent that binds specifically to the molecular tag can be biotin. In some embodiments, a molecular tag can be streptavidin and an agent that binds specifically to the molecular tag can be biotin.

[0263] In some embodiments, a molecular tag can be biotin and an agent that binds specifically to the molecular tag can be streptavidin (e.g., streptavidin attached to a bead). In some embodiments, where the molecular tag is biotin and the method includes the use of streptavidin beads to enrich a nucleic acid complexed with a bait oligonucleotide, the streptavidin beads can be washed using any method known in the art. In some embodiments, the streptavidin bead can be washed for 1 time, 2 times, 3 times, 4 times, 5 times, 6 times, 7 times or more. In some embodiments, the streptavidin beads can be stringently washed for one time, 2 times, 3 times, 4 times, 5 times, 6 times, 7 times, or more. In some embodiments, the streptavidin beads can be washed at about 15° C., about 20° C., about 25° C., about 30° C., about 35° C., about 40° C., about 45° C., about 48° C., about 50° C., or more. In some embodiments, after one or more wash steps, the nucleic acid(s) hybridized to the bait oligonucleotide(s) can be recovered and are enriched.

[0264] In some embodiments, a molecular tag can be biotin and an agent that binds specifically to the molecular tag can be avidin (e.g., avidin attached to a bead). In some embodiments, where the molecular tag is biotin and the method includes the use of avidin beads to enrich a nucleic acid complexed with a bait oligonucleotide, the avidin beads can be washed using any method known in the art. In some embodiments, the avidin bead can be washed for 1 time, 2 times, 3 times, 4 times, 5 times, 6 times, 7 times or more. In some embodiments, the avidin beads can be stringently washed for one time, 2 times, 3 times, 4 times, 5 times, 6 times, 7 times, or more. In some embodiments, the avidin beads can be washed at about 15° C., about 20° C., about 25° C., about 30° C., about 35° C., about 40° C., about 45° C., about 48° C., about 50° C., or more. In some embodiments, after one or more wash steps, the nucleic acid(s) hybridized to the bait oligonucleotide(s) can be recovered and are enriched.

[0265] In some embodiments, the recovered nucleic acids can be released from the bait oligonucleotide(s) and purified to remove avidin and biotin (or any other molecular tag and agent that binds specifically to the molecular tag). In some embodiments, the recovered nucleic acids can be released from the bait oligonucleotide(s) and purified to remove avidin and biotin (or any other molecular tag and agent that binds specifically to the molecular tag). In some embodiments, the recovered nucleic acids can be released from the bait oligonucleotide(s) and purified to remove streptavidin and biotin (or any other molecular tag and agent that binds specifically to the molecular tag).

[0266] In some embodiments, the methods disclosed herein include an enrichment method to selectively increase one or more particular targets. In some embodiments, the bait oligonucleotides added to the plurality of nucleic acids. In some embodiments, bait oligonucleotides hybridize to a particular nucleic acid. In some embodiments, the hybridized bait oligonucleotide/nucleic acid molecule can be enriched (i.e., selectively increased in expression).

[0267] In some embodiments, a plurality of bait oligonucleotides can be used in any of the methods described herein to enrich one or more nucleic acids of interest from a plurality of nucleic acids. In some embodiments, the plurality of bait oligonucleotides are designed to enrich one or more nucleic acids that include all or a part of a sequence of an analyte of interest (e.g., one or more genes that function or are aberrantly expressed in a particular cellular state or pathway), or a complement thereof. For example, in some embodiments, a plurality of bait oligonucleotides can be used to enrich nucleic acids that include all or a part of a sequence of cancer-related transcripts, or complements thereof (e.g., as disclosed in U.S. Appl. No. 62/970,066 (Titled “Capturing Targeted Genetic Targets Using A Hybridization/Capture Approach”) and U.S. Appl. No. 62/929,686, (Titled “Capturing Targeted Genetic Targets Using A Hybridization/Capture Approach”), each of which is incorporated by reference in its entirety). In some embodiments, a plurality of bait oligonucleotides can be used to enrich nucleic acids that include all or a part of a sequence of immune-related transcripts, or complements thereof (e.g., as disclosed in U.S. Appl. No. 62/970,066 (Titled “Capturing Targeted Genetic Targets Using A Hybridization/Capture Approach”) and U.S. Appl. No. 62/929,686, (Titled “Capturing Targeted Genetic Targets Using A Hybridization/Capture Approach”), each of which is incorporated by reference in its entirety). In some embodiments, a plurality of bait oligonucleotides can be used to enrich nucleic acids that include all or a part of a sequence of pathway-specific transcripts, or complements thereof (e.g., as disclosed in U.S. Appl. No. 62/970,066 (Titled “Capturing Targeted Genetic Targets Using A Hybridization/Capture Approach”) and U.S. Appl. No. 62/929,686, (Titled “Capturing Targeted Genetic Targets Using A Hybridization/Capture Approach”), each of which is incorporated by reference in its entirety). In some embodiments, a plurality of bait oligonucleotides can be used to enrich nucleic acids that include all or a part of a sequence of neurological-specific transcripts, or complements thereof, as listed in Table 4 and in the accompanying sequence listing.

[0268] In some embodiments, after hybridization of one or more bait oligonucleotides to their target nucleic acids, the hybridized nucleic acids are enriched, creating a pool of nucleic acids that are enriched for particular nucleic acids of interest. In some embodiments, after hybridization of one or more bait oligonucleotides to their target nucleic acids, the un-hybridized nucleic acids are degraded (e.g., by a nuclease), thus enriching the hybridized nucleic acids. In some embodiments, after hybridization of one or more bait oligonucleotides, the hybridized nucleic acids are degraded (e.g., by a nuclease), thus enriching the un-hybridized nucleic acids; for example, this technique may be useful to decrease the amount of a high-abundance nucleic acid that is not of interest. In some embodiments, the bait oligonucleotides may not include a detectable moiety. In some embodiments, the enriched nucleic acids are purified. In some embodiments, the enriched nucleic acids are sample indexed (e.g., prior to sequencing).

[0269] In some embodiments, a bait oligonucleotide is hybridized with a nucleic acid at about 40° C., about 45° C., about 50° C., about 55° C., about 60° C., about 65° C., about 70° C., about 75° C., about 80° C. or higher. In some embodiments, the bait oligonucleotides are hybridized with a nucleic acid for at least 15 minutes, at least 30 minutes, at least 45 minutes, at least 1 hour, at least 90 minutes, at least 2 hours, at least 3 hours, at least 4 hours at least 5 hours, or longer.

[0270] In some embodiments, one or more detectable moieties can be associated (e.g., attached directly or indirectly) with a bait oligonucleotide. In some embodiments, the one or more detectable moieties can be used to detect (or enhance detection) of a bait oligonucleotide (e.g., a bait oligonucleotide hybridized to a nucleic acid).

[0271] In some embodiments, the enriched nucleic acid can be amplified. After amplification, the enriched and amplified nucleic acid can be used to generate a library of nucleic acids and sequenced using any method known in the art, including the exemplary sequencing methods described herein. In some embodiments, sequencing can include determining all or a portion of the sequence of the spatial barcode or the complement thereof in the nucleic acid. In some embodiments, sequencing includes determining all or a portion of the sequence of the analyte from the biological sample or a complement thereof in the nucleic acid. In some embodiments, sequencing includes high throughput sequencing.

[0272] In some embodiments, targeted spatial gene expression profiling using one or more panels as described herein (e.g., the cancer panel, the immune panel, the pathway panel, or the neuro panel) can enrich the target nucleic acids as compared to unbiased spatial profiling by about 1 fold, about 2 fold, about 3 fold, about 4 fold, about 5 fold, about 6 fold, about 7 fold, about 8 fold, about 9 fold, about 10 fold, about 20 fold, about 50 fold, about 100 fold or greater. In some embodiments, the targeted spatial gene expression profiling using one or more panels as described herein (e.g., the cancer panel, the immune panel, the pathway panel, or the neuro panel) can enrich the target nucleic acids per gene as compared to unbiased spatial profiling by about 1 fold, about 2 fold, about 3 fold, about 4 fold, about 5 fold, about 6 fold, about 7 fold, about 8 fold, about 9 fold, about 10 fold, about 20 fold, about 50 fold, about 100 fold or greater.

[0273] In some embodiments, the targeted spatial gene expression profiling using one or more panels as described herein (e.g., the cancer panel, the immune panel, the pathway panel, or the neuro panel) can increase on-target read percentage as compared to unbiased spatial profiling by about 1 fold, about 2 fold, about 3 fold, about 4 fold, about 5 fold, about 6 fold, about 7 fold, about 8 fold, about 9 fold, about 10 fold, about 20 fold, about 50 fold, about 100 fold or greater. In some embodiments, the targeted spatial gene expression profiling using the panel as described herein (e.g., the cancer panel, the immune panel, the pathway panel, or the neuro panel) can decrease off-target read percentage as compared to unbiased spatial profiling by about 1 fold, about 2 fold, about 3 fold, about 4 fold, about 5 fold, about 6 fold, about 7 fold, about 8 fold, about 9 fold, about 10 fold, about 20 fold, about 50 fold, about 100 fold or greater.

[0274] In some embodiments, the targeted spatial gene expression profiling using one or more panels as described herein (e.g., the cancer panel, the immune panel, the pathway panel, or the neuro panel) enriches detection of a target analyte. In some embodiments, the targeted spatial gene expression profiling using one or more panels as described herein (e.g., the cancer panel, the immune panel, the pathway panel, or the neuro panel) enriches detection of one or more target analytes. In some embodiments, enrichment includes an increase in the number of sequencing reads that are detected when the plurality nucleic acids and/or probes are sequenced. In some embodiments, enrichment includes an increase in the number of sequencing reads that are detected when the nucleic acids are sequenced after avidin-biotin pulldown described herein. In some embodiments, enrichment includes an increase in the number of sequencing reads that are detected when the nucleic acids are sequenced after streptavidin-biotin pulldown described herein. In some embodiments, the increase is about 50%, about 55%, about 60%, about 62%, about 65%, about 70%, about 75%, about 80%, about 85%, about 90%, about 95%, about 1 fold, about 2 fold, about 3 fold, about 4 fold, about 5 fold, about 6 fold, about 7 fold, about 8 fold, about 9 fold, about 10 fold, about 20 fold, about 50 fold, about 100 fold or greater enrichment of target analyte sequence reads compared to the number of sequence reads in the same target analyte when performing whole genome sequencing.

[0275] In some embodiments, the targeted spatial gene expression profiling using one or more panels as described herein (e.g., the cancer panel, the immune panel, the pathway panel, or the neuro panel) can have about 50%, about 55%, about 60%, about 62%, about 65%, about 70%, about 75%, about 80%, about 85%, about 90%, about 95%, or more of panel gene recovery relative to the unbiased spatial gene expression profiling.

[0276] In some embodiments, the targeted spatial gene expression profiling using one or more panels as described herein (e.g., the cancer panel, the immune panel, the pathway panel, or the neuro panel) can have about 50%, about 55%, about 60%, about 62%, about 65%, about 70%, about 75%, about 80%, about 85%, about 90%, about 95%, or more of panel UMI recovery relative to the unbiased spatial gene expression profiling.

[0277] In some embodiments, the targeted spatial gene expression profiling using one or more panels as described herein (e.g., the cancer panel, the immune panel, the pathway panel, or the neuro panel) can reduce gene or UMI targeting complexity (or complexity) to about 90%, about 80%, about 70%, about 60%, about 50%, about 40%, about 30%, about 20% or less of the unbiased spatial gene expression profiling.

[0278] In some embodiments, dual-indexed libraries can be used for targeted spatial gene expression profiling. In some embodiments, individually indexed libraries can be mixed before the enrichment step by hybridization/capture to generate a targeted library for downstream high-throughput sequencing. In some embodiments, individually indexed libraries can be mixed after the enrichment step by hybridization/capture to generate a targeted library for downstream high-throughput sequencing.

[0279] (2) Hybridization of Bait Oligonucleotides Directly to Analytes of Interest.

[0280] In some embodiments, a bait oligonucleotide (e.g., a set of bait oligonucleotides from one or more panels) can be added directly to an analyte. In some embodiment, the bait oligonucleotide is directly associated with (i.e., conjugated to) a detectable moiety at the 3′ end. In some embodiment, the bait oligonucleotide is directly associated with (i.e., conjugated to) a detectable moiety at the 5′ end. In some embodiments, the detectable moiety is a fluorescent marker as described herein.

[0281] In some embodiments, target-specific reactions are performed in the biological sample. In some embodiments, a nucleic acid analyte is denatured to create single-stranded analytes. In some embodiments, a bait oligonucleotide binds (e.g., hybridizes) directly to an analyte (e.g., a single-stranded analyte), and the detectable moiety (e.g., the fluorescent marker) can be identified using one or more imaging techniques disclosed herein. In some embodiments, target-specific reactions include in situ hybridization of the bait oligonucleotide to an analyte. In some embodiment, the in situ hybridization is fluorescence in situ hybridization (FISH). In some embodiments, the fluorescent marker can serve as a marker to purify an analyte of interest. In some embodiments, fluorescence microscopy can be used to locate the fluorescently-bound bait oligonucleotides. In some embodiments, analytes that are not hybridized to the bait oligonucleotide can be washed away. In some embodiments, the wash methods include isolating only those analytes that fluoresce. In some embodiments, the wash steps include any of the wash steps provided herein.

[0282] In some embodiments, a fluorophore (e.g., any of the fluorophores disclosed herein) can be directly associated to (e.g., conjugated to) the bait oligonucleotide. In some embodiments, the bait oligonucleotide can include a non-fluorescent moiety that is directly associated to (e.g., conjugated to) the bait oligonucleotide. In some embodiment, a fluorophore can bind to the non-fluorescent moiety, thereby enhancing detection of the analyte.

[0283] In some embodiments, the fluorescence in situ hybridization methods disclosed herein detect a particular set of transcripts. In some embodiments, fluorescence in situ hybridization methods disclosed herein detect cancer-related transcripts (e.g., as disclosed in U.S. Appl. No. 62/970,066 (Titled “Capturing Targeted Genetic Targets Using A Hybridization/Capture Approach”) and U.S. Appl. No. 62/929,686, (Titled “Capturing Targeted Genetic Targets Using A Hybridization/Capture Approach”), each of which is incorporated by reference in its entirety). In some embodiments, fluorescence in situ hybridization methods disclosed herein detect immune-related transcripts (e.g., as disclosed in U.S. Appl. No. 62/970,066 (Titled “Capturing Targeted Genetic Targets Using A Hybridization/Capture Approach”) and U.S. Appl. No. 62/929,686, (Titled “Capturing Targeted Genetic Targets Using A Hybridization/Capture Approach”), each of which is incorporated by reference in its entirety). In some embodiments, fluorescence in situ hybridization methods disclosed herein detect pathway-specific transcripts (e.g., as disclosed in U.S. Appl. No. 62/970,066 (Titled “Capturing Targeted Genetic Targets Using A Hybridization/Capture Approach”) and U.S. Appl. No. 62/929,686, (Titled “Capturing Targeted Genetic Targets Using A Hybridization/Capture Approach”), each of which is incorporated by reference in its entirety). In some embodiments, fluorescence in situ hybridization methods disclosed herein detect neurological-specific transcripts as described herein.

[0284] In some embodiments, the hybridized analyte/bait oligonucleotide can be cleaved from the substrate. In some embodiments, the spatially-barcoded array populated with capture probes can be contacted with a sample. The spatially-barcoded capture probes are cleaved and then interact with cells within the provided biological sample. In some embodiments, each capture probe can optionally include at least one cleavage domain. The cleavage domain represents the portion of the probe that is used to reversibly attach the probe to an array feature. Further, one or more segments or regions of the capture probe can optionally be released from the array feature by cleavage of the cleavage domain. As an example, spatial barcodes can be released by cleavage of the cleavage domain. In some embodiments, the capture probe can also include a cleavage site (e.g., a cleavage recognition site of a restriction endonuclease), a photolabile bond, a thermosensitive bond, or a chemical-sensitive bond. In some embodiments, once the spatially-barcoded capture probe is associated with a particular cell, the sample can be optionally removed for analysis.

[0285] In some embodiments, the cleaved analyte/bait oligonucleotide is purified for downstream steps (e.g., sequencing). Sequencing can be performed using any method known in the art, including sequencing methods described herein. In some embodiments, sequencing includes determining all or a portion of the sequence of the spatial barcode or the complement thereof. In some embodiments, sequencing includes determining all or a portion of the sequence of the analyte from the biological sample. In some embodiments, sequencing includes high throughput sequencing. In some embodiments, sequencing includes ligating an adapter to the nucleic acid.

[0286] In some embodiments, multiple bait oligonucleotides (e.g., two or more bait oligonucleotides) can be used to interrogate spatial gene expression in a biological sample via RNA-templated ligation.

[0287] (3) Downstream Application after Hybridization of Bait Oligonucleotides

[0288] In some embodiments of methods provided here, RNA-templated ligation is used to interrogate spatial gene expression in a biological sample (e.g., an FFPE tissue section). In some aspects, the steps of RNA-templated ligation include: (1) hybridization of pairs of bait oligonucleotides to a nucleic acid (e.g., a single-stranded cDNA or RNA molecule); (2) ligation of adjacently annealed probe pairs in situ; (3) RNase H treatment that (i) releases RNA-templated ligation products from the tissue (e.g., into solution) for downstream analysis and (ii) destroys unwanted DNA-templated ligation products; and optionally, (4) amplification of RNA—templated ligation products (e.g., by multiplex PCR).

[0289] In some aspects, RNA-templated ligation is used for detection of a target analyte, determination of sequence identity, and/or expression monitoring and transcript analysis. In some aspects, RNA-templated ligation allows for detection of a particular change in a nucleic acid (e.g., a mutation or single nucleotide polymorphism (SNP)), detection or expression of a particular nucleic acid, or detection or expression of a particular set of nucleic acids (e.g., in a similar cellular pathway or expressed in a particular pathology). In some embodiments, the methods that include RNA-templated ligation are used to analyze nucleic acids, e.g., by genotyping, quantitation of DNA copy number or RNA transcripts, localization of particular transcripts within samples, and the like. In some aspects, systems and methods provided herein that include RNA-templated ligation identify single nucleotide polymorphisms (SNPs). In some aspects, such systems and methods identify mutations.

[0290] In some aspects, disclosed herein are methods of detecting RNA expression that include bringing into contact a first bait oligonucleotide, a second bait oligonucleotide, and ligase (e.g., T4 RNA ligase). In some embodiments, the first bait oligonucleotide and the second bait oligonucleotide are designed to hybridize to a target sequence such that the 5′ end of the first bait oligonucleotide and the 3′ end of the second bait oligonucleotide are adjacent and can be ligated. After hybridization, a ligase (e.g., T4 RNA ligase) ligates the first bait oligonucleotide and the second bait oligonucleotide if the target sequence is present in the target sample, but does not ligate the first bait oligonucleotide and the second bait oligonucleotide if the target sequence is not present in the target sample. The presence or absence of the target sequence in the biological sample can be determined by determining whether or not the first and second bait oligonucleotides were ligated in the presence of ligase.

[0291] In some aspects, two or more RNA analytes are analyzed using methods that include RNA-templated ligation. In some aspects, when two or more analytes are analyzed, a first and second bait oligonucleotide that is specific for (e.g., specifically hybridizes to) each RNA analyte are used.

[0292] In some aspects, three or more bait oligonucleotides are used in RNA-templated ligation methods provided herein. In some embodiments, the three or more bait oligonucleotides are designed to hybridize to a target sequence such that the three or more probes hybridize adjacent to each other such that the 5′ and 3′ ends of adjacent probes can be ligated. In some embodiments, the presence or absence of the target sequence in the biological sample can be determined by determining whether or not the three or more bait oligonucleotide were ligated in the presence of ligase.

### III. Breast Cancer Biomarkers

[0293] Spatial transcriptomics technology has helped address the limitations of traditional pathological examination, combining the benefits of histological techniques and massive throughput of RNA-seq. Disclosed herein are methods of combining spatial transcriptomics technology with histological techniques to resolve the expression profile of a tumor. In particular, as disclosed herein are methods to capture an analyte of interest in an unbiased fashion. Then, imaging and sequencing data are processed together resulting in gene expression mapped to image position.

[0294] As disclosed herein, spatial patterns of gene expression that agreed with annotations from pathological examination were combined with immunohistochemical staining for tumor infiltrating lymphocytes, a hallmark of Triple Negative Breast Cancer (TNBC). By aggregating data from serial tissue sections, the delineation of gene expression patterns and cell-type identification were improved. These data were combined with 3′ single-nucleus RNA-seq from the same sample, generating cell-type expression profiles that were used to estimate the proportion of cell-types observed at a given position in the tissue section. Importantly, as disclosed herein, an enrichment strategy to select for cancer-associated genes was used. The enrichment strategy as shown herein showed concordance with the full transcriptome assay, suggesting that a targeted sequencing approach can be used where a fixed gene panel is appropriate.

[0295] (a) Biomarkers and Methods of Detecting Biomarkers in a Cancer Sample

[0296] Disclosed herein are methods of detecting biomarkers in a cancer sample. In some embodiments, the cancer is breast cancer. In some embodiments, the breast cancer is carcinoma. In some embodiments, the breast cancer is ductal cancer in situ or ductal carcinoma in situ (DCIS). DCIS is an overgrowth of abnormal cells in the milk ducts of the breast that has not spread beyond a milk duct into any normal surrounding breast tissue. In some embodiments, the sample is a tissue sample (e.g., a breast tissue sample). In some embodiments, the tissue sample includes cancer cells. In some embodiments, the sample is a section of a tissue (e.g., a frozen, fresh, or FFPE sample affixed to a slide).

[0297] The biomarkers detected herein are aberrantly expressed in cancer cells. In some embodiments, the biomarker is a nucleic acid. In some embodiments, the nucleic acid is mRNA. In some embodiments, the biomarker is one or more mutations in a DNA sample. In some embodiments, the biomarker is a protein. In some embodiments, the biomarkers are aberrantly expressed in breast cancer. In some embodiments, the biomarkers described herein are overexpressed in a cancer sample. In some embodiments, the biomarkers described herein are underexpressed in a cancer sample.

[0298] The biomarkers described herein can be detected in part of a tissue section. In some embodiments, the biomarkers disclosed herein are detected in some areas of a tissue section, but not detected in other areas of the tissue section. For example, a section can include an area identified as cancerous. In some embodiments, an area is annotated as cancerous by a pathologist. In some embodiments, an area is identified as cancerous by detection of a different biomarker using any method as described herein. In some embodiments, the cancerous area of a sample expresses (e.g., overexpresses) one or more biomarkers disclosed herein. In some embodiments, a biomarker is aberrantly expressed (e.g., overexpressed) in a particular type of cancer. For example, in some embodiments, a biomarker is aberrantly expressed is DCIS. In some embodiments, a biomarker is aberrantly expressed in a carcinoma.

[0299] In some embodiments, the biomarker is a transcript of CENPW, A2ML1, VLDLR, SCRG1, RCL1, FABP7, CCNE1, MIEN1, CDC37L1, ERMP1, TNFSF10, or a combination thereof. In some embodiments, the biomarker is a gene product (e.g., a protein) of CENPW, A2ML1, VLDLR, SCRG1, RCL1, FABP7, CCNE1, MIEN1, CDC37L1, ERMP1, TNFSF10, or a combination thereof. In some embodiments, a cell identified as a carcinoma cell aberrantly expresses CENPW, A2ML1, VLDLR, SCRG1, RCL1, FABP7, CCNE1, MIEN1, CDC37L1, ERMP1, TNFSF10, or a combination thereof.

[0300] In some embodiments, the biomarker is centromere protein W (CENPW). The gene product of CENPW is a component of the CENPA-NAC (nucleosome-associated) complex, a complex that plays a role in assembly of kinetochore proteins, mitotic progression and chromosome segregation. In some embodiments, CENPW is aberrantly expressed in cancer. In some embodiments, CENPW is overexpressed in cancer. In some embodiments, CENPW is overexpressed in breast cancer. In some embodiments, CENPW is overexpressed in a carcinoma cell.

[0301] In some embodiments, the biomarker is alpha-2-macroglobulin like 1 (A2ML1) (e.g., DNA, a transcript, or a protein). The gene product of A2ML1 inhibits proteinases using a trapping mechanism. The gene product of A2ML1 includes a peptide stretch, called the ‘bait region’ which contains specific cleavage sites for different proteinases. When a proteinase cleaves the bait region, a conformational change is induced in the protein which traps the proteinase. In some embodiments, A2ML1 is aberrantly expressed in cancer. In some embodiments, A2ML1 is overexpressed in cancer. In some embodiments, A2ML1 is overexpressed in breast cancer. In some embodiments, A2ML1 is overexpressed in a carcinoma cell.

[0302] In some embodiments, the biomarker is very low density lipoprotein receptor (VLDLR) (e.g., DNA, a transcript, or a protein). The low density lipoprotein receptor (LDLR) gene family consists of cell surface proteins involved in receptor-mediated endocytosis of specific ligands. This gene encodes a lipoprotein receptor that is a member of the LDLR family and plays important roles in VLDL-triglyceride metabolism and the reelin signaling pathway. In some embodiments, VLDLR is aberrantly expressed in cancer. In some embodiments, VLDLR is overexpressed in cancer. In some embodiments, VLDLR is overexpressed in breast cancer. In some embodiments, VLDLR is overexpressed in a carcinoma cell.

[0303] In some embodiments, the biomarker is SCRG1 (Scrapie-responsive protein 1, Scrapie-responsive gene 1 protein, or stimulator of chondrogenesis 1) (e.g., DNA, a transcript, or a protein). SCRG1 is associated with neurodegenerative changes observed in transmissible spongiform encephalopathies. It may play a role in host response to prion-associated infections. The scrapie responsive protein 1 may be partly included in the membrane or secreted by the cells due to its hydrophobic N-terminus. In addition, the encoded protein can interact with bone marrow stromal cell antigen 1 (BST1) to enhance the differentiation potentials of human mesenchymal stem cells during tissue and bone regeneration. In some embodiments, SCRG1 is aberrantly expressed in cancer. In some embodiments, SCRG1 is overexpressed in cancer. In some embodiments, SCRG1 is overexpressed in breast cancer. In some embodiments, SCRG1 is overexpressed in a carcinoma cell.

[0304] In some embodiments, the biomarker is RNA 3′-terminal phosphate cyclase-like protein (RCL1) (e.g., DNA, a transcript, or a protein). RCL1 plays a role in 40S-ribosomal-subunit biogenesis in the early pre-rRNA processing steps at sites A0, A1 and A2 that are required for proper maturation of the 18S RNA. In some embodiments, RCL1 is aberrantly expressed in cancer. In some embodiments, RCL1 is overexpressed in cancer. In some embodiments, RCL1 is overexpressed in breast cancer. In some embodiments, RCL1 is overexpressed in a carcinoma cell.

[0305] In some embodiments, the biomarker is fatty acid binding protein 7 (FABP7) (e.g., DNA, a transcript, or a protein). FABP7 is a cytoplasmic protein that bind long-chain fatty acids and other hydrophobic ligands. In some embodiments, FABP7 is aberrantly expressed in cancer. In some embodiments, FABP7 is overexpressed in cancer. In some embodiments, FABP7 is overexpressed in breast cancer. In some embodiments, FABP7 is overexpressed in a carcinoma cell.

[0306] In some embodiments, the biomarker is cyclin E1 (CCNE1) (e.g., DNA, a transcript, or a protein). CCNE1 is involved in control of the cell cycle at the G1/S (start) transition. In some embodiments, CCNE1 is aberrantly expressed in cancer. In some embodiments, CCNE1 is overexpressed in cancer. In some embodiments, CCNE1 is overexpressed in breast cancer. In some embodiments, CCNE1 is overexpressed in a carcinoma cell.

[0307] In some embodiments, the biomarker is migration and invasion enhancer 1 (MIEN1) (e.g., DNA, a transcript, or a protein). MIEN1 plays a role in cell migration. In some embodiments, MIEN1 is aberrantly expressed in cancer. In some embodiments, MIEN1 is overexpressed in cancer. In some embodiments, MIEN1 is overexpressed in breast cancer. In some embodiments, MIEN1 is overexpressed in a carcinoma cell.

[0308] In some embodiments, the biomarker is cell division cycle 37 like 1 (CDC37L1) (e.g., DNA, a transcript, or a protein). CDC37L1 is a cytoplasmic phosphoprotein that complexes with HSP90 as well as several other proteins involved in HSP90-mediated protein folding (Scholz et al., 2001). In some embodiments, CDC37L1 is aberrantly expressed in cancer. In some embodiments, CDC37L1 is overexpressed in cancer. In some embodiments, CDC37L1 is overexpressed in breast cancer. In some embodiments, CDC37L1 is overexpressed in a carcinoma cell.

[0309] In some embodiments, the biomarker is endoplasmic reticulum metallopeptidase 1 (ERMP1) (e.g., DNA, a transcript, or a protein). In some embodiments, ERMP1 is aberrantly expressed in cancer. In some embodiments, ERMP1 is overexpressed in cancer. In some embodiments, ERMP1 is overexpressed in breast cancer. In some embodiments, ERMP1 is overexpressed in a carcinoma cell.

[0310] In some embodiments, the biomarker is the cytokine tumor necrosis factor (ligand) superfamily, member 10 (TNFSF10) (e.g., DNA, a transcript, or a protein). In some embodiments, TNFSF10 is aberrantly expressed in cancer. In some embodiments, TNFSF10 is overexpressed in cancer. In some embodiments, TNFSF10 is overexpressed in breast cancer. In some embodiments, TNFSF10 is overexpressed in a carcinoma cell.

[0311] In some embodiments, the biomarker is a transcript of ACTG2, DMKN, CALML3, COL17A1, MAGED1, PTN, TMEM98, LY6D, TNC, RTN4IP1, or a combination thereof. In some embodiments, the biomarker is a gene product (e.g., a protein) of ACTG2, DMKN, CALML3, COL17A1, MAGED1, PTN, TMEM98, LY6D, TNC, RTN4IP1, or a combination thereof. In some embodiments, a cell identified as a DCIS cancer cell aberrantly expresses ACTG2, DMKN, CALML3, COL17A1, MAGED1, PTN, TMEM98, LY6D, TNC, RTN4IP1, or a combination thereof.

[0312] In some embodiments, the biomarker is actin gamma 2, smooth muscle (ACTG2). ACTG2 is a smooth muscle actin found in enteric tissues and is involved in cell motility. In some embodiments, ACTG2 is aberrantly expressed in cancer. In some embodiments, ACTG2 is overexpressed in cancer. In some embodiments, ACTG2 is overexpressed in breast cancer. In some embodiments, ACTG2 is overexpressed in a DCIS cancer cell.

[0313] In some embodiments, the biomarker is dermokine (DMKN). DMKN normally is expressed in the differentiated layers of skin. In some embodiments, DMKN is aberrantly expressed in cancer. In some embodiments, DMKN is overexpressed in cancer. In some embodiments, DMKN is overexpressed in breast cancer. In some embodiments, DMKN is overexpressed in a DCIS cancer cell.

[0314] In some embodiments, the biomarker is calmodulin like 3 (CALML3). In some embodiments, CALML3 is aberrantly expressed in cancer. In some embodiments, CALML3 is overexpressed in cancer. In some embodiments, CALML3 is overexpressed in breast cancer. In some embodiments, CALML3 is overexpressed in a DCIS cancer cell.

[0315] In some embodiments, the biomarker is collagen type XVII alpha 1 chain (COL17A1). COL17A1 is a transmembrane protein that is a structural component of hemidesmosomes, multiprotein complexes at the dermal-epidermal basement membrane zone that mediate adhesion of keratinocytes to the underlying membrane. In some embodiments, COL17A1 is aberrantly expressed in cancer. In some embodiments, COL17A1 is overexpressed in cancer. In some embodiments, COL17A1 is overexpressed in breast cancer. In some embodiments, COL17A1 is overexpressed in a DCIS cancer cell.

[0316] In some embodiments, the biomarker is MAGED1 (Melanoma-associated antigen D1; MAGE family member DD. MAGED1 is involved in the apoptotic response after nerve growth factor (NGF) binding in neuronal cells; MAGED1 inhibits cell cycle progression, and facilitates NGFR-mediated apoptosis. In some embodiments, MAGED1 is aberrantly expressed in cancer. In some embodiments, MAGED1 is overexpressed in cancer. In some embodiments, MAGED1 is overexpressed in breast cancer. In some embodiments, MAGED1 is overexpressed in a DCIS cancer cell.

[0317] In some embodiments, the biomarker is pleiotrophin (PTN). PTN is a secreted heparin-binding growth factor. PTN has significant roles in cell growth and survival, cell migration, angiogenesis and tumorigenesis. In some embodiments, PTN is aberrantly expressed in cancer. In some embodiments, PTN is overexpressed in cancer. In some embodiments, PTN is overexpressed in breast cancer. In some embodiments, PTN is overexpressed in a DCIS cancer cell.

[0318] In some embodiments, the biomarker is transmembrane protein 98 (TMEM98). TMEM98 functions as a negative regulator of MYRF in oligodendrocyte differentiation and myelination. TMEM98 interacts with the C-terminal of MYRF inhibiting MYRF self-cleavage and N-fragment nuclear translocation. In some embodiments, TMEM98 is aberrantly expressed in cancer. In some embodiments, TMEM98 is overexpressed in cancer. In some embodiments, TMEM98 is overexpressed in breast cancer. In some embodiments, TMEM98 is overexpressed in a DCIS cancer cell.

[0319] In some embodiments, the biomarker is lymphocyte antigen 6 family member D (LY6D). In some embodiments, LY6D is aberrantly expressed in cancer. In some embodiments, LY6D is overexpressed in cancer. In some embodiments, LY6D is overexpressed in breast cancer. In some embodiments, LY6D is overexpressed in a DCIS cancer cell.

[0320] In some embodiments, the biomarker is tenascin C (TNC). TNC encodes an extracellular matrix protein with a spatially and temporally restricted tissue distribution. TNC encodes a protein that is homohexameric with disulfide-linked subunits, and contains multiple EGF-like and fibronectin type-III domains. In some embodiments, TNC is aberrantly expressed in cancer. In some embodiments, TNC is overexpressed in cancer. In some embodiments, TNC is overexpressed in breast cancer. In some embodiments, TNC is overexpressed in a DCIS cancer cell.

[0321] In some embodiments, the biomarker is reticulon 4 interacting protein 1 (RTN4IP1). RTN4IP1 plays a role in the regulation of retinal ganglion cell (RGC) neurite outgrowth and in the development of the inner retina and optic nerve. In some embodiments, RTN4IP1 is aberrantly expressed in cancer. In some embodiments, RTN4IP1 is overexpressed in cancer. In some embodiments, RTN4IP1 is overexpressed in breast cancer. In some embodiments, RTN4IP1 is overexpressed in a DCIS cancer cell.

[0322] (b) Panel Capture Methods
[0323] (i) Selective Enrichment of Genes of Interest

[0324] In some embodiments, where the analyte is a nucleic acid analyte, one or more RNA analyte species of interest can be selectively enriched. For example, one or more species of RNA of interest can be selected by addition of one or more oligonucleotides to the sample. In some embodiments, the additional oligonucleotide is a sequence used for priming a reaction by a polymerase. For example, one or more primer sequences with sequence complementarity to one or more RNAs of interest can be used to amplify the one or more RNAs of interest, thereby selectively enriching these RNAs. In some embodiments, an oligonucleotide with sequence complementarity (e.g. a probe) to the complementary strand of captured RNA (e.g., cDNA) can bind to the cDNA. For example, biotinylated oligonucleotides with sequence complementary to one or more cDNA of interest binds to the cDNA and can be selected using biotinylation-strepavidin affinity using any of a variety of methods known to the field (e.g., streptavidin or avidin beads). Other non-nucleic acid affinity moieties are known in the art, for example, 2-(4-Hydroxyphenylazo)benzoic acid (HABA).

[0325] Alternatively, one or more species of RNA can be down-selected (e.g., removed) using any of a variety of methods. For example, probes can be administered to a sample that selectively hybridize to ribosomal RNA (rRNA), thereby reducing the pool and concentration of rRNA in the sample. Subsequent application of the capture probes to the sample can result in improved capture of other types of RNA due to the reduction in non-specific RNA present in the sample.

[0326] In some embodiments, an analyte of interest includes one or more isoforms (e.g., a plurality of isoforms). In some embodiments, the plurality of isoforms includes three or more isoforms for the first genetic target. Isoforms of a genetic target refer to mRNA sequences that originate from the same genomic locus but comprise different mRNA sequences, including but not limited to transcription start sites (TSSs), protein coding DNA sequences (CDSs), and/or untranslated regions (UTRs). These differences are caused by alternative splicing, variable promoter usage, gene fusions or deletions, single nucleotide polymorphisms (SNPs), and/or other mutations or post-transcriptional modifications of specific genes. Isoforms of a genetic target may have different functional capacities due to the differences in mRNA sequence of the coding sequences and/or the cis-regulatory elements in the promoter sequences. Such alternative sequences may be recognized by alternative transcription factors and produce differential gene expression or behavior.

[0327] In some embodiments, the plurality of isoforms comprises five or more isoforms for the first genetic target. In some embodiments, the plurality of isoforms comprises 2, 3, 4, 5, 6, 7, 8, 9, 10 or more isoforms for the first genetic target. In some embodiments, the first genetic target is a gene and the plurality of isoforms are transcriptional isoforms of the first genetic target. In some embodiments, the first genetic target is a regulator element, such as a promotor, enhancer, or repressor sequence. In some embodiments, the exact genetic function of the genetic target is not known. In some embodiments, the first genetic target is an intro sequence or an exon sequence.

[0328] In some embodiments, the methods disclosed herein include obtaining the plurality of analytes, wherein the plurality of analytes comprises a first subset of analytes and second subset of analytes. Each respective sequence in the first subset of analytes maps to a first genetic target that is characterized by a plurality of isoforms. For instance, in some embodiments, the first genetic target includes a reference isoform and an alternative isoform and thus there are two isoforms. In some embodiments, there are more than two isoforms at any given genetic target. In some embodiments, there are two or more, three or more, four or more, or five or more isoforms at a genetic target. Each respective analyte in the second subset of analytes maps to an off-target portion of a reference genome. While the analytes of the second subset may also indeed map to regions of the genome that have multiple isoforms, what distinguishes the analytes of the second subset and makes them members of the second subset is that they do not map to the genetic target.

[0329] In some embodiments, the method further comprises exposing the plurality of analytes to a plurality of nucleic acid baits of length K residues, thereby forming a plurality of nucleic acid bait—analyte complexes. In some embodiments, K is between 25 and 1000. In some embodiments, K is between 50 and 500. In some embodiments, K is between 90 and 150. In some embodiments, K is between 95 and 130. In some embodiments, K is 100 or 120.

[0330] In some embodiments, each respective nucleic acid bait in the plurality of nucleic acid baits that hybridizes to an isoform in the plurality of isoforms of the genetic target (i) selectively hybridizes to a portion of a first isoform in the plurality of isoforms, or (ii) selectively hybridizes to a portion of an isoform in the plurality of isoforms, other than the first isoform, and is represented by a corresponding portion of a directed graph that is at least a threshold number of edges away (e.g., 1 edge, 2 edges, 3 edges, 4 edges) from any portion of the directed graph that represents a nucleic acid bait that selectively hybridizes to a portion of the first isoform of the genetic target as described in further detail below.

[0331] In some embodiments, the hybridization of each respective nucleic acid bait in the plurality of nucleic acid baits to an isoform in the plurality of isoforms is performed a priori. In some such embodiments, an index of candidate baits is generated by determining the length of the genetic target, the length of the respective baits K, and the desired coverage of the nucleic acid baits to the genetic target. In some such embodiments, the index of candidate baits is generated using input values provided by the user or customer. In some such embodiments, the index of candidate baits is modified by repositioning each respective nucleic acid bait by +/−10 base pairs along the genetic target. In some such embodiments, the respective attributes (e.g., melting temperature, Tm) of each respective nucleic acid bait is compared to established parameters. In some such embodiments, the established parameters for nucleic acid baits is obtained through inputs provided by the user or customer. In some embodiments, each respective nucleic acid bait in the plurality of nucleic acid baits that hybridizes to an isoform in the plurality of isoforms of the first genetic target has a Tm with respect to the isoform that is between a first threshold temperature and a second threshold temperature. In some such embodiments, the first threshold temperature is between 65° C. and 85° C. and the second threshold temperature is between 90° C. and 110° C. In some such embodiments, the first threshold temperature is 75° C. and the second threshold temperature is 100° C. In some embodiments, each respective nucleic acid bait in the plurality of nucleic acid baits that hybridizes to an isoform in the plurality of isoforms of the first genetic target that has a Tm below the first threshold temperature or above the second threshold temperature is filtered from the pool of candidate nucleic acid baits.

[0332] In some embodiments, the first isoform in the plurality of isoforms of the first genetic target is a principal isoform for the genetic target. For example, in some embodiments, the isoforms in the plurality of isoforms of the first genetic target are ranked prior to hybridization of the nucleic acid baits, where the highest ranked isoform is considered the principal isoform. In some such embodiments, isoform rank assignment is informed by annotations for known isoforms of the genetic target, where annotations are based on functional and/or evolutionary conservation of a respective isoform in the plurality of isoforms.

[0333] In some embodiments, a respective nucleic acid bait in a plurality of nucleic acid baits for a respective analyte in a plurality of analytes mapping to a first genetic target is located at a position that is at least a minimum threshold distance from the 3′ end of the respective analyte. In some such embodiments, off-target hybridization of a respective nucleic acid bait to a respective analyte can occur where there are unannotated poly-A sites or poly-A sequences present in the genomic exon and/or mRNA sequence that cause oligo-dT mispriming. As a result, in some such embodiments, the optimal position for nucleic acid bait hybridization to a corresponding analyte is located at a position that is at least a minimum threshold distance from the 3′ end. Non-limiting examples of a minimum threshold distance are from 100 to 200 base pairs (bp), from 200 to 300 bp, from 300 to 400 bp, from 400 to 500 bp, from 500 to 600 bp, from 600 to 700 bp, from 700 to 800 bp, from 800 to 900 bp, from 900 to 1000 bp, or more than 1000 bp. In some embodiments, the percentage of analytes that preferentially hybridize to nucleic acid baits at positions at least a minimum threshold distance away from the 3′ end is between 0% and 10%, between 10% and 20%, or between 20% and 30%. In addition, in some embodiments, nodes and/or edges corresponding to sequences (e.g., analytes or regions of an isoform of a first genetic target) comprising unannotated poly-A sites or poly-A sequences in the mRNA sequence are removed from the directed graph.

[0334] In some embodiments, each respective nucleic acid bait in the plurality of nucleic acid baits shares less than a threshold percentage of sequence identity to any other nucleic acid bait in the plurality of nucleic acid baits. For instance, in some embodiments, each respective nucleic acid bait in the plurality of nucleic acid baits shares less than 100 percent, less than 98 percent, less than 96 percent, less than 94 percent, less than 92 percent, less than 90 percent, less than 88 percent, less than 86 percent, less than 84 percent, less than 82 percent, less than 80, less than 70 percent, less than 60 percent, less than 50 percent, or less than 40 percent identity to any other nucleic acid bait in the plurality of nucleic acid baits. In some embodiments, the threshold percentage of sequence identity shared between each respective nucleic acid bait in the plurality of nucleic acid baits to any other nucleic acid bait in the plurality of nucleic acid baits is ten percent, twenty percent, thirty percent, or between five and fifty percent. In some embodiments, the threshold of shared sequence identity between a respective nucleic acid bait in the plurality of nucleic acid baits to any other nucleic acid bait in the plurality of nucleic acid baits determines the presence and abundance of cross-hybridization of each respective nucleic acid bait to off-target analytes.

[0335] In some embodiments, the method further comprises selectively capturing the plurality of nucleic acid bait—analyte complexes thereby filtering the plurality of analytes. In some such embodiments, the plurality of nucleic acid bait—analyte complexes are selectively captured to a solid support. In some such embodiments, the solid support comprises a bead. In some further such embodiments, each nucleic acid bait in the plurality of nucleic acid baits comprises a binding moiety. The solid support comprises a plurality of capture moieties. A respective nucleic acid bait—analyte complex is captured on the solid support through a reaction between a capture moiety in the plurality of capture moieties and the corresponding binding moiety of the respective nucleic acid bait—analyte complex. A capture moiety in the plurality of capture moieties comprises avidin and the corresponding binding moiety comprises biotin. A capture moiety in the plurality of capture moieties comprises streptavidin and the corresponding binding moiety comprises biotin. In some embodiments, the plurality of nucleic acid baits are directed to a member selected from the group consisting of: whole or partial exome capture whole or partial transcriptome capture, panel capture, targeted exon capture, anchored exome capture, anchored transcriptome capture, and tiled genomic region capture.

[0336] For example, in some such embodiments, a plurality of analytes comprised of nucleic acid analytes (e.g. RNA, mRNA, cDNA or genomic DNA) that are optionally amplified and/or library prepared with functional sequences (e.g. barcodes, spatial barcodes, UMIs, linkers, and/or sequencing adaptors) are hybridized to nucleic acid baits that have sequence complementarity to a plurality of analytes of interest. In some such embodiments, the nucleic acid baits are biotinylated. Due to the strong affinity of biotin to streptavidin or avidin, in some embodiments the nucleic acid bait—analyte complexes are captured by streptavidin-coated beads (e.g., pull-down). Due to the strong affinity of biotin to avidin, in some embodiments the nucleic acid bait
[0337] analyte complexes are captured by avidin-coated beads (e.g., pull-down). Analytes are dissociated from the captured nucleic acid bait—analyte complexes for amplification and/or sequencing analysis. In some embodiments, the capturing of the plurality of nucleic acid bait—analyte complexes occurs before amplification and/or library preparation for sequencing. In some embodiments, the capturing of the plurality of nucleic acid bait—analyte complexes occurs after amplification and/or library preparation for sequencing.

[0338] (ii) Additional Methods

[0339] Also disclosed herein are additional methods that can be combined with the panel capture methods described above. In some embodiments, the identity of one or more cells in a biological sample is determined. In some embodiments, the identity of one or more cells is annotated by a pathologist examining the sample. In some embodiments, a cell or area of a biological sample is determined to include cancer cells or not include cancer cells.

[0340] In some embodiments, one or more cells in a biological sample can be identified. In some embodiments, one or more cells in a biological sample are immune cells, For example, in some embodiments, the immune cells are one of a B-cell; a CD34+ cell; a T cell, including a CD4 T cell or a CD8 T cell; a dendritic cell; a monocyte; or a natural killer (NK) cell. In some embodiments, a biological sample is classified as having cancer cells (e.g., DCIS or invasive carcinoma); immune cells; fat, fibrous tissue, or normal glands.

[0341] In some embodiments, a one or more additional biomarkers can be detected. It is appreciated that biomarkers can be detected with or without enrichment of the target biomarker.

[0342] For example, in some instances, capture of analytes on an array can be performed indiscriminately (e.g., using a capture probe that hybridizes to a poly(A) tail of an mRNA molecule). In this instance, a biomarker can be identified after capture using methods disclosed herein (e.g., next generation sequencing methods). In some instances, bait oligonucleotides as disclosed herein that are designed to detect a biomarker can be used to enhance detection of the biomarker.

[0343] In instances in which a biomarker (i.e., an analyte) is captured on an array, sequencing of the analyte (or complement sequence) can be performed using methods known in the art, including but not limited to in situ methods as described herein.

[0344] In some embodiments, the one or more additional biomarkers are detected using any of the detection methods described herein. In some embodiments, the one or more additional biomarkers is detected using immunofluorescence. In some embodiments, the one or more additional biomarkers is detected using immunohistochemistry.

[0345] In some embodiments, disclosed herein are methods of identifying and detecting expression of a cluster of genes that are dysregulated in a breast cancer sample.

[0346] In some instances, the cluster of genes includes identifying and detecting upregulation of one or more of immunoglobulin lambda constant 2 (IGLC2), immunoglobulin heavy constant gamma 3 (IGHG3), immunoglobulin kappa constant (IGKC), immunoglobulin heavy constant gamma 1 (IGHG1), immunoglobulin lambda constant 3 (IGLC3), immunoglobulin heavy constant alpha 1 (IGHA1), Immunoglobulin Heavy Constant Gamma 2 (G2m Marker) (IGHG2), Immunoglobulin Heavy Constant Mu (IGHM), Immunoglobulin Heavy Constant Gamma 4 (G4m Marker) (IGHG4), and Joining Chain Of Multimeric IgA And IgM (JCHAIN); and downregulation of one or more of Inhibitor Of DNA Binding 3, HLH Protein (ID3), Class II Major Histocompatibility Complex Transactivator (CIITA), Cystatin F (CST7), Interferon Alpha Inducible Protein 27 Like 2 (IFI27L2), FYN Proto-Oncogene, Src Family Tyrosine Kinase (FYN), Microtubule Associated Monooxygenase, Calponin And LIM Domain Containing (MICAL1), Heme Oxygenase 1 (HMOX1), CD7 Molecule (CD7), Rho Guanine Nucleotide Exchange Factor 1 (ARHGEF1), and Complement Factor H (CFH). In some instances, this cluster is called cluster 0. In some instances, cluster 0 is detected in fibrous tissue of a breast cancer sample.

[0347] In some instances, the cluster of genes includes identifying and detecting upregulation of one or more of Metastasis Associated Lung Adenocarcinoma Transcript 1 (MALAT1), Cathepsin D (CTSD), Thymidine Phosphorylase (TYMP), SAM and HD Domain Containing Deoxynucleoside Triphosphate Triphosphohydrolase 1 (SAMHD1), Cytochrome B-245 Alpha Chain (CYBA), ISG15 Ubiquitin Like Modifier (ISG15), Complement C1q A Chain (C1QA), Ribosomal Protein S9 (RPS9), H2A.J Histone (H2AFJ), and Adipogenesis Regulatory Factor (ADIRF); and downregulation of one or more of Rho GDP Dissociation Inhibitor Alpha (ARHGDIA), Adenine Phosphoribosyltransferase (APRT), AE Binding Protein 1 (AEBP1), Plectin (PLEC), Apolipoprotein E (APOE), Fc Fragment Of IgG Receptor And Transporter (FCGRT), NADH:Ubiquinone Oxidoreductase Subunit B7 (NDUFB7), Methyl-CpG Binding Domain Protein 3 (MBD3), Elastin Microfibril Interfacer 1 (EMILIN1), and GADD45G Interacting Protein 1 (GADD45G1P1). In some instances, this cluster is called cluster 1. In some instances, cluster 1 is detected in fibrous tissue of a breast cancer sample.

[0348] In some instances, the cluster of genes includes identifying and detecting upregulation of one or more of C—X—C Motif Chemokine Ligand 14 (CXCL14), Tubulin Tyrosine Ligase Like 12 (TTLL12), GDNF Family Receptor Alpha 1 (GFRA1), Delta 4-Desaturase, Sphingolipid 1 (DEGS1), Anterior Gradient 2, Protein Disulphide Isomerase Family Member (AGR2), Acidic Residue Methyltransferase 1 (ARMT1), Cyclin D1 (CCND1), CAMP Regulated Phosphoprotein 21 (ARPP21), Carnitine 0-Acetyltransferase (CRAT), Protein Kinase CAMP-Activated Catalytic Subunit Beta (PRKACB); and downregulation of one or more of Nuclear Receptor Binding SET Domain Protein 3 (NSD3), Plasminogen Activator, Urokinase Receptor (PLAUR), Cyclin Dependent Kinase Inhibitor 2C (CDKN2C), Factor Interacting With PAPOLA And CPSF1 (FIP1L1), Transmembrane Protein 159 (TMEM159), Transmembrane Protein 141 (TMEM141), Lin-7 Homolog C, Crumbs Cell Polarity Complex Component (L1N7C), Rho Guanine Nucleotide Exchange Factor 39 (ARHGEF39), ARFGEF Family Member 3 (ARFGEF3), and Epithelial Membrane Protein 2 (EMP2). In some instances, this cluster is called cluster 2. In some instances, cluster 2 is detected in areas identified as having invasive carcinoma in a breast cancer sample.

[0349] In some instances, the cluster of genes includes identifying and detecting upregulation of one or more of Carboxypeptidase B1 (CPB1), Fc Fragment Of IgG Receptor IIIb (FCGR3B), Kelch Domain Containing 7B (KLHDC7B), Secretoglobin Family 1D Member 2 (SCGB1D2), Signal Peptide, CUB Domain And EGF Like Domain Containing 3 (SCUBE3), C—X—C Motif Chemokine Ligand 9 (CXCL9), Cytochrome C Oxidase Subunit 6C (COX6C), Complement Factor B (CFB), Secretoglobin Family 2A Member 2 (SCGB2A2), and Neuropeptide Y Receptor Y1 (NPY1R); and downregulation of one or more of ENSG00000262580 (AC087741.1), Guanylate Binding Protein 5 (GBP5), Intraflagellar Transport 27 (IFT27), Neuralized E3 Ubiquitin Protein Ligase 4 (NEURL4), Empty Spiracles Homeobox 1 (EMX1), Solute Carrier Family 13 Member 2 (SLC13A2), Family With Sequence Similarity 110 Member A (FAM110A), Signal Peptidase Complex Subunit 1 (SPCS1), Homogentisate 1,2-Dioxygenase (HGD), and Zinc Finger Protein 587 (ZNF587). In some instances, this cluster is called cluster 3. In some instances, cluster 3 is detected in areas identified as having invasive carcinoma in a breast cancer sample.

[0350] In some instances, the cluster of genes includes identifying and detecting upregulation of one or more of Cysteine Rich Secretory Protein 3 (CRISP3), SLIT And NTRK Like Family Member 6 (SLITRK6), Chromosome 6 Open Reading Frame 141 (C6orf141), V-Set Domain Containing T Cell Activation Inhibitor 1 (VTCN1), Serine Hydrolase Like 2 (SERHL2), CEA Cell Adhesion Molecule 6 (CEACAM6), ATP Binding Cassette Subfamily C Member 11 (ABCC11), Shisa Family Member 2 (SHISA2), Chromosome 2 open reading frame 54 (C2orf54), and PDZ and LIM Domain 1 (PDLIM1); and downregulation of one or more of Zinc Finger CCCH-Type Containing 12A (ZC3H12A), VPS37B Subunit Of ESCRT-I (VPS37B), Interferon Regulatory Factor 2 Binding Protein 2 (IRF2BP2), Ras Association (RalGDS/AF-6) And Pleckstrin Homology Domains 1 (RAPH1), NFKB Inhibitor Alpha (NFKBIA), Eukaryotic Translation Initiation Factor 2 Alpha Kinase 1 (EIF2AK1), Tripartite Motif Containing 33 (TRIM33), Splicing Factor Proline And Glutamine Rich (SFPQ), Coagulation Factor VII (F7), and Trafficking Protein Particle Complex 3 (TRAPPC3). In some instances, this cluster is called cluster 4. In some instances, cluster 4 is detected in areas identified as having invasive carcinoma in a breast cancer sample.

[0351] In some instances, the cluster of genes includes identifying and detecting upregulation of one or more of Long Intergenic Non-Protein Coding RNA 52 (LINC00052), Cytochrome C Oxidase Subunit 6C (COX6C), Synuclein Gamma (SNCG), WAP Four-Disulfide Core Domain 2 (WFDC2), Solute Carrier Family 39 Member 6 (SLC39A6), Microsomal Glutathione S-Transferase 1 (MGST1), Mitochondrial Coiled-Coil Domain 1 (MCCD1), Cystatin A (CSTA), Phosphodiesterase 5A (PDE5A), and Mitochondrially Encoded NADH:Ubiquinone Oxidoreductase Core Subunit 1 (MT-ND1); and downregulation of one or more of Signal Recognition Particle 14 (SRP14), Trafficking Protein Particle Complex 1 (TRAPPC1), Small Nuclear Ribonucleoprotein D3 Polypeptide (SNRPD3), Methionine Adenosyltransferase 2 (MAT2A), Solute Carrier Family 7 Member 8 (SLC7A8), RNA Polymerase II Subunit K (POLR2K), Transmembrane BAX Inhibitor Motif Containing 6 (TMBIM6), OCIA Domain Containing 1 (OCIAD1), Exosome Component 3 (EXOSC3), and Carbonic Anhydrase 1 (CA14). In some instances, this cluster is called cluster 5. In some instances, cluster 5 is detected in areas identified as having invasive carcinoma in a breast cancer sample.

[0352] In some instances, the cluster of genes includes identifying and detecting upregulation of one or more of Atypical Chemokine Receptor 1 (Duffy Blood Group) (ACKR1), Insulin Like Growth Factor Binding Protein 7 (IGFBP7), Aquaporin 1 (Colton Blood Group) (AQP1), Von Willebrand Factor (VWF), Metastasis Associated Lung Adenocarcinoma Transcript 1 (MALAT1), SPARC Like 1 (SPARCL1), Transgelin (TAGLN), C—C Motif Chemokine Ligand 21 (CCL21), Actin Alpha 2, Smooth Muscle (ACTA2), and Coiled-Coil Domain Containing 80 (CCDC₈₀); and downregulation of one or more of Cytochrome B5 Reductase 3 (CYB5R3), Plexin D1 (PLXND1), Dual Specificity Phosphatase 1 (DUSP1), Ribosomal Protein S6 (RPS6), Complement C1q A Chain (C1QA), Heart Development Protein with EGF Like Domains 1 (HEG1), ETS Proto-Oncogene 2, Transcription Factor (ETS2), A-Kinase Anchoring Protein 9 (AKAP9), Cell Division Cycle and Apoptosis Regulator 1 (CCAR1), and Tripartite Motif Containing 47 (TRIM47). In some instances, this cluster is called cluster 6. In some instances, cluster 6 is detected in fibrous tissue of a breast cancer sample.

[0353] In some instances, the cluster of genes includes identifying and detecting upregulation of one or more of Albumin (ALB), Matrix Gla Protein (MGP), ZNF350 Antisense RNA 1 (ZNF350-AS1), S100 Calcium Binding Protein G (S100G), Stanniocalcin 2 (STC2), CART Prepropeptide (CARTPT), Uncharacterized LOC102724957 (AC087379.2), Glypican 3 (GPC3), Endoplasmic Reticulum Protein 27 (ERP27), and Apolipoprotein D (APOD); and downregulation of one or more of CDV3 Homolog (CDV3), Triosephosphate Isomerase 1 (TPI1), TSPY Like 5 (TSPYL5), Phosphofructokinase, Platelet (PFKP), Cysteine Rich Transmembrane BMP Regulator 1 (CRIM1), Palmitoyl-Protein Thioesterase 1 (PPT1), ENSG00000259457 (AC100826.1), Aldolase, Fructose-Bisphosphate A (ALDOA), Leucine Rich Repeat Containing G Protein-Coupled Receptor 4 (LGR4), and Glutaredoxin 2 (GLRX2). In some instances, this cluster is called cluster 7. In some instances, cluster 7 is detected in areas identified as DCIS in a breast cancer sample.

[0354] In some instances, the cluster of genes includes identifying and detecting upregulation of one or more of Uncharacterized LOC102724957 (AC087379.2), S100 Calcium Binding Protein G (S100G), Secretoglobin Family 2A Member 2 (SCGB2A2), PGM5 Antisense RNA 1 (PGM5-AS1), Heme Binding Protein 1 (HEBP1), Adhesion Molecule With Ig Like Domain 2 (AMIGO2), PC-Esterase Domain Containing 1B (PCED1B), Secretoglobin Family 1D Member 2 (SCGB1D2), Inositol 1,4,5-Trisphosphate Receptor Type 1 (ITPR1), and Intraflagellar Transport 122 (IFT122); and downregulation of one or more of GABA Type A Receptor Associated Protein Like 1 (GABARAPL1), Glucose-6-Phosphatase Catalytic Subunit 3 (G6PC3), Inositol Polyphosphate-5-Phosphatase K (INPP5K), Stanniocalcin 2 (STC2), HEXIM P-TEFb Complex Subunit 2 (HEXIM2), Reactive Intermediate Imine Deaminase A Homolog (RIDA), LDL Receptor Related Protein 2 (LRP2), Hexokinase 2 (HK2), Interleukin 1 Receptor Type 2 (IL1R2), and Glutamic-Oxaloacetic Transaminase 2 (GOT2). In some instances, this cluster is called cluster 8. In some instances, cluster 8 is detected in areas identified as having invasive carcinoma in a breast cancer sample.

[0355] In some instances, the cluster of genes includes identifying and detecting upregulation of one or more of Albumin (ALB), Mitochondrially Encoded NADH:Ubiquinone Oxidoreductase Core Subunit 2 (MT-ND2), Mitochondrially Encoded NADH:Ubiquinone Oxidoreductase Core Subunit 1 (MT-ND1), Mitochondrially Encoded NADH:Ubiquinone Oxidoreductase Core Subunit 3 (MT-ND3), Mitochondrially Encoded ATP Synthase Membrane Subunit 6 (MT-ATP6), Mitochondrially Encoded NADH:Ubiquinone Oxidoreductase Core Subunit 4 (MT-ND4), Mitochondrially Encoded Cytochrome C Oxidase I (MT-CO1), Mitochondrially Encoded Cytochrome C Oxidase III (MT-CO3), Mitochondrially Encoded ATP Synthase Membrane Subunit 8 (MT-ATPS), Mitochondrially Encoded NADH:Ubiquinone Oxidoreductase Core Subunit 5 (MT-ND5); and downregulation of one or more of Glyoxalase I (GLO1), Abhydrolase Domain Containing 2 (ABHD2), Long Intergenic Non-Protein Coding RNA 52 (LINC00052), RAS Like Estrogen Regulated Growth Inhibitor (RERG), Stanniocalcin 2 (STC2), Metastasis Associated Lung Adenocarcinoma Transcript 1 (MALAT1), SRY-Box Transcription Factor 4 (SOX4), Carbonic Anhydrase 12 (CA12), Zinc Finger Protein 703 (ZNF703), and Mitochondrial Coiled-Coil Domain 1 (MCCD1). In some instances, this cluster is called cluster 9. In some instances, cluster 9 is detected in areas identified as DCIS in a breast cancer sample. In some instances, cluster 9 is detected in areas identified as having invasive carcinoma in a breast cancer sample. In some instances, cluster 9 is detected in areas identified as DCIS in a breast cancer sample and in areas identified as having invasive carcinoma in a breast cancer sample.

[0356] In some instances, the cluster of genes includes identifying and detecting upregulation of one or more of Long Intergenic Non-Protein Coding RNA 645 (LINC00645), Solute Carrier Family 30 Member 8 (SLC30A8), Mucin 5B, Oligomeric Mucus/Gel-Forming (MUC5B), Collectin Subfamily Member 12 (COLEC12), Parvalbumin (PVALB), Carboxypeptidase B1 (CPB1), Exocyst Complex Component 2 (EXOC2), ENSG00000278621 (AC037198.2), V-Set And Transmembrane Domain Containing 2A (VSTM2A), and Fibrous Sheath Interacting Protein 1 (FSIP1); and downregulation of one or more of Kinesin Family Member 16B (KIF16B), Spermatogenesis Associated 20 (SPATA20), Tetraspanin 9 (TSPAN9), Calcium Voltage-Gated Channel Auxiliary Subunit Beta 3 (CACNB3), Calcium/Calmodulin Dependent Protein Kinase II Inhibitor 1 (CAMK2N1), Intraflagellar Transport 27 (IFT27), Neuralized E3 Ubiquitin Protein Ligase 1 (NEURL1), Tripartite Motif Containing 3 (TRIM3), Solute Carrier Family 46 Member 1 (SLC46A1), and Enoyl-CoA Delta Isomerase 2 (ECI2). In some instances, this cluster is called cluster 10. In some instances, cluster 10 is detected in areas identified as having invasive carcinoma in a breast cancer sample.

[0357] In some instances, the cluster of genes includes identifying and detecting upregulation of one or more of Matrix Gla Protein (MGP), Trefoil Factor 1 (TFF1), Keratin 14 (KRT14), 5100 Calcium Binding Protein A9 (S100A9), Keratin 17 (KRT17), S100 Calcium Binding Protein G (S100G), 5100 Calcium Binding Protein A2 (S100A2), ZNF350 Antisense RNA 1 (ZNF350-AS1), Keratin 5 (KRT5), and 5100 Calcium Binding Protein A8 (S100A8); and downregulation of one or more of MN1 Proto-Oncogene, Transcriptional Regulator (MN1), Transmembrane Protein 45A (TMEM45A), Dynein Axonemal Light Intermediate Chain 1 (DNALI1), Chromosome 3 Open Reading Frame 14 (C3orf14), TSR1 Ribosome Maturation Factor (TSR1), ENSG00000233461 (AL445524.1) Semaphorin 3C (SEMA3C), NADH:Ubiquinone Oxidoreductase Complex Assembly Factor 2 (NDUFAF2), Achaete-Scute Family BHLH Transcription Factor 1 (ASCL1), and Grainyhead Like Transcription Factor 2 (GRHL2). In some instances, this cluster is called cluster 11. In some instances, cluster 11 is detected in areas identified as DCIS in a breast cancer sample.

[0358] In some instances, the cluster of genes includes identifying and detecting upregulation of one or more of Serum Amyloid A1 (SAA1), Fatty Acid Binding Protein 4 (FABP4), Glutathione Peroxidase 3 (GPX3), Pleckstrin Homology Domain Containing A8 (PIP), Alcohol Dehydrogenase 1B (Class I), Beta Polypeptide (ADH1B), Perilipin 1 (PLIN1), Collagen Type II Alpha 1 Chain (COL2A1), SH3 Domain Binding Glutamate Rich Protein Like (SH3BGRL), Adiponectin, C1Q And Collagen Domain Containing (ADIPOQ), and Perilipin 4 (PLIN4); and downregulation of one or more of Heterogeneous Nuclear Ribonucleoprotein A0 (HNRNPA0), Ribosomal Protein L11 (RPL11), Solute Carrier Family 40 Member 1 (SLC40A1), Ribosomal Protein Lateral Stalk Subunit P2 (RPLP2), CTD Small Phosphatase 2 (CTDSP2), Sortilin Related Receptor 1 (SORL1), Ribosomal Protein L31 (RPL31), Endothelin Converting Enzyme 1 (ECE1), Secreted Frizzled Related Protein 2 (SFRP2), and Cyclin D1 (CCND1). In some instances, this cluster is called cluster 12. In some instances, cluster 12 is detected in areas identified as having invasive carcinoma in a breast cancer sample.

[0359] In some instances, the cluster of genes includes identifying and detecting upregulation of one or more of Phosphodiesterase 5A (PDE5A), Matrix Gla Protein (MGP), WAP Four-Disulfide Core Domain 2 (WFDC2), MRPS30 Divergent Transcript (MRPS30-DT), RNA Binding Motif Protein 20 (RBM20), Mitochondrial Ribosomal Protein S30 (MRPS30), Autocrine Motility Factor Receptor (AMFR), Stanniocalcin 2 (STC2), Potassium Voltage-Gated Channel Subfamily E Regulatory Subunit 4 (KCNE4), and Discoidin Domain Receptor Tyrosine Kinase 1 (DDR1); and downregulation of one or more of Methylcrotonoyl-CoA Carboxylase 1 (MCCC1), Pyruvate Dehydrogenase Phosphatase Regulatory Subunit (PDPR), Archaelysin Family Metallopeptidase 2 (AMZ2), Chromosome 5 Open Reading Frame 15 (C5orf15), TBC1 Domain Family Member 9 (TBC1D9), SRSF Protein Kinase 1 (SRPK1), Long Intergenic Non-Protein Coding RNA 1488 (LINC01488), Tumor Susceptibility 101 (TSG101), Cytochrome C Oxidase Assembly Factor 3 (COA3), and NFKB Inhibitor Epsilon (NFKBIE). In some instances, this cluster is called cluster 13. In some instances, cluster 13 is detected in areas identified as having invasive carcinoma in a breast cancer sample.

[0360] In some embodiments, disclosed herein are methods of identifying and/or diagnosing a subject as having breast cancer, wherein the method comprises (a) determining an abundance of CENPW, or a byproduct or precursor or degradation product thereof; and (b) identifying a subject having increased abundance of CENPW, or a byproduct or precursor or degradation product thereof in the biological sample as compared to reference level(s) (e.g., presence or abundance) of the one or more of CENPW, or a byproduct or precursor or degradation product thereof as having breast cancer. In some embodiments, the breast cancer is breast cancer carcinoma.

[0361] In some embodiments, disclosed herein are methods of identifying and/or diagnosing a subject as having breast cancer, wherein the method comprises (a) determining an abundance of A2ML1, or a byproduct or precursor or degradation product thereof; and (b) identifying a subject having increased abundance of A2ML1, or a byproduct or precursor or degradation product thereof in the biological sample as compared to reference level(s) (e.g., presence or abundance) of the one or more of A2ML1, or a byproduct or precursor or degradation product thereof as having breast cancer. In some embodiments, the breast cancer is breast cancer carcinoma.

[0362] In some embodiments, disclosed herein are methods of identifying and/or diagnosing a subject as having breast cancer, wherein the method comprises (a) determining an abundance of VLDLR, or a byproduct or precursor or degradation product thereof; and (b) identifying a subject having increased abundance of VLDLR, or a byproduct or precursor or degradation product thereof in the biological sample as compared to reference level(s) (e.g., presence or abundance) of the one or more of VLDLR, or a byproduct or precursor or degradation product thereof as having breast cancer. In some embodiments, the breast cancer is breast cancer carcinoma.

[0363] In some embodiments, disclosed herein are methods of identifying and/or diagnosing a subject as having breast cancer, wherein the method comprises (a) determining an abundance of SCRG1, or a byproduct or precursor or degradation product thereof; and (b) identifying a subject having increased abundance of SCRG1, or a byproduct or precursor or degradation product thereof in the biological sample as compared to reference level(s) (e.g., presence or abundance) of the one or more of SCRG1, or a byproduct or precursor or degradation product thereof as having breast cancer. In some embodiments, the breast cancer is breast cancer carcinoma.

[0364] In some embodiments, disclosed herein are methods of identifying and/or diagnosing a subject as having breast cancer, wherein the method comprises (a) determining an abundance of RCL1, or a byproduct or precursor or degradation product thereof; and (b) identifying a subject having increased abundance of RCL1, or a byproduct or precursor or degradation product thereof in the biological sample as compared to reference level(s) (e.g., presence or abundance) of the one or more of RCL1, or a byproduct or precursor or degradation product thereof as having breast cancer. In some embodiments, the breast cancer is breast cancer carcinoma.

[0365] In some embodiments, disclosed herein are methods of identifying and/or diagnosing a subject as having breast cancer, wherein the method comprises (a) determining an abundance of FABP7, or a byproduct or precursor or degradation product thereof; and (b) identifying a subject having increased abundance of FABP7, or a byproduct or precursor or degradation product thereof in the biological sample as compared to reference level(s) (e.g., presence or abundance) of the one or more of FABP7, or a byproduct or precursor or degradation product thereof as having breast cancer. In some embodiments, the breast cancer is breast cancer carcinoma.

[0366] In some embodiments, disclosed herein are methods of identifying and/or diagnosing a subject as having breast cancer, wherein the method comprises (a) determining an abundance of CCNE1, or a byproduct or precursor or degradation product thereof; and (b) identifying a subject having increased abundance of CCNE1, or a byproduct or precursor or degradation product thereof in the biological sample as compared to reference level(s) (e.g., presence or abundance) of the one or more of CCNE1, or a byproduct or precursor or degradation product thereof as having breast cancer. In some embodiments, the breast cancer is breast cancer carcinoma.

[0367] In some embodiments, disclosed herein are methods of identifying and/or diagnosing a subject as having breast cancer, wherein the method comprises (a) determining an abundance of MIEN1, or a byproduct or precursor or degradation product thereof; and (b) identifying a subject having increased abundance of MIEN1, or a byproduct or precursor or degradation product thereof in the biological sample as compared to reference level(s) (e.g., presence or abundance) of the one or more of MIEN1, or a byproduct or precursor or degradation product thereof as having breast cancer. In some embodiments, the breast cancer is breast cancer carcinoma.

[0368] In some embodiments, disclosed herein are methods of identifying and/or diagnosing a subject as having breast cancer, wherein the method comprises (a) determining an abundance of CDC37L1, or a byproduct or precursor or degradation product thereof; and (b) identifying a subject having increased abundance of CDC37L1, or a byproduct or precursor or degradation product thereof in the biological sample as compared to reference level(s) (e.g., presence or abundance) of the one or more of CDC37L1, or a byproduct or precursor or degradation product thereof as having breast cancer. In some embodiments, the breast cancer is breast cancer carcinoma.

[0369] In some embodiments, disclosed herein are methods of identifying and/or diagnosing a subject as having breast cancer, wherein the method comprises (a) determining an abundance of ERMP1, or a byproduct or precursor or degradation product thereof; and (b) identifying a subject having increased abundance of ERMP1, or a byproduct or precursor or degradation product thereof in the biological sample as compared to reference level(s) (e.g., presence or abundance) of the one or more of ERMP1, or a byproduct or precursor or degradation product thereof as having breast cancer. In some embodiments, the breast cancer is breast cancer carcinoma.

[0370] In some embodiments, disclosed herein are methods of identifying and/or diagnosing a subject as having breast cancer, wherein the method comprises (a) determining an abundance of TNFSF10, or a byproduct or precursor or degradation product thereof; and (b) identifying a subject having increased abundance of TNFSF10, or a byproduct or precursor or degradation product thereof in the biological sample as compared to reference level(s) (e.g., presence or abundance) of the one or more of TNFSF10, or a byproduct or precursor or degradation product thereof as having breast cancer. In some embodiments, the breast cancer is breast cancer carcinoma.

[0371] In some embodiments, disclosed herein are methods of identifying and/or diagnosing a subject as having breast cancer, wherein the method comprises (a) determining an abundance of ACTG2, or a byproduct or precursor or degradation product thereof; and (b) identifying a subject having increased abundance of ACTG2, or a byproduct or precursor or degradation product thereof in the biological sample as compared to reference level(s) (e.g., presence or abundance) of the one or more of ACTG2, or a byproduct or precursor or degradation product thereof as having breast cancer. In some embodiments, the breast cancer is DCIS.

[0372] In some embodiments, disclosed herein are methods of identifying and/or diagnosing a subject as having breast cancer, wherein the method comprises (a) determining an abundance of DMKN, or a byproduct or precursor or degradation product thereof; and (b) identifying a subject having increased abundance of DMKN, or a byproduct or precursor or degradation product thereof in the biological sample as compared to reference level(s) (e.g., presence or abundance) of the one or more of DMKN, or a byproduct or precursor or degradation product thereof as having breast cancer. In some embodiments, the breast cancer is DCIS.

[0373] In some embodiments, disclosed herein are methods of identifying and/or diagnosing a subject as having breast cancer, wherein the method comprises (a) determining an abundance of CALML3, or a byproduct or precursor or degradation product thereof; and (b) identifying a subject having increased abundance of CALML3, or a byproduct or precursor or degradation product thereof in the biological sample as compared to reference level(s) (e.g., presence or abundance) of the one or more of CALML3, or a byproduct or precursor or degradation product thereof as having breast cancer. In some embodiments, the breast cancer is DCIS.

[0374] In some embodiments, disclosed herein are methods of identifying and/or diagnosing a subject as having breast cancer, wherein the method comprises (a) determining an abundance of COL17A1, or a byproduct or precursor or degradation product thereof; and (b) identifying a subject having increased abundance of COL17A1, or a byproduct or precursor or degradation product thereof in the biological sample as compared to reference level(s) (e.g., presence or abundance) of the one or more of COL17A1, or a byproduct or precursor or degradation product thereof as having breast cancer. In some embodiments, the breast cancer is DCIS.

[0375] In some embodiments, disclosed herein are methods of identifying and/or diagnosing a subject as having breast cancer, wherein the method comprises (a) determining an abundance of MAGED1, or a byproduct or precursor or degradation product thereof; and (b) identifying a subject having increased abundance of MAGED1, or a byproduct or precursor or degradation product thereof in the biological sample as compared to reference level(s) (e.g., presence or abundance) of the one or more of MAGED1, or a byproduct or precursor or degradation product thereof as having breast cancer. In some embodiments, the breast cancer is DCIS.

[0376] In some embodiments, disclosed herein are methods of identifying and/or diagnosing a subject as having breast cancer, wherein the method comprises (a) determining an abundance of PTN, or a byproduct or precursor or degradation product thereof; and (b) identifying a subject having increased abundance of PTN, or a byproduct or precursor or degradation product thereof in the biological sample as compared to reference level(s) (e.g., presence or abundance) of the one or more of PTN, or a byproduct or precursor or degradation product thereof as having breast cancer. In some embodiments, the breast cancer is DCIS.

[0377] In some embodiments, disclosed herein are methods of identifying and/or diagnosing a subject as having breast cancer, wherein the method comprises (a) determining an abundance of TMEM98, or a byproduct or precursor or degradation product thereof; and (b) identifying a subject having increased abundance of TMEM98, or a byproduct or precursor or degradation product thereof in the biological sample as compared to reference level(s) (e.g., presence or abundance) of the one or more of TMEM98, or a byproduct or precursor or degradation product thereof as having breast cancer. In some embodiments, the breast cancer is DCIS.

[0378] In some embodiments, disclosed herein are methods of identifying and/or diagnosing a subject as having breast cancer, wherein the method comprises (a) determining an abundance of LY6D, or a byproduct or precursor or degradation product thereof; and (b) identifying a subject having increased abundance of LY6D, or a byproduct or precursor or degradation product thereof in the biological sample as compared to reference level(s) (e.g., presence or abundance) of the one or more of LY6D, or a byproduct or precursor or degradation product thereof as having breast cancer. In some embodiments, the breast cancer is DCIS.

[0379] In some embodiments, disclosed herein are methods of identifying and/or diagnosing a subject as having breast cancer, wherein the method comprises (a) determining an abundance of TNC, or a byproduct or precursor or degradation product thereof; and (b) identifying a subject having increased abundance of TNC, or a byproduct or precursor or degradation product thereof in the biological sample as compared to reference level(s) (e.g., presence or abundance) of the one or more of TNC, or a byproduct or precursor or degradation product thereof as having breast cancer. In some embodiments, the breast cancer is DCIS.

[0380] In some embodiments, disclosed herein are methods of identifying and/or diagnosing a subject as having breast cancer, wherein the method comprises (a) determining an abundance of RTN4IP1, or a byproduct or precursor or degradation product thereof; and (b) identifying a subject having increased abundance of RTN4IP1, or a byproduct or precursor or degradation product thereof in the biological sample as compared to reference level(s) (e.g., presence or abundance) of the one or more of RTN4IP1, or a byproduct or precursor or degradation product thereof as having breast cancer. In some embodiments, the breast cancer is DCIS.

[0381] In some embodiments, disclosed herein are methods of identifying and/or diagnosing a subject as having breast cancer, wherein the method comprises (a) determining an abundance of ALB, or a byproduct or precursor or degradation product thereof; and (b) identifying a subject having increased abundance of ALB, or a byproduct or precursor or degradation product thereof in the biological sample as compared to reference level(s) (e.g., presence or abundance) of the one or more of ALB, or a byproduct or precursor or degradation product thereof as having breast cancer. In some embodiments, ALB is overexpressed in DCIS.

[0382] In some embodiments, disclosed herein are methods of identifying and/or diagnosing a subject as having breast cancer, wherein the method comprises (a) determining an abundance of CRISP3, or a byproduct or precursor or degradation product thereof; and (b) identifying a subject having increased abundance of CRISP3, or a byproduct or precursor or degradation product thereof in the biological sample as compared to reference level(s) (e.g., presence or abundance) of the one or more of CRISP3, or a byproduct or precursor or degradation product thereof as having breast cancer. In some embodiments, CRISP3 is overexpressed in invasive carcinoma (IC).

[0383] In some embodiments, disclosed herein are methods of identifying and/or diagnosing a subject as having breast cancer, wherein the method comprises (a) determining an abundance of IGLC2, or a byproduct or precursor or degradation product thereof; and (b) identifying a subject having increased abundance of IGLC2, or a byproduct or precursor or degradation product thereof in the biological sample as compared to reference level(s) (e.g., presence or abundance) of the one or more of IGLC2, or a byproduct or precursor or degradation product thereof as having breast cancer. In some embodiments, IGLC2 is overexpressed in fibrous tissue.

[0384] In some embodiments, disclosed herein are methods of identifying and/or diagnosing a subject as having breast cancer, wherein the method comprises (a) determining an abundance of IGHG3, or a byproduct or precursor or degradation product thereof; and (b) identifying a subject having increased abundance of IGHG3, or a byproduct or precursor or degradation product thereof in the biological sample as compared to reference level(s) (e.g., presence or abundance) of the one or more of IGHG3, or a byproduct or precursor or degradation product thereof as having breast cancer. In some embodiments, IGHG3 is overexpressed in fibrous tissue.

[0385] In some embodiments, disclosed herein are methods of identifying and/or diagnosing a subject as having breast cancer, wherein the method comprises (a) determining an abundance of IGKC, or a byproduct or precursor or degradation product thereof; and (b) identifying a subject having increased abundance of IGKC, or a byproduct or precursor or degradation product thereof in the biological sample as compared to reference level(s) (e.g., presence or abundance) of the one or more of IGKC, or a byproduct or precursor or degradation product thereof as having breast cancer. In some embodiments, IGKC is overexpressed in fibrous tissue.

[0386] In some embodiments, disclosed herein are methods of identifying and/or diagnosing a subject as having breast cancer, wherein the method comprises (a) determining an abundance of CXCL14, or a byproduct or precursor or degradation product thereof; and (b) identifying a subject having increased abundance of CXCL14, or a byproduct or precursor or degradation product thereof in the biological sample as compared to reference level(s) (e.g., presence or abundance) of the one or more of CXCL14, or a byproduct or precursor or degradation product thereof as having breast cancer. In some embodiments, CXCL14 is overexpressed in invasive carcinoma.

[0387] In some embodiments, disclosed herein are methods of identifying and/or diagnosing a subject as having breast cancer, wherein the method comprises (a) determining an abundance of IGHG1, or a byproduct or precursor or degradation product thereof; and (b) identifying a subject having increased abundance of IGHG1, or a byproduct or precursor or degradation product thereof in the biological sample as compared to reference level(s) (e.g., presence or abundance) of the one or more of IGHG1, or a byproduct or precursor or degradation product thereof as having breast cancer. In some embodiments, IGHG1 is overexpressed in fibrous tissue.

[0388] In some embodiments, disclosed herein are methods of identifying and/or diagnosing a subject as having breast cancer, wherein the method comprises (a) determining an abundance of IGLC3, or a byproduct or precursor or degradation product thereof; and (b) identifying a subject having increased abundance of IGLC3, or a byproduct or precursor or degradation product thereof in the biological sample as compared to reference level(s) (e.g., presence or abundance) of the one or more of IGLC3, or a byproduct or precursor or degradation product thereof as having breast cancer. In some embodiments, IGLC3 is overexpressed in fibrous tissue.

[0389] In some embodiments, disclosed herein are methods of identifying and/or diagnosing a subject as having breast cancer, wherein the method comprises (a) determining an abundance of MGP, or a byproduct or precursor or degradation product thereof; and (b) identifying a subject having increased abundance of MGP, or a byproduct or precursor or degradation product thereof in the biological sample as compared to reference level(s) (e.g., presence or abundance) of the one or more of MGP, or a byproduct or precursor or degradation product thereof as having breast cancer. In some embodiments, the MGP is expressed in DCIS.

[0390] In some embodiments, disclosed herein are methods of identifying and/or diagnosing a subject as having breast cancer, wherein the method comprises (a) determining an abundance of SLITRK6, or a byproduct or precursor or degradation product thereof; and (b) identifying a subject having increased abundance of SLITRK6, or a byproduct or precursor or degradation product thereof in the biological sample as compared to reference level(s) (e.g., presence or abundance) of the one or more of SLITRK6, or a byproduct or precursor or degradation product thereof as having breast cancer. In some embodiments, SLITRK6 is overexpressed in invasive carcinoma.

[0391] In some embodiments, disclosed herein are methods of identifying and/or diagnosing a subject as having breast cancer, wherein the method comprises (a) determining an abundance of CPB1, or a byproduct or precursor or degradation product thereof; and (b) identifying a subject having increased abundance of CPB1, or a byproduct or precursor or degradation product thereof in the biological sample as compared to reference level(s) (e.g., presence or abundance) of the one or more of CPB1, or a byproduct or precursor or degradation product thereof as having breast cancer. In some embodiments, CPB1 is overexpressed in invasive carcinoma.

[0392] In some embodiments, disclosed herein are methods of identifying and/or diagnosing a subject as having breast cancer, wherein the method comprises (a) determining an abundance of IGHA1, or a byproduct or precursor or degradation product thereof; and (b) identifying a subject having increased abundance of IGHA1, or a byproduct or precursor or degradation product thereof in the biological sample as compared to reference level(s) (e.g., presence or abundance) of the one or more of IGHA1, or a byproduct or precursor or degradation product thereof as having breast cancer. In some embodiments, IGHA1 is overexpressed in fibrous tissue.

[0393] In some embodiments, disclosed herein are methods of identifying and/or diagnosing a subject as having breast cancer, wherein the method comprises (a) determining an abundance of SRP14, or a byproduct or precursor or degradation product thereof; and (b) identifying a subject having increased abundance of SRP14, or a byproduct or precursor or degradation product thereof in the biological sample as compared to reference level(s) (e.g., presence or abundance) of the one or more of SRP14, or a byproduct or precursor or degradation product thereof as having breast cancer. In some embodiments, SRP14 is underexpressed in invasive carcinoma (IC).

[0394] In some embodiments, disclosed herein are methods of identifying and/or diagnosing a subject as having breast cancer, wherein the method comprises (a) determining an abundance of MCCC1, or a byproduct or precursor or degradation product thereof; and (b) identifying a subject having increased abundance of MCCC1, or a byproduct or precursor or degradation product thereof in the biological sample as compared to reference level(s) (e.g., presence or abundance) of the one or more of MCCC1, or a byproduct or precursor or degradation product thereof as having breast cancer. In some embodiments, MCCC1 is underexpressed in invasive carcinoma (IC).

[0395] In some embodiments, disclosed herein are methods of identifying and/or diagnosing a subject as having breast cancer, wherein the method comprises (a) determining an abundance of CDV3, or a byproduct or precursor or degradation product thereof; and (b) identifying a subject having increased abundance of CDV3, or a byproduct or precursor or degradation product thereof in the biological sample as compared to reference level(s) (e.g., presence or abundance) of the one or more of CDV3, or a byproduct or precursor or degradation product thereof as having breast cancer. In some embodiments, CDV3 is underexpressed in DCIS.

[0396] In some embodiments, disclosed herein are methods of identifying and/or diagnosing a subject as having breast cancer, wherein the method comprises (a) determining an abundance of KIF16B, or a byproduct or precursor or degradation product thereof; and (b) identifying a subject having increased abundance of KIF16B, or a byproduct or precursor or degradation product thereof in the biological sample as compared to reference level(s) (e.g., presence or abundance) of the one or more of KIF16B, or a byproduct or precursor or degradation product thereof as having breast cancer. In some embodiments, KIF16B is underexpressed in invasive carcinoma (IC).

[0397] In some embodiments, disclosed herein are methods of identifying and/or diagnosing a subject as having breast cancer, wherein the method comprises (a) determining an abundance of ID3, or a byproduct or precursor or degradation product thereof; and (b) identifying a subject having increased abundance of ID3, or a byproduct or precursor or degradation product thereof in the biological sample as compared to reference level(s) (e.g., presence or abundance) of the one or more of ID3, or a byproduct or precursor or degradation product thereof as having breast cancer. In some embodiments, ID3 is underexpressed in fibrous tissue.

[0398] In some embodiments, disclosed herein are methods of identifying and/or diagnosing a subject as having breast cancer, wherein the method comprises (a) determining an abundance of ZC3H12A, or a byproduct or precursor or degradation product thereof; and (b) identifying a subject having increased abundance of ZC3H12A, or a byproduct or precursor or degradation product thereof in the biological sample as compared to reference level(s) (e.g., presence or abundance) of the one or more of ZC3H12A, or a byproduct or precursor or degradation product thereof as having breast cancer. In some embodiments, ZC3H12A is underexpressed in invasive carcinoma (IC).

[0399] In some embodiments, disclosed herein are methods of identifying and/or diagnosing a subject as having breast cancer, wherein the method comprises (a) determining an abundance of TRAPPC1, or a byproduct or precursor or degradation product thereof; and (b) identifying a subject having increased abundance of TRAPPC1, or a byproduct or precursor or degradation product thereof in the biological sample as compared to reference level(s) (e.g., presence or abundance) of the one or more of TRAPPC1, or a byproduct or precursor or degradation product thereof as having breast cancer. In some embodiments, TRAPPC1 is underexpressed in invasive carcinoma (IC).

[0400] In some embodiments, disclosed herein are methods of identifying and/or diagnosing a subject as having breast cancer, wherein the method comprises (a) determining an abundance of NSD3, or a byproduct or precursor or degradation product thereof; and (b) identifying a subject having increased abundance of NSD3, or a byproduct or precursor or degradation product thereof in the biological sample as compared to reference level(s) (e.g., presence or abundance) of the one or more of NSD3, or a byproduct or precursor or degradation product thereof as having breast cancer. In some embodiments, NSD3 is underexpressed in invasive carcinoma (IC).

[0401] In some embodiments, disclosed herein are methods of identifying and/or diagnosing a subject as having breast cancer, wherein the method comprises (a) determining an abundance of HNRNPA01, or a byproduct or precursor or degradation product thereof; and (b) identifying a subject having increased abundance of HNRNPA01, or a byproduct or precursor or degradation product thereof in the biological sample as compared to reference level(s) (e.g., presence or abundance) of the one or more of HNRNPA01, or a byproduct or precursor or degradation product thereof as having breast cancer. In some embodiments, the HNRNPA01 is underexpressed in invasive carcinoma (IC).

[0402] In some embodiments, disclosed herein are methods of identifying and/or diagnosing a subject as having breast cancer, wherein the method comprises (a) determining an abundance of SPATA20, or a byproduct or precursor or degradation product thereof; and (b) identifying a subject having increased abundance of SPATA20, or a byproduct or precursor or degradation product thereof in the biological sample as compared to reference level(s) (e.g., presence or abundance) of the one or more of SPATA20, or a byproduct or precursor or degradation product thereof as having breast cancer. In some embodiments, SPATA20 is underexpressed in invasive carcinoma (IC).

[0403] In some embodiments, disclosed herein are methods of identifying and/or diagnosing a subject as having breast cancer, wherein the method comprises (a) determining an abundance of PDPR, or a byproduct or precursor or degradation product thereof; and (b) identifying a subject having increased abundance of PDPR, or a byproduct or precursor or degradation product thereof in the biological sample as compared to reference level(s) (e.g., presence or abundance) of the one or more of PDPR, or a byproduct or precursor or degradation product thereof as having breast cancer. In some embodiments, PDPR is underexpressed in invasive carcinoma (IC).

[0404] In some embodiments, disclosed herein are methods of identifying and/or diagnosing a subject as having breast cancer, wherein the method comprises (a) determining an abundance of GABARAPL1, or a byproduct or precursor or degradation product thereof; and (b) identifying a subject having increased abundance of GABARAPL1, or a byproduct or precursor or degradation product thereof in the biological sample as compared to reference level(s) (e.g., presence or abundance) of the one or more of GABARAPL1, or a byproduct or precursor or degradation product thereof as having breast cancer. In some embodiments, GABARAPL1 is underexpressed in invasive carcinoma (IC).

[0405] In some embodiments, a reference abundance (e.g., amount of transcript) is taken from a sample whose transcript abundance is measured as the amount a transcript (e.g., mRNA) from a sample. In some embodiments, the sample is from a different, non-cancerous location in a tissue sample. In some embodiments, reference sample is from a similar tissue obtained from a subject not identified or suspected of having breast cancer. In some embodiments, a reference sample is taken from a sample that is from a cancerous location in a tissue sample. In some embodiments, the reference abundance or presence of a transcript is from a cancerous sample whose abundance is known. In this instance, the known abundance of the transcript is from the cancerous sample can be used as a reference against a test sample.

[0406] In some embodiments, the methods disclosed herein include confirming a diagnosis of breast cancer in the subject by obtaining an image of the subject's breast. In some embodiments, the methods disclosed herein include administering a treatment to the breast cancer based on the results of the diagnostic test and/or based on imaging. For example, a subject identified as having breast cancer can be treated with one or more of an endocrine therapy, chemotherapy a hormonal therapy, or a surgical resection. In some embodiments, the endocrine therapy includes tamoxifen, raloxifene, megestrol, or toremifene. In some embodiments, the subject is treated with an aromatase inhibitor such as anastrozole, letrozole, or exemestane. In some embodiments, the chemotherapy is adjuvant chemotherapy. In some embodiments, the chemotherapy is neoadjuvant chemotherapy such as a taxane derivative, such as docetaxel and/or paclitaxel, and/or other anti-cancer agents, such as, members of the anthracycline class of anti-cancer agents, doxorubicin, or topoisomerase inhibitors. In some embodiments, the surgical resection is surgery for breast tissue and/or lymph node tissue. In some embodiments, the breast tissue surgery is selected from the group comprising lumpectomy, quadrantectomy, partial mastectomy, segmental mastectomy, complete mastectomy, and the lymph node tissue surgery is selected from the group consisting of sentinel lymph node biopsy and axillary lymph node dissection.

[0407] In some embodiments, disclosed herein are methods of identifying a subject as having an increased likelihood of developing breast cancer, wherein the method comprises (a) determining an abundance of one or more of (1) CENPW, or a byproduct or precursor or degradation product thereof; (2) A2ML1, or a byproduct or precursor or degradation product thereof; (3) VLDLR, or a byproduct or precursor or degradation product thereof; (4) SCRG1, or a byproduct or precursor or degradation product thereof; (5) RCL1, or a byproduct or precursor or degradation product thereof; (6) FABP7, or a byproduct or precursor or degradation product thereof; (7) CCNE1, or a byproduct or precursor or degradation product thereof; (8) MIEN1, or a byproduct or precursor or degradation product thereof; (9) CDC37L1, or a byproduct or precursor or degradation product thereof; (10) ERMP1, or a byproduct or precursor or degradation product thereof; (11) TNFSF10, or a byproduct or precursor or degradation product thereof; (12) ACTG2, or a byproduct or precursor or degradation product thereof; (13) DMKN, or a byproduct or precursor or degradation product thereof; (14) CALML3, or a byproduct or precursor or degradation product thereof; (15) COL17A1, or a byproduct or precursor or degradation product thereof; (16) MAGED1, or a byproduct or precursor or degradation product thereof; (17) PTN, or a byproduct or precursor or degradation product thereof; (18) TMEM98, or a byproduct or precursor or degradation product thereof; (19) LY6D, or a byproduct or precursor or degradation product thereof; (20) TNC, or a byproduct or precursor or degradation product thereof; and (21) RTN4IP1, or a byproduct or precursor or degradation product thereof; and (b) identifying a subject having increased abundance of one or more of (1)-(21), in the biological sample as compared to reference level(s) (e.g., presence or abundance) of the one or more of (1)-(21), as having an increased likelihood of developing breast cancer.

[0408] In some embodiments, disclosed herein are methods of identifying a subject as having an increased likelihood of developing breast cancer, wherein the method comprises (a) determining an abundance of one or more of (1) ALB, or a byproduct or precursor or degradation product thereof; (2) CRISP3, or a byproduct or precursor or degradation product thereof; (3) IGLC2, or a byproduct or precursor or degradation product thereof; (4) IGHG3, or a byproduct or precursor or degradation product thereof; (5) IGKC, or a byproduct or precursor or degradation product thereof; (6) CXCL14, or a byproduct or precursor or degradation product thereof; (7) IGHGL, or a byproduct or precursor or degradation product thereof; (8) IGLC3, or a byproduct or precursor or degradation product thereof; (9) MGP, or a byproduct or precursor or degradation product thereof; (10) SLITRK6, or a byproduct or precursor or degradation product thereof; (11) CPB1, or a byproduct or precursor or degradation product thereof; (12) IGHA1, or a byproduct or precursor or degradation product thereof; and (b) identifying a subject having increased abundance of one or more of (1)-(12), in the biological sample as compared to reference level(s) (e.g., presence or abundance) of the one or more of (1)-(12), as having an increased likelihood of developing breast cancer.

[0409] In some embodiments, disclosed herein are methods of identifying a subject as having an increased likelihood of developing breast cancer, wherein the method comprises (a) determining an abundance of one or more of the genes in cluster 0, cluster 1, cluster 2, cluster 3, cluster 4, cluster 5, cluster 6, cluster 7, cluster 8, cluster 9, cluster 10, cluster 11, cluster 12, cluster 13 as disclosed in Section VII(b)(ii) herein. In some instance, the methods further include identifying a subject having dysregulated abundance of one or more of clusters 0-13, in the biological sample as compared to reference level(s) (e.g., presence or abundance) of the one or more of clusters 0-13, as having an increased likelihood of developing breast cancer.

[0410] In some embodiments, disclosed herein are methods of identifying a subject as having an increased likelihood of developing breast cancer, wherein the method comprises (a) determining an abundance of one or more of (13) SRP14, or a byproduct or precursor or degradation product thereof; (14) MCCC1, or a byproduct or precursor or degradation product thereof; (15) CDV3, or a byproduct or precursor or degradation product thereof; (16) KIF16B, or a byproduct or precursor or degradation product thereof; (17) ID3, or a byproduct or precursor or degradation product thereof; (18) ZC3H12A, or a byproduct or precursor or degradation product thereof; (19) TRAPPC1, or a byproduct or precursor or degradation product thereof; (20) NSD3, or a byproduct or precursor or degradation product thereof; (21) HNRNPA01, or a byproduct or precursor or degradation product thereof; (22) SPATA20, or a byproduct or precursor or degradation product thereof; (23) PDPR, or a byproduct or precursor or degradation product thereof; and (24) GABARAPL1, or a byproduct or precursor or degradation product thereof; and (b) identifying a subject having decreased abundance of one or more of (13)-(24), in the biological sample as compared to reference level(s) (e.g., presence or abundance) of the one or more of (13)-(24), as having an increased likelihood of developing breast cancer. In some embodiments, the method further comprises monitoring the identified subject for the development of symptoms of breast cancer. In some embodiments, the method further comprises recording in the identified subject's clinical record that the subject has an increased likelihood of developing breast cancer. In some embodiments, the method further comprises notifying the subject's family that the subject has an increased likelihood of developing breast cancer. In some embodiments, the method further comprises administering to the subject a treatment for decreasing the likelihood of developing breast cancer. In some embodiments, the methods further include obtaining the biological sample from the subject. In some embodiments, the abundance is an amount of protein or a byproduct or precursor or degradation product thereof. In some embodiments, the abundance is an abundance of mRNA or a fragment thereof.

[0411] In some embodiments, the methods disclosed herein include methods of monitoring risk of developing breast cancer in a subject over time, wherein the method includes (a) determining a first abundance of one or more of (1) CENPW, or a byproduct or precursor or degradation product thereof; (2) A2ML1, or a byproduct or precursor or degradation product thereof; (3) VLDLR, or a byproduct or precursor or degradation product thereof; (4) SCRG1, or a byproduct or precursor or degradation product thereof; (5) RCL1, or a byproduct or precursor or degradation product thereof; (6) FABP7, or a byproduct or precursor or degradation product thereof; (7) CCNE1, or a byproduct or precursor or degradation product thereof; (8) MIEN1, or a byproduct or precursor or degradation product thereof; (9) CDC37L1, or a byproduct or precursor or degradation product thereof; (10) ERMP1, or a byproduct or precursor or degradation product thereof; (11) TNFSF10, or a byproduct or precursor or degradation product thereof; (12) ACTG2, or a byproduct or precursor or degradation product thereof; (13) DMKN, or a byproduct or precursor or degradation product thereof; (14) CALML3, or a byproduct or precursor or degradation product thereof; (15) COL17A1, or a byproduct or precursor or degradation product thereof; (16) MAGED1, or a byproduct or precursor or degradation product thereof; (17) PTN, or a byproduct or precursor or degradation product thereof; (18) TMEM98, or a byproduct or precursor or degradation product thereof; (19) LY6D, or a byproduct or precursor or degradation product thereof; (20) TNC, or a byproduct or precursor or degradation product thereof; and (21) RTN4IP1, or a byproduct or precursor or degradation product thereof, in a first biological sample obtained from a subject at a first time point. In some embodiments, the methods include determining a second abundance of one or more of (1) CENPW, or a byproduct or precursor or degradation product thereof; (2) A2ML1, or a byproduct or precursor or degradation product thereof; (3) VLDLR, or a byproduct or precursor or degradation product thereof; (4) SCRG1, or a byproduct or precursor or degradation product thereof; (5) RCL1, or a byproduct or precursor or degradation product thereof; (6) FABP7, or a byproduct or precursor or degradation product thereof; (7) CCNE1, or a byproduct or precursor or degradation product thereof; (8) MIEN1, or a byproduct or precursor or degradation product thereof; (9) CDC37L1, or a byproduct or precursor or degradation product thereof; (10) ERMP1, or a byproduct or precursor or degradation product thereof; (11) TNFSF10, or a byproduct or precursor or degradation product thereof; (12) ACTG2, or a byproduct or precursor or degradation product thereof; (13) DMKN, or a byproduct or precursor or degradation product thereof; (14) CALML3, or a byproduct or precursor or degradation product thereof; (15) COL17A1, or a byproduct or precursor or degradation product thereof; (16) MAGED1, or a byproduct or precursor or degradation product thereof; (17) PTN, or a byproduct or precursor or degradation product thereof; (18) TMEM98, or a byproduct or precursor or degradation product thereof; (19) LY6D, or a byproduct or precursor or degradation product thereof; (20) TNC, or a byproduct or precursor or degradation product thereof; and (21) RTN4IP1, or a byproduct or precursor or degradation product thereof, in a second biological sample obtained from the subject at a second time point. Then, in some embodiments, the methods further include identifying: (i) a subject having an increased second abundance of one or more of (1) through (21) above as compared to the first abundance of the one or more of (1)-(21) as having an increasing risk of developing breast cancer. In some embodiment, a subject having about the same or lowered second abundance of one or more of (1) through (21) as compared to the first abundance of the one or more of (1) through (21), as having about the same or a decreasing risk of developing breast cancer.

[0412] In some embodiments, the methods disclosed herein include methods of monitoring risk of developing breast cancer in a subject over time, wherein the method includes (a) determining a first abundance of one or more of (1) ALB, or a byproduct or precursor or degradation product thereof; (2) CRISP3, or a byproduct or precursor or degradation product thereof; (3) IGLC2, or a byproduct or precursor or degradation product thereof; (4) IGHG3, or a byproduct or precursor or degradation product thereof; (5) IGKC, or a byproduct or precursor or degradation product thereof; (6) CXCL14, or a byproduct or precursor or degradation product thereof; (7) IGHGL, or a byproduct or precursor or degradation product thereof; (8) IGLC3, or a byproduct or precursor or degradation product thereof; (9) MGP, or a byproduct or precursor or degradation product thereof; (10) SLITRK6, or a byproduct or precursor or degradation product thereof; (11) CPB1, or a byproduct or precursor or degradation product thereof; (12) IGHA1, or a byproduct or precursor or degradation product thereof; (13) SRP14, or a byproduct or precursor or degradation product thereof; (14) MCCC1, or a byproduct or precursor or degradation product thereof; (15) CDV3, or a byproduct or precursor or degradation product thereof; (16) KIF16B, or a byproduct or precursor or degradation product thereof; (17) ID3, or a byproduct or precursor or degradation product thereof; (18) ZC3H12A, or a byproduct or precursor or degradation product thereof; (19) TRAPPC1, or a byproduct or precursor or degradation product thereof; (20) NSD3, or a byproduct or precursor or degradation product thereof; (21) HNRNPA01, or a byproduct or precursor or degradation product thereof; (22) SPATA20, or a byproduct or precursor or degradation product thereof; (23) PDPR, or a byproduct or precursor or degradation product thereof; and (24) GABARAPL1, or a byproduct or precursor or degradation product thereof in a second biological sample obtained from the subject at a second time point. Then, in some embodiments, the methods further include identifying: (i) a subject having (A) an increased second abundance of one or more of (1) through (12) above or (B) a decreased second abundance of one or more of (13) through (24) as compared to the first abundance of the one or more of (1)-(24) as having an increasing risk of developing breast cancer. In some embodiment, a subject having (A) about the same or lowered second abundance of one or more of (1) through (12) or (B) about the same or elevated second abundance of one or more of (13) through (24) as compared to the first abundance of the one or more of (1) through (24), as having about the same or a decreasing risk of developing breast cancer.

[0413] In some embodiments, disclosed herein are methods of methods of monitoring risk of developing breast cancer in a subject over time, wherein the method includes determining a first abundance of one or more of the genes in cluster 0, cluster 1, cluster 2, cluster 3, cluster 4, cluster 5, cluster 6, cluster 7, cluster 8, cluster 9, cluster 10, cluster 11, cluster 12, cluster 13, or any combination thereof, as disclosed in Section VII(b)(ii) herein. In some instance, the methods further include identifying a subject having dysregulated abundance of one or more of clusters 0-13, in the biological sample as compared to reference level(s) (e.g., presence or abundance) of the one or more of clusters 0-13, as having an increased likelihood of developing breast cancer. Then, in some embodiments, the methods further include identifying: (i) a subject having dysregulated abundance(s) in one or more clusters as compared to the first abundance of the one or more of clusters as having an increasing risk of developing breast cancer.

[0414] In some embodiments, the methods disclosed herein further include identifying a subject as having an increasing risk of developing breast cancer. In some embodiments, the method further includes administering a treatment for reducing risk of developing breast cancer to the subject or increasing the dose of a treatment for reducing risk of developing breast cancer to be administered to the subject. In some embodiments, the method further comprises recording in the subject's clinical record that the subject has an increasing risk of developing breast cancer. In some embodiments, the method comprises identifying a subject as having about the same or a decreasing risk of developing breast cancer. In some embodiments, the method further comprises recording in the subject's clinical record that the subject as having about the same or a decreasing risk of developing breast cancer.

[0415] In some embodiments, disclosed herein is a method of determining efficacy of a treatment for reducing the risk of developing breast cancer in a subject. In some embodiments, the method includes determining a first abundance of one or more of (1) CENPW, or a byproduct or precursor or degradation product thereof; (2) A2ML1, or a byproduct or precursor or degradation product thereof; (3) VLDLR, or a byproduct or precursor or degradation product thereof; (4) SCRG1, or a byproduct or precursor or degradation product thereof; (5) RCL1, or a byproduct or precursor or degradation product thereof; (6) FABP7, or a byproduct or precursor or degradation product thereof; (7) CCNE1, or a byproduct or precursor or degradation product thereof; (8) MIEN1, or a byproduct or precursor or degradation product thereof; (9) CDC37L1, or a byproduct or precursor or degradation product thereof; (10) ERMP1, or a byproduct or precursor or degradation product thereof; (11) TNFSF10, or a byproduct or precursor or degradation product thereof; (12) ACTG2, or a byproduct or precursor or degradation product thereof; (13) DMKN, or a byproduct or precursor or degradation product thereof; (14) CALML3, or a byproduct or precursor or degradation product thereof; (15) COL17A1, or a byproduct or precursor or degradation product thereof; (16) MAGED1, or a byproduct or precursor or degradation product thereof; (17) PTN, or a byproduct or precursor or degradation product thereof; (18) TMEM98, or a byproduct or precursor or degradation product thereof; (19) LY6D, or a byproduct or precursor or degradation product thereof; (20) TNC, or a byproduct or precursor or degradation product thereof; and (21) RTN4IP1, or a byproduct or precursor or degradation product thereof, in a first biological sample obtained from a subject at a first time point. In some embodiments, the methods also include determining a second abundance of the one or more of (1) CENPW, or a byproduct or precursor or degradation product thereof; (2) A2ML1, or a byproduct or precursor or degradation product thereof; (3) VLDLR, or a byproduct or precursor or degradation product thereof; (4) SCRG1, or a byproduct or precursor or degradation product thereof; (5) RCL1, or a byproduct or precursor or degradation product thereof; (6) FABP7, or a byproduct or precursor or degradation product thereof; (7) CCNE1, or a byproduct or precursor or degradation product thereof; (8) MIEN1, or a byproduct or precursor or degradation product thereof; (9) CDC37L1, or a byproduct or precursor or degradation product thereof; (10) ERMP1, or a byproduct or precursor or degradation product thereof; (11) TNFSF10, or a byproduct or precursor or degradation product thereof; (12) ACTG2, or a byproduct or precursor or degradation product thereof; (13) DMKN, or a byproduct or precursor or degradation product thereof; (14) CALML3, or a byproduct or precursor or degradation product thereof; (15) COL17A1, or a byproduct or precursor or degradation product thereof; (16) MAGED1, or a byproduct or precursor or degradation product thereof; (17) PTN, or a byproduct or precursor or degradation product thereof; (18) TMEM98, or a byproduct or precursor or degradation product thereof; (19) LY6D, or a byproduct or precursor or degradation product thereof; (20) TNC, or a byproduct or precursor or degradation product thereof; and (21) RTN4IP1, or a byproduct or precursor or degradation product thereof, in a second biological sample obtained from the subject at a second time point, wherein the subject is administered one or more doses of a treatment for reducing the risk of developing breast cancer between the first and second time points. In some embodiments, the treatment is effective if the subject has about the same or decreased second abundance(s) of one or more of (1) through (21) above, as compared to the first abundance(s) of the one or more of (1) through (21) above.

[0416] In some embodiments, disclosed herein is a method of determining efficacy of a treatment for reducing the risk of developing breast cancer in a subject. In some embodiments, the method includes determining a first abundance of one or more of (1) ALB, or a byproduct or precursor or degradation product thereof; (2) CRISP3, or a byproduct or precursor or degradation product thereof; (3) IGLC2, or a byproduct or precursor or degradation product thereof; (4) IGHG3, or a byproduct or precursor or degradation product thereof; (5) IGKC, or a byproduct or precursor or degradation product thereof; (6) CXCL14, or a byproduct or precursor or degradation product thereof; (7) IGHGL, or a byproduct or precursor or degradation product thereof; (8) IGLC3, or a byproduct or precursor or degradation product thereof; (9) MGP, or a byproduct or precursor or degradation product thereof; (10) SLITRK6, or a byproduct or precursor or degradation product thereof; (11) CPB1, or a byproduct or precursor or degradation product thereof; (12) IGHA1, or a byproduct or precursor or degradation product thereof; (13) SRP14, or a byproduct or precursor or degradation product thereof; (14) MCCC1, or a byproduct or precursor or degradation product thereof; (15) CDV3, or a byproduct or precursor or degradation product thereof; (16) KIF16B, or a byproduct or precursor or degradation product thereof; (17) ID3, or a byproduct or precursor or degradation product thereof; (18) ZC3H12A, or a byproduct or precursor or degradation product thereof; (19) TRAPPC1, or a byproduct or precursor or degradation product thereof; (20) NSD3, or a byproduct or precursor or degradation product thereof; (21) HNRNPA01, or a byproduct or precursor or degradation product thereof; (22) SPATA20, or a byproduct or precursor or degradation product thereof; (23) PDPR, or a byproduct or precursor or degradation product thereof; and (24) GABARAPL1, or a byproduct or precursor or degradation product thereof, in a second biological sample obtained from the subject at a second time point. In some instances, the subject is administered one or more doses of a treatment for reducing the risk of developing breast cancer between the first and second time points. In some embodiments, the treatment is effective if the subject has (A) about the same or decreased second abundance(s) of one or more of (1) through (12) above, as compared to the first abundance(s) of the one or more of (1) through (12) above or (B) about the same or increased second abundance(s) of one or more of (13) through (24) above, as compared to the first abundance(s) of the one or more of (13) through (24) above.

[0417] In some embodiments, method of determining efficacy of a treatment for reducing the risk of developing breast cancer in a subject. In some embodiments, the method includes determining a first abundance of one or more of the genes in cluster 0, cluster 1, cluster 2, cluster 3, cluster 4, cluster 5, cluster 6, cluster 7, cluster 8, cluster 9, cluster 10, cluster 11, cluster 12, cluster 13, or any combination thereof, as disclosed in Section VII(b)(ii) herein. In some instance, the methods further include identifying a subject having dysregulated abundance of one or more of clusters 0-13, in the biological sample as compared to reference level(s) (e.g., presence or abundance) of the one or more of clusters 0-13, as having an increased likelihood of developing breast cancer.

[0418] The methods disclosed herein further include identifying a subject as having an increasing risk of developing breast cancer. In some embodiments, the method further includes administering a treatment for reducing risk of developing breast cancer to the subject or increasing the dose of a treatment for reducing risk of developing breast cancer to be administered to the subject. In some embodiments, the method further comprises recording in the subject's clinical record that the subject has an increasing risk of developing breast cancer. In some embodiments, the method comprises identifying a subject as having about the same or a decreasing risk of developing breast cancer. In some embodiments, the method further comprises recording in the subject's clinical record that the subject as having about the same or a decreasing risk of developing breast cancer.

[0419] In some embodiments, the methods disclosed herein include identifying the treatment as being effective in the subject. In some embodiments, the method further includes selecting additional doses of the treatment for the subject. In some embodiments, the method further includes administering additional doses of the treatment to the subject. In some embodiments, the method further includes recording in the subject's clinical record that the treatment is effective in the subject. In some embodiments, the method includes identifying the treatment as not being effective in the subject. In some embodiments, the method further includes selecting a different treatment for the subject. In some embodiments, the method further includes administering a different treatment to the subject. In some embodiments, the method further includes increasing the dose of the treatment to be administered to the subject. In some embodiments, the method further includes administering one or more additional doses of the treatment to the subject in combination with an additional treatment. In some embodiments, the methods further include obtaining the first and second biological samples from the subject. In some embodiments, each of the first and second abundance is an abundance of protein or a byproduct or precursor or degradation product thereof. In some embodiments, each of the first and second abundance is an abundance of mRNA or a fragment thereof.

[0420] In some embodiments, also disclosed herein is a method of identifying a patient subpopulation for which a treatment for reducing the risk of developing breast cancer is effective, the method comprising (a) administering a treatment for reducing the risk of developing breast cancer to a patient subpopulation; (b) determining (i) a first abundance of one or more of: (1) CENPW, or a byproduct or precursor or degradation product thereof; (2) A2ML1, or a byproduct or precursor or degradation product thereof; (3) VLDLR, or a byproduct or precursor or degradation product thereof; (4) SCRG1, or a byproduct or precursor or degradation product thereof; (5) RCL1, or a byproduct or precursor or degradation product thereof; (6) FABP7, or a byproduct or precursor or degradation product thereof; (7) CCNE1, or a byproduct or precursor or degradation product thereof; (8) MIEN1, or a byproduct or precursor or degradation product thereof; (9) CDC37L1, or a byproduct or precursor or degradation product thereof; (10) ERMP1, or a byproduct or precursor or degradation product thereof; (11) TNFSF10, or a byproduct or precursor or degradation product thereof; (12) ACTG2, or a byproduct or precursor or degradation product thereof; (13) DMKN, or a byproduct or precursor or degradation product thereof; (14) CALML3, or a byproduct or precursor or degradation product thereof; (15) COL17A1, or a byproduct or precursor or degradation product thereof; (16) MAGED1, or a byproduct or precursor or degradation product thereof; (17) PTN, or a byproduct or precursor or degradation product thereof; (18) TMEM98, or a byproduct or precursor or degradation product thereof; (19) LY6D, or a byproduct or precursor or degradation product thereof; (20) TNC, or a byproduct or precursor or degradation product thereof; and (21) RTN4IP1, or a byproduct or precursor or degradation product thereof, in a first biological sample obtained from a patient subpopulation at a first time point, and (ii) second abundance(s) of the one or more of (1) through (21), in a second biological sample obtained from the patient population at a second time point, wherein the patient subpopulation is administered one or more doses of a treatment for reducing the risk of developing breast cancer between the first and second time points; and (c) determining a correlation between efficacy of the treatment for reducing the risk of developing breast cancer and the second abundance(s) from the patient subpopulation as compared to abundance(s) in a sample obtained from an untreated patient, wherein lower second abundance(s) in the samples from the patient subpopulation as compared to the abundance(s) in the sample from the untreated patient is indicative that the treatment is effective for reducing risk of developing breast cancer in the patient subpopulation. In some embodiments, the therapeutic treatment is an antagonist of one or more of (1) through (21).

[0421] In some embodiments, also disclosed herein is a method of identifying a patient subpopulation for which a treatment for reducing the risk of developing breast cancer is effective, the method comprising (a) administering a treatment for reducing the risk of developing breast cancer to a patient subpopulation; (b) determining (i) a first abundance of one or more of: (1) ALB, or a byproduct or precursor or degradation product thereof; (2) CRISP3, or a byproduct or precursor or degradation product thereof; (3) IGLC2, or a byproduct or precursor or degradation product thereof; (4) IGHG3, or a byproduct or precursor or degradation product thereof; (5) IGKC, or a byproduct or precursor or degradation product thereof; (6) CXCL14, or a byproduct or precursor or degradation product thereof; (7) IGHGL, or a byproduct or precursor or degradation product thereof; (8) IGLC3, or a byproduct or precursor or degradation product thereof; (9) MGP, or a byproduct or precursor or degradation product thereof; (10) SLITRK6, or a byproduct or precursor or degradation product thereof; (11) CPB1, or a byproduct or precursor or degradation product thereof; (12) IGHA1, or a byproduct or precursor or degradation product thereof; (13) SRP14, or a byproduct or precursor or degradation product thereof; (14) MCCC1, or a byproduct or precursor or degradation product thereof; (15) CDV3, or a byproduct or precursor or degradation product thereof; (16) KIF16B, or a byproduct or precursor or degradation product thereof; (17) ID3, or a byproduct or precursor or degradation product thereof; (18) ZC3H12A, or a byproduct or precursor or degradation product thereof; (19) TRAPPC1, or a byproduct or precursor or degradation product thereof; (20) NSD3, or a byproduct or precursor or degradation product thereof; (21) HNRNPA01, or a byproduct or precursor or degradation product thereof; (22) SPATA20, or a byproduct or precursor or degradation product thereof; (23) PDPR, or a byproduct or precursor or degradation product thereof; and (24) GABARAPL1, or a byproduct or precursor or degradation product thereof, or (25) one or more of cluster 0, cluster 1, cluster 2, cluster 3, cluster 4, cluster 5, cluster 6, cluster 7, cluster 8, cluster 9, cluster 10, cluster 11, cluster 12, cluster 13, or any combination thereof, as disclosed in Section VII(b)(ii) herein, in a first biological sample obtained from a patient subpopulation at a first time point, and (ii) second abundance(s) of the one or more of (1) through (25), in a second biological sample obtained from the patient population at a second time point, wherein the patient subpopulation is administered one or more doses of a treatment for reducing the risk of developing breast cancer between the first and second time points; and (c) determining a correlation between efficacy of the treatment for reducing the risk of developing breast cancer and the second abundance(s) from the patient subpopulation as compared to abundance(s) in a sample obtained from an untreated patient, wherein lower second abundance(s) of one or more of (1) through (12); increased second abundance(s) of one or more of (13) through (24); or differential expression in (25) in the samples from the patient subpopulation as compared to the abundance(s) in the sample from the untreated patient is indicative that the treatment is effective for reducing risk of developing breast cancer in the patient subpopulation. In some embodiments, the therapeutic treatment is an antagonist of one or more of (1) through (25).

[0422] In some embodiments, disclosed herein are methods of identifying a patient subpopulation for which a treatment for reducing the risk of developing breast cancer is effective. In some embodiments, the methods include: (a) administering a treatment for reducing the risk of developing breast cancer to a patient subpopulation; (b) determining (i) a first abundance of one or more of: (1) CENPW, or a byproduct or precursor or degradation product thereof; (2) A2ML1, or a byproduct or precursor or degradation product thereof; (3) VLDLR, or a byproduct or precursor or degradation product thereof; (4) SCRG1, or a byproduct or precursor or degradation product thereof; (5) RCL1, or a byproduct or precursor or degradation product thereof; (6) FABP7, or a byproduct or precursor or degradation product thereof; (7) CCNE1, or a byproduct or precursor or degradation product thereof; (8) MIEN1, or a byproduct or precursor or degradation product thereof; (9) CDC37L1, or a byproduct or precursor or degradation product thereof; (10) ERMP1, or a byproduct or precursor or degradation product thereof; (11) TNFSF10, or a byproduct or precursor or degradation product thereof; (12) ACTG2, or a byproduct or precursor or degradation product thereof; (13) DMKN, or a byproduct or precursor or degradation product thereof; (14) CALML3, or a byproduct or precursor or degradation product thereof; (15) COL17A1, or a byproduct or precursor or degradation product thereof; (16) MAGED1, or a byproduct or precursor or degradation product thereof; (17) PTN, or a byproduct or precursor or degradation product thereof; (18) TMEM98, or a byproduct or precursor or degradation product thereof; (19) LY6D, or a byproduct or precursor or degradation product thereof; (20) TNC, or a byproduct or precursor or degradation product thereof; and (21) RTN4IP1, or a byproduct or precursor or degradation product thereof, in a first biological sample obtained from a patient subpopulation at a first time point, and (ii) second abundance(s) of the one or more of (1) through (21), in a second biological sample obtained from the patient population at a second time point, wherein the patient subpopulation is administered one or more doses of a treatment for reducing the risk of developing breast cancer between the first and second time points; and (c) determining a correlation between efficacy of the treatment for reducing the risk of developing breast cancer and the second abundance(s) from the patient subpopulation as compared to abundance(s) in a sample obtained from an untreated patient, wherein decreased second abundance(s) in the samples from the patient subpopulation as compared to the abundance(s) in the sample from the untreated patient is indicative that the treatment is effective for reducing risk of developing breast cancer in the patient subpopulation. In some embodiments, the therapeutic treatment is an agonist of one or more of (1) through (21).

[0423] In some embodiments, disclosed herein are methods of identifying a patient subpopulation for which a treatment for reducing the risk of developing breast cancer is effective. In some embodiments, the methods include: (a) administering a treatment for reducing the risk of developing breast cancer to a patient subpopulation; (b) determining (i) a first abundance of one or more of: (1) ALB, or a byproduct or precursor or degradation product thereof; (2) CRISP3, or a byproduct or precursor or degradation product thereof; (3) IGLC2, or a byproduct or precursor or degradation product thereof; (4) IGHG3, or a byproduct or precursor or degradation product thereof; (5) IGKC, or a byproduct or precursor or degradation product thereof; (6) CXCL14, or a byproduct or precursor or degradation product thereof; (7) IGHGL, or a byproduct or precursor or degradation product thereof; (8) IGLC3, or a byproduct or precursor or degradation product thereof; (9) MGP, or a byproduct or precursor or degradation product thereof; (10) SLITRK6, or a byproduct or precursor or degradation product thereof; (11) CPB1, or a byproduct or precursor or degradation product thereof; (12) IGHA1, or a byproduct or precursor or degradation product thereof; (13) SRP14, or a byproduct or precursor or degradation product thereof; (14) MCCC1, or a byproduct or precursor or degradation product thereof; (15) CDV3, or a byproduct or precursor or degradation product thereof; (16) KIF16B, or a byproduct or precursor or degradation product thereof; (17) ID3, or a byproduct or precursor or degradation product thereof; (18) ZC3H12A, or a byproduct or precursor or degradation product thereof; (19) TRAPPC1, or a byproduct or precursor or degradation product thereof; (20) NSD3, or a byproduct or precursor or degradation product thereof; (21) HNRNPA01, or a byproduct or precursor or degradation product thereof; (22) SPATA20, or a byproduct or precursor or degradation product thereof; (23) PDPR, a byproduct or precursor or degradation product thereof; and (24) GABARAPL1, or a byproduct or precursor or degradation product thereof, or (25) one or more of cluster 0, cluster 1, cluster 2, cluster 3, cluster 4, cluster 5, cluster 6, cluster 7, cluster 8, cluster 9, cluster 10, cluster 11, cluster 12, cluster 13, or any combination thereof, as disclosed in Section VII(b)(ii) herein, in a first biological sample obtained from a patient subpopulation at a first time point, and (ii) second abundance(s) of the one or more of (1) through (25), in a second biological sample obtained from the patient population at a second time point, wherein the patient subpopulation is administered one or more doses of a treatment for reducing the risk of developing breast cancer between the first and second time points; and (c) determining a correlation between efficacy of the treatment for reducing the risk of developing breast cancer and the second abundance(s) from the patient subpopulation as compared to abundance(s) in a sample obtained from an untreated patient, wherein decreased second abundances of any one of (1) through (12); elevated second abundance(s) of any one of (13) through (24); or differential expression in (25) in the samples from the patient subpopulation as compared to the abundance(s) in the sample from the untreated patient is indicative that the treatment is effective for reducing risk of developing breast cancer in the patient subpopulation. In some embodiments, the therapeutic treatment is an agonist of one or more of (1) through (25).

[0424] In some embodiments, disclosed herein are methods of modifying treatment for reducing the risk of developing breast cancer in a subject. In some embodiments, the methods include: (a) administering a treatment for reducing the risk of developing breast cancer to a subject; (b) determining (i) pre-treatment abundance(s) of one or more of: (1) CENPW, or a byproduct or precursor or degradation product thereof; (2) A2ML1, or a byproduct or precursor or degradation product thereof; (3) VLDLR, or a byproduct or precursor or degradation product thereof; (4) SCRG1, or a byproduct or precursor or degradation product thereof; (5) RCL1, or a byproduct or precursor or degradation product thereof; (6) FABP7, or a byproduct or precursor or degradation product thereof; (7) CCNE1, or a byproduct or precursor or degradation product thereof; (8) MIEN1, or a byproduct or precursor or degradation product thereof; (9) CDC37L1, or a byproduct or precursor or degradation product thereof; (10) ERMP1, or a byproduct or precursor or degradation product thereof; (11) TNFSF10, or a byproduct or precursor or degradation product thereof; (12) ACTG2, or a byproduct or precursor or degradation product thereof; (13) DMKN, or a byproduct or precursor or degradation product thereof; (14) CALML3, or a byproduct or precursor or degradation product thereof; (15) COL17A1, or a byproduct or precursor or degradation product thereof; (16) MAGED1, or a byproduct or precursor or degradation product thereof; (17) PTN, or a byproduct or precursor or degradation product thereof; (18) TMEM98, or a byproduct or precursor or degradation product thereof; (19) LY6D, or a byproduct or precursor or degradation product thereof; (20) TNC, or a byproduct or precursor or degradation product thereof; and (21) RTN4IP1, or a byproduct or precursor or degradation product thereof, in a pre-treatment sample obtained from a patient before treatment and (ii) post-treatment level(s) of the one or more of (1) through (21), in a post-treatment sample obtained from the patient after treatment, wherein decreased level(s) of (1) through (21), in the post-treatment sample, as compared to the level(s) of one or more of (1) through (21), in a pre-treatment sample, is indicative of the responsiveness to treatment with the treatment for reducing the risk of developing breast cancer; and (c) increasing the amount of the treatment for reducing the risk of developing breast cancer administered to the patient based on the higher level(s) of the one or more of (1) through (21) in the post-treatment sample as compared to the level(s) of one or more of (1) through (21) in the pre-treatment sample. In some embodiments, the treatment for reducing the risk of developing breast cancer is an antagonist of one or more of (1) through (21).

[0425] In some embodiments, disclosed herein are methods of modifying treatment for reducing the risk of developing breast cancer in a subject. In some embodiments, the methods include: (a) administering a treatment for reducing the risk of developing breast cancer to a subject; (b) determining (i) pre-treatment abundance(s) of one or more of: (1) ALB, or a byproduct or precursor or degradation product thereof; (2) CRISP3, or a byproduct or precursor or degradation product thereof; (3) IGLC2, or a byproduct or precursor or degradation product thereof; (4) IGHG3, or a byproduct or precursor or degradation product thereof; (5) IGKC, or a byproduct or precursor or degradation product thereof; (6) CXCL14, or a byproduct or precursor or degradation product thereof; (7) IGHGL, or a byproduct or precursor or degradation product thereof; (8) IGLC3, or a byproduct or precursor or degradation product thereof; (9) MGP, or a byproduct or precursor or degradation product thereof; (10) SLITRK6, or a byproduct or precursor or degradation product thereof; (11) CPB1, or a byproduct or precursor or degradation product thereof; (12) IGHA1, or a byproduct or precursor or degradation product thereof; (13) SRP14, or a byproduct or precursor or degradation product thereof; (14) MCCC1, or a byproduct or precursor or degradation product thereof; (15) CDV3, or a byproduct or precursor or degradation product thereof; (16) KIF16B, or a byproduct or precursor or degradation product thereof; (17) ID3, or a byproduct or precursor or degradation product thereof; (18) ZC3H12A, or a byproduct or precursor or degradation product thereof; (19) TRAPPC1, or a byproduct or precursor or degradation product thereof; (20) NSD3, or a byproduct or precursor or degradation product thereof; (21) HNRNPA01, or a byproduct or precursor or degradation product thereof; (22) SPATA20, or a byproduct or precursor or degradation product thereof; (23) PDPR, or a byproduct or precursor or degradation product thereof; (24) GABARAPL1, or a byproduct or precursor or degradation product thereof, and (25) one or more of cluster 0, cluster 1, cluster 2, cluster 3, cluster 4, cluster 5, cluster 6, cluster 7, cluster 8, cluster 9, cluster 10, cluster 11, cluster 12, cluster 13, or any combination thereof, as disclosed in Section VII(b)(ii) herein, in a pre-treatment sample obtained from a patient before treatment and (ii) post-treatment level(s) of the one or more of (1) through (25), in a post-treatment sample obtained from the patient after treatment, wherein decreased level(s) of (1) through (12); increased levels of (13) through (24); or differential expression of (25), in the post-treatment sample, as compared to the level(s) of one or more of (1) through (25), in a pre-treatment sample, is indicative of the responsiveness to treatment with the treatment for reducing the risk of developing breast cancer; and (c) increasing the amount of the treatment for reducing the risk of developing breast cancer administered to the patient based on the abundance(s) of the one or more of (1) through (25) in the post-treatment sample as compared to the abundance(s) of one or more of (1) through (25) in the pre-treatment sample. In some embodiments, the treatment for reducing the risk of developing breast cancer is an antagonist of one or more of (1) through (25).

[0426] Also disclosed herein are methods of modifying treatment for reducing the risk of developing breast cancer in a subject. In some embodiments, the methods include: (a) administering a treatment for reducing the risk of developing breast cancer to a subject; (b) determining (i) pre-treatment level(s) of one or more of: (1) CENPW, or a byproduct or precursor or degradation product thereof; (2) A2ML1, or a byproduct or precursor or degradation product thereof; (3) VLDLR, or a byproduct or precursor or degradation product thereof; (4) SCRG1, or a byproduct or precursor or degradation product thereof; (5) RCL1, or a byproduct or precursor or degradation product thereof; (6) FABP7, or a byproduct or precursor or degradation product thereof; (7) CCNE1, or a byproduct or precursor or degradation product thereof; (8) MIEN1, or a byproduct or precursor or degradation product thereof; (9) CDC37L1, or a byproduct or precursor or degradation product thereof; (10) ERMP1, or a byproduct or precursor or degradation product thereof; (11) TNFSF10, or a byproduct or precursor or degradation product thereof; (12) ACTG2, or a byproduct or precursor or degradation product thereof; (13) DMKN, or a byproduct or precursor or degradation product thereof; (14) CALML3, or a byproduct or precursor or degradation product thereof; (15) COL17A1, or a byproduct or precursor or degradation product thereof; (16) MAGED1, or a byproduct or precursor or degradation product thereof; (17) PTN, or a byproduct or precursor or degradation product thereof; (18) TMEM98, or a byproduct or precursor or degradation product thereof; (19) LY6D, or a byproduct or precursor or degradation product thereof; (20) TNC, or a byproduct or precursor or degradation product thereof; and (21) RTN4IP1, or a byproduct or precursor or degradation product thereof, in a pre-treatment sample obtained from a patient before treatment and (ii) post-treatment level. In some embodiments, the methods include: (a) administering a treatment for reducing the risk of developing breast cancer to a subject; (b) determining (i) pre-treatment abundance(s) of one or more of: (1) CENPW, or a byproduct or precursor or degradation product thereof; (2) A2ML1, or a byproduct or precursor or degradation product thereof; (3) VLDLR, or a byproduct or precursor or degradation product thereof; (4) SCRG1, or a byproduct or precursor or degradation product thereof; (5) RCL1, or a byproduct or precursor or degradation product thereof; (6) FABP7, or a byproduct or precursor or degradation product thereof; (7) CCNE1, or a byproduct or precursor or degradation product thereof; (8) MIEN1, or a byproduct or precursor or degradation product thereof; (9) CDC37L1, or a byproduct or precursor or degradation product thereof; (10) ERMP1, or a byproduct or precursor or degradation product thereof; (11) TNFSF10, or a byproduct or precursor or degradation product thereof; (12) ACTG2, or a byproduct or precursor or degradation product thereof; (13) DMKN, or a byproduct or precursor or degradation product thereof; (14) CALML3, or a byproduct or precursor or degradation product thereof; (15) COL17A1, or a byproduct or precursor or degradation product thereof; (16) MAGED1, or a byproduct or precursor or degradation product thereof; (17) PTN, or a byproduct or precursor or degradation product thereof; (18) TMEM98, or a byproduct or precursor or degradation product thereof; (19) LY6D, or a byproduct or precursor or degradation product thereof; (20) TNC, or a byproduct or precursor or degradation product thereof; and (21) RTN4IP1, or a byproduct or precursor or degradation product thereof, in a pre-treatment sample obtained from a patient before treatment and (ii) post-treatment abundance(s) of the one or more of (1) through (21), in a post-treatment sample obtained from the patient after treatment, wherein decreased abundance(s) of (1) through (21), in the post-treatment sample, as compared to the abundance(s) of one or more of (1) through (21), in a pre-treatment sample, is indicative of the responsiveness to treatment with the treatment for reducing the risk of developing breast cancer; and (c) increasing the amount of the treatment for reducing the risk of developing breast cancer administered to the patient based on the decreased abundance(s) of the one or more of (1) through (21) in the post-treatment sample as compared to the abundance(s) of one or more of (1) through (21) in the pre-treatment sample. In some embodiments, the treatment for reducing the risk of developing breast cancer is an agonist of one or more of (1) through (21).

[0427] Also disclosed herein are methods of modifying treatment for reducing the risk of developing breast cancer in a subject. In some embodiments, the methods include: (a) administering a treatment for reducing the risk of developing breast cancer to a subject; (b) determining (i) pre-treatment level(s) of one or more of: (1) ALB, or a byproduct or precursor or degradation product thereof; (2) CRISP3, or a byproduct or precursor or degradation product thereof; (3) IGLC2, or a byproduct or precursor or degradation product thereof; (4) IGHG3, or a byproduct or precursor or degradation product thereof; (5) IGKC, or a byproduct or precursor or degradation product thereof; (6) CXCL14, or a byproduct or precursor or degradation product thereof; (7) IGHGL, or a byproduct or precursor or degradation product thereof; (8) IGLC3, or a byproduct or precursor or degradation product thereof; (9) MGP, or a byproduct or precursor or degradation product thereof; (10) SLITRK6, or a byproduct or precursor or degradation product thereof; (11) CPB1, or a byproduct or precursor or degradation product thereof; (12) IGHA1, or a byproduct or precursor or degradation product thereof; (13) SRP14, or a byproduct or precursor or degradation product thereof; (14) MCCC1, or a byproduct or precursor or degradation product thereof; (15) CDV3, or a byproduct or precursor or degradation product thereof; (16) KIF16B, or a byproduct or precursor or degradation product thereof; (17) ID3, or a byproduct or precursor or degradation product thereof; (18) ZC3H12A, or a byproduct or precursor or degradation product thereof; (19) TRAPPC1, or a byproduct or precursor or degradation product thereof; (20) NSD3, or a byproduct or precursor or degradation product thereof; (21) HNRNPA01, or a byproduct or precursor or degradation product thereof; (22) SPATA20, or a byproduct or precursor or degradation product thereof; (23) PDPR, or a byproduct or precursor or degradation product thereof; (24) GABARAPL1, or a byproduct or precursor or degradation product thereof, and (25) one or more of cluster 0, cluster 1, cluster 2, cluster 3, cluster 4, cluster 5, cluster 6, cluster 7, cluster 8, cluster 9, cluster 10, cluster 11, cluster 12, cluster 13, or any combination thereof, as disclosed in Section VII(b)(ii) herein, in a pre-treatment sample obtained from a patient before treatment and (ii) post-treatment abundance(s) of the one or more of (1) through (25), in a post-treatment sample obtained from the patient after treatment, wherein decreased abundance(s) of one or more of (1) through (12); increased abundance(s) of one or more of (13) through (24); or differential expression of (25), in the post-treatment sample, as compared to the abundance(s) of one or more of (1) through (25), in a pre-treatment sample, is indicative of the responsiveness to treatment with the treatment for reducing the risk of developing breast cancer; and (c) increasing the amount of the treatment for reducing the risk of developing breast cancer administered to the patient based on the differential abundance(s) of the one or more of (1) through (25) in the post-treatment sample as compared to the abundance(s) of one or more of (1) through (25) in the pre-treatment sample. In some embodiments, the treatment for reducing the risk of developing breast cancer is an agonist of one or more of (1) through (25).

[0428] Also disclosed herein are methods of modifying treatment for reducing the risk of developing breast cancer in a subject. In some embodiments, the methods include: (a) administering a treatment for reducing the risk of developing breast cancer to a subject; (b) determining (i) pre-treatment level(s) of one or more of: (1) ALB, or a byproduct or precursor or degradation product thereof; (2) CRISP3, or a byproduct or precursor or degradation product thereof; (3) IGLC2, or a byproduct or precursor or degradation product thereof; (4) IGHG3, or a byproduct or precursor or degradation product thereof; (5) IGKC, or a byproduct or precursor or degradation product thereof; (6) CXCL14, or a byproduct or precursor or degradation product thereof; (7) IGHGL, or a byproduct or precursor or degradation product thereof; (8) IGLC3, or a byproduct or precursor or degradation product thereof; (9) MGP, or a byproduct or precursor or degradation product thereof; (10) SLITRK6, or a byproduct or precursor or degradation product thereof; (11) CPB1, or a byproduct or precursor or degradation product thereof; (12) IGHA1, or a byproduct or precursor or degradation product thereof, in a pre-treatment sample obtained from a patient before treatment and (ii) post-treatment abundance(s) of the one or more of (1) through (12), in a post-treatment sample obtained from the patient after treatment, wherein decreased abundance(s) of (1) through (12), in the post-treatment sample, as compared to the abundance(s) of one or more of (1) through (12), in a pre-treatment sample, is indicative of the responsiveness to treatment with the treatment for reducing the risk of developing breast cancer; and (c) increasing the amount of the treatment for reducing the risk of developing breast cancer administered to the patient based on the decreased abundance(s) of the one or more of (1) through (12) in the post-treatment sample as compared to the abundance(s) of one or more of (1) through (12) in the pre-treatment sample. In some embodiments, the treatment for reducing the risk of developing breast cancer is an agonist of one or more of (1) through (12).

[0429] Also disclosed herein are methods of modifying treatment for reducing the risk of developing breast cancer in a subject. In some embodiments, the methods include: (a) administering a treatment for reducing the risk of developing breast cancer to a subject; (b) determining (i) pre-treatment level(s) of one or more of: (13) SRP14, or a byproduct or precursor or degradation product thereof; (14) MCCC1, or a byproduct or precursor or degradation product thereof; (15) CDV3, or a byproduct or precursor or degradation product thereof; (16) KIF16B, or a byproduct or precursor or degradation product thereof; (17) ID3, or a byproduct or precursor or degradation product thereof; (18) ZC3H12A, or a byproduct or precursor or degradation product thereof; (19) TRAPPC1, or a byproduct or precursor or degradation product thereof; (20) NSD3, or a byproduct or precursor or degradation product thereof; (21) HNRNPA01, or a byproduct or precursor or degradation product thereof; (22) SPATA20, or a byproduct or precursor or degradation product thereof; (23) PDPR, or a byproduct or precursor or degradation product thereof; and (24) GABARAPL1, or a byproduct or precursor or degradation product thereof, in a pre-treatment sample obtained from a patient before treatment and (ii) post-treatment abundance(s) of the one or more of (13) through (24), in a post-treatment sample obtained from the patient after treatment, wherein increased abundance(s) of (13) through (24), in the post-treatment sample, as compared to the abundance(s) of one or more of (13) through (24), in a pre-treatment sample, is indicative of the responsiveness to treatment with the treatment for reducing the risk of developing breast cancer; and (c) increasing the amount of the treatment for reducing the risk of developing breast cancer administered to the patient based on the increased abundance(s) of the one or more of (13) through (24) in the post-treatment sample as compared to the abundance(s) of one or more of (13) through (24) in the pre-treatment sample. In some embodiments, the treatment for reducing the risk of developing breast cancer is an agonist of one or more of (13) through (24).

[0430] Also disclosed herein are methods of modifying treatment for reducing the risk of developing breast cancer in a subject. In some embodiments, the methods include: (a) administering a treatment for reducing the risk of developing breast cancer to a subject; (b) determining (i) pre-treatment and post-treatment abundances(s) of one or more of: cluster 0, cluster 1, cluster 2, cluster 3, cluster 4, cluster 5, cluster 6, cluster 7, cluster 8, cluster 9, cluster 10, cluster 11, cluster 12, cluster 13, or any combination thereof, as disclosed in Section VII(b)(ii) herein, (c) modifying the amount of the treatment for reducing the risk of developing breast cancer administered to the patient based on the differential abundance(s) of the one or more of clusters 0-13 in the post-treatment sample as compared to the abundance(s) of one or more of clusters 0-13 in the pre-treatment sample. In some embodiments, the treatment for reducing the risk of developing breast cancer is an agonist of one or more genes in clusters 0-13.

[0431] Also disclosed herein are methods of monitoring relapse for developing recurrent breast cancer in a subject. In some embodiments, the methods include: (a) determining (i) pre-treatment level(s) of one or more of: (1) CENPW, or a byproduct or precursor or degradation product thereof; (2) A2ML1, or a byproduct or precursor or degradation product thereof; (3) VLDLR, or a byproduct or precursor or degradation product thereof; (4) SCRG1, or a byproduct or precursor or degradation product thereof; (5) RCL1, or a byproduct or precursor or degradation product thereof; (6) FABP7, or a byproduct or precursor or degradation product thereof; (7) CCNE1, or a byproduct or precursor or degradation product thereof; (8) MIEN1, or a byproduct or precursor or degradation product thereof; (9) CDC37L1, or a byproduct or precursor or degradation product thereof; (10) ERMP1, or a byproduct or precursor or degradation product thereof; (11) TNFSF10, or a byproduct or precursor or degradation product thereof; (12) ACTG2, or a byproduct or precursor or degradation product thereof; (13) DMKN, or a byproduct or precursor or degradation product thereof; (14) CALML3, or a byproduct or precursor or degradation product thereof; (15) COL17A1, or a byproduct or precursor or degradation product thereof; (16) MAGED1, or a byproduct or precursor or degradation product thereof; (17) PTN, or a byproduct or precursor or degradation product thereof; (18) TMEM98, or a byproduct or precursor or degradation product thereof; (19) LY6D, or a byproduct or precursor or degradation product thereof; (20) TNC, or a byproduct or precursor or degradation product thereof; and (21) RTN4IP1, or a byproduct or precursor or degradation product thereof, in a pre-treatment sample obtained from a patient before treatment and (ii) post-treatment level. In some embodiments, the methods include: (a) administering a treatment for reducing the risk of developing breast cancer to a subject; (b) determining (i) pre-treatment abundance(s) of one or more of: (1) CENPW, or a byproduct or precursor or degradation product thereof; (2) A2ML1, or a byproduct or precursor or degradation product thereof; (3) VLDLR, or a byproduct or precursor or degradation product thereof; (4) SCRG1, or a byproduct or precursor or degradation product thereof; (5) RCL1, or a byproduct or precursor or degradation product thereof; (6) FABP7, or a byproduct or precursor or degradation product thereof; (7) CCNE1, or a byproduct or precursor or degradation product thereof; (8) MIEN1, or a byproduct or precursor or degradation product thereof; (9) CDC37L1, or a byproduct or precursor or degradation product thereof; (10) ERMP1, or a byproduct or precursor or degradation product thereof; (11) TNFSF10, or a byproduct or precursor or degradation product thereof; (12) ACTG2, or a byproduct or precursor or degradation product thereof; (13) DMKN, or a byproduct or precursor or degradation product thereof; (14) CALML3, or a byproduct or precursor or degradation product thereof; (15) COL17A1, or a byproduct or precursor or degradation product thereof; (16) MAGED1, or a byproduct or precursor or degradation product thereof; (17) PTN, or a byproduct or precursor or degradation product thereof; (18) TMEM98, or a byproduct or precursor or degradation product thereof; (19) LY6D, or a byproduct or precursor or degradation product thereof; (20) TNC, or a byproduct or precursor or degradation product thereof; and (21) RTN4IP1, or a byproduct or precursor or degradation product thereof, in a pre-treatment sample obtained from a patient before treatment and (ii) post-treatment abundance(s) of the one or more of (1) through (21), in a post-treatment sample obtained from the patient after treatment. The methods further include monitoring the abundance(s) of one or more of (1) through (21) over time (e.g., multiple times over a period of weeks, months, or years) after treatment. Relapse for developing recurrent breast cancer in a subject can be determined if there is an increased abundance of any one of (1) through (21) as compared to the abundance(s) of one or more of (1) through (21), in a post-treatment sample. In some instances, the method further includes increasing the amount of the treatment for reducing the risk of developing breast cancer administered to the patient based on the increased abundance(s) of the one or more of (1) through (21) as compared to the abundance(s) of one or more of (1) through (21) in the post-treatment sample. In some embodiments, the treatment for reducing the risk of developing breast cancer is an agonist of one or more of (1) through (21).

[0432] Also disclosed herein are methods of monitoring relapse for developing recurrent breast cancer in a subject. In some embodiments, the methods include: (a) determining (i) pre-treatment level(s) of one or more of: (1) ALB, or a byproduct or precursor or degradation product thereof; (2) CRISP3, or a byproduct or precursor or degradation product thereof; (3) IGLC2, or a byproduct or precursor or degradation product thereof; (4) IGHG3, or a byproduct or precursor or degradation product thereof; (5) IGKC, or a byproduct or precursor or degradation product thereof; (6) CXCL14, or a byproduct or precursor or degradation product thereof; (7) IGHGL, or a byproduct or precursor or degradation product thereof; (8) IGLC3, or a byproduct or precursor or degradation product thereof; (9) MGP, or a byproduct or precursor or degradation product thereof; (10) SLITRK6, or a byproduct or precursor or degradation product thereof; (11) CPB1, or a byproduct or precursor or degradation product thereof; (12) IGHA1, or a byproduct or precursor or degradation product thereof; (13) SRP14, or a byproduct or precursor or degradation product thereof; (14) MCCC1, or a byproduct or precursor or degradation product thereof; (15) CDV3, or a byproduct or precursor or degradation product thereof; (16) KIF16B, or a byproduct or precursor or degradation product thereof; (17) ID3, or a byproduct or precursor or degradation product thereof; (18) ZC3H12A, or a byproduct or precursor or degradation product thereof; (19) TRAPPC1, or a byproduct or precursor or degradation product thereof; (20) NSD3, or a byproduct or precursor or degradation product thereof; (21) HNRNPA01, or a byproduct or precursor or degradation product thereof; (22) SPATA20, or a byproduct or precursor or degradation product thereof; (23) PDPR, or a byproduct or precursor or degradation product thereof; and (24) GABARAPL1, or a byproduct or precursor or degradation product thereof, in a pre-treatment sample obtained from a patient before treatment and (ii) post-treatment abundance(s) of the one or more of (1) through (24), in a post-treatment sample obtained from the patient after treatment. The methods further include monitoring the abundance(s) of one or more of (1) through (24) over time (e.g., multiple times over a period of weeks, months, or years) after treatment. Relapse for developing recurrent breast cancer in a subject can be determined if there is an increased abundance of any one of (1) through (12) or an decreased abundance of any one of (13) through (24), as compared to the abundance(s) of one or more of (1) through (24), in a post-treatment sample. In some instances, the method further includes increasing the amount of the treatment for reducing the risk of developing breast cancer administered to the patient based on the increased abundance(s) of the one or more of (1) through (12) or the decreased abundance(s) of (13) through (24) in the relapsed sample as compared to the abundance(s) of one or more of (1) through (24) in the post-treatment sample. In some embodiments, the treatment for reducing the risk of developing breast cancer is an agonist of one or more of (1) through (24).

[0433] (c) Integration of Single Nucleus RNA-Seq with Spatial Gene Expression Capture

[0434] Spatial gene expression as described herein provides a wealth of information regarding the location and abundance of a sample. In some instances, these methods are augmented by single-cell cell methods to further determine the cell type at a particular location in a sample. In some instances, the methods disclosed herein examine single cells in a first section of a tissue to identify cell make-up in the sample. Then, a second serial section is imaged and subjected to the spatial analysis methods disclosed herein (e.g., spatial detection using an array having capture probes; selective enrichment using one or more bait oligonucleotides disclosed herein). Using biomarkers associated with cell types, one can combine the cell make-up data with the spatial information to determine cell type in the sample. Combining spatial analysis with single cell analysis provides the ability to understanding microenvironments and cellular structure, including allowing the ability to understand the spatial distribution of cellular components.

[0435] In some instances, the methods of analyzing individual cells (i.e., individual nuclei) include steps of separating cells from a biological sample, isolating RNA from each cell, barcoding RNA from each cell, cDNA amplification and cleanup, and sequencing.

[0436] The methods disclosed herein allow for profiling of 500-100,000 individual cells per sample. In some instances, a pool of ˜3,500,000 barcodes are sampled separately to index each cell's transcriptome by partitioning thousands of cells into nanoliter-scale beads-in-emulsion, where all generated cDNA share a common barcode sequence. Libraries are generated and sequenced from the cDNA and barcodes are used to associate individual reads back to the individual partitions (i.e., cell). See e.g., Chromium Next GEM Single Cell 3′ Reagent Kits v3.1 User Guide, Document CG000204, November 2019, which is incorporated by reference in its entirety.

[0437] In some instances, the biological sample is a tissue. In some instances, the biological sample is a section of a tissue. In instances where Single Nucleus RNA-sequencing is used with spatial methods, serial sections of a tissue are used, one for each method. In some instances, the section is about 10 μm. In some instances, the section is about 5 μm to about 20 μm; about 5 μm to about 15 μm; or about 5 μm to about 10 μm.

[0438] In a single nucleus RNA-sequencing sample, the number of isolated nuclei can vary. In some instances the number of isolated nuclei range from about 500 nuclei to about 100,000 nuclei (e.g., about 500, about 1,000, about 2,000, about 3,000, about 4,000, about 5,000, about 6,000, about 7,000, about 8,000, about 9,000, 10,000, about 20,000, about 30,000, about 40,000, about 50,000, about 60,000, about 70,000, about 80,000, about 90,000, or about 1,000,000, nuclei).

[0439] The methods disclosed herein allow for identification of cell types based on known biomarkers or biomarkers disclosed herein. In some instances, single cells can be identified include one or more of T cells, B cells, cancer or tumor cells, tumor stem cells, CD49f^{hi} mammary stem cells, CD163+ macrophages, CD80+ macrophages, alveolar secretory cells, luminal progenitor cells, stromal cells, plasmacytoid dendritic cells, mast cells, myoepithelial cells, mature luminal cells, endothelial lymphatic cells, and ductal cells.

[0440] Because one spot on an array can have multiple cells, it is necessary to deconvolute the spot in order to determine which cell type(s) are in each spot. In some instances, each spot includes about 1 to 10 cells (e.g., 1 to 5, 2 to 5, 2 to 4). Further, because each spot contains more than one cell it can be useful to estimate the proportion of a given cell type at each spot. This gives insight into spatial organization of cells as well as how different cell types might interact in space. Multiple methods of deconvolution of spots are known in the art. See Elosua et al., SPOTlight: Seeded NMF regression to Deconvolute Spatial Transcriptomics Spots with Single-Cell Transcriptomes; Maaskola et al., Charting Tissue Expression Anatomy by Spatial Transcriptome Deconvolution; and MuSiC.

### EXAMPLES

### Example 1: Targeted Spatial Gene Expression Workflow

[0441] A slide is prepared and kept for storage at −80° C. for less than a week. After being thawed, the biological sample is fixed by methanol, stained by H&E (Haemotoxylin and Eosin), and then imaged in bright field. Next, the fixed sample is permeabilized. Next, the first strand cDNA is synthesized and then denatured, followed by the second cDNA synthesis and denaturation. Next, the cDNA is transferred off the slide and quantified by qPCR. Next, the cDNA is amplified followed by quality control (QC). Next, the cDNA is modified by fragmentation, end repair and A-tailing, followed by adapter ligation. Next, sample index PCR (SI-PCR) is performed and the quality of the resulting library is checked by QC. The library as peppered above is dried down and hybridized with biotinylated baits. After the hybridization, the biotinylated baits is captured with streptavidin or avidin beads. The beads is washed and the retaining library is re-amplified as a new library. The quality of the new library is checked and used for downstream steps.

[0442] In an alternative way, the steps including hybridization using biotinylated baits, capture with streptavidin or avidin beads and washing is performed prior to the adapter ligation and SI-PCR steps.

### Example 2: Selective Enrichment of Genes of Interest in Triple Negative Breast Cancer Sample

[0443] A triple negative breast cancer sample was prepared according to the steps in Example 1. Identification of genes of interest were determined using a cancer-specific panel looking at 1141 genes known to be involved in cancer biology (FIG. 26B) compared to a non-biased approach using probes to cover the entire transcriptome (FIG. 26A). Whole Transcriptome methods were used to sequence at ˜50k reads/spot. As shown in FIG. 26C, there was strong concordance between each group, demonstrating the comparative capability of using the cancer-specific panel instead of probes for the entire transcriptome. Each point in FIG. 26C represented the log 10 sum UMI of each 1141 pan cancer genes.

[0444] Next, identification of genes of interest were determined in the triple negative breast cancer sample using an immune-specific panel (FIG. 27B) compared to a non-biased approach using probes to cover the entire transcriptome (FIG. 27A). As shown in FIG. 27C, there was strong concordance between each group, demonstrating the comparative capability of using the cancer-specific panel instead of probes for the entire transcriptome.

[0445] Next, identification of genes of interest were determined in the triple negative breast cancer sample using a pathway (i.e., transcription factor) specific panel (FIG. 28B) compared to a non-biased approach using probes to cover the entire transcriptome (FIG. 28A). As shown in FIG. 28C, there was strong concordance between each group, demonstrating the comparative capability of using the cancer-specific panel instead of probes for the entire transcriptome.

[0446] The bait oligonucleotides and target analytes for an exemplary cancer, immune, and pathway panels were disclosed in U.S. Appl. No. 62/970,066 (Titled “Capturing Targeted Genetic Targets Using A Hybridization/Capture Approach”) and U.S. Appl. No. 62/929,686, (Titled “Capturing Targeted Genetic Targets Using A Hybridization/Capture Approach”), each of which is incorporated by reference in its entirety.

[0447] The triple negative breast cancer sample was examined by a pathologist, who identified areas of the sample as having areas that were cancerous or non-cancerous. See FIGS. 29A-32B. Based on the experiments, it was identified that CENPW, A2ML1, VLDLR, SCRG1, RCL1, FABP7, CCNE1, MIEN1, CDC37L1, ERMP1, and TNFSF10 were overexpressed in carcinoma cells. And, it was identified that ACTG2, DMKN, CALML3, COL17A1, MAGED1, PTN, TMEM98, LY6D, TNC, RTN4IP1 were overexpressed in DCIS cancer cells. See, e.g., Table 2.

TABLE 2
Transcripts with increased expression
(increased expression is shown in parentheses
relative to all other cells in same sample.

| Invasive Carcinoma vs. | | Ductal Carcinoma | |
|---|---|---|---|
| All | | In Situ vs. All | |
| FABP7 | (2.25) | ACTG2 | (5.09) |
| CENPW | (1.88) | DMKN | (3.84) |
| A2ML1 | (1.69) | CALML3 | (3.73) |
| SCRG1 | (1.68) | COL17A1 | (3.65) |
| VLDLR | (1.63) | MAGED1 | (3.49) |
| CDC37L1 | (1.55) | PTN | (3.25) |
| RCL1 | (1.53) | TMEM98 | (3.14) |
| ERMP1 | (1.53) | LY6D | (3.06) |
| TNFSF10 | (1.52) | TNC | (2.92) |

[0448] In addition, based on immune clustering, immune cells were identified. See FIGS. 33A-33B.

[0449] In addition to identifying analytes of interest using the enrichment methods described herein, additional methods were performed on the samples. For example, detection of CD3 was determined using immunofluorescence. As shown in FIGS. 34A-34H, CD3 detection was observed in samples that underwent enrichment analysis, demonstrating that one can overlap detection of a marker of interest with enrichment analysis.

### Example 3: Detection of Genes of Interest in DCIS Breast Cancer Sample

[0450] To further identify genes that are differentially expressed in a breast cancer sample, spatial gene expression was analyzed. A breast cancer tissue sample was serially sectioned and placed onto a gene expression slide. The sample was then fixed, stained, and permeabilized, releasing mRNA. The released mRNA hybridized to spatially barcoded capture probes on the slide, allowing for the capture of global gene expression information. cDNA was then synthesized from captured mRNA and sequencing libraries were prepared. The libraries were then sequenced and further analyzed.

[0451] A pathologist annotated areas of the breast cancer tissue sample as invasive carcinoma, fibrous tissue, or ductal cancer in situ (DCIS). FIG. 35A. Gene expression clusters were identified using Seurat, which is an R package designed for quality control, analysis, and exploration of single-cell RNA-sequencing data. Seurat aims to enable users to identify and interpret sources of heterogeneity from single-cell transcriptomic measurements and to integrate diverse types of single-cell data. See Stuart et al. Cell, 2019 Jun. 13; 177(7):1888-1902.e21; Butler et al., Nat Biotechnol., 2018 June; 36(5):411-420, each of which is incorporated by reference in its entirety.

[0452] The sequencing data from cDNA libraries were further analyzed. Using Seurat, 14 clusters (number 0-13) were identified as containing differentially expressed genes compared to other areas of the breast cancer tissue shown in FIG. 35A. Gene expression of the 14 clusters was compared and plotted using Uniform Manifold Approximation and Projection (UMAP). FIG. 35B. See McInnes and Healy, UMAP: Uniform Manifold Approximation and Projection for Dimension Reduction, ArXiv e-prints 1802.03426, 2018, which is incorporated by reference in its entirety. Further, spatial cluster expression was determined. See FIG. 35C. Based on a comparison between pathology annotations (FIG. 35A) and tissue sample cluster expression (FIG. 35C), clusters 7 and 11 were detected in DCIS tissue; clusters 2, 3, 4, 5, 8, 10, 12, and 13 were detected in invasive carcinoma (IC); and clusters 0, 1, and 6 were detected in fibrous tissue. Cluster 9 was detected in areas identified as DCIS or IC. Consistent with the spatial expression identifying cluster 9 as either DCIS or IC, a UMAP graph places cluster 9 between clusters 7 and 11 (detected in DCIS tissue) and clusters 13 and 5 (detected in IC tissue), respectively. FIG. 35B. These data demonstrate that clustered gene expression can be used to identify areas of a breast cancer tissue such as IC, fibrous tissue, or DCIS tissue, and can be used to identify heterogenous expression in sub-areas within each pathologist-identified area.

[0453] Lists of the most differentiated genes in each cluster are provided in Tables 3-16 (Clusters 0-13) below. Upregulated genes are designated by an increase in the average log fold change (avg_logFC), whereas downregulated genes are designated by a decrease in the ave_logFC.

TABLE 3
Most differentially expressed genes in Cluster 0.

| Cluster | Gene | avg_logFC (Increase) | p_val | pct. 1 | pct. 2 | p_val_adj |
|---|---|---|---|---|---|---|
| 0 | IGLC2 | 2.237698576 | 9.874E−207 | 1 | 0.97 | 1.9502E−202 |
| 0 | IGHG3 | 1.969278877 | 6.4947E−207 | 1 | 1 | 1.2828E−202 |
| 0 | IGKC | 1.927099555 | 4.2908E−208 | 1 | 1 | 8.4747E−204 |
| 0 | IGHG1 | 1.871963119 | 8.4732E−226 | 1 | 0.987 | 1.6735E−221 |
| 0 | IGLC3 | 1.8685086 | 7.1717E−160 | 0.949 | 0.617 | 1.4165E−155 |
| 0 | IGHA1 | 1.659076716 | 7.9596E−138 | 0.998 | 0.95 | 1.5721E−133 |
| 0 | IGHG2 | 1.609732309 | 6.45414E−90 | 0.731 | 0.433 | 1.27476E−85 |
| 0 | IGHM | 1.578956691 | 7.9731E−126 | 0.978 | 0.804 | 1.5748E−121 |
| 0 | IGHG4 | 1.445300704 | 8.1275E−196 | 1 | 1 | 1.6053E−191 |
| 0 | JCHAIN | 1.442206837 | 4.7992E−116 | 0.738 | 0.389 | 9.4789E−112 |
| Cluster | Gene | avg_logFC (Decrease) | p_val | pct. 1 | pct. 2 | p_val_adj |
| 0 | ID3 | 0.250178206 | 2.04457E−15 | 0.599 | 0.511 | 4.03822E−11 |
| 0 | CIITA | 0.250796336 | 1.22165E−18 | 0.42 | 0.267 | 2.41288E−14 |
| 0 | CST7 | 0.251487743 | 2.18694E−27 | 0.323 | 0.147 | 4.31943E−23 |
| 0 | IFI27L2 | 0.251944559 | 2.48422E−16 | 0.565 | 0.453 | 4.90658E−12 |
| 0 | FYN | 0.25199912 | 3.63133E−23 | 0.345 | 0.18 | 7.17225E−19 |
| 0 | MICAL1 | 0.252555589 | 2.10911E−16 | 0.501 | 0.367 | 4.1657E−12 |
| 0 | HMOX1 | 0.252966034 | 1.05706E−10 | 0.418 | 0.318 | 2.0878E−06 |
| 0 | CD7 | 0.253105009 | 1.58297E−16 | 0.409 | 0.272 | 3.12652E−12 |
| 0 | ARHGEF1 | 0.254803199 | 5.90394E−20 | 0.816 | 0.769 | 1.16609E−15 |
| 0 | CFH | 0.25502568 | 5.29489E−21 | 0.453 | 0.291 | 1.04579E−16 |

TABLE 4
Most differentially expressed genes in Cluster 1.

| Cluster | Gene | avg_logFC (Increase) | p_val | pct. 1 | pct. 2 | p_val_adj |
|---|---|---|---|---|---|---|
| 1 | MALAT1 | 0.76555696 | 1.9285E−132 | 1 | 0.998 | 3.809E−128 |
| 1 | CTSD | 0.322061763 | 1.06506E−67 | 1 | 1 | 2.10361E−63 |
| 1 | TYMP | 0.309075856 | 2.21042E−42 | 1 | 0.988 | 4.3658E−38 |
| 1 | SAMHD1 | 0.300996766 | 3.4535E−21 | 0.896 | 0.652 | 6.82102E−17 |
| 1 | CYBA | 0.2885973 | 6.78103E−35 | 0.998 | 0.874 | 1.33932E−30 |
| 1 | ISG15 | 0.288174446 | 9.97411E−37 | 1 | 1 | 1.96999E−32 |
| 1 | C1QA | 0.281999783 | 2.05697E−40 | 1 | 0.903 | 4.06272E−36 |
| 1 | RPS9 | 0.27786914 | 2.17818E−70 | 1 | 1 | 4.30212E−66 |
| 1 | H2AFJ | 0.276362387 | 3.23165E−26 | 1 | 0.999 | 6.38283E−22 |
| 1 | ADIRF | 0.276352352 | 9.25273E−41 | 1 | 1 | 1.82751E−36 |
| Cluster | Gene | avg_logFC (Decrease) | p_val | pct. 1 | pct. 2 | p_val_adj |
| 1 | ARHGDIA | 0.252646375 | 1.09333E−27 | 1 | 0.999 | 2.15943E−23 |
| 1 | APRT | 0.252736884 | 2.08263E−36 | 1 | 1 | 4.1134E−32 |
| 1 | AEBP1 | 0.254118619 | 2.90888E−37 | 1 | 0.94 | 5.74533E−33 |
| 1 | PLEC | 0.2577431 | 2.73281E−25 | 1 | 0.94 | 5.39757E−21 |
| 1 | APOE | 0.262450453 | 1.98698E−44 | 1 | 1 | 3.92448E−40 |
| 1 | FCGRT | 0.263904163 | 3.83161E−23 | 1 | 0.91 | 7.56782E−19 |
| 1 | NDUFB7 | 0.266525453 | 4.21567E−31 | 1 | 0.999 | 8.32636E−27 |
| 1 | MBD3 | 0.267243753 | 2.20384E−15 | 0.95 | 0.758 | 4.3528E−11 |
| 1 | EMILIN1 | 0.269909237 | 4.98053E−28 | 0.921 | 0.63 | 9.83704E−24 |
| 1 | GADD45GIP1 | 0.270198314 | 3.5038E−23 | 0.998 | 0.976 | 6.92036E−19 |

TABLE 5
Most differentially expressed genes in Cluster 2.

| Cluster | Gene | avg_logFC (Increase) | p_val | pct. 1 | pct. 2 | p_val_adj |
|---|---|---|---|---|---|---|
| 2 | CXCL14 | 1.873297518 | 1.2773E−247 | 1 | 0.959 | 2.5228E−243 |
| 2 | TTLL12 | 1.445474956 | 9.8846E−233 | 0.995 | 0.871 | 1.9523E−228 |
| 2 | GFRA1 | 1.317657382 | 4.4333E−235 | 1 | 0.945 | 8.7562E−231 |
| 2 | DEGS1 | 1.213369592 | 7.1204E−212 | 1 | 0.928 | 1.4064E−207 |
| 2 | AGR2 | 1.127044122 | 2.2901E−222 | 1 | 0.996 | 4.5233E−218 |
| 2 | ARMT1 | 1.116280085 | 3.4403E−150 | 0.965 | 0.771 | 6.795E−146 |
| 2 | CCND1 | 1.08106123 | 7.3788E−241 | 1 | 1 | 1.4574E−236 |
| 2 | ARPP21 | 1.076105815 | 0 | 0.826 | 0.104 | 0 |
| 2 | CRAT | 0.9897182 | 3.7078E−203 | 0.981 | 0.528 | 7.3233E−199 |
| 2 | PRKACB | 0.983798671 | 3.7861E−193 | 0.984 | 0.573 | 7.478E−189 |
| Cluster | Gene | avg_logFC (Decrease) | p_val | pct. 1 | pct. 2 | p_val_adj |
| 2 | NSD3 | 0.250253912 | 4.50449E−25 | 0.81 | 0.646 | 8.89681E−21 |
| 2 | PLAUR | 0.250509089 | 1.18007E−30 | 0.588 | 0.301 | 2.33075E−26 |
| 2 | CDKN2C | 0.25052229 | 7.03066E−45 | 0.431 | 0.153 | 1.38862E−40 |
| 2 | FIP1L1 | 0.250833324 | 1.02448E−26 | 0.613 | 0.35 | 2.02344E−22 |
| 2 | TMEM159 | 0.2509697 | 1.38051E−27 | 0.667 | 0.394 | 2.72665E−23 |
| 2 | TMEM141 | 0.25121772 | 5.44499E−30 | 0.984 | 0.953 | 1.07544E−25 |
| 2 | LIN7C | 0.251234768 | 9.94912E−31 | 0.688 | 0.389 | 1.96505E−26 |
| 2 | ARHGEF39 | 0.251245333 | 5.73091E−53 | 0.456 | 0.148 | 1.13191E−48 |
| 2 | ARFGEF3 | 0.251555275 | 1.43128E−29 | 0.681 | 0.388 | 2.82691E−25 |
| 2 | EMP2 | 0.251573293 | 1.63626E−24 | 0.85 | 0.714 | 3.23178E−20 |

TABLE 6
Most differentially expressed genes in Cluster 3.

| Cluster | Gene | avg_logFC (Increase) | p_val | pct. 1 | pct. 2 | p_val_adj |
|---|---|---|---|---|---|---|
| 3 | CPB1 | 1.813546977 | 4.8082E−198 | 1 | 0.928 | 9.4967E−194 |
| 3 | FCGR3B | 1.312602264 | 2.3751E−183 | 0.861 | 0.262 | 4.6911E−179 |
| 3 | KLHDC7B | 0.963524765 | 9.7325E−120 | 0.913 | 0.518 | 1.9223E−115 |
| 3 | SCGB1D2 | 0.881685998 | 3.22688E−83 | 0.97 | 0.782 | 6.37341E−79 |
| 3 | SCUBE3 | 0.797313921 | 2.1631E−170 | 0.837 | 0.231 | 4.2724E−166 |
| 3 | CXCL9 | 0.790154947 | 1.21794E−60 | 0.903 | 0.7 | 2.40555E−56 |
| 3 | COX6C | 0.788284816 | 1.6234E−137 | 1 | 1 | 3.2064E−133 |
| 3 | CFB | 0.767466081 | 9.9425E−127 | 0.995 | 0.966 | 1.9638E−122 |
| 3 | SCGB2A2 | 0.747428171 | 2.95969E−71 | 0.988 | 0.821 | 5.84569E−67 |
| 3 | NPY1R | 0.736002145 | 5.3061E−109 | 0.47 | 0.092 | 1.048E−104 |
| Cluster | Gene | avg_logFC (Decrease) | p_val | pct. 1 | pct. 2 | p_val_adj |
| 3 | AC087741.1 | 0.250441692 | 1.25487E−31 | 0.502 | 0.236 | 2.47849E−27 |
| 3 | GBP5 | 0.250653298 | 1.09264E−21 | 0.433 | 0.222 | 2.15807E−17 |
| 3 | IFT27 | 0.2506927 | 1.77701E−27 | 0.71 | 0.417 | 3.50977E−23 |
| 3 | NEURL4 | 0.251015027 | 8.51238E−35 | 0.584 | 0.278 | 1.68128E−30 |
| 3 | EMX1 | 0.251397736 | 1.72136E−47 | 0.359 | 0.104 | 3.39985E−43 |
| 3 | SLC13A2 | 0.251482828 | 1.26552E−38 | 0.413 | 0.151 | 2.49954E−34 |
| 3 | FAM110A | 0.251756928 | 5.76693E−22 | 0.946 | 0.911 | 1.13903E−17 |
| 3 | SPCS1 | 0.25179759 | 1.57136E−34 | 0.998 | 0.989 | 3.1036E−30 |
| 3 | HGD | 0.251819872 | 4.74587E−38 | 0.446 | 0.17 | 9.37357E−34 |
| 3 | ZNF587 | 0.251876129 | 2.46484E−31 | 0.594 | 0.293 | 4.86832E−27 |

TABLE 7
Most differentially expressed genes in Cluster 4.

| Cluster | Gene | avg_logFC (Increase) | p_val | pct. 1 | pct. 2 | p_val_adj |
|---|---|---|---|---|---|---|
| 4 | CRISP3 | 2.606820862 | 2.548E−239 | 1 | 0.801 | 5.0325E−235 |
| 4 | SLITRK6 | 1.815692524 | 7.0593E−276 | 0.995 | 0.369 | 1.3943E−271 |
| 4 | C6orf141 | 1.429567269 | 1.9098E−236 | 0.977 | 0.39 | 3.772E−232 |
| 4 | VTCN1 | 1.205762478 | 1.1731E−195 | 0.992 | 0.565 | 2.3169E−191 |
| 4 | SERHL2 | 1.035361703 | 8.2259E−177 | 0.997 | 0.952 | 1.6247E−172 |
| 4 | CEACAM6 | 0.869552995 | 2.2032E−169 | 0.914 | 0.304 | 4.3516E−165 |
| 4 | ABCC11 | 0.858101263 | 8.065E−171 | 0.818 | 0.216 | 1.5929E−166 |
| 4 | SHISA2 | 0.841892886 | 1.8502E−101 | 0.924 | 0.596 | 3.65428E−97 |
| 4 | C2orf54 | 0.840209125 | 7.6291E−179 | 0.858 | 0.236 | 1.5068E−174 |
| 4 | PDLIM1 | 0.827500664 | 4.4222E−135 | 0.98 | 0.787 | 8.7343E−131 |
| Cluster | Gene | avg_logFC (Decrease) | p_val | pct. 1 | pct. 2 | p_val_adj |
| 4 | ZC3H12A | 0.25019439 | 2.6266E−34 | 0.559 | 0.261 | 5.18781E−30 |
| 4 | VPS37B | 0.250812072 | 7.14498E−28 | 0.608 | 0.333 | 1.41121E−23 |
| 4 | IRF2BP2 | 0.250861762 | 2.73864E−30 | 0.995 | 0.987 | 5.40908E−26 |
| 4 | RAPH1 | 0.251221523 | 4.552E−31 | 0.572 | 0.284 | 8.99066E−27 |
| 4 | NFKBIA | 0.251297742 | 1.34827E−16 | 0.954 | 0.958 | 2.66297E−12 |
| 4 | EIF2AK1 | 0.251322666 | 2.57398E−27 | 0.934 | 0.868 | 5.08388E−23 |
| 4 | TRIM33 | 0.2514734 | 2.19479E−30 | 0.592 | 0.301 | 4.33493E−26 |
| 4 | SFPQ | 0.251550205 | 1.28212E−27 | 0.987 | 0.958 | 2.53231E−23 |
| 4 | F7 | 0.251667544 | 3.4573E−30 | 0.605 | 0.308 | 6.8285E−26 |
| 4 | TRAPPC3 | 0.251990477 | 7.40789E−23 | 0.762 | 0.553 | 1.46313E−18 |

TABLE 8
Most differentially expressed genes in Cluster 5.

| Cluster | Gene | avg_logFC (Increase) | p_val | pct. 1 | pct. 2 | p_val_adj |
|---|---|---|---|---|---|---|
| 5 | LINC00052 | 0.932352783 | 2.0054E−164 | 0.609 | 0.092 | 3.9609E−160 |
| 5 | COX6C | 0.931214106 | 4.2849E−142 | 1 | 1 | 8.463E−138 |
| 5 | SNCG | 0.919464458 | 4.6901E−123 | 0.997 | 0.74 | 9.2633E−119 |
| 5 | WFDC2 | 0.850299518 | 5.0658E−115 | 0.972 | 0.655 | 1.0005E−110 |
| 5 | SLC39A6 | 0.842272163 | 2.1966E−139 | 1 | 1 | 4.3385E−135 |
| 5 | MGST1 | 0.792992516 | 5.35745E−55 | 0.668 | 0.324 | 1.05815E−50 |
| 5 | MCCD1 | 0.783075139 | 6.3641E−103 | 1 | 0.728 | 1.25697E−98 |
| 5 | CSTA | 0.762385432 | 1.31863E−91 | 1 | 0.929 | 2.60443E−87 |
| 5 | PDE5A | 0.745956824 | 2.48765E−97 | 0.818 | 0.328 | 4.91336E−93 |
| 5 | MT-ND1 | 0.714131921 | 2.0471E−110 | 1 | 1 | 4.0432E−106 |
| Cluster | Gene | avg_logFC (Decrease) | p_val | pct. 1 | pct. 2 | p_val_adj |
| 5 | SRP14 | 0.250014586 | 9.9687E−30 | 1 | 1 | 1.96892E−25 |
| 5 | TRAPPC1 | 0.250231971 | 1.21924E−21 | 0.966 | 0.925 | 2.40812E−17 |
| 5 | SNRPD3 | 0.250640943 | 4.05507E−24 | 0.982 | 0.949 | 8.00917E−20 |
| 5 | MAT2A | 0.251201295 | 7.11429E−22 | 0.994 | 0.98 | 1.40514E−17 |
| 5 | SLC7A8 | 0.251686529 | 4.91604E−12 | 0.763 | 0.66 | 9.70967E−08 |
| 5 | POLR2K | 0.251970379 | 2.92774E−25 | 0.997 | 0.993 | 5.78257E−21 |
| 5 | TMBIM6 | 0.25203555 | 3.23036E−46 | 1 | 1 | 6.38028E−42 |
| 5 | OCIAD1 | 0.25256478 | 1.80539E−19 | 0.917 | 0.894 | 3.56584E−15 |
| 5 | EXOSC3 | 0.253204453 | 1.69102E−15 | 0.745 | 0.578 | 3.33994E−11 |
| 5 | CA14 | 0.255572019 | 2.4818E−30 | 0.372 | 0.135 | 4.90181E−26 |

TABLE 9
Most differentially expressed genes in Cluster 6.

| Cluster | Gene | avg_logFC (Increase) | p_val | pct. 1 | pct. 2 | p_val_adj |
|---|---|---|---|---|---|---|
| 6 | ACKR1 | 1.164188559 | 6.20534E−72 | 0.551 | 0.158 | 1.22562E−67 |
| 6 | IGFBP7 | 1.155549296 | 4.2857E−101 | I | 0.972 | 8.46469E−97 |
| 6 | AQP1 | 1.148352788 | 8.43379E−59 | 0.745 | 0.418 | 1.66576E−54 |
| 6 | VWF | 1.132634271 | 1.72739E−68 | 0.955 | 0.62 | 3.41178E−64 |
| 6 | MALAT1 | 1.097207191 | 4.7557E−100 | 1 | 0.999 | 9.39293E−96 |
| 6 | SPARCL1 | 1.03827919 | 1.90465E−71 | 0.992 | 0.711 | 3.76188E−67 |
| 6 | TAGLN | 1.036652912 | 3.55202E−70 | 1 | 0.799 | 7.01559E−66 |
| 6 | CCL21 | 1.008295494 | 1.49472E−39 | 0.409 | 0.131 | 2.95222E−35 |
| 6 | ACTA2 | 0.996706517 | 2.74918E−49 | 0.968 | 0.687 | 5.42991E−45 |
| 6 | CCDC80 | 0.983680244 | 7.12231E−81 | 0.976 | 0.567 | 1.40673E−76 |
| Cluster | Gene | avg_logFC (Decrease) | p_val | pct. 1 | pct. 2 | p_val_adj |
| 6 | CYB5R3 | 0.25163237 | 6.42024E−09 | 0.992 | 0.889 | 0.000126806 |
| 6 | PLXND1 | 0.251694121 | 3.32911E−08 | 0.992 | 0.87 | 0.000657533 |
| 6 | DUSP1 | 0.251949699 | 3.42806E−08 | 1 | 0.965 | 0.000677075 |
| 6 | RPS6 | 0.252683686 | 4.58295E−29 | 1 | 1 | 9.05179E−25 |
| 6 | C1QA | 0.253357634 | 1.09397E−15 | 1 | 0.91 | 2.1607E−11 |
| 6 | HEG1 | 0.254800252 | 0.000174538 | 0.279 | 0.213 | 1 |
| 6 | ETS2 | 0.25641834 | 0.001070649 | 0.32 | 0.273 | 1 |
| 6 | AKAP9 | 0.257293084 | 0.003696097 | 0.409 | 0.415 | 1 |
| 6 | CCAR1 | 0.257652478 | 2.56255E−10 | 0.826 | 0.633 | 5.0613E−06 |
| 6 | TRIM47 | 0.257710346 | 1.9105E−10 | 0.887 | 0.704 | 3.77342E−06 |

TABLE 10
Most differentially expressed genes in Cluster 7.

| Cluster | Gene | avg_logFC (Increase) | p_val | pct. 1 | pct. 2 | p_val_adj |
|---|---|---|---|---|---|---|
| 7 | ALB | 3.018020845 | 3.7726E−68 | 0.91 | 0.596 | 7.45127E−64 |
| 7 | MGP | 1.857551944 | 2.92965E−93 | 1 | 1 | 5.78636E−89 |
| 7 | ZNF350-AS1 | 1.654270953 | 5.7211E−109 | 0.862 | 0.231 | 1.13E−104 |
| 7 | S100G | 1.516630368 | 1.66337E−81 | 1 | 0.882 | 3.28532E−77 |
| 7 | STC2 | 1.197048816 | 1.755E−75 | 0.994 | 0.913 | 3.4663E−71 |
| 7 | CARTPT | 1.161620086 | 4.75215E−74 | 0.641 | 0.146 | 9.38598E−70 |
| 7 | AC087379.2 | 1.128126745 | 8.79613E−53 | 0.731 | 0.267 | 1.73732E−48 |
| 7 | GPC3 | 1.077283133 | 5.18464E−74 | 0.862 | 0.353 | 1.02402E−69 |
| 7 | ERP27 | 1.063082306 | 1.04333E−67 | 0.808 | 0.306 | 2.06068E−63 |
| 7 | APOD | 1.037935962 | 1.24707E−49 | 0.934 | 0.692 | 2.46309E−45 |
| Cluster | Gene | avg_logFC (Decrease) | p_val | pct. 1 | pct. 2 | p_val_adj |
| 7 | CDV3 | 0.250134338 | 5.36348E−10 | 0.91 | 0.871 | 1.05934E−05 |
| 7 | TPI1 | 0.25129609 | 1.36497E−13 | 1 | 0.999 | 2.69596E−09 |
| 7 | TSPYL5 | 0.251830782 | 2.86966E−11 | 0.844 | 0.718 | 5.66786E−07 |
| 7 | PFKP | 0.252016961 | 7.62543E−08 | 0.629 | 0.474 | 0.001506099 |
| 7 | CRIM1 | 0.252263553 | 1.53415E−11 | 0.515 | 0.286 | 3.03009E−07 |
| 7 | PPT1 | 0.253111642 | 2.97806E−13 | 1 | 0.962 | 5.88198E−09 |
| 7 | AC100826.1 | 0.254598773 | 4.48212E−26 | 0.365 | 0.102 | 8.85264E−22 |
| 7 | ALDOA | 0.255033207 | 3.97131E−09 | 0.85 | 0.767 | 7.84374E−05 |
| 7 | LGR4 | 0.255225468 | 7.34236E−22 | 0.413 | 0.142 | 1.45019E−17 |
| 7 | GLRX2 | 0.255424409 | 2.3313E−10 | 0.605 | 0.387 | 4.60455E−06 |

TABLE 11
Most differentially expressed genes in Cluster 8.

| Cluster | Gene | avg_logFC (Increase) | p_val | pct. 1 | pct. 2 | p_val_adj |
|---|---|---|---|---|---|---|
| 8 | AC087379.2 | 1.522104743 | 2.0576E−137 | 0.982 | 0.256 | 4.064E−133 |
| 8 | S100G | 1.306401389 | 1.23714E−85 | 1 | 0.882 | 2.44348E−81 |
| 8 | SCGB2A2 | 1.19728421 | 2.00029E−58 | 0.994 | 0.831 | 3.95076E−54 |
| 8 | PGM5-AS1 | 1.122790247 | 9.8375E−210 | 0.768 | 0.068 | 1.943E−205 |
| 8 | HEBP1 | 1.047481665 | 8.87729E−78 | 1 | 0.952 | 1.75335E−73 |
| 8 | AMIGO2 | 1.028239612 | 6.52522E−84 | 0.933 | 0.369 | 1.2888E−79 |
| 8 | PCED1B | 0.998411713 | 9.52857E−78 | 0.982 | 0.711 | 1.88199E−73 |
| 8 | SCGB1D2 | 0.95963851 | 2.65838E−43 | 0.97 | 0.794 | 5.25056E−39 |
| 8 | ITPR1 | 0.939019125 | 9.19629E−70 | 0.982 | 0.723 | 1.81636E−65 |
| 8 | IFT122 | 0.93503288 | 3.00484E−79 | 1 | 0.963 | 5.93486E−75 |
| Cluster | Gene | avg_logFC (Decrease) | p_val | pct. 1 | pct. 2 | p_val_adj |
| 8 | GABARAPL1 | 0.250341138 | 2.71991E−11 | 0.549 | 0.315 | 5.3721E−07 |
| 8 | G6PC3 | 0.250432894 | 2.34275E−13 | 0.988 | 0.954 | 4.62717E−09 |
| 8 | INPP5K | 0.250631086 | 1.42594E−11 | 0.817 | 0.583 | 2.81637E−07 |
| 8 | STC2 | 0.251084053 | 3.03925E−09 | 0.951 | 0.915 | 6.00282E−05 |
| 8 | HEXIM2 | 0.251279917 | 4.76458E−09 | 0.726 | 0.521 | 9.41052E−05 |
| 8 | RIDA | 0.252173971 | 5.80131E−12 | 0.713 | 0.463 | 1.14582E−07 |
| 8 | LRP2 | 0.252242655 | 2.33188E−16 | 0.518 | 0.233 | 4.6057E−12 |
| 8 | HK2 | 0.252549276 | 2.65516E−12 | 0.902 | 0.752 | 5.24421E−08 |
| 8 | IL1R2 | 0.252817886 | 2.29597E−24 | 0.378 | 0.112 | 4.53477E−20 |
| 8 | GOT2 | 0.253194125 | 8.64267E−11 | 0.951 | 0.933 | 1.70701E−06 |

TABLE 12
Most differentially expressed genes in Cluster 9.

| Cluster | Gene | avg_logFC (Increase) | p_val | pct. 1 | pct. 2 | p_val_adj |
|---|---|---|---|---|---|---|
| 9 | ALB | 1.128772536 | 3.09084E−38 | 0.859 | 0.598 | 6.10471E−34 |
| 9 | MT-ND2 | 0.833165922 | 1.09533E−76 | 1 | 1 | 2.16338E−72 |
| 9 | MT-ND1 | 0.710992385 | 1.19906E−72 | 1 | 1 | 2.36826E−68 |
| 9 | MT-ND3 | 0.697529604 | 7.52593E−74 | 1 | 1 | 1.48645E−69 |
| 9 | MT-ATP6 | 0.689210803 | 2.78756E−74 | 1 | 1 | 5.5057E−70 |
| 9 | MT-ND4 | 0.622259532 | 7.89828E−72 | 1 | 1 | 1.55999E−67 |
| 9 | MT-CO1 | 0.608445612 | 2.58326E−60 | 1 | 1 | 5.10219E−56 |
| 9 | MT-CO3 | 0.564176502 | 2.38763E−68 | 1 | 1 | 4.71581E−64 |
| 9 | MT-ATP8 | 0.553967653 | 2.34899E−26 | 0.675 | 0.371 | 4.6395E−22 |
| 9 | MT-ND5 | 0.543556469 | 1.60679E−32 | 1 | 0.972 | 3.17357E−28 |
| Cluster | Gene | avg_logFC (Decrease) | p_val | pct. 1 | pct. 2 | p_val_adj |
| 9 | GLO1 | 0.256088408 | 5.38322E−09 | 1 | 0.967 | 0.000106324 |
| 9 | ABHD2 | 0.256260458 | 1.20616E−12 | 1 | 0.931 | 2.38229E−08 |
| 9 | LINC00052 | 0.256816809 | 1.63578E−13 | 0.325 | 0.128 | 3.23082E−09 |
| 9 | RERG | 0.258917705 | 1.91148E−11 | 0.951 | 0.811 | 3.77536E−07 |
| 9 | STC2 | 0.273505647 | 3.20466E−11 | 0.988 | 0.914 | 6.32952E−07 |
| 9 | MALAT1 | 0.276485039 | 2.92227E−17 | 1 | 0.999 | 5.77177E−13 |
| 9 | SOX4 | 0.279350546 | 9.12168E−08 | 0.988 | 0.927 | 0.001801623 |
| 9 | CA12 | 0.280510067 | 2.33579E−11 | 0.982 | 0.915 | 4.61342E−07 |
| 9 | ZNF703 | 0.296272389 | 1.89071E−21 | 1 | 1 | 3.73434E−17 |
| 9 | MCCD1 | 0.299751994 | 7.81129E−13 | 0.957 | 0.742 | 1.54281E−08 |

TABLE 13
Most differentially expressed genes in Cluster 10.

| Cluster | Gene | avg_logFC (Increase) | p_val | pct. 1 | pct. 2 | p_val_adj |
|---|---|---|---|---|---|---|
| 10 | LINC00645 | 1.554766862 | 2.4267E−152 | 0.968 | 0.197 | 4.7929E−148 |
| 10 | SLC30A8 | 1.15206813 | 2.66089E−91 | 0.885 | 0.273 | 5.25551E−87 |
| 10 | MUC5B | 0.970379983 | 6.16705E−74 | 1 | 0.913 | 1.21805E−69 |
| 10 | COLEC12 | 0.914745725 | 3.87756E−57 | 0.968 | 0.718 | 7.65858E−53 |
| 10 | PVALB | 0.900229898 | 2.43034E−70 | 1 | 0.871 | 4.80017E−66 |
| 10 | CPB1 | 0.864886628 | 8.42462E−28 | 1 | 0.933 | 1.66395E−23 |
| 10 | EXOC2 | 0.861629448 | 9.11902E−63 | 0.974 | 0.736 | 1.8011E−58 |
| 10 | AC037198.2 | 0.752617236 | 5.18903E−69 | 0.731 | 0.199 | 1.02489E−64 |
| 10 | VSTM2A | 0.737447794 | 2.17124E−45 | 0.891 | 0.477 | 4.28842E−41 |
| 10 | FSIP1 | 0.721439645 | 6.21151E−60 | 0.801 | 0.288 | 1.22683E−55 |
| Cluster | Gene | avg_logFC (Decrease) | p_val | pct. 1 | pct. 2 | p_val_adj |
| 10 | KIF16B | 0.250136535 | 2.97876E−09 | 0.545 | 0.336 | 5.88335E−05 |
| 10 | SPATA20 | 0.250274461 | 1.06422E−12 | 0.929 | 0.866 | 2.10195E−08 |
| 10 | TSPAN9 | 0.250994922 | 1.4495E−11 | 0.859 | 0.627 | 2.86291E−07 |
| 10 | CACNB3 | 0.251004717 | 9.29225E−10 | 0.615 | 0.381 | 1.83531E−05 |
| 10 | CAMK2N1 | 0.251422988 | 1.88546E−10 | 0.891 | 0.789 | 3.72398E−06 |
| 10 | IFT27 | 0.251458321 | 1.52644E−10 | 0.679 | 0.438 | 3.01486E−06 |
| 10 | NEURL1 | 0.252584022 | 2.52458E−10 | 0.84 | 0.637 | 4.98629E−06 |
| 10 | TRIM3 | 0.252765807 | 4.58074E−09 | 0.756 | 0.591 | 9.04741E−05 |
| 10 | SLC46A1 | 0.252878017 | 2.57216E−13 | 0.699 | 0.402 | 5.08028E−09 |
| 10 | ECI2 | 0.253214426 | 2.3343E−08 | 0.846 | 0.77 | 0.000461048 |

TABLE 14
Most differentially expressed genes in Cluster 11.

| Cluster | Gene | avg_logFC (Increase) | p_val | pct. 1 | pct. 2 | p_val_adj |
|---|---|---|---|---|---|---|
| 11 | MGP | 1.783159997 | 3.85543E−83 | 1 | 1 | 7.61487E−79 |
| 11 | TFF1 | 1.227959562 | 7.47452E−57 | 1 | 0.976 | 1.47629E−52 |
| 11 | KRT14 | 1.225131728 | 2.72598E−91 | 0.752 | 0.152 | 5.38409E−87 |
| 11 | S100A9 | 1.131511529 | 7.93036E−22 | 0.846 | 0.665 | 1.56633E−17 |
| 11 | KRT17 | 1.125163636 | 3.86663E−88 | 0.698 | 0.134 | 7.63697E−84 |
| 11 | S100G | 1.024339965 | 8.86712E−41 | 0.993 | 0.883 | 1.75135E−36 |
| 11 | S100A2 | 0.979776639 | 5.5328E−108 | 0.664 | 0.094 | 1.0928E−103 |
| 11 | ZNF350-AS1 | 0.969905765 | 2.40754E−45 | 0'705 | 0.24 | 4.75514E−41 |
| 11 | KRT5 | 0.965368643 | 2.5431E−127 | 0.698 | 0.085 | 5.0229E−123 |
| 11 | S100A8 | 0.964816133 | 3.96337E−34 | 0.597 | 0.208 | 7.82804E−30 |
| Cluster | Gene | avg_logFC (Decrease) | p_val | pct. 1 | pct. 2 | p_val_adj |
| 11 | MN1 | 0.250383023 | 1.3128E−14 | 0.456 | 0.198 | 2.59292E−10 |
| 11 | TMEM45A | 0.251362007 | 4.87257E−25 | 0.369 | 0.098 | 9.62382E−21 |
| 11 | DNALI1 | 0.251438063 | 2.77364E−17 | 0.55 | 0.237 | 5.47822E−13 |
| 11 | C3orf14 | 0.252462456 | 1.6936E−11 | 0.644 | 0.376 | 3.34502E−07 |
| 11 | TSR1 | 0.252566899 | 3.76623E−10 | 0.624 | 0.388 | 7.43868E−06 |
| 11 | AL445524.1 | 0.252748869 | 5.63616E−12 | 0.544 | 0.288 | 1.1132E−07 |
| 11 | SEMA3C | 0.252987332 | 8.68902E−06 | 0.725 | 0.578 | 0.171616801 |
| 11 | NDUFAF2 | 0.253508185 | 3.96142E−10 | 0.685 | 0.421 | 7.82421E−06 |
| 11 | ASCL1 | 0.253569127 | 1.55004E−07 | 0.456 | 0.263 | 0.003061487 |
| 11 | GRHL2 | 0.253639823 | 3.9779E−12 | 0.617 | 0.348 | 7.85675E−08 |

TABLE 15
Most differentially expressed genes in Cluster 12.

| Cluster | Gene | avg_logFC (Increase) | p_val | pct. 1 | pct. 2 | p_val_adj |
|---|---|---|---|---|---|---|
| 12 | SAA1 | 1.627887297 | 3.39544E−69 | 0.889 | 0.188 | 6.70634E−65 |
| 12 | FABP4 | 1.436847865 | 2.49417E−73 | 0.691 | 0.098 | 4.92624E−69 |
| 12 | GPX3 | 1.235701869 | 3.44158E−29 | 0.802 | 0.354 | 6.79746E−25 |
| 12 | PIP | 1.049914368 | 2.86315E−19 | 0.667 | 0.286 | 5.65501E−15 |
| 12 | ADH1B | 0.899800048 | 1.29817E−61 | 0.58 | 0.076 | 2.56402E−57 |
| 12 | PLIN1 | 0.784480331 | 1.32243E−53 | 0.543 | 0.077 | 2.61193E−49 |
| 12 | COL2A1 | 0.783492947 | 5.22017E−12 | 0.778 | 0.628 | 1.03104E−07 |
| 12 | SH3BGRL | 0.768594814 | 4.86726E−12 | 0.827 | 0.699 | 9.61333E−08 |
| 12 | AD1POQ | 0.687320225 | 8.2589E−109 | 0.494 | 0.027 | 1.6312E−104 |
| 12 | PLIN4 | 0.65682665 | 5.41747E−33 | 0.407 | 0.068 | 1.07001E−28 |
| Cluster | Gene | avg_logFC (Decrease) | p_val | pct. 1 | pct. 2 | p_val_adj |
| 12 | HNRNPA0 | 0.250265112 | 2.70326E−05 | 0.975 | 0.957 | 0.533920821 |
| 12 | RPL11 | 0.250877761 | 7.1194E−12 | 1 | 1 | 1.40615E−07 |
| 12 | SLC40A1 | 0.252618406 | 0.000200052 | 0.605 | 0.432 | 1 |
| 12 | RPLP2 | 0.253394982 | 4.98006E−18 | 1 | 1 | 9.83611E−14 |
| 12 | CTDSP2 | 0.253415479 | 5.19057E−06 | 0.938 | 0.844 | 0.102518854 |
| 12 | SORL1 | 0.254054156 | 0.000137998 | 0.494 | 0.326 | 1 |
| 12 | RPL31 | 0.255440813 | 1.14535E−09 | 1 | 1 | 2.26219E−05 |
| 12 | ECE1 | 0.258177708 | 0.00017553 | 0.765 | 0.72 | 1 |
| 12 | SFRP2 | 0.259944446 | 3.32806E−05 | 0.914 | 0.847 | 0.65732505 |
| 12 | CCND1 | 0.2602566 | 0.000364464 | 0.988 | 1 | 1 |

TABLE 16
Most differentially expressed genes in Cluster 13.

| Cluster | Gene | avg_logFC (Increase) | p_val | pct. 1 | pct. 2 | p_val_adj |
|---|---|---|---|---|---|---|
| 13 | PDE5A | 1.439985157 | 3.24289E−22 | 0.967 | 0.365 | 6.40503E−18 |
| 13 | MGP | 1.222167551 | 9.68174E−16 | 1 | 1 | 1.91224E−11 |
| 13 | WFDC2 | 1.091487434 | 5.91075E−17 | 1 | 0.679 | 1.16743E−12 |
| 13 | MRPS30-DT | 1.081270562 | 4.90793E−34 | 0.9 | 0.157 | 9.69365E−30 |
| 13 | RBM20 | 1.079620292 | 3.3553E−29 | 0.967 | 0.227 | 6.62704E−25 |
| 13 | MRPS30 | 1.056911819 | 3.60223E−19 | 1 | 0.667 | 7.11477E−15 |
| 13 | AMFR | 1.046976995 | 1.25599E−16 | 1 | 0.94 | 2.4807E−12 |
| 13 | STC2 | 0.9846206 | 5.37678E−17 | 1 | 0.916 | 1.06197E−12 |
| 13 | KCNE4 | 0.922004616 | 1.41051E−17 | 0.9 | 0.325 | 2.7859E−13 |
| 13 | DDR1 | 0.915241601 | 7.09634E−18 | 1 | 0.997 | 1.4016E−13 |
| Cluster | Gene | avg_logFC (Decrease) | p_val | pct. 1 | pct. 2 | p_val_adj |
| 13 | MCCC1 | 0.25012036 | 0.008672717 | 0.533 | 0.329 | 1 |
| 13 | PDPR | 0.250283653 | 0.001475067 | 0.867 | 0.636 | 1 |
| 13 | AMZ2 | 0.251051569 | 0.00140596 | 0.9 | 0.741 | 1 |
| 13 | C5orf15 | 0.251417578 | 0.001008343 | 0.9 | 0.833 | 1 |
| 13 | TBC1D9 | 0.251419806 | 0.00067258 | 1 | 0.971 | 1 |
| 13 | SRPK1 | 0.251720616 | 0.004445033 | 0.6 | 0.368 | 1 |
| 13 | LINC01488 | 0.252824252 | 0.000284945 | 0.3 | 0.102 | 1 |
| 13 | TSG101 | 0.253298185 | 0.00115588 | 0.867 | 0.7 | 1 |
| 13 | COA3 | 0.253593567 | 0.001172954 | 1 | 0.993 | 1 |
| 13 | NFKBIE | 0.253780521 | 0.000400873 | 0.667 | 0.343 | 1 |

[0454] Further, using Seurat, the most differentially-expressed genes in the breast cancer sample from FIG. 35A were identified by examining the average log fold change in a particular gene compared to the average expression of all genes in the breast cancer tissue sample. As shown in FIG. 36 and Table 17 below, the most upregulated genes in the breast cancer tissue sample include ALB, CRISP3, IGLC2, IGHG3, IGKC, CXCL14, IGHGL, IGLC3, MGP, SLITRK6, CPB1, and IGHA1.

TABLE 17
Most upregulated genes in a breast cancer sample.

| Cluster | Gene | avg_logFC (Increase) | p_val | pct. 1 | pct. 2 | p_val_adj |
|---|---|---|---|---|---|---|
| 7 | ALB | 3.0180208 | 3.77E−68 | 0.91 | 0.596 | 7.45E−64 |
| 4 | CRISP3 | 2.6068209 | 2.55E−239 | 1 | 0.801 | 5.03E−235 |
| 0 | IGLC2 | 2.2376986 | 9.87E−207 | 1 | 0.97 | 1.95E−202 |
| 0 | IGHG3 | 1.9692789 | 6.49E−207 | 1 | 1 | 1.28E−202 |
| 0 | IGKC | 1.9270996 | 4.29E−208 | 1 | 1 | 8.47E−204 |
| 2 | CXCL14 | 1.8732975 | 1.28E−247 | 1 | 0.959 | 2.52E−243 |
| 0 | IGHG1 | 1.8719631 | 8.47E−226 | 1 | 0.987 | 1.67E−221 |
| 0 | IGLC3 | 1.8685086 | 7.17E−160 | 0.949 | 0.617 | 1.42E−155 |
| 7 | MGP | 1.8575519 | 2.93E−93 | 1 | 1 | 5.79E−89 |
| 4 | SLITRK6 | 1.8156925 | 7.06E−276 | 0.995 | 0.369 | 1.39E−271 |

[0455] As shown in FIG. 37 and Table 18 below, the most downregulated genes in the breast cancer tissue sample include SRP14, MCCC1, CDV3, KIF16B, ID3, ZC3H12A, TRAPPC1, NSD3, HNRNPA01, SPATA20, PDPR, and GABARAPL1.

TABLE 18
Most downregulated genes in a breast cancer sample.

| Cluster | Gene | avg_logFC (Decrease) | p_val | pct. 1 | pct. 2 | p_val_adj |
|---|---|---|---|---|---|---|
| 5 | SRP14 | 0.2500146 | 9.97E−30 | 1 | 1 | 1.97E−25 |
| 13 | MCCC1 | 0.2501204 | 8.67E−03 | 0.533 | 0.329 | 1.00E+00 |
| 7 | CDV3 | 0.25013413 | 5.36E−10 | 0.91 | 0.871 | 1.06E−05 |
| 10 | KIF16B | 0.2501365 | 2.98E−09 | 0.545 | 0.336 | 5.88E−05 |
| 0 | ID3 | 0.2501782 | 2.04E−15 | 0.599 | 0.511 | 4.04E−11 |
| 4 | ZC3H12A | 0.2501944 | 2.63E−34 | 0.559 | 0.261 | 5.19E−30 |
| 5 | TRAPPC1 | 0.250232 | 1.13E−21 | 0.966 | 0.925 | 2.41E−17 |
| 2 | NSD3 | 0.2502539 | 4.50E−25 | 0.81 | 0.646 | 8.90E−21 |
| 12 | HNRNPA01 | 0.2502651 | 2.70E−05 | 0.975 | 0.957 | 5.34E−01 |
| 10 | SPATA20 | 0.2502745 | 1.06E−12 | 0.929 | 0.866 | 2.10E−08 |

[0456] The above data provide both individual gene markers and clusters of gene markers that are differentially expressed in a breast cancer sample. The individual gene markers and clusters of gene markers can be utilized to identify particular types of breast cancer (e.g., invasive carcinoma; DCIS) in a tissue sample, aiding in both diagnostic and therapeutic methods.

### Example 4: Spatially-Resolved Gene Expression and Clustering in Invasive Ductal Carcinoma

[0457] The spatial gene expression of invasive ductal carcinoma tissue from a female patient (ER+, PR−, HER2+) was profiled (BioIVT: Asterand—Case ID 66320; Specimen ID 116899F). As a control, the healthy tissue sections adjacent to the tumor were obtained. 4 replicates were used for each tissue type.

[0458] Spatially-resolved gene expression and clustering in invasive ductal carcinoma reveal intra-tumor heterogeneity is shown in FIGS. 23A-H. FIG. 23A shows a histological section of an invasive ductal carcinoma annotated by a pathologist. The section contains a large proportion of invasive carcinoma (outlined in black), three separate ductal cancer in situ regions, and fibrous tissue. FIG. 23B shows a tissue plot with spots colored by unsupervised clustering of transcripts. FIG. 23C shows a t-SNE plot of spots colored by unsupervised clustering of transcripts. FIG. 23D shows a gene expression heat map of the most variable genes between the 9 identified clusters. The region defined as fibrous tissue mostly corresponds to clusters 1, 7, and 8. Interestingly, a large region annotated as invasive carcinoma by a pathologist contained spatial spots that were assigned to DCIS (cluster 5). In addition, four subtypes of invasive carcinoma with distinct molecular properties (clusters 2, 3, 4, and 6) were identified, revealing intra-tumor heterogeneity.

[0459] The expression levels of genes corresponding to human epidermal growth factor receptor 2 (Her2 or ERBB2), estrogen receptor (ER or ESR1), and progesterone receptor (PGR) in the tissue section are shown in FIG. 23E. It is clearly visible that ERBB2 and ESR1 are highly expressed in the invasive carcinoma and DCIS regions while the expression of PR is absent, consistent with the patient's diagnosis. One of the top differentially expressed genes from each cluster in the invasive carcinoma region was selected (rectangular boxes in FIG. 23D), and its expression levels are located in the tissue as shown in FIG. 23F and overlapped in one plot as shown in FIG. 23G. With the exception of PGR, all of these genes were highly up-regulated in the carcinoma tissue compared to the adjacent normal tissue (FIG. 23H). Analysis revealed that all of these up-regulated genes have implication in cancer progression. Interestingly, in the subset of cluster 3, a long non-coding RNA, of which abnormal expression has recently been implicated in tumor development (see, e.g., Chang T, et al. Long Non-Coding RNA and Breast Cancer. Technol Cancer Res Treat. 2019, 18, 1533033819843889, incorporated herein by reference in its entirety), is one of the top differentially expressed genes. In glioblastoma, LINC00645 promotes epithelial-to-mesenchymal transition by inducing TGF-β (see, e.g., Li, C. et al. Long non-coding RNA linc00645 promotes TGF-β-induced epithelial—mesenchymal transition by regulating miR-205-3p-ZEB1 axis in glioma. Cell Death & Dis. 2019, 10, 272, incorporated herein by reference in its entirety).

[0460] During breast cancer progression, the myoepithelial cells, which continue to surround preinvasive in situ carcinoma, gradually disappear (see, e.g., Gudjonsson, T. et al. Myoepithelial Cells: Their Origin and Function in Breast Morphogenesis and Neoplasia. J. Mammary Gland Biol. Neoplasia. 2009, 10, 261, incorporated herein by reference in its entirety). This phenomenon is clearly visualized in FIGS. 23I and 23J where KRT14 (a gene signature of myoepithelial cells) was highly expressed around the lining of the duct in the normal tissue while it was disappearing in the DCIS region in IDC tissue (FIG. 23I). The extracellular matrix genes such as COL1A1 and FN1, key genes associated with invasion and metastasis, were highly upregulated while smooth muscles and basal keratin were down-regulated in IDC (FIG. 23J).

### Example 5: Identification of Heterogeneity in Triple Negative Breast Cancer Sample Using Spatial Gene Expression Methods

[0461] Extensive heterogeneity exists in the breast cancer tumor microenvironment. However, clinical characterization has been primarily limited to pathologist annotation and tissue staining for three key genes: estrogen receptor (ER), progesterone receptor (PR), and human epidermal growth factor receptor 2 (HER2). Triple negative breast cancer (TNBC) expresses none of the usual breast cancer therapeutic targets, including ER, PR, and HER2, making it unresponsive to either hormone therapy or targeted anti-HER2 drugs like trastuzumab.

[0462] Here, heterogeneity was examined using spatial methods. Briefly, human tissue specimens from triple negative breast cancer biopsy were obtained. 10 μm fresh-frozen tissue was sectioned using a cryostat. The sectioned tissues for each sample were placed onto a gene expression slide having approximately 5,000 gene expression spots, each of which contains spatially barcoded probes that bind mRNA from the cells in the tissue section above it.

[0463] The samples were fixed with acetone, and were stained with hematoxylin and eosin (H&E) according established protocols. H&E-stained tissues were images at 20× magnification using brightfield settings (see FIG. 38A) and manually annotated by a pathologist. As shown in FIG. 38B, annotation of the sample outlined areas of DCIS, fibrous tissue, immune cells, invasive carcinoma, and normal gland. The outlined areas identified by the pathologist were filled in, showing the five annotations. As shown in FIG. 38C, the bulk of the section was annotated as invasive carcinoma, meaning the cancer cells have spread beyond the milk duct and invaded the surrounding breast tissue, and have the potential to spread to other parts of the body. Surrounding the invasive carcinoma are immune cells, which are interspersed with discrete regions of ductal carcinoma in situ (DCIS), areas of non-invasive cancer where atypical cells line the milk ducts. Along the upper left periphery lies fibrous tissue, predominantly made up of extracellular matrix. Normal gland, is also present.

[0464] After imaging, the tissue was prepared for spatial detection of gene expression. First, the tissue was permeabilized, releasing mRNA that bound to spatially barcoded capture probes on the slide. Briefly, tissues were washed and permeabilized using Proteinase K, incubated at 37° C. for at least 5 minutes and then washed to remove the protease.

[0465] After permeabilization, the released mRNA are allowed to hybridize to the capture domain on the capture probe immobilized on the spatial array via the polyA tail on the mRNA. The captured mRNA molecules were copied, using the capture probe as a template and the extension product was released from the spatial array. Briefly, the tissues were incubated with a second strand extension mix comprising Kapa Hifi DNA polymerase (Roche) for 25 minutes at 53° C. Following incubation, the extension mix was removed from the tissues and the tissues were washed with SSC. A solution of KOH was added to each of the tissue wells, the tissues were incubated at room temperature for 10 minutes to release the extension product from the spatial array and the supernatant from each tissue well was transferred for quantitation, library preparation and sequencing on the Illumina NextSeq sequencing instrument.

[0466] Sequencing results were analyzed and groups (i.e., clusters) of co-segregated genes were identified. Clusters were visualized spatially, with reference to the tissue section (FIG. 38D), or as UMAP projections showing the distance between gene expression-based clusters (FIG. 38E). While a traditional single cell UMAP is made up of dots representing single cells, with spatial gene expression each dot represents a tissue-covered spot that may include mRNA from one to ten cells as shown in FIG. 38E. A list of select differentially expressed genes for all eight graph-based clusters is provided in Table 19.

[0467] In general, there was high correlation between pathologist annotations and graph-based clusters determined by gene expression, particularly at region boundaries. For instance, as shown in FIG. 38D, graph-based Cluster 3 primarily overlapped with the pathologist-annotated region labeled as fibrous tissue, and Clusters 6 and 7 overlapped largely with immune cells. Cluster 8 showed consistent localization with DCIS. Using Spatial Gene Expression, additional heterogeneity can be identified within regions, particularly for invasive carcinoma, which is made up of four distinct gene expression-based clusters, including Cluster 1, Cluster 2, Cluster 4, and Cluster 5.

[0468] In the same sample used herein, these methods were used to identify expression of individual genes. For example, immunoglobulin lambda constant 2 (IGLC2; FIGS. 40A-40B); C—C motif chemokine ligand 19 (CCL19, FIG. 40C); immunoglobulin heavy constant alpha 2 (A2m marker) (IGHA2; FIG. 40D); migration and invasion enhancer 1 (MIEN1; FIG. 40E), and secretory leukocyte peptidase inhibitor (SLPI, FIG. 40F) were identified.

[0469] Next, using the cancer panel described herein, similar cluster patterns and transcriptional profiles were resolved on a second section of the same TNBC sample. See FIG. 38F.

[0470] Taken together, these data demonstrate that, while whole transcriptome analysis is ideal for discovery and full characterization of graph-based clusters, targeted transcriptome analysis can provide exceptional value in the disambiguation of spatial heterogeneity and validation of preliminary findings.

TABLE 19
Select differentially expressed genes for spatially defined clusters

| Cluster | Gene | Name | Summary |
|---|---|---|---|
| 1 | MMP7 | Matrix metallopeptidase 7 | Exhibits elevated expression in |
| | | | several types of human cancer |
| 1 | FYB1 | FYN binding protein 1 | Involved in platelet activation and IL- |
| | | | 2 expression |
| 2 | FDCSP | Follicular dendritic cell | Secreted protein that binds to |
| | | secreted protein | activated B cells to regulate antibody |
| | | | responses may promote cancer cell |
| | | | invasion and migration |
| 2 | BCL2A1 | BCL2 related protein Al | Reduces release of pro-apoptotic |
| | | | cytochrome c, and serves as a direct |
| | | | transcription factor of NK-kB in |
| | | | response to inflammatory mediators |
| 3 | TNXB | Tenascin XB | Extracellular matrix glycoprotein |
| | | | with anti-adhesive effects |
| 3 | CLDN5 | Claudin 5 | Integral membrane protein and |
| | | | component of tight junctions |
| 4 | KLK6 | Kallikrein related | Implicated in carcinogenesis and may |
| | | peptidase 6 | serve as a biomarker for multiple |
| | | | cancer types |
| 4 | CENPW | Centromere protein W | Putative oncogene |
| 5 | CST1 | Cystatin SN | Favorable prognostic marker in |
| | | | breast cancer |
| 5 | POSTN | Periostin | Secreted extracellular matrix protein |
| | | | that plays a role in cancer stem cell |
| | | | maintenance and metastasis |
| 6 | CXCL14 | C-X-C motif chemokine | Chemoattractant for neutrophils and |
| | | ligand 14 | expressed by myeloid dendritic cells |
| 6 | CD79B | CD79b molecule | Part of B lymphocyte antigen |
| | | | receptor |
| 7 | IGLC3 | Immunoglobulin lambda | Part of the constant region of B-cell |
| | | constant 3 (Kern-Oz + | antibodies |
| | | marker) | |
| 7 | MZB1 | Marginal zone B and B1 | Marker of plasma B cells |
| | | cell specific protein | |
| 8 | PIGR | Polymeric | Favorable prognostic marker in |
| | | immunoglobulin receptor | breast cancer |
| 8 | CLU | Clusterin | Secreted chaperone protein that can |
| | | | protect against apoptosis |

### Example 6: Integration of Single Nucleus RNA-Seq with Spatial Gene Expression Integration

[0471] Spatial gene expression spots have a diameter of about 55 microns and typically capture 1-10 cells per spot, depending on tissue thickness and cell density. To increase resolution of spatially resolved gene expression to the single cell level, single nuclei RNA-sequencing (snRNA-seq) of two TNBC samples was used to identify cellular subtypes within the tissue.

[0472] The methods of sectioning a tissue, staining and imaging the section, and capturing and amplification of mRNA was performed as described in Example 5. In addition, two additional fresh-frozen serial TNBC samples were sectioned, and individual nuclei were isolated using methods described previously. See Chromium Next GEM Single Cell 3′ Reagent Kits v3.1 User Guide, Document Number CG000204, Revision Date: November 2019. The resulting data for 86,249 single nuclei were aggregated before clustering and annotated manually using a marker gene approach. See FIG. 39A. Gene expression profiles for both tissues were processed in Seurat and batch corrected using Harmony. See e.g., Korsunsky et al., Fast, Sensitive and Accurate Integration of Single-Cell Data with Harmony. Nat. Methods. 16, 1289-1296 (2019), which is incorporated by reference in its entirety. Cell-type anchors determined by snRNA-seq were matched to Visium Gene Expression spots where these cell types were abundant. For additional detail on how to generate and match cell-type anchors, consult the “Analysis, visualization, and integration of spatial datasets with Seurat” vignette (Analysis, visualization, and integration of spatial datasets with Seurat. Satija Lab. satijalab.org/seurat/v3.2/spatial_vignette.html, which is incorporated by reference in its entirety).

[0473] The extent and composition of immune cell infiltration in a tumor informs prognosis. Thus, combining snRNA-seq with spatial gene expression provides a unique view into both the identity of infiltrating cells as well as the extent of penetration into the cancerous region. By leveraging paired snRNA-seq data, spots containing specific subtypes of T cells were identified. As shown in FIG. 39B and FIG. 41, T cells were found throughout the immune cell-annotated region, as well as within the invasive carcinoma region, well beyond the exterior histological boundary. This cluster, T cells-1, expressed PD-1, perforin, granzyme, and other checkpoint inhibitors, suggesting an exhausted T-cell phenotype and limited anti-tumor efficacy.

[0474] In the absence of snRNA-seq data, the predominant cell type in graph-based clusters can also be inferred based on gene expression. For example, as shown in FIG. 38D, Cluster 7, along the periphery of the pathologist-annotated invasive carcinoma region, expressed numerous immunoglobulin genes, along with MZB1 and JCHAIN, both markers of plasma B cells, suggesting that in this patient, a novel B-cell response has been mounted against the tumor. Analysis of paired, full-length Ig receptors in B cells from this sample could provide additional prognostic value and potential tumor-specific antibody sequences. But, by coupling snRNA-seq and spatial analysis, CD49f^{hi} mammary stem cells (MaSCs), a potential tumor stem cell population, were identified and localized predominantly within the fibrous tissue (FIGS. 39C and 44). Transformation of MaSCs into breast cancer stem cells may result in CD49f^{hi} cells within a breast tumor, the presence of which have been associated with increased chance of cancer recurrence. Given the identification of CD49f^{hi} cells in this TNBC section, knowing whether the cells are tumorigenic could help inform prognosis. Additional cells were identified using the methods disclosed herein. For example, B cells (FIG. 42), subsets of tumor cells (FIG. 43) and cancer stem cells (i.e., luminal progenitor cells) (FIG. 45) were identified in the sample.

[0475] To discriminate between tumor and normal cells, spots were individually genotyped. Serial sections of TNBC individually genotyped by souporcell variant identification pipeline. See Heaton et al., bioRxiv 2019. doi.org/10.1101/699637. Variants called in bulk and genotyped using VarTrix6. Clustering (k=2) for identification of major distinct spot clusters shows refinement of tumor/normal boundaries. As shown in FIG. 39D, it was possible to differentiate between putative tumor spots and non-transformed normal spots as long as the divergent alleles were expressed. For example, in the sample in FIG. 39D, the regions containing CD49f^{hi} MaSCs appear genetically normal, suggesting these cells have not yet transformed into breast cancer stem cells, though they may be driven towards a cancer phenotype, given their gene expression profiles. Finally, alternate allele genotype load identified by selection of nonsense (stop gain) and missense (stop loss) mutations were enriched in tumor samples. As shown in FIGS. 39E-39G, Mutant Variant Load represents the number of deleterious alternate allele was observed for a given spot.

### Example 7: Selective Enrichment of Genes of Interest in Breast Invasive Ductal Carcinoma Sample

[0476] An invasive ductal carcinoma tissue sample from a female patient (ER+, PR−, HER2+) (BioIVT: Asterand—Case ID 66320; Specimen ID 1168993F) was processed as described according to the steps in Example 1. Identification of genes of interest were determined using a cancer-specific panel (FIG. 46A), immune-specific panel (FIG. 46B), and gene-signature (transcription factor) specific panel (FIG. 46C) compared to a non-biased approach using probes to cover the entire transcriptome (FIG. 46D). As shown in FIGS. 47A-47C, there was strong concordance between each group, demonstrating the comparative capability of using a gene-specific panel instead of probes for the entire transcriptome.

[0477] The invasive ductal carcinoma sample was examined by a pathologist, who identified areas of the sample as having areas that were cancerous or non-cancerous. See FIG. 48A. Individual TNBC sections were processed and expression in two different tissue and gene expression spaces was determined; after aggregation of RNA-seq data, clusters were mapped back to their original tissue space but now share expression space (UMAP). See FIG. 48B. Based on the pan-cancer targeted sample, it was identified that ALB, SOCS2, CSTA, BAMBI, WIPI1, PRLR, BCL2, ZNF03, and IL6ST were overexpressed in DCIS cancer cells. And, it was identified that PRKACB, SPP1, CCND1, FGFR1, VEGFA, FN1, HES6, S100A11, H2AFX, were overexpressed in invasive carcinoma cancer cells. See, e.g., Table 20.

[0478] In addition, based on immune clustering, immune cells were identified. See FIGS. 49A-49D.

TABLE 20
Transcripts with increased expression (increased
expression is shown in parentheses relative to all other
cells in same sample), taken from pan-cancer
targeted invasive ductal carcinoma sample.

| DCIS vs. All | | Invasive Carcinoma vs. All | |
|---|---|---|---|
| (Log fold change) | | (Log fold change) | |
| ALB | (3.51) | PRKACB | (2.32) |
| SOCS2 | (2.88) | SPP1 | (2.24) |
| CSTA | (2.69) | CCND1 | (1.52) |
| BAMBI | (2.33) | FGFR1 | (1.47) |
| WIPI1 | (2.19) | VEGFA | (1.45) |
| PRLR | (1.84) | FN1 | (1.41) |
| BCL2 | (1.57) | HES6 | (1.36) |
| ZNF703 | (1.57) | S100A11 | (1.14) |
| IL6ST | (1.55) | H2AFX | (1.11) |

### Example 8: Spot Deconvolution with scRNA-Seq

[0479] The snRNA-seq sample of Example 6 is further analyzed to identify the cell types in each spot on an array. Here, a first section of a sample is placed on an array and analyte capture as described herein. A second section of tissue undergoes cellular dissociation, creating a sample with isolated cells that can be analyzed. Briefly, a tissue is minced into small pieces and treated with lysis buffer to homogenize the sample. The homogenous resultant is filtered and centrifuged to collect a pellet of nuclei. The nuclei is resuspended and used for single cell analysis. Multiple methods of deconvolution of spots are known in the art. See Elosua et al., SPOTlight: Seeded NMF regression to Deconvolute Spatial Transcriptomics Spots with Single-Cell Transcriptomes; Maaskola et al., Charting Tissue Expression Anatomy by Spatial Transcriptome Deconvolution; and MuSiC.

[0480] Data captured from the second section (i.e., the single nuclei data) is combined with the data from the first section (i.e., the whole tissue data) to gain a higher cell type understanding and potentially deconvolve the cell type identity within each spot on the array. Additional methods of single cell isolation is found in Hu et al., Mol Cell. 2017 Dec. 7; 68(5):1006-1015.e7; Habib et al., Science, 2016 Aug. 26; 353(6302):925-8; Habib et al., Nat Methods, 2017 October; 14(10):955-958; Lake et al., Science, 2016 Jun. 24; 352(6293):1586-90; and Lacar et al., Nat Commun, 2016 Apr. 19; 7:11022; each of which is incorporated by reference in its entirety.

1-67. (canceled)

68. A method of determining the abundance of two or more analytes in a breast cancer sample from a subject, wherein the method comprises
(a) determining an abundance of two or more analytes selected from the group consisting of: (1) CENPW, (2) A2ML1, (3) VLDLR, (4) SCRG1, (5) RCL1, (6) FABP7, (7) CCNE1, (8) MIEN1, (9) CDC37L1, (10) ERMP1, (11) TNFSF10, (12) ACTG2, (13) DMKN, (14) CALML3, (15) COL17A1, (16) MAGED1, (17) PTN, (18) TMEM98, (19) LY6D, (20) TNC, and (21) RTN4IP1, and byproducts, precursors, and degradation products thereof in a biological sample obtained from the subject; and
(b) identifying a subject having increased abundance(s) of the two or more analytes (1)-(21) and byproducts, precursors, and degradation products thereof, in the biological sample as compared to reference abundance(s) of the two or more analytes (1)-(21) and byproducts, precursors, and degradation products thereof, as having breast cancer; thereby determining the abundance of two or more analytes in the breast cancer sample from the subject.

69. The method of claim 68, wherein a subject is further treated for (a) invasive carcinoma, when the subject has increased abundance(s) of two or more analytes (1)-(11) and byproducts, precursors, and degradation products thereof, or (b) ductal carcinoma, when the subject has increased abundance(s) of two or more analytes (12)-(21) and byproducts, precursors, and degradation products thereof.

70. (canceled)

71. A method of determining the abundance of two or more analytes in a breast cancer sample from a subject, wherein the method comprises
(a) determining an abundance of two or more analytes selected from the group consisting of: ALB, SOCS2, CSTA, BAMBI, WIPI1, PRLR, BCL2, ZNF03, IL6ST, PRKACB, SPP1, CCND1, FGFR1, VEGFA, FN1, HES6, S100A11, H2AFX, and byproducts, precursors, and degradation products thereof in a biological sample obtained from the subject; and
(b) identifying a subject having increased abundance(s) of two or more analytes ALB, SOCS2, CSTA, BAMBI, WIPI1, PRLR, BCL2, ZNF03, IL6ST, PRKACB, SPP1, CCND1, FGFR1, VEGFA, FN1, HES6, S100A11, H2AFX, and byproducts, precursors, and degradation products thereof, in the biological sample as compared to reference abundance(s) of the two or more analytes ALB, SOCS2, CSTA, BAMBI, WIPI1, PRLR, BCL2, ZNF03, IL6ST, PRKACB, SPP1, CCND1, FGFR1, VEGFA, FN1, HES6, S100A11, H2AFX, and byproducts, precursors, and degradation products thereof, as having breast cancer; thereby determining the abundance of two or more analytes in the breast cancer sample from the subject.

72. The method of claim 71, wherein a subject is further treated for (a) ductal carcinoma, when the subject has increased abundance(s) of two or more analytes ALB, SOCS2, CSTA, BAMBI, WIPI1, PRLR, BCL2, ZNF03, IL6ST, and byproducts, precursors, and degradation products thereof or (b) invasive carcinoma, when the subject has increased abundance(s) of two or more analytes PRKACB, SPP1, CCND1, FGFR1, VEGFA, FN1, HES6, S100A11, and H2AFX, and byproducts, precursors, and degradation products thereof.

73. (canceled)

74. A method of determining the abundance of two or more analytes in a breast cancer sample from a subject, wherein the method comprises
(a) determining in a biological sample obtained from the subject an abundance of one or more of:
(i) two or more analytes selected from the group consisting of IGLC2, IGHG3, IGKC, IGHG1, IGLC3, IGHA1, IGHG2, IGHM, IGHG4, JCHAIN, ID3, CIITA, CST7, IFI27L2, FYN, MICAL1, HMOX1, CD7, ARHGEF1, and CFH and byproducts, precursors, and degradation products thereof;
(ii) two or more analytes selected from the group consisting of MALAT1, CTSD, TYMP, SAMHD1, CYBA, ISG15, C1QA, RPS9, H2AFJ, ADIRF, ARHGDIA, APRT, AEBP1, PLEC, APOE, FCGRT, NDUFB7, MBD3, EMILIN1, and GADD45GIP1 and byproducts, precursors, and degradation products thereof;
(iii) two or more analytes selected from the group consisting of CXCL14, TTLL12, GFRA1, DEGS1, AGR2, ARMT1, CCND1, ARPP21, CRAT, PRKACB, NSD3, PLAUR, CDKN2C, FIP1L1, TMEM159, TMEM141, LIN7C, ARHGEF39, ARFGEF3, and EMP2 and byproducts, precursors, and degradation products thereof;
(iv) two or more analytes selected from the group consisting of CPB1, FCGR3B, KLHDC7B, SCGB1D2, SCUBE3, CXCL9, COX6C, CFB, SCGB2A2, NPY1R, AC087741.1, GBP5, IFT27, NEURL4, EMX1, SLC13A2, FAM110A, SPCS1, HGD, and ZNF587 and byproducts, precursors, and degradation products thereof;
(v) two or more analytes selected from the group consisting of CRISP3, SLITRK6, C6orf141, VTCN1, SERHL2, CEACAM6, ABCC11, SHISA2, C2orf54, PDLIM1, ZC3H12A, VPS37B, IRF2BP2, RAPH1, NFKBIA, EIF2AK1, TRIM33, SFPQ, F7, and TRAPPC3 and byproducts, precursors, and degradation products thereof;
(vi) two or more analytes selected from the group consisting of LINC00052, COX6C, SNCG, WFDC2, SLC39A6, MGST1, MCCD1, CSTA, PDE5A, MT-ND1, SRP14, TRAPPC1, SNRPD3, MAT2A, SLC7A8, POLR2K, TMBIM6, OCIAD1, EXOSC3, and CA14 and byproducts, precursors, and degradation products thereof;
(vii) two or more analytes selected from the group consisting of ACKR1, IGFBP7, AQP1, VWF, MALAT1, SPARCL1, TAGLN, CCL21, ACTA2, CCDC₈₀, CYB5R3, PLXND1, DUSP1, RPS6, C1QA, HEG1, ETS2, AKAP9, CCAR1, and TRIM47 and byproducts, precursors, and degradation products thereof;
(viii) two or more analytes selected from the group consisting of ALB, MGP, ZNF350-AS1, S100G, STC2, CARTPT, AC087379.2, GPC3, ERP27, APOD, CDV3, TPI1, TSPYL5, PFKP, CRIM1, PPT1, AC100826.1, ALDOA, LGR4, and GLRX2 and byproducts, precursors, and degradation products thereof;
(ix) two or more analytes selected from the group consisting of AC087379.2, S100G, SCGB2A2, PGM5-AS1, HEBP1, AMIGO2, PCED1B, SCGB1D2, ITPR1, IFT122, GABARAPL1, G6PC3, INPP5K, STC2, HEXIM2, RIDA, LRP2, HK2, IL1R2, and GOT2 and byproducts, precursors, and degradation products thereof;
(x) two or more analytes selected from the group consisting of ALB, MT-ND2, MT-ND1, MT-ND3, MT-ATP6, MT-ND4, MT-CO1, MT-CO3, MT-ATPS, MT-ND5, GLO1, ABHD2, LINC00052, RERG, STC2, MALAT1, SOX4, CA12, ZNF703, and MCCD1 and byproducts, precursors, and degradation products thereof;
(xi) two or more analytes selected from the group consisting of LINC00645, SLC30A8, MUC5B, COLEC12, PVALB, CPB1, EXOC2, AC037198.2, VSTM2A, FSIP1, KIF16B, SPATA20, TSPAN9, CACNB3, CAMK2N1, IFT27, NEURL1, TRIM3, SLC46A1, and ECI2 and byproducts, precursors, and degradation products thereof;
(xii) two or more analytes selected from the group consisting of MGP, TFF1, KRT14, S100A9, KRT17, S100G, S100A2, ZNF350-AS1, KRT5, S100A8, MN1, TMEM45A, DNALI1, C3orf14, TSR1, AL445524.1, SEMA3C, NDUFAF2, ASCL1, and GRHL2 and byproducts, precursors, and degradation products thereof;
(xiii) two or more analytes selected from the group consisting of SAA1, FABP4, GPX3, PIP, ADH1B, PLIN1, COL2A1, SH3BGRL, ADIPOQ, PLIN4, HNRNPA0, RPL11, SLC40A1, RPLP2, CTDSP2, SORL1, RPL31, ECE1, SFRP2, and CCND1 and byproducts, precursors, and degradation products thereof; or
(xiv) two or more analytes selected from the group consisting of PDE5A, MGP, WFDC2, MRPS30-DT, RBM20, MRPS30, AMFR, STC2, KCNE4, DDR1, MCCC1, PDPR, AMZ2, C5orf15, TBC1D9, SRPK1, LINC01488, TSG101, COA3, and NFKBIE and byproducts, precursors, and degradation products thereof; and
(b) identifying a subject having dysregulated abundance(s) of one or more of (i)-(xiv) in the biological sample as compared to reference abundance(s) of the one or more of as having breast cancer; thereby determining the abundance of two or more analytes in the breast cancer sample from the subject.

75. The method of claim 74, wherein the method comprises:
(a) determining an abundance of one or more of:
(i) two or more analytes selected from the group consisting of IGLC2, IGHG3, IGKC, IGHG1, IGLC3, IGHA1, IGHG2, IGHM, IGHG4, JCHAIN, and byproducts, precursors, and degradation products thereof;
(ii) two or more analytes selected from the group consisting of MALAT1, CTSD, TYMP, SAMHD1, CYBA, ISG15, C1QA, RPS9, H2AFJ, ADIRF, and byproducts, precursors, and degradation products thereof;
(iii) two or more analytes selected from the group consisting of CXCL14, TTLL12, GFRA1, DEGS1, AGR2, ARMT1, CCND1, ARPP21, CRAT, PRKACB, and byproducts, precursors, and degradation products thereof;
(iv) two or more analytes selected from the group consisting of CPB1, FCGR3B, KLHDC7B, SCGB1D2, SCUBE3, CXCL9, COX6C, CFB, SCGB2A2, NPY1R, and byproducts, precursors, and degradation products thereof;
(v) two or more analytes selected from the group consisting of CRISP3, SLITRK6, C6orf141, VTCN1, SERHL2, CEACAM6, ABCC11, SHISA2, C2orf54, PDLIM1, and byproducts, precursors, and degradation products thereof;
(vi) two or more analytes selected from the group consisting of LINC00052, COX6C, SNCG, WFDC2, SLC39A6, MGST1, MCCD1, CSTA, PDE5A, MT-ND1, and byproducts, precursors, and degradation products thereof;
(vii) two or more analytes selected from the group consisting of ACKR1, IGFBP7, AQP1, VWF, MALAT1, SPARCL1, TAGLN, CCL21, ACTA2, CCDC₈₀, and byproducts, precursors, and degradation products thereof;
(viii) two or more analytes selected from the group consisting of ALB, MGP, ZNF350-AS1, S100G, STC2, CARTPT, AC087379.2, GPC3, ERP27, APOD, and byproducts, precursors, and degradation products thereof;
(ix) two or more analytes selected from the group consisting of AC087379.2, S100G, SCGB2A2, PGM5-AS1, HEBP1, AMIGO2, PCED1B, SCGB1D2, ITPR1, IFT122, and byproducts, precursors, and degradation products thereof;
(x) two or more analytes selected from the group consisting of ALB, MT-ND2, MT-ND1, MT-ND3, MT-ATP6, MT-ND4, MT-CO1, MT-CO3, MT-ATPS, MT-ND5, and byproducts, precursors, and degradation products thereof;
(xi) two or more analytes selected from the group consisting of LINC00645, SLC30A8, MUC5B, COLEC12, PVALB, CPB1, EXOC2, AC037198.2, VSTM2A, FSIP1, and byproducts, precursors, and degradation products thereof;
(xii) two or more analytes selected from the group consisting of MGP, TFF1, KRT14, S100A9, KRT17, S100G, S100A2, ZNF350-AS1, KRT5, S100A8, and byproducts, precursors, and degradation products thereof;
(xiii) two or more analytes selected from the group consisting of SAA1, FABP4, GPX3, PIP, ADH1B, PLIN1, COL2A1, SH3BGRL, ADIPOQ, PLIN4, and byproducts, precursors, and degradation products thereof; or
(xiv) two or more analytes selected from the group consisting of PDE5A, MGP, WFDC2, MRPS30-DT, RBM20, MRPS30, AMFR, STC2, KCNE4, DDR1, and byproducts, precursors, and degradation products thereof; and
(b) identifying a subject having increased abundance(s) of one or more of (i)-(xiv), in the biological sample as compared to reference abundance(s) of the one or more of (i)-(xiv), as having breast cancer.

76. The method of claim 74, wherein the method comprises:
(a) determining an abundance of one or more of:
(i) two or more analytes selected from the group consisting of ID3, CIITA, CST7, IFI27L2, FYN, MICAL1, HMOX1, CD7, ARHGEF1, and CFH and byproducts, precursors, and degradation products thereof;
(ii) two or more analytes selected from the group consisting of ARHGDIA, APRT, AEBP1, PLEC, APOE, FCGRT, NDUFB7, MBD3, EMILIN1, and GADD45GIP1 and byproducts, precursors, and degradation products thereof;
(iii) two or more analytes selected from the group consisting of NSD3, PLAUR, CDKN2C, FIP1L1, TMEM159, TMEM141, LIN7C, ARHGEF39, ARFGEF3, and EMP2 and byproducts, precursors, and degradation products thereof;
(iv) two or more analytes selected from the group consisting of AC087741.1, GBP5, IFT27, NEURL4, EMX1, SLC13A2, FAM110A, SPCS1, HGD, and ZNF587 and byproducts, precursors, and degradation products thereof;
(v) two or more analytes selected from the group consisting of ZC3H12A, VPS37B, IRF2BP2, RAPH1, NFKBIA, EIF2AK1, TRIM33, SFPQ, F7, and TRAPPC3 and byproducts, precursors, and degradation products thereof;
(vi) two or more analytes selected from the group consisting of SRP14, TRAPPC1, SNRPD3, MAT2A, SLC7A8, POLR2K, TMBIM6, OCIAD1, EXOSC3, and CA14 and byproducts, precursors, and degradation products thereof;
(vii) two or more analytes selected from the group consisting of CYB5R3, PLXND1, DUSP1, RPS6, C1QA, HEG1, ETS2, AKAP9, CCAR1, and TRIM47 and byproducts, precursors, and degradation products thereof;
(viii) two or more analytes selected from the group consisting of CDV3, TPI1, TSPYL5, PFKP, CRIM1, PPT1, AC100826.1, ALDOA, LGR4, and GLRX2 and byproducts, precursors, and degradation products thereof;
(ix) two or more analytes selected from the group consisting of GABARAPL1, G6PC3, INPP5K, STC2, HEXIM2, RIDA, LRP2, HK2, IL1R2, and GOT2 and byproducts, precursors, and degradation products thereof;
(x) two or more analytes selected from the group consisting of GLO1, ABHD2, LINC00052, RERG, STC2, MALAT1, SOX4, CA12, ZNF703, and MCCD1 and byproducts, precursors, and degradation products thereof;
(xi) two or more analytes selected from the group consisting of KIF16B, SPATA20, TSPAN9, CACNB3, CAMK2N1, IFT27, NEURL1, TRIM3, SLC46A1, and ECI2 and byproducts, precursors, and degradation products thereof;
(xii) two or more analytes selected from the group consisting of MN1, TMEM45A, DNALI1, C3orf14, TSR1, AL445524.1, SEMA3C, NDUFAF2, ASCL1, and GRHL2 and byproducts, precursors, and degradation products thereof;
(xiii) two or more analytes selected from the group consisting of HNRNPA0, RPL11, SLC40A1, RPLP2, CTDSP2, SORL1, RPL31, ECE1, SFRP2, and CCND1 and byproducts, precursors, and degradation products thereof; or
(xiv) two or more analytes selected from the group consisting of MCCC1, PDPR, AMZ2, C5orf15, TBC1D9, SRPK1, LINC01488, TSG101, COA3, and NFKBIE and byproducts, precursors, and degradation products thereof; and
(b) identifying a subject having decreased abundance(s) of one or more of (i)-(xiv), in the biological sample as compared to reference abundance(s) of the one or more of (i)-(xiv), as having breast cancer.

77-78. (canceled)

79. The method of claim 68, further comprising administering a treatment of breast cancer to the subject, adjusting a dosage of a treatment of breast cancer for the subject, or adjusting a treatment of breast cancer for the subject.

80. The method of claim 79, wherein the treatment comprises administering one or more therapies selected from the group consisting of an endocrine therapy, a chemotherapy a hormonal therapy, and a surgical resection.

81. The method of claim 80, wherein the endocrine therapy is one or more agents selected from the group consisting of tamoxifen, raloxifene, megestrol, toremifene, and an aromatase inhibitor; the chemotherapy is neoadjuvant chemotherapy; and the surgical resection is surgery for breast tissue and/or lymph node tissue.

82. The method of claim 81, wherein the aromatase inhibitor is one or more agents selected from the group consisting of anastrozole, letrozole, or exemestane; and the neoadjuvant chemotherapy is one or more agents selected from a taxane derivative, an anthracycline derivative, and a topoisomerase inhibitors.

83-84. (canceled)

85. The method of claim 82, wherein the taxane derivative is one or more agents selected from docetaxel and paclitaxel; and the anthracycline derivative is doxorubicin.

86. (canceled)

87. The method of claim 81, wherein the breast tissue surgery is selected from the group comprising lumpectomy, quadrantectomy, partial mastectomy, segmental mastectomy, complete mastectomy, and the lymph node tissue surgery is selected from the group consisting of sentinel lymph node biopsy and axillary lymph node dissection.

88. The method of claim 68, wherein the two or more analytes are mRNA molecules.

89. The method of claim 88, wherein the determining step comprises determining the abundance and location of the two or more analytes, the method comprising:
(a) contacting the biological sample with a substrate comprising a plurality of attached capture probes, wherein a capture probe of the plurality comprises (i) a spatial barcode and (ii) a capture domain that binds to a sequence present in the analyte;
(b) hybridizing the two or more analytes to the capture domain;
(c) extending a 3′ end of the capture probe using the analyte that is bound to the capture domain as a template to generate an extended capture probe;
(d) amplifying the extended capture probe; and
(e) determining (i) all or a portion of the sequence of the spatial barcode or the complement thereof, and (ii) all or a portion of the sequence of the analyte from the biological sample; and using the determined sequences of (i) and (ii) to identify the location of the analyte in the biological sample, thereby determining the abundance and location of the two or more analytes.

90. The method of claim 68, wherein the two or more analytes are proteins.

91. The method of claim 90, wherein the determining step comprises determining the abundance and location of the two or more analytes, the method comprising:
(a) attaching the biological sample with a plurality of analyte capture agents, wherein an analyte capture agent of the plurality of analyte capture agents comprises:
(i) an analyte binding moiety that binds to the two or more analytes;
(ii) an analyte binding moiety barcode that uniquely identifies an interaction between the two or more analytes and the analyte binding moiety; and
(iii) an analyte capture sequence, wherein the analyte capture sequence binds to a capture domain;
(b) contacting the biological sample with a substrate, wherein the substrate comprises a plurality of capture probes, wherein a capture probe of the plurality of capture probes comprises (i) the capture domain and (ii) a spatial barcode;
(c) hybridizing the two or more analytes to the capture probe; and
(d) determining (i) all or a part of a sequence corresponding to the analyte binding moiety barcode, and (ii) all or a part of a sequence corresponding to the spatial barcode, or a complement thereof, and using the determined sequence of (i) and (ii) to identify the abundance and spatial location of the two or more analytes in the biological sample.

92. The method of claim 68, wherein the biological sample from the subject comprises more than one biological sample from the subject from a plurality of time points and determining the abundance of the two or more analytes in the two or more biological samples from the plurality of time points from the subject.

93. The method of claim 68, wherein the biological sample is a solid tissue sample, wherein the solid tissue sample is a formalin fixed paraffin embedded tissue sample or a frozen tissue sample.

94. The method of claim 68, wherein the biological sample is a breast tissue sample from a subject suspected of having a breast carcinoma of any one of: a ductal carcinoma in situ, a triple negative breast cancer, an estrogen receptor positive breast cancer, a progesterone receptor negative breast cancer, and a human epidermal growth factor receptor 2 positive breast cancer.

The application's sequence listing, which the Patent Office published only in electronic form, follows.

SEQUENCE LISTING (1041963 sequences)

SEQ ID NO: 1 - DNA, 120 bp, Artificial Sequence
  ENSG00000000003_0 (sequence is synthesized)
agttgtggacgctcgtaagttttcggcagtttccggggagactcggggactccgcgtctcgctctctgtgttccaatcgcccggtgcggtggtgcagggtctcgggctagtcatggcgtc

SEQ ID NO: 2 - DNA, 120 bp, Artificial Sequence
  ENSG00000000003_1 (sequence is synthesized)
cccgtctcggagactgcagactaaaccagtcattacttgtttcaagagcgttctgctaatctacacttttattttctggatcactggcgttatccttcttgcagttggcatttggggcaa

SEQ ID NO: 3 - DNA, 120 bp, Artificial Sequence
  ENSG00000000003_2 (sequence is synthesized)
ggtgagcctggagaattacttttctcttttaaatgagaaggccaccaatgtccccttcgtgctcattgctactggtaccgtcattattcttttgggcacctttggttgttttgctacctg

SEQ ID NO: 4 - DNA, 120 bp, Artificial Sequence
  ENSG00000000003_3 (sequence is synthesized)
ccgagcttctgcatggatgctaaaactgtatgcaatgtttctgactctcgtttttttggtcgaactggtcgctgccatcgtaggatttgttttcagacatgagattaagaacagctttaa

SEQ ID NO: 5 - DNA, 120 bp, Artificial Sequence
  ENSG00000000003_4 (sequence is synthesized)
gaataattatgagaaggctttgaagcagtataactctacaggagattatagaagccatgcagtagacaagatccaaaatacgttgcattgttgtggtgtcaccgattatagagattggac

SEQ ID NO: 6 - DNA, 120 bp, Artificial Sequence
  ENSG00000000003_5 (sequence is synthesized)
agatactaattattactcagaaaaaggatttcctaagagttgctgtaaacttgaagattgtactccacagagagatgcagacaaagtaaacaatgaaggttgttttataaaggtgatgac

SEQ ID NO: 7 - DNA, 120 bp, Artificial Sequence
  ENSG00000000003_6 (sequence is synthesized)
cattatagagtcagaaatgggagtcgttgcaggaatttcctttggagttgcttgcttccaactgattggaatctttctcgcctactgcctctctcgtgccataacaaataaccagtatga

SEQ ID NO: 8 - DNA, 120 bp, Artificial Sequence
  ENSG00000000003_7 (sequence is synthesized)
gatagtgtaacccaatgtatctgtgggcctattcctctctacctttaaggacatttagggtcccccctgtgaattagaaagttgcttggctggagaactgacaacactacttactgatag

SEQ ID NO: 9 - DNA, 120 bp, Artificial Sequence
  ENSG00000000003_8 (sequence is synthesized)
accaaaaaactacaccagtaggttgattcaatcaagatgtatgtagacctaaaactacaccaataggctgattcaatcaagatccgtgctcgcagtgggctgattcaatcaagatgtatg

SEQ ID NO: 10 - DNA, 120 bp, Artificial Sequence
  ENSG00000000003_9 (sequence is synthesized)
tttgctatgttctaagtccaccttctatcccattcatgttagatcgttgaaaccctgtatccctctgaaacactggaagagctagtaaattgtaaatgaagtaatactgtgttcctcttg

SEQ ID NO: 11 - DNA, 120 bp, Artificial Sequence
  ENSG00000000003_10 (sequence is synthesized)
actgttatttttcttagtagggggcctttggaaggcactgtgaatttgctattttgatgtagtgttacaagatggaaaattgattcctctgactttgctattgatgtagtgtgatagaaa

SEQ ID NO: 12 - DNA, 120 bp, Artificial Sequence
  ENSG00000000003_11 (sequence is synthesized)
attcacccctctgaactggctccttcccagtcaaggttatctggtttgattgtataatttgcaccaagaagttaaaatgttttatgactctctgttctgctgacaggcagagagtcacat

SEQ ID NO: 13 - DNA, 120 bp, Artificial Sequence
  ENSG00000000003_12 (sequence is synthesized)
tgtgtaatttaatttcagtcagtcaatagatggcatccctcatcagggttgccagatggtgataacagtgtaaggccttgggtctaaggcatccacgactggaagggactactgatgttc

SEQ ID NO: 14 - DNA, 120 bp, Artificial Sequence
  ENSG00000000003_13 (sequence is synthesized)
tgtgatacatcaggtttcagcacacaacttacatttctttgcctccaaattgaggcatttattatgatgttcatactttccctcttgtttgaaagtttctaattattaaatggtgtcgga

SEQ ID NO: 15 - DNA, 120 bp, Artificial Sequence
  ENSG00000000003_14 (sequence is synthesized)
attgttgtattttccttaggaattcagtggaacttatcttcattaaatttagctggtaccaggttgatatgacttgtcaatattatggtcaactttaagtcttagttttcgtttgtgcct

SEQ ID NO: 16 - DNA, 120 bp, Artificial Sequence
  ENSG00000000003_15 (sequence is synthesized)
aaagatcgtgtttaaattaacttgtagaaaatctgctggaatggttgttgttttccactgagaaagctaagccctacatttctattcagagtactgtttttagatgtgaaatataagcct

SEQ ID NO: 17 - DNA, 120 bp, Artificial Sequence
  ENSG00000000003_16 (sequence is synthesized)
tctattcagagtactgtttttagatgtgaaatataagcctgcggccttaactctgtattaaaaaaaatgtttttgtttaaaaaaaactgttcccataggtgcagcaaaccaccatggcac

SEQ ID NO: 18 - DNA, 120 bp, Artificial Sequence
  ENSG00000000003_17 (sequence is synthesized)
atcccagaacttaatgtaaacaaaaaaatcttaaagtgcaaatattaaaaaaaactgttctctgtgaaaaaaattatattccatgttataaagtagcatatgactagtgttctcctagag

SEQ ID NO: 19 - DNA, 120 bp, Artificial Sequence
  ENSG00000000003_18 (sequence is synthesized)
atcagacttttttgattgtatagtttgcattaaaaagttgtacagggagggatgtaacctgtatcttcaggataatagggaaattaataaggaaaataataattactaaaatttgagttg

SEQ ID NO: 20 - DNA, 120 bp, Artificial Sequence
  ENSG00000000003_19 (sequence is synthesized)
aagtcagggaattatttctttggttttgagtctctttatacatccattagtagaacctgtctagtctgattgccacagtccttgaattgatggtaagggggagtcagttacagttagaaa

SEQ ID NO: 21 - DNA, 120 bp, Artificial Sequence
  ENSG00000000003_20 (sequence is synthesized)
aaaacctgggcaaaaactactagttaaatgatcatgaattttgagtatgtgttttaaaatgcttggagttattgcagaaaaatgatattctccattagaacatttgatgtgtgacttttg

SEQ ID NO: 22 - DNA, 120 bp, Artificial Sequence
  ENSG00000000003_21 (sequence is synthesized)
acataggataaggtgataagaaaattaagttgaaaaatagtgactcaagtacagcaaatcagatttttggctactgagattaaagaagcaaatatttaaaggattatcagcaattttcaa

SEQ ID NO: 23 - DNA, 120 bp, Artificial Sequence
  ENSG00000000003_22 (sequence is synthesized)
attttcaaatacatatttttcactgcagtggttttgaagaatgttttaaggttatatttagagtttttaaaaaagttttccctcagccagccatggtggctcacatctgtaatcccagca

SEQ ID NO: 24 - DNA, 60 bp, Artificial Sequence
  ENSG00000000003_23 (sequence is synthesized)
tagagtgaacctgcatctcagaaaaaaaaaaaaagttttccctcattattaaaaaggaaa

SEQ ID NO: 25 - DNA, 120 bp, Artificial Sequence
  ENSG00000000003_24 (sequence is synthesized)
gaaaaaaaaaaaaagttttccctcattattaaaaaggaaaaattatagaaaattaaaatatagaatgtagaaagaggaaaaacaccacacatcactcgtcaggtggattggtttgtttat

SEQ ID NO: 26 - DNA, 120 bp, Artificial Sequence
  ENSG00000000003_25 (sequence is synthesized)
ttttaagatgggtttattttggatagccagttagaaaacgcccttatagctgatgtgtgcttgtgcatactgaattgtatacttaattctgaaagtaatgaggaaacatttcacctaatg

SEQ ID NO: 27 - DNA, 120 bp, Artificial Sequence
  ENSG00000000003_26 (sequence is synthesized)
ataactggtacaaaggaaagttcacgtgtctttaatagtttgctaattagactagctggttagaaagagggatcactagattggagagagagatccagtttccactggaggcagtaggtc

SEQ ID NO: 28 - DNA, 120 bp, Artificial Sequence
  ENSG00000000003_27 (sequence is synthesized)
tgctcatttccatggtgacaatcctaatggcagagggagtgagtttcccttagtggcacaggctgggggttttgagcttttaagttttgttttatagaaatctggagaattttacatttt

SEQ ID NO: 29 - DNA, 120 bp, Artificial Sequence
  ENSG00000000003_28 (sequence is synthesized)
acttcactatatatctatgtttaaaataattcatttttgatgtcccaaaattgatgtgggttgccttatttccaggcaccaggttgctcactgcaaggtgacattttgagaagcagaaat

SEQ ID NO: 30 - DNA, 120 bp, Artificial Sequence
  ENSG00000000003_29 (sequence is synthesized)
ctctaggtatatcttaagtgtgaaaagcttgttagatttccatggcctattccaggtgggttgttgggtttatgttgtaagcatcaaacttttgtggaaataaatacctaatacaaggta

SEQ ID NO: 31 - DNA, 120 bp, Artificial Sequence
  ENSG00000000003_30 (sequence is synthesized)
agctcttcagtagtttctgaacatctagacggtaggatgtagaatagggcaccaggggccagggaggcccaatctcagagcgctgcgggctctgctggtgatagaaacaatatggtgaag

SEQ ID NO: 32 - DNA, 120 bp, Artificial Sequence
  ENSG00000000003_31 (sequence is synthesized)
ttataaggagaggggaggggtggggggcgggaaagattccttaggatagaaaaaaaacaatgaagaaagctccacttgaagacctatgaaatttccgacactagaacctttgtatatagt

SEQ ID NO: 33 - DNA, 120 bp, Artificial Sequence
  ENSG00000000003_32 (sequence is synthesized)
tttcggtaaccttcggcagggggcgctctgaaattgttgccactttccggacagcctcccatactttaccctctacaaaattgtacagtgtttccggcccttctcagttgtggacgctca

SEQ ID NO: 34 - DNA, 120 bp, Artificial Sequence
  ENSG00000000003_33 (sequence is synthesized)
gtccccgtctcggagactgcagactaaaccagtcattacttgtttcaagagcgttctgctaatctacacttttattttctgggtgagagacgaaggcgcctggggccggcaggggatccc

SEQ ID NO: 35 - DNA, 120 bp, Artificial Sequence
  ENSG00000000003_34 (sequence is synthesized)
gggcttttagttgtggggggtgtgaccctgagcggcgggagctcaggtcgggaacggtgtggggtttgggcggccatcgcgcctgggaccccgacgccggcgaccagtgactgggccccg

SEQ ID NO: 36 - DNA, 120 bp, Artificial Sequence
  ENSG00000000003_35 (sequence is synthesized)
aacaaagagctcaggcatctcgccggcgctggggtcggagtgcgggacgaaggcagccgagaggctgagctgggacccagacgtaccagcgttcgagttcgatacgggaggcgaggtggg

SEQ ID NO: 37 - DNA, 120 bp, Artificial Sequence
  ENSG00000000003_36 (sequence is synthesized)
gccttaagcccccagagcacgcagacggtgaccctggacctttgcaaaggcaagcaaggcttgcccggcccctttgagggctcacttgcataatagtgtctttcttttcactgcttcgta

SEQ ID NO: 38 - DNA, 120 bp, Artificial Sequence
  ENSG00000000005_0 (sequence is synthesized)
agccgactcacttgcaactccacctcagcagtggtctctcagtcctctcaaagcaaggaaagagtactgtgtgctgagagaccatggcaaagaatcctccagagaattgtgaagactgtc

SEQ ID NO: 39 - DNA, 120 bp, Artificial Sequence
  ENSG00000000005_1 (sequence is synthesized)
acattctaaatgcagaagcttttaaatccaagaaaatatgtaaatcacttaagatttgtggactggtgtttggtatcctggccctaactctaattgtcctgttttgggggagcaagcact

SEQ ID NO: 40 - DNA, 120 bp, Artificial Sequence
  ENSG00000000005_2 (sequence is synthesized)
tctggccggaggtacccaaaaaagcctatgacatggagcacactttctacagcaatggagagaagaagaagatttacatggaaattgatcctgtgaccagaactgaaatattcagaagcg

SEQ ID NO: 41 - DNA, 120 bp, Artificial Sequence
  ENSG00000000005_3 (sequence is synthesized)
gaaatggcactgatgaaacattggaagtgcacgactttaaaaacggatacactggcatctacttcgtgggtcttcaaaaatgttttatcaaaactcagattaaagtgattcctgaatttt

SEQ ID NO: 42 - DNA, 120 bp, Artificial Sequence
  ENSG00000000005_4 (sequence is synthesized)
ctgaaccagaagaggaaatagatgagaatgaagaaattaccacaactttctttgaacagtcagtgatttgggtcccagcagaaaagcctattgaaaaccgagattttcttaaaaattcca

SEQ ID NO: 43 - DNA, 120 bp, Artificial Sequence
  ENSG00000000005_5 (sequence is synthesized)
ctggagatttgtgataacgtgaccatgtattggatcaatcccactctaatatcagtttctgagttacaagactttgaggaggagggagaagatcttcactttcctgccaacgaaaaaaaa

SEQ ID NO: 44 - DNA, 120 bp, Artificial Sequence
  ENSG00000000005_6 (sequence is synthesized)
gggattgaacaaaatgaacagtgggtggtccctcaagtgaaagtagagaagacccgtcacgccagacaagcaagtgaggaagaacttccaataaatgactatactgaaaatggaatagaa

SEQ ID NO: 45 - DNA, 120 bp, Artificial Sequence
  ENSG00000000005_7 (sequence is synthesized)
tttgatcccatgctggatgagagaggttattgttgtatttactgccgtcgaggcaaccgctattgccgccgcgtctgtgaacctttactaggctactacccatatccatactgctaccaa

SEQ ID NO: 46 - DNA, 120 bp, Artificial Sequence
  ENSG00000000005_8 (sequence is synthesized)
ggaggacgagtcatctgtcgtgtcatcatgccttgtaactggtgggtggcccgcatgctggggagggtctaataggaggtttgagctcaaatgcttaaactgctggcaacatataataaa

SEQ ID NO: 47 - DNA, 120 bp, Artificial Sequence
  ENSG00000000005_9 (sequence is synthesized)
tgcatgctattcaatgaatttctgcctatgaggcatctggcccctggtagccagctctccagaattacttgtaggtaattcctctcttcatgttctaataaacttctacattatcaccaa

SEQ ID NO: 48 - DNA, 120 bp, Artificial Sequence
  ENSG00000000005_10 (sequence is synthesized)
ggtagcttaaagaagcagcataggttttaggtgatccctcagcttaacacaaggggaaaatactttataggctggtttgcaaactatcatttgctgtttagtcaaggctgccaagaaaac

SEQ ID NO: 49 - DNA, 120 bp, Artificial Sequence
  ENSG00000000005_11 (sequence is synthesized)
tgttggaattcttagtaattagctcagcagcttggcttgaattcaaaataccagctctgaagggatccccatatcagctccagcgccaaaaagcacctcactttagggacacactgagta

SEQ ID NO: 50 - DNA, 120 bp, Artificial Sequence
  ENSG00000000419_0 (sequence is synthesized)
gcttccggcatctggctcagttccgccatggcctccttggaagtcagtcgtagtcctcgcaggtctcggcgggagctggaagtgcgcagtccacgacagaacaaatattcggtgctttta

SEQ ID NO: 51 - DNA, 120 bp, Artificial Sequence
  ENSG00000000419_1 (sequence is synthesized)
cctacctacaacgagcgcgagaacctgccgctcatcgtgtggctgctggtgaaaagcttctccgagagtggaatcaactatgaaattataatcatagatgatggaagcccagatggaaca

SEQ ID NO: 52 - DNA, 120 bp, Artificial Sequence
  ENSG00000000419_2 (sequence is synthesized)
agggatgttgctgaacagttggagaagatctatgggtcagacagaattcttctaagaccacgagagaaaaagttgggactaggaactgcatatattcatggaatgaaacatgccacagga

SEQ ID NO: 53 - DNA, 120 bp, Artificial Sequence
  ENSG00000000419_3 (sequence is synthesized)
aactacatcattattatggatgctgatctctcacaccatccaaaatttattcctgaatttattaggaagcaaaaggagggtaattttgatattgtctctggaactcgctacaaaggaaat

SEQ ID NO: 54 - DNA, 120 bp, Artificial Sequence
  ENSG00000000419_4 (sequence is synthesized)
accgaaaagaagttctagagaaattaatagaaaaatgtgtttctaaaggctacgtcttccagatggagatgattgttcgggcaagacagttgaattatactattggcgaggttccaatat

SEQ ID NO: 55 - DNA, 120 bp, Artificial Sequence
  ENSG00000000419_5 (sequence is synthesized)
catttgtggatcgtgtttatggtgaatccaagttgggaggaaatgaaatagtatctttcttgaaaggattattgactctttttgctactacataaaagaaagatactcatttatagttac

SEQ ID NO: 56 - DNA, 120 bp, Artificial Sequence
  ENSG00000000419_6 (sequence is synthesized)
gttcatttcaggttaaacatgaaagaagcctggttactgatttgtataaaatgtactcttaaagtataaaatataaggtaaggtaaatttcatgcatctttttatgaagaccacctattt

SEQ ID NO: 57 - DNA, 120 bp, Artificial Sequence
  ENSG00000000419_7 (sequence is synthesized)
tatatttcaaattaaataattttaaagttgctggcctaatgagcaatgttctcaattttcgttttcattttgctgtattgagacctataaataaatgtatatttttttttgcataaagta

SEQ ID NO: 58 - DNA, 120 bp, Artificial Sequence
  ENSG00000000419_8 (sequence is synthesized)
tcctgggctcaagtgatccagccatcttggcctcctgggattacagccgtggggccaattttttaactcagatcttgctgagaccaggagcatctgatttaacaggaagtttcagattat

SEQ ID NO: 59 - DNA, 120 bp, Artificial Sequence
  ENSG00000000457_0 (sequence is synthesized)
ctgcttggctttgaggaagagtggcagtactgcctcactgcataagggatgggatcagagaacagtgctttaaagagctatacactgagagaaccaccatttaccttaccctctggactt

SEQ ID NO: 60 - DNA, 120 bp, Artificial Sequence
  ENSG00000000457_1 (sequence is synthesized)
gctgtttatcccgctgtactgcaagatggcaaatttgcttcagtttttgtgtataagagagaaaatgaagacaaggttaataaagctgccaagcatttgaagacacttcgtcacccttgc

SEQ ID NO: 61 - DNA, 120 bp, Artificial Sequence
  ENSG00000000457_2 (sequence is synthesized)
ttgctaagatttttatcttgtactgtggaagcggatggcattcatcttgtcactgagcgagtacagcccctggaagtggctttggaaacattgtcttctgcagaggtctgtgctgggatc

SEQ ID NO: 62 - DNA, 120 bp, Artificial Sequence
  ENSG00000000457_3 (sequence is synthesized)
tatgacatattgctggctcttatcttccttcatgacagaggacacctaacacacaataatgtctgtttatcatctgtgtttgtgagtgaagatggacactggaagctaggaggaatggaa

SEQ ID NO: 63 - DNA, 120 bp, Artificial Sequence
  ENSG00000000457_4 (sequence is synthesized)
actgtttgtaaagtttctcaggccacaccagagtttctgaggagtattcagtcaataagagacccagcatctatccctcctgaagagatgtctccagaattcacaactctcccagagtgt

SEQ ID NO: 64 - DNA, 120 bp, Artificial Sequence
  ENSG00000000457_5 (sequence is synthesized)
catggacatgcccgggatgccttttcatttggaacattggtggaaagtttgctcacaatcttaaatgaacaggtttcagcggatgttctctccagctttcaacagaccttgcactcaact

SEQ ID NO: 65 - DNA, 120 bp, Artificial Sequence
  ENSG00000000457_6 (sequence is synthesized)
ttgctgaatcccattccaaaatgtcggccagcgctctgcaccttactatctcatgacttcttcagaaatgattttctggaagttgtgaatttcttgaaaagtttaacattgaagagtgaa

SEQ ID NO: 66 - DNA, 120 bp, Artificial Sequence
  ENSG00000000457_7 (sequence is synthesized)
gaggagaaaacggaattctttaaatttctgctggacagagtcagctgcttgtcagaggaattgatagcttcaaggttggtgcctcttctgcttaatcagttggtgtttgcagagccagtg

SEQ ID NO: 67 - DNA, 120 bp, Artificial Sequence
  ENSG00000000457_8 (sequence is synthesized)
gctgttaagagttttcttccttatctgcttggccccaaaaaagatcatgcgcagggagaaactccttgcttgctctcaccagccctgttccagtcacgggtgatccccgtgcttctccag

SEQ ID NO: 68 - DNA, 120 bp, Artificial Sequence
  ENSG00000000457_9 (sequence is synthesized)
ttgtttgaagttcatgaagagcatgtgcggatggtgctgctgtctcacatcgaggcctacgtggagcacttcactcaggagcagctgaagaaagtcatcttgccacaggttttgctgggc

SEQ ID NO: 69 - DNA, 120 bp, Artificial Sequence
  ENSG00000000457_10 (sequence is synthesized)
ctgcgtgatactagcgattccattgtggcaattactctgcatagcctagcagtgctggtctctctgcttggaccagaggtggttgtgggaggagaacgaaccaagatcttcaaacgcact

SEQ ID NO: 70 - DNA, 120 bp, Artificial Sequence
  ENSG00000000457_11 (sequence is synthesized)
gccccaagttttactaaaaatactgacctttctctagaagattctcctatgtgtgtcgtctgcagccatcacagtcagatctcgccaatcttggagaaccccttctctagcatattccct

SEQ ID NO: 71 - DNA, 120 bp, Artificial Sequence
  ENSG00000000457_12 (sequence is synthesized)
aagaagcacatacagcgagattactacaatactcttttacagacaggcgatccattttctcagcctattaaatttcccataaatggactctcagatgtaaaaaatacttcggaggacagt

SEQ ID NO: 72 - DNA, 120 bp, Artificial Sequence
  ENSG00000000457_13 (sequence is synthesized)
gaaaacttcccatcaagttctaaaaagtctgaggagtggcctgactggagtgaacctgaggagcctgaaaatcaaactgtcaacatacagatttggcctagagaaccttgtgatgatgtc

SEQ ID NO: 73 - DNA, 120 bp, Artificial Sequence
  ENSG00000000457_14 (sequence is synthesized)
aagtcccagtgcactaccttggatgtggaagagtcatcttgggatgactgcgagcccagcagcttagatactaaagtaaacccaggaggtggaatcactgctacaaaacctgttacctca

SEQ ID NO: 74 - DNA, 120 bp, Artificial Sequence
  ENSG00000000457_15 (sequence is synthesized)
ggggagcagaagcctattcctgctttgctttcactcactgaagagtctatgccttggaaatcaagcttaccccaaaagattagccttgtacaaaggggggatgacgcagaccaaatcgag

SEQ ID NO: 75 - DNA, 120 bp, Artificial Sequence
  ENSG00000000457_16 (sequence is synthesized)
ccgccaaaagtgtcatcacaagaaaggccccttaaggttccatcagaacttggtttaggagaggaattcaccattcaagtaaaaaagaagccagtaaaagatcctgagatggattggttt

SEQ ID NO: 76 - DNA, 120 bp, Artificial Sequence
  ENSG00000000457_17 (sequence is synthesized)
gctgatatgatcccagaaattaagccttctgctgcttttcttatattacctgaactgaggacagaaatggtcccaaaaaaggatgatgtctccccagtgatgcagttttcctcaaaattt

SEQ ID NO: 77 - DNA, 120 bp, Artificial Sequence
  ENSG00000000457_18 (sequence is synthesized)
gctgcagcagaaattactgagggagaggctgaaggctgggaagaagaaggggagctgaactgggaagataataactggtgacaatagatgtgagttaaactttaggaaaaaggattccct

SEQ ID NO: 78 - DNA, 120 bp, Artificial Sequence
  ENSG00000000457_19 (sequence is synthesized)
ttttttaaaaaaaatcaatacctcaaaagcaggctttgggacaagaaaaccccaaagtggcctgcttttcccatcccaggagctcattatccagtctgtgccaactgaagtaggagactg

SEQ ID NO: 79 - DNA, 120 bp, Artificial Sequence
  ENSG00000000457_20 (sequence is synthesized)
actgtgagtgctggctaaaagccctgggtggtgaggctcacagtactggtttccaggaggaagagcctttgtgcatttgactgaggccagtttctatgaagagcaagtagctgaggagag

SEQ ID NO: 80 - DNA, 120 bp, Artificial Sequence
  ENSG00000000457_21 (sequence is synthesized)
gtcgaatttactgctttttccaggacaattctggaagtaaagaaaatgtaattcaagctggttagcttaattttgtgccattctttaacataagagtaagctctattatgaaatacaact

SEQ ID NO: 81 - DNA, 120 bp, Artificial Sequence
  ENSG00000000457_22 (sequence is synthesized)
ttaaaaaattttagctataaattatataaatgattttaaattgctgaggtttccttaggcagcttatttatttgtttacagttagactatctgagtaaatggttctttgtggacctaggc

SEQ ID NO: 82 - DNA, 120 bp, Artificial Sequence
  ENSG00000000457_23 (sequence is synthesized)
agttcctgactgttccacatgtagtacattgtaccaaagttcttaataagaatattccccacaatcctgttctctaaatgtcaaataaagattattttcactagattcaactttacaaaa

SEQ ID NO: 83 - DNA, 120 bp, Artificial Sequence
  ENSG00000000457_24 (sequence is synthesized)
tgtcccgtttccggacccgtctctatggtgtaggagaaacccggcccccagaagattgtgggtgtagtggccacagccttacaggcaggcaggggtggttggtgtcaacaggggggccaa

SEQ ID NO: 84 - DNA, 120 bp, Artificial Sequence
  ENSG00000000457_25 (sequence is synthesized)
ttagaaaatgtacagacataagtattttcagttgacaaagcatcaaacccagttctgcctagtgataagtttcaccctagagtatgtatgtaacgttttagcttatccatcctttcttgg

SEQ ID NO: 85 - DNA, 120 bp, Artificial Sequence
  ENSG00000000457_26 (sequence is synthesized)
agcgcctccatttccattgaaagccaggctggagcaggacccttttggagtagtgactcagttgcttccaaagcccctgctattgtatgcagcgctgacctgtactcttcttcccagggg

SEQ ID NO: 86 - DNA, 120 bp, Artificial Sequence
  ENSG00000000457_27 (sequence is synthesized)
aaatataaagaaccttccttttggactggagtaaagcttacatgcaaattttattctagtcattggatcacaagggtaggaggatgcaccccaaaacccctacacagtcatctagaaaaa

SEQ ID NO: 87 - DNA, 120 bp, Artificial Sequence
  ENSG00000000457_28 (sequence is synthesized)
tatgtaaaggcattttggtttatcatagcaattcagagtgctactaccagtgtcttagtttgtatgtggtatacaacaagtatcctgtcccaaagggctcccaatgagaagtgctgcata

SEQ ID NO: 88 - DNA, 120 bp, Artificial Sequence
  ENSG00000000457_29 (sequence is synthesized)
gtccaagcttacatgtcttataaacaagttcataaatgtattttctttttatgagagtttgactaaaacttatcagaatgttgttcttcatgaattactactatactaattactatacta

SEQ ID NO: 89 - DNA, 120 bp, Artificial Sequence
  ENSG00000000457_30 (sequence is synthesized)
atagtgctcaaaacaatattttgaatatccttattggtgtcaaattctgccttttaataagtagatgtgatcttcagttactgccaaaaattattaggagactcatttgattaataaggc

SEQ ID NO: 90 - DNA, 120 bp, Artificial Sequence
  ENSG00000000457_31 (sequence is synthesized)
aaggaatcaaactaaacatttaggagtaagtttctttcattttcttctgtggttcagtaaagactgcatttatagcatcactggtacaatatgtaacttcccttaaaggttactaccaat

SEQ ID NO: 91 - DNA, 120 bp, Artificial Sequence
  ENSG00000000457_32 (sequence is synthesized)
aattcaaacatactgaaagaatatatttgatatggtgtagtcccacttcttaattttaaaagcaactaccataaaacagaattttacatgtctagatctatttgatttgaaattcagcat

SEQ ID NO: 92 - DNA, 120 bp, Artificial Sequence
  ENSG00000000457_33 (sequence is synthesized)
aaggctggaaaccacactggtttgtttcgtcagtaagtaaaaagggcagaatttgccttgttaaagtttggcccctattgaaatcagcccatacctgtaaagatgacctctttgcttctt

SEQ ID NO: 93 - DNA, 120 bp, Artificial Sequence
  ENSG00000000457_34 (sequence is synthesized)
ctacagtcacattagcaaagggttcccagaaaatacctttttcctgtttcacacgttccactttggcagcttcagtttcatctacaaacccagtctgccagggaccatgaaaaaccaagc

SEQ ID NO: 94 - DNA, 120 bp, Artificial Sequence
  ENSG00000000457_35 (sequence is synthesized)
aaatagcaacatgttagcactctactagatatgaaatggccacataatttaagtgctgagtgttcaaccatactaggcaaattctggaagtcacatggactgatctataaatactcttag

SEQ ID NO: 95 - DNA, 120 bp, Artificial Sequence
  ENSG00000000457_36 (sequence is synthesized)
tataatctggattaaatcactctactgtgttcttccttacaaaatagttagttatagagttgtctttgcaggaaaaaatgatagtctgctaacctttactgtataagctaagaaactggc

SEQ ID NO: 96 - DNA, 120 bp, Artificial Sequence
  ENSG00000000457_37 (sequence is synthesized)
aacagcagtgtatacacatgtacttaaaatccagcttagatgtaatataagtaggccaagtgtggtggctcatgcctctaatcccaggactttggtgggaggaatgcttgagcccaggag

SEQ ID NO: 97 - DNA, 88 bp, Artificial Sequence
  ENSG00000000457_38 (sequence is synthesized)
aattaaagttcagtgagtcaagtgggcccatttcacctaaaaaaatatatatgtaatatatgtaaaatatataacgtgcatcattaca

SEQ ID NO: 98 - DNA, 120 bp, Artificial Sequence
  ENSG00000000457_39 (sequence is synthesized)
atatgtaatatatgtaaaatatataacgtgcatcattacatgtaatatatcaaataattcagtttctcctggtagtctaaatttgtggtttaacagttccactagtatttcaattaacta

SEQ ID NO: 99 - DNA, 120 bp, Artificial Sequence
  ENSG00000000457_40 (sequence is synthesized)
ttatttcctcacactaagttcccaagtatgcatagacataggaaccttgtgattcaaaattttggttttaattgtaaaaacaggtcttggctgcaaagagaataaaaaagccatgccaaa

SEQ ID NO: 100 - DNA, 80 bp, Artificial Sequence
  ENSG00000000457_41 (sequence is synthesized)
cctggcttgggaggctcctaaattatacccaaaatatggtagtaaacatcctctcaggcctacctaattatgtgatcaag

SEQ ID NO: 101 - DNA, 120 bp, Artificial Sequence
  ENSG00000000457_42 (sequence is synthesized)
agtaaacatcctctcaggcctacctaattatgtgatcaagtgtatttaattatgattattaatagcttagggatcctcattagtcatctcactgcctggataatcagtgctattacaccc

SEQ ID NO: 102 - DNA, 81 bp, Artificial Sequence
  ENSG00000000457_43 (sequence is synthesized)
tagtcatctcactgcctggataatcagtgctattacaccccaaactacaggcagaggaactacaagtgtccttttttgaga

SEQ ID NO: 103 - DNA, 85 bp, Artificial Sequence
  ENSG00000000457_44 (sequence is synthesized)
ccaagtgttttacttctgtggcctcaattgcttagtaaaagtcgtcagcactgtgctcagcactgtgaaaagtttaagctaagaa

SEQ ID NO: 104 - DNA, 120 bp, Artificial Sequence
  ENSG00000000457_45 (sequence is synthesized)
cagcactgtgctcagcactgtgaaaagtttaagctaagaagacactcaggttggttacagttacataatttcggaaaaaaaaaaataggacaaagaataaaacatgagccatgtaaagaa

SEQ ID NO: 105 - DNA, 120 bp, Artificial Sequence
  ENSG00000000457_46 (sequence is synthesized)
agtaccttctccagaaaggatacaactttgttcttagtttcttcagaactgagacactgtggaactatctcttcatgatttgttccctattaaaaaattgatgaacaagaccaattttaa

SEQ ID NO: 106 - DNA, 120 bp, Artificial Sequence
  ENSG00000000457_47 (sequence is synthesized)
catttcaacaacttgcaaagacaaatagatgagttttatgagctaccttaaccaaaaattcattttaagtaagagtcccagaggatcctcaaaggtgataaactcatgattccttcaggg

SEQ ID NO: 107 - DNA, 120 bp, Artificial Sequence
  ENSG00000000457_48 (sequence is synthesized)
tccctaaggataatacaaaattaacttctgtacaagtgttgtaagctttaattacttctgctgggtcatactaatgcttctggactcccttatgatcataggcatgactatacagcaaat

SEQ ID NO: 108 - DNA, 120 bp, Artificial Sequence
  ENSG00000000457_49 (sequence is synthesized)
gcagtaagagtaaaggagcaacccatcttacaggtttaggttcatcagcctaacccttatgactgatagcacaaaatgaaatgtattatcatttgacccaaaaatactatctgctggaag

SEQ ID NO: 109 - DNA, 120 bp, Artificial Sequence
  ENSG00000000457_50 (sequence is synthesized)
actgtgtctgtgtctgtctgtatcagtaggcctgctgtgtatgcctgttctggtccttgtttattcagaggaccttacgaaattcacttcatttatctaagcctcattttgagaagctgt

SEQ ID NO: 110 - DNA, 120 bp, Artificial Sequence
  ENSG00000000457_51 (sequence is synthesized)
aaaagagataacgagtaatgtacccttcagacaattttccgattgcaatacagaagcagttcaataaatgttttgggattgttctggaatatttgaaatattaaaatggtttgaaagtca

SEQ ID NO: 111 - DNA, 120 bp, Artificial Sequence
  ENSG00000000457_52 (sequence is synthesized)
ctcacaatcttaaatgaacagggttggtttttgctctcggcagtctccagctatagaggtcctgaaaagagggagaaggcattggaaactaactgtagctctggatttcagtttcagcgg

SEQ ID NO: 112 - DNA, 120 bp, Artificial Sequence
  ENSG00000000457_53 (sequence is synthesized)
gcacctctactgtttgctacaagtggccagcagccattttggatttgggcggaaatgaaattaaaactgtgctgttaaaagcctaaaaattcaagtcaagacaaacttaagcattcgacc

SEQ ID NO: 113 - DNA, 120 bp, Artificial Sequence
  ENSG00000000457_54 (sequence is synthesized)
aacacatctagaaagggggcatcttcgtggactaactagaccactggggcagtgagtgaaactcggtatcgtcgcggcgcccacacttaagatggcaccggcctgagactcagctgtgcg

SEQ ID NO: 114 - DNA, 120 bp, Artificial Sequence
  ENSG00000000460_0 (sequence is synthesized)
ggctttggccctggaaagcctcgcggacgtgttctgacccaaggttttagcagtggatgtggcgttttcttccattccttctttcagtttttctgtactcgttgcttgcaattaagtgta

SEQ ID NO: 115 - DNA, 120 bp, Artificial Sequence
  ENSG00000000460_1 (sequence is synthesized)
aatacttttgctagtggataatgggggaggcaaggactgagacctgcggtatgacgatagctctggctcttaatagtttgaggtaaagcgagatactctgagcttttgtctcccgtaaaa

SEQ ID NO: 116 - DNA, 120 bp, Artificial Sequence
  ENSG00000000460_2 (sequence is synthesized)
agggtggtgaatatgaataagggctttcttagcgttataagaattaaagggcatagttctgtggtgtgaaatctttaaaagatgttcagtaaataaaaatgattttcctccttcccctct

SEQ ID NO: 117 - DNA, 120 bp, Artificial Sequence
  ENSG00000000460_3 (sequence is synthesized)
cagacctctttttcttctttctttctttttttttgacaagttctcactcctctcacccaggctggagtctttctgaaagagttcttccgcttgttgttggctttcaactgttggatttga

SEQ ID NO: 118 - DNA, 120 bp, Artificial Sequence
  ENSG00000000460_4 (sequence is synthesized)
ggcgcttagcgccttcttcgtccgggtgcagcacattcttgattggtctcatgcctttgtggttgtaaatgtgcctggaatcctagcctttcatggtttgttctgagtaatgaataccct

SEQ ID NO: 119 - DNA, 120 bp, Artificial Sequence
  ENSG00000000460_5 (sequence is synthesized)
attactatgatactagtatcttccttaattatcctactcattgtctcaacattctgacagttggattgagcatattcaaattttgaaaattattgtagaaatgtttttacctcatatgaa

SEQ ID NO: 120 - DNA, 120 bp, Artificial Sequence
  ENSG00000000460_6 (sequence is synthesized)
ccacctgacattggaacagactttcttttcacaagtgttaccaaagactgtgaaattattcgatgacatgatgtatgaattaaccagtcaagccagaggactgtcaagccaaaatttgga

SEQ ID NO: 121 - DNA, 120 bp, Artificial Sequence
  ENSG00000000460_7 (sequence is synthesized)
aatccagaccactctaaggaatattttacaaacaatggtgcagctcttaggagctctcacaggatgtgttcagcatatctgtgccacacaggaatccatcattttggaaaatattcagag

SEQ ID NO: 122 - DNA, 120 bp, Artificial Sequence
  ENSG00000000460_8 (sequence is synthesized)
tctcccctcctcagtccttcatataattaaaagcacatttgtgcattgtaagaatagtgaatctgtgtattctgggtgtttacacctagtttcagaccttctccaggctcttttcaagga

SEQ ID NO: 123 - DNA, 120 bp, Artificial Sequence
  ENSG00000000460_9 (sequence is synthesized)
ggcctattctcttcaaaagcagttaatggaactgctggacatggtttgcatggaccctttagtagatgacaatgatgatattttgaatatggtaatagttattcattctttattggatat

SEQ ID NO: 124 - DNA, 120 bp, Artificial Sequence
  ENSG00000000460_10 (sequence is synthesized)
ctgctctgttatttccagtatggaccatgcatttcatgccaatacttggaagtttataattaagcagagccttaagcaccagtccataataaaaagccagttgaaacacaaagatataat

SEQ ID NO: 125 - DNA, 120 bp, Artificial Sequence
  ENSG00000000460_11 (sequence is synthesized)
tactagcttgtgtgaagacattcttttctccttccattcttgtttacagttagctgagcagatgacacagtcagatgcacaggataatgctgactacagattatttcagaaaacactcaa

SEQ ID NO: 126 - DNA, 120 bp, Artificial Sequence
  ENSG00000000460_12 (sequence is synthesized)
attgtgtcgtttttttgccaactcccttttgcactacgctaaggaatttcttcctttcctctctgattcttgctgtactttgcaccaactgtatcttcagatacacagcaagtttcctcc

SEQ ID NO: 127 - DNA, 120 bp, Artificial Sequence
  ENSG00000000460_13 (sequence is synthesized)
aagcctttatgctaccaggatttctaaagcacaccaagaggaaatagcaggtgctttcctagtgacactggatccacttatcagtcagctgctcacatttcagcctttcatgcaggtggt

SEQ ID NO: 128 - DNA, 120 bp, Artificial Sequence
  ENSG00000000460_14 (sequence is synthesized)
tttggacagtaaattagacctgccatgtgaactgcagtttccacaatgtcttcttctggttgttgtcatggataagctgccatctcagcctaaggaagtgcaaaccctgtggtgcacaga

SEQ ID NO: 129 - DNA, 120 bp, Artificial Sequence
  ENSG00000000460_15 (sequence is synthesized)
cagccaggtctcagaaacgacaaccaggatatctctactcaaagccgttttctacagttttgagcagtgttctggtgaactctctctacctgttcatttacagggattaaagagtaaggg

SEQ ID NO: 130 - DNA, 120 bp, Artificial Sequence
  ENSG00000000460_16 (sequence is synthesized)
gaaagctgaggtggctgtcaccttgtatcagcatgtttgtgttcatctgtgtacatttattacttcctttcatccctcactgtttgctgaactggatgctgctctgctgaatgctgtact

SEQ ID NO: 131 - DNA, 120 bp, Artificial Sequence
  ENSG00000000460_17 (sequence is synthesized)
tagtgctaatatgatcacctctttgttagctatggatgcatggtgcttccttgctcgatatgggactgctgaactgtgtgcacaccatgtcaccatagtggctcatctgataaagtcatg

SEQ ID NO: 132 - DNA, 120 bp, Artificial Sequence
  ENSG00000000460_18 (sequence is synthesized)
tactgttgaagcgtctctttttcttcatggcaccaccccatcagctggagtttatccagaaattttccccaaaagaagcagaaaatctgcctctgtggcaacatatttccttccaggcgt

SEQ ID NO: 133 - DNA, 120 bp, Artificial Sequence
  ENSG00000000460_19 (sequence is synthesized)
tacctcctgagcttagggaacaaactgtccatgaggtcaccacagtaggcactgcagaatgcaggaaatggctgagcaggagtcgtactttgggagaactagaatctctgaacacagtac

SEQ ID NO: 134 - DNA, 120 bp, Artificial Sequence
  ENSG00000000460_20 (sequence is synthesized)
tgtctgctttgcttgcagtatgtaattctgctggtgaagctttggatacaggaaaacaaactgcaattatcgaagttgtgagtcagctttgggcttttttaaacattaaacaggtagcag

SEQ ID NO: 135 - DNA, 120 bp, Artificial Sequence
  ENSG00000000460_21 (sequence is synthesized)
atcaaccttatgttcaacagacattcagccttttacttccactgttgggatttttcattcaaactctagatcctaaactgatacttcaggcagtaactttgcagacctcgctacttaaat

SEQ ID NO: 136 - DNA, 120 bp, Artificial Sequence
  ENSG00000000460_22 (sequence is synthesized)
tagagcttcctgactatgttcgtttggcaatgttggattttgtatcttctttaggaaaactttttatacctgaagctatccaggacagaattctgcccaacctgtcctgtatgtttgcct

SEQ ID NO: 137 - DNA, 120 bp, Artificial Sequence
  ENSG00000000460_23 (sequence is synthesized)
tactgctagctgacaggagttggctgctagaacaacataccttggaggcgtttactcagttcgctgagggaacaaatcatgaagagatagttccacagtgtctcagttctgaagaaacta

SEQ ID NO: 138 - DNA, 120 bp, Artificial Sequence
  ENSG00000000460_24 (sequence is synthesized)
agaacaaagttgtatcctttctggagaagactgggtttgtagatgaaactgaagctgccaaagtggaacgtgtgaaacaggaaaaaggtattttctgggaaccctttgctaatgtgactg

SEQ ID NO: 139 - DNA, 120 bp, Artificial Sequence
  ENSG00000000460_25 (sequence is synthesized)
tagaagaagcaaagaggtcatctttacagccttatgcaaaaagagctcgtcaggagttcccctgggaagaagagtacaggtcagcgctgcatacaatagcaggggctttggaagcaactg

SEQ ID NO: 140 - DNA, 120 bp, Artificial Sequence
  ENSG00000000460_26 (sequence is synthesized)
agtcactactccaaaagggtcctgctccagcctggctttcaatggaaatggaggcgctccaagaaaggatggataagctaaaacgttacatacatactctagggtgaaacttatcactag

SEQ ID NO: 141 - DNA, 120 bp, Artificial Sequence
  ENSG00000000460_27 (sequence is synthesized)
gcagaactgggtttgatgctttgtcaactgaaaatacttatgtctgtacattttctaacagatataaaacaaattttgtaaagttgaatctagtgaaaataatctttatttgacatttag

SEQ ID NO: 142 - DNA, 120 bp, Artificial Sequence
  ENSG00000000460_28 (sequence is synthesized)
agaacaggattgtggggaatattcttattaagaactttggtacaatgtactacatgtggaacagtcaggaactgcctaggtccacaaagaaccatttactcagatagtctaactgtaaac

SEQ ID NO: 143 - DNA, 120 bp, Artificial Sequence
  ENSG00000000460_29 (sequence is synthesized)
aaataaataagctgcctaaggaaacctcagcaatttaaaatcatttatataatttatagctaaaattttttaaagttgtatttcataatagagcttactcttatgttaaagaatggcaca

SEQ ID NO: 144 - DNA, 120 bp, Artificial Sequence
  ENSG00000000460_30 (sequence is synthesized)
aaattaagctaaccagcttgaattacattttctttacttccagaattgtcctggaaaaagcagtaaattcgacctctcctcagctacttgctcttcatagaaactggcctcagtcaaatg

SEQ ID NO: 145 - DNA, 120 bp, Artificial Sequence
  ENSG00000000460_31 (sequence is synthesized)
cacaaaggctcttcctcctggaaaccagtactgtgagcctcaccacccagggcttttagccagcactcacagtcagtctcctacttcagttggcacagactggataatgagctcctggga

SEQ ID NO: 146 - DNA, 120 bp, Artificial Sequence
  ENSG00000000460_32 (sequence is synthesized)
tgggaaaagcaggccactttggggttttcttgtcccaaagcctgcttttgaggtattgattttttttaaaaaaagggaatcctttttcctaaagtttaactcacatctattgtcaccagt

SEQ ID NO: 147 - DNA, 120 bp, Artificial Sequence
  ENSG00000000460_33 (sequence is synthesized)
tattatcttcccagttcagctccccttcttcttcccagccttcagcctctccctgcaacaaaataaagcacaccaagaacccactgaaacaaatcatatgcaaaaatcatacgcaaattt

SEQ ID NO: 148 - DNA, 120 bp, Artificial Sequence
  ENSG00000000460_34 (sequence is synthesized)
gaaaaagcaggaatttaaaatttatcttttgatgccagaaacactacctcgtactaagtaaaataacttagagctctaacagaaagttgaaaagtaggattacaaaaccatggcactgga

SEQ ID NO: 149 - DNA, 120 bp, Artificial Sequence
  ENSG00000000460_35 (sequence is synthesized)
aaatagcttttcaaaaaccataaaatccagtaaaaatcagtgtggatgacaccaaatccttattttaatcccttttttttctttttcaaataaaaaggttacaatagctcattaaacaaa

SEQ ID NO: 150 - DNA, 120 bp, Artificial Sequence
  ENSG00000000460_36 (sequence is synthesized)
actgcgagtttccggtctgggctttggcgggtctggtttgaagctctcctgtttgacgaaagtatgtctcaggaaggctggagtctttctgaaagagttcttccgcttgttgttggcttt

SEQ ID NO: 151 - DNA, 120 bp, Artificial Sequence
  ENSG00000000460_37 (sequence is synthesized)
gcgagtttccggtctgggctttggcgggtctggtttgaagctctcctgtttgacgaaagtatgtctcaggaaggtgcggtcccagctagcgcggttcccctggaagaattaagtagctgg

SEQ ID NO: 152 - DNA, 120 bp, Artificial Sequence
  ENSG00000000460_38 (sequence is synthesized)
aatatggtaataggtgagtgaagaaaactttctgcttagtatatggtgactataaatcatgtatcaattaaaattgtctctaatgattcatgttattttcttactaattatgcattaaaa

SEQ ID NO: 153 - DNA, 120 bp, Artificial Sequence
  ENSG00000000460_39 (sequence is synthesized)
ggtcccggaacaaatccgaccccagaagtggggacttctggccctcacctccccatttgaatgtaatgtttacagtgatccagacctggggatgcttgcttcccgacgtgtcctgggatc

SEQ ID NO: 154 - DNA, 120 bp, Artificial Sequence
  ENSG00000000460_40 (sequence is synthesized)
ccagaggagctatgccgccgggaactgccgtccgtcctgccccgactcctctcattgtctcaacattctgacagttggattgagcatattcactgtgaaattattcgatgacatgatgta

SEQ ID NO: 155 - DNA, 65 bp, Artificial Sequence
  ENSG00000000460_41 (sequence is synthesized)
ttgaagccagcaagaccacgaacccactgggaggaaagaacaactccagatgtgccaccttaaga

SEQ ID NO: 156 - DNA, 67 bp, Artificial Sequence
  ENSG00000000460_42 (sequence is synthesized)
agcgagaccatgaacccaccagaaggccgaacacatccaaacatcagaaggaatggcttcattcttg

SEQ ID NO: 157 - DNA, 120 bp, Artificial Sequence
  ENSG00000000460_43 (sequence is synthesized)
cagtgagaccaagaacccaccaattccgggcacattttggtgaccacgaagggactatcacctattgccaagcggtgaggctatcgccaagcagtgagaccattgcctgtcactgtgcgg

SEQ ID NO: 158 - DNA, 120 bp, Artificial Sequence
  ENSG00000000460_44 (sequence is synthesized)
gtcactgtgcggcgagacaattgcttatcgccaagcaaccatgtgacatttggtgccgtaactcagatcggggaacctcccttgggagatcagtcccctgtcatcctgctctttgctcca

SEQ ID NO: 159 - DNA, 86 bp, Artificial Sequence
  ENSG00000000460_45 (sequence is synthesized)
agacagaggaaacgtgttctatctgtgaacccaaaactccagcactggtcatggacttggaaagacagtcttcccttgatgtttaa

SEQ ID NO: 160 - DNA, 88 bp, Artificial Sequence
  ENSG00000000460_46 (sequence is synthesized)
aggaaacgtgttctatctgtgaacccaaaactccagcactggtcatggacttggaaagacagtcttcccttgatgtttaatcactgca

SEQ ID NO: 161 - DNA, 120 bp, Artificial Sequence
  ENSG00000000460_47 (sequence is synthesized)
gggacgcctgcctggatccttcaccttagtggttctcgctgtctcaccctggctggagtggagtggcatgaccacggttcactgcaggtttgaacttccaggctcaagcaatcctcccac

SEQ ID NO: 162 - DNA, 120 bp, Artificial Sequence
  ENSG00000000938_0 (sequence is synthesized)
aaagggtgagaggggcaggtggggctagggtggagaccaaagcactgatgtgacggaaccatcagccaggcaactggacctggtggatccaggaagactttctggaagaggtctctgacc

SEQ ID NO: 163 - DNA, 120 bp, Artificial Sequence
  ENSG00000000938_1 (sequence is synthesized)
cctcccaaggatcatgccgcagccccactgacccaggagtaggggcctaagggcagggaacctggaatgggctgtgtgttctgcaagaaattggagccggtggccacggccaaggaggat

SEQ ID NO: 164 - DNA, 120 bp, Artificial Sequence
  ENSG00000000938_2 (sequence is synthesized)
gctggcctggaaggggacttcagaagctacggggcagcagaccactatgggcctgaccccactaaggcccggcctgcatcctcatttgcccacatccccaactacagcaacttctcctct

SEQ ID NO: 165 - DNA, 120 bp, Artificial Sequence
  ENSG00000000938_3 (sequence is synthesized)
caggccatcaaccctggcttccttgatagtggcaccatcaggggtgtgtcagggattggggtgaccctgttcattgccctgtatgactatgaggctcgaactgaggatgacctcaccttc

SEQ ID NO: 166 - DNA, 120 bp, Artificial Sequence
  ENSG00000000938_4 (sequence is synthesized)
accaagggcgagaagttccacatcctgaacaatactgaaggtgactggtgggaggctcggtctctcagctccggaaaaactggctgcattcccagcaactacgtggcccctgttgactca

SEQ ID NO: 167 - DNA, 120 bp, Artificial Sequence
  ENSG00000000938_5 (sequence is synthesized)
atccaagctgaagagtggtactttggaaagattgggagaaaggatgcagagaggcagctgctttcaccaggcaacccccagggggcctttctcattcgggaaagcgagaccaccaaaggt

SEQ ID NO: 168 - DNA, 120 bp, Artificial Sequence
  ENSG00000000938_6 (sequence is synthesized)
gcctactccctgtccatccgggactgggatcagaccagaggcgatcatgtgaagcattacaagatccgcaaactggacatgggcggctactacatcaccacacgggttcagttcaactcg

SEQ ID NO: 169 - DNA, 120 bp, Artificial Sequence
  ENSG00000000938_7 (sequence is synthesized)
gtgcaggagctggtgcagcactacatggaggtgaatgacgggctgtgcaacctgctcatcgcgccctgcaccatcatgaagccgcagacgctgggcctggccaaggacgcctgggagatc

SEQ ID NO: 170 - DNA, 120 bp, Artificial Sequence
  ENSG00000000938_8 (sequence is synthesized)
gctgaagccgggcaccatgtccccgaaggccttcctggaggaggcgcaggtcatgaagctgctgcggcacgacaagctggtgcagctgtacgccgtggtgtcggaggagcccatctacat

SEQ ID NO: 171 - DNA, 120 bp, Artificial Sequence
  ENSG00000000938_9 (sequence is synthesized)
cgtgaccgagttcatgtgtcacggcagcttgctggattttctcaagaacccagagggccaggatttgaggctgccccaattggtggacatggcagcccaggtagctgagggcatggccta

SEQ ID NO: 172 - DNA, 120 bp, Artificial Sequence
  ENSG00000000938_10 (sequence is synthesized)
catggaacgcatgaactacattcaccgcgacctgagggcagccaacatcctggttggggagcggctggcgtgcaagatcgcagactttggcttggcgcgtctcatcaaggacgatgagta

SEQ ID NO: 173 - DNA, 120 bp, Artificial Sequence
  ENSG00000000938_11 (sequence is synthesized)
caacccctgccaaggttccaagttccccatcaagtggacagccccagaagctgccctctttggcagattcaccatcaagtcagacgtgtggtcctttgggatcctgctcactgagctcat

SEQ ID NO: 174 - DNA, 120 bp, Artificial Sequence
  ENSG00000000938_12 (sequence is synthesized)
caccaagggccgaatcccctacccaggcatgaataaacgggaagtgttggaacaggtggagcagggctaccacatgccgtgccctccaggctgcccagcatccctgtacgaggccatgga

SEQ ID NO: 175 - DNA, 120 bp, Artificial Sequence
  ENSG00000000938_13 (sequence is synthesized)
acagacctggcgtctggacccggaggagaggcctaccttcgagtacctgcagtccttcctggaggactacttcacctccgctgaaccacagtaccagcccggggatcagacatagcctgt

SEQ ID NO: 176 - DNA, 120 bp, Artificial Sequence
  ENSG00000000938_14 (sequence is synthesized)
ccgggcatcaaccctctctggcggtggccaccagtccttgccaatccccagagctgttcttccaaagcccccaggctggcttagaaccccatagagtcctagcatcaccgaggacgtggc

SEQ ID NO: 177 - DNA, 120 bp, Artificial Sequence
  ENSG00000000938_15 (sequence is synthesized)
tgctctgacaccacctagggcaacctacttgttttacagatggggcaaaaggaggcccagagctgatctctcatccgctctggccccaagcactatttcttccttttccacttaggcccc

SEQ ID NO: 178 - DNA, 120 bp, Artificial Sequence
  ENSG00000000938_16 (sequence is synthesized)
gggaggaccccaatctaggcccaagagggaaagccacgtgcctgtatgagcgtatgagcatgtgcatgcgcgtgtgtgcacagggtggtgcacctggcaggggtccttgagtgaggcatg

SEQ ID NO: 179 - DNA, 120 bp, Artificial Sequence
  ENSG00000000938_17 (sequence is synthesized)
gtagcctttctcactccatccccacccaaagtgctcagaccttgtctagttatttataaaactgtatgtacctccctcacttctctcctatcactgctttcctactctccttttatctca

SEQ ID NO: 180 - DNA, 120 bp, Artificial Sequence
  ENSG00000000938_18 (sequence is synthesized)
ctctagtccaggtgccaagaatttcccttctaccctctattctcttgtgtctgtaagttacaaagtcaggaaaagtcttggctggacccctttcctgctgggtggatgcagtggtccagg

SEQ ID NO: 181 - DNA, 120 bp, Artificial Sequence
  ENSG00000000938_19 (sequence is synthesized)
actggggtctgggcccaggtttgagggagaaggttgcagagcacttcccacctctctgaatagtgtgtatgtgttggtttattgattctgtaaataagtaaaatgacaatatgaatcctc

SEQ ID NO: 182 - DNA, 120 bp, Artificial Sequence
  ENSG00000000938_20 (sequence is synthesized)
cccagcaggggcggcggtcagaggcgggcagcaccccagttctccccgcacgccggcactcgcggctgctggagccccggctggctcaccccggggccgggcagaattgggctccaggtc

SEQ ID NO: 183 - DNA, 120 bp, Artificial Sequence
  ENSG00000000938_21 (sequence is synthesized)
ccaagcacggggcatccaaggtgtggagttttagaacacccagagtcccactgctcatctgcacgtgagtttagaagacaagcagctgaagatacattaaaatgtccccttcgttgctga

SEQ ID NO: 184 - DNA, 120 bp, Artificial Sequence
  ENSG00000000938_22 (sequence is synthesized)
ctctgagtgttgcaatggcaatgtttctggcagggtgtgggggacccttgctcaatgacctcctgccctgttgctcagaggataccgctgccagaaaagggttggctcattgtggggctt

SEQ ID NO: 185 - DNA, 120 bp, Artificial Sequence
  ENSG00000000938_23 (sequence is synthesized)
tgcgaacttgcccttaggagcctccaggaggatgtggcagatacaaccccgctttcaagatcacatgggctgagggagtctgtacagccctcccatcagaaaccacagtctgcaggggag

SEQ ID NO: 186 - DNA, 120 bp, Artificial Sequence
  ENSG00000000938_24 (sequence is synthesized)
ggtcaagaagctctactcccagtctgagaggggcaggatcctgtgacagatgcaagtgacaaagagaaacttcttgcccttttaggtgccacttcccagatgggaagtcttcttggtggg

SEQ ID NO: 187 - DNA, 120 bp, Artificial Sequence
  ENSG00000000971_0 (sequence is synthesized)
acagcattaacatttagtgggagtgcagtgagaattgggtttaacttctggcatttctgggcttgtggcttgtggttgattttttatttactttgcaaaagtttctgataggcggagcat

SEQ ID NO: 188 - DNA, 120 bp, Artificial Sequence
  ENSG00000000971_1 (sequence is synthesized)
ctagtttcaacttccttttgcagcaagttctttcctgcactaatcacaattcttggaagaggagaactggacgttgtgaacagagttagctggtaaatgtcctcttaaaagatccaaaaa

SEQ ID NO: 189 - DNA, 120 bp, Artificial Sequence
  ENSG00000000971_2 (sequence is synthesized)
atgagacttctagcaaagattatttgccttatgttatgggctatttgtgtagcagaagattgcaatgaacttcctccaagaagaaatacagaaattctgacaggttcctggtctgaccaa

SEQ ID NO: 190 - DNA, 120 bp, Artificial Sequence
  ENSG00000000971_3 (sequence is synthesized)
acatatccagaaggcacccaggctatctataaatgccgccctggatatagatctcttggaaatgtaataatggtatgcaggaagggagaatgggttgctcttaatccattaaggaaatgt

SEQ ID NO: 191 - DNA, 120 bp, Artificial Sequence
  ENSG00000000971_4 (sequence is synthesized)
cagaaaaggccctgtggacatcctggagatactccttttggtacttttacccttacaggaggaaatgtgtttgaatatggtgtaaaagctgtgtatacatgtaatgaggggtatcaattg

SEQ ID NO: 192 - DNA, 120 bp, Artificial Sequence
  ENSG00000000971_5 (sequence is synthesized)
ctaggtgagattaattaccgtgaatgtgacacagatggatggaccaatgatattcctatatgtgaagttgtgaagtgtttaccagtgacagcaccagagaatggaaaaattgtcagtagt

SEQ ID NO: 193 - DNA, 120 bp, Artificial Sequence
  ENSG00000000971_6 (sequence is synthesized)
gcaatggaaccagatcgggaataccattttggacaagcagtacggtttgtatgtaactcaggctacaagattgaaggagatgaagaaatgcattgttcagacgatggtttttggagtaaa

SEQ ID NO: 194 - DNA, 120 bp, Artificial Sequence
  ENSG00000000971_7 (sequence is synthesized)
gagaaaccaaagtgtgtggaaatttcatgcaaatccccagatgttataaatggatctcctatatctcagaagattatttataaggagaatgaacgatttcaatataaatgtaacatgggt

SEQ ID NO: 195 - DNA, 120 bp, Artificial Sequence
  ENSG00000000971_8 (sequence is synthesized)
tatgaatacagtgaaagaggagatgctgtatgcactgaatctggatggcgtccgttgccttcatgtgaagaaaaatcatgtgataatccttatattccaaatggtgactactcaccttta

SEQ ID NO: 196 - DNA, 120 bp, Artificial Sequence
  ENSG00000000971_9 (sequence is synthesized)
aggattaaacacagaactggagatgaaatcacgtaccagtgtagaaatggtttttatcctgcaacccggggaaatacagcaaaatgcacaagtactggctggatacctgctccgagatgt

SEQ ID NO: 197 - DNA, 120 bp, Artificial Sequence
  ENSG00000000971_10 (sequence is synthesized)
accttgaaaccttgtgattatccagacattaaacatggaggtctatatcatgagaatatgcgtagaccatactttccagtagctgtaggaaaatattactcctattactgtgatgaacat

SEQ ID NO: 198 - DNA, 120 bp, Artificial Sequence
  ENSG00000000971_11 (sequence is synthesized)
tttgagactccgtcaggaagttactgggatcacattcattgcacacaagatggatggtcgccagcagtaccatgcctcagaaaatgttattttccttatttggaaaatggatataatcaa

SEQ ID NO: 199 - DNA, 120 bp, Artificial Sequence
  ENSG00000000971_12 (sequence is synthesized)
aatcatggaagaaagtttgtacagggtaaatctatagacgttgcctgccatcctggctacgctcttccaaaagcgcagaccacagttacatgtatggagaatggctggtctcctactccc

SEQ ID NO: 200 - DNA, 120 bp, Artificial Sequence
  ENSG00000000971_13 (sequence is synthesized)
agatgcatccgtgtcaaaacatgttccaaatcaagtatagatattgagaatgggtttatttctgaatctcagtatacatatgccttaaaagaaaaagcgaaatatcaatgcaaactagga

SEQ ID NO: 201 - DNA, 120 bp, Artificial Sequence
  ENSG00000000971_14 (sequence is synthesized)
tatgtaacagcagatggtgaaacatcaggatcaattacatgtgggaaagatggatggtcagctcaacccacgtgcattaaatcttgtgatatcccagtatttatgaatgccagaactaaa

SEQ ID NO: 202 - DNA, 120 bp, Artificial Sequence
  ENSG00000000971_15 (sequence is synthesized)
aatgacttcacatggtttaagctgaatgacacattggactatgaatgccatgatggttatgaaagcaatactggaagcaccactggttccatagtgtgtggttacaatggttggtctgat

SEQ ID NO: 203 - DNA, 120 bp, Artificial Sequence
  ENSG00000000971_16 (sequence is synthesized)
ttacccatatgttatgaaagagaatgcgaacttcctaaaatagatgtacacttagttcctgatcgcaagaaagaccagtataaagttggagaggtgttgaaattctcctgcaaaccagga

SEQ ID NO: 204 - DNA, 120 bp, Artificial Sequence
  ENSG00000000971_17 (sequence is synthesized)
gtctcctgacctcccaatatgtaaagagcaagtacaatcatgtggtccacctcctgaactcctcaatgggaatgttaaggaaaaaacgaaagaagaatatggacacagtgaagtggtgga

SEQ ID NO: 205 - DNA, 120 bp, Artificial Sequence
  ENSG00000000971_18 (sequence is synthesized)
atattattgcaatcctagatttctaatgaagggacctaataaaattcaatgtgttgatggagagtggacaactttaccagtgtgtattgtggaggagagtacctgtggagatatacctga

SEQ ID NO: 206 - DNA, 120 bp, Artificial Sequence
  ENSG00000000971_19 (sequence is synthesized)
acttgaacatggctgggcccagctttcttcccctccttattactatggagattcagtggaattcaattgctcagaatcatttacaatgattggacacagatcaattacgtgtattcatgg

SEQ ID NO: 207 - DNA, 120 bp, Artificial Sequence
  ENSG00000000971_20 (sequence is synthesized)
agtatggacccaacttccccagtgtgtggcaatagataaacttaagaagtgcaaatcatcaaatttaattatacttgaggaacatttaaaaaacaagaaggaattcgatcataattctaa

SEQ ID NO: 208 - DNA, 120 bp, Artificial Sequence
  ENSG00000000971_21 (sequence is synthesized)
cataaggtacagatgtagaggaaaagaaggatggatacacacagtctgcataaatggaagatgggatccagaagtgaactgctcaatggcacaaatacaattatgcccacctccacctca

SEQ ID NO: 209 - DNA, 120 bp, Artificial Sequence
  ENSG00000000971_22 (sequence is synthesized)
gattcccaattctcacaatatgacaaccacactgaattatcgggatggagaaaaagtatctgttctttgccaagaaaattatctaattcaggaaggagaagaaattacatgcaaagatgg

SEQ ID NO: 210 - DNA, 120 bp, Artificial Sequence
  ENSG00000000971_23 (sequence is synthesized)
aagatggcagtcaataccactctgtgttgaaaaaattccatgttcacaaccacctcagatagaacacggaaccattaattcatccaggtcttcacaagaaagttatgcacatgggactaa

SEQ ID NO: 211 - DNA, 120 bp, Artificial Sequence
  ENSG00000000971_24 (sequence is synthesized)
attgagttatacttgtgagggtggtttcaggatatctgaagaaaatgaaacaacatgctacatgggaaaatggagttctccacctcagtgtgaaggccttccttgtaaatctccacctga

SEQ ID NO: 212 - DNA, 120 bp, Artificial Sequence
  ENSG00000000971_25 (sequence is synthesized)
gatttctcatggtgttgtagctcacatgtcagacagttatcagtatggagaagaagttacgtacaaatgttttgaaggttttggaattgatgggcctgcaattgcaaaatgcttaggaga

SEQ ID NO: 213 - DNA, 120 bp, Artificial Sequence
  ENSG00000000971_26 (sequence is synthesized)
aaaatggtctcaccctccatcatgcataaaaacagattgtctcagtttacctagctttgaaaatgccatacccatgggagagaagaaggatgtgtataaggcgggtgagcaagtgactta

SEQ ID NO: 214 - DNA, 120 bp, Artificial Sequence
  ENSG00000000971_27 (sequence is synthesized)
cacttgtgcaacatattacaaaatggatggagccagtaatgtaacatgcattaatagcagatggacaggaaggccaacatgcagagacacctcctgtgtgaatccgcccacagtacaaaa

SEQ ID NO: 215 - DNA, 120 bp, Artificial Sequence
  ENSG00000000971_28 (sequence is synthesized)
tgcttatatagtgtcgagacagatgagtaaatatccatctggtgagagagtacgttatcaatgtaggagcccttatgaaatgtttggggatgaagaagtgatgtgtttaaatggaaactg

SEQ ID NO: 216 - DNA, 120 bp, Artificial Sequence
  ENSG00000000971_29 (sequence is synthesized)
gacggaaccacctcaatgcaaagattctacaggaaaatgtgggccccctccacctattgacaatggggacattacttcattcccgttgtcagtatatgctccagcttcatcagttgagta

SEQ ID NO: 217 - DNA, 120 bp, Artificial Sequence
  ENSG00000000971_30 (sequence is synthesized)
ccaatgccagaacttgtatcaacttgagggtaacaagcgaataacatgtagaaatggacaatggtcagaaccaccaaaatgcttacatccgtgtgtaatatcccgagaaattatggaaaa

SEQ ID NO: 218 - DNA, 120 bp, Artificial Sequence
  ENSG00000000971_31 (sequence is synthesized)
ttataacatagcattaaggtggacagccaaacagaagctttattcgagaacaggtgaatcagttgaatttgtgtgtaaacggggatatcgtctttcatcacgttctcacacattgcgaac

SEQ ID NO: 219 - DNA, 120 bp, Artificial Sequence
  ENSG00000000971_32 (sequence is synthesized)
aacatgttgggatgggaaactggagtatccaacttgtgcaaaaagatagaatcaatcataaagtgcacacctttattcagaactttagtattaaatcagttctcaatttcattttttatg

SEQ ID NO: 220 - DNA, 120 bp, Artificial Sequence
  ENSG00000000971_33 (sequence is synthesized)
tattgttttactcctttttattcatacgtaaaattttggattaatttgtgaaaatgtaattataagctgagaccggtggctctcttcttaaaagcaccatattaaatcctggaaaactaa

SEQ ID NO: 221 - DNA, 120 bp, Artificial Sequence
  ENSG00000000971_34 (sequence is synthesized)
gagaaattggaaaatattaagtagaatcaaaagaactactcaaattattttaaacacttaggtcgaagaggatggaaaattaacgatgatttctctattgaagttaatgtcataaagttt

SEQ ID NO: 222 - DNA, 120 bp, Artificial Sequence
  ENSG00000000971_35 (sequence is synthesized)
gcttttacatcttttaggaacacagtgttatattattctagggcataaatgaaaatgtatttaattatctcaagctttatatttcttaattatttaaaaatactagtttgttactacaaa

SEQ ID NO: 223 - DNA, 120 bp, Artificial Sequence
  ENSG00000000971_36 (sequence is synthesized)
aatacaagctagcattgaaagtagtaattttcattgtccactcccatagaaaagaatcaggaataaacattccatttgcttgtttcttagaggaaagtatctctagcaaacaggtatatc

SEQ ID NO: 224 - DNA, 120 bp, Artificial Sequence
  ENSG00000000971_37 (sequence is synthesized)
aaatgcttctaaaaataatttaagtaatttcctccaatcttatcctgaggatgattttatacatacacatatttttcacaataaacttttaaaattccattagaaaacattacatgtatt

SEQ ID NO: 225 - DNA, 120 bp, Artificial Sequence
  ENSG00000000971_38 (sequence is synthesized)
atgtaaatatacatttaaaacatcgttcattctaaggaatatcagcaatattaacaatagctaatgtttattgagcacttactatctgcctgtaattgagctaagttctttgcatgcatc

SEQ ID NO: 226 - DNA, 120 bp, Artificial Sequence
  ENSG00000000971_39 (sequence is synthesized)
atttcattttaactttcaaaaaactccatgatttacttactcatcactttcattttataatggaagagactggtgcaaagaagttaaatcacatgccctggattatcatggcataaagag

SEQ ID NO: 227 - DNA, 120 bp, Artificial Sequence
  ENSG00000000971_40 (sequence is synthesized)
tcaagttaggatttaaatgtaggttatctgacaccagagtccatgctttaaccataactccattgtagttgtctcttaggttgaaagagaatgctaagtatttctgctgcaagctgtaag

SEQ ID NO: 228 - DNA, 120 bp, Artificial Sequence
  ENSG00000000971_41 (sequence is synthesized)
acctctggaatagacatttgtttttattttgaaagccaaagattcattatgtatttccagagatacattagaatgacattcgtttttgaataacacttttaggaagcagacctattttat

SEQ ID NO: 229 - DNA, 120 bp, Artificial Sequence
  ENSG00000000971_42 (sequence is synthesized)
atttgtactgcaagtttactataaatgttgctgaattgaacagaatccactaaataaattgttgcctcttaaaaaaagttttatagtaaactgtaagccaggatttttttagtcataata

SEQ ID NO: 230 - DNA, 120 bp, Artificial Sequence
  ENSG00000000971_43 (sequence is synthesized)
ctgccaacctgtgcatcatgaccaatcaaagattttggcttctgtgataaacatcgtggttgatttgtttagtagtaccatagttcaagttcattttaccaataattgtttggcagaagt

SEQ ID NO: 231 - DNA, 120 bp, Artificial Sequence
  ENSG00000000971_44 (sequence is synthesized)
aatagttctttatgttaaatctaatatttttattcagcatagcaaatattatgtactttagaagtacatggatggaatttacatccttacaactagattcctgtggttagtgaaaacttc

SEQ ID NO: 232 - DNA, 120 bp, Artificial Sequence
  ENSG00000000971_45 (sequence is synthesized)
ctggaatggctgatgcctacgattaagtcttaaagaaaaaaaacgagattttgtagatgaaaatgagagcaaaagcataccagagttcagggaaagggaagtggaagggcagtgaggctt

SEQ ID NO: 233 - DNA, 120 bp, Artificial Sequence
  ENSG00000000971_46 (sequence is synthesized)
taaggagcatgaagcaccactgattcttgtccattgttcctaggcaccttagtctaggatgcaagtagggaacgagtcagtgataaatagaaggtgggccaatacatagtgctgaggtgc

SEQ ID NO: 234 - DNA, 120 bp, Artificial Sequence
  ENSG00000000971_47 (sequence is synthesized)
tgcatgcaccatgctgaagaacgcgtcttttattcagattgatttgggaatcaatgaaggatttcaagtggagttacgatgtgtctacctgagaggtcattaagctatacacaaggaaaa

SEQ ID NO: 235 - DNA, 120 bp, Artificial Sequence
  ENSG00000000971_48 (sequence is synthesized)
tggattagaaagtgggagaacagagtttgggaaactacttatgattggcacaatcccaggtaaaaatgtttgagagaagtgggtataaaaggtataaaagatgatggccatttttttttt

SEQ ID NO: 236 - DNA, 120 bp, Artificial Sequence
  ENSG00000000971_49 (sequence is synthesized)
ttctgaggaaatcttggctaaatagtgatgacacaaaaacaggtcagttacttttcagagatgtaatgacaatgagttaaatcaatgtctttgacaaaaagtcctgttgataattcctgt

SEQ ID NO: 237 - DNA, 120 bp, Artificial Sequence
  ENSG00000000971_50 (sequence is synthesized)
cttatcaataactagaagatgtgttattttttgcaggtcattcagtgaaaacatcacaataaaactatatttatgatcaattttatttatacagttgatgaatgttactggtcactattt

SEQ ID NO: 238 - DNA, 120 bp, Artificial Sequence
  ENSG00000000971_51 (sequence is synthesized)
atttcaagaaggctaatttatcctgaaactaaataaaatcagaagcataattttaatcagaattttaactttcttcagataaatcatttattaagcggtcaagtcaaaacagaacttttg

SEQ ID NO: 239 - DNA, 120 bp, Artificial Sequence
  ENSG00000000971_52 (sequence is synthesized)
tttggttgactgatttacctgatggaaacaacatttctgttttcatataattatgtcctggtcacagtcctttaatttgcaataaacattttggaatttaatcccttttatttagaaatt

SEQ ID NO: 240 - DNA, 120 bp, Artificial Sequence
  ENSG00000000971_53 (sequence is synthesized)
aatggtctcaccctccatcatgcataagtatggtgcattgaattttattatatgtatgataaatattcttcattcaaagtgtaagtggtaccaataagaaagtaaacagggactctagaa

SEQ ID NO: 241 - DNA, 120 bp, Artificial Sequence
  ENSG00000000971_54 (sequence is synthesized)
attcataaggttttcttgaatattctggactgctgtgggaaattatagctgtagtaattaaaacatttgacattataagccaaattagttcattttcacatcatcttgtgtgaactttaa

SEQ ID NO: 242 - DNA, 120 bp, Artificial Sequence
  ENSG00000000971_55 (sequence is synthesized)
gcatcctctgatgtatattctcagacttctcatctctgttcttagggcacagctgcctctactcatcaatctccacattattcaatcttctgtcagtttatcaacaatctgcctataagt

SEQ ID NO: 243 - DNA, 120 bp, Artificial Sequence
  ENSG00000000971_56 (sequence is synthesized)
acattttctgaaatattttaaaaaatcattataagtatttcacatttgatagaagcaaaaaatttggaaatgcacacacaatataggtggtgtattattccgttttcacactgctgtaaa

SEQ ID NO: 244 - DNA, 120 bp, Artificial Sequence
  ENSG00000000971_57 (sequence is synthesized)
gaccttcctgagactgggtaatttataaaagaaaaaattttaattgatcacagttcctcatgactgaggaggtgtcatgaaacttaccattaccgctgaaggggaagcaggcaccttctt

SEQ ID NO: 245 - DNA, 120 bp, Artificial Sequence
  ENSG00000000971_58 (sequence is synthesized)
cacaaggtggcaggagagagaggagtgagtgaaggaggaacttctaaacagttattaaatcatcatatcttgtgagaactcactcaccatcgtgagaacagcatgtgggaaactgccacc

SEQ ID NO: 246 - DNA, 120 bp, Artificial Sequence
  ENSG00000000971_59 (sequence is synthesized)
caccatcgtgagaacagcatgtgggaaactgccaccatgatccaatcacttcccaccaggtctctctctcaacacctggagattattattcaagatgagatttgggtgaggacacaaagc

SEQ ID NO: 247 - DNA, 120 bp, Artificial Sequence
  ENSG00000000971_60 (sequence is synthesized)
tgtgaacaaaaaaatgtgtaatctcaattgctacggctaccaatatttcttcagtcttctaatatcatttctatcttgtatttttaatagatttagaagaatttaatgtaattaagacaa

SEQ ID NO: 248 - DNA, 120 bp, Artificial Sequence
  ENSG00000000971_61 (sequence is synthesized)
aatggctaatatattttctcaagttataagaaaaatgttgtacagtattcattgattctatatatcgctattttagaatccattacatgtattgtatgtaacctatttttaaagatttgc

SEQ ID NO: 249 - DNA, 120 bp, Artificial Sequence
  ENSG00000000971_62 (sequence is synthesized)
tctgaacttctgatcgaaggtcatccctctccagcttgagtggatcaaagatgacaagggccaatggaaccaagtttgagtcttgccaggtcaatacttgggtcctgagtatggtgacta

SEQ ID NO: 250 - DNA, 120 bp, Artificial Sequence
  ENSG00000000971_63 (sequence is synthesized)
gtatctgttttgttatgtgtgtattattccagccagaatgggaaatgctaattcagctcctccaggcagcccaatggggctggtggctttgagattattaaactctttctctgctgcaaa

SEQ ID NO: 251 - DNA, 120 bp, Artificial Sequence
  ENSG00000000971_64 (sequence is synthesized)
gtacttaatacatttgtgaaatttatgaaaactaggtgtaaaaatacttaagatttaatattgtagcaattatgcctgaattatatcactattgccagtcaaatacaaaataatacataa

SEQ ID NO: 252 - DNA, 120 bp, Artificial Sequence
  ENSG00000000971_65 (sequence is synthesized)
tcttttttttttgttttgagatggagtctggctctgtcacctaggctgcagtgcagtggcgcaattttgagatggagtctccctctatcgcctggctggagtgcagtggcgctatttcgg

SEQ ID NO: 253 - DNA, 120 bp, Artificial Sequence
  ENSG00000001036_0 (sequence is synthesized)
gcggcatactcagcggcagagacggaagaacagcgctcccgaggccgcgggagcctgcagagaggacagccggcctgcgccgggacatgcggccccaggagctccccaggctcgcgttcc

SEQ ID NO: 254 - DNA, 120 bp, Artificial Sequence
  ENSG00000001036_1 (sequence is synthesized)
cgttgctgctgttgctgttgctgctgctgccgccgccgccgtgccctgcccacagcgccacgcgcttcgaccccacctgggagtccctggacgcccgccagctgcccgcgtggtttgacc

SEQ ID NO: 255 - DNA, 120 bp, Artificial Sequence
  ENSG00000001036_2 (sequence is synthesized)
aggccaagttcggcatcttcatccactggggagtgttttccgtgcccagcttcggtagcgagtggttctggtggtattggcaaaaggaaaagataccgaagtatgtggaatttatgaaag

SEQ ID NO: 256 - DNA, 120 bp, Artificial Sequence
  ENSG00000001036_3 (sequence is synthesized)
ataattaccctcctagtttcaaatatgaagattttggaccactatttacagcaaaattttttaatgccaaccagtgggcagatatttttcaggcctctggtgccaaatacattgtcttaa

SEQ ID NO: 257 - DNA, 120 bp, Artificial Sequence
  ENSG00000001036_4 (sequence is synthesized)
cttccaaacatcatgaaggctttaccttgtgggggtcagaatattcgtggaactggaatgccatagatgaggggcccaagagggacattgtcaaggaacttgaggtagccattaggaaca

SEQ ID NO: 258 - DNA, 120 bp, Artificial Sequence
  ENSG00000001036_5 (sequence is synthesized)
gaactgacctgcgttttggactgtactattccctttttgaatggtttcatccgctcttccttgaggatgaatccagttcattccataagcggcaatttccagtttctaagacattgccag

SEQ ID NO: 259 - DNA, 120 bp, Artificial Sequence
  ENSG00000001036_6 (sequence is synthesized)
agctctatgagttagtgaacaactatcagcctgaggttctgtggtcggatggtgacggaggagcaccggatcaatactggaacagcacaggcttcttggcctggttatataatgaaagcc

SEQ ID NO: 260 - DNA, 120 bp, Artificial Sequence
  ENSG00000001036_7 (sequence is synthesized)
cagttcggggcacagtagtcaccaatgatcgttggggagctggtagcatctgtaagcatggtggcttctatacctgcagtgatcgttataacccaggacatcttttgccacataaatggg

SEQ ID NO: 261 - DNA, 120 bp, Artificial Sequence
  ENSG00000001036_8 (sequence is synthesized)
aaaactgcatgacaatagacaaactgtcctggggctataggagggaagctggaatctctgactatcttacaattgaagaattggtgaagcaacttgtagagacagtttcatgtggaggaa

SEQ ID NO: 262 - DNA, 120 bp, Artificial Sequence
  ENSG00000001036_9 (sequence is synthesized)
tttatgaaacccatacctggcgatcccagaatgacactgtcaccccagatgtgtggtacacatccaagcctaaagaaaaattagtctatgccatttttcttaaatggcccacatcaggac

SEQ ID NO: 263 - DNA, 120 bp, Artificial Sequence
  ENSG00000001036_10 (sequence is synthesized)
agctgttccttggccatcccaaagctattctgggggcaacagaggtgaaactactgggccatggacagccacttaactggatttctttggagcaaaatggcattatggtagaactgccac

SEQ ID NO: 264 - DNA, 120 bp, Artificial Sequence
  ENSG00000001036_11 (sequence is synthesized)
agctaaccattcatcagatgccgtgtaaatggggctgggctctagccctgactaatgtgatctaaagtgcagcagagtggctgatgctgcaagttatgtctaaggctaggaactatcagg

SEQ ID NO: 265 - DNA, 120 bp, Artificial Sequence
  ENSG00000001036_12 (sequence is synthesized)
tgtctataattgtagcacatggagaaagcaaatgtaaaactggataagaaaattattttggcagttcagccctttccctttttcccactaaattttttcttaaattacccatgtaaccat

SEQ ID NO: 266 - DNA, 120 bp, Artificial Sequence
  ENSG00000001036_13 (sequence is synthesized)
tttaactctccagtgcactttgccattaaagtctcttcacattgatttgtttccatgtgtgactcagaggtgagaattttttcacattatagtagcaaggaattggtggtattatggacc

SEQ ID NO: 267 - DNA, 120 bp, Artificial Sequence
  ENSG00000001036_14 (sequence is synthesized)
gaactgaaaattttatgttgaagccatatcccccatgattatatagttatgcatcacttaatatggggatattttctgggaaatgcattgctagtcaatttttttttgtgccaacatcat

SEQ ID NO: 268 - DNA, 120 bp, Artificial Sequence
  ENSG00000001036_15 (sequence is synthesized)
agagtgtatttacaaaatcctagatggcatagcctactacacacctaatgtgtatggtatagactgttgctcctaggctacagacatatacagcatgttactgaatactgtaggcaatag

SEQ ID NO: 269 - DNA, 120 bp, Artificial Sequence
  ENSG00000001036_16 (sequence is synthesized)
taacagtggtatttgtatatcgaaacatatggaaacatagagaaggtacagtaaaaatactgtaaaataaatggtgcacctgtatagggcacttaccacgaatggagcttacaggactgg

SEQ ID NO: 270 - DNA, 120 bp, Artificial Sequence
  ENSG00000001036_17 (sequence is synthesized)
aagttgctctgggtgagtcagtgagtgaatgtgaaggcctaggacattattgaacactgccagactttataaatactgtatgcttaggctacactacatttataaaaaaaagtttttctt

SEQ ID NO: 271 - DNA, 120 bp, Artificial Sequence
  ENSG00000001036_18 (sequence is synthesized)
tcttcaattataaattaacataagtgtactgtaactttacaaacgttttaatttttaaaacctttttggctcttttgtaataacacttagcttaaaacataaactcattgtgcaaatgta

SEQ ID NO: 272 - DNA, 120 bp, Artificial Sequence
  ENSG00000001036_19 (sequence is synthesized)
acattaacttttaaggggagccttataactgtttcacttatacttcataaaaggaattgtaaatgagctccagccaagcattgtggctcacactgtaattccagcactttgggaggctaa

SEQ ID NO: 273 - DNA, 83 bp, Artificial Sequence
  ENSG00000001036_20 (sequence is synthesized)
gaggccagagtctacaaaaattttttttaaagttagctgagcatggtggcacgcacctgtagtcctagttactcaggaggctg

SEQ ID NO: 274 - DNA, 120 bp, Artificial Sequence
  ENSG00000001036_21 (sequence is synthesized)
aggaggattgcttgagcccagtaggtcaagactacagtaagctatgactgcaccacttcagcctgtctctgaaaaaataaaataaaatataataaaataaaatgaatttcaccaatgaca

SEQ ID NO: 275 - DNA, 120 bp, Artificial Sequence
  ENSG00000001084_0 (sequence is synthesized)
aggagcggcgagctagcggacgcaaagactgggcatgctccgcggcggcgcaggttttggtcacaagtaggaagaagccagtgcaccagaccggcaaagagaagcgggagccgccgcggc

SEQ ID NO: 276 - DNA, 120 bp, Artificial Sequence
  ENSG00000001084_1 (sequence is synthesized)
cgtggggtccgccgccgccgcatcggagcgggaggaggagcagcggggagggcgaggccgccgggccgagagccgtcccgcctgctctcggtcttctgccttcgcctccgcgcggtgcgt

SEQ ID NO: 277 - DNA, 120 bp, Artificial Sequence
  ENSG00000001084_2 (sequence is synthesized)
cttctgccttcgcctccgcgcggtgcgtcggacccagggtctgtcacctgggcgccaggggccgccgccggggagccggagcgggcaggaccctccctccgccgactgcggcccgagagc

SEQ ID NO: 278 - DNA, 120 bp, Artificial Sequence
  ENSG00000001084_3 (sequence is synthesized)
cagccgccttctgcgggcggctgagtgtccgtctcgcgcccggagcgggcgaccgccgtcagcccggaggaggaggaggaggaggagggggcggccatggggctgctgtcccagggctcg

SEQ ID NO: 279 - DNA, 120 bp, Artificial Sequence
  ENSG00000001084_4 (sequence is synthesized)
ccgctgagctgggaggaaaccaagcgccatgccgaccacgtgcggcggcacgggatcctccagttcctgcacatctaccacgccgtcaaggaccggcacaaggacgttctcaagtggggc

SEQ ID NO: 280 - DNA, 120 bp, Artificial Sequence
  ENSG00000001084_5 (sequence is synthesized)
gatgaggtggaatacatgttggtatcttttgatcatgaaaataaaaaagtccggttggtcctgtctggggagaaagttcttgaaactctgcaagagaagggggaaaggacaaacccaaac

SEQ ID NO: 281 - DNA, 120 bp, Artificial Sequence
  ENSG00000001084_6 (sequence is synthesized)
catcctaccctttggagaccagagtatgggagttacatgattgaagggacaccaggacagccctacggaggaacaatgtccgagttcaatacagttgaggccaacatgcgaaaacgccgg

SEQ ID NO: 282 - DNA, 120 bp, Artificial Sequence
  ENSG00000001084_7 (sequence is synthesized)
aaggaggctacttctatattagaagaaaatcaggctctttgcacaataacttcatttcccagattaggctgtcctgggttcacactgcccgaggtcaaacccaacccagtggaaggagga

SEQ ID NO: 283 - DNA, 120 bp, Artificial Sequence
  ENSG00000001084_8 (sequence is synthesized)
gcttccaagtccctcttctttccagatgaagcaataaacaagcaccctcgcttcagtaccttaacaagaaatatccgacataggagaggagaaaaggttgtcatcaatgtaccaatattt

SEQ ID NO: 284 - DNA, 120 bp, Artificial Sequence
  ENSG00000001084_9 (sequence is synthesized)
aaggacaagaatacaccatctccatttatagaaacatttactgaggatgatgaagcttcaagggcttctaagccggatcatatttacatggatgccatgggatttggaatgggcaattgc

SEQ ID NO: 285 - DNA, 120 bp, Artificial Sequence
  ENSG00000001084_10 (sequence is synthesized)
tgtctccaggtgacattccaagcctgcagtatatctgaggccagatacctttatgatcagttggctactatctgtccaattgttatggctttgagtgctgcatctcccttttaccgaggc

SEQ ID NO: 286 - DNA, 120 bp, Artificial Sequence
  ENSG00000001084_11 (sequence is synthesized)
tatgtgtcagacattgattgtcgctggggagtgatttctgcatctgtagatgatagaactcgggaggagcgaggactggagccattgaagaacaataactataggatcagtaaatcccga

SEQ ID NO: 287 - DNA, 120 bp, Artificial Sequence
  ENSG00000001084_12 (sequence is synthesized)
tatgactcaatagacagctatttatctaagtgtggtgagaaatataatgacatcgacttgacgatagataaagagatctacgaacagctgttgcaggaaggcattgatcatctcctggcc

SEQ ID NO: 288 - DNA, 120 bp, Artificial Sequence
  ENSG00000001084_13 (sequence is synthesized)
cagcatgttgctcatctctttattagagacccactgacactgtttgaagagaaaatacacctggatgatgctaatgagtctgaccattttgagaatattcagtccacaaattggcagaca

SEQ ID NO: 289 - DNA, 120 bp, Artificial Sequence
  ENSG00000001084_14 (sequence is synthesized)
atgagatttaagccccctcctccaaactcagacattggatggagagtagaatttcgacccatggaggtgcaattaacagactttgagaactctgcctatgtggtgtttgtggtactgctc

SEQ ID NO: 290 - DNA, 120 bp, Artificial Sequence
  ENSG00000001084_15 (sequence is synthesized)
gaaggtagcacagaaaagagatgctgtcttgcagggaatgttttatttcaggaaagatatttgcaaaggtggcaatgcagtggtggatggttgtggcaaggcccagaacagcacggagct

SEQ ID NO: 291 - DNA, 120 bp, Artificial Sequence
  ENSG00000001084_16 (sequence is synthesized)
cgctgcagaggagtacaccctcatgagcatagacaccatcatcaatgggaaggaaggtgtgtttcctggactgatcccaattctgaactcttaccttgaaaacatggaagtggatgtgga

SEQ ID NO: 292 - DNA, 120 bp, Artificial Sequence
  ENSG00000001084_17 (sequence is synthesized)
caccagatgtagtattctgaactacctaaagctaattaagaagagagcatctggagaactaatgacagttgccagatggatgagggagtttatcgcaaaccatcctgactacaagcaaga

SEQ ID NO: 293 - DNA, 120 bp, Artificial Sequence
  ENSG00000001084_18 (sequence is synthesized)
cagtgtcataactgatgaaatgaattatagccttattttgaagtgtaaccaaattgcaaatgaattatgtgaatgcccagagttacttggatcagcatttaggaaagtaaaatatagtgg

SEQ ID NO: 294 - DNA, 120 bp, Artificial Sequence
  ENSG00000001084_19 (sequence is synthesized)
aagtaaaactgactcatccaactagacattctacagaaagaaaaatgcattattgacgaactggctacagtaccatgcctctcagccagcccgtgtgtataatatgaagaccaaatgata

SEQ ID NO: 295 - DNA, 120 bp, Artificial Sequence
  ENSG00000001084_20 (sequence is synthesized)
gaactgtactgttttctgggccagtgagccagaaattgattaaggctttctttggtaggtaaatctagagtttatacagtgtacatgtacatagtaaagtatttttgattaacaatgtat

SEQ ID NO: 296 - DNA, 120 bp, Artificial Sequence
  ENSG00000001084_21 (sequence is synthesized)
tttaataacatatctaaagtcatcatgaactggcttgtacatttttaaattcttactctggagcaacctactgtctaagcagttttgtaaatgtactggtaattgtacaatacttgcatt

SEQ ID NO: 297 - DNA, 120 bp, Artificial Sequence
  ENSG00000001084_22 (sequence is synthesized)
ccagagttaaaatgtttactgtaaatttttgttcttttaaagactacctgggacctgatttattgaaatttttctctttaaaaacattttctctcgttaattttcctttgtcatttcctt

SEQ ID NO: 298 - DNA, 120 bp, Artificial Sequence
  ENSG00000001084_23 (sequence is synthesized)
tgttgtctacattaaatcacttgaatccattgaaagtgcttcaagggtaatcttgggtttctagcaccttatctatgatgtttcttttgcaattggaataatcacttggtcaccttgccc

SEQ ID NO: 299 - DNA, 120 bp, Artificial Sequence
  ENSG00000001084_24 (sequence is synthesized)
caagctttcccctctgaataaatacccattgaactctgatggctgttatcaaaggaacttttctttgtttaaatttgctgatgcaggaattaagtttaaacacaactctatagaaagaaa

SEQ ID NO: 300 - DNA, 120 bp, Artificial Sequence
  ENSG00000001084_25 (sequence is synthesized)
ggagattattacccagaattcacatgtagtgattattaaggacaatttttttttttaactaaaaaagttggcggcaggggtggggggtggcaatcatttttcttcctatacatacaaagg

SEQ ID NO: 301 - DNA, 120 bp, Artificial Sequence
  ENSG00000001084_26 (sequence is synthesized)
atattgtcaaaaatggcgttcttctcttgtggcctgttattctgattgctgctgtatacagttttgtcactctttagtttttagttaagcatactgatagactttcctctaaaagccatt

SEQ ID NO: 302 - DNA, 120 bp, Artificial Sequence
  ENSG00000001084_27 (sequence is synthesized)
cactccagattttacctggggaatattctacatactgcttactttctctataaaactcatcaataaatcatgaaaggcactgagttttgtaaatcaggaccctaaatgtttaattgtaaa

SEQ ID NO: 303 - DNA, 120 bp, Artificial Sequence
  ENSG00000001084_28 (sequence is synthesized)
taagtttcagataattattatagctttgcgttgaagtttgttgttttttttctcaactagttaagtcaactgcttctgaaataactctgtattgtagattatgcagatctttacaggcat

SEQ ID NO: 304 - DNA, 120 bp, Artificial Sequence
  ENSG00000001084_29 (sequence is synthesized)
aaatatttaaactgtaatatgctaacttgaagagattgcaataaagctgcttcagctaaccctgtttatgtttaaatactagggtttgttctatattttatacatgcattttggatgatt

SEQ ID NO: 305 - DNA, 120 bp, Artificial Sequence
  ENSG00000001084_30 (sequence is synthesized)
aaagaatgcctggttttcgtttgcaatttgcttgtgtaaatcaggttgtaaaaaggcagataaattgaaatgtttgtggtatgaggaaataaaagaatggaattagctttcattcagaaa

SEQ ID NO: 306 - DNA, 120 bp, Artificial Sequence
  ENSG00000001084_31 (sequence is synthesized)
tttctttatggtgatgggtatagatctatctgtagatatatttatttatatatgctatttatttcccacctaatttcatttgaaattgtttaccctttgcaataaaatgtttctccatca

SEQ ID NO: 307 - DNA, 120 bp, Artificial Sequence
  ENSG00000001084_32 (sequence is synthesized)
actttgccttcttccatgattggaagcttcctgaggccaccccagagtcagaagccgctatgcttcctggacagcttgcagaacccaatgtgaggaaagtggaatgaacttggactttga

SEQ ID NO: 308 - DNA, 120 bp, Artificial Sequence
  ENSG00000001084_33 (sequence is synthesized)
aggcaaactaacctggaatcaaatactggctctgctgtttgcaagtgtgatctttgggtatgcttcctaatctgtgagcttcaacttcctcctctgtaaaccaagatcaaagacaaacag

SEQ ID NO: 309 - DNA, 120 bp, Artificial Sequence
  ENSG00000001084_34 (sequence is synthesized)
atctgatgaggaactcactggcctacctttccttgacagctggggcctgccagccttgaagcatgactccacaacgcccctacccaaggccatggaggttgctgctgatgagcaagctgt

SEQ ID NO: 310 - DNA, 120 bp, Artificial Sequence
  ENSG00000001084_35 (sequence is synthesized)
tttatatttaatccaggtttctgcttggagaggaagaaggtagaggagccagcgaaggtggaatacatgttggtatcttttgatcatgaaaataaaaaagtccggttggtcctgtctggg

SEQ ID NO: 311 - DNA, 120 bp, Artificial Sequence
  ENSG00000001084_36 (sequence is synthesized)
ggtttctgttgggtaacaaagaatttatgctcaccaagttatatgatcttttctctgcctaactcttaagtgtcctacctaccatccttgtgcaggcttcctgggtgatctccccatctt

SEQ ID NO: 312 - DNA, 120 bp, Artificial Sequence
  ENSG00000001084_37 (sequence is synthesized)
caggacattctctgagcctactccccaggtctttctacaactcgggtttttcttctgggcaccagccctgaagacctagccacttagagggcctctttttctgtctgttctcttggcctc

SEQ ID NO: 313 - DNA, 120 bp, Artificial Sequence
  ENSG00000001084_38 (sequence is synthesized)
gtaagtccatcatgtcatgacacctctttatctctaacctctgaacacccaagccaaaacctaagccatcccctactctcagtctccccttggtcaccagtgcctgctactttgacttta

SEQ ID NO: 314 - DNA, 120 bp, Artificial Sequence
  ENSG00000001084_39 (sequence is synthesized)
gtatcactctccccacatctttcctcagccttttccttgacaggtgcagtattttaactgcttccctgtctttctagtctttcccccttccaagctcttcaccatactgccaccagtgaa

SEQ ID NO: 315 - DNA, 86 bp, Artificial Sequence
  ENSG00000001084_40 (sequence is synthesized)
ggaagaaagaaagaaaacaatagttaacatgtccaaatcccttttgcatccctcactgactgaagggataggaaggcaacaagcca

SEQ ID NO: 316 - DNA, 120 bp, Artificial Sequence
  ENSG00000001084_41 (sequence is synthesized)
catccctcactgactgaagggataggaaggcaacaagccagtagaagagaaaatgctttgctaaacatcatcgtatgtctgtgtcttatttttcttttttgactatttaatcttatttca

SEQ ID NO: 317 - DNA, 120 bp, Artificial Sequence
  ENSG00000001084_42 (sequence is synthesized)
cttaggaccttggttatttatattagttgtctataggcagtggaacataattaaataccattttctagttaaattcacctaagacaacttttaaacaaaactcttgcgttaaatgttgcc

SEQ ID NO: 318 - DNA, 120 bp, Artificial Sequence
  ENSG00000001084_43 (sequence is synthesized)
attaatgaagcgttgttaacttgcccctctctgcccagcaccttccttctctgacttcactgcttggggagcatgctaatgattccttggtgttaataactttgcaattcttaaacaggt

SEQ ID NO: 319 - DNA, 120 bp, Artificial Sequence
  ENSG00000001084_44 (sequence is synthesized)
tacagagaggcaaagtgttccatccatttctgttttttaacttctttatatatgcatgtttcctgttccaaaaatcacattttaatgaggttgaaatggtagctggtatgcctttctgaa

SEQ ID NO: 320 - DNA, 120 bp, Artificial Sequence
  ENSG00000001084_45 (sequence is synthesized)
aaacatgaagttatattagtaaattcattggaagctgtctatgactaatagttctacagactctgttgttcaccacaaaggtatatacggtatatatacctttataactgtaatttcagt

SEQ ID NO: 321 - DNA, 120 bp, Artificial Sequence
  ENSG00000001084_46 (sequence is synthesized)
taacttaaaatgcaatatattctgtcattgtttcccttctctttttatatgcctagtttttactgccatctcgtgacaggctagtgaggtggtttaaatattgttcaaaactctgaaaat

SEQ ID NO: 322 - DNA, 120 bp, Artificial Sequence
  ENSG00000001084_47 (sequence is synthesized)
gagctctgatggaagtattccaatgattttgtgatccaagggatttgtgcaaagctgtctagcggtacaaaaagaataaatatttagcagcttgtgtttgtcttgcccctgagtaaagta

SEQ ID NO: 323 - DNA, 120 bp, Artificial Sequence
  ENSG00000001084_48 (sequence is synthesized)
tacaggagcctgtctctgtttacccatttaaaaattttcctggatctgtttaaatgatggtgcccctggcagtgagtgtgtccaagctcacttaggaccagagtggaagagcatggaacc

SEQ ID NO: 324 - DNA, 120 bp, Artificial Sequence
  ENSG00000001084_49 (sequence is synthesized)
catcaggtggccacacaaaagcctgcagttggcttttggctctgtcactactcaggtttttgggcaactccctttacttcttttggctcagatttttcatcagttgaaagaagggctgat

SEQ ID NO: 325 - DNA, 120 bp, Artificial Sequence
  ENSG00000001084_50 (sequence is synthesized)
attaagtccccttctaggtctgactctaagctaatatttattttattgccttaactaacagaagtaaaagagagaggctgcttgttatttaatgtccaaggaaattttatccagttgtga

SEQ ID NO: 326 - DNA, 120 bp, Artificial Sequence
  ENSG00000001084_51 (sequence is synthesized)
ttacttcagctgattcaaaacagcgtccttagaggcacagggccgtgcagagcctggacccatgtaagacccctctgagccgccagcctgactgctctcagtgcaaagacccagaaccca

SEQ ID NO: 327 - DNA, 120 bp, Artificial Sequence
  ENSG00000001084_52 (sequence is synthesized)
gccttccttcacctgaaacagctgcagcgtgcacacacacttcttgtgcatatatctctggtctatttattttcaaaactaagtataatccaaattgaatgctggaatcagatttttcca

SEQ ID NO: 328 - DNA, 120 bp, Artificial Sequence
  ENSG00000001084_53 (sequence is synthesized)
ttctgaatgtgtttaaataacatggccaaggataatttctttctgttttcttgacatttataggtagtataagatatgtgacttccaaataaacataaaccatcacacttcacgaaaaaa

SEQ ID NO: 329 - DNA, 120 bp, Artificial Sequence
  ENSG00000001084_54 (sequence is synthesized)
gagggctgtaaccttattccagatatgacaacctatgaactgtctttgcctttcctcactaaagtggggaggcaaaaccccaatggcgaggcagcaggggaagagcactcaacttagaag

SEQ ID NO: 330 - DNA, 63 bp, Artificial Sequence
  ENSG00000001084_55 (sequence is synthesized)
caatggcgaggcagcaggggaagagcactcaacttagaagaaccgggcgggcagatcacttga

SEQ ID NO: 331 - DNA, 120 bp, Artificial Sequence
  ENSG00000001084_56 (sequence is synthesized)
gagcgagactccatctcaaaaaaacagaagaagaactgggttctagtcctgccttctgccttcgttaccctgggactcctggtgagacactgctatataaagggaaccagccacctgccc

SEQ ID NO: 332 - DNA, 120 bp, Artificial Sequence
  ENSG00000001084_57 (sequence is synthesized)
ggtgagacactgctatataaagggaaccagccacctgccctcccaacactgtatatctgttgcaaggctcagtcacagaggtgctttgaaatgcagacgttccacatgaatataagtttt

SEQ ID NO: 333 - DNA, 120 bp, Artificial Sequence
  ENSG00000001084_58 (sequence is synthesized)
gggttttaagtttctcttaaaattccctgattggttgaaaaatcacataccaatccatgattgagtgatacagtcctcacataaataaaaagcctgttcctcccactgggaagcatttga

SEQ ID NO: 334 - DNA, 120 bp, Artificial Sequence
  ENSG00000001084_59 (sequence is synthesized)
gcagaaagtagaatccctaagggaatgagtcctaattgcaaaggtgaggaaggtgctgcaacttgtatgtctgatcaagaatattttgacttagtcgtgattctttttttcccttaggtt

SEQ ID NO: 335 - DNA, 120 bp, Artificial Sequence
  ENSG00000001084_60 (sequence is synthesized)
gatgagaacatgaaggtagcacagaaaagagatgctgtcttgcagggaatgttttatttcaggaaagatatttgcaaaggtattacattatcttagatttctaatgtcagcttatgctgc

SEQ ID NO: 336 - DNA, 120 bp, Artificial Sequence
  ENSG00000001084_61 (sequence is synthesized)
cgctgcagaggagtacaccctcatgagcatagacaccatcatcaatgggaaggtaggagggtggccctgtacagtacccctcactgtgcacatcccccggcagggagttcataaagtgtc

SEQ ID NO: 337 - DNA, 120 bp, Artificial Sequence
  ENSG00000001084_62 (sequence is synthesized)
tcgacctttccataggatattaagtaggacagaggaaagaagggatggaagtggcactactgactgatcctttctacaggtttccatattatgcatatgaacacttatgtgctgtactgt

SEQ ID NO: 338 - DNA, 120 bp, Artificial Sequence
  ENSG00000001084_63 (sequence is synthesized)
aaacaaatgtgactgtctggagttactgtggatcctttacagacttcacgtttccctgcctttttcttctggaggccacactgaaaacaagtctggaagaatgttaatttttctcacctt

SEQ ID NO: 339 - DNA, 120 bp, Artificial Sequence
  ENSG00000001084_64 (sequence is synthesized)
tcacgtggcgggggctgtatcacaacaactgcgcggcgtgcgccgcccgcggcccacaccgcttcctcccgcgacaggccggctctccgagcatgctcagcttggcctcacgactgcacg

SEQ ID NO: 340 - DNA, 120 bp, Artificial Sequence
  ENSG00000001084_65 (sequence is synthesized)
gttaaggagggttgatttctgagaatagatgtgggcaaagggcttccagacccagatggggaattaggagatggcttgggaatgacatgatctgaggaagggcctgggtcagggaagagc

SEQ ID NO: 341 - DNA, 120 bp, Artificial Sequence
  ENSG00000001167_0 (sequence is synthesized)
gattcccctttgttcgggttcgccattttgctaggcagcggcagtggcggcggcagcggcggctggagcctctgattgggtttcggagtccggtactggagccaatcagcgcgggcagcg

SEQ ID NO: 342 - DNA, 120 bp, Artificial Sequence
  ENSG00000001167_1 (sequence is synthesized)
aaccgggggagcgaggcacggagtgtacctcacagccttctaggatctccagagtggacaggaatctcacttggagggaccatggagcagtatacagcaaacagcaatagttcgacagag

SEQ ID NO: 343 - DNA, 120 bp, Artificial Sequence
  ENSG00000001167_2 (sequence is synthesized)
cagattgttgtccaggcaggacagattcagcagcagcagcagggtggtgtcactgctgtgcagttgcagactgaggcccaggtggcatccgcctcaggccagcaagtccagaccctccag

SEQ ID NO: 344 - DNA, 120 bp, Artificial Sequence
  ENSG00000001167_3 (sequence is synthesized)
gtagtccaagggcagccattaatggtgcaggtcagtggaggccagctaatcacatcaactggccaacccatcatggtccaggctgtccctggtggacaaggtcaaaccatcatgcaagta

SEQ ID NO: 345 - DNA, 120 bp, Artificial Sequence
  ENSG00000001167_4 (sequence is synthesized)
cctgtttctggaacacagggtttgcagcaaatacagttggtcccacctggacagatccagatccagggtggacaggctgtgcaggtgcagggccagcagggccagacccagcagatcatc

SEQ ID NO: 346 - DNA, 120 bp, Artificial Sequence
  ENSG00000001167_5 (sequence is synthesized)
atccagcagccccagacggctgtcactgctggccagactcagacacagcagcagattgctgtccagggacagcaagtggcacagactgctgaagggcagaccatcgtctatcaaccagtt

SEQ ID NO: 347 - DNA, 120 bp, Artificial Sequence
  ENSG00000001167_6 (sequence is synthesized)
aatgcagatggcaccattctccagcaagttacagtccctgtttcaggcatgatcactatcccagcagccagtttggcaggagcacagattgttcaaacaggagccaataccaacacaacc

SEQ ID NO: 348 - DNA, 120 bp, Artificial Sequence
  ENSG00000001167_7 (sequence is synthesized)
agcagtgggcaagggactgtcactgtgacactaccagtggcaggcaatgtggtcaattcaggagggatggtcatgatggttcctggggctggctctgtgcctgctatccaaagaatccct

SEQ ID NO: 349 - DNA, 120 bp, Artificial Sequence
  ENSG00000001167_8 (sequence is synthesized)
ctacctggagcagagatgcttgaagaagagcctctctacgtgaatgccaaacaataccaccgtattcttaagaggaggcaagcccgagctaaactagaggcagaagggaaaattccaaag

SEQ ID NO: 350 - DNA, 120 bp, Artificial Sequence
  ENSG00000001167_9 (sequence is synthesized)
gagagaaggaaatacctgcatgagtctcggcaccgtcatgccatggcacggaagcgtggtgaaggtggacgatttttctctccaaaggaaaaggatagtccccatatgcaggatccaaac

SEQ ID NO: 351 - DNA, 120 bp, Artificial Sequence
  ENSG00000001167_10 (sequence is synthesized)
caagccgatgaagaagcaatgacacagatcatccgagtgtcctaaccccacgccatgtgatggagctgatcaaggtcatgtttctcactgttccaggaaattgatcaactcttccaatgg

SEQ ID NO: 352 - DNA, 120 bp, Artificial Sequence
  ENSG00000001167_11 (sequence is synthesized)
gacattgatgatcacattctgccctttactacaggacagaaaccacttagtttttaataagtggctcagtattacaattgcagcgatgcctggcaaattgaagttgcaagcctttgtctt

SEQ ID NO: 353 - DNA, 120 bp, Artificial Sequence
  ENSG00000001167_12 (sequence is synthesized)
actctttcagtcaggacctatttcagactgttgatgacattgacatttcatggattcggatgatgcaaggagacacatgccaccccagcagtacacaaagcacttaccttgactggtgaa

SEQ ID NO: 354 - DNA, 120 bp, Artificial Sequence
  ENSG00000001167_13 (sequence is synthesized)
gtcagccagccatctcagcagggaagaacaaccttctcaaccaaaactgcaatcaggaaagcagcagcccactccttcccatggaatctagacagcatttatccctctggtgggggaatc

SEQ ID NO: 355 - DNA, 120 bp, Artificial Sequence
  ENSG00000001167_14 (sequence is synthesized)
tcacactgactaactgaatggacgctttgtattcagagatggcttccaggcaaggaagttctatcttgtgatacggaaacaataaattcctgagatacattcttccaatctgtggtaata

SEQ ID NO: 356 - DNA, 120 bp, Artificial Sequence
  ENSG00000001167_15 (sequence is synthesized)
caagcactaaaaatatacattgccgaatctctttttctagctttgaaaagttgtggcctgcttgtccctctgttgactggtcatctggaccatcgtacttgctgtggctacttctaagac

SEQ ID NO: 357 - DNA, 120 bp, Artificial Sequence
  ENSG00000001167_16 (sequence is synthesized)
aatgtagagggttattaaaccttgaaactgcctttcctaagtagagaacaagactattcaacaacttctttgctgaagcactgaggagatttgtaatactcctaaaggaagggccaaact

SEQ ID NO: 358 - DNA, 120 bp, Artificial Sequence
  ENSG00000001167_17 (sequence is synthesized)
agagattttcaatcatagactttgtgacagcatttggggaactaaaagattcatgtgtttcagcctagtgggagagagtgggggagaggaagagagagagagagcatgtatacccgtatg

SEQ ID NO: 359 - DNA, 120 bp, Artificial Sequence
  ENSG00000001167_18 (sequence is synthesized)
ttatcatagagcacgattctccagtggatggatacctggaatggatcattaagatgaagagagtaattcacatttactctagaacctttaacaagcactgaaaggaagaagcctgagatt

SEQ ID NO: 360 - DNA, 120 bp, Artificial Sequence
  ENSG00000001167_19 (sequence is synthesized)
tgatccttgacaatttctggaaagcactggtcagtcacactgtcctggacagagtccaagttacccactaaagcttgaggtggatgttggcttcactcctgcagcacaatgctggcccta

SEQ ID NO: 361 - DNA, 120 bp, Artificial Sequence
  ENSG00000001167_20 (sequence is synthesized)
gaaagcgagcattttcattcttcccatggcagctgattctttggtgccagttttcatgttttctccataggccttgtgcagaaaggttttctcattgcatccatactgtgagaataaact

SEQ ID NO: 362 - DNA, 120 bp, Artificial Sequence
  ENSG00000001167_21 (sequence is synthesized)
gcagactgaaagaaacatgcctgcagggtcaggaactgggccactgttcccagaacgggttgtgcctcagaaatctatttctcttttagatgttgaaccctgagagaactaagatgatat

SEQ ID NO: 363 - DNA, 120 bp, Artificial Sequence
  ENSG00000001167_22 (sequence is synthesized)
ttcagaagagttggctgccttctctggaaacaaggaaaacccaataattccgaggaacattgggggttaaataccaagaataaaaattggttcttctttgacttcagcttaactgtatta

SEQ ID NO: 364 - DNA, 120 bp, Artificial Sequence
  ENSG00000001167_23 (sequence is synthesized)
agacagaaattaagccctctaaaaacaccacaaagagagatgattgtaatgatagaaatagaggtacagagctatgcaaaggaaacaggaagtgaaatattcctagtcccagggatctgg

SEQ ID NO: 365 - DNA, 120 bp, Artificial Sequence
  ENSG00000001167_24 (sequence is synthesized)
taatcgctcctggcttccagatgtcaaaggactgatcctttggtaagctcactagaaacttctagctctacaagagtttgggatattaatgttattcagtaagtcccaagtttttcagag

SEQ ID NO: 366 - DNA, 120 bp, Artificial Sequence
  ENSG00000001167_25 (sequence is synthesized)
aatagattactaacaatgaggaatttatattccttggttaatttaggagtctaagatgcagagttcagaaagaaattactcagacctaactttgagtgcttaagctgccaacagttagaa

SEQ ID NO: 367 - DNA, 120 bp, Artificial Sequence
  ENSG00000001167_26 (sequence is synthesized)
gatgctatttatttgtgtctgtaagtttgtacatagtaatgccagccttgttgctgaattttttatttggggggagatgactttgaattttgtttgaaatgcttcagttgtcattttgtc

SEQ ID NO: 368 - DNA, 120 bp, Artificial Sequence
  ENSG00000001167_27 (sequence is synthesized)
attgcatttcaaatagctcatgacccttttcttgtggtcactttggcacaccatagtagcccacaaagtgggggcagggtattgacatttggattttttctttgatactagttcttttat

SEQ ID NO: 369 - DNA, 120 bp, Artificial Sequence
  ENSG00000001167_28 (sequence is synthesized)
tcatttttatttgtgactgtagtgataactttacagatggagaaagagtgaatggatgaatgaataattggtttaatgcctagttatgcaacttgagtgcttttttttttttttgcagga

SEQ ID NO: 370 - DNA, 120 bp, Artificial Sequence
  ENSG00000001167_29 (sequence is synthesized)
taattttaagtgtatatattttaactgcactggtacattgaacatgtcagtgtcgatgccactggaccaacagagcattttgtggctatagggtgcctgataataatgtcttgatttttc

SEQ ID NO: 371 - DNA, 120 bp, Artificial Sequence
  ENSG00000001167_30 (sequence is synthesized)
tttgggattcaactatatcgaaggtttttcccccagcagtatgggggcgtacaggtgatcgatcattaatgtcattgcaattgttattttttaaaataaatttataaaaataaccgaaaa

SEQ ID NO: 372 - DNA, 120 bp, Artificial Sequence
  ENSG00000001460_0 (sequence is synthesized)
atagcgaccgggaggttgggctggccagattcagctgccgggaccggaccaggtgcttaggagaacatgcagtagaacttttcatcaaacaaatggaacacgtcacagaattttgctaac

SEQ ID NO: 373 - DNA, 120 bp, Artificial Sequence
  ENSG00000001460_1 (sequence is synthesized)
atggacaactctgcacagaaaaatgaacgcactggcaaacatcccagacgtgccagtgaagtacagaaagaatgatatcccaggacctgggttctacaatgttattcaccagtcaccggt

SEQ ID NO: 374 - DNA, 120 bp, Artificial Sequence
  ENSG00000001460_2 (sequence is synthesized)
gtccaacagtgtctcattgtccaagaaaggaacttgcatgtttccctcaatgtgcgcccgattggacaccatcatttctaaataccctgcagcgaatgcatacactatcccatcggattt

SEQ ID NO: 375 - DNA, 120 bp, Artificial Sequence
  ENSG00000001460_3 (sequence is synthesized)
tatttccaagagagactttagtaattcgtgttccagcatgttccagttgccaagctttatgaaagctctcaagtttgaaactcctgcaccaaactattacaatgcctctgtctcttgctg

SEQ ID NO: 376 - DNA, 120 bp, Artificial Sequence
  ENSG00000001460_4 (sequence is synthesized)
caagcagagaaacaacgtctgtactcgagccgggtttatgtcaaaaacccaaagaggatctttcgcttttgctgataaaggacctcccccagggcattatgatatcaacgaatcccttgt

SEQ ID NO: 377 - DNA, 120 bp, Artificial Sequence
  ENSG00000001460_5 (sequence is synthesized)
gaagcagtcgccaaatacattaatgtcttgttttaaatcaaaaaccaaccgtggattaaaactgacgtcaacaggcccgggacctggttattacaaccccagtgattgcacaaaagttcc

SEQ ID NO: 378 - DNA, 120 bp, Artificial Sequence
  ENSG00000001460_6 (sequence is synthesized)
aaaaaagactcttttcccgaaaaaccccatcctgaacttctctgctcagccttcgcctctgcctccgaagccacctttcccaggtcctggtcagtatgagatcgtggactacttaggccc

SEQ ID NO: 379 - DNA, 120 bp, Artificial Sequence
  ENSG00000001460_7 (sequence is synthesized)
ccgcaagcatttcatctctagtgcatcattcgtgtccaataccagccggtggacagcggcgccgcctcagccaggcctgcctggcccagctacgtacaagccagagcttccaggaaagca

SEQ ID NO: 380 - DNA, 120 bp, Artificial Sequence
  ENSG00000001460_8 (sequence is synthesized)
gtccttcctctacaacgaggacaagaaatggatcccggttctgtagggatgtcacacaaggtcaaggagaactccagccaccagcccaccctgcccagcgtccccaggacattcctcagg

SEQ ID NO: 381 - DNA, 120 bp, Artificial Sequence
  ENSG00000001460_9 (sequence is synthesized)
aggagaccgatcatgagtgtggcagctgacaacttggggggtggctctaccactctggcctggcatcctagccggactgctgccattgcctttgtcttgagctggagacattgctccctg

SEQ ID NO: 382 - DNA, 120 bp, Artificial Sequence
  ENSG00000001460_10 (sequence is synthesized)
ctccagtggcttcctgagcagaagggaggagtggacagagccccctggctgcttccccacgcacccatccaggctgccttccggcacgactccctgccgcagactgaagggactcctgaa

SEQ ID NO: 383 - DNA, 120 bp, Artificial Sequence
  ENSG00000001460_11 (sequence is synthesized)
gcgcagacttcaaggaggatcagtccaccctgaaggtggccaagcctggaagccccacccttccctgtttcattccttcattcatttacacattcattcattccctcactcctgcctttc

SEQ ID NO: 384 - DNA, 120 bp, Artificial Sequence
  ENSG00000001460_12 (sequence is synthesized)
tcatttgtccctttctgacctcactcacttacggtatgtctactgggcgaaagctacctgcaggcaggtgatgctttttccaccagtccacagcttcctttctaaagtgaccacctgttt

SEQ ID NO: 385 - DNA, 120 bp, Artificial Sequence
  ENSG00000001460_13 (sequence is synthesized)
ggaaagacctctctttactccttttagacctttttctctttggagtgggagatcatcttggaatggcagtggccgggcccgggggctgcgcttttccctgactttctctgctggcgggac

SEQ ID NO: 386 - DNA, 120 bp, Artificial Sequence
  ENSG00000001460_14 (sequence is synthesized)
tgaattttctcaaggcttacaggcccttccatggagtccacatggcctgtctaggcctgatagctttcgtctctctatgtggagggaaaaagaaatgtgccctagtggttttggtggagg

SEQ ID NO: 387 - DNA, 120 bp, Artificial Sequence
  ENSG00000001460_15 (sequence is synthesized)
ctgcacagattcgcggtgggtggggagctgccaggctccttttctgatctcccagcaggctttgactgacgctgtttagtctttctgtacattaaccccgccagataccgagaggttaca

SEQ ID NO: 388 - DNA, 120 bp, Artificial Sequence
  ENSG00000001460_16 (sequence is synthesized)
aagcctccaaggcctgtacaactgtggcctctccagagaagtggttctcagccttgactgcacactgtaatcacctggggactttaaaaagtactgaggcctggggcccacccacaaatg

SEQ ID NO: 389 - DNA, 120 bp, Artificial Sequence
  ENSG00000001460_17 (sequence is synthesized)
ctgatttaactcctccagggtggggtctgggcagtggggaggcaggagccacccaggtgattccaatgataggtgtaggttgagaagcgccaccttccagcttcctaactggctctggga

SEQ ID NO: 390 - DNA, 120 bp, Artificial Sequence
  ENSG00000001460_18 (sequence is synthesized)
ggggagctgggtgggaagttcaggaggtgggaactttgtacacgcagagcacctggagcacctacagcatggctgtggttccacactcctctgtcatttaaccttcacacatcacctcgt

SEQ ID NO: 391 - DNA, 120 bp, Artificial Sequence
  ENSG00000001460_19 (sequence is synthesized)
tctgacatcaagggtgcgtcacagccacagtgaggcctcgcctgggcagagcaactctgggtgccccactgggtccctcccacaggggcaggcaagcctaatgggaacccgaggcaaaag

SEQ ID NO: 392 - DNA, 120 bp, Artificial Sequence
  ENSG00000001460_20 (sequence is synthesized)
gaaacatcagtaatacgaatcctgtctttaaaactgtgatgttttgttcaccatggattttttttttgggggggggggccttaattttaaaaatattgcattaaacttatttatcttgct

SEQ ID NO: 393 - DNA, 120 bp, Artificial Sequence
  ENSG00000001460_21 (sequence is synthesized)
cagaaaggttttactgctgcatatccaacacaatcctccattccttttaaatctcaagcttcagtaatcccagaatcagaaaaaaaaggattcaatagtcaagccaagagatttcctcat

SEQ ID NO: 394 - DNA, 120 bp, Artificial Sequence
  ENSG00000001460_22 (sequence is synthesized)
tcgtcacagccatgagtgagacttgaagcccgttttacgtatgaagaaatgtcatttgggcctagacatcaacaatgagaaagaggcagttctagtctcagatcgtggggcagagaaagc

SEQ ID NO: 395 - DNA, 120 bp, Artificial Sequence
  ENSG00000001460_23 (sequence is synthesized)
ctaggccaaggagcagtgaggacgcttcctctgtcctgaccgcgcctcgtccaggctgctcccagaatagttttgctgtctccttcctgcctggcaagaatgtctttactatcatctcct

SEQ ID NO: 396 - DNA, 120 bp, Artificial Sequence
  ENSG00000001460_24 (sequence is synthesized)
aggtaatgacgttgtctcaggggttctttcgttttagtctggattttagccttgcgggacaggcacgttctgtctggctgctgtgtctttctgtggacagtggagggcagtgtgctccca

SEQ ID NO: 397 - DNA, 120 bp, Artificial Sequence
  ENSG00000001460_25 (sequence is synthesized)
ggagccgcggcaccagctccactgaggggcaccgactggactaactgtaagaacgagcctgaaaaatgggacatccagggaaaaacaactgtgtctggatttatggcgccaaaaatattg

SEQ ID NO: 398 - DNA, 120 bp, Artificial Sequence
  ENSG00000001460_26 (sequence is synthesized)
aactggaccaaaactattttaagaaaacaatatattttaaaaatcatcataaagctaaaaaattgcaaaaattcccaagtgttatcaattaagtaaaagattaaaaaaaaatcttcccca

SEQ ID NO: 399 - DNA, 120 bp, Artificial Sequence
  ENSG00000001460_27 (sequence is synthesized)
gcttttctggttttgcttttgtttgtggtggttggcattgctgtggtttaatttttcttttaaaaagcagcttccctctctgcctcaggaactcgcaggcctctgaagcatcgcctgcaa

SEQ ID NO: 400 - DNA, 120 bp, Artificial Sequence
  ENSG00000001460_28 (sequence is synthesized)
agattgaaggctctccctcagctgggtgggagtccggactgaaagcctggaggaaccctttgcaagctgtactcccttataagacacatacttttcacctggtgactctcttttcctgat

SEQ ID NO: 401 - DNA, 120 bp, Artificial Sequence
  ENSG00000001460_29 (sequence is synthesized)
ttcgaagcatttcttcaggacctacatatgcccgagaggcaagcagtcacctctgcgttgtcaaccaccccacaattagagcacgtggtcactgacccaaggaaggaatgagaattcact

SEQ ID NO: 402 - DNA, 120 bp, Artificial Sequence
  ENSG00000001460_30 (sequence is synthesized)
aggtgctctgcttccattcccaccccgtttatctcgatgacggatttcaccaatcccacagagcacgttttacaaatgagacagccgtggctcatagcgtctgtattcgaatttgcctct

SEQ ID NO: 403 - DNA, 120 bp, Artificial Sequence
  ENSG00000001460_31 (sequence is synthesized)
ttctgaacaaatcaataaaacacgctctttcccaccacccgacgatctggcttctggaggtgagcgccagttccctgccaagcttcccgttcctcggctttggctcacgagaaggttaca

SEQ ID NO: 404 - DNA, 120 bp, Artificial Sequence
  ENSG00000001460_32 (sequence is synthesized)
ttcttccgtcccgtcccactgagctggaaacttacaactcgaggagacagcacctctgttccagaagcgggcttagaccaagaacgcctcccctcatcccacctgctaactccaccatct

SEQ ID NO: 405 - DNA, 120 bp, Artificial Sequence
  ENSG00000001460_33 (sequence is synthesized)
gctgccgccaggaagcccgagccgctcggcacgaagaggagaaattctggcaaagttaactccatgtcacttcctggtttggtagagcctggcatcacctttagtaaggtagcccatgcc

SEQ ID NO: 406 - DNA, 120 bp, Artificial Sequence
  ENSG00000001460_34 (sequence is synthesized)
cccgctcctcttggcctcgatgcaaaactggaaagaacattccaaggcaacgggacccaggttggcgaggctggtgacagtaagaaggaagggtatgtacactaggggacgttaggtgac

SEQ ID NO: 407 - DNA, 120 bp, Artificial Sequence
  ENSG00000001460_35 (sequence is synthesized)
ttcgctttttccagaaaaaaacgaaggttaaattcaattccccttcctcccggtgttaatcactactcaccggcggcgtctcctctaaggcccacctatcaaaaccttctgagaaatgac

SEQ ID NO: 408 - DNA, 120 bp, Artificial Sequence
  ENSG00000001460_36 (sequence is synthesized)
tcggactcttcgtgcaacccggaggcacagcctccttcatcccttcccaattcagagctgccaagatgctgcagtgttttgctttcaaaggtcgcgatttgatttgccagactgcctgcc

SEQ ID NO: 409 - DNA, 120 bp, Artificial Sequence
  ENSG00000001460_37 (sequence is synthesized)
agtcagaagttggcaggcatttcgcgcaggcaagtggctgcgaggacggggagtaggcgggacagcccctggcaattggctgcgctgcaaagcttgcttgaagcataagggagcgacctg

SEQ ID NO: 410 - DNA, 120 bp, Artificial Sequence
  ENSG00000001460_38 (sequence is synthesized)
gggctagagcttggcgctcacctggagcggggaccccctagcggccacaggaagaatggtgcggcgactcccctgccccctctcccgctgtcccagagagcttaggtggttgctcgcctc

SEQ ID NO: 411 - DNA, 120 bp, Artificial Sequence
  ENSG00000001460_39 (sequence is synthesized)
cacctgcccggcaggtgggcctggttttagcagcctgccaggtgtcctcccttcttatcctcatagccaccttccgggctttgctcctgctgttcccctacccgacgctctcaccaagta

SEQ ID NO: 412 - DNA, 120 bp, Artificial Sequence
  ENSG00000001460_40 (sequence is synthesized)
ttcaaatccaaaacgtccttgaagacccagcgctccccagagccctcgcgagacttgggaccaaacatatctctcctttcctgccctcctggaacacctgtcggataccaagcctcccag

SEQ ID NO: 413 - DNA, 120 bp, Artificial Sequence
  ENSG00000001460_41 (sequence is synthesized)
caatactgaaggtcctgaaacgagcccagcgcttggttaatgtttctataatgtacataattatcacggccatgataattaacatgcgcatggagttttacagatgacaagcttctcatc

SEQ ID NO: 414 - DNA, 120 bp, Artificial Sequence
  ENSG00000001460_42 (sequence is synthesized)
ggggcgtggttgggcctgcgatctgagggacgggccagggacagtttataaataacatatttgggggccggcgcggtggctcacacctgtaatctcaggactttgggaggccaggaggat

SEQ ID NO: 415 - DNA, 66 bp, Artificial Sequence
  ENSG00000001460_43 (sequence is synthesized)
cccaggagtttgagaccagcctggacaatatagtggcgtggtcccagctactcaggaggctgaggc

SEQ ID NO: 416 - DNA, 72 bp, Artificial Sequence
  ENSG00000001460_44 (sequence is synthesized)
cgcttgaactcgggaggcggaggttgcagcgagtcgagatcgcgccactgcactccagctgggggatttcac

SEQ ID NO: 417 - DNA, 120 bp, Artificial Sequence
  ENSG00000001460_45 (sequence is synthesized)
aaagcttggatttcaccctaaatttaaaggcgagccattggaggactttaagcaggggagtgacaaggtcgctgagaccgccctgccctgaagcgtgtgaagaggggctcctggaatact

SEQ ID NO: 418 - DNA, 120 bp, Artificial Sequence
  ENSG00000001460_46 (sequence is synthesized)
gtgaagaggggctcctggaatactaagtggctgcccttgtatagtcgcccatgtcaatttttttttttttcttctgttagaaacagggcttggggccgggcgtggtggctcacgcctgta

SEQ ID NO: 419 - DNA, 72 bp, Artificial Sequence
  ENSG00000001460_47 (sequence is synthesized)
ccagctactcaggaggctgaagcaggagcatcgcttgaacctggactcgacaaagcgagactctgtctcaaa

SEQ ID NO: 420 - DNA, 120 bp, Artificial Sequence
  ENSG00000001460_48 (sequence is synthesized)
aaagaaacagggcttggatgaatgttaattcttttaggtatattccttgaagcaggatttttgagtgagcaaaattctgaggcttttggtttatcacaagatttttgaagcatggcctag

SEQ ID NO: 421 - DNA, 120 bp, Artificial Sequence
  ENSG00000001460_49 (sequence is synthesized)
ttccccaccccgctacaggccctgatgtaattaacctaagccctaaaattcggccggcttctctgcggactttgaaacgcctctaatgattggtcaacaacttttcacgttaaagaaaca

SEQ ID NO: 422 - DNA, 120 bp, Artificial Sequence
  ENSG00000001460_50 (sequence is synthesized)
gaagcaaggcttcggatttggcgggacatttgcccaagtccacacagccaacttgaggagccacagggaattggctcaggactaagtctttcctcattccctgtgatgctggattcccct

SEQ ID NO: 423 - DNA, 120 bp, Artificial Sequence
  ENSG00000001460_51 (sequence is synthesized)
ggtgctgacattgttctatttttgtaacataaaatcttcgctggagtggcaggacattcagaagcagtcaagctctcatagctttataccgatggaagtttaagccctgactttcgagtt

SEQ ID NO: 424 - DNA, 120 bp, Artificial Sequence
  ENSG00000001460_52 (sequence is synthesized)
ggtgatacctgctggatttgtacttcagctctgctgtttttatgctctgtgaccttgggcagagttctaacctctctgagcctccatgccctcatctgtaaggtgggaataattcctgcc

SEQ ID NO: 425 - DNA, 120 bp, Artificial Sequence
  ENSG00000001460_53 (sequence is synthesized)
tgctaaatacagatcgaattaatggtttactaaaataaaaggaagaggggatcttggggacatcgtattttaatgcagttgtcaagccagttagcatttgttgactacccaatgggtgcc

SEQ ID NO: 426 - DNA, 120 bp, Artificial Sequence
  ENSG00000001460_54 (sequence is synthesized)
taaggctgtacaagactcttacagggaatttgcagaccccagagatcaggatgggcaacatggaggccagtatcaagctgtggggaggccactgccctgagaaacacatattctaattac

SEQ ID NO: 427 - DNA, 120 bp, Artificial Sequence
  ENSG00000001460_55 (sequence is synthesized)
tcttgtcctgtaacctttctgggacgtagttttctcatctgtaacaatgggtgtattatttaccactttgtctgcagccactaatgatttactttttaggttcttctagggaaaataaac

SEQ ID NO: 428 - DNA, 120 bp, Artificial Sequence
  ENSG00000001460_56 (sequence is synthesized)
ggaagagaaatgagacttactttgagttggttccaagggtgggaattaggacggatagaaaaagaaaaaaagagagagagaatcagctttgatacaggaaggaactttctagcaattaga

SEQ ID NO: 429 - DNA, 120 bp, Artificial Sequence
  ENSG00000001460_57 (sequence is synthesized)
actgtccaacagtgaacttcccccaggagtttttaaactgtgttctgatgaaacctagcattctgtgaatattcaagagagtcaaatatttgcccccacccagccatcccttatttgctt

SEQ ID NO: 430 - DNA, 120 bp, Artificial Sequence
  ENSG00000001460_58 (sequence is synthesized)
tatattttgaaaactatatgcaatattgtaacttcagaaacccaaccaggtaaggcacggtggctcactgtaatcccagtgctttgggaagctgaggtgagaagatcacttgaggctagg

SEQ ID NO: 431 - DNA, 120 bp, Artificial Sequence
  ENSG00000001460_59 (sequence is synthesized)
atgccatcctgtcatggacagttatacaggtggaccagtgaggcacacctgggcagtgctctgttcacatctgtcctgcacctgctctcatcctgccttcacaggtgcttaggagaacat

SEQ ID NO: 432 - DNA, 120 bp, Artificial Sequence
  ENSG00000001460_60 (sequence is synthesized)
gtacatgtgtctttgcagggaggagatagctcctgacatatgcttattttagtacataagagcaaatttggggggaatagtaagtcctgggttatatccacagggccatccttacaggca

SEQ ID NO: 433 - DNA, 120 bp, Artificial Sequence
  ENSG00000001460_61 (sequence is synthesized)
taccaaataggtggctttaggccctactgtttcaagtgtgacgattgggaagaaactgagaagaaaggatgagagaagaaggaggaagtctgttaaaaaataaaaaactaataaacaaaa

SEQ ID NO: 434 - DNA, 120 bp, Artificial Sequence
  ENSG00000001460_62 (sequence is synthesized)
tcccaatcattctggtctttcttttgaaaggtggttgtggggaagaagcccaacatagagaaaaggatggggtgtcactgcttggcagagcacagtgccgggccactctcttcaggggcc

SEQ ID NO: 435 - DNA, 120 bp, Artificial Sequence
  ENSG00000001460_63 (sequence is synthesized)
tcacacataatgatgctcagtaaatgcctgttgaatgcctgatacttattgagcaaccactgtgtgccaggaacttaaaattgtattcaattattattataatcctgttgtaagaattgt

SEQ ID NO: 436 - DNA, 120 bp, Artificial Sequence
  ENSG00000001460_64 (sequence is synthesized)
aggaaggaatgagaattcactaggtgctctgcttccattcccaccccgtttatctcgatgacggatttcaccaatcccacagagcacgttttacaaatgagacagccgtggctcatagca

SEQ ID NO: 437 - DNA, 120 bp, Artificial Sequence
  ENSG00000001461_0 (sequence is synthesized)
gaattgggaagggatgaaggaggctgtgcctccgggttgcacgaagagtccgagtcatttctcagaaggttttgataggtgggccttagaggagacgccgccgagcaccgcaagaactgg

SEQ ID NO: 438 - DNA, 120 bp, Artificial Sequence
  ENSG00000001461_1 (sequence is synthesized)
aaaacacacccctctctgtctgcctgggagagccacggaaattggcacttctctgagtgaagctgaggagaaggctgtaaatctgccaaaacagccttgaagtattcttttgtcatgagg

SEQ ID NO: 439 - DNA, 120 bp, Artificial Sequence
  ENSG00000001461_2 (sequence is synthesized)
aagtgacggctgctggagggaggtgaacaccacaaggagagatggcatctggcctgggccccgcctagcagcagctccacctcctaggccaggccctgtgggatgcgccactagaccacc

SEQ ID NO: 440 - DNA, 120 bp, Artificial Sequence
  ENSG00000001461_3 (sequence is synthesized)
atggacggatcccacagcgcagccctgaagctgcagcagctgcctcccacaagtagctccagcgccgtaagcgaggcctccttctcctacaaggaaaacctgattggcgccctcttggcg

SEQ ID NO: 441 - DNA, 120 bp, Artificial Sequence
  ENSG00000001461_4 (sequence is synthesized)
atcttcgggcacctcgtggtcagcattgcacttaacctccagaagtactgccacatccgcctggcaggctccaaggatccccgggcctatttcaagaccaagacatggtggctgggcctg

SEQ ID NO: 442 - DNA, 120 bp, Artificial Sequence
  ENSG00000001461_5 (sequence is synthesized)
ttcctgatgcttctgggcgagctgggtgtgttcgcctcctacgccttcgcgccgctgtcactcatcgtgcccctcagcgcagtttctgtgatagctagtgccatcataggaatcatattc

SEQ ID NO: 443 - DNA, 120 bp, Artificial Sequence
  ENSG00000001461_6 (sequence is synthesized)
atcaaggaaaagtggaaaccgaaagactttctgaggcgctacgtcttgtcctttgttggctgcggtttggctgtcgtgggtacctacctgctggtgacattcgcacccaacagtcacgag

SEQ ID NO: 444 - DNA, 120 bp, Artificial Sequence
  ENSG00000001461_7 (sequence is synthesized)
aagatgacaggcgagaatgtcaccaggcacctcgtgagctggcctttccttttgtacatgctggtggagatcattctgttctgcttgctgctctacttctacaaggagaagaacgccaac

SEQ ID NO: 445 - DNA, 120 bp, Artificial Sequence
  ENSG00000001461_8 (sequence is synthesized)
aacattgtcgtgattcttctcttggtggcgttacttggctccatgacagtggtgacagtcaaggccgtggctgggatgcttgtcttgtccattcaagggaacctgcagcttgactacccc

SEQ ID NO: 446 - DNA, 120 bp, Artificial Sequence
  ENSG00000001461_9 (sequence is synthesized)
atcttctacgtgatgttcgtgtgcatggtggcaaccgccgtctatcaggctgcgtttttgagtcaagcctcacagatgtacgactcctctttgattgccagtgtgggctacattctgtcc

SEQ ID NO: 447 - DNA, 120 bp, Artificial Sequence
  ENSG00000001461_10 (sequence is synthesized)
acaaccattgctatcacagcaggtgcaatattttacctggacttcatcggggaggacgtgctgcacatctgcatgtttgcactggggtgcctcattgcattcttgggcgtcttcttaatc

SEQ ID NO: 448 - DNA, 120 bp, Artificial Sequence
  ENSG00000001461_11 (sequence is synthesized)
acgcgtaacaggaagaagcccattccatttgagccctatatttccatggatgccatgccaggtatgcagaacatgcacgataaagggatgactgtccagcctgaacttaaagcttctttt

SEQ ID NO: 449 - DNA, 120 bp, Artificial Sequence
  ENSG00000001461_12 (sequence is synthesized)
tcctatggggctctggaaaacaatgacaacatttctgagatctacgctcctgccaccctgccagtcatgcaagaagagcacggctccagaagtgcctctggggtcccctaccgagtccta

SEQ ID NO: 450 - DNA, 120 bp, Artificial Sequence
  ENSG00000001461_13 (sequence is synthesized)
gagcacaccaagaaggaatgagactcgcctccctctatttataactgtcccctccaggctgacagtggttcaaccctgaatcctaaaacttgcctttcaagtctcattttgtttctaact

SEQ ID NO: 451 - DNA, 120 bp, Artificial Sequence
  ENSG00000001461_14 (sequence is synthesized)
gagaactctatggatgatgatctcaaaaagcctttgtctctgggaaaggatgcgttatcttggtcttggaaatttcaaatgatgagggttgggggatggaagcattattccaggtggacg

SEQ ID NO: 452 - DNA, 120 bp, Artificial Sequence
  ENSG00000001461_15 (sequence is synthesized)
ggatagaatccagcctctgcctggattagcccagggggatttggaaagcctttctaccatccttgaggatggtaactgagcttcctctgacagtgaccaaaggatgctgtatccttcaga

SEQ ID NO: 453 - DNA, 120 bp, Artificial Sequence
  ENSG00000001461_16 (sequence is synthesized)
gctaaggcaagacagagagtctgctgttaattctcaaatccagcgaaaggctggacatctctaaatctcgtcttcctccacctcatgtgcatgcctgatctcaccctgacactcctgatg

SEQ ID NO: 454 - DNA, 120 bp, Artificial Sequence
  ENSG00000001461_17 (sequence is synthesized)
ccgcatctgtgatagcactcgtgttgccttcacatggcaggctgggccaaccctgggtggaaggttctgacatttgtgttttcagaaatgtacatctgccttccagtcatctgtgccctt

SEQ ID NO: 455 - DNA, 120 bp, Artificial Sequence
  ENSG00000001461_18 (sequence is synthesized)
ctagggaagatgtgcttgatatgttcaaattggatctactctgaaaacgaaacttggttttggtcctgtgaggactacttgtttgtccacctcctccaccaaaggaattaggaagttaag

SEQ ID NO: 456 - DNA, 120 bp, Artificial Sequence
  ENSG00000001461_19 (sequence is synthesized)
agaaggggaagaatatggaggataggagagggtgatgatgctttagcccattaaggaagaaaagttccccttactcttacaaaaggtgattgcaccacttaaaaaaggataggtagaaaa

SEQ ID NO: 457 - DNA, 120 bp, Artificial Sequence
  ENSG00000001461_20 (sequence is synthesized)
tctggccattttatgtgttatttttttcctgcataccagtgccccctggaaagatggggatgctcatttcagagacagcctcttcacctgtcctccgtctctccattacagagccacaag

SEQ ID NO: 458 - DNA, 120 bp, Artificial Sequence
  ENSG00000001461_21 (sequence is synthesized)
ccaagcttgagttactggttaatttccttgaagtcaatagagactctctgggtcctcatccccatgcatatatgtctgggagaagcaagcattctccaaaacagggctgttgctttcttc

SEQ ID NO: 459 - DNA, 120 bp, Artificial Sequence
  ENSG00000001461_22 (sequence is synthesized)
cccctagaagcatatgtaaaatgcagattcctgcaccccaactgcagacactgttaagtgggactggagtggggcccacgggtctgcattcttaactggtaccaccagtgattctgatgc

SEQ ID NO: 460 - DNA, 120 bp, Artificial Sequence
  ENSG00000001461_23 (sequence is synthesized)
gatgcttcaatcccgagatttcacatctggaaagcctaagaatttacaaagatgttctgctaaaacccccagggccccatgcagtcttgctagaaaatttcctccctagggttcctttgg

SEQ ID NO: 461 - DNA, 120 bp, Artificial Sequence
  ENSG00000001461_24 (sequence is synthesized)
aaggttaaatactccccataggatctgtggcatttctccatccaatgaatactacttagagctacactcaccacttccctagacagcctttaataggcatgataacagtgttaatagacc

SEQ ID NO: 462 - DNA, 120 bp, Artificial Sequence
  ENSG00000001461_25 (sequence is synthesized)
agtgtgatagatcacttatctttatggattgtgcttaatactgatttagtatcttgactccaaaaactgacatctgttgtctgtgataaccacttctgtattgcgtcttaaccacttctg

SEQ ID NO: 463 - DNA, 120 bp, Artificial Sequence
  ENSG00000001461_26 (sequence is synthesized)
tattgtgtggtcttaactgcctaaggcggcaatgggcagtgggcccctttcccttaggatgggtatcaattcaacaatatttataaggcatttactgtgtgctaagcatttggaagaccc

SEQ ID NO: 464 - DNA, 120 bp, Artificial Sequence
  ENSG00000001461_27 (sequence is synthesized)
aggctacaaaataagacatagttcctgccctccaggccagcagagggaggcacaaatacccaggaatctctgatgggtgtgaagtgcggtcgtgggccacagaaaatgaccgtcatggag

SEQ ID NO: 465 - DNA, 120 bp, Artificial Sequence
  ENSG00000001461_28 (sequence is synthesized)
accctgctaaaggtcggaccctgagcccaaaggggtattcagaagtggagatgattttggccccactcatagatgggtggcaaatctaagatttgtataaagcatataaaatagggtgat

SEQ ID NO: 466 - DNA, 120 bp, Artificial Sequence
  ENSG00000001461_29 (sequence is synthesized)
cacccccgaggcagaggggccagcatttgcaaaggcacagagctaagaggagctgggcaaagaaaggaaagccagggaaggtggtgggagatgagtctcaaagctaagtagtggaagctg

SEQ ID NO: 467 - DNA, 82 bp, Artificial Sequence
  ENSG00000001461_30 (sequence is synthesized)
tgtggtggtgcatgcctgtgagagcccagagagccaaggctacagtgagccatgatcatgctactgcactccagcctgggtg

SEQ ID NO: 468 - DNA, 120 bp, Artificial Sequence
  ENSG00000001461_31 (sequence is synthesized)
tgctactgcactccagcctgggtgacaatgagaccatggctcaaaaaaaaaaaaaaaaaaaagataagcagtggaggccgaatcatggagggtcttgaatacctggctaaggagtttaaa

SEQ ID NO: 469 - DNA, 120 bp, Artificial Sequence
  ENSG00000001461_32 (sequence is synthesized)
gtgtatccaagaggacgtgggagccactgatggttcatgaggaagagaagggcaggaccagcactgattgaaaaggagggcttgttcagtgtggaggaagaatcagaagggggaataagt

SEQ ID NO: 470 - DNA, 120 bp, Artificial Sequence
  ENSG00000001461_33 (sequence is synthesized)
taccttctccgagcctgcaagaacaaaaaacaaaaagcagaaattaaaatcaggtttcactgctatttatatatttctcctttcccaaatgatttttctaaagctgggagtggaggcagg

SEQ ID NO: 471 - DNA, 120 bp, Artificial Sequence
  ENSG00000001461_34 (sequence is synthesized)
agggagaaacagaaggtgagcagggaggctatttagatgtgtcaaacccgggtgatcattaataatttgggcatatatatgctcccaaacttactctgcccccttccttccctttttttt

SEQ ID NO: 472 - DNA, 120 bp, Artificial Sequence
  ENSG00000001461_35 (sequence is synthesized)
ttttttttttggtatgggccttttaggcttgggccagccagctttcttgagatgagtgaataaaagcgtattgtaatttcatgtctgcttcagatcatggggacagtgccacccaggaac

SEQ ID NO: 473 - DNA, 120 bp, Artificial Sequence
  ENSG00000001461_36 (sequence is synthesized)
tgctgctgaggcctgggaagctcccttgccttcgggtttggagcagtggcatcatcccaccaacctgagccatgaaagggctgagcagaaagttaaatggtagtttcctgactggaagcc

SEQ ID NO: 474 - DNA, 120 bp, Artificial Sequence
  ENSG00000001461_37 (sequence is synthesized)
acacgtaggtcacttgagtagtcaggaagcacagtgggtgtggagccatcatctgtcttgggctggttcctcccaatctttgtccagtggtataaatggactgtctgctgatggccatac

SEQ ID NO: 475 - DNA, 120 bp, Artificial Sequence
  ENSG00000001461_38 (sequence is synthesized)
gcagcactggctgttaagatggggaaggggtacatcaggattccactcatagccctggttcgttattgttactcatggctctgacgtccccaagccctcttgaatgttgcaagcaatgtt

SEQ ID NO: 476 - DNA, 120 bp, Artificial Sequence
  ENSG00000001461_39 (sequence is synthesized)
aaatatcacacctcggtctccttttgagcagcccaggtacctaaagcaaggtcaccaaacttgggtttaaacttcagttgccatcacagcagggttcaggttatgcagtttttgcagtgt

SEQ ID NO: 477 - DNA, 120 bp, Artificial Sequence
  ENSG00000001461_40 (sequence is synthesized)
ggagttgaacgctgggtaaagaagggagagctgactctccattgcttttctagtggaaaccagccagtttgacggcacggtgcggatacaggactccatcaggctagtgttggggaacca

SEQ ID NO: 478 - DNA, 120 bp, Artificial Sequence
  ENSG00000001461_41 (sequence is synthesized)
gcccggcagccttccatgtgaattccaaagctgtttcaacactggctgataggcagacaaaaggttacttgtgtgtttctctgagaagcggtgtaaatgaagtcaccttagaatatattc

SEQ ID NO: 479 - DNA, 120 bp, Artificial Sequence
  ENSG00000001461_42 (sequence is synthesized)
tgtgcggatgcttatattttgttaacttcacgacttatggcatgtcttatttaaaaaaaaaaaagtactaggtgcaaataacattatgaagtggtatttaattaaaaatccatgcagtga

SEQ ID NO: 480 - DNA, 120 bp, Artificial Sequence
  ENSG00000001461_43 (sequence is synthesized)
agttgtgcaaccagaatttaaacccgggtcagaccagctgcagaacccatgctcctaactgcggcgctgctctgactctccggtgtcctgactcctgctgctgccaccgcatcccagcat

SEQ ID NO: 481 - DNA, 120 bp, Artificial Sequence
  ENSG00000001461_44 (sequence is synthesized)
gcccaaggaggggactctgcaggtcattaaaggcttttgtcattttaattccttctgaccagccagatggaatatgtatggaaattatgaacatttgtctggaattagactcattctaga

SEQ ID NO: 482 - DNA, 120 bp, Artificial Sequence
  ENSG00000001461_45 (sequence is synthesized)
ttttttggggtttgggaatttgtattttcctagcaaggaagttacacagtgctctgcattggctaacagatatgtatggggtctgcatgcctgtcactggtagaaacaggcaggctcttc

SEQ ID NO: 483 - DNA, 77 bp, Artificial Sequence
  ENSG00000001461_46 (sequence is synthesized)
gtctgcatgcctgtcactggtagaaacaggcaggctcttcacacagacaagggaatgtgtaagcaaaagacaagaga

SEQ ID NO: 484 - DNA, 77 bp, Artificial Sequence
  ENSG00000001461_47 (sequence is synthesized)
gtgggcgggtcacgaggtcaagagattgagaccatgattggctgggcgtggtggtgcccacctgtagtcccagctac

SEQ ID NO: 485 - DNA, 88 bp, Artificial Sequence
  ENSG00000001461_48 (sequence is synthesized)
gccctgtacctggctagaactgcatataattttatagctaaatagagctgtggggaatccatccttcctgaggagaagcagacagagg

SEQ ID NO: 486 - DNA, 120 bp, Artificial Sequence
  ENSG00000001461_49 (sequence is synthesized)
tgtggggaatccatccttcctgaggagaagcagacagaggcggaggagcaggctggtgtcagggctggtgaagcctgctaccgcgctgctcttgagtggcctcaggctaatgaccctccc

SEQ ID NO: 487 - DNA, 120 bp, Artificial Sequence
  ENSG00000001461_50 (sequence is synthesized)
tccttaagccacgctgtccacttctctaaagggggggcctatgagaacatccaagtcacggaagggagtgggggttaaatgagatgtgcacaggtggctaatatgtgcatttttcttcca

SEQ ID NO: 488 - DNA, 120 bp, Artificial Sequence
  ENSG00000001461_51 (sequence is synthesized)
accttcctactgtgtgccctaccaccgccacaagccatcaaccaaatagatacctgtcaccgaagacagggtttccttaattttttaacagctctgttgagatataatttacataccata

SEQ ID NO: 489 - DNA, 120 bp, Artificial Sequence
  ENSG00000001461_52 (sequence is synthesized)
aagttcacctgtttaaagtatacaattcagtggtttttagtatttcatagagttgtgaaaccatcatcctaatctaattttagaacattttgtcacccccaaaagaaaccctgtgcccat

SEQ ID NO: 490 - DNA, 120 bp, Artificial Sequence
  ENSG00000001461_53 (sequence is synthesized)
tagcagtcactccctgttccccttttcccagcctcaggcaaccactaagctatcttctgtccctgtagatttgcctttttgaacaccttcataaataaagtcgtatgctttgtggcctga

SEQ ID NO: 491 - DNA, 120 bp, Artificial Sequence
  ENSG00000001461_54 (sequence is synthesized)
cgtggctgggatgcttgtcttgtccattcaagggaacctgcagcttgactaccccatcttctacgtgatgttcgtgtgcatggtggcaaccgccgtctatcaggctgccttctccaagac

SEQ ID NO: 492 - DNA, 120 bp, Artificial Sequence
  ENSG00000001461_55 (sequence is synthesized)
agattcttcacctgctaatgagaacaacagtccctacctaagagaatcacatgaagctcttatgagaatgtctctagggaaatgcccggtttttgagtcaagcctcacagatgtacgact

SEQ ID NO: 493 - DNA, 120 bp, Artificial Sequence
  ENSG00000001461_56 (sequence is synthesized)
agctgaacatccatatagaatgactgctacttcctgtttaaaaagagacaaccaactgctgtgctgtgcctttatcgtgtgactgttctctcactgtcttttttcttttctttttaattt

SEQ ID NO: 494 - DNA, 120 bp, Artificial Sequence
  ENSG00000001461_57 (sequence is synthesized)
tgtgcaaaagggtaggcaatggctgaggcacctcggttggttttgagcacatcttgccagttctgtgtctatttggggatcttttaaataaaattctgattcatactcaatataattagg

SEQ ID NO: 495 - DNA, 120 bp, Artificial Sequence
  ENSG00000001461_58 (sequence is synthesized)
atctgcagccccaggcttcatgcctgcaaatggaaaaatccattcatctagttggaatgaaatgatcagaaaggggaaggagaatgagtggaatgaaattaaaatattataatctcactc

SEQ ID NO: 496 - DNA, 120 bp, Artificial Sequence
  ENSG00000001461_59 (sequence is synthesized)
cctggatgccacaagggagtgcatcattctggaaagcctaatttcctagcgagctaaggattcataccgagaaacacaaatttaaatgtctgtaagccctgacagtaacataagcatgtg

SEQ ID NO: 497 - DNA, 120 bp, Artificial Sequence
  ENSG00000001461_60 (sequence is synthesized)
aatcagcccaatactgcccagcagggagtggtgggacctgcggaggactggagagtgcctgtctagcctaaaggaattcggattagaaaagttaagacattggaccaacctcagatttgc

SEQ ID NO: 498 - DNA, 120 bp, Artificial Sequence
  ENSG00000001461_61 (sequence is synthesized)
tgacctaaactctgtaggttgctggtgaccattagctttcacacttaactcaacattttaattttatttatacaagatggaactctctctaaaacataatctcctgtccttcattaacac

SEQ ID NO: 499 - DNA, 120 bp, Artificial Sequence
  ENSG00000001461_62 (sequence is synthesized)
aatctcatgaacaaaatataaacacactgatggtctagaggactgcttactcgagaggttttcatgctgtaacgctgtgatgcaggtgtgttctcagggttgactggtgtgcccctacat

SEQ ID NO: 500 - DNA, 120 bp, Artificial Sequence
  ENSG00000001461_63 (sequence is synthesized)
cttcttgctgtagccagcctgcctgagtatagcaactcaatgtcaatgtgctccttcaacccagcttgttcagattacaaataaaatcaaaatgaaggagctctgagttgggggcctaag

SEQ ID NO: 501 - DNA, 120 bp, Artificial Sequence
  ENSG00000001461_64 (sequence is synthesized)
atttctcctaggagttaagtgcatgagctttggtgcatgaactttttaaacgtctaatctggctgctcagattccttttttgctaacttccttgtttctcggctgtgttccggatagatg

SEQ ID NO: 502 - DNA, 120 bp, Artificial Sequence
  ENSG00000001461_65 (sequence is synthesized)
agggcgctggatagctgaattccagataggtgaggtgtcaactctgtgtgtgcaagtatgtgtatgtatatgtgtgtttgtgtgtttacaaactatgtgtatatatcaatatcagtattt

SEQ ID NO: 503 - DNA, 120 bp, Artificial Sequence
  ENSG00000001461_66 (sequence is synthesized)
gtgtgtgtatatatatatatatatagatgtattttctggtggaaaatagaaggtaacctaaggtagtcttagatatcaacattctgtggtatgtttgtgggtgtggctctcagctttttc

SEQ ID NO: 504 - DNA, 120 bp, Artificial Sequence
  ENSG00000001461_67 (sequence is synthesized)
tttgtaccttgtgaccagtgggaagtcagctgttgaatcagggagaccctgcccttgcagtggcttgtcaggacacttccgattgtaggtgttctgtactgtgaagagcgtgggcttgga

SEQ ID NO: 505 - DNA, 120 bp, Artificial Sequence
  ENSG00000001461_68 (sequence is synthesized)
gttcagatgacctggattcaaatcccaactctaccaccttcctgctgtgtgacctcccaaggcctctcatcctcacttgtaactgggattccttctttcaggctagtggtcatatgtgta

SEQ ID NO: 506 - DNA, 120 bp, Artificial Sequence
  ENSG00000001461_69 (sequence is synthesized)
aaggcctcttgcacggtgtctgggacatggtagatgcctggttatatttggtttcacttcccttttgctttaaaaacctttggaagtttcacacacttgtttgacctggtggcaggtaga

SEQ ID NO: 507 - DNA, 120 bp, Artificial Sequence
  ENSG00000001461_70 (sequence is synthesized)
acatgcagaataaaactgctgaacagtctcagtctaaacagaggtgcttttccagccacttggtttccctggtcagcattaggatcttgccttttgtctacctagattcatatcttcaca

SEQ ID NO: 508 - DNA, 120 bp, Artificial Sequence
  ENSG00000001461_71 (sequence is synthesized)
acagacaactgctgttcaagaggtattcaaattccagaaatttaccacatcacaatttggagagcctttgagtaattcaagcacctgaaagacttcttaaaaatgagatcgagaaacagc

SEQ ID NO: 509 - DNA, 120 bp, Artificial Sequence
  ENSG00000001461_72 (sequence is synthesized)
ccctgacctccaggaactagcctggcactctcagccaggccttggccctttcctgtggaacagaaacaatttcacagaacatcagcagcagacaaggccactctgcagctgtgatggatc

SEQ ID NO: 510 - DNA, 120 bp, Artificial Sequence
  ENSG00000001461_73 (sequence is synthesized)
aggacacaagcaggtggaatgggaagaaaagggtttttttcctaaaattaaaaataaataaataaataaaagaacacaaacaggactactctgctagcctgactaaacatagacaaaaaa

SEQ ID NO: 511 - DNA, 120 bp, Artificial Sequence
  ENSG00000001497_0 (sequence is synthesized)
gtgcggagcggcgcggcacagagcctgttgttgagctcagtatgtcgtgggaatccggggccgggccaggtctaggttcccaggggatggatctcgtgtggagtgcgtggtacggaaagt

SEQ ID NO: 512 - DNA, 120 bp, Artificial Sequence
  ENSG00000001497_1 (sequence is synthesized)
gcgttaaagggaaagggtcgttgccactctcggcccacggcatcgtggtcgcctggctcagcagggccgagtgggaccaggtgacggtttatctgttctgtgacgaccataagttgcagc

SEQ ID NO: 513 - DNA, 120 bp, Artificial Sequence
  ENSG00000001497_2 (sequence is synthesized)
ggtacgcgcttaaccgcatcacggtgtggaggagcaggtcaggcaacgaactccctctggcagtggcttctactgctgacctgatacgctgtaagctcttggatgtaactggtggcttgg

SEQ ID NO: 514 - DNA, 120 bp, Artificial Sequence
  ENSG00000001497_3 (sequence is synthesized)
gcactgatgaacttagactgctctatggcatggcattggtcaggtttgtgaatcttatctcagagaggaagacaaagtttgccaaggtccccctcaagtgtctggctcaagaggtaaata

SEQ ID NO: 515 - DNA, 120 bp, Artificial Sequence
  ENSG00000001497_4 (sequence is synthesized)
ttccggattggattgttgaccttcgccatgagttgacccacaagaaaatgccccatataaatgactgccgcagaggctgctactttgtcctggattggctccagaagacctattggtgcc

SEQ ID NO: 516 - DNA, 120 bp, Artificial Sequence
  ENSG00000001497_5 (sequence is synthesized)
gccaactggagaacagcctgagagagacctgggagttggaggagttcagggaagggatagaggaagaggatcaagaggaagataagaacattgttgttgatgacatcacagaacagaaac

SEQ ID NO: 517 - DNA, 120 bp, Artificial Sequence
  ENSG00000001497_6 (sequence is synthesized)
cagagcctcaggatgatgggaaaagtacggagtcagatgtaaaggccgatggagacagcaaaggcagcgaagaggtggattctcattgcaaaaaggccctgagtcataaagagctatatg

SEQ ID NO: 518 - DNA, 120 bp, Artificial Sequence
  ENSG00000001497_7 (sequence is synthesized)
aaagagcccgagaactgctggtatcatacgaagaggagcagtttacggtgctggagaaatttaggtatttacctaaggccattaaggcgtggaataacccgtccccacgtgtagaatgtg

SEQ ID NO: 519 - DNA, 120 bp, Artificial Sequence
  ENSG00000001497_8 (sequence is synthesized)
tcctggcagagctcaagggcgttacatgcgagaacagggaggctgtgctggatgcttttctggatgatggcttccttgtccccacatttgaacagttggcagctttgcagatagaatatg

SEQ ID NO: 520 - DNA, 120 bp, Artificial Sequence
  ENSG00000001497_9 (sequence is synthesized)
aagatggtcagactgaggtccagagaggggaaggtactgacccaaagtcacacaaaaacgtggacttgaatgacgtcctggtgccaaagccgttctctcagttctggcagcccctgctca

SEQ ID NO: 521 - DNA, 120 bp, Artificial Sequence
  ENSG00000001497_10 (sequence is synthesized)
agaggatgctctctgaactgccagccttggggatcagcgggatccggcctacctacatcctcagatggaccgttgaactgatcgtggccaacaccaagactggacggaatgctcgccgat

SEQ ID NO: 522 - DNA, 120 bp, Artificial Sequence
  ENSG00000001497_11 (sequence is synthesized)
tttctgcaggccagtgggaagcaagaaggggctggaggctgttcaactgctccgcctcccttgactggccccggatggttgagtcctgcttgggctcaccttgctgggccagcccccaac

SEQ ID NO: 523 - DNA, 120 bp, Artificial Sequence
  ENSG00000001497_12 (sequence is synthesized)
tccttcggatcatcttcaaagccatggggcagggcctgccagacgaggagcaggagaagctgctgcgcatctgttccatttatacccagagtggagaaaacagcctggtgcaggagggct

SEQ ID NO: 524 - DNA, 120 bp, Artificial Sequence
  ENSG00000001497_13 (sequence is synthesized)
ctgaggcctcccccattgggaagtctccatatacactagacagcctgtattggagcgtcaagccagccagctccagcttcgggtctgaagcaaaggcccagcaacaggaggagcagggca

SEQ ID NO: 525 - DNA, 120 bp, Artificial Sequence
  ENSG00000001497_14 (sequence is synthesized)
gtgttaatgatgtcaaggaagaggagaaggaggagaaagaggtcttgccagaccaggtagaggaggaggaagaaaatgatgaccaagaggaggaagaggaggatgaagatgatgaagatg

SEQ ID NO: 526 - DNA, 120 bp, Artificial Sequence
  ENSG00000001497_15 (sequence is synthesized)
atgaagaggaagacagaatggaggtggggcctttctctacagggcaagagtcccccactgccgagaatgctaggcttctggcccagaaaagaggagctttgcagggctctgcatggcagg

SEQ ID NO: 527 - DNA, 120 bp, Artificial Sequence
  ENSG00000001497_16 (sequence is synthesized)
ttagctcagaagacgtgcgatgggacacatttcccctaggccgaatgccaggtcagaccgaggacccagcagagctcatgctggagaattatgacaccatgtatcttttggaccagcctg

SEQ ID NO: 528 - DNA, 120 bp, Artificial Sequence
  ENSG00000001497_17 (sequence is synthesized)
tgctagagcagcggctggaaccctcaacatgcaagactgacaccttgggcctgagctgtggtgtcggcagtggcaactgcagcaacagcagcagcagcaacttcgagggccttctctgga

SEQ ID NO: 529 - DNA, 120 bp, Artificial Sequence
  ENSG00000001497_18 (sequence is synthesized)
gccaggggcagctgcatgggctcaaaactggcctgcagctcttctgatggccatccctggtgcaagtgttcatccagccgtgccagggcaacagcccaccccctagtacaactgatgctc

SEQ ID NO: 530 - DNA, 120 bp, Artificial Sequence
  ENSG00000001497_19 (sequence is synthesized)
cctgagacaacctgggagacagcctggatcagccacatcaactcagttgtccaccacaggggaattttgaatgtcttttgtttttgttttgttttgaaaaataataaacaggcaactgta

SEQ ID NO: 531 - DNA, 120 bp, Artificial Sequence
  ENSG00000001497_20 (sequence is synthesized)
ggatggttgagtcctgcttgggctcaccttgctgggccagcccccaactccttcggattgcctgcagagtggaagctgctggtctcggagaagtctggaccacagagatcttctcccaac

SEQ ID NO: 532 - DNA, 120 bp, Artificial Sequence
  ENSG00000001497_21 (sequence is synthesized)
cagataagcagtgaatctagtcctaatcaccccgttacacagagtggagaacagagggggtttgcccaggtattatgctgcaagtcagagctggggccagaatccagatagcctgtcctt

SEQ ID NO: 533 - DNA, 120 bp, Artificial Sequence
  ENSG00000001497_22 (sequence is synthesized)
agtcccatgctcttctgtaatactccactagattgtattattgcagaaagcatctgttaaacacagaacttggcttttgttttccccagagaaaaaataaaagatactattggaaattaa

SEQ ID NO: 534 - DNA, 120 bp, Artificial Sequence
  ENSG00000001497_23 (sequence is synthesized)
caagcctcagggccacactgccctagaatgactgagttagaagggccctttggggacagtctagcccagtctcactcccactgacagatgggacaactgagtccagagaggggaggggta

SEQ ID NO: 535 - DNA, 120 bp, Artificial Sequence
  ENSG00000001497_24 (sequence is synthesized)
gggttttcttacctaagatcatacagcttaagacctgactgaactgagtccagtgtgggaatggataagacaatccccctagagtgcttagcacagtggcctgcacagagtaagtgcaca

SEQ ID NO: 536 - DNA, 120 bp, Artificial Sequence
  ENSG00000001497_25 (sequence is synthesized)
ataaatggtagctgctgtttattattgaacccaggtcttctgactccaagcccagtgctgtttcctctattatctttccaaagtatacctctgatagttgcttagcaaccttcagttgct

SEQ ID NO: 537 - DNA, 120 bp, Artificial Sequence
  ENSG00000001497_26 (sequence is synthesized)
ccctattgccttcctgttaagtctaggcttcttagcctgacattcaaagatctttctgattctggcccaacttaccatggtagccatacctcctgtgagtctcctttaccctatccaccc

SEQ ID NO: 538 - DNA, 120 bp, Artificial Sequence
  ENSG00000001497_27 (sequence is synthesized)
tgggttctatggtcaaactgaatattgcactggtaaatacctgtggttgtctccctttccttttctctgtcatttcctgaccctgagccacttccctcataatcatggaagcctttagcg

SEQ ID NO: 539 - DNA, 120 bp, Artificial Sequence
  ENSG00000001497_28 (sequence is synthesized)
cctgattcccttcttgctttcttgagcaatatctgtttcatttggatgactcatctgacactctacagctcctcaactccagtgactttcattctccactacactcagcaacccatttcc

SEQ ID NO: 540 - DNA, 120 bp, Artificial Sequence
  ENSG00000001497_29 (sequence is synthesized)
atcattcggagctattccacctctgaaagctcacatcccagcatcccactcggtgaccaccacttctcgtccttctagttctcacccttgcatcccatgacatctgctctttgcctgcat

SEQ ID NO: 541 - DNA, 120 bp, Artificial Sequence
  ENSG00000001497_30 (sequence is synthesized)
ccagatctccatccctccatttcctgcatcccttgaccttgcttcctctctatcctgtctgtggttgctcagttcggccactcatcatcagcaccttcagctttgcccatcctttggcca

SEQ ID NO: 542 - DNA, 120 bp, Artificial Sequence
  ENSG00000001497_31 (sequence is synthesized)
tatctgacttgcaaacccctgagctggaattgatcctccccattctgcttcccctgctcctcagcccgggtagctgagctctgctggagaaaaccacatagccctgcggattgctgccac

SEQ ID NO: 543 - DNA, 120 bp, Artificial Sequence
  ENSG00000001497_32 (sequence is synthesized)
tgtctgaacttttacttgttttctgaccactttctctcccatttcctcactattctaaacccttaccgctcacctcaagcccctccccctctcccatttcaccctagcttcctcgagcac

SEQ ID NO: 544 - DNA, 120 bp, Artificial Sequence
  ENSG00000001497_33 (sequence is synthesized)
atggaggcatccggcagggccccctcgacctgaggtccagccctcgtgaactgatctgcggctgcactcaaccttctcgccagtctcaggatgaggtggccttgccccacctcaaagcct

SEQ ID NO: 545 - DNA, 120 bp, Artificial Sequence
  ENSG00000001497_34 (sequence is synthesized)
gctcctccacctgtgctctggagccacctctgccagcatcgctggggcctcaccccagcctctaccttgctctgctggctcttgctcttcaacctaggaacgtgcctgagcttttctcat

SEQ ID NO: 546 - DNA, 120 bp, Artificial Sequence
  ENSG00000001497_35 (sequence is synthesized)
cttaaacaaaacaacaataacagcaacacaagcaaaatctcctttgaccctgcatccctctgttgggttatcatcagcttatcattcccacccttcccatcaaaacatctcaaaagagta

SEQ ID NO: 547 - DNA, 120 bp, Artificial Sequence
  ENSG00000001497_36 (sequence is synthesized)
gtctacactcaacactctccatttcctcactaccctcttactcctcaacctgctgcaatttgacattcacccccagagttgctttgacctcctaattaccaaatcagtgggcccttgtca

SEQ ID NO: 548 - DNA, 120 bp, Artificial Sequence
  ENSG00000001497_37 (sequence is synthesized)
gtctctgtgtctgctgcattgatgctgtttaccaccccctcctcaaaaaatgcctgtgcttattactagttcctataaagtgctgaaacccaaatctgtctagccctggcccctccccca

SEQ ID NO: 549 - DNA, 120 bp, Artificial Sequence
  ENSG00000001497_38 (sequence is synthesized)
agattcagcctcctgtactcgactacatgtcagacatctccccttggatggcccacaggcaccttactgtgaccaaaagagaattggtcgtctcagtccccatctcaactctaaagtgat

SEQ ID NO: 550 - DNA, 120 bp, Artificial Sequence
  ENSG00000001497_39 (sequence is synthesized)
cttcctcctctgttccctatctcacttggtggcggcaccatctaccctgtcctgttgactctcgaatacttcccaaatctgaggttttgtgttgccgtgtctacttcccttagtgtctcc

SEQ ID NO: 551 - DNA, 120 bp, Artificial Sequence
  ENSG00000001497_40 (sequence is synthesized)
ttccctctatcagactaagcttttcaagggcaaggactctacatcagctgtccgtgccctagcacaccacacaagtctaggcaccaaacaggcctcagtaaatgtcgttgaattgaaccg

SEQ ID NO: 552 - DNA, 120 bp, Artificial Sequence
  ENSG00000001497_41 (sequence is synthesized)
tgctctgctctctcattcccagcagtgctgtccttggtgggagctgacccagtgcctggggaatgaatgaagtgggagtctggatgccaagaccctcttagtccctgatccccctattga

SEQ ID NO: 553 - DNA, 120 bp, Artificial Sequence
  ENSG00000001497_42 (sequence is synthesized)
gtccaaaagtctttctttaaccctgatggcatttgggacacagaggtatttgtaaggttttaaaagtggctttgtagacaaagtcagtcaaggcaagacttccaggagttggaactgaac

SEQ ID NO: 554 - DNA, 120 bp, Artificial Sequence
  ENSG00000001497_43 (sequence is synthesized)
agccacattgccagatgtgtgctccagactagaagtgatgtggatgggtgggcaattgggaggagaaccaaaagggcctggatgagtcagagtttcaagaggaggcatttgaacaattca

SEQ ID NO: 555 - DNA, 120 bp, Artificial Sequence
  ENSG00000001497_44 (sequence is synthesized)
agcaggagaaagaataaagcaagtttcaaagtccagaaggaacatggcatgtgtatataatgggagggagggagtgacaagagcagcatggagaggtttggataggtggccttcaaggta

SEQ ID NO: 556 - DNA, 120 bp, Artificial Sequence
  ENSG00000001497_45 (sequence is synthesized)
ctttccaatcctaagtgcctgcagagtggaagctgctggtctcggagaagtctggaccacagagatcttctcccaacccaagcataccagagggatgcgacacatgccggcagtaacagc

SEQ ID NO: 557 - DNA, 120 bp, Artificial Sequence
  ENSG00000001561_0 (sequence is synthesized)
actcggagcgccccgagcggcgcagatagggacgttggggctgtgccccgcggcgcggcgcctgccactgcgcaggcgcctcaggaagagctcggcatcgcccctcttcctccaggtccc

SEQ ID NO: 558 - DNA, 120 bp, Artificial Sequence
  ENSG00000001561_1 (sequence is synthesized)
ccttccccgcaacttcccacgagtgccaggtgccgcgagcgccgagttccgcgcattggaaagaagcgaccgcggcggctggaaccctgattgctgtccttcaacgtgttcattatgaag

SEQ ID NO: 559 - DNA, 120 bp, Artificial Sequence
  ENSG00000001561_2 (sequence is synthesized)
ttattagtaatacttttgttttctggacttataactggttttagaagtgactcttcctctagtttgccacctaagttactactagtatcctttgatggcttcagagctgattatctgaag

SEQ ID NO: 560 - DNA, 120 bp, Artificial Sequence
  ENSG00000001561_3 (sequence is synthesized)
aactatgaatttcctcatctccagaattttatcaaagaaggtgttttggtagagcatgttaaaaatgtttttatcacaaaaacatttccaaaccactacagtattgtgacaggcttgtat

SEQ ID NO: 561 - DNA, 120 bp, Artificial Sequence
  ENSG00000001561_4 (sequence is synthesized)
gaagaaagccatggcattgtggctaattccatgtatgatgcagtcacaaagaaacacttttctgactctaatgacaaggatcctttttggtggaatgaggcagtacctatttgggtgacc

SEQ ID NO: 562 - DNA, 120 bp, Artificial Sequence
  ENSG00000001561_5 (sequence is synthesized)
aatcagcttcaggaaaacagatcaagtgctgctgctatgtggcctggtactgatgtacccattcacgataccatctcttcctattttatgaattacaactcctcagtgtcatttgaggaa

SEQ ID NO: 563 - DNA, 120 bp, Artificial Sequence
  ENSG00000001561_6 (sequence is synthesized)
agactaaataatattactatgtggctaaacaattcgaacccaccagtcacctttgcaacactatattgggaagaaccagatgcaagtggccacaaatacggacctgaagataaagaaaac

SEQ ID NO: 564 - DNA, 120 bp, Artificial Sequence
  ENSG00000001561_7 (sequence is synthesized)
atgagcagagtgttgaaaaaaatagatgatcttatcggtgacttagtccaaagactcaagatgttagggctatgggaaaatcttaatgtgatcattacaagtgatcatgggatgacccag

SEQ ID NO: 565 - DNA, 120 bp, Artificial Sequence
  ENSG00000001561_8 (sequence is synthesized)
tgttctcaggacagactgataaacctggattcctgcatcgatcattcatactacactcttatagatttgagcccagttgctgcaatacttcccaaaataaatagaacagaggtttataac

SEQ ID NO: 566 - DNA, 120 bp, Artificial Sequence
  ENSG00000001561_9 (sequence is synthesized)
aaactgaaaaactgtagccctcatatgaatgtttatctcaaagaagacattcctaacagattttattaccaacataatgatcgaattcagcccattattttggttgccgatgaaggctgg

SEQ ID NO: 567 - DNA, 120 bp, Artificial Sequence
  ENSG00000001561_10 (sequence is synthesized)
acaattgtgctaaatgaatcatcacaaaaattaggtgaccatggttatgataattctttgcctagtatgcatccatttctagctgcccacggacctgcatttcacaaaggctacaagcat

SEQ ID NO: 568 - DNA, 120 bp, Artificial Sequence
  ENSG00000001561_11 (sequence is synthesized)
agcacaattaacattgtggatatttatccaatgatgtgccacatcctgggattaaaaccacatcccaataatgggacctttggtcatactaagtgcttgttagttgaccagtggtgcatt

SEQ ID NO: 569 - DNA, 120 bp, Artificial Sequence
  ENSG00000001561_12 (sequence is synthesized)
aatctcccagaagccatcgcgattgttatcggttcactcttggtgttaaccatgctaacatgcctcataataatcatgcagaatagactttctgtacctcgtccattttctcgacttcag

SEQ ID NO: 570 - DNA, 120 bp, Artificial Sequence
  ENSG00000001561_13 (sequence is synthesized)
ctacaagaagatgatgatgatcctttaattgggtgacatgtgctagggcttatacaaagtgtctttgattaatcacaaaactaagaatacatccaaagaatagtgttgtaactatgaaaa

SEQ ID NO: 571 - DNA, 120 bp, Artificial Sequence
  ENSG00000001561_14 (sequence is synthesized)
agaatactttgaaagacaaagaacttagactaagcatgttaaaattattactttgttttccttgtgttttgtttcggtgcatttgctaataagataacgctgaccatagtaaaattgtta

SEQ ID NO: 572 - DNA, 120 bp, Artificial Sequence
  ENSG00000001561_15 (sequence is synthesized)
gtaaatcattaggtaacatcttgtggtaggaaatcattaggtaacatcaatcctaactagaaatactaaaaatggcttttgagaaaaatacttcctctgcttgtattttgcgatgaagat

SEQ ID NO: 573 - DNA, 120 bp, Artificial Sequence
  ENSG00000001561_16 (sequence is synthesized)
agatgtgatacatctttaaatgaaaatataccaaaatttagtaggcatgtttttctaataaatttatatatttgtaaagaaaacaacagaaatctttatgcaatttgtgaattttgtata

SEQ ID NO: 574 - DNA, 120 bp, Artificial Sequence
  ENSG00000001561_17 (sequence is synthesized)
ggaggaaaagcttcctatatttttatatttacctttaattagtttgtatctcaagtaccctcttgaggtaggaaatgctctgtgatggtaaataaaattggagcagacagaaaagatata

SEQ ID NO: 575 - DNA, 120 bp, Artificial Sequence
  ENSG00000001561_18 (sequence is synthesized)
gcaaatgaagaaatattttaaggaaacctatttgaaaaaaaaagcaaagaccatttgataaaagcctgagttgtcaccattatgtcttaagctgttagtcttaaagattattgttaaaaa

SEQ ID NO: 576 - DNA, 120 bp, Artificial Sequence
  ENSG00000001561_19 (sequence is synthesized)
ctgtgcaagtgtgtttgtgtgtggttgtgtggacattatgtgatttactatataaggaggtcagagatggactgtggccaggcttccacattcctgaagcacacagatctcaggaaaggt

SEQ ID NO: 577 - DNA, 120 bp, Artificial Sequence
  ENSG00000001561_20 (sequence is synthesized)
tatttttgcacttcatatttgtttactttctcctaactcacaagttaaaatcataacttaatttcattaacttttatcatttaactctctcatgtttgttgtaacctgaggtatccaaat

SEQ ID NO: 578 - DNA, 120 bp, Artificial Sequence
  ENSG00000001561_21 (sequence is synthesized)
gctacagaaaaatttatgacccaaatacaaatctcaatttgactgggacagaatgaggaatggagatttttgtatttatctttgggactttatgccttactttttaggctatagaatagt

SEQ ID NO: 579 - DNA, 120 bp, Artificial Sequence
  ENSG00000001561_22 (sequence is synthesized)
taagaaattttaaacaaaatttagtatcttttggtctttcacaccattcatatgttaagtggcagaatagccttagtgctacctccacttttttctccagtatttgcatcacagaaataa

SEQ ID NO: 580 - DNA, 120 bp, Artificial Sequence
  ENSG00000001561_23 (sequence is synthesized)
tccctctgtttaacatgtttgttcagagccaagggtttattgtgaagaactgtcatcctgcctttgctagctggtaccttctagtaatcaaaattaatatgaagaaactaggttgtgaca

SEQ ID NO: 581 - DNA, 120 bp, Artificial Sequence
  ENSG00000001561_24 (sequence is synthesized)
gactagattatatttagtaggggaaaaattgggctcaagaaccattcatcagtacgtgagacaagcagttaatagtatgatctttaaagttttgacaatataaaataaacttggtaactg

SEQ ID NO: 582 - DNA, 120 bp, Artificial Sequence
  ENSG00000001561_25 (sequence is synthesized)
ttttacaaatataaaagtataataaatatgcagcccagttaaatattgattatctgtgatggtaaagaacaacagtggtgccagtcatcaaacatacagtgcgtcctattgagtcactgc

SEQ ID NO: 583 - DNA, 120 bp, Artificial Sequence
  ENSG00000001561_26 (sequence is synthesized)
taatttcttgagcctggtatttgctgcctattgtatttgtggttgttgagaggcattttcaaaccctgtataaataatccatgctgttggtcataagttaactgtattaagaacagtaaa

SEQ ID NO: 584 - DNA, 120 bp, Artificial Sequence
  ENSG00000001561_27 (sequence is synthesized)
aaaccaatagtactaattttgctttaaaaaaatttctaatttttttcacataaaacaattatcctaaaggttaatagttgatcgaaacagaataatagaaaaattctactttaatttcca

SEQ ID NO: 585 - DNA, 120 bp, Artificial Sequence
  ENSG00000001561_28 (sequence is synthesized)
aatttccattaaaaagcaaatagcattgacacatttaaagcttttcatttaaagtagtggatgtttttgaagtatctaaaatagtagcagaatattttatacttggtccttgcaatggtg

SEQ ID NO: 586 - DNA, 120 bp, Artificial Sequence
  ENSG00000001561_29 (sequence is synthesized)
tgagttttaatgattgcattatcgtgattggtggttatgagtttcagaaatctatacttggcatccaactcatgagtggattttatataggatggaacaggaaggtatgtcctgtcagta

SEQ ID NO: 587 - DNA, 120 bp, Artificial Sequence
  ENSG00000001561_30 (sequence is synthesized)
tcttaaccctttcaacaagacatttacctatttgtctttccttacgttctcaaaatattaactcgaattgtaaattaagcaaaaatttaaaaagtatatgttgatgggacaagaagaata

SEQ ID NO: 588 - DNA, 120 bp, Artificial Sequence
  ENSG00000001561_31 (sequence is synthesized)
acaagaagaatagtatttatttaataaaacatatattatattgaactatgtgttaattcatttgtatcttttaaaaaattatcactgttaaagccattgactcctttagtacactgagaa

SEQ ID NO: 589 - DNA, 120 bp, Artificial Sequence
  ENSG00000001561_32 (sequence is synthesized)
aaaactagcctttcacattaaggttttggtgtgtattttgttaaataactaacatgctgctctattttctgggtgtagaaagtatttggctctaggaaacatttacttgtttgtgaaaac

SEQ ID NO: 590 - DNA, 120 bp, Artificial Sequence
  ENSG00000001561_33 (sequence is synthesized)
aataccccaaggtaataggaaaagtttgagttaagtgtttttaattcagtcagtgaattcagaataagtacattcatgtataacatagggacagttctgctgctgttatttatatgcaat

SEQ ID NO: 591 - DNA, 120 bp, Artificial Sequence
  ENSG00000001561_34 (sequence is synthesized)
tcttctggtaaatagcaatagaataaaacatatttcaatgtttgtgtataggttttatattattattccactaggaatggcataagaatttatagataaattcttgtaacattaaaggat

SEQ ID NO: 592 - DNA, 120 bp, Artificial Sequence
  ENSG00000001561_35 (sequence is synthesized)
taaaatgtttttacattgtttttgggtgtctccttcttgtgcccatatctgataagctttatggattattgcatttaattccttttatttggagggttttacttccttgttaacatataa

SEQ ID NO: 593 - DNA, 120 bp, Artificial Sequence
  ENSG00000001561_36 (sequence is synthesized)
agttataaatgaaggacaaggaggagatggaaaatgtgtatttattgttaattcttaaaatagtgtgtaaataaaataacatcagtgtgctttaaagaaatgtgtatgtagtgccttaat

SEQ ID NO: 594 - DNA, 120 bp, Artificial Sequence
  ENSG00000001561_37 (sequence is synthesized)
gccttaatttaaattaaaatatttttgactgttacttgagttcagaattaatgactttgttcatgatttttaaaatgtgtgtgaataaaatctaccaaaaaattcttactgtaattatta

SEQ ID NO: 595 - DNA, 80 bp, Artificial Sequence
  ENSG00000001617_0 (sequence is synthesized)
gagcgcccctgagccttcccatggcccgggctggggcccgggccctcggctgctgacgcgcccgaagcccgcggaaccgg

SEQ ID NO: 596 - DNA, 120 bp, Artificial Sequence
  ENSG00000001617_1 (sequence is synthesized)
ggccgctagcgcggaccggcccaacgggagccgctccgtgccgccgccgccgcccgggcgcccaggccccgccgctgcggaagaggtttctagagagtggagcctgcttcctgggcccta

SEQ ID NO: 597 - DNA, 120 bp, Artificial Sequence
  ENSG00000001617_2 (sequence is synthesized)
ggtttctagagagtggagcctgcttcctgggccctaggcccctcccacaatgcttgtcgccggtcttcttctctgggcttccctactgaccggggcctggccatccttccccacccagga

SEQ ID NO: 598 - DNA, 120 bp, Artificial Sequence
  ENSG00000001617_3 (sequence is synthesized)
ccacctcccggccacgccccgggtccggctctcattcaaagagctgaaggccacaggcaccgcccacttcttcaacttcctgctcaacacaaccgactaccgaatcttgctcaaggacga

SEQ ID NO: 599 - DNA, 120 bp, Artificial Sequence
  ENSG00000001617_4 (sequence is synthesized)
ggaccacgaccgcatgtacgtgggcagcaaggactacgtgctgtccctggacctgcacgacatcaaccgcgagcccctcattatacactgggcagcctccccacagcgcatcgaggaatg

SEQ ID NO: 600 - DNA, 120 bp, Artificial Sequence
  ENSG00000001617_5 (sequence is synthesized)
cgtgctctcaggcaaggatgtcaacggcgagtgtgggaacttcgtcaggctcatccagccctggaaccgaacacacctgtatgtgtgcgggacaggtgcctacaaccccatgtgcaccta

SEQ ID NO: 601 - DNA, 120 bp, Artificial Sequence
  ENSG00000001617_6 (sequence is synthesized)
tgtgaaccgcggacgccgcgcccaggccacaccatggacccagactcaggcggtcagaggccgcggcagcagagccacggatggtgccctccgcccgatgcccacagccccacgccagga

SEQ ID NO: 602 - DNA, 120 bp, Artificial Sequence
  ENSG00000001617_7 (sequence is synthesized)
ttacatcttctacctggagcctgagcgactcgagtcagggaagggcaagtgtccgtacgatcccaagctggacacagcatcggccctcatcaatgaggagctctatgctggtgtgtacat

SEQ ID NO: 603 - DNA, 120 bp, Artificial Sequence
  ENSG00000001617_8 (sequence is synthesized)
cgattttatgggcactgatgcagccatcttccgcacacttggaaagcagacagccatgcgcacggatcagtacaactcccggtggctgaacgacccgtcgttcatccatgctgagctcat

SEQ ID NO: 604 - DNA, 120 bp, Artificial Sequence
  ENSG00000001617_9 (sequence is synthesized)
tcctgacagtgcggagcgcaatgatgataagctttacttcttcttccgtgagcggtcggcagaggcgccgcagagccccgcggtgtacgcccgcatcgggcgcatttgcctgaacgatga

SEQ ID NO: 605 - DNA, 120 bp, Artificial Sequence
  ENSG00000001617_10 (sequence is synthesized)
cggtggtcactgttgcctggtcaacaagtggagcacattcctgaaggcgcggctcgtctgctctgtcccgggcgaggatggcattgagactcactttgatgagctccaggacgtgtttgt

SEQ ID NO: 606 - DNA, 120 bp, Artificial Sequence
  ENSG00000001617_11 (sequence is synthesized)
ccagcagacccaggacgtgaggaaccctgtcatttacgctgtctttacctcctctggctccgtgttccgaggctctgccgtgtgtgtctactccatggctgatattcgcatggtcttcaa

SEQ ID NO: 607 - DNA, 120 bp, Artificial Sequence
  ENSG00000001617_12 (sequence is synthesized)
cgggccctttgcccacaaagaggggcccaactaccagtggatgcccttctcagggaagatgccctacccacggccgggcacgtgccctggtggaaccttcacgccatctatgaagtccac

SEQ ID NO: 608 - DNA, 120 bp, Artificial Sequence
  ENSG00000001617_13 (sequence is synthesized)
caaggattatcctgatgaggtgatcaacttcatgcgcagccacccactcatgtaccaggccgtgtaccctctgcagcggcggcccctggtagtccgcacaggtgctccctaccgccttac

SEQ ID NO: 609 - DNA, 120 bp, Artificial Sequence
  ENSG00000001617_14 (sequence is synthesized)
cactattgccgtggaccaggtggatgcagccgacgggcgctatgaggtgcttttcctgggcacagaccgcgggacagtgcagaaggtcattgtgctgcccaaggatgaccaggagttgga

SEQ ID NO: 610 - DNA, 120 bp, Artificial Sequence
  ENSG00000001617_15 (sequence is synthesized)
atgctggaggaggtggaggtcttcaaggatccagcacccgtcaagaccatgaccatctcttctaagaggcaacaactctacgtggcgtcagccgtgggtgtcacacacctgagcctgcac

SEQ ID NO: 611 - DNA, 120 bp, Artificial Sequence
  ENSG00000001617_16 (sequence is synthesized)
cgctgccaggcgtatggggctgcctgtgctgactgctgccttgcccgggacccttactgtgcctgggatggccaggcctgctcccgctatacagcatcctccaagaggcggagccgccgg

SEQ ID NO: 612 - DNA, 120 bp, Artificial Sequence
  ENSG00000001617_17 (sequence is synthesized)
caggacgtccggcacggaaaccccatcaggcagtgccgtgggttcaactccaatgccaacaagaatgccgtggagtctgtgcagtatggcgtggccggcagcgcagccttccttgagtgc

SEQ ID NO: 613 - DNA, 120 bp, Artificial Sequence
  ENSG00000001617_18 (sequence is synthesized)
cagccccgctcgccccaagccactgttaagtggctgttccagcgagatcctggtgaccggcgccgagagattcgtgcagaggaccgcttcctgcgcacagagcagggcttgttgctccgt

SEQ ID NO: 614 - DNA, 120 bp, Artificial Sequence
  ENSG00000001617_19 (sequence is synthesized)
gcactgcagctcagcgatcgtggcctctactcctgcacagccactgagaacaactttaagcacgtcgtcacacgagtgcagctgcatgtactgggccgggacgccgtccatgctgccctc

SEQ ID NO: 615 - DNA, 120 bp, Artificial Sequence
  ENSG00000001617_20 (sequence is synthesized)
ttcccaccactgtccatgagcgccccgccacccccaggcgcaggccccccaacgcctccttaccaggagttagcccagctgctggcccagccagaagtgggcctcatccaccagtactgc

SEQ ID NO: 616 - DNA, 120 bp, Artificial Sequence
  ENSG00000001617_21 (sequence is synthesized)
cagggttactggcgccatgtgccccccagccccagggaggctccaggggcaccccggtctcctgagccccaggaccagaaaaagccccggaaccgccggcaccaccctccggacacatga

SEQ ID NO: 617 - DNA, 120 bp, Artificial Sequence
  ENSG00000001617_22 (sequence is synthesized)
ggaaccgccggcaccaccctccggacacatgaggccagctgcctgtgcctgccatgggccagcctagcccttgtcccttttaatataaaagatatatatatatatatatatatataaaat

SEQ ID NO: 618 - DNA, 120 bp, Artificial Sequence
  ENSG00000001617_23 (sequence is synthesized)
agacagtatttattggtgggttgaatatagcctgcctcagtggcagcatcctccaaaacttagacccatgctggtcagagacggcagaaaacagagcctgcctaaccaggcccagccagt

SEQ ID NO: 619 - DNA, 120 bp, Artificial Sequence
  ENSG00000001617_24 (sequence is synthesized)
tggtggggccaggccaggaccacacagtccccagactcagctggaagtctacctgctggacagcctccgccaagatctacaggacaaagggagggagcaagccctactcggatggggcac

SEQ ID NO: 620 - DNA, 120 bp, Artificial Sequence
  ENSG00000001617_25 (sequence is synthesized)
ggactgtccaccttttctgatgtgtgttgtcagcctgtgctgtggcatagacatggatgcgaggaccactttggagactggggtggcctcaagagcacacagagaagggaagaaggggcc

SEQ ID NO: 621 - DNA, 120 bp, Artificial Sequence
  ENSG00000001617_26 (sequence is synthesized)
atcacaggatgccagcccctgcctgggttgggggcactcagccacgaccagccccttcctgggtatttattctctatttattggggataggagaagaggcatcctgcctgggtgggacag

SEQ ID NO: 622 - DNA, 120 bp, Artificial Sequence
  ENSG00000001617_27 (sequence is synthesized)
cctcttcagccccttctcccctccccgcctggccagggcagggccaccccactctacctccttagctttccctgtgccactttgactcagaggctgggagcatagcagaggggccaggcc

SEQ ID NO: 623 - DNA, 120 bp, Artificial Sequence
  ENSG00000001617_28 (sequence is synthesized)
caggcagagctgacgggaggccccagctctgaggggagggggtccgtggtagaggcctggggccggtagaggctccccagggctcccttatgtccaccacttcaggggatgggtgtggat

SEQ ID NO: 624 - DNA, 120 bp, Artificial Sequence
  ENSG00000001617_29 (sequence is synthesized)
gtaattagctctggggggcagttgggtagatgggtgggggctcctggtggccttctgctgcccaggccacagccgcctttgggttccatcttgctaataaacactggctctgggactaga

SEQ ID NO: 625 - DNA, 120 bp, Artificial Sequence
  ENSG00000001617_30 (sequence is synthesized)
ctgactggtgctccctctcttccatcttgggctgtctgcatgtgtctcattcccccactctctcctgtgcctcccctctaccgtaataatcaggtccaggtttctctgtactgggagaag

SEQ ID NO: 626 - DNA, 120 bp, Artificial Sequence
  ENSG00000001617_31 (sequence is synthesized)
acctgtggctggagcaggcagggatgcaccctatctgttccccattcctccaggtgggagggagaaggagtaacccactttattggccacagatgcaggggagaaaggagaaagcatgct

SEQ ID NO: 627 - DNA, 120 bp, Artificial Sequence
  ENSG00000001617_32 (sequence is synthesized)
agcgccccgtcccgccggcggccgcgagaccagagcgagcgaacgaaccgcggcggtccggagagccccgagcgcagcgcaggacctgggtacgccgcgaggaaccgtgcagcccagcgc

SEQ ID NO: 628 - DNA, 80 bp, Artificial Sequence
  ENSG00000001617_33 (sequence is synthesized)
gcccggcccgggtccagcagccaggagagcgcagcgcttcgaagccgagtgcgcgccaccgcccgcgccccgcgctgggg

SEQ ID NO: 629 - DNA, 120 bp, Artificial Sequence
  ENSG00000001617_34 (sequence is synthesized)
agaagtgtccggggagcgggtctcgtcgagccggggggctgcccgcggacataggggcaacaaggctggggtgggattcttacctgtcctggaggcccggaccccttacctacggggcgg

SEQ ID NO: 630 - DNA, 120 bp, Artificial Sequence
  ENSG00000001617_35 (sequence is synthesized)
cctaggaacaaccagagaggaaggagatgacaggggtggggagggggacatggaagggagtggtccgcttggccaaatgctgccacgaggtcatggcacctgaggccagggaggtggctg

SEQ ID NO: 631 - DNA, 120 bp, Artificial Sequence
  ENSG00000001617_36 (sequence is synthesized)
tggcatttggccacctgggaccttggccagagcaggacctgtagaggtcaggtgcagggcagaaacttggagagcgggtttggggagaggagcaggttgaggtagtggggacagacagtg

SEQ ID NO: 632 - DNA, 120 bp, Artificial Sequence
  ENSG00000001626_0 (sequence is synthesized)
aattggaagcaaatgacatcacagcaggtcagagaaaaagggttgagcggcaggcacccagagtagtaggtctttggcattaggagcttgagcccagacggccctagcagggaccccagc

SEQ ID NO: 633 - DNA, 120 bp, Artificial Sequence
  ENSG00000001626_1 (sequence is synthesized)
gcccgagagaccatgcagaggtcgcctctggaaaaggccagcgttgtctccaaactttttttcagctggaccagaccaattttgaggaaaggatacagacagcgcctggaattgtcagac

SEQ ID NO: 634 - DNA, 120 bp, Artificial Sequence
  ENSG00000001626_2 (sequence is synthesized)
atataccaaatcccttctgttgattctgctgacaatctatctgaaaaattggaaagagaatgggatagagagctggcttcaaagaaaaatcctaaactcattaatgcccttcggcgatgt

SEQ ID NO: 635 - DNA, 120 bp, Artificial Sequence
  ENSG00000001626_3 (sequence is synthesized)
tttttctggagatttatgttctatggaatctttttatatttaggggaagtcaccaaagcagtacagcctctcttactgggaagaatcatagcttcctatgacccggataacaaggaggaa

SEQ ID NO: 636 - DNA, 120 bp, Artificial Sequence
  ENSG00000001626_4 (sequence is synthesized)
cgctctatcgcgatttatctaggcataggcttatgccttctctttattgtgaggacactgctcctacacccagccatttttggccttcatcacattggaatgcagatgagaatagctatg

SEQ ID NO: 637 - DNA, 120 bp, Artificial Sequence
  ENSG00000001626_5 (sequence is synthesized)
tttagtttgatttataagaagactttaaagctgtcaagccgtgttctagataaaataagtattggacaacttgttagtctcctttccaacaacctgaacaaatttgatgaaggacttgca

SEQ ID NO: 638 - DNA, 120 bp, Artificial Sequence
  ENSG00000001626_6 (sequence is synthesized)
ttggcacatttcgtgtggatcgctcctttgcaagtggcactcctcatggggctaatctgggagttgttacaggcgtctgccttctgtggacttggtttcctgatagtccttgcccttttt

SEQ ID NO: 639 - DNA, 120 bp, Artificial Sequence
  ENSG00000001626_7 (sequence is synthesized)
caggctgggctagggagaatgatgatgaagtacagagatcagagagctgggaagatcagtgaaagacttgtgattacctcagaaatgattgaaaatatccaatctgttaaggcatactgc

SEQ ID NO: 640 - DNA, 120 bp, Artificial Sequence
  ENSG00000001626_8 (sequence is synthesized)
tgggaagaagcaatggaaaaaatgattgaaaacttaagacaaacagaactgaaactgactcggaaggcagcctatgtgagatacttcaatagctcagccttcttcttctcagggttcttt

SEQ ID NO: 641 - DNA, 120 bp, Artificial Sequence
  ENSG00000001626_9 (sequence is synthesized)
gtggtgtttttatctgtgcttccctatgcactaatcaaaggaatcatcctccggaaaatattcaccaccatctcattctgcattgttctgcgcatggcggtcactcggcaatttccctgg

SEQ ID NO: 642 - DNA, 120 bp, Artificial Sequence
  ENSG00000001626_10 (sequence is synthesized)
gctgtacaaacatggtatgactctcttggagcaataaacaaaatacaggatttcttacaaaagcaagaatataagacattggaatataacttaacgactacagaagtagtgatggagaat

SEQ ID NO: 643 - DNA, 120 bp, Artificial Sequence
  ENSG00000001626_11 (sequence is synthesized)
gtaacagccttctgggaggagggatttggggaattatttgagaaagcaaaacaaaacaataacaatagaaaaacttctaatggtgatgacagcctcttcttcagtaatttctcacttctt

SEQ ID NO: 644 - DNA, 120 bp, Artificial Sequence
  ENSG00000001626_12 (sequence is synthesized)
ggtactcctgtcctgaaagatattaatttcaagatagaaagaggacagttgttggcggttgctggatccactggagcaggcaagacttcacttctaatggtgattatgggagaactggag

SEQ ID NO: 645 - DNA, 120 bp, Artificial Sequence
  ENSG00000001626_13 (sequence is synthesized)
ccttcagagggtaaaattaagcacagtggaagaatttcattctgttctcagttttcctggattatgcctggcaccattaaagaaaatatcatctttggtgtttcctatgatgaatataga

SEQ ID NO: 646 - DNA, 120 bp, Artificial Sequence
  ENSG00000001626_14 (sequence is synthesized)
tacagaagcgtcatcaaagcatgccaactagaagaggacatctccaagtttgcagagaaagacaatatagttcttggagaaggtggaatcacactgagtggaggtcaacgagcaagaatt

SEQ ID NO: 647 - DNA, 120 bp, Artificial Sequence
  ENSG00000001626_15 (sequence is synthesized)
tctttagcaagagcagtatacaaagatgctgatttgtatttattagactctccttttggatacctagatgttttaacagaaaaagaaatatttgaaagctgtgtctgtaaactgatggct

SEQ ID NO: 648 - DNA, 120 bp, Artificial Sequence
  ENSG00000001626_16 (sequence is synthesized)
aacaaaactaggattttggtcacttctaaaatggaacatttaaagaaagctgacaaaatattaattttgcatgaaggtagcagctatttttatgggacattttcagaactccaaaatcta

SEQ ID NO: 649 - DNA, 120 bp, Artificial Sequence
  ENSG00000001626_17 (sequence is synthesized)
cagccagactttagctcaaaactcatgggatgtgattctttcgaccaatttagtgcagaaagaagaaattcaatcctaactgagaccttacaccgtttctcattagaaggagatgctcct

SEQ ID NO: 650 - DNA, 120 bp, Artificial Sequence
  ENSG00000001626_18 (sequence is synthesized)
gtctcctggacagaaacaaaaaaacaatcttttaaacagactggagagtttggggaaaaaaggaagaattctattctcaatccaatcaactctatacgaaaattttccattgtgcaaaag

SEQ ID NO: 651 - DNA, 120 bp, Artificial Sequence
  ENSG00000001626_19 (sequence is synthesized)
actcccttacaaatgaatggcatcgaagaggattctgatgagcctttagagagaaggctgtccttagtaccagattctgagcagggagaggcgatactgcctcgcatcagcgtgatcagc

SEQ ID NO: 652 - DNA, 120 bp, Artificial Sequence
  ENSG00000001626_20 (sequence is synthesized)
actggccccacgcttcaggcacgaaggaggcagtctgtcctgaacctgatgacacactcagttaaccaaggtcagaacattcaccgaaagacaacagcatccacacgaaaagtgtcactg

SEQ ID NO: 653 - DNA, 120 bp, Artificial Sequence
  ENSG00000001626_21 (sequence is synthesized)
gcccctcaggcaaacttgactgaactggatatatattcaagaaggttatctcaagaaactggcttggaaataagtgaagaaattaacgaagaagacttaaaggagtgcttttttgatgat

SEQ ID NO: 654 - DNA, 120 bp, Artificial Sequence
  ENSG00000001626_22 (sequence is synthesized)
atggagagcataccagcagtgactacatggaacacataccttcgatatattactgtccacaagagcttaatttttgtgctaatttggtgcttagtaatttttctggcagaggtggctgct

SEQ ID NO: 655 - DNA, 120 bp, Artificial Sequence
  ENSG00000001626_23 (sequence is synthesized)
tctttggttgtgctgtggctccttggaaacactcctcttcaagacaaagggaatagtactcatagtagaaataacagctatgcagtgattatcaccagcaccagttcgtattatgtgttt

SEQ ID NO: 656 - DNA, 120 bp, Artificial Sequence
  ENSG00000001626_24 (sequence is synthesized)
tacatttacgtgggagtagccgacactttgcttgctatgggattcttcagaggtctaccactggtgcatactctaatcacagtgtcgaaaattttacaccacaaaatgttacattctgtt

SEQ ID NO: 657 - DNA, 120 bp, Artificial Sequence
  ENSG00000001626_25 (sequence is synthesized)
atgtcaaccctcaacacgttgaaagcaggtgggattcttaatagattctccaaagatatagcaattttggatgaccttctgcctcttaccatatttgacttcatccagttgttattaatt

SEQ ID NO: 658 - DNA, 120 bp, Artificial Sequence
  ENSG00000001626_26 (sequence is synthesized)
gtgattggagctatagcagttgtcgcagttttacaaccctacatctttgttgcaacagtgccagtgatagtggcttttattatgttgagagcatatttcctccaaacctcacagcaactc

SEQ ID NO: 659 - DNA, 120 bp, Artificial Sequence
  ENSG00000001626_27 (sequence is synthesized)
aaacaactggaatctgaaggcaggagtccaattttcactcatcttgttacaagcttaaaaggactatggacacttcgtgccttcggacggcagccttactttgaaactctgttccacaaa

SEQ ID NO: 660 - DNA, 120 bp, Artificial Sequence
  ENSG00000001626_28 (sequence is synthesized)
gctctgaatttacatactgccaactggttcttgtacctgtcaacactgcgctggttccaaatgagaatagaaatgatttttgtcatcttcttcattgctgttaccttcatttccatttta

SEQ ID NO: 661 - DNA, 120 bp, Artificial Sequence
  ENSG00000001626_29 (sequence is synthesized)
acaacaggagaaggagaaggaagagttggtattatcctgactttagccatgaatatcatgagtacattgcagtgggctgtaaactccagcatagatgtggatagcttgatgcgatctgtg

SEQ ID NO: 662 - DNA, 120 bp, Artificial Sequence
  ENSG00000001626_30 (sequence is synthesized)
agccgagtctttaagttcattgacatgccaacagaaggtaaacctaccaagtcaaccaaaccatacaagaatggccaactctcgaaagttatgattattgagaattcacacgtgaagaaa

SEQ ID NO: 663 - DNA, 120 bp, Artificial Sequence
  ENSG00000001626_31 (sequence is synthesized)
gatgacatctggccctcagggggccaaatgactgtcaaagatctcacagcaaaatacacagaaggtggaaatgccatattagagaacatttccttctcaataagtcctggccagagggtg

SEQ ID NO: 664 - DNA, 120 bp, Artificial Sequence
  ENSG00000001626_32 (sequence is synthesized)
ggcctcttgggaagaactggatcagggaagagtactttgttatcagcttttttgagactactgaacactgaaggagaaatccagatcgatggtgtgtcttgggattcaataactttgcaa

SEQ ID NO: 665 - DNA, 120 bp, Artificial Sequence
  ENSG00000001626_33 (sequence is synthesized)
cagtggaggaaagcctttggagtgataccacagaaagtatttattttttctggaacatttagaaaaaacttggatccctatgaacagtggagtgatcaagaaatatggaaagttgcagat

SEQ ID NO: 666 - DNA, 120 bp, Artificial Sequence
  ENSG00000001626_34 (sequence is synthesized)
gaggttgggctcagatctgtgatagaacagtttcctgggaagcttgactttgtccttgtggatgggggctgtgtcctaagccatggccacaagcagttgatgtgcttggctagatctgtt

SEQ ID NO: 667 - DNA, 120 bp, Artificial Sequence
  ENSG00000001626_35 (sequence is synthesized)
ctcagtaaggcgaagatcttgctgcttgatgaacccagtgctcatttggatccagtaacataccaaataattagaagaactctaaaacaagcatttgctgattgcacagtaattctctgt

SEQ ID NO: 668 - DNA, 120 bp, Artificial Sequence
  ENSG00000001626_36 (sequence is synthesized)
gaacacaggatagaagcaatgctggaatgccaacaatttttggtcatagaagagaacaaagtgcggcagtacgattccatccagaaactgctgaacgagaggagcctcttccggcaagcc

SEQ ID NO: 669 - DNA, 120 bp, Artificial Sequence
  ENSG00000001626_37 (sequence is synthesized)
atcagcccctccgacagggtgaagctctttccccaccggaactcaagcaagtgcaagtctaagccccagattgctgctctgaaagaggagacagaagaagaggtgcaagatacaaggctt

SEQ ID NO: 670 - DNA, 120 bp, Artificial Sequence
  ENSG00000001626_38 (sequence is synthesized)
tagagagcagcataaatgttgacatgggacatttgctcatggaattggagctcgtgggacagtcacctcatggaattggagctcgtggaacagttacctctgcctcagaaaacaaggatg

SEQ ID NO: 671 - DNA, 120 bp, Artificial Sequence
  ENSG00000001626_39 (sequence is synthesized)
aattaagtttttttttaaaaaagaaacatttggtaaggggaattgaggacactgatatgggtcttgataaatggcttcctggcaatagtcaaattgtgtgaaaggtacttcaaatccttg

SEQ ID NO: 672 - DNA, 120 bp, Artificial Sequence
  ENSG00000001626_40 (sequence is synthesized)
aagatttaccacttgtgttttgcaagccagattttcctgaaaacccttgccatgtgctagtaattggaaaggcagctctaaatgtcaatcagcctagttgatcagcttattgtctagtga

SEQ ID NO: 673 - DNA, 120 bp, Artificial Sequence
  ENSG00000001626_41 (sequence is synthesized)
aactcgttaatttgtagtgttggagaagaactgaaatcatacttcttagggttatgattaagtaatgataactggaaacttcagcggtttatataagcttgtattcctttttctctcctc

SEQ ID NO: 674 - DNA, 120 bp, Artificial Sequence
  ENSG00000001626_42 (sequence is synthesized)
tccccatgatgtttagaaacacaactatattgtttgctaagcattccaactatctcatttccaagcaagtattagaataccacaggaaccacaagactgcacatcaaaatatgccccatt

SEQ ID NO: 675 - DNA, 120 bp, Artificial Sequence
  ENSG00000001626_43 (sequence is synthesized)
caacatctagtgagcagtcaggaaagagaacttccagatcctggaaatcagggttagtattgtccaggtctaccaaaaatctcaatatttcagataatcacaatacatcccttacctggg

SEQ ID NO: 676 - DNA, 120 bp, Artificial Sequence
  ENSG00000001626_44 (sequence is synthesized)
aaagggctgttataatctttcacaggggacaggatggttcccttgatgaagaagttgatatgccttttcccaactccagaaagtgacaagctcacagacctttgaactagagtttagctg

SEQ ID NO: 677 - DNA, 120 bp, Artificial Sequence
  ENSG00000001626_45 (sequence is synthesized)
gaaaagtatgttagtgcaaattgtcacaggacagcccttctttccacagaagctccaggtagagggtgtgtaagtagataggccatgggcactgtgggtagacacacatgaagtccaagc

SEQ ID NO: 678 - DNA, 120 bp, Artificial Sequence
  ENSG00000001626_46 (sequence is synthesized)
atttagatgtataggttgatggtggtatgttttcaggctagatgtatgtacttcatgctgtctacactaagagagaatgagagacacactgaagaagcaccaatcatgaattagttttat

SEQ ID NO: 679 - DNA, 120 bp, Artificial Sequence
  ENSG00000001626_47 (sequence is synthesized)
gcaccaatcatgaattagttttatatgcttctgttttataattttgtgaagcaaaattttttctctaggaaatatttattttaataatgtttcaaacatatataacaatgctgtatttta

SEQ ID NO: 680 - DNA, 120 bp, Artificial Sequence
  ENSG00000001626_48 (sequence is synthesized)
gtataaaataatttttatatttgaaatattgactttttatggcactagtatttctatgaaatattatgttaaaactgggacaggggagaacctagggtgatattaaccaggggccatgaa

SEQ ID NO: 681 - DNA, 120 bp, Artificial Sequence
  ENSG00000001626_49 (sequence is synthesized)
tcaccttttggtctggagggaagccttggggctgatgcagttgttgcccacagctgtatgattcccagccagcacagcctcttagatgcagttctgaagaagatggtaccaccagtctga

SEQ ID NO: 682 - DNA, 120 bp, Artificial Sequence
  ENSG00000001626_50 (sequence is synthesized)
ctgtttccatcaagggtacactgccttctcaactccaaactgactcttaagaagactgcattatatttattactgtaagaaaatatcacttgtcaataaaatccatacatttgtgtgaaa

SEQ ID NO: 683 - DNA, 120 bp, Artificial Sequence
  ENSG00000001626_51 (sequence is synthesized)
tggaaagaaaagcaaactgaggctcagagagataatatactttgccagttaatgaatgatggagccatgattccagctgagagaatgggatagagagctggcttcaaagaaaaatcctaa

SEQ ID NO: 684 - DNA, 120 bp, Artificial Sequence
  ENSG00000001626_52 (sequence is synthesized)
tcattatgtatcacataactatattcatttttgtgattatgaaaagactacgaaatctggtgaataggtgtaaaaatataaaggatgaatccaactccaaacactaagaaaccacctaaa

SEQ ID NO: 685 - DNA, 120 bp, Artificial Sequence
  ENSG00000001626_53 (sequence is synthesized)
actctagtaaggataagtaaaaatcctttggaactaaaatgtcctggaacacgggtggcaatttacaatctcaatgggctcagcaaaataaattgcttgcttaaaaaattattttctgtt

SEQ ID NO: 686 - DNA, 120 bp, Artificial Sequence
  ENSG00000001626_54 (sequence is synthesized)
atgattccaaatcacattatcttactagtacatgagattactggtgcctttattttgctgtattcaacaggagagtgtcaggagacaatgtcagcagaattaggtcaaatgcagctaatt

SEQ ID NO: 687 - DNA, 120 bp, Artificial Sequence
  ENSG00000001626_55 (sequence is synthesized)
agctaattacatatatgaatgtttgtaatattttgaaatcatatctgcatggtgaattgtttcaaagaaaaacactaaaaatttaaagtatagcagctttaaatactaaataaataatac

SEQ ID NO: 688 - DNA, 120 bp, Artificial Sequence
  ENSG00000001626_56 (sequence is synthesized)
aagtcatcttaataatgtattccaaaaatggttttgttttctcacctctagtccttgagtacactaatgggatctttatcttcagaaaagctgctaatataaaacacaatgccttatcac

SEQ ID NO: 689 - DNA, 120 bp, Artificial Sequence
  ENSG00000001626_57 (sequence is synthesized)
taacaaatcaaattagatataatctaagcaggtgtatgtgagcaggaaaaaaaccacattagagccacctgaatctagatatgatctatgattttgacagcattcagttttgttctcaag

SEQ ID NO: 690 - DNA, 120 bp, Artificial Sequence
  ENSG00000001626_58 (sequence is synthesized)
atcagtgacataatctttactacatattgttatttttaaggtatgtgcagttttgtaacagcaatacaatgcaggtatgtacacttcattgtaaataaccattctggcgaaaaaaaggct

SEQ ID NO: 691 - DNA, 120 bp, Artificial Sequence
  ENSG00000001626_59 (sequence is synthesized)
tttatgaaaaaaaaggaaggtgttttaactctgagcacccaattcctggtgctccatttaagtatttaagatgtttctaattagggttgagtcttgttgtgaacagctagtgaaatacta

SEQ ID NO: 692 - DNA, 120 bp, Artificial Sequence
  ENSG00000001626_60 (sequence is synthesized)
acatgggagggcaagttttatgagcattgataaattgaacacaaattatctgttacagagactacaaagagctatagataaaaagtacagcaaaatgatttcatgaaatcaatattttat

SEQ ID NO: 693 - DNA, 120 bp, Artificial Sequence
  ENSG00000001626_61 (sequence is synthesized)
tcagtgtcaaagcatcttaactgaattgtatgcttatgctgtcaagttaccagaaagaaaatgagaagttacattgcttgtcatgagttggatggtgatagtcacaactgtaaaaacagt

SEQ ID NO: 694 - DNA, 120 bp, Artificial Sequence
  ENSG00000001626_62 (sequence is synthesized)
gcagataatgatggttgcagggcccctcttcaatggaggcattgccagccttctggccatgaaggagaaagtgatttcaactaacccaggaaactcttacctctaaatggagatacttcc

SEQ ID NO: 695 - DNA, 120 bp, Artificial Sequence
  ENSG00000001626_63 (sequence is synthesized)
gctttgttagactgtgttcagtaagtgaatcccagtagcctgaagcaatgtgttagcagaatctatttgtaacattattattgtacagtagaatcaatattaaacacacatgttttatta

SEQ ID NO: 696 - DNA, 120 bp, Artificial Sequence
  ENSG00000001626_64 (sequence is synthesized)
aatggtgactctagtaaccagccttggttctgctgagcttctctgcgtcttctcaggagacacaggctacagagcttgaaggctgaggattcttccagggtcacttcaggggcaaatctg

SEQ ID NO: 697 - DNA, 120 bp, Artificial Sequence
  ENSG00000001626_65 (sequence is synthesized)
aaactttcttcaggacaggaatcaacgagatcttctcacttacttatacctgggggaggaactgtatgaaatccacccaagaaccagtcatgctaagggccaaacctatagacaaaaaaa

SEQ ID NO: 698 - DNA, 120 bp, Artificial Sequence
  ENSG00000001626_66 (sequence is synthesized)
atcaccaaagtgaaatctcttggggtcagattttcagactcagctaatcttaagtggaacagcaatgtaactctaatatatacttggctagtggtttgggaaaatataaaaacactgaaa

SEQ ID NO: 699 - DNA, 120 bp, Artificial Sequence
  ENSG00000001626_67 (sequence is synthesized)
caacaaatatgtaatggagaataaagaggggacaaatctggggtccaggccacctgcatttacagggaaaggaaagagaagtctagactgcaagaagctagcttagaaaggcaagagctt

SEQ ID NO: 700 - DNA, 120 bp, Artificial Sequence
  ENSG00000001626_68 (sequence is synthesized)
aaaaggctgagctacatctggtgagggaacacatcctagtccatcctcgtcacctccatgtgtacttgatggtatgttaagggcgaatctgcttagtatgttctgcttttgttttgtaaa

SEQ ID NO: 701 - DNA, 120 bp, Artificial Sequence
  ENSG00000001626_69 (sequence is synthesized)
gtatttgggaagaacaggaggccagtgaggcctcttgatgtgaatcaggacagagaaagggattgagtggtagcctggggctcaaacatcctggtaaaccatgacaagagctgttactcc

SEQ ID NO: 702 - DNA, 120 bp, Artificial Sequence
  ENSG00000001626_70 (sequence is synthesized)
aaagcttggttcttttctccgacacgcaaaggaagcgctaaggaacccgactaggatcatcgggaaaaggaggaggaggaggaaggcaggctccggggaagctggtggcagcgggtcctg

SEQ ID NO: 703 - DNA, 120 bp, Artificial Sequence
  ENSG00000001626_71 (sequence is synthesized)
ggtctggcggaccctgacgcgaaggagggtctaggaagctctccggggagccggttctcccgccggtggcttcttctgtcctccagcgttgccaactggacctaaagagaggccgcgact

SEQ ID NO: 704 - DNA, 81 bp, Artificial Sequence
  ENSG00000001626_72 (sequence is synthesized)
atcctcctgcctcagcttctccaagctggaccagaccaattttgaggaaaggatacagacagcgcctggaattgtcagaca

SEQ ID NO: 705 - DNA, 120 bp, Artificial Sequence
  ENSG00000001626_73 (sequence is synthesized)
ggagatgagaacagaatattatcttcctcatttttgtgtttttgttcaactctaatgtctgcaaagcacttgcgtatgtaatgatgctcagtgtcataggagcaggcaggacatctccaa

SEQ ID NO: 706 - DNA, 120 bp, Artificial Sequence
  ENSG00000001629_0 (sequence is synthesized)
gggtcggcggccgggctgctgccgttcctgctccttttcactggacctgcagtctctcaggggctggtggcaggcgactaggagactagggtggtggcggtgggggtgccagcggctgag

SEQ ID NO: 707 - DNA, 120 bp, Artificial Sequence
  ENSG00000001629_1 (sequence is synthesized)
ccggagccggagccggaggcgggggaggggaagagggcggccggggctgcgagcgcgcaaggctggaacatgagccgggcttgaccgcgaggcggaggcaagagccaccgccccctcttc

SEQ ID NO: 708 - DNA, 120 bp, Artificial Sequence
  ENSG00000001629_2 (sequence is synthesized)
agagccaccgccccctcttcccctcccccgagtgaggcggcgcagcggccggagagggatggggggcgcccacccagtctgagcctcgccgcgggcgccttcggctcacgcagcgcttcc

SEQ ID NO: 709 - DNA, 120 bp, Artificial Sequence
  ENSG00000001629_3 (sequence is synthesized)
cctcggccacatcagcctccgcctggcgggtgcacccgggccggcgaggaaggggcaaccgtccgggtgggtggggcgggctgggtacctgaggtcaccagctcggctgtagaggcaggg

SEQ ID NO: 710 - DNA, 120 bp, Artificial Sequence
  ENSG00000001629_4 (sequence is synthesized)
gcggcggaggcggaactgcggagttgctgggtccaccgacccttaccctcagcgagagaagtaaccaatgtgaaagatgttgcagaagtgttccagaagtggctgaagatagaaggaaaa

SEQ ID NO: 711 - DNA, 120 bp, Artificial Sequence
  ENSG00000001629_5 (sequence is synthesized)
aagtgccactgcctatcagaaaaaacaaaacaaaacatgggaaatacaaccaccaaattccgtaaagcactcatcaatggtgatgaaaacctggcctgccaaatatatgaaaacaatcct

SEQ ID NO: 712 - DNA, 120 bp, Artificial Sequence
  ENSG00000001629_6 (sequence is synthesized)
cagctaaaagaatctcttgatccaaatacatcttatggggagccctaccagcacaatactccattacattatgctgctagacatggaatgaataaaatattagggacttttcttggtaga

SEQ ID NO: 713 - DNA, 120 bp, Artificial Sequence
  ENSG00000001629_7 (sequence is synthesized)
gatggaaatccaaataaacggaatgtgcacaatgaaacatctatgcatttgttgtgtatgggacctcaaattatgatatctgaaggagcccttcatcctcgcttggcacgccccacagaa

SEQ ID NO: 714 - DNA, 120 bp, Artificial Sequence
  ENSG00000001629_8 (sequence is synthesized)
gatgatttcagaagagcagattgtctgcagatgatcttaaaatggaaaggagcaaaacttgaccagggtgaatatgagagagcagctattgatgctgttgataacaaaaaaaacacaccc

SEQ ID NO: 715 - DNA, 120 bp, Artificial Sequence
  ENSG00000001629_9 (sequence is synthesized)
ttgcactatgctgctgcctcagggatgaaagcctgtgtagagcttttagtaaaacatggaggagacttgtttgctgagaatgaaaataaagatactccttgtgattgtgctgaaaagcaa

SEQ ID NO: 716 - DNA, 120 bp, Artificial Sequence
  ENSG00000001629_10 (sequence is synthesized)
caccacaaagatttggccctcaatctggaatctcaaatggtattctcacgggatcccgaggctgaagaaatagaagctgaatatgctgcattagacaaacgagagccatatgaaggatta

SEQ ID NO: 717 - DNA, 120 bp, Artificial Sequence
  ENSG00000001629_11 (sequence is synthesized)
aggcctcaggatcttcgtagactaaaagatatgcttattgtggaaactgcagacatgcttcaggctcctctctttactgctgaagctttacttcgagctcatgactgggacagggagaaa

SEQ ID NO: 718 - DNA, 120 bp, Artificial Sequence
  ENSG00000001629_12 (sequence is synthesized)
ttacttgaagcttggatgtccaacccggagaactgctgccaacgatcaggtgttcaaatgccaactccaccaccaagtgggtataatgcctgggacacgctcccatctccaagaactcca

SEQ ID NO: 719 - DNA, 120 bp, Artificial Sequence
  ENSG00000001629_13 (sequence is synthesized)
aggactacacgctcttctgtcacctccccagatgaaatcagcttatctcctggggatttagacaccagtttgtgtgacatttgtatgtgcagtatctctgtatttgaagaccctgtggat

SEQ ID NO: 720 - DNA, 120 bp, Artificial Sequence
  ENSG00000001629_14 (sequence is synthesized)
atgccctgtggacatgacttttgtagaggatgttgggagtcgtttttgaatctgaaaattcaagaaggtgaagctcacaacattttttgccctgcatatgattgcttccaacttgtacct

SEQ ID NO: 721 - DNA, 120 bp, Artificial Sequence
  ENSG00000001629_15 (sequence is synthesized)
gtggatatcatagaaagtgtagtttcaaaggagatggacaaacgatacctacagtttgatattaaggcctttgttgaaaataatcctgccattaaatggtgtcctactccaggctgtgac

SEQ ID NO: 722 - DNA, 120 bp, Artificial Sequence
  ENSG00000001629_16 (sequence is synthesized)
agagcagtaagactaacgaaacaagggtcaaatacatctggatctgatacactcagcttcccattgctgagagctcctgctgttgattgtggaaaaggacacctcttctgctgggagtgc

SEQ ID NO: 723 - DNA, 120 bp, Artificial Sequence
  ENSG00000001629_17 (sequence is synthesized)
cttggtgaagcacatgagccttgtgactgccaaacatggaagaattggctgcaaaaaataaccgaaatgaaaccagaagaacttgtgggagttagtgaagcctacgaggatgccgccaat

SEQ ID NO: 724 - DNA, 120 bp, Artificial Sequence
  ENSG00000001629_18 (sequence is synthesized)
tgtctctggttattaactaactccaagccttgtgccaactgtaagtctccaatacagaagaatgaaggctgcaatcacatgcagtgtgctaagtgcaagtatgacttttgctggatttgc

SEQ ID NO: 725 - DNA, 120 bp, Artificial Sequence
  ENSG00000001629_19 (sequence is synthesized)
cttgaagagtggaaaaaacatagttcgtccactggaggttattacagatgtactcgctatgaagtcattcaacacgtggaggagcaatccaaggaaatgactgtggaggctgagaaaaaa

SEQ ID NO: 726 - DNA, 120 bp, Artificial Sequence
  ENSG00000001629_20 (sequence is synthesized)
cacaaacgatttcaggaacttgacagatttatgcactattatacaagatttaaaaaccatgagcatagttatcagctagaacaacgccttcttaaaacagccaaagaaaagatggagcaa

SEQ ID NO: 727 - DNA, 120 bp, Artificial Sequence
  ENSG00000001629_21 (sequence is synthesized)
ttgagcagagctctcaaagaaactgaaggaggctgtccagataccactttcattgaagatgcagttcatgtgctcttaaaaactcggcgcattctcaagtgttcttatccatatggattt

SEQ ID NO: 728 - DNA, 120 bp, Artificial Sequence
  ENSG00000001629_22 (sequence is synthesized)
ttcttggaacctaaaagcacaaagaaagaaatttttgaactaatgcaaacagacctagaaatggtcactgaagaccttgcccagaaagtcaataggccttaccttcgcacaccccgccac

SEQ ID NO: 729 - DNA, 120 bp, Artificial Sequence
  ENSG00000001629_23 (sequence is synthesized)
aagatcatcaaagcagcatgccttgtacagcagaagaggcaagaattcctggcatctgtggctcggggagtagctcctgcagactcaccagaagctccaaggcgcagctttgctggtgga

SEQ ID NO: 730 - DNA, 120 bp, Artificial Sequence
  ENSG00000001629_24 (sequence is synthesized)
acatgggattgggaatatttaggatttgcatcaccagaggaatatgctgaatttcagtatcggaggaggcacagacaacgtcgtcgaggagatgttcacagtctactcagtaatcctcca

SEQ ID NO: 731 - DNA, 120 bp, Artificial Sequence
  ENSG00000001629_25 (sequence is synthesized)
gaccctgatgagccaagtgaaagcactttagatattccagaaggcggcagcagcagccgcaggcctggcacatccgtggtaagttctgcatctatgagtgtgctgcacagctcttccctg

SEQ ID NO: 732 - DNA, 120 bp, Artificial Sequence
  ENSG00000001629_26 (sequence is synthesized)
tatcactgcaagagtctgggctggccctcgatgaagaaactagagacttcctcagtaatgaagcatccttaggtgcgataggcacttctttaccttccaggctggactctgtccccagaa

SEQ ID NO: 733 - DNA, 120 bp, Artificial Sequence
  ENSG00000001629_27 (sequence is synthesized)
atacagatagccctcgggctgcattgagcagctctgagcttttggaacttggtgacagcctcatgagactaggagcagagaatgacccattttcaactgacaccctgagctcacaccctc

SEQ ID NO: 734 - DNA, 120 bp, Artificial Sequence
  ENSG00000001629_28 (sequence is synthesized)
tcagtgaggcaagaagtgatttctgtccctcatctagtgatcctgactcagctggccaggaccccaacatcaatgacaatcttctcggcaacatcatggcttggtttcatgacatgaacc

SEQ ID NO: 735 - DNA, 120 bp, Artificial Sequence
  ENSG00000001629_29 (sequence is synthesized)
ctcagagtattgccctgattcctccagcaactacagaaatcagtgcagattcccagctcccctgtatcaaagatgggtcagaaggtgtgaaggatgtggaactggtgctgccagaagatt

SEQ ID NO: 736 - DNA, 120 bp, Artificial Sequence
  ENSG00000001629_30 (sequence is synthesized)
caatgtttgaagatgccagtgtcagtgaaggtagaggaacccagatagaagaaaatcctttggaagaaaatattctggcgggggaagcagcatctcaagctggtgacagtggtaacgagg

SEQ ID NO: 737 - DNA, 120 bp, Artificial Sequence
  ENSG00000001629_31 (sequence is synthesized)
cagccaacagaggagatggttcagatgtttcaagtcaaacacctcaaacctcaagtgactggcttgaacaagtacatttagtgtgaactgcacacatctgggctctaaatgaattacagg

SEQ ID NO: 738 - DNA, 120 bp, Artificial Sequence
  ENSG00000001629_32 (sequence is synthesized)
tacagatggtatgctaggtggagtatgcttgatagagactttgattcacttaattccaactcagtgataaaccactgacattagggttgaatacagagaagttcccttgaatggtagctt

SEQ ID NO: 739 - DNA, 120 bp, Artificial Sequence
  ENSG00000001629_33 (sequence is synthesized)
cattttttattttaaccttacagggaatttcctttgtacttaattgaatagcttttcccctttttgctgacaaaaagaagagcaagagaaagagaaacaaaaatgaaataaataagttgt

SEQ ID NO: 740 - DNA, 120 bp, Artificial Sequence
  ENSG00000001629_34 (sequence is synthesized)
attccacactctaagaaaatgcagtcctctatttagcctaggcttgacaatacttaaattgaacatttaaactaaaggcttactccctaatctttgggtggctttcctttaaaaaaaaaa

SEQ ID NO: 741 - DNA, 120 bp, Artificial Sequence
  ENSG00000001629_35 (sequence is synthesized)
aaaaagttttcttcattctagaaatttattttggataaatccgataacatatatgtcctcaatctctttgtgctcttccataacttacttcctttttgtctgagcaatgtgaattgaagt

SEQ ID NO: 742 - DNA, 120 bp, Artificial Sequence
  ENSG00000001629_36 (sequence is synthesized)
ctctttagtaccacatctaccatagtgtaattagttttaattttcacatgaatcaaaggtttcctttcatgtctatttacagtccaattgtgccaaactcttacttgtgtgctgactaac

SEQ ID NO: 743 - DNA, 120 bp, Artificial Sequence
  ENSG00000001629_37 (sequence is synthesized)
aaggcatttaggtgtgcagcatcctagagtgctccagggcagtgtcagcgttctcgggagtaaaaggtgccacttggtagcaatgatattccagaattaaatgggtttttgttgccatgg

SEQ ID NO: 744 - DNA, 120 bp, Artificial Sequence
  ENSG00000001629_38 (sequence is synthesized)
agactgcatttatataaatgtagcctgtagcttaagttaactaaacctaatgctgctgttaaaaacagtttattttaatattaaaatacagttgattagcaacagcggtgctgtatttta

SEQ ID NO: 745 - DNA, 120 bp, Artificial Sequence
  ENSG00000001629_39 (sequence is synthesized)
agagacactttattggaagtgcaatcatagttatttgttttcacaattttacagtgcattctaattactgatgggtgcaattacttttaatcgtgttttataaaatagaaaaaaagtgga

SEQ ID NO: 746 - DNA, 120 bp, Artificial Sequence
  ENSG00000001629_40 (sequence is synthesized)
gttttcatgagttatagtaaatcccacgattattaagaaattcagtaaaacatcctgcgcaacatgttaccgtgcctttgcctaacctaaatggatagttgccagttaaataagtgagta

SEQ ID NO: 747 - DNA, 120 bp, Artificial Sequence
  ENSG00000001629_41 (sequence is synthesized)
attcaaatttcaatgtctcttctgaagtaactatgctatgaattgcaaagacctccataaaaccacccatggccttgcttttacactaactataacaactaaatgttcaatcagtttgtt

SEQ ID NO: 748 - DNA, 120 bp, Artificial Sequence
  ENSG00000001629_42 (sequence is synthesized)
tgcctaactagcaaatgctgacatgtgtttgttctactgcgcaatactcatttgctgtgtgattactgtttagtgttgaaaaaaatcaacttcctagttatcagtgtcttactgtgaaga

SEQ ID NO: 749 - DNA, 120 bp, Artificial Sequence
  ENSG00000001629_43 (sequence is synthesized)
aaatactggtcttagttgtaattaggatacaatggtacagtgtgtaattaaaactagagtaaactgttggaatggctgttttacttaaatattatcaaaactagcataacataagcaaaa

SEQ ID NO: 750 - DNA, 120 bp, Artificial Sequence
  ENSG00000001629_44 (sequence is synthesized)
tagataagtacaacactccatttagtgttttgccagattgttaccagaagtctacagataccaaactttcagttctgagtttgtacaggcaagtcctgggctgggtaaaaagttatatta

SEQ ID NO: 751 - DNA, 120 bp, Artificial Sequence
  ENSG00000001629_45 (sequence is synthesized)
atattgttatccacaagagatgtgattatgggttttgattactttttttttttccaaaccctgcttttgaaatatccttgtacttaaaattcatattgctaagacactgtattagaatat

SEQ ID NO: 752 - DNA, 120 bp, Artificial Sequence
  ENSG00000001629_46 (sequence is synthesized)
ttaatattccccagatcctcttaggataaactgtgggaatcctcctatgccatggatatcaaaggtccacattagtttttatttctccagtgatcagaaacattgatatcaatccctatt

SEQ ID NO: 753 - DNA, 120 bp, Artificial Sequence
  ENSG00000001629_47 (sequence is synthesized)
aaattagtggggggaatattaactttatctacagtgtattactgtatattaaactgaaatagtccattaaaggatttttttataaatttattttggattaaaaatatcaacaccaataag

SEQ ID NO: 754 - DNA, 120 bp, Artificial Sequence
  ENSG00000001629_48 (sequence is synthesized)
tttttagaccaagttgtaatttttccaatatagagtctttgcatcacactgaggcatcttgcacagctgcagttaaggtgagaaagaatgctctgtgtgaagacagtgtacacaatgggt

SEQ ID NO: 755 - DNA, 120 bp, Artificial Sequence
  ENSG00000001629_49 (sequence is synthesized)
tccggtttccttgcaccttgtgcagtatcctttatttctgtgctgttctctcctgagcatgaaaaatgatcattatccaatttgtatttccttggtacatattttaaaaacaacacagtc

SEQ ID NO: 756 - DNA, 120 bp, Artificial Sequence
  ENSG00000001629_50 (sequence is synthesized)
attgactttacaattcagtaatgaagtttggcaaagcctattttgtaaacaagttaattttataatgtaaaaaaaaaaagttaatctaaccttgacttgttatttgcactttcatagtct

SEQ ID NO: 757 - DNA, 120 bp, Artificial Sequence
  ENSG00000001629_51 (sequence is synthesized)
atacttgatacattcccactttatatacagtaggattctacaaacgtgtagatgtttggccaaatgaatgctgttaataatatgtaaaattctttgattaaacatttattacttaaacta

SEQ ID NO: 758 - DNA, 120 bp, Artificial Sequence
  ENSG00000001629_52 (sequence is synthesized)
ggccctcaatctggaatctcaaatggtattctcacgggatcccgaggctgaagaaatagaagctgaatatgctgcattagacaaacgagagtattctaaatatcctgtcatcttcatagc

SEQ ID NO: 759 - DNA, 120 bp, Artificial Sequence
  ENSG00000001629_53 (sequence is synthesized)
cggagttctgagaccagcctgggctatagcaagactctatctacaaaaaattttaaaaatttgccaggaatggtggcccacactcattgtcctaactactcaggaggctgaggcaagagg

SEQ ID NO: 760 - DNA, 120 bp, Artificial Sequence
  ENSG00000001629_54 (sequence is synthesized)
atcacttgagtccaagagttcaaggctgccatgagctatgatcatgccaggacactccagcctggcgacaaagtgagaccctgtctctaactttaaaaataaataaataataacatctag

SEQ ID NO: 761 - DNA, 86 bp, Artificial Sequence
  ENSG00000001629_55 (sequence is synthesized)
gaggccgagcagtagaagcaacatagcaagactctgactctaaaaataaaaaaataaaaaataaaaaacctcccttcaaggaaagc

SEQ ID NO: 762 - DNA, 120 bp, Artificial Sequence
  ENSG00000001629_56 (sequence is synthesized)
taaaaaaataaaaaataaaaaacctcccttcaaggaaagccttacttaaatgagtaatatggttgtagtattaattagataacaagatccttgaaatcatcaggcatataaaatagggct

SEQ ID NO: 763 - DNA, 120 bp, Artificial Sequence
  ENSG00000001629_57 (sequence is synthesized)
gttctaatgtagcactggggcttgcaagtattcctaatttatctaggcaattgtaatgactgttgaaaactttctttttccattttaccttttgtgtttccttggcatggcaaaacctga

SEQ ID NO: 764 - DNA, 120 bp, Artificial Sequence
  ENSG00000001629_58 (sequence is synthesized)
ttcagccaagtgattttataagatgtgtataaaatcacaaactttttcccctggaaaaaagtgtgtactttgttttatttgcattttaaaaattgcatgctctcttgtattttataacct

SEQ ID NO: 765 - DNA, 120 bp, Artificial Sequence
  ENSG00000001630_0 (sequence is synthesized)
agtaggagacctggggcaaggccccctgtggacgaccatctgccagcttctctcgttccgtcgattgggaggagcggtggcgacctcggccttcagtgtttccgacggagtgaatggcgg

SEQ ID NO: 766 - DNA, 120 bp, Artificial Sequence
  ENSG00000001630_1 (sequence is synthesized)
cggcggctgggatgctgctgctgggcttgctgcaggcgggtgggtcggtgctgggccaggcgatggagaaggtgacaggcggcaacctcttgtccatgctgctgatcgcctgcgccttca

SEQ ID NO: 767 - DNA, 120 bp, Artificial Sequence
  ENSG00000001630_2 (sequence is synthesized)
ccctcagcctggtctacctgatccgtctggccgccggccacctggtccagctgcccgcaggggtgaaaagtcctccatacattttctccccaattccattccttgggcatgccatagcat

SEQ ID NO: 768 - DNA, 120 bp, Artificial Sequence
  ENSG00000001630_3 (sequence is synthesized)
ttgggaaaagtccaattgaatttctagaaaatgcatatgagaagtatggacctgtatttagttttaccatggtaggcaagacatttacttaccttctggggagtgatgctgctgcactgc

SEQ ID NO: 769 - DNA, 120 bp, Artificial Sequence
  ENSG00000001630_4 (sequence is synthesized)
tttttaatagtaaaaatgaagacctgaatgcagaagatgtctacagtcgcctgacaacacctgtgtttgggaagggagttgcatacgatgtgcctaatccagttttcttggagcagaaga

SEQ ID NO: 770 - DNA, 120 bp, Artificial Sequence
  ENSG00000001630_5 (sequence is synthesized)
aaatgttaaaaagtggccttaacatagcccactttaaacagcatgtttctataattgaaaaagaaacaaaggaatactttgagagttggggagaaagtggagaaaaaaatgtgtttgaag

SEQ ID NO: 771 - DNA, 120 bp, Artificial Sequence
  ENSG00000001630_6 (sequence is synthesized)
ctctttctgagctcataattttaacagctagccattgtttgcatggaaaggaaatcagaagtcaactcaatgaaaaggtagcacagctgtatgcagatttggatggaggtttcagccatg

SEQ ID NO: 772 - DNA, 120 bp, Artificial Sequence
  ENSG00000001630_7 (sequence is synthesized)
cagcctggctcttaccaggttggctgcctttgcctagtttcagacgcagggacagagctcatcgggaaatcaaggatattttctataaggcaatccagaaacgcagacagtctcaagaaa

SEQ ID NO: 773 - DNA, 120 bp, Artificial Sequence
  ENSG00000001630_8 (sequence is synthesized)
aaattgatgacattctccaaactttactagatgctacatacaaggatgggcgtcctttgactgatgatgaagtagcagggatgcttattggattactcttggcagggcagcatacatcct

SEQ ID NO: 774 - DNA, 120 bp, Artificial Sequence
  ENSG00000001630_9 (sequence is synthesized)
caactactagtgcttggatgggcttctttttggccagagacaaaacacttcaaaaaaaatgttatttagaacagaaaacagtctgtggagagaatctgcctcctttaacttatgaccagc

SEQ ID NO: 775 - DNA, 120 bp, Artificial Sequence
  ENSG00000001630_10 (sequence is synthesized)
tcaaggatctaaatttacttgatcgctgtataaaagaaacattaagacttagacctcctataatgatcatgatgagaatggccagaactcctcagactgtggcagggtataccattcctc

SEQ ID NO: 776 - DNA, 120 bp, Artificial Sequence
  ENSG00000001630_11 (sequence is synthesized)
caggacatcaggtgtgtgtttctcccactgtcaatcaaagacttaaagactcatgggtagaacgcctggactttaatcctgatcgctacttacaggataacccagcatcaggggaaaagt

SEQ ID NO: 777 - DNA, 120 bp, Artificial Sequence
  ENSG00000001630_12 (sequence is synthesized)
ttgcctatgtgccatttggagctgggcgtcatcgttgtattggggaaaattttgcctatgttcaaattaagacaatttggtccactatgcttcgtttatatgaatttgatctcattgatg

SEQ ID NO: 778 - DNA, 120 bp, Artificial Sequence
  ENSG00000001630_13 (sequence is synthesized)
cacacccctgaaaacccagttatccgttacaaacgaagatcaaaatgaaaaaggttgcaaggaacgaatatatgtgattatcactgtaagccacaaaggcattcgaagagaatgaagtgt

SEQ ID NO: 779 - DNA, 120 bp, Artificial Sequence
  ENSG00000001630_14 (sequence is synthesized)
acaaaacaactcttgtagtttactgtttttttaagtgtgtaattctaaaagccagtttatgatttaggattttgttaactgaatggttctatcaaatataatagcatttgaaacattttc

SEQ ID NO: 780 - DNA, 120 bp, Artificial Sequence
  ENSG00000001630_15 (sequence is synthesized)
taatagttatgatacttatacatgtgctttcaggaagttccttggtgaaacaattgttgaggggggatctaggtaattggcagattctaaataatataatttccagatagtaattttaag

SEQ ID NO: 781 - DNA, 120 bp, Artificial Sequence
  ENSG00000001630_16 (sequence is synthesized)
agtactcatcgctcttgccaaataagttcagggtattcaaatcttggactagtcctgcaaggtataaagaataaaaatcccagtgagatacttggaaaccacagtttattattatttatc

SEQ ID NO: 782 - DNA, 120 bp, Artificial Sequence
  ENSG00000001630_17 (sequence is synthesized)
tgggcaattattgtgtgtgtgaggatggaagggtagggaataatcgaacatctaaagccttgaataagagaatactaattgttttggtatgatgatactcagaaatggagatattatagg

SEQ ID NO: 783 - DNA, 120 bp, Artificial Sequence
  ENSG00000001630_18 (sequence is synthesized)
aaaaagaaatcctttggaattttaactaaaatcactgcatatgggaaattaagagatccaggaccatatttgataagagttcctaaaaataatgtaattattaatgctaaagactgctca

SEQ ID NO: 784 - DNA, 120 bp, Artificial Sequence
  ENSG00000001630_19 (sequence is synthesized)
tgtatcttgatctaattactaaataattacatatttatttacctgataaatatgtatctagttctacaaggtcacatttatgtggaagtccaaagtcaagtccttaggggataattttgt

SEQ ID NO: 785 - DNA, 60 bp, Artificial Sequence
  ENSG00000001630_20 (sequence is synthesized)
tgtggaagtccaaagtcaagtccttaggggataattttgttttggctcagttgttccctg

SEQ ID NO: 786 - DNA, 72 bp, Artificial Sequence
  ENSG00000001630_21 (sequence is synthesized)
cctgcttcctctctagaatccaattagggatgtttgttactactcatattgattaaaacagttaacaaactt

SEQ ID NO: 787 - DNA, 120 bp, Artificial Sequence
  ENSG00000001630_22 (sequence is synthesized)
tttgttactactcatattgattaaaacagttaacaaacttttttctttttaaaatgtgagatcagtgaactctggttttaagataatctgaaacaaggtccttgggagtaataaaattgg

SEQ ID NO: 788 - DNA, 120 bp, Artificial Sequence
  ENSG00000001630_23 (sequence is synthesized)
tcacattctgtaaagcacattctgtttaggaatcaacttatctcaaattgtaactcggggcctaactatatgagatggctgaaaaaataccacatcgtctgttttcactaggtgatgcca

SEQ ID NO: 789 - DNA, 120 bp, Artificial Sequence
  ENSG00000001630_24 (sequence is synthesized)
aaatattttgctttatgtatattacagttctttttaaaacactggaagactcatgttaaactctaattgtgaaggcagaatctctgctaatttttcagattaaaattctctttgaaaaaa

SEQ ID NO: 790 - DNA, 120 bp, Artificial Sequence
  ENSG00000001630_25 (sequence is synthesized)
acagagcgcgccgtcgccgctcgagctcgccctgagatccctccgctcagcgccttcaacgccgtgtcccggcaccccgcacccgggcacacaaaaaacgggtcgcccgcgattctcagg

SEQ ID NO: 791 - DNA, 120 bp, Artificial Sequence
  ENSG00000001630_26 (sequence is synthesized)
ttttagtttgcctattatctagccagtttttaaatatatgtacagatggttcttgatttatgtgattcaacttataattttttgactttatgatggatttatcaggatgtaaacctatca

SEQ ID NO: 792 - DNA, 120 bp, Artificial Sequence
  ENSG00000001630_27 (sequence is synthesized)
taagtcaaggagcatctgagtatcccatgtatattcatgctttattacacaatgatctgattatttgtcagcacatttttaaattctctaatgaaatgtgtggcttttgtttatagactg

SEQ ID NO: 793 - DNA, 120 bp, Artificial Sequence
  ENSG00000001631_0 (sequence is synthesized)
gctccggctcagccgctggcacccccaccgccaccaccctagtctcctagtcgcctgccaccagcccctgagagactgcaggtccagtgaaaaggagcaggaacggcagcagcccggccg

SEQ ID NO: 794 - DNA, 120 bp, Artificial Sequence
  ENSG00000001631_1 (sequence is synthesized)
ccgacccggaagctctttcaccgccaaccgcgaggctgcaaagggtgtgaacccggaagcgatttcatagccacggtaacggcggggtggaaagctaaggcctttgaagacctgggaccc

SEQ ID NO: 795 - DNA, 120 bp, Artificial Sequence
  ENSG00000001631_2 (sequence is synthesized)
cgtagtttcgggagagggtgaggggtgaatggtgctgaggtgcgaggagagggaaggacagtaaagagcaggtgggcaggagggtctccgactccagagacctgagcttttggggcgcgg

SEQ ID NO: 796 - DNA, 120 bp, Artificial Sequence
  ENSG00000001631_3 (sequence is synthesized)
gtgggagcgcgggggaaccctcaagacggctttcttttggcgactgagggtttttctgccacaggaagctgggccgggctgctgtgcctgggaggagggaaggaggaatgagaaagcggt

SEQ ID NO: 797 - DNA, 120 bp, Artificial Sequence
  ENSG00000001631_4 (sequence is synthesized)
gacggtccctgccccccctcgccaggtgactgtcccacccatttagttgaatgtagcggccagagaggcactcgcggcagcccgtacgggtgggacctctcggtgtccttcgggaaacag

SEQ ID NO: 798 - DNA, 120 bp, Artificial Sequence
  ENSG00000001631_5 (sequence is synthesized)
gaggagcaagttcgactccagcgagggaaaacggagcctcaccagaagtctttcatctcggtggtccaactcaggatctcagcctcattattttcttacccttctggagtgcatatgtgc

SEQ ID NO: 799 - DNA, 120 bp, Artificial Sequence
  ENSG00000001631_6 (sequence is synthesized)
ctttacagtttctgtttgcaaacgctgtctagcatactaagaggatgttagcaaacctgttccatggacactaaatggcagttgtacatctcccctcatcagtcatagtgacaaccagaa

SEQ ID NO: 800 - DNA, 120 bp, Artificial Sequence
  ENSG00000001631_7 (sequence is synthesized)
atgccctccatattttccagtgatcccagtcttcaatgcgtctgtctcataatttgtaaacgtttattatcttgaagtcattgttaatctgtggtgaaaagtaattgctaaatagaaatt

SEQ ID NO: 801 - DNA, 120 bp, Artificial Sequence
  ENSG00000001631_8 (sequence is synthesized)
ctgagaagaaaaaggcctcatccttttcacatgatgtaggaaggtctgttgcatgagcaatgggaaatccagaaaacatagaagatgcatatgttgctgttattcgtccaaagaatactg

SEQ ID NO: 802 - DNA, 120 bp, Artificial Sequence
  ENSG00000001631_9 (sequence is synthesized)
ccagtctcaattctcgggaatacagagctaagtcatatgaaattttgttgcatgaagttcccattgaaggacagaaaaaaaagagaaagaaagttttattggaaacgaaacttcaaggca

SEQ ID NO: 803 - DNA, 120 bp, Artificial Sequence
  ENSG00000001631_10 (sequence is synthesized)
acagtgaaataacacaaggcatattggattacgtagtagaaaccaccaaaccaatttctcctgcaaaccagggtatcagaggaaaacgagttgtactaatgaaaaaatttcctctggatg

SEQ ID NO: 804 - DNA, 120 bp, Artificial Sequence
  ENSG00000001631_11 (sequence is synthesized)
gagagaagatgggcagagaagcatcattatttattgttccatcagttgtcaaagataatactaaatacacatataccccaggatgcccaattttttactgcttacaagatattatgcgag

SEQ ID NO: 805 - DNA, 120 bp, Artificial Sequence
  ENSG00000001631_12 (sequence is synthesized)
tctgtagtgaatccagtactcattttgctacacttacagcaaggatgttaatagccttggataagtggttagatgaacgtcatgcacaatctcactttattccagctttattccgacctt

SEQ ID NO: 806 - DNA, 120 bp, Artificial Sequence
  ENSG00000001631_13 (sequence is synthesized)
ctcctcttgagcggataaaaactaatgtcataaatcctgcatatgctactgaatcaggtcagacagaaaactcactacatatgggctatagtgcactagaaataaagagtaaaatgttag

SEQ ID NO: 807 - DNA, 120 bp, Artificial Sequence
  ENSG00000001631_14 (sequence is synthesized)
ccctagagaaagcagatacctgtatttacaaccctttgtttggatcagatcttcagtatacaaatcgggtagataaagtggtaataaatccatactttggtctaggagctccagactact

SEQ ID NO: 808 - DNA, 120 bp, Artificial Sequence
  ENSG00000001631_15 (sequence is synthesized)
caaaaatccaaatacctaaacaggaaaaatggcagagaagcatgagcagtgtcacagaagacaaggaacgacagtgggtagatgattttcctctccaccgaagcgcctgtgaaggagatt

SEQ ID NO: 809 - DNA, 120 bp, Artificial Sequence
  ENSG00000001631_16 (sequence is synthesized)
cagaattactaagccgtcttctcagtgaaagattttcagtcaaccagttagatagtgaccactgggcacccattcattatgcatgctggtatggaaaagttgaggccactcgcatattgt

SEQ ID NO: 810 - DNA, 120 bp, Artificial Sequence
  ENSG00000001631_17 (sequence is synthesized)
tagagaaaggaaagtgcaatccaaaccttttaaatggacaacttagttctcctcttcattttgctgctggaggaggacatgctgaaatagtacagattctcctaaaccacccagaaacgg

SEQ ID NO: 811 - DNA, 120 bp, Artificial Sequence
  ENSG00000001631_18 (sequence is synthesized)
tatgaaaaagttcgaatatacagaatggatgggtcatatcgttctgttgaattgaagcatggaaataataccacagtgcagcagataatggaaggaatgcgtctctctcaagaaactcag

SEQ ID NO: 812 - DNA, 120 bp, Artificial Sequence
  ENSG00000001631_19 (sequence is synthesized)
caatatttcactatatggatttgttcagaaaacctcagccttcaactcaaaccatatcataaacccttgcaacatgttcgtgactggccagaaatacttgctgaattgactaatctggat

SEQ ID NO: 813 - DNA, 120 bp, Artificial Sequence
  ENSG00000001631_20 (sequence is synthesized)
cctcaaagggaaacacctcagctttttctaagaagagatgtgagacttcccttggaagttgaaaaacagattgaagacccactagctattcttattctctttgatgaagccagatataat

SEQ ID NO: 814 - DNA, 120 bp, Artificial Sequence
  ENSG00000001631_21 (sequence is synthesized)
ttattgaagggcttttatacagctcctgatgctaagctgataacattggcaagtctgcttttgcaaatagtctatggaaattatgagagtaaaaaacacaagcaaggtttcctaaatgaa

SEQ ID NO: 815 - DNA, 120 bp, Artificial Sequence
  ENSG00000001631_22 (sequence is synthesized)
gaaaatctaaaatccatcgtacctgttaccaaactgaaaagtaaggcacctcactggacaaatcgcatacttcatgaatacaagaatctcagtacaagtgaaggtgtcagtaaagaaatg

SEQ ID NO: 816 - DNA, 120 bp, Artificial Sequence
  ENSG00000001631_23 (sequence is synthesized)
catcaccttcagcgcatgttcttacagaattgctgggaaattcctacttatggagcagcatttttcacaggacagatatttacaaaggcaagccccagcaatcataaagtcatccctgtg

SEQ ID NO: 817 - DNA, 120 bp, Artificial Sequence
  ENSG00000001631_24 (sequence is synthesized)
tatgtaggagtgaatataaaaggacttcatctcctcaacatggaaactaaggctttactcatcagtcttaagtatggttgttttatgtggcaattgggagatactgatacttgttttcag

SEQ ID NO: 818 - DNA, 120 bp, Artificial Sequence
  ENSG00000001631_25 (sequence is synthesized)
atccatagcatggaaaataaaatgagctttatagtacatacaaaacaggctggtctcgtggtaaaactgttaatgaagctaaatggacagttaatgcccactgaaagaaattcatgaaag

SEQ ID NO: 819 - DNA, 120 bp, Artificial Sequence
  ENSG00000001631_26 (sequence is synthesized)
agaagtaactgttactcaagccaccacattttgtaatgcagagttttttttccgtgaaagatttcttaaaatattacttttggccgagcatggtggctcacccctgtaattccagcactt

SEQ ID NO: 820 - DNA, 78 bp, Artificial Sequence
  ENSG00000001631_27 (sequence is synthesized)
ctgggtgtggtggcgggcgcctataatcctagctactagggaggccaaggtgggagatcgcttaggcacgctagcctg

SEQ ID NO: 821 - DNA, 120 bp, Artificial Sequence
  ENSG00000001631_28 (sequence is synthesized)
aaaaaaaaaaaaaaattactttcaacaaggcatatagtctcttgtaatatatatgtatactattacattgtacagaatctgtacttatgtttggtgtgtaatataccaattagttttata

SEQ ID NO: 822 - DNA, 120 bp, Artificial Sequence
  ENSG00000001631_29 (sequence is synthesized)
taatatcctcataagctattctaatttttgagagaaacacaaaaagttatagattgatagtctgtataatattagacaaaatagtaagctttataaaaagttatttttggtaaatggtaa

SEQ ID NO: 823 - DNA, 120 bp, Artificial Sequence
  ENSG00000001631_30 (sequence is synthesized)
ggaatttggggtggaatgtgatgagattaaaatgtagctttggtataacttcatgtgtatttcaaaatatactgaacgtcaacatgatttgaataaagaaaatgtattttctacttgaac

SEQ ID NO: 824 - DNA, 120 bp, Artificial Sequence
  ENSG00000001631_31 (sequence is synthesized)
cacataacactgttatttaaaacagttttctgcagtctataaacatttctcaacatttttttaaaagtcttagttaaaatgtaaatctgatatacagtagtgtttctcaaagtatagttc

SEQ ID NO: 825 - DNA, 120 bp, Artificial Sequence
  ENSG00000001631_32 (sequence is synthesized)
atgaactccttgcatcataattacctagatgcctcttaaaaatgaagatttcagagacccattctaaacaagggcattcactctctggaagtagcatggccttgtgaacttaaatttggt

SEQ ID NO: 826 - DNA, 120 bp, Artificial Sequence
  ENSG00000001631_33 (sequence is synthesized)
tttgttttttcttttttgctgttagaataatttcagacccaataaggaatttcgattattaaagttgagaaatttcacaaaactgcctggcacacaagcacacacatacatagacacatt

SEQ ID NO: 827 - DNA, 120 bp, Artificial Sequence
  ENSG00000001631_34 (sequence is synthesized)
ttaagtgataatctcttgatattagaagttgcatttgttaaatacatgctgtattttttatgagttgacttaatagtttatgtatattgactttgctttgtaggaagtaaatcaccagat

SEQ ID NO: 828 - DNA, 120 bp, Artificial Sequence
  ENSG00000001631_35 (sequence is synthesized)
atcttattgtttcatttaggaaagtagtgatatagatgaagagccaacttgatgaatgtgctattcataagctagaaactacagtttttccaaactaataaactgatgaattctaaataa

SEQ ID NO: 829 - DNA, 120 bp, Artificial Sequence
  ENSG00000001631_36 (sequence is synthesized)
atttttaatggtactatatgtaggccttattaaaattaagattgtatggttaagtaaagttaacaagaaagcctgatttatctttaattctgtgctaggtacttttgattctacatgaac

SEQ ID NO: 830 - DNA, 120 bp, Artificial Sequence
  ENSG00000001631_37 (sequence is synthesized)
aatacccttttcagttcccttcattctaatgtcctcaactgttaccaaataccctgttgactcccaaacctaagattttagcctcaacttcttttctgaacttcaaatcttaatttccaa

SEQ ID NO: 831 - DNA, 120 bp, Artificial Sequence
  ENSG00000001631_38 (sequence is synthesized)
gttatacttgttctaggtccatctaaatggtctacagagaacttcagttgaatcatagctggaaacagaatttatttcctctatttgcttcattctgtccttccactatattccctattt

SEQ ID NO: 832 - DNA, 120 bp, Artificial Sequence
  ENSG00000001631_39 (sequence is synthesized)
agccacggtaacggcggggtggaaagctaaggcctttgaagacctgggaccccgtagtttcgggagagggtgaggggtgaatggtgctgaggtttttggctttcatcgctttttctacat

SEQ ID NO: 833 - DNA, 120 bp, Artificial Sequence
  ENSG00000001631_40 (sequence is synthesized)
cacattgtttaaaatacttgtggagaaagattcttttaaaaatatacacatattaaaccaatttctttttatgttcctttacatttaacaaacttgcaaaaaaactcaagtgttttttaa

SEQ ID NO: 834 - DNA, 120 bp, Artificial Sequence
  ENSG00000001631_41 (sequence is synthesized)
tttattccagctttattccgaccttctcctcttgagcggataaaaactaatgtcataaatcctgcatatgctactgaatcaggtagataaagtggtaataaatccatactttggtctagg

SEQ ID NO: 835 - DNA, 120 bp, Artificial Sequence
  ENSG00000001631_42 (sequence is synthesized)
aatgccgttagaagtatcttttaattaatcaaatacatgtttatagtagaaattagttgtcatagatacagacactttgagaagaaaataatgaaaataatatatgtattaaaaaatggt

SEQ ID NO: 836 - DNA, 120 bp, Artificial Sequence
  ENSG00000001631_43 (sequence is synthesized)
ttttcaattctaatataaaaatgaaaaacccgaagataaggttgtcctggcctgggtacagcatgttaattttatttttcagaaatggtaaacactgccctggcttaagaattaagattt

SEQ ID NO: 837 - DNA, 120 bp, Artificial Sequence
  ENSG00000001631_44 (sequence is synthesized)
acctgttatgaaactatacatttaatattgagttactcttatcagtgaagaagtcattcaacctcttatgcctttgtctttctgtaagaacagggctaatgtcacctacatctcagtagt

SEQ ID NO: 838 - DNA, 120 bp, Artificial Sequence
  ENSG00000001631_45 (sequence is synthesized)
ttgaattttaacagtacttttatgttttttgaaaggagtttttattactataatggcacatacatttaaaaaatttatttgctgtatccattaacaaaacttttattaataaatgaagta

SEQ ID NO: 839 - DNA, 120 bp, Artificial Sequence
  ENSG00000001631_46 (sequence is synthesized)
tttgtatactgacttgatctttatagatcatatgaacatattatcacatgtgcccctaaagtatgtacagtattatgcatgtttttttgttaaaaaaatcaatttgcaatataaataaat

SEQ ID NO: 840 - DNA, 120 bp, Artificial Sequence
  ENSG00000001631_47 (sequence is synthesized)
taataaagtacttaactaacactaaattaaaattataaaaatctgaaggtaatattcacaagtgtcatatatcagagttagatagtaatctatctttttcatcttcactttcgaatggct

SEQ ID NO: 841 - DNA, 120 bp, Artificial Sequence
  ENSG00000001631_48 (sequence is synthesized)
atagccacggtaacggcggggtggaaagctaaggcctttgaagacctgggaccccgtagtttcgggagagggtttttggctttcatcgctttttctacatgtttttagcctcaccagaag

SEQ ID NO: 842 - DNA, 120 bp, Artificial Sequence
  ENSG00000001631_49 (sequence is synthesized)
gtataataatttttagaaaaagcattctgaactattatatttagagcagacaacataaatgtagatagtaagagaaaataggtgaagtttttaatatgtatttcaatatagttgtttcca

SEQ ID NO: 843 - DNA, 120 bp, Artificial Sequence
  ENSG00000002016_0 (sequence is synthesized)
attctcctctgcgcggcctccatctaagatctcttccccttgtccatagcctagatcgagctccctgtgtgcaccgcgcgctgcccgaggcgcaggtcaaccagaatcaagatgtctggg

SEQ ID NO: 844 - DNA, 120 bp, Artificial Sequence
  ENSG00000002016_1 (sequence is synthesized)
actgaggaagcaattcttggaggacgtgacagccatcctgctgctggcggcggctcagtgttatgctttggacagtgccagtacacagcagaagagtaccaggccatccagaaggccctg

SEQ ID NO: 845 - DNA, 120 bp, Artificial Sequence
  ENSG00000002016_2 (sequence is synthesized)
aggcagaggctgggcccagaatacataagtagccgcatggctggcggaggccagaaggtgtgctacattgagggtcatcgggtaattaatctggccaatgagatgtttggttacaatggc

SEQ ID NO: 846 - DNA, 120 bp, Artificial Sequence
  ENSG00000002016_3 (sequence is synthesized)
tgggcacactccatcacgcagcagaatgtggattttgttgacctcaacaatggcaagttctacgtgggagtctgtgcatttgtgagggtccagctgaaggatggttcatatcatgaagat

SEQ ID NO: 847 - DNA, 120 bp, Artificial Sequence
  ENSG00000002016_4 (sequence is synthesized)
gttggttatggtgttagtgagggcctcaagtccaaggctttatctttggagaaggcaaggaaggaggcggtgacagacgggctgaagcgagccctcaggagttttgggaatgcacttgga

SEQ ID NO: 848 - DNA, 120 bp, Artificial Sequence
  ENSG00000002016_5 (sequence is synthesized)
aactgtattctggacaaagactacctgagatcactaaataagcttccacgccagttgcctcttgaagtggatttaactaaagcgaagagacaagatcttgaaccgtctgtggaggaggca

SEQ ID NO: 849 - DNA, 120 bp, Artificial Sequence
  ENSG00000002016_6 (sequence is synthesized)
agatacaacagctgccgaccgaacatggccctgggacacccacagctgcagcaggtgacctccccttccagacccagccatgctgtgataccggcggaccaggactgcagctcccgaagc

SEQ ID NO: 850 - DNA, 120 bp, Artificial Sequence
  ENSG00000002016_7 (sequence is synthesized)
ctgagctcatccgccgtggagagcgaggccacgcaccagcggaagctccggcagaagcagctgcagcagcagttccgggagcggatggagaagcagcaggttcgagtctccacgccgtca

SEQ ID NO: 851 - DNA, 120 bp, Artificial Sequence
  ENSG00000002016_8 (sequence is synthesized)
gctgagaagagtgaggcagcgcctccggcccctcctgtgacgcacagcactcctgtaactgtctcagaaccactcctggagaaagacttccttgcaggagtgactcaagaattaatcaag

SEQ ID NO: 852 - DNA, 120 bp, Artificial Sequence
  ENSG00000002016_9 (sequence is synthesized)
actcttgaagacaactctgaaaagtgggctgtgactcccgatgcaggggatggtgtggtcaagccctcgtctagagcagacccagcccagacctctgacacattagccttgaacaaccag

SEQ ID NO: 853 - DNA, 120 bp, Artificial Sequence
  ENSG00000002016_10 (sequence is synthesized)
atggtgacccagaacaggactccacacagcgtttgccaccagaaaccacaagcaaaatctggatcttgggacctccaaacttatagcgctgaccaacgcacaacaggaaactgggaatct

SEQ ID NO: 854 - DNA, 120 bp, Artificial Sequence
  ENSG00000002016_11 (sequence is synthesized)
cataggaagagccaggacatgaagaaaaggaaatatgatccatcttaactgaggctcaggccacataattggactctgtcacaaagggactttggaaaactactttttggtcatgaaatt

SEQ ID NO: 855 - DNA, 120 bp, Artificial Sequence
  ENSG00000002016_12 (sequence is synthesized)
cgtcattgcgatttatcttgcttcattctgaaccttatcaagaggatctgactgagagcccactgcagttagagctgagcacttttgaaaagcttgtccatcactctagtagggagaggc

SEQ ID NO: 856 - DNA, 120 bp, Artificial Sequence
  ENSG00000002016_13 (sequence is synthesized)
tctggacagatgaataccttttcttcggcttgtgaggcttcccactatttattactgaactattatgttaatgaagatggacattttaggaatcaccaatggctccttgccctcaagcaa

SEQ ID NO: 857 - DNA, 120 bp, Artificial Sequence
  ENSG00000002016_14 (sequence is synthesized)
tataggccagacttggtcctaagcacctgcctcagcaattgtctacattcagttgttttgcataacgtctgccttctttcctttacggtccatgcctttaatgttgcccacattaagcac

SEQ ID NO: 858 - DNA, 120 bp, Artificial Sequence
  ENSG00000002016_15 (sequence is synthesized)
tgtggatcacgacaggaaaaaggttggagcagtgcttttcactactttgtatcaatccaggctacaatcttcatttaatataaataatttatggatttatgacattacaatcctgcattg

SEQ ID NO: 859 - DNA, 120 bp, Artificial Sequence
  ENSG00000002016_16 (sequence is synthesized)
taatttatggatttatgacattacaatcctgcattgtttcaagactgacattttttcctaaggaaggaaataatcatctaagaccacgaaaaaaggctgttttttgtttttttttttttt

SEQ ID NO: 860 - DNA, 120 bp, Artificial Sequence
  ENSG00000002016_17 (sequence is synthesized)
actggagttcagtggtgcaaacacagctctctccacaacctcttgggcccaagtgatactcccacctctgccttacaaaatacagggattactggtgtgagccactgtgtctggccagaa

SEQ ID NO: 861 - DNA, 120 bp, Artificial Sequence
  ENSG00000002016_18 (sequence is synthesized)
aaggcatttttgagaaagcaaatcgtataccttattaacaaaatagaatatatatatattgcttatctgaaatgcttgaaaccagaattgttttgcattttttgaatatttgtatacaca

SEQ ID NO: 862 - DNA, 120 bp, Artificial Sequence
  ENSG00000002016_19 (sequence is synthesized)
taatgagaccttggggatgggacccaagtctgaacgtggaattcacctgtgtttcgtgtatatgcctcatacacataattttgtgcatgaaacagagtttttgtataagaagatacactg

SEQ ID NO: 863 - DNA, 120 bp, Artificial Sequence
  ENSG00000002016_20 (sequence is synthesized)
cagctgaagagggctgggtttttttttctcttagggtcgctgcataaactgttgtatgcctggtgctttgcgacttgtcacacgaggtcacgtgtggaattttccacttctggcatcacg

SEQ ID NO: 864 - DNA, 120 bp, Artificial Sequence
  ENSG00000002016_21 (sequence is synthesized)
tcagtgctcagaaattttctgatctcagagcatttcaattagggatgctcaaacgcaactgtttctacttccccatttcaggtgtgagatgtaacccaccttgaccataaattggctttt

SEQ ID NO: 865 - DNA, 120 bp, Artificial Sequence
  ENSG00000002016_22 (sequence is synthesized)
catagtgctcagatgtttcataattcttcccccaaaataatgaagtttgcagtttaacaactttttttttgagagggggggtctggctctgtagcgcaggctggagtgcagcggtgccat

SEQ ID NO: 866 - DNA, 71 bp, Artificial Sequence
  ENSG00000002016_23 (sequence is synthesized)
gtctggctctgtagcgcaggctggagtgcagcggtgccatcttgactcattgcagcctccgcctgccagac

SEQ ID NO: 867 - DNA, 120 bp, Artificial Sequence
  ENSG00000002016_24 (sequence is synthesized)
gttccctcccaggatcgacatgcacttggatcattgcagtttctgggcctgctgtcatctcccccttcagtacttcccacatatgactaccaactgttagacgatgtgctgctgccagac

SEQ ID NO: 868 - DNA, 120 bp, Artificial Sequence
  ENSG00000002016_25 (sequence is synthesized)
cagcctttcatttcttggacatccggctatttacccaggaaaagtcatcctttgactatttttcatgacctttctcatctgactcgtgatctgcccatcttgttactccctagcagtgtg

SEQ ID NO: 869 - DNA, 120 bp, Artificial Sequence
  ENSG00000002016_26 (sequence is synthesized)
cagggccctgggaggcgtctgcaggaggaagtgtagccgcagggtcttctgattctctgcggtaaccctgggccggctccaaaccaggcctcgctgggacttctctcaagctacacgcag

SEQ ID NO: 870 - DNA, 120 bp, Artificial Sequence
  ENSG00000002016_27 (sequence is synthesized)
aagatctcttccccttgtccatagcctagatcgagctccctgtgtgcaccgcgcgctgcccgaggcgcgtgtgctacattgagggtcatcgggtaattaatctggccaatgagatgtttg

SEQ ID NO: 871 - DNA, 120 bp, Artificial Sequence
  ENSG00000002016_28 (sequence is synthesized)
tgagtatgctctccagcagtggggacttctgcactgtccagctcctgctgaaagtctgctgtgggtgaggaggtaaggtaggtggactcagctgccagcaggaggaatggttgtggccca

SEQ ID NO: 872 - DNA, 120 bp, Artificial Sequence
  ENSG00000002016_29 (sequence is synthesized)
gcttcccttgctgggagtaagtggtagaatcctgtactctctcttctccgtgcactcagtcatgtgtgccggaggccttcccactcctactgcgagtgcacagacagcaccctcctctcc

SEQ ID NO: 873 - DNA, 120 bp, Artificial Sequence
  ENSG00000002016_30 (sequence is synthesized)
agaacctggggctgcggtggacctgatcctgaggtctcagcgtagagatgctgagtccagaggcctgttctagttcaccagtgcagtgaggggctcagtatccgggcctcccgagagagg

SEQ ID NO: 874 - DNA, 120 bp, Artificial Sequence
  ENSG00000002016_31 (sequence is synthesized)
gatcgagctccctgtgtgcaccgcgcgctgcccgaggcgccccagtgacagctggagtggacaaagtgaccaagggcctcaaggacacacaaggccaagaagatttgaagtgctgtaggt

SEQ ID NO: 875 - DNA, 120 bp, Artificial Sequence
  ENSG00000002016_32 (sequence is synthesized)
cctctgcggcccctcctgtgtcacggggctgcctccactcaggcctccagagccagccagccgtgcgtgtcctcccagcagccgcggctgttgctcaggagcccgtcctcgccgccgccc

SEQ ID NO: 876 - DNA, 120 bp, Artificial Sequence
  ENSG00000002330_0 (sequence is synthesized)
cggcaggcccgggtcaggggcctcgagatcgggcttgggcccagagcatgttccagatcccagagtttgagccgagtgagcaggaagactccagctctgcagagaggggcctgggcccca

SEQ ID NO: 877 - DNA, 120 bp, Artificial Sequence
  ENSG00000002330_1 (sequence is synthesized)
gccccgcaggggacgggccctcaggctccggcaagcatcatcgccaggccccaggcctcctgtgggacgccagtcaccagcaggagcagccaaccagcagcagccatcatggaggcgctg

SEQ ID NO: 878 - DNA, 120 bp, Artificial Sequence
  ENSG00000002330_2 (sequence is synthesized)
gggctgtggagatccggagtcgccacagctcctaccccgcggggacggaggacgacgaagggatgggggaggagcccagcccctttcggggccgctcgcgctcggcgccccccaacctct

SEQ ID NO: 879 - DNA, 120 bp, Artificial Sequence
  ENSG00000002330_3 (sequence is synthesized)
gcgggcacagcaacgcagatgcggcaaagctccagctggacgcgagtcttccagtcctggtgggatcggaacttgggcaggggaagctccgccccctcccagtgaccttcgctccacatc

SEQ ID NO: 880 - DNA, 120 bp, Artificial Sequence
  ENSG00000002330_4 (sequence is synthesized)
ccgaaactccacccgttcccactgccctgggcagccatcttgaatatgggcggaagtacttccctcaggcctatgcaaaaagaggatccgtgctgtctcctttggagggagggctgaccc

SEQ ID NO: 881 - DNA, 120 bp, Artificial Sequence
  ENSG00000002330_5 (sequence is synthesized)
agattcccttccggtgcgtgtgaagccacggaaggcttggtcccatcggaagttttgggttttccgcccacagccgccggaagtggctccgtggccccgccctcaggctccgggctttcc

SEQ ID NO: 882 - DNA, 120 bp, Artificial Sequence
  ENSG00000002330_6 (sequence is synthesized)
cccaggcgcctgcgctaagtcgcgagccaggtttaaccgttgcgtcaccgggacccgagcccccgcgatgccctgggggccgtgctcactaccaaatgttaataaagcccgcgtctgtgc

SEQ ID NO: 883 - DNA, 120 bp, Artificial Sequence
  ENSG00000002330_7 (sequence is synthesized)
gggcttggggtgagacctgtgcgccgtcaccacgggcggggcggggcctgggtccaccggggttctgaggggagactgaggtcctgagccgacagcctcagctccctgccaggccagacc

SEQ ID NO: 884 - DNA, 120 bp, Artificial Sequence
  ENSG00000002330_8 (sequence is synthesized)
cggcagacagatgagggcccaggaggcctggcgggcctgggggcgctacggtgggagaggaagccaggggtacctgcctctgccttccagggccaccgttggccccagctgtgccttgac

SEQ ID NO: 885 - DNA, 120 bp, Artificial Sequence
  ENSG00000002330_9 (sequence is synthesized)
aaatcccagtgcagggatgctcgcggaagcatcagcagggatgtccgccccagccgctgactcagaagcccaacacgcagagaatgtaaagctagaggtgccatgctggggcctggggca

SEQ ID NO: 886 - DNA, 120 bp, Artificial Sequence
  ENSG00000002330_10 (sequence is synthesized)
cttctagccacagccactaccctccacttccacacccagctccgggccaggctctaggcggatggcaagagtgggcaggcctgggcacccacccacgttcacacccaaggaggagccaca

SEQ ID NO: 887 - DNA, 120 bp, Artificial Sequence
  ENSG00000002330_11 (sequence is synthesized)
ggacacaggctaagagagtcgaaggctggctagacaaggggagagacacagagctccgctgatcatcactggactctggattccaccaaacctttggaaccttccagcctcaggcctcca

SEQ ID NO: 888 - DNA, 120 bp, Artificial Sequence
  ENSG00000002549_0 (sequence is synthesized)
gcgggcgcacacgaatgcgggcgcacacgaatgcgggcgcacacgaatgcgggcgcacccttgagtcccctccacaaccgcggtttgatcccagcggtccagtcggccggtgctgcccat

SEQ ID NO: 889 - DNA, 120 bp, Artificial Sequence
  ENSG00000002549_1 (sequence is synthesized)
ttgatcccagcggtccagtcggccggtgctgcccatccgtcccgccccctagacgcacgtccgctcgcccggcgcccgagccagtccgcgcgcacgccgtctgcgccccgaaagccccgc

SEQ ID NO: 890 - DNA, 120 bp, Artificial Sequence
  ENSG00000002549_2 (sequence is synthesized)
gctggagggcggtgcgaggggccgagccgacaagatgttcttgctgcctcttccggctgcggggcgagtagtcgtccgacgtctggccgtgagacgtttcgggagccggagtctctccac

SEQ ID NO: 891 - DNA, 120 bp, Artificial Sequence
  ENSG00000002549_3 (sequence is synthesized)
cgcagacatgacgaagggccttgttttaggaatctattccaaagaaaaagaagatgatgtgccacagttcacaagtgcaggagagaattttgataaattgttagctggaaagctgagaga

SEQ ID NO: 892 - DNA, 120 bp, Artificial Sequence
  ENSG00000002549_4 (sequence is synthesized)
gactttgaacatatctggaccacctctgaaggcagggaagactcgaaccttttatggtctgcatcaggacttccccagcgtggtgctagttggcctcggcaaaaaggcagctggaatcga

SEQ ID NO: 893 - DNA, 120 bp, Artificial Sequence
  ENSG00000002549_5 (sequence is synthesized)
cgaacaggaaaactggcatgaaggcaaagaaaacatcagagctgctgttgcagcggggtgcaggcagattcaagacctggagctctcgtctgtggaggtggatccctgtggagacgctca

SEQ ID NO: 894 - DNA, 120 bp, Artificial Sequence
  ENSG00000002549_6 (sequence is synthesized)
ggctgctgcggagggagcggtgcttggtctctatgaatacgatgacctaaagcaaaaaaagaagatggctgtgtcggcaaagctctatggaagtggggatcaggaggcctggcagaaagg

SEQ ID NO: 895 - DNA, 120 bp, Artificial Sequence
  ENSG00000002549_7 (sequence is synthesized)
agtcctgtttgcttctgggcagaacttggcacgccaattgatggagacgccagccaatgagatgacgccaaccagatttgctgaaattattgagaagaatctcaaaagtgctagtagtaa

SEQ ID NO: 896 - DNA, 120 bp, Artificial Sequence
  ENSG00000002549_8 (sequence is synthesized)
aaccgaggtccatatcagacccaagtcttggattgaggaacaggcaatgggatcattcctcagtgtggccaaaggatctgacgagcccccagtcttcttggaaattcactacaaaggcag

SEQ ID NO: 897 - DNA, 120 bp, Artificial Sequence
  ENSG00000002549_9 (sequence is synthesized)
acagtggtggtatctccatcaaggcttctgcaaatatggacctcatgagggctgacatgggaggagctgcaactatatgctcagccatcgtgtctgctgcaaagcttaatttgcccatta

SEQ ID NO: 898 - DNA, 120 bp, Artificial Sequence
  ENSG00000002549_10 (sequence is synthesized)
atattataggtctggcccctctttgtgaaaatatgcccagcggcaaggccaacaagccgggggatgttgttagagccaaaaacgggaagaccatccaggttgataacactgatgctgagg

SEQ ID NO: 899 - DNA, 120 bp, Artificial Sequence
  ENSG00000002549_11 (sequence is synthesized)
ggaggctcatactggctgatgcgctctgttacgcacacacgtttaacccgaaggtcatcctcaatgccgccaccttaacaggtgccatggatgtagctttgggatcaggtgccactgggg

SEQ ID NO: 900 - DNA, 120 bp, Artificial Sequence
  ENSG00000002549_12 (sequence is synthesized)
tctttaccaattcatcctggctctggaacaaactcttcgaggccagcattgaaacaggggaccgtgtctggaggatgcctctcttcgaacattatacaagacaggttgtagattgccagc

SEQ ID NO: 901 - DNA, 120 bp, Artificial Sequence
  ENSG00000002549_13 (sequence is synthesized)
ttgctgatgttaacaacattggaaaatacagatctgcaggagcatgtacagctgcagcattcctgaaagaattcgtaactcatcctaagtgggcacatttagacatagcaggcgtgatga

SEQ ID NO: 902 - DNA, 120 bp, Artificial Sequence
  ENSG00000002549_14 (sequence is synthesized)
ccaacaaagatgaagttccctatctacggaaaggcatgactgggaggcccacaaggactctcattgagttcttacttcgtttcagtcaagacaatgcttagttcagatactcaaaaatgt

SEQ ID NO: 903 - DNA, 120 bp, Artificial Sequence
  ENSG00000002549_15 (sequence is synthesized)
cttcactctgtcttaaattggacagttgaacttaaaaggtttttgaataaatggatgaaaatcttttaacggagacaaaggatggtatttaaaaatgtagaacacaatgaaatttgtatg

SEQ ID NO: 904 - DNA, 120 bp, Artificial Sequence
  ENSG00000002549_16 (sequence is synthesized)
tatgccttgatttttttttcatttcacacaaagatttataaaggtaaagttaatatcttacttgataaggatttttaagatactctataaatgattaaaatttttagaacttcctaatca

SEQ ID NO: 905 - DNA, 120 bp, Artificial Sequence
  ENSG00000002549_17 (sequence is synthesized)
tcagagtatatgtttttcattgagaagcaaaattgtaactcagatttgtgatgctaggaacatgagcaaactgaaaattactatgcacttgtcagaaacaataaatgcaacttgttgtgc

SEQ ID NO: 906 - DNA, 120 bp, Artificial Sequence
  ENSG00000002549_18 (sequence is synthesized)
ttagaacattttcataacccccaaaggaaaccctatacccattagcagttactccctgtttcccattccctaaagccagcaggggatggacactttggttgtttttaccttttatttctt

SEQ ID NO: 907 - DNA, 120 bp, Artificial Sequence
  ENSG00000002549_19 (sequence is synthesized)
tttggtatatgcctaggagttgaattgctgaatcaaatcgtagttctgtttaactttttgaggaacttcacatggcttattttggtgaattattcctatcatcacttttggacacaaatg

SEQ ID NO: 908 - DNA, 120 bp, Artificial Sequence
  ENSG00000002549_20 (sequence is synthesized)
aagaacacagcatgcctaactagacatgggatgagaatttctgcctcatagattcccttagcctagactccagcattggtgctcccaggtgtccctgaatgctgtgtcagtgggaggctg

SEQ ID NO: 909 - DNA, 120 bp, Artificial Sequence
  ENSG00000002549_21 (sequence is synthesized)
ttggagctgaaagcctgctcgtccagttccgtcgctctcttgggatctccagccctttaagcaaaccaactctgagcatttgggaatttataattaaaacaaatgaacagacccaagtct

SEQ ID NO: 910 - DNA, 120 bp, Artificial Sequence
  ENSG00000002549_22 (sequence is synthesized)
caggaacttcacatggcttattttggtgaattattcctatcatcacttttggacacaaatgaagaacacagcatgcctaactagacatgggatgagaatttctgcctcatagattccctt

SEQ ID NO: 911 - DNA, 120 bp, Artificial Sequence
  ENSG00000002549_23 (sequence is synthesized)
ttttagaggaataacttgagaccagagatttgagatgacccacttgggtccacatggggagctggaatagagctgagtttgaggttctttctatctttccttgcctttgagagagagagt

SEQ ID NO: 912 - DNA, 120 bp, Artificial Sequence
  ENSG00000002549_24 (sequence is synthesized)
gccatgatatactatgtatgtgtatatttcataactgtgttattcagacacaattaacatgccatagaattcaccaatgcaaagtgtgcaattcagtgatttttttttttttttttttga

SEQ ID NO: 913 - DNA, 120 bp, Artificial Sequence
  ENSG00000002549_25 (sequence is synthesized)
aaccttttatggtctgcatcaggtatgagaagaacgtgatcatttggtaaaccctcaatgagcatctactgtacaccaagtattggggctgtctagtcatactaaacattatgtgttgga

SEQ ID NO: 914 - DNA, 120 bp, Artificial Sequence
  ENSG00000002549_26 (sequence is synthesized)
ttgtatgattttattccactattaagcagaacatttaagattaagaggcgatttgctgtcaaaaactactgcctatcttatattcctcaatctgaaggctttctttatccggttgtggct

SEQ ID NO: 915 - DNA, 120 bp, Artificial Sequence
  ENSG00000002549_27 (sequence is synthesized)
ctggcttacacagaattatttgcaagagtatcctcacttactctgcctctcaaacctataagttatacaattttgccaggacacaaaggttttaagaaaaaaaagccacaaccaaatttc

SEQ ID NO: 916 - DNA, 120 bp, Artificial Sequence
  ENSG00000002549_28 (sequence is synthesized)
agctgctgttgcaggttatttcactttttaagtttaaagaatcctgaggatccactctttttgatgacctctctttcccctttttgtccttttaccagttgccaccccttaccacgttca

SEQ ID NO: 917 - DNA, 120 bp, Artificial Sequence
  ENSG00000002549_29 (sequence is synthesized)
agaaggttagctaatggaattttatttttaatatatctatatctcatttgggtgttttactaccatttgttcgctcttgtcatattagagctgtgttttcccagaacctgtagtgtatag

SEQ ID NO: 918 - DNA, 120 bp, Artificial Sequence
  ENSG00000002586_0 (sequence is synthesized)
atctgtcctgccgccttcgcccacgccctgcactccgggaccgtccctgcgcgctctgggcgcaccatggcccgcggggctgcgctggcgctgctgctcttcggcctgctgggtgttctg

SEQ ID NO: 919 - DNA, 120 bp, Artificial Sequence
  ENSG00000002586_1 (sequence is synthesized)
gtcgccgccccggatggtggtttcgatttatccgatgcccttcctgacaatgaaaacaagaaacccactgcaatccccaagaaacccagtgctggggatgactttgacttaggagatgct

SEQ ID NO: 920 - DNA, 120 bp, Artificial Sequence
  ENSG00000002586_2 (sequence is synthesized)
gttgttgatggagaaaatgacgacccacgaccaccgaacccacccaaaccgatgccaaatccaaaccccaaccaccctagttcctccggtagcttttcagatgctgaccttgcggatggc

SEQ ID NO: 921 - DNA, 120 bp, Artificial Sequence
  ENSG00000002586_3 (sequence is synthesized)
gtttcaggtggagaaggaaaaggaggcagtgatggtggaggcagccacaggaaagaaggggaagaggccgacgccccaggcgtgatccccgggattgtgggggctgtcgtggtcgccgtg

SEQ ID NO: 922 - DNA, 120 bp, Artificial Sequence
  ENSG00000002586_4 (sequence is synthesized)
tcaaagaaaatgcagaacaaggggaggtggacatggagagccaccggaatgccaacgcagagccagctgttcagcgtactcttttagagaaatagaagattgtcggcagaaacagcccag

SEQ ID NO: 923 - DNA, 120 bp, Artificial Sequence
  ENSG00000002586_5 (sequence is synthesized)
gcgttggcagcagggttagaacagctgcctgaggctcctccctgaaggacacctgcctgagagcagagatggaggccttctgttcacggcggattctttgttttaatcttgcgatgtgct

SEQ ID NO: 924 - DNA, 120 bp, Artificial Sequence
  ENSG00000002586_6 (sequence is synthesized)
ttgcttgttgctgggcggatgatgtttactaacgatgaattttacatccaaagggggataggcacttggacccccattctccaaggcccgggggggcggtttcccatgggatgtgaaagg

SEQ ID NO: 925 - DNA, 120 bp, Artificial Sequence
  ENSG00000002586_7 (sequence is synthesized)
ctggccattattaagtccctgtaactcaaatgtcaaccccaccgaggcacccccccgtcccccagaatcttggctgtttacaaatcacgtgtccatcgagcacgtctgaaacccctggta

SEQ ID NO: 926 - DNA, 120 bp, Artificial Sequence
  ENSG00000002586_8 (sequence is synthesized)
gccccgacttctttttaattaaaataaggtaagcccttcaatttgtttcttcaatatttctttcatttgtagggatatttgtttttcatatcagactaataaaaagaaattagaaaccaa

SEQ ID NO: 927 - DNA, 120 bp, Artificial Sequence
  ENSG00000002586_9 (sequence is synthesized)
cagctggcaggctctttgggaccttgtattgggatccgccgtgaagctgatggctgaagacctaggggtgagcagagaacccagcccaggcctgcggagcgtcctgaccgtaatcgtttt

SEQ ID NO: 928 - DNA, 120 bp, Artificial Sequence
  ENSG00000002586_10 (sequence is synthesized)
atctgctaagacatagccttaaagcaaacccttccatctgccgctcccctcgccctgctggcaaattcccaccacgatgggattctcaatcacatggcggattctctgccttcagttcca

SEQ ID NO: 929 - DNA, 120 bp, Artificial Sequence
  ENSG00000002586_11 (sequence is synthesized)
tatgcttttgcctttctggatgcacagaagctcattatagcaaatcatatttctgcataagagcttcagaaaatgaagagaaatgcagatattttcttttaaacatgaatctaacagaaa

SEQ ID NO: 930 - DNA, 120 bp, Artificial Sequence
  ENSG00000002586_12 (sequence is synthesized)
aaaaggaggcagtgatggtggaggcagccacaggaaagaaggggaagagggtaggtgcacctggcttctgtcttcttgtctctcccacgtggtgttgagaaggggaagcagaatgtctga

SEQ ID NO: 931 - DNA, 120 bp, Artificial Sequence
  ENSG00000002586_13 (sequence is synthesized)
aggggctcctggtctctgtggaaaccatggccggtagcagcctctgtgtctgtcttctgggctcaagagtcgttgtataaacctcagctcggtgtgggcagacaatgaaaacaagaaacc

SEQ ID NO: 932 - DNA, 120 bp, Artificial Sequence
  ENSG00000002586_14 (sequence is synthesized)
atagttaatactggaattgtgttatgatgttacatttcatgtagtgattccagtaaaagaatggttgctgatgtgaaatgtttcggggccatttggacaacatctctgtgtgcttttatt

SEQ ID NO: 933 - DNA, 81 bp, Artificial Sequence
  ENSG00000002586_15 (sequence is synthesized)
tttcggggccatttggacaacatctctgtgtgcttttattctaagggtctgagttactctgtctttagcgtttcattcttg

SEQ ID NO: 934 - DNA, 120 bp, Artificial Sequence
  ENSG00000002586_16 (sequence is synthesized)
cagcaaccattcctccatcttagttgggttttcaaaatcattcttcatactagaagacaagatctgaggccatggtgaactgtcacatcagttgcggagcacatatgggttgctagagcc

SEQ ID NO: 935 - DNA, 120 bp, Artificial Sequence
  ENSG00000002586_17 (sequence is synthesized)
atgttttagacaccctctagcctaaatctgatcacagtcatctgtccccttctcttagggtctacctttccaaagttgttagggacctgggaggagaggatgatgggatggggagtcaac

SEQ ID NO: 936 - DNA, 120 bp, Artificial Sequence
  ENSG00000002586_18 (sequence is synthesized)
aggagaaaatcatgtgcaggcagaattggaatttcaacttggtccaggcaacacaattcatttataaattactttatttctctctctctctccccactgcctctcctctgagagcttctc

SEQ ID NO: 937 - DNA, 120 bp, Artificial Sequence
  ENSG00000002586_19 (sequence is synthesized)
tgagatcctggtcaagctgatattcagaaaagtatttaggaatgtggggccgtggtgtgtttttgatctgttcacgaggtcattccttcctcgtttctctctggaatttggtattaactg

SEQ ID NO: 938 - DNA, 120 bp, Artificial Sequence
  ENSG00000002586_20 (sequence is synthesized)
cggcgttgggggcgccccgcggggacacccggagcctcctccctgcccggcaggacgcgctgtgcccacgggggcccaggcccggaggaggcgcccactttctccccaacgcttttcctg

SEQ ID NO: 939 - DNA, 120 bp, Artificial Sequence
  ENSG00000002586_21 (sequence is synthesized)
accagaaaaagaagctatgcttcaaagaaaatgaaagagcttccatgtgcgtgttcctcagtgtttagggagaagaaagcaacccttaaaatagaggaaaatgaagctgcttggattacc

SEQ ID NO: 940 - DNA, 120 bp, Artificial Sequence
  ENSG00000002586_22 (sequence is synthesized)
ctgttgaagttcatctctgcctgtgccatgcatgaaaaaatactggcaaagtcttcacttacatgagtgttagactccatgttcccagtgggtctcggggttcagaactgagtgctctca

SEQ ID NO: 941 - DNA, 120 bp, Artificial Sequence
  ENSG00000002586_23 (sequence is synthesized)
tccaagcaataggagcgtcgacctcaggaaagcccaagtgttttgtgtgtattttgaggagtgggttatctgttgcactgagcctctctgtgtattttcttcttcttttcagcagaacaa

SEQ ID NO: 942 - DNA, 120 bp, Artificial Sequence
  ENSG00000002586_24 (sequence is synthesized)
ccgatgcccttcctggtgagtatcaacatcattttttaaaatcccgtcaatattttatgttaacatagtatatacaggcatatcccagccatttccagctaggttctagaccaccgcaat

SEQ ID NO: 943 - DNA, 120 bp, Artificial Sequence
  ENSG00000002586_25 (sequence is synthesized)
aacaggagtcatagcaatttttggcttcccagtacatataaatgttatgtttactctcaactgtagtctattaagtatgcaatagcattacctctaaaaacagtatactccaattgaaaa

SEQ ID NO: 944 - DNA, 120 bp, Artificial Sequence
  ENSG00000002586_26 (sequence is synthesized)
taccttattgctaaaaaatgcagatacagagacaggaagtggggcacgtgctgttggaaaaaatgatgccgagagtctggcttgccacagggttgctgcaggccttccgtttgtaaaaca

SEQ ID NO: 945 - DNA, 120 bp, Artificial Sequence
  ENSG00000002586_27 (sequence is synthesized)
cacagtatttgcaaagcaccttaagacaaagtgcagtgaaggaggtccgcctgtatgtgtccacctgccttattataaaaactagactcatagatgacgaggaaaagcaagatgcccttg

SEQ ID NO: 946 - DNA, 120 bp, Artificial Sequence
  ENSG00000002586_28 (sequence is synthesized)
cttggggaggggtctagaggaggtgagcaaatggaggtccccaggagagaggggcatccagtgctggcatcctccctctcgaaatcggcacccgctgtctccatggggccactccttcct

SEQ ID NO: 947 - DNA, 120 bp, Artificial Sequence
  ENSG00000002586_29 (sequence is synthesized)
tcttctgcagctcttcctgtctcccgctcctcacccagagccctcggtgaagggcatgggaaaaggaattgaaggaattccgtcttatcactctatcagcttctgggtcttgtcatccct

SEQ ID NO: 948 - DNA, 120 bp, Artificial Sequence
  ENSG00000002586_30 (sequence is synthesized)
ttgtatttgttttccggggctgccataaaaaggtgccaccaactgggggcttaaaccacagggatttatcatcttccagacctggacaacagaagtctgagatcaaggtgtagacagacc

SEQ ID NO: 949 - DNA, 120 bp, Artificial Sequence
  ENSG00000002586_31 (sequence is synthesized)
aaggtgtagacagacccatgctccctctaggggctctaggggagggtccttcctgcctcttgcggcttccgggagctccaggtgtccctggacttgtggccgcatcactccagtctctgc

SEQ ID NO: 950 - DNA, 120 bp, Artificial Sequence
  ENSG00000002586_32 (sequence is synthesized)
cctcctcctctgtgtctgtgtctccttttctttgtcttacaaggatacttgtcattgggtttagggccactctactccaggattatctaatctcaagatccttctcttaagcacatctgc

SEQ ID NO: 951 - DNA, 120 bp, Artificial Sequence
  ENSG00000002586_33 (sequence is synthesized)
atggcccgcggggctgcgctggcgctgctgctcttcggcctgctgggtgttctggtcgccgccccggggtttggggacctgcgtcttcaggccgcgcgcggaggccgccctggagttgcc

SEQ ID NO: 952 - DNA, 120 bp, Artificial Sequence
  ENSG00000002586_34 (sequence is synthesized)
tgtcacagccacgccctgcgtcccgggcctaaatttggaatcgctaggagcctgagacccgggtggtggggggaagggaaggaaaagttagaaaaaaactttgagccctgaaaatgttca

SEQ ID NO: 953 - DNA, 120 bp, Artificial Sequence
  ENSG00000002586_35 (sequence is synthesized)
gcaacacggggcgcagaaagaaacgtgtgcttaccaaattgtccatctgcggcggtggagaattcggaaaacagaaaaagtgggcagggaagaaagagccacggtcaccctcccacgccc

SEQ ID NO: 954 - DNA, 120 bp, Artificial Sequence
  ENSG00000002586_36 (sequence is synthesized)
taaaccgggcctatttctaattattactttaatcatgtttttctgtttccctccctttgaaacggaaacggagaccctgccggatgtggtatgttataaattcttttttcatgttataaa

SEQ ID NO: 955 - DNA, 120 bp, Artificial Sequence
  ENSG00000002587_0 (sequence is synthesized)
ctctgcgccctggcagccaggagtcgccgccacgacagccgggtctcagtgggtgcctgcgccttctccccgcccgcctgccccgggccatccagaaacttgctctacccgccgcgggtg

SEQ ID NO: 956 - DNA, 120 bp, Artificial Sequence
  ENSG00000002587_1 (sequence is synthesized)
ctcggcagtgctgcccatggcccagcctaggagcctatttagggcgccggacgggctggacagaggcgcggctcagtaattgaaggcctgaaacgcccatgtgccactgactaggaggct

SEQ ID NO: 957 - DNA, 120 bp, Artificial Sequence
  ENSG00000002587_2 (sequence is synthesized)
tccctgctgcggcacttcatgacccagcggcgcgcggcccagtgaagccaccgtggtgtccagcatggccgcgctgctcctgggcgcggtgctgctggtggcccagccccagctagtgcc

SEQ ID NO: 958 - DNA, 120 bp, Artificial Sequence
  ENSG00000002587_3 (sequence is synthesized)
ttcccgccccgccgagctaggccagcaggagcttctgcggaaagcggggaccctccaggatgacgtccgcgatggcgtggccccaaacggctctgcccagcagttgccgcagaccatcat

SEQ ID NO: 959 - DNA, 120 bp, Artificial Sequence
  ENSG00000002587_4 (sequence is synthesized)
catcggcgtgcgcaagggcggcacgcgcgcactgctggagatgctcagcctgcaccccgacgtggcggccgcggagaacgaggtccacttcttcgactgggaggagcattacagccacgg

SEQ ID NO: 960 - DNA, 120 bp, Artificial Sequence
  ENSG00000002587_5 (sequence is synthesized)
cttgggctggtacctcagccagatgcccttctcctggccacaccagctcacagtggagaagacccccgcgtatttcacgtcgcccaaagtgcctgagcgagtctacagcatgaacccgtc

SEQ ID NO: 961 - DNA, 120 bp, Artificial Sequence
  ENSG00000002587_6 (sequence is synthesized)
catccggctgctgctcatcctgcgagacccgtcggagcgcgtgctatctgactacacccaagtgttctacaaccacatgcagaagcacaagccctacccgtccatcgaggagttcctggt

SEQ ID NO: 962 - DNA, 120 bp, Artificial Sequence
  ENSG00000002587_7 (sequence is synthesized)
gcgcgatggcaggctcaatgtggactacaaggccctcaaccgcagcctctaccacgtgcacatgcagaactggctgcgctttttcccgctgcgccacatccacattgtggacggcgaccg

SEQ ID NO: 963 - DNA, 120 bp, Artificial Sequence
  ENSG00000002587_8 (sequence is synthesized)
cctcatcagggaccccttccctgagatccaaaaggtcgagaggttcctaaagctgtcgccgcagatcaatgcttcgaacttctactttaacaaaaccaagggcttttactgcctgcggga

SEQ ID NO: 964 - DNA, 120 bp, Artificial Sequence
  ENSG00000002587_9 (sequence is synthesized)
cagcggccgggaccgctgcttacatgagtccaaaggccgggcgcacccccaagtcgatcccaaactactcaataaactgcacgaatattttcatgagccaaataagaagttcttcgagct

SEQ ID NO: 965 - DNA, 120 bp, Artificial Sequence
  ENSG00000002587_10 (sequence is synthesized)
tgttggcagaacatttgactggcactgatttgcaataagctaagctcagaaactttcctactgtaagttctggtgtacatctgaggggaaaaagaattttaaaaaagcatttaaggtata

SEQ ID NO: 966 - DNA, 120 bp, Artificial Sequence
  ENSG00000002587_11 (sequence is synthesized)
atttatttgtaaaatccataaagtacttctgtacagtattagattcacaattgccatatatactagttatatttttctacttgttaaatggagggcattttgtattgtttttcatggttg

SEQ ID NO: 967 - DNA, 120 bp, Artificial Sequence
  ENSG00000002587_12 (sequence is synthesized)
ttaacattgtgtaatatgtctctatatgaaggaactaaactatttcactgaaaaaaaaaaaaagattttttctggagacgctatgtttttttgaatataattaacttgcccccaactcaa

SEQ ID NO: 968 - DNA, 120 bp, Artificial Sequence
  ENSG00000002587_13 (sequence is synthesized)
aatagctgtctgtgttgcaatcattgcaaaatctaaattcttttgttacttaaaaaaacatgtttttcatggctattacaatcctctctctcccctctcctttctgcattgctcttttta

SEQ ID NO: 969 - DNA, 120 bp, Artificial Sequence
  ENSG00000002587_14 (sequence is synthesized)
atttttaatgtctcattgtgatcatcagatttatttttacttggattgtaagatttatctcctcggcgattccttgtcatttttggaggtcacagttttactcattcccatgtgtaaact

SEQ ID NO: 970 - DNA, 120 bp, Artificial Sequence
  ENSG00000002587_15 (sequence is synthesized)
tcaagtaaacaaagcaatattcaggatggagaagcagttagtgactggctagaggtctcttgggatccatcttgacctcaaagaatatttgcacatgcttctgatctcagcagttataat

SEQ ID NO: 971 - DNA, 120 bp, Artificial Sequence
  ENSG00000002587_16 (sequence is synthesized)
aaagaggattaaacccttggccttcagaatgatcttggacctggatactttgccccaggtggcagctggcctccagaaagccaattagaatagaaaagagaaactgcgaaatctatgcgt

SEQ ID NO: 972 - DNA, 120 bp, Artificial Sequence
  ENSG00000002587_17 (sequence is synthesized)
gtcttcatcctgtcggttctgtgaaaggctgactaaaagggtagtagtcttttgcttagtctgaaagtctgcttacttcctgaaagacacattggcattatagacatatattccatatgc

SEQ ID NO: 973 - DNA, 120 bp, Artificial Sequence
  ENSG00000002587_18 (sequence is synthesized)
actgagacataaatatgtgtatgtttcaaaatcaactctaaatttggagtcctgaatgtgaaagaaaaagtaagttcccaagtgttgaagttaaaaagagaaaagggcagagttgaaggt

SEQ ID NO: 974 - DNA, 120 bp, Artificial Sequence
  ENSG00000002587_19 (sequence is synthesized)
agcacctaagagaaccactgtacctgcccccagaggagtggctggagttcagttttacttctgcccctgagcagccagcttgttggagatggtcacataaacccttcttatcctcagttt

SEQ ID NO: 975 - DNA, 120 bp, Artificial Sequence
  ENSG00000002587_20 (sequence is synthesized)
tttcatgcattcttcatgcagtcagccttttacagaattaaacccattggattttaataaaaataaaacattcattacagtaaaagagaaaatacaaacaagcaaaataaaccggcttcc

SEQ ID NO: 976 - DNA, 120 bp, Artificial Sequence
  ENSG00000002587_21 (sequence is synthesized)
tgacatggtttataccgcaggaaaatgacagaaatggacgttattaatcatctcctacacttaagaactcattgaaatttctccaagcaaccccaggatgcagatattattatggaaatt

SEQ ID NO: 977 - DNA, 120 bp, Artificial Sequence
  ENSG00000002587_22 (sequence is synthesized)
tcaaagaggaggaattaggcccagagaacatgagaaacttgcccaaggtcacattgactataaactcaggcttagaggctactcagagccaaagcacaggttatttatgtatttagtttt

SEQ ID NO: 978 - DNA, 120 bp, Artificial Sequence
  ENSG00000002587_23 (sequence is synthesized)
tacccaactctttctgaactcaaaaggaaaagcccagactcagagccagttcttcctgacctgacttaacatttcttcccaggtgccaaatatcttccatcctaagaggtgtgtcccaga

SEQ ID NO: 979 - DNA, 120 bp, Artificial Sequence
  ENSG00000002587_24 (sequence is synthesized)
tacaggaagggcaagaagaagcctgcatttttctcagcagtgttatcagggaagtgagtcaccttggtacgtttcagcagctccagcctgacctgaccttagcatggcctatgccccacc

SEQ ID NO: 980 - DNA, 120 bp, Artificial Sequence
  ENSG00000002587_25 (sequence is synthesized)
ccatatcatgaacagagagcagagaggatgccttcctctttagaatccattgaagttgtcattaagccatcatctcccccagaggaagtagcagaaatatttacagcaggcccctggtgg

SEQ ID NO: 981 - DNA, 120 bp, Artificial Sequence
  ENSG00000002587_26 (sequence is synthesized)
acatggtacttttcaataggcagagagcctccctctgcagcacatcgttggatcttgcttttaccatactccttgaagagctgaagaaataagagggcccagcaaggttaagtcaagttt

SEQ ID NO: 982 - DNA, 120 bp, Artificial Sequence
  ENSG00000002587_27 (sequence is synthesized)
ccaagcctgttcaggaatatggtgactgaaaggaaactgcaatgagagtctctgactgaagaagatgctctttgcaaactgcctgtaaattcctgtcccctgacagggatggtctggtag

SEQ ID NO: 983 - DNA, 120 bp, Artificial Sequence
  ENSG00000002587_28 (sequence is synthesized)
aagcatgaactgtggatgcaagaggcagcggggaggagtggaggaagacaggaccagcacatggaatataatctagctgctgggactggcatagtcgatggaggcggtggtccagtgtaa

SEQ ID NO: 984 - DNA, 120 bp, Artificial Sequence
  ENSG00000002587_29 (sequence is synthesized)
ccatgagcaagggatcagaggtcctagtggcactatctgttcattcatttttggtacaaccccagccagtcattgagaaggtacactgtgtaagaaaccatcactccagacttacccaag

SEQ ID NO: 985 - DNA, 120 bp, Artificial Sequence
  ENSG00000002587_30 (sequence is synthesized)
gtatttattgctagatctcaccaagcactgtcaaattcaaaggaggccctgtagtagaccctgggctgtccttacagggccaaaatgcagtgactcaggagcctaatagcacccggtccc

SEQ ID NO: 986 - DNA, 120 bp, Artificial Sequence
  ENSG00000002587_31 (sequence is synthesized)
tccaaaacatgccttctaccaattccattaacagagacaggtgtcagtggaaggggtgggtctcctgtccagaccaccccggcccgggagcagcctgggggatctaggtgggtccttcca

SEQ ID NO: 987 - DNA, 120 bp, Artificial Sequence
  ENSG00000002587_32 (sequence is synthesized)
gagaggcaagtgagaacaactgaaccaagcctcagctattagatttggaatattcacacacttgacactccagagtcagaacagccccttccctttcccttcctcctggaatcagatagg

SEQ ID NO: 988 - DNA, 120 bp, Artificial Sequence
  ENSG00000002587_33 (sequence is synthesized)
gttgaaatccttttaacaccatttggttatcagctcacaacctgaaggtttgcaagtttaggaaaagtgacatgcctctgagcacagggtgctttactccttctgtgcttggaggcttac

SEQ ID NO: 989 - DNA, 120 bp, Artificial Sequence
  ENSG00000002587_34 (sequence is synthesized)
ccaactgaaaggagatggagggcaggagaggccgatgcctagcgtgcctgctgcttacaggggtggtgtcacaggtcaccattattcattaaaattttacttttttgatcccctaccaca

SEQ ID NO: 990 - DNA, 120 bp, Artificial Sequence
  ENSG00000002587_35 (sequence is synthesized)
tgctcaacatggtattgagtcctcaagaatataaaaagaaaatacaacaggaaccagtagtcattaactgtttgttctggactttaataaaagtacagagggtcttggagtacaaaggca

SEQ ID NO: 991 - DNA, 120 bp, Artificial Sequence
  ENSG00000002587_36 (sequence is synthesized)
aagacatttagctgtgtatagaatgggtgggggaatgtgttccatggtttggcattcagttcagcaacattcctgagagaaatcaactagcccccttatagagaagaggaaactgagatt

SEQ ID NO: 992 - DNA, 77 bp, Artificial Sequence
  ENSG00000002587_37 (sequence is synthesized)
cactgaggcaagagaaccacttgaacctggcaggtggaggttgcagggggccgagatgatgccactgcactccagcc

SEQ ID NO: 993 - DNA, 71 bp, Artificial Sequence
  ENSG00000002587_38 (sequence is synthesized)
taaaaaaataaaaaagtaatcctgacttcaagtcatttttttcagaagaaaggattcttgctcactccagg

SEQ ID NO: 994 - DNA, 120 bp, Artificial Sequence
  ENSG00000002587_39 (sequence is synthesized)
gtcatttttttcagaagaaaggattcttgctcactccagggaaatagtccagaaatggaaaatgttgacatcacaaatcacaaaagaaggtgaaaaatatcagagaccctctccagaatg

SEQ ID NO: 995 - DNA, 120 bp, Artificial Sequence
  ENSG00000002587_40 (sequence is synthesized)
tcatttctcagaaatattaagaaatagagaatcttcccagaggtcgcatgtcagggcaggtcacttaacttgtgggccacagagaccctgaccttcctgtgggaaggcttcatggaggaa

SEQ ID NO: 996 - DNA, 120 bp, Artificial Sequence
  ENSG00000002587_41 (sequence is synthesized)
ttgccataaagctggggcacgcacgaatggcagtagtgtcaccagagcagggcattctgaacaagggaagcttgagacatgaagacagtggtcacggggagaggctgggggtagagggta

SEQ ID NO: 997 - DNA, 120 bp, Artificial Sequence
  ENSG00000002587_42 (sequence is synthesized)
gaggtaggcaagagatttgtctgagtggcatgtcaaatgtgttaaactcaatgagaagctactgctttccaaggctggagtgttggaagcttacttagcaggcacccatgtgaatttggc

SEQ ID NO: 998 - DNA, 120 bp, Artificial Sequence
  ENSG00000002587_43 (sequence is synthesized)
tcctgtgcaggtgtatctgttgcataaaaatagctatcatttgttgcacacctgccatgtgcttggtattttaaatatattgcttctaacctatataacaaccctaggaagtagaaaatg

SEQ ID NO: 999 - DNA, 120 bp, Artificial Sequence
  ENSG00000002587_44 (sequence is synthesized)
ggctactaattttacagaaaaataaactcagaaattaaagggcttgcccatgttgatagagccattacttcttacaaatgaaattttgtctccgatgtctctgctccttttcagtccatc

SEQ ID NO: 1000 - DNA, 120 bp, Artificial Sequence
  ENSG00000002587_45 (sequence is synthesized)
tatttgtgggtaagtggaggaagatataaagcatatgcatctgtctattaggcagagcctgtaagggaaattatgggcatctaggatttggagttggacagttagggtgatatcaagatt

SEQ ID NO: 1001 - DNA, 120 bp, Artificial Sequence
  ENSG00000002587_46 (sequence is synthesized)
accttcaagcaaagcagtggctgggatttgatgcaacagggacgtgataaaacatgctcctaaccggcagcagctcatttcggaagactgagcctgagttaaaggccagagcaacataac

SEQ ID NO: 1002 - DNA, 120 bp, Artificial Sequence
  ENSG00000002587_47 (sequence is synthesized)
agagttctccaaacagcacacagtgagagaaggccaaagctaaagaggacatcatcggatttagctgcttcactaaagtgttttgatgtagaaaatgaccttggtgctttagttatccct

SEQ ID NO: 1003 - DNA, 120 bp, Artificial Sequence
  ENSG00000002587_48 (sequence is synthesized)
gatgtcaagacctttactctattttgcccaaatttctcagttagataacagcaaagagagagagccagaagacctgggtgtgcatcctagctgtaccaatcactgaccatgggatcttag

SEQ ID NO: 1004 - DNA, 120 bp, Artificial Sequence
  ENSG00000002587_49 (sequence is synthesized)
attcagactctgagaacctccatttccttctccataaaaatgggcagatatgtactgtactctgttgggggaaaactccaactcaatgagataaagtaggtaaaaactataaacccagtg

SEQ ID NO: 1005 - DNA, 120 bp, Artificial Sequence
  ENSG00000002587_50 (sequence is synthesized)
catatgttacttagtggttaaaaacatttgggactttaggagacagaccaaaactggttttgaaccagtcggcagaaatgcgctgccttttttcctcctctgcttcccagctatgtgact

SEQ ID NO: 1006 - DNA, 120 bp, Artificial Sequence
  ENSG00000002587_51 (sequence is synthesized)
gtagctattgctgttaatgctccatccagagctcatttaccagggaagtgctctcaaccccagctgccacaaagattgtcttctgtactattttctgaaggatttctcttagttggcagg

SEQ ID NO: 1007 - DNA, 120 bp, Artificial Sequence
  ENSG00000002587_52 (sequence is synthesized)
agttttcttacctgaagatgcctgagaaatgttgtccaccccactcccctgctttcctagggttagggcatgactaatgattgactgacccatgtgggatggggcatgggggtagtaggg

SEQ ID NO: 1008 - DNA, 120 bp, Artificial Sequence
  ENSG00000002587_53 (sequence is synthesized)
taacagtccaccctcattgcctccaggcaggacaacctctggtgcaactcatgctcagagctcctcgtgagatcaggctgaggctagacttctcctgaaactgtacttttacttatttct

SEQ ID NO: 1009 - DNA, 120 bp, Artificial Sequence
  ENSG00000002587_54 (sequence is synthesized)
tccgaaacttcatccttttcccacattaccttactcatttcttctgctaccctattctcagtaaatgtgtttcccaagaaaacaggaatcccccctcagactttgcttctagaccatcca

SEQ ID NO: 1010 - DNA, 120 bp, Artificial Sequence
  ENSG00000002587_55 (sequence is synthesized)
ctctaaagtcttaaccttgcatgcatgttttcttctctctgtattttacatgtataacgtgatcaacccacggagttattagaattcttccaattaaatgagatatagcagagaatgagt

SEQ ID NO: 1011 - DNA, 120 bp, Artificial Sequence
  ENSG00000002587_56 (sequence is synthesized)
ctattttattggctagcaaatagcaaagtgttaaattcaataatggctgaaattgttaccaagtagtaggctcttttattagcttatcggactaccaaaatagtataatgcatcaatatc

SEQ ID NO: 1012 - DNA, 120 bp, Artificial Sequence
  ENSG00000002587_57 (sequence is synthesized)
aaacttaaatttcaacttcataaaacaattctgggcccaacaaatatgaaggtattgctccatcttatgtagcaacatcttgtatttctattgtttgataaatattccacttagaactaa

SEQ ID NO: 1013 - DNA, 120 bp, Artificial Sequence
  ENSG00000002587_58 (sequence is synthesized)
ctaagaagaatcgaggctggagcaggtggagtggatgcagagggaaccaggaagcaaaggctggggattttcccatcctcctcacctcctgccctagcacctctgctctggaagtcccga

SEQ ID NO: 1014 - DNA, 120 bp, Artificial Sequence
  ENSG00000002587_59 (sequence is synthesized)
gacagggcgctctttgaagccggctcctcacgcggattctggcccaggccgccgctccggtcccagtccggctgcagagcgaattggagaggatggcacctcctgcttcccggggggcgg

SEQ ID NO: 1015 - DNA, 120 bp, Artificial Sequence
  ENSG00000002726_0 (sequence is synthesized)
tctgattgacttcaagaaggagtcagagatcagcttaagggcaaaggctggaagcagagcgaactgggagcagagcacacagagccgtggagcgagagatgccggccctgggctgggccg

SEQ ID NO: 1016 - DNA, 120 bp, Artificial Sequence
  ENSG00000002726_1 (sequence is synthesized)
tggctgccatcctgatgctgcagacggccatggcggagccctccccggggactctgcccaggaaggcaggggtgttttcagacctaagcaaccaagagctgaaggcagtgcacagcttcc

SEQ ID NO: 1017 - DNA, 120 bp, Artificial Sequence
  ENSG00000002726_2 (sequence is synthesized)
tctggtccaagaaggagctgaggctgcagccctccagtaccaccaccatggccaagaacaccgtgtttctcatcgagatgctgctgcccaagaagtaccatgtgctgaggtttctggata

SEQ ID NO: 1018 - DNA, 120 bp, Artificial Sequence
  ENSG00000002726_3 (sequence is synthesized)
aaggtgaaaggcatcctgtgcgggaagcccgtgccgtcatcttctttggtgaccaggagcatcccaatgtcaccgagtttgctgtggggcccctgccagggccctgctacatgcgagcac

SEQ ID NO: 1019 - DNA, 120 bp, Artificial Sequence
  ENSG00000002726_4 (sequence is synthesized)
tgtcccccaggcctgggtaccagtcctcctgggcatcgaggcccatctccacagcagagtatgccctcctctaccacaccctgcaggaagccaccaagcccctgcatcagttcttcctca

SEQ ID NO: 1020 - DNA, 120 bp, Artificial Sequence
  ENSG00000002726_5 (sequence is synthesized)
ataccacaggcttctcattccaagactgccatgacagatgcctggccttcaccgatgtggccccccggggtgtggcttctggccagcgccgcagttggcttatcatacagcgctatgtag

SEQ ID NO: 1021 - DNA, 120 bp, Artificial Sequence
  ENSG00000002726_6 (sequence is synthesized)
aaggctactttctgcaccccactgggctggagctcctcgtggatcatgggagcacagatgctgggcactgggccgtggagcaggtgtggtacaacgggaagttctatgggagcccagagg

SEQ ID NO: 1022 - DNA, 120 bp, Artificial Sequence
  ENSG00000002726_7 (sequence is synthesized)
aactggctcggaagtatgcagatggagaggtggacgtggtggtcctggaggacccgctgcctgggggcaaggggcatgacagcacagaggagccgcccctcttctcctcccacaagcccc

SEQ ID NO: 1023 - DNA, 120 bp, Artificial Sequence
  ENSG00000002726_8 (sequence is synthesized)
gcggggacttccccagccccatccatgtgagcggcccccgcttggtccagccccacggccctcgcttcaggctggagggcaacgctgtgctctacggcggctggagctttgccttccggc

SEQ ID NO: 1024 - DNA, 120 bp, Artificial Sequence
  ENSG00000002726_9 (sequence is synthesized)
tgcgctcctcctccgggctgcaggtcctgaacgtgcacttcggcggagagcgcattgcctatgaggtcagcgtgcaagaggcagtggcgctgtatggaggacacacacctgcaggcatgc

SEQ ID NO: 1025 - DNA, 120 bp, Artificial Sequence
  ENSG00000002726_10 (sequence is synthesized)
agaccaagtacctcgatgtcggctggggcctgggcagcgtcactcatgagttagcccccggcatcgactgcccggagaccgccaccttcctggacactttccactactatgatgccgatg

SEQ ID NO: 1026 - DNA, 120 bp, Artificial Sequence
  ENSG00000002726_11 (sequence is synthesized)
attatccccgagccctctgcctctttgaaatgcccacaggggtgccccttcggcggcactttaattccaactttaaaggtggcttcaacttctatgcggggctgaagggccaggtgctgg

SEQ ID NO: 1027 - DNA, 120 bp, Artificial Sequence
  ENSG00000002726_12 (sequence is synthesized)
tgctgcggacaacttcaactgtctacaattatgattacatttgggactttatcttctaccccaacggggtgatggaggccaagatgcatgccactggctacgtccacgccaccttctaca

SEQ ID NO: 1028 - DNA, 120 bp, Artificial Sequence
  ENSG00000002726_13 (sequence is synthesized)
cccccgaggggctgcgccacggcactcgcctgcacacccacctgattggcaacatacacactcacttggtgcactaccgcgtagacctggatgtggcaggcaccaagaacagcttccaga

SEQ ID NO: 1029 - DNA, 120 bp, Artificial Sequence
  ENSG00000002726_14 (sequence is synthesized)
cactgcagatgaagctagaaaacatcaccaacccctggagcccaagacaccgcgtggtccagccaactctggagcagacgcagtactcctgggagcgccaggcggccttccgcttcaaaa

SEQ ID NO: 1030 - DNA, 120 bp, Artificial Sequence
  ENSG00000002726_15 (sequence is synthesized)
ggaagctgcctaagtacctgctctttaccagcccccaggagaacccctggggccacaagcgcacgtaccgcctgcagatccactccatggccgaccaggtgctgcccccaggctggcagg

SEQ ID NO: 1031 - DNA, 120 bp, Artificial Sequence
  ENSG00000002726_16 (sequence is synthesized)
aggagcaggccatcacctgggcaaggtaccccctggcagtgaccaagtaccgggagtcggagctgtgcagcagcagcatctaccaccagaacgacccctggcacccgcccgtggtctttg

SEQ ID NO: 1032 - DNA, 120 bp, Artificial Sequence
  ENSG00000002726_17 (sequence is synthesized)
agcagtttcttcacaacaacgagaacattgaaaatgaggacctggtggcctgggtgacggtgggcttcctgcacatcccccactcagaggacattcccaacacagccacacctgggaact

SEQ ID NO: 1033 - DNA, 120 bp, Artificial Sequence
  ENSG00000002726_18 (sequence is synthesized)
ccgtgggcttcctgctccggccattcaacttcttcccagaggacccctccctggcatccagagacactgtgatcgtgtggcctcgggacaacggccccaactacgtccagcgctggatcc

SEQ ID NO: 1034 - DNA, 120 bp, Artificial Sequence
  ENSG00000002726_19 (sequence is synthesized)
ctgaggacagggactgctcgatgcctcccccttttagctacaatgggacctatagacctgtgtgaccagcccccagttcctcccccagttcctcccaggaagcccaggagcctcactggg

SEQ ID NO: 1035 - DNA, 120 bp, Artificial Sequence
  ENSG00000002726_20 (sequence is synthesized)
gcagacaataaaccctcagagcctcgctctgtgtgctgcttcttgcggggaggcacagggccatgtgtgtaggaaacacacgaacagacgtgcacacacacagacgtgcacacacacaca

SEQ ID NO: 1036 - DNA, 120 bp, Artificial Sequence
  ENSG00000002726_21 (sequence is synthesized)
gacatgcacacacacacagacgtgcacacacacagacgtgcacgcactcacacggacatgcacacacatggcatgtactttattcacactggtctactgcagtccagaaaagccaccatt

SEQ ID NO: 1037 - DNA, 120 bp, Artificial Sequence
  ENSG00000002726_22 (sequence is synthesized)
tttggaggagacaagtttgggagcaggaaagccagtaggagtctactgcaggaatttagctttcaaatctgtacctgttgatgagagaacctccaggtttgtcccctactaccaatgatg

SEQ ID NO: 1038 - DNA, 120 bp, Artificial Sequence
  ENSG00000002726_23 (sequence is synthesized)
aggcaaacacagagagaggaacccctttgactaaagctgaattgtaaaggactaaagccctaacttctcttcgaatgacctgcattcaaatcaagagcggttgaattctctgttttgctg

SEQ ID NO: 1039 - DNA, 120 bp, Artificial Sequence
  ENSG00000002726_24 (sequence is synthesized)
gactgggaagacatgaccttacacaccttggttctttaacttgaccttgggaagacagggccagccagcaaggtggctggggagaaggccgaggtccccgggccgcagacgggaattgag

SEQ ID NO: 1040 - DNA, 120 bp, Artificial Sequence
  ENSG00000002726_25 (sequence is synthesized)
ggtcaggagccgaagtgaaactggagccggcgccacgagatgcagccctgaagggcacctccacccagtggccctcccccaccccactcccggggccctcctggcccagcgtcaccctgc

SEQ ID NO: 1041 - DNA, 120 bp, Artificial Sequence
  ENSG00000002726_26 (sequence is synthesized)
tgcgctaggacctacaagggcggcctctgggagccctctgctttacctcctctcctgggtcaggctgcagaaagaacaagctcctccaccctgcctgctttcaaatctgtacctgttgat

SEQ ID NO: 1042 - DNA, 120 bp, Artificial Sequence
  ENSG00000002726_27 (sequence is synthesized)
gaatctggtcagggtctcaaagatcgttaaaaagccgccaaagtttgcaactcgtcttgagtggctgctcctcccaaacggttctgcctctggtgtcttgttctaggagcggttgaattc

SEQ ID NO: 1043 - DNA, 120 bp, Artificial Sequence
  ENSG00000002726_28 (sequence is synthesized)
ggctacagagcaagactgtctcaggaaaaagaaaaaatagtctatttaaagaagaaaaaaaagaggcctggccaatatttaataggagaacacaagaactcacctcatatccttcctgct

SEQ ID NO: 1044 - DNA, 120 bp, Artificial Sequence
  ENSG00000002745_0 (sequence is synthesized)
aacagaagtttctcacctaggaatgcgaggggcgctcccgcatctcctgcacatctccacccctgcgcaggaggagatccccaggctgctctctccatctctcctacagctccctgcaaa

SEQ ID NO: 1045 - DNA, 120 bp, Artificial Sequence
  ENSG00000002745_1 (sequence is synthesized)
cgagggggaagctgctgagagtccctatcactgctggccttttaatgttgtatgcaaggaggaagagggcgagggataacttggtgctggacaactgacctgcggcccgaagggcctctg

SEQ ID NO: 1046 - DNA, 120 bp, Artificial Sequence
  ENSG00000002745_2 (sequence is synthesized)
gggagggggtgcaaaagaggagcggctgggctgggggactccatgcgggggcgatggacagggcggcgctcctgggactggcccgcttgtgcgcgctgtgggcagccctgctcgtgctgt

SEQ ID NO: 1047 - DNA, 120 bp, Artificial Sequence
  ENSG00000002745_3 (sequence is synthesized)
tcccctacggagcccaaggaaactggatgtggttgggcattgcctccttcggggttccagagaagctgggctgcgccaatttgccgctgaacagccgccagaaggagctgtgcaagagga

SEQ ID NO: 1048 - DNA, 120 bp, Artificial Sequence
  ENSG00000002745_4 (sequence is synthesized)
aaccgtacctgctgccgagcatccgagagggcgcccggctgggcattcaggagtgcgggagccagttcagacacgagagatggaactgcatgatcaccgccgccgccactaccgccccga

SEQ ID NO: 1049 - DNA, 120 bp, Artificial Sequence
  ENSG00000002745_5 (sequence is synthesized)
tgggcgccagccccctctttggctacgagctgagcagcggcaccaaagagacagcatttatttatgctgtgatggctgcaggcctggtgcattctgtgaccaggtcatgcagtgcaggca

SEQ ID NO: 1050 - DNA, 120 bp, Artificial Sequence
  ENSG00000002745_6 (sequence is synthesized)
acatgacagagtgttcctgtgacaccaccttgcagaacggcggctcagcaagtgaaggctggcactgggggggctgctccgatgatgtccagtatggcatgtggttcagcagaaagttcc

SEQ ID NO: 1051 - DNA, 120 bp, Artificial Sequence
  ENSG00000002745_7 (sequence is synthesized)
tagatttccccatcggaaacaccacgggcaaagaaaacaaagtactattagcaatgaacctacataacaatgaagctggaaggcaggctgtcgccaagttgatgtcagtagactgccgct

SEQ ID NO: 1052 - DNA, 120 bp, Artificial Sequence
  ENSG00000002745_8 (sequence is synthesized)
gccacggagtttccggctcctgtgctgtgaaaacatgctggaaaaccatgtcttcttttgaaaagattggccatttgttgaaggataaatatgaaaacagtatccagatatcagacaaaa

SEQ ID NO: 1053 - DNA, 120 bp, Artificial Sequence
  ENSG00000002745_9 (sequence is synthesized)
caaagaggaaaatgcgcaggagagaaaaagatcagaggaaaataccaatccataaggatgatctgctctatgttaataagtctcccaactactgtgtagaagataagaaactgggaatcc

SEQ ID NO: 1054 - DNA, 120 bp, Artificial Sequence
  ENSG00000002745_10 (sequence is synthesized)
cagggacacaaggcagagaatgcaaccgtacatcagagggtgcagatggctgcaacctcctctgctgtggccgaggttacaacacccatgtggtcaggcacgtggagaggtgtgagtgta

SEQ ID NO: 1055 - DNA, 120 bp, Artificial Sequence
  ENSG00000002745_11 (sequence is synthesized)
agttcatctggtgctgctatgtccgttgcaggaggtgtgaaagcatgactgatgtccacacttgcaagtaaccactccatccagccttgggcaagatgcctcagcaatatacaatggcat

SEQ ID NO: 1056 - DNA, 120 bp, Artificial Sequence
  ENSG00000002745_12 (sequence is synthesized)
tgcaaccagagaggtgcccatccctgtgcagcgctagtaaagttgactcttgcagtggaatccctagaaccttggacctgagagtttcccttacctgatcgacatattttcctttatctg

SEQ ID NO: 1057 - DNA, 120 bp, Artificial Sequence
  ENSG00000002745_13 (sequence is synthesized)
gattctaatgttgaaaaggtttatattcaccttttgatgatttggggaatatatattgacatacaaggaagataatctgtttcctaagcaagaaataacaggaaagatcccttatgccag

SEQ ID NO: 1058 - DNA, 120 bp, Artificial Sequence
  ENSG00000002745_14 (sequence is synthesized)
gaggcctgccatactcaggataagatccttgaatatggaacttagttacaggactcaataatggtgggtgaacattagtcatttttaaaagacacctcttatagcaataaggagacatta

SEQ ID NO: 1059 - DNA, 120 bp, Artificial Sequence
  ENSG00000002745_15 (sequence is synthesized)
acatgaatctcatttattctctcagtattttaactgaagaaattatactgtttgtgtgtggatagaagatgttgaaaagttaacataagcattgggtgctgacttaccctttcatgtact

SEQ ID NO: 1060 - DNA, 120 bp, Artificial Sequence
  ENSG00000002745_16 (sequence is synthesized)
tccaaagaaaggtaatcaaaaagaatcttcttaagtgatataatatccctaaaaaaatgatcattacagatgtttagtgacaaagaatcaatatgtaaaaagtataatgaatgatttaga

SEQ ID NO: 1061 - DNA, 120 bp, Artificial Sequence
  ENSG00000002745_17 (sequence is synthesized)
ttttaagtgccttttcactgggagaatctggaaaaacctccataaggtatatagcaatctttgatctttagattcatacttttatcacagatcagtttcaactgttaaaaacccacctct

SEQ ID NO: 1062 - DNA, 120 bp, Artificial Sequence
  ENSG00000002745_18 (sequence is synthesized)
gagatactggggggaggatcctgaaacatgcgggaaaaggagaggtaaacagtggaggtaaaaatataatttcatacattgtaaagaaaagcaccctttaaatgtgtaaagacagtgttt

SEQ ID NO: 1063 - DNA, 120 bp, Artificial Sequence
  ENSG00000002745_19 (sequence is synthesized)
tgtaaagaattttgtttaaaaagtttctattttgtaaatacagtacttaagttatatgatttatattaaaacatttattgacaaagcctaagagctaaggcagtaaaattatctcataaa

SEQ ID NO: 1064 - DNA, 120 bp, Artificial Sequence
  ENSG00000002745_20 (sequence is synthesized)
taatattagcttattttttttcatactattaatgctatttttttggacatcgaagagaatttaacttagcagttagttatatggatgtgtatttcttgctaaaatgacagttttatatgt

SEQ ID NO: 1065 - DNA, 120 bp, Artificial Sequence
  ENSG00000002745_21 (sequence is synthesized)
atgttatagattaaaatatgttgcaaaatatcaaaaatttgtgttatttcagcagtaagattaattgaattctcttttcacattagttatgcttaactcataaggttattataataaatt

SEQ ID NO: 1066 - DNA, 120 bp, Artificial Sequence
  ENSG00000002745_22 (sequence is synthesized)
tagtaaaagtcttaactggaaaaaagaatctaaatcagaatagtgatcaatttgtggatttgatatcctggatatttattatattttatgtaatgctgcatttctatttgaatgttaagt

SEQ ID NO: 1067 - DNA, 120 bp, Artificial Sequence
  ENSG00000002745_23 (sequence is synthesized)
ggtctttcttgtttttaatattcatgcatgtatattcatcatattttacaaggttcctggtaaaaattacagggctctatttaaggatgtattttaatgtaaatgcttatgttttttatg

SEQ ID NO: 1068 - DNA, 120 bp, Artificial Sequence
  ENSG00000002745_24 (sequence is synthesized)
aattgttaaatatttcagtattatatagaaaaaaatagatttttaaaattcagaatggacaaagagaatattcattttcttattaataagataaagaaatgtttccctgccccacagtct

SEQ ID NO: 1069 - DNA, 120 bp, Artificial Sequence
  ENSG00000002745_25 (sequence is synthesized)
tcattctatttctctttaattttattcactgaggcagagaaacaatttttgaaaaagagcaaacccatggaaaatgtctcagatctaatattaaaatcaagactaagcatttaactgtga

SEQ ID NO: 1070 - DNA, 120 bp, Artificial Sequence
  ENSG00000002745_26 (sequence is synthesized)
agcctgcaaaaaccacagagggcaaagccagaaagatggaaaggcacccatgcagctcaccacttgcctcagggagaccctcttcacaggggcttctcaaaagacctccctatggtggtt

SEQ ID NO: 1071 - DNA, 120 bp, Artificial Sequence
  ENSG00000002746_0 (sequence is synthesized)
gcatcaggcgctgttgttggagccggaacaccgtgcgactctgaccgaaccggccccctcctcgcgcacacactcgccgagccgcgcgcgcccctccgccgtgacagtggccgtggcctc

SEQ ID NO: 1072 - DNA, 120 bp, Artificial Sequence
  ENSG00000002746_1 (sequence is synthesized)
cgctctctcggggcacccggcagccagagcgcagcgagagcgggcggtcgccagggtcccctccccagccagtcccaggcgcccggtgcactatgcggggcacgtgcgccccccagctct

SEQ ID NO: 1073 - DNA, 120 bp, Artificial Sequence
  ENSG00000002746_2 (sequence is synthesized)
aatctgcgcgctgacaggagcatgatctgtgcccaggccagggctgccaagatatcaatgctatgttcagcagaaacggatacagcaagagcagcatagttcaaaaattgagggaggcat

SEQ ID NO: 1074 - DNA, 120 bp, Artificial Sequence
  ENSG00000002746_3 (sequence is synthesized)
cttctctcttttcctgggatttaaacgcgatttaggagggcagatgccctacccgaaaaggccaaccgttaaagaccccggcagtgttgtggtccaaggcgtctcaaagcaggtggccag

SEQ ID NO: 1075 - DNA, 120 bp, Artificial Sequence
  ENSG00000002746_4 (sequence is synthesized)
atctgcgtttctcatcagcagactcactccggctgtggctattacggaattgatgcgcgtacacgtggtgggtcattatgctgctgcacctgtgtagtgtgaagaatctgtaccagaaca

SEQ ID NO: 1076 - DNA, 120 bp, Artificial Sequence
  ENSG00000002746_5 (sequence is synthesized)
ggtttttaggcctggccgccatggcgtctccttctagaaactcccagagccgacgccggtgcaaggagccgctccgatacagctacaaccccgaccagttccacaacatggacctcaggg

SEQ ID NO: 1077 - DNA, 120 bp, Artificial Sequence
  ENSG00000002746_6 (sequence is synthesized)
gcggcccccacgatggcgtcaccattccccgctccaccagcgacactgacctggtcacctcggacagccgctccacgctcatggtcagcagctcctactattccatcgggcactctcagg

SEQ ID NO: 1078 - DNA, 120 bp, Artificial Sequence
  ENSG00000002746_7 (sequence is synthesized)
acctggtcatccactgggacataaaggaggaagtggacgctggggactggattggcatgtacctcattgatgaggtcttgtccgaaaactttctggactataaaaaccgtggagtcaatg

SEQ ID NO: 1079 - DNA, 120 bp, Artificial Sequence
  ENSG00000002746_8 (sequence is synthesized)
gttctcatcggggccagatcatctggaagatcgatgccagctcgtactttgtggaacctgaaactaagatctgcttcaaatactaccatggagtgagtggggccctgcgagcaaccaccc

SEQ ID NO: 1080 - DNA, 120 bp, Artificial Sequence
  ENSG00000002746_9 (sequence is synthesized)
ccagtgtcacggtcaaaaactcggcagctcctatttttaaaagcattggtgctgatgagaccgtccaaggacaaggaagtcggaggctgatcagcttctctctctcagatttccaagcca

SEQ ID NO: 1081 - DNA, 120 bp, Artificial Sequence
  ENSG00000002746_10 (sequence is synthesized)
tggggttgaagaaagggatgtttttcaacccagacccttatctgaagatttccattcagcctgggaaacacagcatcttccccgccctccctcaccatggacaggagaggagatccaaga

SEQ ID NO: 1082 - DNA, 120 bp, Artificial Sequence
  ENSG00000002746_11 (sequence is synthesized)
tcataggcaacaccgtgaaccccatctggcaggccgagcaattcagttttgtgtccttgcccactgacgtgctggaaattgaggtgaaggacaagtttgccaagagccgccccatcatca

SEQ ID NO: 1083 - DNA, 120 bp, Artificial Sequence
  ENSG00000002746_12 (sequence is synthesized)
agcgcttcttgggaaagctgtcgatgcccgttcaaagactcctggagagacacgccataggggatagggtggtcagctacacacttggccgcaggcttccaacagatcatgtgagtggac

SEQ ID NO: 1084 - DNA, 120 bp, Artificial Sequence
  ENSG00000002746_13 (sequence is synthesized)
agctgcaattccgatttgagatcacttcctccatccacccagatgatgaggagatttccctgagtaccgagcctgagtcagcccaaattcaggacagccccatgaacaacctgatggaaa

SEQ ID NO: 1085 - DNA, 120 bp, Artificial Sequence
  ENSG00000002746_14 (sequence is synthesized)
gcggcagtggggaacctcggtctgaggcaccagagtcctctgagagctggaagccagagcagctgggtgagggcagtgtccccgatggtccagggaaccaaagcatagagctttccagac

SEQ ID NO: 1086 - DNA, 120 bp, Artificial Sequence
  ENSG00000002746_15 (sequence is synthesized)
cagctgaggaagcagcagtcatcacggaggcaggagaccagggcatggtctctgtgggacctgaaggggctggggagctcctggcccaggtgcaaaaggacatccagcctgcccccagtg

SEQ ID NO: 1087 - DNA, 120 bp, Artificial Sequence
  ENSG00000002746_16 (sequence is synthesized)
cagaagagctggccgagcagctggacctgggtgaggaggcatcagcactgctgctggaagacggtgaagccccagccagcaccaaggaggagcccttggaggaggaagcaacgacccaga

SEQ ID NO: 1088 - DNA, 120 bp, Artificial Sequence
  ENSG00000002746_17 (sequence is synthesized)
gccgggctggaagggaagaagaggagaaggagcaggaggaggagggagatgtgtctaccctggagcagggagagggcaggctgcagctgcgggcctcggtgaagagaaaaagcaggccct

SEQ ID NO: 1089 - DNA, 120 bp, Artificial Sequence
  ENSG00000002746_18 (sequence is synthesized)
gctccttgcctgtgtccgagctggagacggtgatcgcgtcagcctgcggggaccccgagaccccgcggacacactacatccgcatccacaccctgctgcacagcatgccctccgcccagg

SEQ ID NO: 1090 - DNA, 120 bp, Artificial Sequence
  ENSG00000002746_19 (sequence is synthesized)
gcggcagcgcggcagaggaggaggacggcgcggaggaggagtccaccctcaaggactcctcggagaaggatgggctcagcgaggtggacacggtggccgctgacccgtctgccctggaag

SEQ ID NO: 1091 - DNA, 120 bp, Artificial Sequence
  ENSG00000002746_20 (sequence is synthesized)
aggacagagaagagcccgagggggctactccaggcacggcgcaccctggccactccgggggccacttccccagcctggccaatggcgcggcccaggatggcgacacgcaccccagcaccg

SEQ ID NO: 1092 - DNA, 120 bp, Artificial Sequence
  ENSG00000002746_21 (sequence is synthesized)
ggagcgagagcgactccagccccaggcaaggcggggaccacagttgcgagggctgtgacgcgtcctgctgcagcccctcgtgctacagctcctcgtgctacagcacgtcctgctacagca

SEQ ID NO: 1093 - DNA, 120 bp, Artificial Sequence
  ENSG00000002746_22 (sequence is synthesized)
gctcgtgctacagcgcctcgtgctacagcccctcctgctacaacggcaacaggttcgccagccacacgcgcttctcctccgtggacagcgccaagatctccgagagcacggtcttctcct

SEQ ID NO: 1094 - DNA, 120 bp, Artificial Sequence
  ENSG00000002746_23 (sequence is synthesized)
cgcaagacgacgaggaggaggagaacagcgcgttcgagtcggtacccgactccatgcagagccctgagctggacccggagtccacgaacggcgctgggccgtggcaagacgagctggccg

SEQ ID NO: 1095 - DNA, 120 bp, Artificial Sequence
  ENSG00000002746_24 (sequence is synthesized)
cccctagcgggcacgtggaaagaagcccggaaggtctggaatcccccgtggcaggtccaagcaatcggagagaaggtgaatgtcctatactccataattcccagccagtaagccagcttc

SEQ ID NO: 1096 - DNA, 120 bp, Artificial Sequence
  ENSG00000002746_25 (sequence is synthesized)
cttccctgaggcctgaacatcatcactacccaacaatcgatgagcctcttccaccaaactgggaagctcgaattgacagccacgggcgggtcttttatgtggaccacgtgaaccgcacaa

SEQ ID NO: 1097 - DNA, 120 bp, Artificial Sequence
  ENSG00000002746_26 (sequence is synthesized)
ccacctggcagcgtccgacggcagcagccaccccggatggcatgcggagatcggggtccatccagcagatggagcaactcaacaggcggtatcaaaacattcagcgaaccattgcaacag

SEQ ID NO: 1098 - DNA, 120 bp, Artificial Sequence
  ENSG00000002746_27 (sequence is synthesized)
agaggtccgaagaagattctggcagccaaagctgcgagcaagccccagcaggaggaggcggaggtggagggagtgactcagaagccgaatcttcccagtccagcttagatctaaggagag

SEQ ID NO: 1099 - DNA, 120 bp, Artificial Sequence
  ENSG00000002746_28 (sequence is synthesized)
aagggtcactttctccagtgaactcacaaaaaatcaccttgctgctgcagtccccagcggtcaagttcatcaccaaccccgagttcttcactgtgctacatgccaattatagtgcctacc

SEQ ID NO: 1100 - DNA, 120 bp, Artificial Sequence
  ENSG00000002746_29 (sequence is synthesized)
gagtcttcaccagtagcacctgcttaaagcacatgattctgaaagtccgacgggatgctcgcaattttgaacgctaccagcacaaccgggacttggtgaatttcatcaacatgttcgcag

SEQ ID NO: 1101 - DNA, 120 bp, Artificial Sequence
  ENSG00000002746_30 (sequence is synthesized)
acactcggctggaactgccccggggctgggagatcaaaacggaccagcagggaaagtcttttttcgtggaccacaacagtcgagctaccactttcattgacccccgaatccctcttcaga

SEQ ID NO: 1102 - DNA, 120 bp, Artificial Sequence
  ENSG00000002746_31 (sequence is synthesized)
acggtcgtcttcccaatcatctaactcaccgacagcacctccagaggctccgaagttacagcgctggagaggcctcagaagtttctagaaacagaggagcctctttactggccaggccag

SEQ ID NO: 1103 - DNA, 120 bp, Artificial Sequence
  ENSG00000002746_32 (sequence is synthesized)
gacacagcttagtagctgctattcgaagccaacatcaacatgagtcattgccactggcatataatgacaagattgtggcatttcttcgccagccaaacatttttgaaatgctgcaagagc

SEQ ID NO: 1104 - DNA, 120 bp, Artificial Sequence
  ENSG00000002746_33 (sequence is synthesized)
gtcagccaagcttagcaagaaaccacacactcagggagaaaatccattacattcggactgagggtaatcacgggcttgagaagttgtcctgtgatgcggatctggtcattttgctgagtc

SEQ ID NO: 1105 - DNA, 120 bp, Artificial Sequence
  ENSG00000002746_34 (sequence is synthesized)
tctttgaagaagagattatgtcctacgtccccctgcaggctgccttccaccctgggtatagcttctctccccgatgttcaccctgttcttcacctcagaactccccaggtttacagagag

SEQ ID NO: 1106 - DNA, 120 bp, Artificial Sequence
  ENSG00000002746_35 (sequence is synthesized)
ccagtgcaagagccccttccccctaccgaagagactttgaggccaagctccgcaatttctacagaaaactggaagccaaaggatttggtcagggtccggggaaaattaagctcattattc

SEQ ID NO: 1107 - DNA, 120 bp, Artificial Sequence
  ENSG00000002746_36 (sequence is synthesized)
gccgggatcatttgttggagggaaccttcaatcaggtgatggcctattcgcggaaagagctccagcgaaacaagctctacgtcacctttgttggagaggagggcctggactacagtggcc

SEQ ID NO: 1108 - DNA, 120 bp, Artificial Sequence
  ENSG00000002746_37 (sequence is synthesized)
cctcgcgggagttcttcttccttctgtctcaggagctcttcaacccttactatggactctttgagtactcggcaaatgatacttacacggtgcagatcagccccatgtccgcatttgtag

SEQ ID NO: 1109 - DNA, 120 bp, Artificial Sequence
  ENSG00000002746_38 (sequence is synthesized)
aaaaccatcttgagtggttcaggtttagcggtcgcatcctgggtctggctctgatccatcagtaccttcttgacgctttcttcacgaggcccttctacaaggcactcctgagactgccct

SEQ ID NO: 1110 - DNA, 120 bp, Artificial Sequence
  ENSG00000002746_39 (sequence is synthesized)
ctttcactgttaatgaagaggtttttggacaggtcacggaaagggagttgaagtctggaggagccaacacacaggtgacggagaaaaacaagaaggagtacatcgagcgcatggtgaagt

SEQ ID NO: 1111 - DNA, 120 bp, Artificial Sequence
  ENSG00000002746_40 (sequence is synthesized)
ggcgggtggagcgcggcgtggtacagcagaccgaggcgctggtgcgcggcttctacgaggttgtagactcgaggctggtgtccgtgtttgatgccagggagctggagctggtgatagctg

SEQ ID NO: 1112 - DNA, 120 bp, Artificial Sequence
  ENSG00000002746_41 (sequence is synthesized)
gcaccgcggaaatcgacctaaatgactggcggaataacactgagtaccggggaggttaccacgatgggcatcttgtgatccgctggttctgggctgcggtggagcgcttcaataatgagc

SEQ ID NO: 1113 - DNA, 120 bp, Artificial Sequence
  ENSG00000002746_42 (sequence is synthesized)
agaggctgagattactgcagtttgtcacgggaacatccagcgtgccctacgaaggcttcgcagccctccgtgggagcaatgggcttcggcgcttctgcatagagaaatgggggaaaatta

SEQ ID NO: 1114 - DNA, 120 bp, Artificial Sequence
  ENSG00000002746_43 (sequence is synthesized)
cttctctccccagggcacacacatgcttcaaccgactggatcttccaccgtatccctcgtactccatgttgtatgaaaagctgttaacagcagtagaggaaaccagcacctttggacttg

SEQ ID NO: 1115 - DNA, 120 bp, Artificial Sequence
  ENSG00000002746_44 (sequence is synthesized)
agtgaggacatggaacctcgcctgacattttcctggccagtgacatcacccttcctgggatgatccccttttccctttcccttaatcaactctcctttgattttggtattccatgatttt

SEQ ID NO: 1116 - DNA, 120 bp, Artificial Sequence
  ENSG00000002746_45 (sequence is synthesized)
tattttcaaaccaaatcaggattgacaaaagctgtgcatgaagaactgccttcttctaagatctaaccttcaggcttctctcctctgttttcaatgaactgctagcctgtatgcaatatt

SEQ ID NO: 1117 - DNA, 120 bp, Artificial Sequence
  ENSG00000002746_46 (sequence is synthesized)
aaaaaacagctgtctcaaggtctgtgtatatctccacatacctccattactaacaatgaaatatgaatgcaagttaagctacacttgaccaaatggtaataaatgtttacttccatttct

SEQ ID NO: 1118 - DNA, 120 bp, Artificial Sequence
  ENSG00000002746_47 (sequence is synthesized)
atcattgaagggaaaatgtgagcattaagcactccaggctttcatatgcccatgtcttctgagcagagccaccattttttataatttctaataaccaactccagaactaggagctgatca

SEQ ID NO: 1119 - DNA, 120 bp, Artificial Sequence
  ENSG00000002746_48 (sequence is synthesized)
actctttgttttcctctccatctacttttccctgtgcataatatccatccaaaggacaacagtggcaaagctgaaatttttatacattcaactcatgattcacatgtggcatcagtccca

SEQ ID NO: 1120 - DNA, 120 bp, Artificial Sequence
  ENSG00000002746_49 (sequence is synthesized)
tcagccggaactagcctagacatacggtgcaaatatgacacttctaacgattaacaacagcaagaaaacacctgctgctgatgcaatgcaatgcatcccaatggttgtggggattgtggg

SEQ ID NO: 1121 - DNA, 120 bp, Artificial Sequence
  ENSG00000002746_50 (sequence is synthesized)
ctcaactcaagagaagtttaggagggggagcatccctagtgaatactcacaccacaagaaggacaaacttgtgcacatgtccaagaaagaaagcttcttgattgaggtagcatgaaggat

SEQ ID NO: 1122 - DNA, 120 bp, Artificial Sequence
  ENSG00000002746_51 (sequence is synthesized)
gaggcttcagcccccattgtcttatgtagaatgtggcaatgccaactggagaaagggaagaaggacatattaccttggtttgaatccctgagttctgtactgttctgttttgtttagtct

SEQ ID NO: 1123 - DNA, 120 bp, Artificial Sequence
  ENSG00000002746_52 (sequence is synthesized)
agccacagttcttcacaaaggaaaaaaaaatgtgtagatgataccatgacttttgttaaagccatgacttttgtttgcttggcagacaaaccctttttttaaaactttgatatttttttt

SEQ ID NO: 1124 - DNA, 120 bp, Artificial Sequence
  ENSG00000002746_53 (sequence is synthesized)
tcacatttttttttccttttcctttcttaatcatggagttcaagttcctttgcattcgattgtccatcgggaccacactaggaagctgcagagagtgatggtgcttgttagggatcaagg

SEQ ID NO: 1125 - DNA, 120 bp, Artificial Sequence
  ENSG00000002746_54 (sequence is synthesized)
gcaacatagtacttctccttcacccatagtaatcctcctggggcagaaacataacaccccaaaggcacgttgatttgtatcaaaataaatatccagtttcttttagcattcagtgaaaac

SEQ ID NO: 1126 - DNA, 120 bp, Artificial Sequence
  ENSG00000002746_55 (sequence is synthesized)
atatctcagaaaacttcatgttgtcagaaaaacagctgcaggctccaaagacagcctaacctctcaactacatttgaaataaacccaaccataatggtcatttgctatttttctaacgtt

SEQ ID NO: 1127 - DNA, 120 bp, Artificial Sequence
  ENSG00000002746_56 (sequence is synthesized)
gttatccatgttgcctgaaataggtcataaatgaaagtgtttttcttcactgggaaaaagaagagctcaagagaccccactatttaaatgtcatttaattgttttccatattaaaacaag

SEQ ID NO: 1128 - DNA, 120 bp, Artificial Sequence
  ENSG00000002746_57 (sequence is synthesized)
ggagaaatgtaagacgaagtgaatttcatatgaagccaatggctcattataccagtttgtgtctggacagtgtgttatttgtgttcctacactctaaagcattccggccaggagcggtgg

SEQ ID NO: 1129 - DNA, 71 bp, Artificial Sequence
  ENSG00000002746_58 (sequence is synthesized)
acttgggaggctgaggaaggagaatcgctcaaacctgagatgatcaagggagacaccatctaaaaaaaaaa

SEQ ID NO: 1130 - DNA, 120 bp, Artificial Sequence
  ENSG00000002746_59 (sequence is synthesized)
ctggatgatcaagggagacaccatctaaaaaaaaaataaataaaaataaaagcatttttttagtaggaattatctacaatgcccagcaccccttgcagcgatgtgtccgttgtcaatcaa

SEQ ID NO: 1131 - DNA, 120 bp, Artificial Sequence
  ENSG00000002746_60 (sequence is synthesized)
ggagtatacattatagaaatttagacttttattgtctaaaaagaatatttactgagacaggatggaatctgtaagttatatgatatagaatttgagggatatgtaaaattcagtacacgt

SEQ ID NO: 1132 - DNA, 120 bp, Artificial Sequence
  ENSG00000002746_61 (sequence is synthesized)
tcagcatctgaaaaataatggattccaatggagctattgttttatttatgaaatcagagcataaggactatgcaaatcattgaaccataaccttattctaactcttgcaacaacatctct

SEQ ID NO: 1133 - DNA, 120 bp, Artificial Sequence
  ENSG00000002746_62 (sequence is synthesized)
aatataggggcatcttttatctttagaacttggtgttatatatatgtaaatactcattaattcaagcactctctttctagtactcacattatttgtcaggcattggaaaaggagaaagct

SEQ ID NO: 1134 - DNA, 120 bp, Artificial Sequence
  ENSG00000002746_63 (sequence is synthesized)
gtttacaagatggaccagctcctggagagctttgcaatttatataaattactaattaatctattaattagattaattaatatctaatctacccatatacaaaaggaatgcagtatctcag

SEQ ID NO: 1135 - DNA, 120 bp, Artificial Sequence
  ENSG00000002746_64 (sequence is synthesized)
aaattatatatagataggtaactttggcatacatgatttttcaactaccgtttccttatccaccagtactactgatgtcacagctatagatctatcccacaaagcataacaggaacattc

SEQ ID NO: 1136 - DNA, 120 bp, Artificial Sequence
  ENSG00000002746_65 (sequence is synthesized)
tttcacaaaagtgcaaaatttcatgaagaaatgctgatgtcacggtcacctgaaagaagatgaagcttgtaatattttattgcaaccttgcatagaatccttaaggaagaaaaacaaaga

SEQ ID NO: 1137 - DNA, 120 bp, Artificial Sequence
  ENSG00000002746_66 (sequence is synthesized)
gaagaggaacacagaaacaagttatggaaattcatgtttaccttatttataaggctgatttttaaattatatataatttttcattcaatatgtatatgaaatgaaatagctatagaacta

SEQ ID NO: 1138 - DNA, 120 bp, Artificial Sequence
  ENSG00000002746_67 (sequence is synthesized)
aatttcacttaggtggaggtataaaccaccttaaattatatagttcggcagaaagacagatctatttgttaccacctgtaatttttttttaagcatgagttttctccatggaggcaaatt

SEQ ID NO: 1139 - DNA, 120 bp, Artificial Sequence
  ENSG00000002746_68 (sequence is synthesized)
gcaaaattaatcacttataaatttataagccacaatctccctaaaacaattgattttagtaagagtgtaacgcctttaatcaggggacaaacaagaacaataaataagagaagatttatg

SEQ ID NO: 1140 - DNA, 120 bp, Artificial Sequence
  ENSG00000002746_69 (sequence is synthesized)
ttacaactttgaaaaatgcttttaaaattctataaagtgttataataatttcatggatatcacaaatgttttattctacagtgtgaagatgataatcctaaaaatggaaattgattctgt

SEQ ID NO: 1141 - DNA, 120 bp, Artificial Sequence
  ENSG00000002746_70 (sequence is synthesized)
gaggtcaggagaagtattctaaatctactgaactctttgtaatttcctatgtatataaatgagtggaggttgtgaagatgccgagagagtggtgaaaaaattaagaaaaagagacatatg

SEQ ID NO: 1142 - DNA, 120 bp, Artificial Sequence
  ENSG00000002746_71 (sequence is synthesized)
atttgggggagcaggcgttaaacatgcaagatctaaattttcttttaatacatgaccatatgtccttgaacagtaagtatatttgtgtggcaagccaatggctgagttttccagggtagt

SEQ ID NO: 1143 - DNA, 120 bp, Artificial Sequence
  ENSG00000002746_72 (sequence is synthesized)
tttaatattacatccatcatattttcagtccatgtgtcaaaccatgtgtccaaaatttgggttcggaaatttctcagttgccacaaatattttcccagtcaagatgaaacactttcaaat

SEQ ID NO: 1144 - DNA, 120 bp, Artificial Sequence
  ENSG00000002746_73 (sequence is synthesized)
tcccagtcaagatgaaacactttcaaatgaaagtagttagaactttacataacaaatgtggtgctttattattattattattattatttttattattattattattacgtacttcagtgt

SEQ ID NO: 1145 - DNA, 120 bp, Artificial Sequence
  ENSG00000002746_74 (sequence is synthesized)
tcataaaaatctgggatggatgttccagccatcataaggtccaaaagaaaagagaaagtgttattttcctgttagtgacatgtagtccctttgttctagtaggaaaaaaggtgcctagag

SEQ ID NO: 1146 - DNA, 120 bp, Artificial Sequence
  ENSG00000002746_75 (sequence is synthesized)
gtagtatatagagtaaatattgttcctttagcctacttcctgcagcttccaatttatccaaggaaatgtctacaacaattttgttcaaaagtctgttctagtcaatagcaggagaagtcc

SEQ ID NO: 1147 - DNA, 120 bp, Artificial Sequence
  ENSG00000002746_76 (sequence is synthesized)
acgttattgggctgattttgcttacatcagcaagagaaatgtcacgtgatactcaggccgcgctttctcttccatcacaccatcttcaaggaatgtcaataaactcactttggtatggca

SEQ ID NO: 1148 - DNA, 120 bp, Artificial Sequence
  ENSG00000002746_77 (sequence is synthesized)
acaccaacagaaaatcaggacatcattaattctctacacttattgatttggaacctccattgaagcagcaagctcagcacagaaataaaactgtcctggtgagtcgctcacagcctgtcc

SEQ ID NO: 1149 - DNA, 120 bp, Artificial Sequence
  ENSG00000002746_78 (sequence is synthesized)
cagtaactgttccggagcgtcagcctgacgcagcacccctgaaggaccacgccgtgcgggctgcgagcctcgcccttaaccatgcccagcaggaccagagctgccagcacaaatgaaggt

SEQ ID NO: 1150 - DNA, 120 bp, Artificial Sequence
  ENSG00000002746_79 (sequence is synthesized)
ttctgagcctgcactttaagaaggcgctcttgttttgaatacgtagtctgtcctgttctttcaaagtagatcctggtcaagaatgtctccaaaactggattaagccagtgtacttgaatg

SEQ ID NO: 1151 - DNA, 120 bp, Artificial Sequence
  ENSG00000002746_80 (sequence is synthesized)
ggaatatagacaaccaggacagacttggaatgttttttaatgtattggcccagcaaagctagaaatcctccactttacctaacagaagataattagaattaaaaatggcactaactgaaa

SEQ ID NO: 1152 - DNA, 120 bp, Artificial Sequence
  ENSG00000002746_81 (sequence is synthesized)
gttacagcgctggagagggaccccagcttcctctgcaaatgggtgaccactaacgtgtgttccagctgtgtgattctcagagtctgtggggcttgattccacgtcttcaggaccgcataa

SEQ ID NO: 1153 - DNA, 120 bp, Artificial Sequence
  ENSG00000002746_82 (sequence is synthesized)
ccattaactacatagagctaagaggagcaggaaaggcaggacggaaggatggcaggtttgtctttaggcaagttgataatgtgtgtgaaaatagcagggtatctgattagatatgacagt

SEQ ID NO: 1154 - DNA, 120 bp, Artificial Sequence
  ENSG00000002746_83 (sequence is synthesized)
taaacagatggaaatatgagactcagcaatcatcgatgggttatttccataatccattatttttctgtgtcccgtatcacaggcaatagggaattaactatagatatttcttagactaca

SEQ ID NO: 1155 - DNA, 120 bp, Artificial Sequence
  ENSG00000002746_84 (sequence is synthesized)
acttacaagtgtgggtattttctgttcacctacataagccattctcttgagtgttattcagcagttgatttttttataaattgcatgtaaggacagaattaaaatgggtttctatattaa

SEQ ID NO: 1156 - DNA, 120 bp, Artificial Sequence
  ENSG00000002746_85 (sequence is synthesized)
aattatcaagcagcccttggatcaaagggaagtctgatcctggggactttcttatgcctcccccagagctatggataatttccctgcctgcattcttcactgcaactctcttttatgaga

SEQ ID NO: 1157 - DNA, 120 bp, Artificial Sequence
  ENSG00000002746_86 (sequence is synthesized)
caggtcgtgcccaaaggtggcctgtaggctgcaatagtatagtctcacagagagtcaaaatggtatcattatatttcctttgtttttcctactaattatgttgcctgagccaacataagt

SEQ ID NO: 1158 - DNA, 120 bp, Artificial Sequence
  ENSG00000002746_87 (sequence is synthesized)
gtttgttatattaaacaaacccatcccttttcacttgatgtgtaacactggttacttacccaagagagtaaaaaatcctattaaaaatattaaacagtattaaaagaagccctcaatggg

SEQ ID NO: 1159 - DNA, 120 bp, Artificial Sequence
  ENSG00000002746_88 (sequence is synthesized)
gcatttttctgtacaggtagaaactaaagtttgttttactatgaagaatattatttcattcatatgccagtctggtatgtaagatttaatcatatgtgacatttccataacaagatggaa

SEQ ID NO: 1160 - DNA, 120 bp, Artificial Sequence
  ENSG00000002746_89 (sequence is synthesized)
tactgggtaactactgtagagtttcttacttagaagacactagtatctgcagatgctagataacatggataagaatttgaaagcatgattctcatggaatgacagcaattaagatgctca

SEQ ID NO: 1161 - DNA, 120 bp, Artificial Sequence
  ENSG00000002746_90 (sequence is synthesized)
cagaattcaattgtatatgagaatgggtttctgttttgtctcttttacattcatgtccactcatggttctcattaaagtggactatgaccagataacagccctatgtataatatgtattt

SEQ ID NO: 1162 - DNA, 120 bp, Artificial Sequence
  ENSG00000002746_91 (sequence is synthesized)
ctttaggtaacagggactacatttgaaaacactaaataaagctttctattgataaacatatacttatatacaatgtaacccttacaaagatagcaaaagaatgagaaaaaaatatgcaga

SEQ ID NO: 1163 - DNA, 120 bp, Artificial Sequence
  ENSG00000002746_92 (sequence is synthesized)
atttccaagtgtcttaatttaaagttctttggattatcagaaggactttggaatcacggataattatcataaagacatttattattaattggaaccttatggtgtgtaggcagcagggtg

SEQ ID NO: 1164 - DNA, 120 bp, Artificial Sequence
  ENSG00000002746_93 (sequence is synthesized)
cacagagacctgccactaactctccagccaaagggagctgagtttatggagctgcagtcacgtgtcacatgcagtgtttgcacttgccattcatggttgtgaggattaaacagacaaaaa

SEQ ID NO: 1165 - DNA, 120 bp, Artificial Sequence
  ENSG00000002746_94 (sequence is synthesized)
aaagaacctagcacggccactggcacgtagtaggaacacaaaagaaaatggtattccttgtgatcttttttatttcatttagtcctcataatgcttctgtgacagcattatcaccattcc

SEQ ID NO: 1166 - DNA, 120 bp, Artificial Sequence
  ENSG00000002746_95 (sequence is synthesized)
tgcacgaggaaacaaggcttcaaaaggatcaataattatgtaaacccaaggcttgtgggtggcagagatccggccggaattcagactcacacctgtgtctctccaaagtccgagggccat

SEQ ID NO: 1167 - DNA, 120 bp, Artificial Sequence
  ENSG00000002746_96 (sequence is synthesized)
ccccacacaacaggcttctctcagggttcctaggactgattctgtagtttattgtgggccatgcttttcatttctctccttctctgccctactggctgctctcacagctgttagcacctc

SEQ ID NO: 1168 - DNA, 120 bp, Artificial Sequence
  ENSG00000002746_97 (sequence is synthesized)
tgccagggggtgggctggagaacaaaaacaggggctgtgtgggattctttctaccccagcacccagtgcactgccgcccagcatgcattagatagataccagttcgtacgtaaggaacag

SEQ ID NO: 1169 - DNA, 120 bp, Artificial Sequence
  ENSG00000002746_98 (sequence is synthesized)
aacttctctctccagctcgctgcagccgcagagcccctctgccctcccatgctgagttctctcctaagtccaagctgccggctcctatcttcttagcactgtcccgccctccaagcctcc

SEQ ID NO: 1170 - DNA, 120 bp, Artificial Sequence
  ENSG00000002746_99 (sequence is synthesized)
cactgtggaaaggcacatccccagctgaaagcaagtacctgaggtggaaaagggtgtccccgaccaaaagaaggttagctatgattttcccagtgttcttgccacccagggaaatggaga

SEQ ID NO: 1171 - DNA, 120 bp, Artificial Sequence
  ENSG00000002746_100 (sequence is synthesized)
gcacagatcgagtgtgattgagcttacacctctccaagaggcaacaacagcaagccatggaggcgtttttcctcccaccctctttgatgggatgatagactgccccctggtggcggcgca

SEQ ID NO: 1172 - DNA, 120 bp, Artificial Sequence
  ENSG00000002746_101 (sequence is synthesized)
gagcagctcctcctccaaagccttctgcttccacagcccctgggggccacttctgcagtgctgcctcctccggaggtgtcccaccgtggttaggagcagagtgttggggtgatggccatg

SEQ ID NO: 1173 - DNA, 120 bp, Artificial Sequence
  ENSG00000002746_102 (sequence is synthesized)
gaagcagtggccatgcagcctgagccatggcagaaccccagagtgcacccacaacaaaagtgaatccactttgcaccgcagcttccctctgccctcagcacatgctctccccataaagcc

SEQ ID NO: 1174 - DNA, 120 bp, Artificial Sequence
  ENSG00000002746_103 (sequence is synthesized)
ccctgcatccgtggtttctgaaacgtttggctccacctgtactggctgcctccctgccctgagatatttgcacctttcccccctgggcacacatgcactctcatttccaatcctccttcg

SEQ ID NO: 1175 - DNA, 120 bp, Artificial Sequence
  ENSG00000002746_104 (sequence is synthesized)
attccttggcctgtaaaatcccaggcttctgttggctgtctgcctgtaactctaaccatctcaccttcgcattgaagtgtcactggctgtcttgaaccattatttagtggtcctacctta

SEQ ID NO: 1176 - DNA, 120 bp, Artificial Sequence
  ENSG00000002746_105 (sequence is synthesized)
tgcccccagctggacataagctatttaaaggcaggggcgatgtatgacatgctttgtatcaactgcagcacctttcacatggcaggggctcaaaaaatatttgttaagtgggtgaaaagc

SEQ ID NO: 1177 - DNA, 120 bp, Artificial Sequence
  ENSG00000002746_106 (sequence is synthesized)
tcgccagtcattgcctgaactcggctttcctggaccttaggggataaatagtgtggtccagcactgccctgggtgagctgagtcatgcccttggcagggtcgaggagctcccgtgaggag

SEQ ID NO: 1178 - DNA, 120 bp, Artificial Sequence
  ENSG00000002746_107 (sequence is synthesized)
accaatcgcctagcgtgagtcttcttccgggattgctcgccctctgccccctaggtgccgggcgccgcccgtccccacctccatcagaactcgggtcatctgcggagccttggctgcggc

SEQ ID NO: 1179 - DNA, 120 bp, Artificial Sequence
  ENSG00000002746_108 (sequence is synthesized)
ggtgacaatgcagcaaaatccgagggctcaaacaatgtggcccctccatccccggctccagggcattctgattgctctgccgctttgacgtcccggccacttggctgattttcagagcca

SEQ ID NO: 1180 - DNA, 120 bp, Artificial Sequence
  ENSG00000002746_109 (sequence is synthesized)
tgatgcgcggtgtctctgtcttgcacacagaggctgggcaccataacttcttccctgccgaatttcagcgcgtagggggagctggcagggacacaggctgcagagatgcccggcttcctg

SEQ ID NO: 1181 - DNA, 120 bp, Artificial Sequence
  ENSG00000002746_110 (sequence is synthesized)
tggttccgggcacagcgcgcctcagtctgcattgggctgacaccagagagcatgtggggattttcctagttgccgaagaagatattatttgacgttgctgtagttttgtgcttacttctc

SEQ ID NO: 1182 - DNA, 88 bp, Artificial Sequence
  ENSG00000002746_111 (sequence is synthesized)
acccccgaatccctcttcagaacggtcgtcttcccaatcatctaactcaccgacagcacctccagaggctccgaagttacagcgctgg

SEQ ID NO: 1183 - DNA, 120 bp, Artificial Sequence
  ENSG00000002822_0 (sequence is synthesized)
gggcgccagctgtccatctgtccatgtgcaactgagactcaattggtggcttgctggtggggatttggtggcatgcttccttgcttccattttttgtctggtaaattggcagcatggctc

SEQ ID NO: 1184 - DNA, 120 bp, Artificial Sequence
  ENSG00000002822_1 (sequence is synthesized)
ccagttgccattgaagaatgtggttacaggcatgggtgtattatgagctccaatgtgcgttaggggagtggggctgtccagaggctctgctgactgcacggctgatggcacgtggaaagg

SEQ ID NO: 1185 - DNA, 120 bp, Artificial Sequence
  ENSG00000002822_2 (sequence is synthesized)
ctgcccctgaccagtcctttgtctgtccccggaaggaaagcaaccatggaagacctgggggaaaacaccatggttttatccaccctgagatctttgaacaacttcatctctcagcgtgtg

SEQ ID NO: 1186 - DNA, 120 bp, Artificial Sequence
  ENSG00000002822_3 (sequence is synthesized)
gagggaggctctggactggatatttctacctcggccccaggttctctgcagatgcagtaccagcagagcatgcagctggaggaaagagcagagcagatccgttcgaagtcccacctcatc

SEQ ID NO: 1187 - DNA, 120 bp, Artificial Sequence
  ENSG00000002822_4 (sequence is synthesized)
caggtggagcgggagaaaatgcagatggagctgagtcacaagagggctcgagtggagctggagagagcagccagcaccagtgccaggaactacgagcgtgaggtcgaccgcaaccaggag

SEQ ID NO: 1188 - DNA, 120 bp, Artificial Sequence
  ENSG00000002822_5 (sequence is synthesized)
ctcctgacgcgcatccggcagcttcaggagcgggaggccggggcggaggagaagatgcaggagcagctggagcgcaacaggcagtgtcagcagaacttggatgctgccagcaagaggctg

SEQ ID NO: 1189 - DNA, 120 bp, Artificial Sequence
  ENSG00000002822_6 (sequence is synthesized)
cgtgagaaagaggacagtctggcccaggctggcgagaccatcaacgcactgaaggggaggatctcggaactgcagtggagcgtgatggaccaggagatgcgggtgaagcgcctggagtcg

SEQ ID NO: 1190 - DNA, 120 bp, Artificial Sequence
  ENSG00000002822_7 (sequence is synthesized)
gagaagcaggagctgcaggagcagctggacctgcaacacaaaaaatgccaggaagccaatcagaaaatccaggaactccaggccagccaagaagcaagagcagaccacgagcagcagatt

SEQ ID NO: 1191 - DNA, 120 bp, Artificial Sequence
  ENSG00000002822_8 (sequence is synthesized)
aaggatctggagcagaagctgtccctgcaagagcaggatgcagcgattgtgaagaacatgaagtctgagctggtacggctccctaggctggaacgggagctgaagcagctgcgggaggag

SEQ ID NO: 1192 - DNA, 120 bp, Artificial Sequence
  ENSG00000002822_9 (sequence is synthesized)
agcgcgcacctgcgggagatgagagagaccaacgggctgctccaggaagagctggaagggctgcagaggaagctggggcgccaggagaagatgcaggagacgctggttggcttggagctg

SEQ ID NO: 1193 - DNA, 120 bp, Artificial Sequence
  ENSG00000002822_10 (sequence is synthesized)
gagaacgagaggctgctggccaagctgcaaagctgggagagactggaccagaccatgggcctgagcatcaggactccagaagacctttccagattcgtggttgagctgcagcagagggag

SEQ ID NO: 1194 - DNA, 120 bp, Artificial Sequence
  ENSG00000002822_11 (sequence is synthesized)
gagctccggcaggtcagcggccagctgttggaggagaggaagaagcgcgagacccacgaggcgctggcccggaggctccagaaacgggtcctgctgctcaccaaggagcgggacggtatg

SEQ ID NO: 1195 - DNA, 120 bp, Artificial Sequence
  ENSG00000002822_12 (sequence is synthesized)
cgggccatcctggggtcctacgacagcgagctgaccccggccgagtactcaccccagctgacgcggcgcatgcgggaggctgaggatatggtgcagaaggtgcacagccacagcgccgag

SEQ ID NO: 1196 - DNA, 120 bp, Artificial Sequence
  ENSG00000002822_13 (sequence is synthesized)
atggaggctcagctgtcgcaggccctggaggagctgggaggccagaaacaaagagcagacatgctggagatggagctgaagatgctgaagtctcagtccagctctgccgaacagagcttc

SEQ ID NO: 1197 - DNA, 120 bp, Artificial Sequence
  ENSG00000002822_14 (sequence is synthesized)
ctgttctccagggaggaggcggacacgctcaggttgaaggtcgaggagctggaaggcgagcggagtcggctggaggaggaaaagaggatgctggaggcacagctggagcggcgagctctg

SEQ ID NO: 1198 - DNA, 120 bp, Artificial Sequence
  ENSG00000002822_15 (sequence is synthesized)
cagggtgactatgaccagagcaggaccaaagtgctgcacatgagcctgaaccccaccagtgtggccaggcagcgcctgcgcgaggaccacagccagctgcaggcggagtgcgagcgactg

SEQ ID NO: 1199 - DNA, 120 bp, Artificial Sequence
  ENSG00000002822_16 (sequence is synthesized)
cgcgggctcctgcgcgccatggagagaggaggcaccgtcccagccgaccttgaggctgccgccgcgagtctgccatcgtccaaggaggtggcagagctgaagaagcaggtggagagtgcc

SEQ ID NO: 1200 - DNA, 120 bp, Artificial Sequence
  ENSG00000002822_17 (sequence is synthesized)
gagctgaagaaccagcggctcaaggaggttttccagaccaagatccaggagttccgcaaggcctgctacacgctcaccggctaccagatcgacatcaccacggagaaccagtaccggctg

SEQ ID NO: 1201 - DNA, 120 bp, Artificial Sequence
  ENSG00000002822_18 (sequence is synthesized)
acctcgctgtacgccgagcacccaggcgactgcctcatcttcaaggccaccagcccctcgggttccaagatgcagctactggagacagagttctcacacaccgtgggcgagctcatcgag

SEQ ID NO: 1202 - DNA, 120 bp, Artificial Sequence
  ENSG00000002822_19 (sequence is synthesized)
gtgcacctgcggcgccaggacagcatccctgccttcctcagctcgctcaccctcgagctcttcagccgccagaccgtggcgtagcctgcaggctcgggggcatagccggagccactctgc

SEQ ID NO: 1203 - DNA, 120 bp, Artificial Sequence
  ENSG00000002822_20 (sequence is synthesized)
ttggcctgacctgcaggtcccctgccccgccagccacaggctgggtgcacgtcctgcctctccagccccacagggcagcagcatgactgacagacacgctgggacctacgtcgggcttcc

SEQ ID NO: 1204 - DNA, 120 bp, Artificial Sequence
  ENSG00000002822_21 (sequence is synthesized)
tgctggggcggccagcaccctctccacgtgcagaccccatgcgtcccggagcctggtgtgtgggcgtcggccaccagcctgggttcctcaccttgtgaaataaaatcttctcccctagac

SEQ ID NO: 1205 - DNA, 120 bp, Artificial Sequence
  ENSG00000002822_22 (sequence is synthesized)
gcaggtctcgcgagagcgcaggcgcaagtgtcgcgataaatgggcgccggcggagcggagggagatccgagcggcggcggcaagctggctgcgagcggctgaggagctgggatacactct

SEQ ID NO: 1206 - DNA, 120 bp, Artificial Sequence
  ENSG00000002822_23 (sequence is synthesized)
tcctctcctctcctcaacagcagcactccaagctcgccggcctttggtctccaggacttgtcccagcagcccctcgaactgagaattacaccatcggacccctggctctgaggccttcag

SEQ ID NO: 1207 - DNA, 120 bp, Artificial Sequence
  ENSG00000002822_24 (sequence is synthesized)
gcaaaattttgggaagagtcaacggtgcaagtttgtccgaggaggctgccgtgggcgcggctattccacacattacggcgcgaggcgaaagccttagtggaagcgcgtcctgcgcaaagc

SEQ ID NO: 1208 - DNA, 120 bp, Artificial Sequence
  ENSG00000002822_25 (sequence is synthesized)
cggggggcccccgactgcgccttggctcagccttcggttccgagtcctttccgtgcggagtctcccaggggtggcggctccgggtgcggacgcggagtccccaggatcagccggtgcgca

SEQ ID NO: 1209 - DNA, 120 bp, Artificial Sequence
  ENSG00000002822_26 (sequence is synthesized)
gactcggttctttacggcccgattgccacgcaggtctcgcgagagcgcaggcgcaagtgtcgcgataaatgggcgccggcggagcggagggagatccgagcggcggcggcaagctggctg

SEQ ID NO: 1210 - DNA, 120 bp, Artificial Sequence
  ENSG00000002822_27 (sequence is synthesized)
cccaggctggcgagggtcctgattgtcacgctccttactctggaattatcttatgcgcctcttccttgccaactgtccggcgtcccctacaacacgggtgaccctgtgggcaggtgggct

SEQ ID NO: 1211 - DNA, 120 bp, Artificial Sequence
  ENSG00000002822_28 (sequence is synthesized)
cagcctctctcagaaggcggccacctctgtcacagctctcctgggttttgggctggagtaccctggatgaggacagcacaagctcgtactccacccggggctccgggagtgcttggtgct

SEQ ID NO: 1212 - DNA, 120 bp, Artificial Sequence
  ENSG00000002822_29 (sequence is synthesized)
agcgtttctccatatcacccgtgtctggccctgtgctgggggcagatgagagaggcacggtccagtgcccaggagtccgcagccaggaggacagccctggagacctgcccgtgccaccag

SEQ ID NO: 1213 - DNA, 120 bp, Artificial Sequence
  ENSG00000002822_30 (sequence is synthesized)
gatgcagcagagagcaggacgcacggtccctgtgctgaaactcagcacagcaatgtggtgctgggtgcggaggcggggaagggctttgaggaccaagagttggagggccttgctgttcta

SEQ ID NO: 1214 - DNA, 120 bp, Artificial Sequence
  ENSG00000002822_31 (sequence is synthesized)
ggattgtggggaagtcttctgatgtagtccctaaagctgacacgccagagcatctcgaggctgttgggggctgttgctgggatcctgaggccgcacacctccctgctatgagttctgacg

SEQ ID NO: 1215 - DNA, 120 bp, Artificial Sequence
  ENSG00000002822_32 (sequence is synthesized)
atttcagaaaattggggccactactttttcaagactctttgctgtccccaccactggcaaccagtccttgaataacatcgctgcagaactcactggctcgtggcttctggggtcaggaat

SEQ ID NO: 1216 - DNA, 120 bp, Artificial Sequence
  ENSG00000002822_33 (sequence is synthesized)
ccaagtgtggctgagctggctctctgctcagagacctcaccagccacagtcctcttggctctgctggggaaggtcccacgtccaggccaccagcccctcgggttccaagatgcagctact

SEQ ID NO: 1217 - DNA, 120 bp, Artificial Sequence
  ENSG00000002822_34 (sequence is synthesized)
gaagatgcaggagacgctggttggcttggagctggagaacgagaggctgctggccaagctgcaaagctgggagagactggaccagaccatgggcctgagcatcagttggtggtgatgtat

SEQ ID NO: 1218 - DNA, 120 bp, Artificial Sequence
  ENSG00000002822_35 (sequence is synthesized)
gggcggagcctccagtgctcttggctgctgtgacagggcccccctggggtcctgcactatcccagcgagacccccaaagcaaggccagcagagagcttcctgacagctgcctcgctttgg

SEQ ID NO: 1219 - DNA, 120 bp, Artificial Sequence
  ENSG00000002822_36 (sequence is synthesized)
gtgaagtttcggatgggcgttcccagcagtgctgacaggctcacgccgcccttgggcttcattccaggtgcagagagctctgatctcccacgatcggaagtaccgtgtgcgtgtcttacc

SEQ ID NO: 1220 - DNA, 120 bp, Artificial Sequence
  ENSG00000002822_37 (sequence is synthesized)
tgggcagaatgcagagaccttcactggcagctgtgtgtggaccctggggctctgttacacagccaggtgctgaggagcagggctccgagccaggccagcgaaccttccttagaccccctg

SEQ ID NO: 1221 - DNA, 120 bp, Artificial Sequence
  ENSG00000002822_38 (sequence is synthesized)
tgtgcaggcctggtgcctggtgtcgggggcccagtggagaacaagatccggctgttgccatgggactttcgtctggtggggagtcctgaggaggatgtggatgaggtggagaagaggttc

SEQ ID NO: 1222 - DNA, 120 bp, Artificial Sequence
  ENSG00000002822_39 (sequence is synthesized)
gagactggaccagaccatgggcctgagcatcagggaccaggtttggggtagttcttaggaatttcccgtgtctggcagcattgaatgtggtggtgaagtcggcgacagggacacagatgt

SEQ ID NO: 1223 - DNA, 120 bp, Artificial Sequence
  ENSG00000002822_40 (sequence is synthesized)
aaatgctaatttgggagtggggaaagctgagagctagcttgatctgtgctgcagagttttgaccacgcttgggagctgtgactgcttacttccagagtggccacacgaggacataagagt

SEQ ID NO: 1224 - DNA, 120 bp, Artificial Sequence
  ENSG00000002822_41 (sequence is synthesized)
gtgttgtgagccggctgctcagaggccctggtccttgctcagcccagtgcagccggggcgggcattaggcgtgctgagcaggcggtaaagccgatggtcgtgcacttggcgcttttcggg

SEQ ID NO: 1225 - DNA, 120 bp, Artificial Sequence
  ENSG00000002822_42 (sequence is synthesized)
aattccagttaggatttccacggggacgcagccaaaccatatcaccttggctgtggcctccactgtgcctgggactggccacagagagctgtgtctccgtggctgccttctccttgcctg

SEQ ID NO: 1226 - DNA, 120 bp, Artificial Sequence
  ENSG00000002822_43 (sequence is synthesized)
tttgcgtggtctcgaggaagctgcacagcagggcccgagtcggccgtgtgagccgctctccctgtcaaagcacacccatccctgcctgctttgacctgaacttggtgaccttcaggccat

SEQ ID NO: 1227 - DNA, 120 bp, Artificial Sequence
  ENSG00000002822_44 (sequence is synthesized)
tggagtggggcagaatgaatagcctgtcctggctcatggcagccaccgggtgaggcgcctgcatgcgtggctcggaggccttctgcaggcacaacccccaccgtgggcctggcagcttgt

SEQ ID NO: 1228 - DNA, 120 bp, Artificial Sequence
  ENSG00000002822_45 (sequence is synthesized)
gtgggaggcgtgcgggtcggtggcagagggtgagcaccagccctgtgtgaaccttcacaactcctctgtggaccctggacttggcttcactgctgcgcccgggggctggagaaggccagg

SEQ ID NO: 1229 - DNA, 120 bp, Artificial Sequence
  ENSG00000002822_46 (sequence is synthesized)
cgtgtgtggctcttctctggagaaatgttcaagggccccttgtttaattggctctttcctcttcatggtggagttgtgggagttctgggcatattctgggccaccagcccctcgggttcc

SEQ ID NO: 1230 - DNA, 120 bp, Artificial Sequence
  ENSG00000002822_47 (sequence is synthesized)
ggacgcacggatggtctccttctctctgacctcgggagacggtagatgtgtccaggacacctgctgtgcctctctgcgtcactccaggcaccggattatcttctgtggcttctctttttt

SEQ ID NO: 1231 - DNA, 120 bp, Artificial Sequence
  ENSG00000002822_48 (sequence is synthesized)
ctccaagtcagagctggagggcatggggcggttgtttagtagagcctggggaggtgacttgcccccttgtctctgcagttctcatttcctaatctccagcagcctggggcggaagtgaat

SEQ ID NO: 1232 - DNA, 120 bp, Artificial Sequence
  ENSG00000002822_49 (sequence is synthesized)
cagaccatgggcctgagcatcaggactccagaagacctttccagattcgtggttgagctgcagcagagggagcttgccttgaaggacaagaacagcgccgtcaccagcagcccggctctt

SEQ ID NO: 1233 - DNA, 120 bp, Artificial Sequence
  ENSG00000002822_50 (sequence is synthesized)
ctcgtggctgtgaggggccatccaggctccggcatcacacccagaggcggaaatgagaggcctcttttttggatcttttctgtacaagaaagcgtttcctaggacccccactgccagcaa

SEQ ID NO: 1234 - DNA, 120 bp, Artificial Sequence
  ENSG00000002822_51 (sequence is synthesized)
gggccccttatgcctccttggctaagaaggggtcttatgcctgcccctgaccagaaggtggagctaccatgagggactgaaccccatccggtgggacctgtggggctggtgggcagtggg

SEQ ID NO: 1235 - DNA, 120 bp, Artificial Sequence
  ENSG00000002822_52 (sequence is synthesized)
tgacagggtgggaaagacgtcactgggggccaggcagggccttaccaggaggcagcatctgagcagaggcctgagggcagccgggggctgggcaggggtgaccaagcgggacagacgagc

SEQ ID NO: 1236 - DNA, 120 bp, Artificial Sequence
  ENSG00000002822_53 (sequence is synthesized)
tgctgggacgccagcagggctggcacagtgcggggatcacagcatgattgcagcgggcagctgttgaagactggaagcgcggcagtggcatggttacctcacacagtcggaagagcgacc

SEQ ID NO: 1237 - DNA, 120 bp, Artificial Sequence
  ENSG00000002822_54 (sequence is synthesized)
caccgtgagcctgtgcatctgttgctattcaggagatggaagtgacaaaaaaatgagagaacttgagtttgcaaagttagagtgctgtctggcctggcagcttcaggcttccaggagaga

SEQ ID NO: 1238 - DNA, 120 bp, Artificial Sequence
  ENSG00000002822_55 (sequence is synthesized)
aggctccgtaggatggtgaagaggttgagatgctgtccagcccacagaggccccggaaagccagtgccgcccgtcagaggggtctcctgagtgcgtgtgggtggctggattctgcatact

SEQ ID NO: 1239 - DNA, 120 bp, Artificial Sequence
  ENSG00000002822_56 (sequence is synthesized)
gggttatcttaaccccggctgtgaaaactggatgaagtagcaatcctttcaaccccaagagtctgtgattcagccagagttacaagatgtctcttcatcctctgaggtttacaaggttct

SEQ ID NO: 1240 - DNA, 120 bp, Artificial Sequence
  ENSG00000002822_57 (sequence is synthesized)
cagaaaacctgtgaagagctgcgcggatcctctcctgccccggcccagcggcagggctgccgcctccctctcccctgggcctgagtgggtggatttcccctcccctcctccttcccagga

SEQ ID NO: 1241 - DNA, 120 bp, Artificial Sequence
  ENSG00000002834_0 (sequence is synthesized)
gccagttccccagctccagccgccgtcgctgctgcctgtgtagttgcagccgcggccgcctcccgccagctcgcctcggggaacaggacgcgcgtgagctcaggcgtccccgccccagct

SEQ ID NO: 1242 - DNA, 120 bp, Artificial Sequence
  ENSG00000002834_1 (sequence is synthesized)
tttctcggaaccatgaaccccaactgcgcccggtgcggcaagatcgtgtatcccacggagaaggtgaactgtctggataagttctggcataaagcatgcttccattgcgagacctgcaag

SEQ ID NO: 1243 - DNA, 120 bp, Artificial Sequence
  ENSG00000002834_2 (sequence is synthesized)
atgacactgaacatgaagaactacaagggctacgagaagaagccctactgcaacgcacactaccccaagcagtccttcaccatggtggcggacaccccggaaaaccttcgcctcaagcaa

SEQ ID NO: 1244 - DNA, 120 bp, Artificial Sequence
  ENSG00000002834_3 (sequence is synthesized)
cagagtgagctccagagtcaggtgcgctacaaggaggagtttgagaagaacaagggcaaaggtttcagcgtagtggcagacacgcccgagctccagagaatcaagaagacccaggaccag

SEQ ID NO: 1245 - DNA, 120 bp, Artificial Sequence
  ENSG00000002834_4 (sequence is synthesized)
atcagtaacataaaataccatgaggagtttgagaagagccgcatgggccctagcgggggcgagggcatggagccagagcgtcgggattcacaggacggcagcagctaccggcggcccctg

SEQ ID NO: 1246 - DNA, 120 bp, Artificial Sequence
  ENSG00000002834_5 (sequence is synthesized)
gagcagcagcagcctcaccacatcccgaccagtgccccggtttaccagcagccccagcagcagccggtggcccagtcctatggtggctacaaggagcctgcagccccagtctccatacag

SEQ ID NO: 1247 - DNA, 120 bp, Artificial Sequence
  ENSG00000002834_6 (sequence is synthesized)
cgcagcgccccaggtggtggcgggaagcggtaccgcgcggtgtatgactacagcgccgccgacgaggacgaggtctccttccaggacggggacaccatcgtcaacgtgcagcagatcgac

SEQ ID NO: 1248 - DNA, 120 bp, Artificial Sequence
  ENSG00000002834_7 (sequence is synthesized)
gacggctggatgtacgggacggtggagcgcaccggcgacacggggatgctgccggccaactacgtggaggccatctgaacccgcagcgcccccatctgtcttcagcacattccacggcat

SEQ ID NO: 1249 - DNA, 120 bp, Artificial Sequence
  ENSG00000002834_8 (sequence is synthesized)
cgcatccgtcctgggcgtgacccgtccattcttcagtgtctctgttttttaaaacctgcgacagcttgtgattcctacccctcttccagcttcttttgccaactgaagccttcttctgcc

SEQ ID NO: 1250 - DNA, 120 bp, Artificial Sequence
  ENSG00000002834_9 (sequence is synthesized)
acttctgcgggctccctcctctggcaggcttcccccttgatcgacttcttggttttctctctggatggaacgggcatgggcctctctgggggaggcagggctggaatgggagacctgttg

SEQ ID NO: 1251 - DNA, 120 bp, Artificial Sequence
  ENSG00000002834_10 (sequence is synthesized)
gcctgtgggcctcacctgcccctctgttctctcccctcacatcctcctgcccagctcctcacatacccacacattccagggctggggtgagcctgactgccaggaccccaggtcaggggc

SEQ ID NO: 1252 - DNA, 120 bp, Artificial Sequence
  ENSG00000002834_11 (sequence is synthesized)
tccctacattccccagagtgggatccacttcttggttcctgggatggcgatggggactctgccgctgtgtagggaccagtgggatgggctctacctctctttctcaaagagggggctctg

SEQ ID NO: 1253 - DNA, 120 bp, Artificial Sequence
  ENSG00000002834_12 (sequence is synthesized)
cccacctggggtctctctccctacctccctcctcaggggcaacaacaggagaatggggttcctgctgtggggcgaattcatcccctccccgcgcgttccttcgcacactgtgattttgcc

SEQ ID NO: 1254 - DNA, 120 bp, Artificial Sequence
  ENSG00000002834_13 (sequence is synthesized)
ctcctgcccacgcagacctgcagcgggcaaagagctcccgaggaagcacagcttgggtcaggttcttgcctttcttaattttagggacagctaccggaaggaggggaacaaggagttctc

SEQ ID NO: 1255 - DNA, 120 bp, Artificial Sequence
  ENSG00000002834_14 (sequence is synthesized)
ttccgcagcccctttccccacgcccacccccagtctccagggacccttgcctgcctcctaggctggaagccatggtcccgaagtgtagggcaagggtgcctcaggaccttttggtcttca

SEQ ID NO: 1256 - DNA, 120 bp, Artificial Sequence
  ENSG00000002834_15 (sequence is synthesized)
gcctccctcagcccccaggatctgggttaggtggccgctcctccctgctcctcatgggaagatgtctcagagccttccatgacctcccctccccagcccaatgccaagtggacttggagc

SEQ ID NO: 1257 - DNA, 120 bp, Artificial Sequence
  ENSG00000002834_16 (sequence is synthesized)
aggtgtctgacacgcaagtgtgtgagtgtgagtgtgagagatggggcgggggtgtgtctgtaggtgtctctgggcctgtgtgtgggtggggttatgtgagggtatgaagagctgtcttcc

SEQ ID NO: 1258 - DNA, 120 bp, Artificial Sequence
  ENSG00000002834_17 (sequence is synthesized)
cctgagagtttcctcagaacccacagtgagaggggagggctcctggggcagagaagttccttaggttttctttggaatgaaattcctccttccccccatctctgagtggaggaagcccac

SEQ ID NO: 1259 - DNA, 120 bp, Artificial Sequence
  ENSG00000002834_18 (sequence is synthesized)
caatctgccctttgcagtgtgcagggtggaaggtaagaggttggtgtggagttggggctgccatagggtctgcagcctgctggggctaagcggtggaggaaggctctgtcactccaggca

SEQ ID NO: 1260 - DNA, 120 bp, Artificial Sequence
  ENSG00000002834_19 (sequence is synthesized)
tatgtttccccatctctgtctggggctacagaatagggtggcagaagtgtcaccctgtgggtgtctccctcgggggctcttcccctagacctccccctcacttacataaagctcccttga

SEQ ID NO: 1261 - DNA, 120 bp, Artificial Sequence
  ENSG00000002834_20 (sequence is synthesized)
agcaagaaagagggtcccagggctgcaaaactggaagcacagcctcggggatggggagggaaagacggtgctatatccagttcctgctctctgctcatgggtggctgtgacaaccctggc

SEQ ID NO: 1262 - DNA, 120 bp, Artificial Sequence
  ENSG00000002834_21 (sequence is synthesized)
ctcacttgattcatctctggttttcttgccaccctctgggagtccccatcccattttcatcctgagcccaaccaggccctgccattggcctcttgtcccttggcacacttgtacccacag

SEQ ID NO: 1263 - DNA, 120 bp, Artificial Sequence
  ENSG00000002834_22 (sequence is synthesized)
gtgaggggcaggacctgaaggtattggcctgttcaacaatcagtcatcatgggtgtttttgtcaactgcttgttaattgatttggggatgtttgccccgaatgagaggttgaggaaaaga

SEQ ID NO: 1264 - DNA, 120 bp, Artificial Sequence
  ENSG00000002834_23 (sequence is synthesized)
ctgtgggtggggaggccctgcctgacccatcccttttcctttctggccccagcctaggtggaggcaagtggaatatcttatattgggcgatttgggggctcggggaggcagagaatctct

SEQ ID NO: 1265 - DNA, 120 bp, Artificial Sequence
  ENSG00000002834_24 (sequence is synthesized)
tgggagtcttgggtggcgctggtgcattctgtttcctcttgatctcaaagcacaatgtggatttggggaccaaaggtcagggacacatccccttagaggacctgagtttgggagagtggt

SEQ ID NO: 1266 - DNA, 120 bp, Artificial Sequence
  ENSG00000002834_25 (sequence is synthesized)
gagtggaagggaggagcagcaagaagcagcctgttttcactcagcttaattctccttcccagataaggcaagccagtcatggaatcttgctgcaggccctccctctactcttcctgtcct

SEQ ID NO: 1267 - DNA, 120 bp, Artificial Sequence
  ENSG00000002834_26 (sequence is synthesized)
aaaaataggggccgttttcttacacacccccagagagaggagggactgtcacactggtgctgagtgaccgggggctgctgggcgtctgttctttaccaaaaccatccatccctagaagag

SEQ ID NO: 1268 - DNA, 120 bp, Artificial Sequence
  ENSG00000002834_27 (sequence is synthesized)
cacagagccctgaggggctgggctgggctgggctgagcccctggtcttctctacagttcacagaggtctttcagctcatttaatcccaggaaagaggcatcaaagctagaatgtgaatat

SEQ ID NO: 1269 - DNA, 120 bp, Artificial Sequence
  ENSG00000002834_28 (sequence is synthesized)
aacttttgtggaccaatactaagaataacaagaagcccagtggtgaggaaagtgcgttctcccagcactgcctcctgttttctccctctcatgtccctccagggaaaatgactttattgc

SEQ ID NO: 1270 - DNA, 120 bp, Artificial Sequence
  ENSG00000002834_29 (sequence is synthesized)
ttaatttctgcctttcccccctcacacatgcacttttgggcctttttttatagctggaaaaaacaaaataccaccctacaaacctgtatttaaaaagaaacagaaatgaccacgtgaaat

SEQ ID NO: 1271 - DNA, 120 bp, Artificial Sequence
  ENSG00000002834_30 (sequence is synthesized)
ttgcctctgtccaaacatttcatccgtgtgtatgtgtatgtgtgtgagtgtgtgaagccgccagttcatctttttatatggggttgttgtctcattttggtctgttttggtcccctccct

SEQ ID NO: 1272 - DNA, 120 bp, Artificial Sequence
  ENSG00000002834_31 (sequence is synthesized)
cgtgggcttgtgctcgggatcaaacctttctggcctgttatgattctgaacatttgacttgaaccacaagtgaatctttctcctggtgactcaaataaaagtataatttttacctgcgga

SEQ ID NO: 1273 - DNA, 120 bp, Artificial Sequence
  ENSG00000002834_32 (sequence is synthesized)
tggacacagctcatggattctcctgacctttgcacccaccctctgttgtgtgtgatgataaggatctcagccttgtgagcagagaggaaattggttggcgtagtgggcagaggctggctg

SEQ ID NO: 1274 - DNA, 120 bp, Artificial Sequence
  ENSG00000002834_33 (sequence is synthesized)
ggactggggccctgcgttccagccctggtgtaccatgggcaggttgctcaccctgctttgggtggggtttccttaccccagctacctgggaacacacaaggcaactttctgcatggggcc

SEQ ID NO: 1275 - DNA, 120 bp, Artificial Sequence
  ENSG00000002834_34 (sequence is synthesized)
ttccagcactgggcgctgctctcctcgcttcatgaggatggcccccacatccttcagctctcaggctgcccctgcctctgaggggcctccccagccatgtcgtgtaaagcgcatcaccct

SEQ ID NO: 1276 - DNA, 120 bp, Artificial Sequence
  ENSG00000002834_35 (sequence is synthesized)
gatgctttgcatcactcgactccgctggctgccttcagagcactttttccaactaaaaagagctcttcgtgttggtcaccttctctgtgtcccctgctgggctggggaccctggcagcgt

SEQ ID NO: 1277 - DNA, 120 bp, Artificial Sequence
  ENSG00000002834_36 (sequence is synthesized)
ccgtctggttcacctactctgagccaggcctagagcaagtgaataagcccagcaggaatggggtgagatcaggcttcctgagccctcagagctgaagtcccggctctgtaagtcctgcca

SEQ ID NO: 1278 - DNA, 120 bp, Artificial Sequence
  ENSG00000002834_37 (sequence is synthesized)
cctgggaattcaaagtagctcacgtaggagcagaacagatacttagagagataaaatcgcctgagataatggctggctggagtctgatgctctgggcacacaaacaaagggatgttagga

SEQ ID NO: 1279 - DNA, 120 bp, Artificial Sequence
  ENSG00000002834_38 (sequence is synthesized)
ctgcccagggcactgtgggcgcaagagttagtctgaagtataaggttccaggcagcccagccagtccctccctcctcaatgggtctgtcctggatgtgtagggtccatctctgaatataa

SEQ ID NO: 1280 - DNA, 120 bp, Artificial Sequence
  ENSG00000002834_39 (sequence is synthesized)
agccacctctctgccctctgggggcttacattccagtcagggggacaaacaagaaaacaataagaaaataggtgtataacataaggtcagcggtgacacgctgtgaagagaaagacagca

SEQ ID NO: 1281 - DNA, 79 bp, Artificial Sequence
  ENSG00000002834_40 (sequence is synthesized)
ataaggtcagcggtgacacgctgtgaagagaaagacagcagggtgagggatggatagaaagcagctggattaagacatt

SEQ ID NO: 1282 - DNA, 80 bp, Artificial Sequence
  ENSG00000002834_41 (sequence is synthesized)
gcagtcagcctgagagcgctgaggcgccagcaccgcgggccccgccgtccccccaggaacccgcccccgcgcagccccac

SEQ ID NO: 1283 - DNA, 120 bp, Artificial Sequence
  ENSG00000002834_42 (sequence is synthesized)
gcagatgtgaatgaggccagtgcctccactacccctgccctccagggtgggcctggggaagagcttggggttcccagatgcctcttctctgtgtacccccagaccaccagcacgcatagc

SEQ ID NO: 1284 - DNA, 120 bp, Artificial Sequence
  ENSG00000002834_43 (sequence is synthesized)
attttcttcttgaagggactgtattctgtgggggcctgtgtgctaaatcagcccccactctctctgactgttgttcttttttctggatatcgtgggtatcggtgaagactgcatgtctca

SEQ ID NO: 1285 - DNA, 120 bp, Artificial Sequence
  ENSG00000002834_44 (sequence is synthesized)
tcttagcacaaaggtcaaaactggggggcggggagcacctggcctcccctggtctgcgcctgggtgctgacattgcagtcatttccgcccttccttggcctcctcccccacatcagcctg

SEQ ID NO: 1286 - DNA, 120 bp, Artificial Sequence
  ENSG00000002834_45 (sequence is synthesized)
ctcttccttcctgtgtaaaaaccccagccagcttcacccgccagccctgcaccccctggctcacaccccccgcctccctgatggtcagtggcatctggctgtggcaggggtgggcatgga

SEQ ID NO: 1287 - DNA, 120 bp, Artificial Sequence
  ENSG00000002834_46 (sequence is synthesized)
gagtgggcaggggatcaactgtccccagcatcgtgtgccctccatggcacctgtggccagagaacaggcctcagtttcctgcttggcagagccacaggcaagcagcctgtgtggctttag

SEQ ID NO: 1288 - DNA, 120 bp, Artificial Sequence
  ENSG00000002834_47 (sequence is synthesized)
gtgccaggctgcaggcacagtgacacgaagcttgccacatcccccccaacccagagccacagagggacaggctgtcccaagtgaggggtatccttgcaggcttctgcccctaccagcctg

SEQ ID NO: 1289 - DNA, 120 bp, Artificial Sequence
  ENSG00000002834_48 (sequence is synthesized)
tttacctttctttagagtgggttgcaggtaggcaagggaagatcaagatgaccctgccttggagcctcggatccaggctgagaggcctctaacaggcagcagagttctggcataaagcat

SEQ ID NO: 1290 - DNA, 120 bp, Artificial Sequence
  ENSG00000002834_49 (sequence is synthesized)
agtgagctccagagtcagatgaagaaaccgaggccaggggcttgagatgcagggcttctgtatctggagctacatttctctgcctctgagtgccctaccttccccgatgcccgcttccca

SEQ ID NO: 1291 - DNA, 120 bp, Artificial Sequence
  ENSG00000002834_50 (sequence is synthesized)
gctgagtctgagaaacgcttgtctcccctcggccttggtggtggacactgaagtcctcctgtggggccgggccagggcgtgcccaagcataggacgaagttcccaggagggcatgctctg

SEQ ID NO: 1292 - DNA, 120 bp, Artificial Sequence
  ENSG00000002834_51 (sequence is synthesized)
tgagaagcccagaggctcctgcccctcccccagagtcacccccactctgttttttctgtcctgcagacactaccccaagcagtccttcaccatggtggcggacaccccggaaaaccttcg

SEQ ID NO: 1293 - DNA, 120 bp, Artificial Sequence
  ENSG00000002919_0 (sequence is synthesized)
ccggcgtcccaagtgagtggaggggggatcccgactccagtccggggccttggccagcggagccgcgctattcggaagcgggaatcccactcagagcccgggcctgtaggggcggggcgt

SEQ ID NO: 1294 - DNA, 120 bp, Artificial Sequence
  ENSG00000002919_1 (sequence is synthesized)
cccgggcacccgggattggggcgtctcccgtcgtgcaccggggcaccggcgactcacccggaaggagaagccgtgatctggctatatggtggggcgcgggcggtgtcgctgtggggagct

SEQ ID NO: 1295 - DNA, 120 bp, Artificial Sequence
  ENSG00000002919_2 (sequence is synthesized)
ggtgctgttctcagatgtttccttccaatgggcttttggtgtaggatgtcggagaaccaagaacaggaggaggtgattacagtgcgtgttcaggacccccgagtgcagaatgagggctcc

SEQ ID NO: 1296 - DNA, 120 bp, Artificial Sequence
  ENSG00000002919_3 (sequence is synthesized)
tggaactcttatgtggattataagatattcctccataccaacagcaaagcctttactgccaagacttcctgtgtgcggcgccgctaccgtgagttcgtgtggctgagaaagcagctacag

SEQ ID NO: 1297 - DNA, 120 bp, Artificial Sequence
  ENSG00000002919_4 (sequence is synthesized)
agaaatgctggtttggtgcctgttcctgaacttcctgggaagtcaaccttcttcggcacctcagatgagttcattgagaagcgacgacaaggtctgcagcacttccttgaaaaggtcctg

SEQ ID NO: 1298 - DNA, 120 bp, Artificial Sequence
  ENSG00000002919_5 (sequence is synthesized)
cagagtgtggttctcctgtcagacagccagttgcacctattcctgcaaagccagctctcggtgcctgagatagaagcctgtgtccagggccgaagtaccatgactgtgtctgatgccatt

SEQ ID NO: 1299 - DNA, 120 bp, Artificial Sequence
  ENSG00000002919_6 (sequence is synthesized)
cttcgatatgctatgtcaaactgtggctgggcccaggaagagaggcagagctcttctcacctggctaaaggagaccagcctaagagttgctgctttcttccaagatcgggtaggaggagc

SEQ ID NO: 1300 - DNA, 120 bp, Artificial Sequence
  ENSG00000002919_7 (sequence is synthesized)
tctccctcaccgcctcccagtgaagaaaaggaccatttagaagtgtgggctccagttgttgactctgaggttccttccttggaaagtcccactctcccacccctctcctcaccattatgc

SEQ ID NO: 1301 - DNA, 120 bp, Artificial Sequence
  ENSG00000002919_8 (sequence is synthesized)
tgtgattttggaagacccaaagagggaacctccactcttcagtctgtgaggagggctgtgggaggagatcatgctgtgcctttggaccctggtcagttagaaacagttttggaaaagtga

SEQ ID NO: 1302 - DNA, 120 bp, Artificial Sequence
  ENSG00000002919_9 (sequence is synthesized)
gcgggccaggagacttactcaggtgggactgggcacagggcaggtatgtgggaggctgggctgcttagtgtcttctagtcacctctgcttgggctgattgacagaggtcagtcattacag

SEQ ID NO: 1303 - DNA, 120 bp, Artificial Sequence
  ENSG00000002919_10 (sequence is synthesized)
ccccttatgcctcttccatgggaacaaatactgtgcagatgtttgtaagttaaacataagacacaggggctgttgcttttgaacagaaccctatattactctcctgggatctgagtttct

SEQ ID NO: 1304 - DNA, 120 bp, Artificial Sequence
  ENSG00000002919_11 (sequence is synthesized)
gcaggtcatttgtatgtaggaccaggagtatctcctcaggtgaccagttttggggacccgtatgtggcaaattctaagctgccatattgaacatcatcccactgggagtggttatgttgt

SEQ ID NO: 1305 - DNA, 120 bp, Artificial Sequence
  ENSG00000002919_12 (sequence is synthesized)
atccccatcttggctggcttcagtttttgctgtagccctagagcactttgtttgtgggaggctggcctcttgcctacctccttgcatggacagggggatgaatatttactttcccacctc

SEQ ID NO: 1306 - DNA, 120 bp, Artificial Sequence
  ENSG00000002919_13 (sequence is synthesized)
cttgctttttctttcactgataccactgaatggaactggtgctgtgactcctgctgctggggatttatgtcccgagaccttagcctggctgagtggagcctgagacctgcacaacagctc

SEQ ID NO: 1307 - DNA, 120 bp, Artificial Sequence
  ENSG00000002919_14 (sequence is synthesized)
atggtcatgcatgagagagaagtggctggccacagccagagggaacagtaacagcccaggggcctttattttgggaaaggctgtcccgggctgttactgtctcttctggttataaagcag

SEQ ID NO: 1308 - DNA, 120 bp, Artificial Sequence
  ENSG00000002919_15 (sequence is synthesized)
acatgtggccatcttttccgcagggttagagtgggctcctttctttttggaatccttttcttctcctttggtagcagctccctgcctccagggcttccgccaccagcgtctctgctgtgt

SEQ ID NO: 1309 - DNA, 120 bp, Artificial Sequence
  ENSG00000002919_16 (sequence is synthesized)
tgcgcagtgcagtggggtgcaagggctttgtttctgcctgcctgaaagagagggctctggggatggagatgagaaacaacacgctctccttcagacaatgaggcattctgtcctcctgct

SEQ ID NO: 1310 - DNA, 120 bp, Artificial Sequence
  ENSG00000002919_17 (sequence is synthesized)
gccattcttcatctccactgagagccagagctggtaggagccgagtgccacaggcattctgcattgctctactcttaggtttgtgtgtgtgatccttcccctccctgtcgcccactcctc

SEQ ID NO: 1311 - DNA, 120 bp, Artificial Sequence
  ENSG00000002919_18 (sequence is synthesized)
cctcctctggctatcctaccctgtctgtgggctcttttactaccagcctatgctgtgggactgtcatggcatttagttcagagtggaggggctttggcctgaaataaaatgcaagtattt

SEQ ID NO: 1312 - DNA, 120 bp, Artificial Sequence
  ENSG00000002919_19 (sequence is synthesized)
atcagtgtggaaataatgcttcagaactgtgctctgtagccctcctgcattgtgtgtgcagctcaagttcaccactggaggaaggattgtcttccaaagagctgggatccaactcttctc

SEQ ID NO: 1313 - DNA, 120 bp, Artificial Sequence
  ENSG00000002919_20 (sequence is synthesized)
acagttctgggcgtgaaccttgttaggtataatttacctgatgctgcttccatcctcgcagtctgtctgaggtgccaggtgctgaaagagaaataaagtttgtcaacaggcagatgcaaa

SEQ ID NO: 1314 - DNA, 120 bp, Artificial Sequence
  ENSG00000002919_21 (sequence is synthesized)
attcgccgtccctcacccggcacctgcgtgcactctccggcgtcccaaatgtttccttccaatgggcttttggtgtaggatgtcggagaaccaagaacaggaggtaagagtatggtctgc

SEQ ID NO: 1315 - DNA, 120 bp, Artificial Sequence
  ENSG00000002919_22 (sequence is synthesized)
ggtctgcagagaacaggtgggtaaaagttggagaggggatttaggaggaaagaggacatagagatgcaaatcattaattattacctgcagtattactttggtggttctgatgagctcaga

SEQ ID NO: 1316 - DNA, 120 bp, Artificial Sequence
  ENSG00000002919_23 (sequence is synthesized)
ataaagtcaggagaaagaaatcaacagcagaggcattcctaggaaattggggttccattctgactaaattttcctttgattggaatatactggaatgtaagcttcatgggggcaggcact

SEQ ID NO: 1317 - DNA, 120 bp, Artificial Sequence
  ENSG00000002919_24 (sequence is synthesized)
tacgtctcttgttcatgctttatccccagtgcctataacagtgtctgacacgtagtggggctcagtaaaaatttgttgaattgagtgactgaattgagtgaatgaaagttgaattgaata

SEQ ID NO: 1318 - DNA, 120 bp, Artificial Sequence
  ENSG00000002919_25 (sequence is synthesized)
actggctttttgggtgcttatgtaggaactggagttgacaatgaagagaacttgcaacataccaggcactaaggaaattgggaaatatgttgtttctttttttgttttttgggttttttt

SEQ ID NO: 1319 - DNA, 120 bp, Artificial Sequence
  ENSG00000002919_26 (sequence is synthesized)
gtgggcttgagcgtcagtagtggcactcgggatggtggcatcgctttacatcctagggagggactctcttaccacccgggattaaggagccagcctggatcatttgttggcagtacatat

SEQ ID NO: 1320 - DNA, 120 bp, Artificial Sequence
  ENSG00000002919_27 (sequence is synthesized)
agagaacaggaggtgattacagtgcgtgttcaggacccccgagtgcagaatgagggctcctggaactcttatgtggattataagatattcctccataccaacagcaaagcctttactgcc

SEQ ID NO: 1321 - DNA, 120 bp, Artificial Sequence
  ENSG00000002933_0 (sequence is synthesized)
acttctccagccagcgccccagccctcccgccgcccgctcgcaggtcccgaggagcgcagactgtgtccctgacaatgggaacagccgacagtgatgagatggccccggaggccccacag

SEQ ID NO: 1322 - DNA, 120 bp, Artificial Sequence
  ENSG00000002933_1 (sequence is synthesized)
cacacccacatcgatgtgcacatccaccaggagtctgccctggccaagctcctgctcacctgctgctctgcgctgcggccccgggccacccaggccaggggcagcagccggctgctggtg

SEQ ID NO: 1323 - DNA, 120 bp, Artificial Sequence
  ENSG00000002933_2 (sequence is synthesized)
gcctcgtgggtgatgcagatcgtgctggggatcttgagtgcagtcctaggaggatttttctacatccgcgactacaccctcctcgtcacctcgggagctgccatctggacaggggctgtg

SEQ ID NO: 1324 - DNA, 120 bp, Artificial Sequence
  ENSG00000002933_3 (sequence is synthesized)
gctgtgctggctggagctgctgccttcatttacgagaaacggggtggtacatactgggccctgctgaggactctgctaacgctggcagctttctccacagccatcgctgccctcaaactt

SEQ ID NO: 1325 - DNA, 120 bp, Artificial Sequence
  ENSG00000002933_4 (sequence is synthesized)
acactccagcccccactcagagtccagaagaagtcagaaggctacacctatgtacctccttcatggacatgctgaaggccttgttcagaacccttcaggccatgctcttgggtgtctgga

SEQ ID NO: 1326 - DNA, 120 bp, Artificial Sequence
  ENSG00000002933_5 (sequence is synthesized)
ttctgctgcttctggcatctctgacccctctgtggctgtactgctggagaatgttcccaaccaaagggaaaagagaccagaaggaaatgttggaagtgagtggaatctagccatgcctct

SEQ ID NO: 1327 - DNA, 120 bp, Artificial Sequence
  ENSG00000002933_6 (sequence is synthesized)
cctgattattagtgcctggtgcttctgcaccgggcgtccctgcatctgactgctggaagaagaaccagactgaggaaaagaggctcttcaacagccccagttatcctggccccatgaccg

SEQ ID NO: 1328 - DNA, 120 bp, Artificial Sequence
  ENSG00000002933_7 (sequence is synthesized)
tggccacagccctgctccagcagcacttgcccattccttacaccccttccccatcctgctccgcttcatgtcccctcctgagtagtcatgtgataataaactctcatgttattgttccca

SEQ ID NO: 1329 - DNA, 120 bp, Artificial Sequence
  ENSG00000002933_8 (sequence is synthesized)
gtttcccgaaaccagctgcggcccgggggcccggcaaagggggttccgcccggaggagcggaccgggcgggagaagaccgagcccccgcgcgccccctgcgctcccactcgcgcacactt

SEQ ID NO: 1330 - DNA, 120 bp, Artificial Sequence
  ENSG00000002933_9 (sequence is synthesized)
gctcccactcgcgcacacttgcacgccggccctggccgggcggggctggaggcgagaacgaccccacgggctttcccagggccgtccgcccgcggaccctcccagctccccagagcccag

SEQ ID NO: 1331 - DNA, 120 bp, Artificial Sequence
  ENSG00000002933_10 (sequence is synthesized)
tgaccctcgcgcagcaggagaaccccagacggaccccaggccctgcagcctgtcatgaacccgaggggctgaagttcagccccacccccgcctcccctccccgcctccccctccaactct

SEQ ID NO: 1332 - DNA, 120 bp, Artificial Sequence
  ENSG00000002933_11 (sequence is synthesized)
ctctcaacccacttctccagccagcgccccagccctcccgccgcccgctcgcaggtcccgaggagcgcaggtgaggcggcaccccactcccggcggcccccgggcctccttccgcacgca

SEQ ID NO: 1333 - DNA, 120 bp, Artificial Sequence
  ENSG00000002933_12 (sequence is synthesized)
gagctgcctccgcacagttggaggagcgtaggagggacccccacccagggatgacactccaggaaggggactgcagaggaagccagactgtgtccctgacaatgggaacagccgacagtg

SEQ ID NO: 1334 - DNA, 120 bp, Artificial Sequence
  ENSG00000002933_13 (sequence is synthesized)
gaggaactccccacctccagccgcagcagcactctctgccagcctccctctgaacaggacaccgagccagttatgtcttcttacttagcgatgtgattctctggccttctcagtgatgca

SEQ ID NO: 1335 - DNA, 120 bp, Artificial Sequence
  ENSG00000002933_14 (sequence is synthesized)
ctcctcctctttcttctccttttctcttctcttctcttctcttctcttctttctttctctctctctctacctctccctctctttttggggttttagcggttaatccctgcagtggcaggt

SEQ ID NO: 1336 - DNA, 120 bp, Artificial Sequence
  ENSG00000002933_15 (sequence is synthesized)
gctggcagtcggagagatctgattatctaggaccattccctgcctgttcagatgagcaaacagctgagggcggtggtggcatgtcctattcacactgtctgctctcccatacccttccca

SEQ ID NO: 1337 - DNA, 120 bp, Artificial Sequence
  ENSG00000002933_16 (sequence is synthesized)
gtgctgttcccaccaggctggctgcctctccctgccttcaacagttaatgtcaactaaggatctaaggacctgctcatctccagatacttgcattgagatggggaaggcagagcgttcca

SEQ ID NO: 1338 - DNA, 120 bp, Artificial Sequence
  ENSG00000002933_17 (sequence is synthesized)
gatagtatgtggtcccccaggaagcatcaccccctggttattctcattgtcctccacaggccctgtacacaatggaaacccaggaattgttgtcaacagatgggtgtgtgcagtttgcac

SEQ ID NO: 1339 - DNA, 120 bp, Artificial Sequence
  ENSG00000002933_18 (sequence is synthesized)
aggagctgggtaggctggtcatggtacctacactctcagaatagcactaaaacactcatatttactgacagaagccgagagtaattaccttcacccagcctgtggcaaaatacccagctt

SEQ ID NO: 1340 - DNA, 120 bp, Artificial Sequence
  ENSG00000002933_19 (sequence is synthesized)
aattacagaattagccaaacaggattcaggtccacctgtccactgggacatactagatttcctgttcttcaagcccagctgagtggattattgggcactgttaggacaggcttctagacc

SEQ ID NO: 1341 - DNA, 120 bp, Artificial Sequence
  ENSG00000002933_20 (sequence is synthesized)
cacccttcattgagatcttctccagcaccccatgacttttatccacaggatcccaccatccctagaactttcataaagcacttggtgttgtttaaaaaggaaggtttagaagggaagagg

SEQ ID NO: 1342 - DNA, 120 bp, Artificial Sequence
  ENSG00000002933_21 (sequence is synthesized)
ggctcacacctggcttgaccacaagctcttaggtgtcactaaagcagggccttttgcagcctcaggagttggatccaggctccaccctctcagcaattatcttaccatggataataaagc

SEQ ID NO: 1343 - DNA, 120 bp, Artificial Sequence
  ENSG00000002933_22 (sequence is synthesized)
ctgtgctggctggagctgctgccttcatttacgagaaacggggtggtacatactgggtaagttcagggaagggcatgggaggggaccaggttcaggctggaggtcaccccaatctcctgc

SEQ ID NO: 1344 - DNA, 120 bp, Artificial Sequence
  ENSG00000002933_23 (sequence is synthesized)
cctgttgcaggcttctctgggccttgcccttttttcccccgactggactctgagagagactgaaacacaaagatttctctctgcctcctccctccccaggccctgctgaggactctgcta

SEQ ID NO: 1345 - DNA, 120 bp, Artificial Sequence
  ENSG00000002933_24 (sequence is synthesized)
gtactgctggagaatgttcccaaccaaaggggtgagtccctaaggtgtgtgcctgtgtatttggggcagtggaactgctcaaaggagacaggaatggacagtggacagtttggggaggag

SEQ ID NO: 1346 - DNA, 120 bp, Artificial Sequence
  ENSG00000002933_25 (sequence is synthesized)
aaaggggcccatgacccaagtcccacctattatcatgcctgtctttctacccagtggtggcccagcccagaaagcccctatccccaaccaagtggcccccaagtcaaagagcccaggaat

SEQ ID NO: 1347 - DNA, 120 bp, Artificial Sequence
  ENSG00000002933_26 (sequence is synthesized)
cggcctgcctcgtcgggcggcgggaggaactccccacctccagccgcagcagcactctctgccagcctccctctgaacaggacaccgagccagttatgtcttcttacttagcgatgtgat

SEQ ID NO: 1348 - DNA, 120 bp, Artificial Sequence
  ENSG00000002933_27 (sequence is synthesized)
tctctggccttctcagtaagagcctggggaggggaggctctgggctgaaggggtgtggaggagccactgaccatgcagagtcccaatcagtggagccctgagtccatcctttcctctggg

SEQ ID NO: 1349 - DNA, 120 bp, Artificial Sequence
  ENSG00000003056_0 (sequence is synthesized)
agagtggggcacagcgaggcgctagggggaacgctggcctctgaaactagctctgggaccggggtctgcggccggcccctagctggccccgtctcccatccccagaagggtattcactgg

SEQ ID NO: 1350 - DNA, 120 bp, Artificial Sequence
  ENSG00000003056_1 (sequence is synthesized)
ggattctgagctttggctactccagtttcccacgacacgatgttccctttctacagctgctggaggactggactgctactactactcctggctgtggcagtgagagaatcctggcagaca

SEQ ID NO: 1351 - DNA, 120 bp, Artificial Sequence
  ENSG00000003056_2 (sequence is synthesized)
gaagaaaaaacttgcgacttggtaggagaaaagggtaaagagtcagagaaagagttggctctagtgaagaggctgaaaccactgtttaataaaagctttgagagcactgtgggccagggt

SEQ ID NO: 1352 - DNA, 120 bp, Artificial Sequence
  ENSG00000003056_3 (sequence is synthesized)
tcagacacatacatctacatcttcagggtgtgccgggaagctggcaaccacacttctggggcaggcctggtgcaaatcaacaaaagtaatgggaaggagacagtggtagggagactcaac

SEQ ID NO: 1353 - DNA, 120 bp, Artificial Sequence
  ENSG00000003056_4 (sequence is synthesized)
gagactcacatcttcaacggaagtaattggatcatgctgatctataaagggggtgatgaatatgacaaccactgtggcaaggagcagcgtcgtgcagtggtgatgatctcctgcaatcga

SEQ ID NO: 1354 - DNA, 120 bp, Artificial Sequence
  ENSG00000003056_5 (sequence is synthesized)
cacaccctagcggacaattttaaccctgtgtctgaggagcgtggcaaagtccaagattgtttctacctctttgagatggatagcagcctggcctgttcaccagagatctcccacctcagt

SEQ ID NO: 1355 - DNA, 120 bp, Artificial Sequence
  ENSG00000003056_6 (sequence is synthesized)
gtgggttccatcttacttgtcacgtttgcatcactggttgctgtttatgttgttggggggttcctataccagcgactggtagtgggagccaaaggaatggagcagtttccccacttagcc

SEQ ID NO: 1356 - DNA, 120 bp, Artificial Sequence
  ENSG00000003056_7 (sequence is synthesized)
ttctggcaggatcttggcaacctggtagcagatggctgtgactttgtctgccgttctaaacctcgaaatgtgcctgcagcatatcgtggtgtgggggatgaccagctgggggaggagtca

SEQ ID NO: 1357 - DNA, 120 bp, Artificial Sequence
  ENSG00000003056_8 (sequence is synthesized)
gaagaaagggatgaccatttattaccaatgtagattgcactttatatgtccagcctcttcctcagtcccccaaaccaaagctacacagccagatttctcaagcagtctcaactccagtcc

SEQ ID NO: 1358 - DNA, 120 bp, Artificial Sequence
  ENSG00000003056_9 (sequence is synthesized)
ctcatctcacccttactattgctcttgctttccagtttgcttttgatttgcatcttctcactagtaaaactgccttccctttgttccttattttctgttttttctctagagaggtacagt

SEQ ID NO: 1359 - DNA, 120 bp, Artificial Sequence
  ENSG00000003056_10 (sequence is synthesized)
ttgtctcttgacatcagaagttacaataggcatatgggcaaaatggtgtagcaggctcactggccgtttgttttttaaacacattttcacaagtttttgagacactggatttctttaatt

SEQ ID NO: 1360 - DNA, 120 bp, Artificial Sequence
  ENSG00000003056_11 (sequence is synthesized)
aaaaaaaaaatgccaagaaacattatttatacagggttgattgctttcatgttgttattctgtaccctatagtagcctccatgagaatctggtatttcttgctgcttggaactactttgc

SEQ ID NO: 1361 - DNA, 120 bp, Artificial Sequence
  ENSG00000003056_12 (sequence is synthesized)
agtgattacttggttgcagtccaagtactctcgtttagtctgagcctggagatgttctagacttgcttctcccacctctgagattaggacaggaaaaatgtgaaatttcccaattacagg

SEQ ID NO: 1362 - DNA, 120 bp, Artificial Sequence
  ENSG00000003056_13 (sequence is synthesized)
attatacggtaccatcacatcatttgtggaaattggggtgactgtatagctgggattgggctaaggactgtggtcttatctgtccacatacagccaaaatgcctatccagaaatccagtt

SEQ ID NO: 1363 - DNA, 120 bp, Artificial Sequence
  ENSG00000003056_14 (sequence is synthesized)
cgttggaaaggaaaattggtactcctgtgccacaggggttccagaaaagggaagtcactttaccttgcggtggtgggatcctgatgtctttcatccatttgtagtaaaagctggtaaagc

SEQ ID NO: 1364 - DNA, 120 bp, Artificial Sequence
  ENSG00000003056_15 (sequence is synthesized)
ttttcttactcctggttccctaccagtatttctaaacatgtcgcactttctccacaggcatgtggttttgacctttttttcaatcttctagaaagggaacggaagcagaagtgggacatc

SEQ ID NO: 1365 - DNA, 120 bp, Artificial Sequence
  ENSG00000003056_16 (sequence is synthesized)
gagggctctgctgtcctctgcgctgggtgtggaatgctgctgcacctgtcccttctgctggctcagggaagtgtcttcttgcccacatttctgtggggaaaggtttttaatcctctgatg

SEQ ID NO: 1366 - DNA, 120 bp, Artificial Sequence
  ENSG00000003056_17 (sequence is synthesized)
cttccatcttcctgtttaggccatgtgcccagaaacctggactgatctttctttaatagtgaacccctgggccactgaagagtaacatggctccactggacacaaaagagggatggaatc

SEQ ID NO: 1367 - DNA, 120 bp, Artificial Sequence
  ENSG00000003056_18 (sequence is synthesized)
aacaggcagggggccttttataagccttaggaaaagaaaatgaaactatttcatctttggacttttcaatactattggagtgatttttttctttctaaacagggaaaataatgttacaaa

SEQ ID NO: 1368 - DNA, 120 bp, Artificial Sequence
  ENSG00000003056_19 (sequence is synthesized)
agcatcttttttgttatttgtttgcatccctcccccacaccctggtgttttaaaatgaagaaaaaaaaccatcaccttttgtacaaaaactcttaatgattaaaaaacaaacaaaacata

SEQ ID NO: 1369 - DNA, 120 bp, Artificial Sequence
  ENSG00000003056_20 (sequence is synthesized)
gttgttggggggttcctataccagcgactggtagtgggagccaaaggaatggagcagtttccccacttagccttctggcaggatcttggcaacctggtagcagcatgtggttttgacctt

SEQ ID NO: 1370 - DNA, 120 bp, Artificial Sequence
  ENSG00000003056_21 (sequence is synthesized)
aatcctgtatgtcttggccgtttctagtgtcttcagcatatcatacgtgtggttcggcacacctgagactgtaatataccacaggatgcctaattccacagctcctctgtaagccacagc

SEQ ID NO: 1371 - DNA, 120 bp, Artificial Sequence
  ENSG00000003056_22 (sequence is synthesized)
ttacttgtcacgtgagtatgccttcctttatcagaacagaccttccttccttttgtttttaaggtcagtaactatatggtggtacataagcacaaattgtatgtgtacattatgctgtaa

SEQ ID NO: 1372 - DNA, 120 bp, Artificial Sequence
  ENSG00000003056_23 (sequence is synthesized)
gcagtaagtaacagggcagctggttgaatttgtagcctgcaaacaaggttgggtgaccaaccatcctcgtttgttcacactgagggggttcctgggacacaggacattgagtgctaaaac

SEQ ID NO: 1373 - DNA, 120 bp, Artificial Sequence
  ENSG00000003056_24 (sequence is synthesized)
cacaaaagtcccagcaaacaagacagttgccctagtacagagtagtaagtggcacagcatccatttctggccttggtaagacattgctgaaagagcaacactgttgaccagatgggctct

SEQ ID NO: 1374 - DNA, 120 bp, Artificial Sequence
  ENSG00000003056_25 (sequence is synthesized)
caatttgttgtcattgatttgtagtgtaaaagacaactgtacttatgggaagtctagaaacccttgagatttgtgacctgtagaggccaaagaggtttcagaagactacatcaagccatc

SEQ ID NO: 1375 - DNA, 120 bp, Artificial Sequence
  ENSG00000003056_26 (sequence is synthesized)
aaacagtaaagaggcaaggatggctccacccaagctgtcatcattcttttttaagttctttcatttccctcttcccaactttgtagtttgttctgaaagactcacctatacattagacta

SEQ ID NO: 1376 - DNA, 120 bp, Artificial Sequence
  ENSG00000003056_27 (sequence is synthesized)
caagttacatataaatgaattttctgctgcagatgctcttgttacagagatattaaaatgtactatgtgttgcatatgccagagaatcttgtactttctggataattaaaataccatcga

SEQ ID NO: 1377 - DNA, 120 bp, Artificial Sequence
  ENSG00000003056_28 (sequence is synthesized)
tttattacacattcatacgctttatctctttcctctctctcctgatcctacctgccctccccaacacacactctctcccaaaggatgttccctttctacagctgctggaggactggactg

SEQ ID NO: 1378 - DNA, 120 bp, Artificial Sequence
  ENSG00000003056_29 (sequence is synthesized)
ggattctgagctttggctactccagtttcccacgacactgtaaaagacaactgtacttatgggaagtctagaaacccttgagatttgtgacctgtagaggccaaagaggtttcagaagac

SEQ ID NO: 1379 - DNA, 120 bp, Artificial Sequence
  ENSG00000003096_0 (sequence is synthesized)
attaagagcatgctactctgtacttcgctgctgcagaagagagagtgatatttgtgttactacagcatgttgtaaatgtgtgagattttgctcatctcagcttggaaataagaataggga

SEQ ID NO: 1380 - DNA, 120 bp, Artificial Sequence
  ENSG00000003096_1 (sequence is synthesized)
aaggagagcaacttgaatcagaagctactagaagaacctgcagagttctgaagcagtttatattcttcttacattttgccttctcctagctggaaagcagagggactggaatttttgaaa

SEQ ID NO: 1381 - DNA, 120 bp, Artificial Sequence
  ENSG00000003096_2 (sequence is synthesized)
cgggcttttcccataatggcattcttgatttgtgtggccagagcttgcacaggaggaaagcaggctgctgaatttagtcactgatctctattagcggtagcctaaggctatgctgaggtt

SEQ ID NO: 1382 - DNA, 120 bp, Artificial Sequence
  ENSG00000003096_3 (sequence is synthesized)
tatatcccatttgtattgttgcagctcaaaagaagattgttcagaggatgacaagtgtattctgagtaggtatgttgttgtttcattttcatatgaaacccatctatgttttttcttgct

SEQ ID NO: 1383 - DNA, 120 bp, Artificial Sequence
  ENSG00000003096_4 (sequence is synthesized)
actattggtcagaaatcaggttaataggtgcagaatatagtacagtgctgcagtatccctgttaaggtagaacaatggtattgcaagcttaaaaaaaaaaagcctggctgcttttattaa

SEQ ID NO: 1384 - DNA, 120 bp, Artificial Sequence
  ENSG00000003096_5 (sequence is synthesized)
ataaagctgcattgtatggtatgcacagtgcagtcctaaaaaaatatactgcagtcaacgcttttctggcactattgttgagttggaatgattgaatcatcatattgctttaggggacag

SEQ ID NO: 1385 - DNA, 120 bp, Artificial Sequence
  ENSG00000003096_6 (sequence is synthesized)
aagaatttaaggaggtaccttacagccctattttacagattggaagcatcggtttaagggcactggcagaatcctttgcttgttctccgcggcagccactgctgtgtcagtacagtgtgg

SEQ ID NO: 1386 - DNA, 120 bp, Artificial Sequence
  ENSG00000003096_7 (sequence is synthesized)
aatggaagtcttagttggtagtctgttatggaaacgctctttactgttattgtagtaccgtggtgacaacatgccattgaaatggaaaacgagctctcctgctatctggaaattcccagt

SEQ ID NO: 1387 - DNA, 120 bp, Artificial Sequence
  ENSG00000003096_8 (sequence is synthesized)
tcctgtgcttaaaacatccaggtcaactccactttctccagcatacatatctctcgtggaagaggaagaccaacacatgaaattgtcccttggaggcagcgaaatgggcctctcatccca

SEQ ID NO: 1388 - DNA, 120 bp, Artificial Sequence
  ENSG00000003096_9 (sequence is synthesized)
tttgcagtcttccaaggcaggacctacacgcatctttaccagcaatacccacagttctgtggtgttacagggctttgaccagcttcgacttgaaggattgctttgtgatgtgaccctgat

SEQ ID NO: 1389 - DNA, 120 bp, Artificial Sequence
  ENSG00000003096_10 (sequence is synthesized)
gccaggtgacacagatgatgctttccctgtgcatagagtcatgatggcatctgctagtgattacttcaaggctatgttcacaggtggaatgaaagaacaagatttaatgtgcattaaact

SEQ ID NO: 1390 - DNA, 120 bp, Artificial Sequence
  ENSG00000003096_11 (sequence is synthesized)
tcatggtgtgagcaaagtcggtctaaggaaaattattgatttcatttatactgcaaagctttctcttaatatggacaaccttcaagacacgctggaagctgccagtttcctacagattct

SEQ ID NO: 1391 - DNA, 120 bp, Artificial Sequence
  ENSG00000003096_12 (sequence is synthesized)
gccagttttggacttctgtaaagtgtttctcatatctggggtcactttagacaactgtgttgaagttggacggattgccaacacctacaatctaaccgaagtggataaatacgttaacag

SEQ ID NO: 1392 - DNA, 120 bp, Artificial Sequence
  ENSG00000003096_13 (sequence is synthesized)
tttcgtcttgaagaattttcctgcattgctgagcacaggggagttcttgaaactcccttttgagcgtcttgccttcgtgctttccagtaatagccttaagcactgtactgaacttgagct

SEQ ID NO: 1393 - DNA, 120 bp, Artificial Sequence
  ENSG00000003096_14 (sequence is synthesized)
ctttaaggctacctgtcgttggcttcgcctggaagagcctcggatggactttgctgcaaaattaatgaagaacatacgatttccactgatgacaccacaggagctcattaattacgtgca

SEQ ID NO: 1394 - DNA, 120 bp, Artificial Sequence
  ENSG00000003096_15 (sequence is synthesized)
aacggtggatttcatgagaactgacaatacttgtgtgaatttgcttttggaagccagcaattaccaaatgatgccatatatgcagccagttatgcagtcagacaggactgccattaggtc

SEQ ID NO: 1395 - DNA, 120 bp, Artificial Sequence
  ENSG00000003096_16 (sequence is synthesized)
cttggttacactaggaggagtgctgaggcagcagctggttgtcagtaaggaattgcgcatgtatgatgaaaaggcccatgagtggaaatcgttagcccccatggatgccccaaggtacca

SEQ ID NO: 1396 - DNA, 120 bp, Artificial Sequence
  ENSG00000003096_17 (sequence is synthesized)
gcatggcatcgccgtcattggaaattttctctatgtggttggcggacagagtaattatgatacaaaaggaaaaacggcagttgatacagtcttcagatttgatcctcgatacaataaatg

SEQ ID NO: 1397 - DNA, 120 bp, Artificial Sequence
  ENSG00000003096_18 (sequence is synthesized)
gatgcaagttgcatctttaaatgaaaagcgcaccttcttccacctaagtgccctcaaaggatatctgtatgcagttggtgggcgaaatgcagcaggtgaactgcccacagtagaatgtta

SEQ ID NO: 1398 - DNA, 120 bp, Artificial Sequence
  ENSG00000003096_19 (sequence is synthesized)
caatccaagaacaaatgaatggacctatgttgccaaaatgagtgagccccactatggccatgctggaactgtgtatggaggagtgatgtatatttcaggaggaattactcatgatacttt

SEQ ID NO: 1399 - DNA, 120 bp, Artificial Sequence
  ENSG00000003096_20 (sequence is synthesized)
ccaaaaggagctcatgtgctttgaccctgatactgacaaatggatccagaaggcgccaatgaccactgtcagaggtctgcattgcatgtgtacagtgggagaaaggctctatgtcattgg

SEQ ID NO: 1400 - DNA, 120 bp, Artificial Sequence
  ENSG00000003096_21 (sequence is synthesized)
tggcaatcacttcagaggaacaagtgattatgatgatgtcctaagctgtgaatactattcacctatccttgaccagtggaccccaattgctgccatgttaagagggcagagtgatgttgg

SEQ ID NO: 1401 - DNA, 120 bp, Artificial Sequence
  ENSG00000003096_22 (sequence is synthesized)
ggtcgctgtcttcgaaaataaaatctatgtggttggggggtattcttggaataatcgttgtatggtagagatagtgcagaaatatgatccagataaagatgaatggcataaggtttttga

SEQ ID NO: 1402 - DNA, 120 bp, Artificial Sequence
  ENSG00000003096_23 (sequence is synthesized)
tctgccagaatcccttggtggcattcgtgcttgcacactcacagtttttccaccagaagaaaccacaccatcaccttctagagagtcccctctttctgcaccttaagatcatctctacaa

SEQ ID NO: 1403 - DNA, 120 bp, Artificial Sequence
  ENSG00000003096_24 (sequence is synthesized)
ctaagatgctgtagttctatctttgcaatgtgtcataaattctcttctttttcccccttaagtagtatatatgttaggattaccctctggtaattgatacagatattggaaaaaagacaa

SEQ ID NO: 1404 - DNA, 120 bp, Artificial Sequence
  ENSG00000003096_25 (sequence is synthesized)
cattgatgttatttgtgctctttgtttggcctagaatgtttataaagtggtaacacaaccattctggaaatgtatcccatagaagctgatgtttaacatatgaaaaaaaaagtattgtct

SEQ ID NO: 1405 - DNA, 120 bp, Artificial Sequence
  ENSG00000003096_26 (sequence is synthesized)
ataaaatgtttcttcagtactttttaaatgctgtgtattgggtgtaaggtatttgtcatcttacattagtaaacccaataagccaagttgaaggtggattatagtaaatgtacaactgtg

SEQ ID NO: 1406 - DNA, 120 bp, Artificial Sequence
  ENSG00000003096_27 (sequence is synthesized)
ctcactaggcttcaagtaaaaagttttcctttcatctttgactgtaagatgtcaaagggaggcagcctgcttgaacaggaaacaatacacaaaaggttgccaactcgcatgagctacctc

SEQ ID NO: 1407 - DNA, 120 bp, Artificial Sequence
  ENSG00000003096_28 (sequence is synthesized)
cctcttttcataaagtatttttgacatatctgtcaacccacttgactgtgtgggtgcattgagaacacaaagtttcctagacacacaggagaagtagcttaaattcactaatattaattt

SEQ ID NO: 1408 - DNA, 120 bp, Artificial Sequence
  ENSG00000003096_29 (sequence is synthesized)
aaaaagcagcatgaaccctctacttataaacaagggtttggtgtttttaaagtgtgtatacatacatacacatacacacatgcacatatgtcaaatataatttttttaaaaattgagtgg

SEQ ID NO: 1409 - DNA, 120 bp, Artificial Sequence
  ENSG00000003096_30 (sequence is synthesized)
cacatcaaagaaatgtgaaattaaaaagaattcttccaaaaagcagcttccattaaaatgggaattcagtatgcacatactgaatgcatatatgtagaaccatacagaatttaggtggat

SEQ ID NO: 1410 - DNA, 120 bp, Artificial Sequence
  ENSG00000003096_31 (sequence is synthesized)
aagggctagaaattttgagcaacaaaatttgtcacttgaccagattttatcttcaaaaactgtattctactccttctcctttgctgttgaggtaacttgcatattatatgtattctgtat

SEQ ID NO: 1411 - DNA, 120 bp, Artificial Sequence
  ENSG00000003096_32 (sequence is synthesized)
actcagttcataaggttatttagcacaaagtatagcagcttcacctggagagctgcttttgctcagtaaattcaacttccatgttttatctttttttgttcaataaaaacatttaatgtc

SEQ ID NO: 1412 - DNA, 120 bp, Artificial Sequence
  ENSG00000003096_33 (sequence is synthesized)
agagaatttgatgagagagggatccacaagaacatgacaaatgatgagagttcaaaccttaagagaaaaatgggcttattggagacggaggcaattgtcattaaaacaagccgatttcaa

SEQ ID NO: 1413 - DNA, 120 bp, Artificial Sequence
  ENSG00000003096_34 (sequence is synthesized)
actgccccctccctccccaactgggttcccgcccccctccctcagcagcccccccacaccctggtgaggtcaggcggaggctctgccgctgcggccgcagtagctcagctcctattcctg

SEQ ID NO: 1414 - DNA, 120 bp, Artificial Sequence
  ENSG00000003096_35 (sequence is synthesized)
ggaagcctggaacggggacttttgaaaataactgcagcggcattcgggttagggtccgtgctctccgcctgcgccaggacagggtgaagtggtcggggcgagcagagggtgcgaaggtgc

SEQ ID NO: 1415 - DNA, 120 bp, Artificial Sequence
  ENSG00000003096_36 (sequence is synthesized)
gggtgctggtgcctcgcagcaggagggagccccggctgcgccgcgcgactccctctttggccctcggagcgcagcacccggcggacaagcggcgggacgccaggacgcggcgagcaaggt

SEQ ID NO: 1416 - DNA, 120 bp, Artificial Sequence
  ENSG00000003096_37 (sequence is synthesized)
cattatccaacttttagaggtgatggatcatctgcatagaggggaattggttgctgcaatacttcgtaaccgatctctcgtggaagaggaagaccaacacatgaaattgtcccttggagg

SEQ ID NO: 1417 - DNA, 120 bp, Artificial Sequence
  ENSG00000003096_38 (sequence is synthesized)
cattatccaacttttagaggtgatggatcatctgcatagaggggaattggttgctgcaatacttcgtaaccggagacggaggcaattgtcattaaaacaagccgatttcaaggatatatt

SEQ ID NO: 1418 - DNA, 120 bp, Artificial Sequence
  ENSG00000003096_39 (sequence is synthesized)
cttggaattactcagataatcattcctttaagcatagattgatataattgtggcttggggtttgcagagaagtgttacctccttgcaatgttgaagaacagtgctcttcacattcaatca

SEQ ID NO: 1419 - DNA, 120 bp, Artificial Sequence
  ENSG00000003096_40 (sequence is synthesized)
ataaacttaataaaggggagatagatgggaatattgaatctgctaagaaggttaacatggcatgtactgttaccaaagcagaaattagtagggagtgttttgaatgttaaaaagtcaaaa

SEQ ID NO: 1420 - DNA, 120 bp, Artificial Sequence
  ENSG00000003096_41 (sequence is synthesized)
gatactgataaaacatcatgaaaaagataattttagtccaggcttcttcagcttttgaagtaattaattaaaaaggcaagcatattatgttggcaagaaagggctgcattttcacttttt

SEQ ID NO: 1421 - DNA, 120 bp, Artificial Sequence
  ENSG00000003096_42 (sequence is synthesized)
gctttctgtttttaagagcaagagacaaatgacaaagtaaataagttgttacttgtagtttactcaaaaaagcaatttccgggatatgtcattgtggcaatgtgaattcagctttactcc

SEQ ID NO: 1422 - DNA, 120 bp, Artificial Sequence
  ENSG00000003096_43 (sequence is synthesized)
tatcccttttacatctgcagtttcataagaatgataattgatggtcatttaagcactgcataataaagaaatgtctttggaatgatctacagaaagaagattctgtattcattcagagga

SEQ ID NO: 1423 - DNA, 120 bp, Artificial Sequence
  ENSG00000003096_44 (sequence is synthesized)
catatattaagtctttcgtgctaggctctgtgcagggaatacagaaactaataaaacagtctgcttgaatatcctattaatataatctggatgaatagacattttctggttagggataac

SEQ ID NO: 1424 - DNA, 120 bp, Artificial Sequence
  ENSG00000003096_45 (sequence is synthesized)
agtcaccatcaatcaatttctgacttttccaattgattctgtaattttaaacgtctgtccacaaaagttgtttaaaattgtgtgtgtgtgctatatatcataaatataacttaattctct

SEQ ID NO: 1425 - DNA, 120 bp, Artificial Sequence
  ENSG00000003096_46 (sequence is synthesized)
ttaaagctatctctgaaactctggtggaaggctatatccagtttcttttatgctttttaaaatcttaagttattctcttctttattaaatatctatcagaattgaattaaacatggttat

SEQ ID NO: 1426 - DNA, 120 bp, Artificial Sequence
  ENSG00000003096_47 (sequence is synthesized)
atattattaattcatttttggttatactatggctctaatatcattaagaagaattgatgtcatccttaaggccagaatttttgctaattattgcaagatttaaaaccacttagttggtgt

SEQ ID NO: 1427 - DNA, 120 bp, Artificial Sequence
  ENSG00000003096_48 (sequence is synthesized)
cataattcaaaaagcagaatctttagtatggtctttttcttgttaaaactgatcaacttggggttttaggtatgacaggaaaaaaaggtgaaacctttctgatattggatagctcagtta

SEQ ID NO: 1428 - DNA, 120 bp, Artificial Sequence
  ENSG00000003096_49 (sequence is synthesized)
gacagttagaaaagcaaataattcaaaattgaggaaattacagaaaaaatgaagagttccagcacttgaaaatctgctctccttcttttttcctaatgtctattttagcagtctttttag

SEQ ID NO: 1429 - DNA, 120 bp, Artificial Sequence
  ENSG00000003096_50 (sequence is synthesized)
cagtctgtatcatgaatgcagaaccaaattcatgagccatgggctccccactcttaggcaggtgatccagagattattttagcaatgtatacctatggagaaacacaagatctcttctaa

SEQ ID NO: 1430 - DNA, 120 bp, Artificial Sequence
  ENSG00000003096_51 (sequence is synthesized)
ggaatgatgaaaggttattaataatggcacatttttagtataacctgagatttttaaactatcaaatgtattgtcatattctctttgcatctaagtgacctactgactaaggttctccta

SEQ ID NO: 1431 - DNA, 120 bp, Artificial Sequence
  ENSG00000003096_52 (sequence is synthesized)
ttcttacttatgccccttgaaaatactattgctgcaatacatgcaaatacagaattgcctgtatttatatttttagtattcatttctttgaaaagatggaaatgtgactagattgtagct

SEQ ID NO: 1432 - DNA, 120 bp, Artificial Sequence
  ENSG00000003096_53 (sequence is synthesized)
attaaacaatcccaaactggtaagtgagagatactgctagaaaaagaaattatatcatgtgaaaaattttgttcagttggggttgattagaactactactaataacagaagataaagtaa

SEQ ID NO: 1433 - DNA, 120 bp, Artificial Sequence
  ENSG00000003096_54 (sequence is synthesized)
tgcattaatatataacaattaatcttttacttttattaatgggggtttggagtgggaatcagactagacctagattcaaaccctgggccaaccactttaataagtggtttctgacccttc

SEQ ID NO: 1434 - DNA, 120 bp, Artificial Sequence
  ENSG00000003096_55 (sequence is synthesized)
tttagtctgtgtataaaattattggcaagtacctgctatataatgactattcaataaatggtagctatcatttttatcttttcaaaattaggtgttccaaattaattttaactatatgca

SEQ ID NO: 1435 - DNA, 120 bp, Artificial Sequence
  ENSG00000003096_56 (sequence is synthesized)
gcataatttgatggcattgctatctaaatagtaacatatcaacagtaattactgtggcctttaaaaactctgtgactataattttgaaccaccttttaagttgatttctcagttatcatc

SEQ ID NO: 1436 - DNA, 120 bp, Artificial Sequence
  ENSG00000003096_57 (sequence is synthesized)
tgtatattctgtacttggaaaccattttacaaatatacatttcttctaagataaagagtggtacaagcgtataatatagtgaaacaatattcaccatattgcatggtcatatgattgcaa

SEQ ID NO: 1437 - DNA, 120 bp, Artificial Sequence
  ENSG00000003096_58 (sequence is synthesized)
tagtgactgattatttttctaaataatctcattgtaaattgtacaagttttaatttccccttctttcttatgtaaaaaaactttcagatctctcgtggaagaggaagaccaacacatgaa

SEQ ID NO: 1438 - DNA, 120 bp, Artificial Sequence
  ENSG00000003137_0 (sequence is synthesized)
aggcaatttttttcctccctctctccgctcccctcgcagcctccactccctttcccttggccccttcctccttctctgtttcggctggaggtgccaggacccccggccgcagcctcccct

SEQ ID NO: 1439 - DNA, 120 bp, Artificial Sequence
  ENSG00000003137_1 (sequence is synthesized)
cccccgccgctccggtcccctcccgtcgggccctcccctcccccgccgcggccggcacagccaatcccccgagcggccgccaacatgctctttgagggcttggatctggtgtcggcgctg

SEQ ID NO: 1440 - DNA, 120 bp, Artificial Sequence
  ENSG00000003137_2 (sequence is synthesized)
gccaccctcgccgcgtgcctggtgtccgtgacgctgctgctggccgtgtcgcagcagctgtggcagctgcgctgggccgccactcgcgacaagagctgcaagctgcccatccccaaggga

SEQ ID NO: 1441 - DNA, 120 bp, Artificial Sequence
  ENSG00000003137_3 (sequence is synthesized)
tccatgggcttcccgctcatcggagagaccggccactggctgctgcagggttctggcttccagtcgtcgcggagggagaagtatggcaacgtgttcaagacgcatttgttggggcggccg

SEQ ID NO: 1442 - DNA, 120 bp, Artificial Sequence
  ENSG00000003137_4 (sequence is synthesized)
ctgatacgcgtgaccggcgcggagaacgtgcgcaagatcctcatgggcgagcaccacctcgtgagcaccgagtggcctcgcagcacccgcatgttgctgggccccaacacggtgtccaat

SEQ ID NO: 1443 - DNA, 120 bp, Artificial Sequence
  ENSG00000003137_5 (sequence is synthesized)
tccattggcgacatccaccgcaacaagcgcaaggtcttctccaagatcttcagccacgaggccctggagagttacctgcccaagatccagctggtgatccaggacacactgcgcgcctgg

SEQ ID NO: 1444 - DNA, 120 bp, Artificial Sequence
  ENSG00000003137_6 (sequence is synthesized)
agcagccaccccgaggccatcaacgtgtaccaggaggcgcagaagctgaccttccgcatggccatccgggtgctgctgggcttcagcatccctgaggaggaccttgggcacctctttgag

SEQ ID NO: 1445 - DNA, 120 bp, Artificial Sequence
  ENSG00000003137_7 (sequence is synthesized)
gtctaccagcagtttgtggacaatgtcttctccctgcctgtcgacctgcccttcagtggctaccggcggggcattcaggctcggcagatcctgcagaaggggctggagaaggccatccgg

SEQ ID NO: 1446 - DNA, 120 bp, Artificial Sequence
  ENSG00000003137_8 (sequence is synthesized)
gagaagctgcagtgcacacagggcaaggactacttggacgccctggacctcctcattgagagcagcaaggagcacgggaaggagatgaccatgcaggagctgaaggacgggaccctggag

SEQ ID NO: 1447 - DNA, 120 bp, Artificial Sequence
  ENSG00000003137_9 (sequence is synthesized)
ctgatctttgcggcctatgccaccacggccagcgccagcacctcactcatcatgcagctgctgaagcaccccactgtgctggagaagctgcgggatgagctgcgggctcatggcatcctg

SEQ ID NO: 1448 - DNA, 120 bp, Artificial Sequence
  ENSG00000003137_10 (sequence is synthesized)
cacagtggcggctgcccctgcgagggcacactgcgcctggacacgctcagtgggctgcgctacctggactgcgtcatcaaggaggtcatgcgcctgttcacgcccatttccggcggctac

SEQ ID NO: 1449 - DNA, 120 bp, Artificial Sequence
  ENSG00000003137_11 (sequence is synthesized)
cgcactgtgctgcagaccttcgagcttgatggtttccagatccccaaaggctggagtgtcatgtatagcatccgggacacccatgacacagcgcccgtgttcaaagacgtgaacgtgttc

SEQ ID NO: 1450 - DNA, 120 bp, Artificial Sequence
  ENSG00000003137_12 (sequence is synthesized)
gaccccgatcgcttcagccaggcgcggagcgaggacaaggatggccgcttccattacctcccgttcggtggcggtgtccggacctgcctgggcaagcacctggccaagctgttcctgaag

SEQ ID NO: 1451 - DNA, 120 bp, Artificial Sequence
  ENSG00000003137_13 (sequence is synthesized)
gtgctggcggtggagctggctagcaccagccgctttgagctggccacacggaccttcccccgcatcaccttggtccccgtcctgcaccccgtggatggcctcagcgtcaagttctttggc

SEQ ID NO: 1452 - DNA, 120 bp, Artificial Sequence
  ENSG00000003137_14 (sequence is synthesized)
ctggactccaaccagaacgagatcctgccggagacggaggccatgctgagcgccacagtctaacccaagacccacccgcctcagcccagcccaggcagcggggtggtggttgtgggaggt

SEQ ID NO: 1453 - DNA, 120 bp, Artificial Sequence
  ENSG00000003137_15 (sequence is synthesized)
agaaacctgtgtgtgggagggggccggaacggggagggcgagtggcccccatacttgccctcccttgctccccctccctggcaaaccctacccaaagccagtgggccccattcctagggc

SEQ ID NO: 1454 - DNA, 120 bp, Artificial Sequence
  ENSG00000003137_16 (sequence is synthesized)
tgggctccccttctggctccagcttccctccagccactccccatttaccatcagctcagcccctgggaagggcgtggcaggggctctgcatgcccgtgacagtgttaggtgtcagcgcgt

SEQ ID NO: 1455 - DNA, 120 bp, Artificial Sequence
  ENSG00000003137_17 (sequence is synthesized)
gctacagtgtttttgtgatgttctgaactgctcccttccctccgttcctttcggacccttttagctggggttgggggacgggaagagccgtgcccccttgggcgcactcttcagcgtctc

SEQ ID NO: 1456 - DNA, 120 bp, Artificial Sequence
  ENSG00000003137_18 (sequence is synthesized)
ctcctcctgcgcccccactgcgtctgcccaggaacagcatcctgggtagcagaacaggagtcaaccttggcggggcgggggctgcgtccaacctggagattgcccttccctatgccacgg

SEQ ID NO: 1457 - DNA, 120 bp, Artificial Sequence
  ENSG00000003137_19 (sequence is synthesized)
cttgttctgtcctctgaccttggggcaaaggagccccaggccctgtctccccagcatcctccctggtggccctgggcaggtgcactgacacccccaccttcccatcccctgctgaaccag

SEQ ID NO: 1458 - DNA, 120 bp, Artificial Sequence
  ENSG00000003137_20 (sequence is synthesized)
gccctgttacacacagccgcctaaggcccgcggctcatgtgctgcccgcccccatatttattcactgatagagaatcttggggatgctggggtctggagtgaacatctcctccccttcat

SEQ ID NO: 1459 - DNA, 120 bp, Artificial Sequence
  ENSG00000003137_21 (sequence is synthesized)
gccctagcctgtgttctagctgtcctggcgagacttctgtgagtgaagaggaaggggtctctggtcaaacccagcccccagggcctagggttgaaagccttccccggctccgggcattat

SEQ ID NO: 1460 - DNA, 120 bp, Artificial Sequence
  ENSG00000003137_22 (sequence is synthesized)
ttgggtttaatctcggagcctcactcctggactgaagtccggtgcctctgccttatccctggtggagatggaatgtggcccattgcctcctccctctcctgtcaaaaaccctgatcaggt

SEQ ID NO: 1461 - DNA, 120 bp, Artificial Sequence
  ENSG00000003137_23 (sequence is synthesized)
agatttggaggcggccacgatttcctgtttggcccctgttcaccccagtgcactggccctgactccaggcgtgagtatggggaaggatacgggttcttctgacggggagcaagggcctcc

SEQ ID NO: 1462 - DNA, 120 bp, Artificial Sequence
  ENSG00000003137_24 (sequence is synthesized)
gtcttcccttccttaactctccccctttgccctccgccctgaaaaaggtgtccttgaagtcccttccacctctatgccactgtctgcttagcccagctcaggggtggggaagaggcgaaa

SEQ ID NO: 1463 - DNA, 120 bp, Artificial Sequence
  ENSG00000003137_25 (sequence is synthesized)
gcgtgggggaggtgagcgcagcggcagttctgcctcggagctgattgcagggccctgtgtggtctccggacagctgcgggaaggctgccgcagctgaagctgaagaggcggctacgtgcg

SEQ ID NO: 1464 - DNA, 120 bp, Artificial Sequence
  ENSG00000003137_26 (sequence is synthesized)
gtttgtcagggggattgggttgaaaactggccagtcgggatgactgggtgaaagaggagtagctcctgccactggcgttttgagtgttggcaatttgggatgcctcctggggaaggtttc

SEQ ID NO: 1465 - DNA, 120 bp, Artificial Sequence
  ENSG00000003137_27 (sequence is synthesized)
cgggcgtttggtgagtctctagatttttccttgctttctgtgtttattggtttttgatgttgtaaaagcaatgaatcccctttacaagaaaatcgaaaacacagaagaatgaaggacatg

SEQ ID NO: 1466 - DNA, 120 bp, Artificial Sequence
  ENSG00000003137_28 (sequence is synthesized)
ccagtccccgatcgctgctgtgagcacctcagtggctccctcagaccagatcccgtaggcagccccacagaccgaccctgaccccactcacagccaccctgaagatagactataggaacg

SEQ ID NO: 1467 - DNA, 120 bp, Artificial Sequence
  ENSG00000003137_29 (sequence is synthesized)
ggcccataccacacagactgctctccaatccctgagtctcagatgtttcatttatttcctacttttccactactaaaaaacagtgtggaatagacattattggcaaaattgctcatccct

SEQ ID NO: 1468 - DNA, 120 bp, Artificial Sequence
  ENSG00000003137_30 (sequence is synthesized)
aatcctgaaaaacaggccagaatgggtaaagacttgtcaaagcttgcaacatagctacatggtgcacccggacctgtaccccctccccccaacacaaaaccagtgtctgggaggttcatt

SEQ ID NO: 1469 - DNA, 120 bp, Artificial Sequence
  ENSG00000003137_31 (sequence is synthesized)
ttcctttaaactgatccagctggccctgaaccaattgtttttgactgagtatctaggagagcagtaagtggaacttcagacaagcccactgggtctggtccaggtgaggggcagggggca

SEQ ID NO: 1470 - DNA, 120 bp, Artificial Sequence
  ENSG00000003137_32 (sequence is synthesized)
tggggctgggaggtctcaggggccttccctgggggtggccagcctggtagggggcagagaaggaaaagctgaggggggtccctgtgagggaggaaagaaggatcatttgccccgctgggt

SEQ ID NO: 1471 - DNA, 120 bp, Artificial Sequence
  ENSG00000003137_33 (sequence is synthesized)
ctcaaaggcagtgagaagagagctgaagaaagctctggctggctgacaggatccctgtgttgtaattggtccctcctttcagctctctagtgagatgcccgtgtctgtgcgtgtgcgtgt

SEQ ID NO: 1472 - DNA, 120 bp, Artificial Sequence
  ENSG00000003137_34 (sequence is synthesized)
gtgtttcatacagctagcattagatgggtgatgtttcttacttatcatccctaactattgcaacttgaccttaaaaagacaaaaccccacaaaactcttcctgccacgggcttgcagatt

SEQ ID NO: 1473 - DNA, 120 bp, Artificial Sequence
  ENSG00000003137_35 (sequence is synthesized)
gaagcactttcgatgttgggcgctggcgtttgtgttctgggcaccaccgtgaccctgcccagatggctataatattattttatacacaaaccttttttttcataaatgttataattttgt

SEQ ID NO: 1474 - DNA, 120 bp, Artificial Sequence
  ENSG00000003137_36 (sequence is synthesized)
aaacatggttcaaaatattaatatgtttttatcacagtcgttttaatattgaaaaagcacttgtgtgttttgttttgatatgaaactggtaccgtgtgagtgtttttgctgtcgtggttt

SEQ ID NO: 1475 - DNA, 120 bp, Artificial Sequence
  ENSG00000003137_37 (sequence is synthesized)
taatctgtatataatattccatgttgcatattaaaaacatgaatgttgtgcattttgtgattttggaaatactcaatgtggctcttctataggcttctagaataaaccgtggggacccgc

SEQ ID NO: 1476 - DNA, 120 bp, Artificial Sequence
  ENSG00000003137_38 (sequence is synthesized)
gcattatttattatcctctaggccctacttcgcagttcttgtgcacgctatgaaaaataaaacctgcgtgctcgtctgtgtgagtgtgtttggtggggagagggggcaggtgactgtacc

SEQ ID NO: 1477 - DNA, 120 bp, Artificial Sequence
  ENSG00000003137_39 (sequence is synthesized)
ccgggttggggtccgccgcccctccctcgcgggccctctgcagaagtgcaccctgagagagacccgggtgtggctcccgcagggttctggcttccagtcgtcgcggagggagaagtatgg

SEQ ID NO: 1478 - DNA, 120 bp, Artificial Sequence
  ENSG00000003147_0 (sequence is synthesized)
gctgcaggaagcagcaggagacgcccggcagccgggacggtcggggacgcctgaagaagaagaaaacatgtcaggacacaaatgcagttatccctgggacttacaggatcgatatgctca

SEQ ID NO: 1479 - DNA, 120 bp, Artificial Sequence
  ENSG00000003147_1 (sequence is synthesized)
agataagtcagttgtaaataagatgcaacagaaatattgggagacgaagcaggcctttattaaagccacagggaagaaggaagatgaacatgttgttgcctctgacgcggacctggatgc

SEQ ID NO: 1480 - DNA, 120 bp, Artificial Sequence
  ENSG00000003147_2 (sequence is synthesized)
caagctagagctgtttcattcaattcagagaacctgtctggacttatcgaaagcaattgtactctatcaaaagaggatatgtttcttgtctcaagaagaaaacgaactgggaaaatttct

SEQ ID NO: 1481 - DNA, 120 bp, Artificial Sequence
  ENSG00000003147_3 (sequence is synthesized)
tcgatcccaaggtttccaagataaaaccagagcaggaaagatgatgcaagcgacaggaaaggccctctgcttttcttcccagcaaaggttggccttacgaaatcctttgtgtcgatttca

SEQ ID NO: 1482 - DNA, 120 bp, Artificial Sequence
  ENSG00000003147_4 (sequence is synthesized)
ccaagaagtggagacttttcggcatcgggccatctcagatacttggctgacggtgaaccgcatggaacagtgcaggacggaatatagaggagcactattatggatgaaggacgtgtctca

SEQ ID NO: 1483 - DNA, 120 bp, Artificial Sequence
  ENSG00000003147_5 (sequence is synthesized)
ggagcttgatccagacctctacaagcaaatggagaagttcaggaaggtacaaacacaagtgcgccttgcaaaaaaaaactttgacaaattgaagatggatgtttgtcaaaaagtggatct

SEQ ID NO: 1484 - DNA, 120 bp, Artificial Sequence
  ENSG00000003147_6 (sequence is synthesized)
tcttggagcgagcagatgcaatctcttgtctcacatgctagcaacataccagaccactctgcttcatttttgggagaaaacttctcacactatggcagccatccatgagagtttcaaagg

SEQ ID NO: 1485 - DNA, 120 bp, Artificial Sequence
  ENSG00000003147_7 (sequence is synthesized)
ttatcaaccatatgaatttactactttaaagagcttacaagaccctatgaaaaaattagttgagaaagaagagaagaagaaaatcaaccagcaggaaagtacagatgcagccgtgcagga

SEQ ID NO: 1486 - DNA, 120 bp, Artificial Sequence
  ENSG00000003147_8 (sequence is synthesized)
agacaaaggctctacacatactgcatgctcaggacccatagatgaactattagacatgaaatctgaggaaggtgcttgcctgggaccagtggcagggaccccggaacctgaaggtgctga

SEQ ID NO: 1487 - DNA, 120 bp, Artificial Sequence
  ENSG00000003147_9 (sequence is synthesized)
caaagatgacctgctgctgttgagtgagatcttcaatgcttcctccttggaagagggcgagttcagcaaagagtgggccgctgtgtttggagacggccaagtgaaggagccagtgcccac

SEQ ID NO: 1488 - DNA, 120 bp, Artificial Sequence
  ENSG00000003147_10 (sequence is synthesized)
tatggccctgggagagccagaccccaaggcccagacaggctcaggtttccttccttcgcagcttttagaccaaaatatgaaagacttacaggcctcgctacaagaacctgctaaggctgc

SEQ ID NO: 1489 - DNA, 120 bp, Artificial Sequence
  ENSG00000003147_11 (sequence is synthesized)
ctcagacctgactgcctggttcagcctcttcgctgacctcgacccactctcaaatcctgatgctgttgggaaaaccgataaagaacacgaattgctcaatgcatgaatctgtacccttcg

SEQ ID NO: 1490 - DNA, 120 bp, Artificial Sequence
  ENSG00000003147_12 (sequence is synthesized)
ggagggcactcacatgccgcccccagcagctcccctgggggctagcagaagtataaagtgatcagtatgctgttttaataattatgtgccattttaataaaatgaaagggtcaacggccc

SEQ ID NO: 1491 - DNA, 120 bp, Artificial Sequence
  ENSG00000003147_13 (sequence is synthesized)
tgtttatattggtataattatttactcttatttggtataaagggttttcgtgtatctctatgtggatctaaataatacaggattgtctagaagcggtttccaggccaccgctctcctgcc

SEQ ID NO: 1492 - DNA, 120 bp, Artificial Sequence
  ENSG00000003147_14 (sequence is synthesized)
tacatcccatcatggctgctgcggtgtcactgggctaccgtgagatccaagttgaaatcagaagcctactttgatggtaggtttgaatgacgtgtcctacagcctcagaggcagcaggag

SEQ ID NO: 1493 - DNA, 120 bp, Artificial Sequence
  ENSG00000003147_15 (sequence is synthesized)
gctagcaaagcttaaatgcctccttctctgcccccagcctctgtcccccttggaggagggctgtaggaagattccctcttcctgccaagccaccttccagtgagctctggatgaagctct

SEQ ID NO: 1494 - DNA, 120 bp, Artificial Sequence
  ENSG00000003147_16 (sequence is synthesized)
ggccaaccaaagacactgtccccacagcaggtgcctggtgggccacgtgttctcacactggtggaggagctgggcttctgtccaaggcacaaaccttactatggaaagcagccatatttg

SEQ ID NO: 1495 - DNA, 120 bp, Artificial Sequence
  ENSG00000003147_17 (sequence is synthesized)
gctgacgtcggatgagtgatccggagggacgctccgaccgcggccgggaggctcctgggggccggggctccgaggttataatataacttatcctctcatgcttttttcctgccccttctc

SEQ ID NO: 1496 - DNA, 120 bp, Artificial Sequence
  ENSG00000003147_18 (sequence is synthesized)
accactgtctccttttgtcctcttcgtggctggaattcaaaagcatgtatttctgaagcctcttgtgacattgttttttttttttttttaattaaacagaaaagatatttgacatgcaaa

SEQ ID NO: 1497 - DNA, 120 bp, Artificial Sequence
  ENSG00000003147_19 (sequence is synthesized)
ttgtgacgcaaacgctatggccacgtggaacacctgccggagagcaggggcggggtcactctgggcggcggatccgagcgggggataccccaggagatgggggtcgaggagagaccccgg

SEQ ID NO: 1498 - DNA, 120 bp, Artificial Sequence
  ENSG00000003147_20 (sequence is synthesized)
ggagtagagagagagaaactcactccccgagtccccgaccctccccaagcaaggttataatataacttatcctctcatgcttttttcctgccccttctccccaaatcatcaacaatagaa

SEQ ID NO: 1499 - DNA, 120 bp, Artificial Sequence
  ENSG00000003147_21 (sequence is synthesized)
ctcactctggcagctagaggttttgcctctggccagtgaccattcctttgagtagtgagctttctgttctttccagtaactgctggcaagttataatataacttatcctctcatgctttt

SEQ ID NO: 1500 - DNA, 120 bp, Artificial Sequence
  ENSG00000003147_22 (sequence is synthesized)
tcagatattaagatgctacagaaagggaaagaaggccagcaaattggcatattaatttcattagaggaagaaaaccagcgcaaggaatcctctagttttaagactgaagatggaaaaagt

SEQ ID NO: 1501 - DNA, 90 bp, Artificial Sequence
  ENSG00000003147_23 (sequence is synthesized)
agctgtttcattcaattcagagaacctgtctggacttatcgaaagcaattgtactctatcaaaagaggatatgttcatgagccaggagtt

SEQ ID NO: 1502 - DNA, 77 bp, Artificial Sequence
  ENSG00000003147_24 (sequence is synthesized)
atgtgacctataatgagccgttgtgctccagcctgggcgacagaagtcttgtctcaagaagaaaacgaactgggaaa

SEQ ID NO: 1503 - DNA, 87 bp, Artificial Sequence
  ENSG00000003147_25 (sequence is synthesized)
gactaggttccttgtcttcaaagagctcaaagtttaggaagaatctggagatagtgaagtctatttttctatacctctaggacagag

SEQ ID NO: 1504 - DNA, 120 bp, Artificial Sequence
  ENSG00000003147_26 (sequence is synthesized)
gagatagtgaagtctatttttctatacctctaggacagagcagagtgtgctaagtgaaataagttctaagaaagccagtgacagcttaaagagggagaaatagaatcagctgagggattg

SEQ ID NO: 1505 - DNA, 120 bp, Artificial Sequence
  ENSG00000003147_27 (sequence is synthesized)
caacagtagagcgttaattatttaccctgggttttggaggatggatcagatgagaaaaagagaatggagaggagaatgtcccaggtggtgggagcagcatgagttctgggaggcagcatt

SEQ ID NO: 1506 - DNA, 120 bp, Artificial Sequence
  ENSG00000003147_28 (sequence is synthesized)
gaatcatgctttaaagaatcttcaaagctacagagagtcatacttccctggggaccaggactagaactgggcattcaaaacattaatagctttactgtctttctttgcagaccactctgc

SEQ ID NO: 1507 - DNA, 120 bp, Artificial Sequence
  ENSG00000003147_29 (sequence is synthesized)
cgagcagatgcaatctcttgtctcacatgctagcaacataccaggtaacaaaataatgtttgttgcaatgaaccaaggatggcacaaggtttaaataacatcaaaatggtgtttgagcta

SEQ ID NO: 1508 - DNA, 120 bp, Artificial Sequence
  ENSG00000003147_30 (sequence is synthesized)
aaagtaagctttggccattgtgaagttctgaatgcctttccgtaatttcacttcccacatctctgccttctagggccctacgtttaaccaaaccaaatagtagttatttcctgtatatac

SEQ ID NO: 1509 - DNA, 120 bp, Artificial Sequence
  ENSG00000003147_31 (sequence is synthesized)
aagttttgtttatatcacaagcaaagtccattgcagaaagcatcattattccaggactcagaatgctgaagagagaactgtgcccccagcagagtctttttctttctttctttctttctt

SEQ ID NO: 1510 - DNA, 120 bp, Artificial Sequence
  ENSG00000003147_32 (sequence is synthesized)
tcaatacaatgagaatctactgcaatccaaaagcgcgaattgaaccttgaaccttgagatacatgttcctgggagatgaattgtggtgaacttgagtctaatgattggtcctgctccttt

SEQ ID NO: 1511 - DNA, 120 bp, Artificial Sequence
  ENSG00000003147_33 (sequence is synthesized)
aaaatacttgtttgacattgctaaaggggagattgtacaagtcccataaactcagttacttttaattattatattcaaatatcctcacttgagaaggtgtcctcctttcctctcttactt

SEQ ID NO: 1512 - DNA, 120 bp, Artificial Sequence
  ENSG00000003147_34 (sequence is synthesized)
ctgaaatgtatcattttattctgagagtattatccaacataaaattgaatttttctgtaagactacagcaatattttctaattgaaaaagcagtattaaactcaatgatttttcatctca

SEQ ID NO: 1513 - DNA, 120 bp, Artificial Sequence
  ENSG00000003147_35 (sequence is synthesized)
ctcactctggcagctagaggttttgcctctggccagtgaccattcctttgagtagtgagctttctgttctttccagtaactgctggttataatataacttatcctctcatgcttttttcc

SEQ ID NO: 1514 - DNA, 120 bp, Artificial Sequence
  ENSG00000003147_36 (sequence is synthesized)
gggggcgcgccgggcgggctgcaggaagcagcaggagacgcccggcagccgggacggtcggggacgcctggttataatataacttatcctctcatgcttttttcctgccccttctcccca

SEQ ID NO: 1515 - DNA, 120 bp, Artificial Sequence
  ENSG00000003147_37 (sequence is synthesized)
ttaatgaccatcccttctcagaaaatctaaccttgaccctgatggagctcacacttctttccactgccctctgatcttgtctcaagaagaaaacgaactgggaaaatttcttcgatccca

SEQ ID NO: 1516 - DNA, 120 bp, Artificial Sequence
  ENSG00000003147_38 (sequence is synthesized)
ggatccgagcgggggataccccaggagatgggggtcgaggagagaccccggggagtagagagagagaaactcactccccgagtccccgaccctccccaagcaagaagaagaagaaaacat

SEQ ID NO: 1517 - DNA, 120 bp, Artificial Sequence
  ENSG00000003147_39 (sequence is synthesized)
gcagatgccttggcctttggagagtgatctaaaatggcctagtcggagagatgctaatcacatacgctccattcctcctcaaagggccaaatgtagaaatgggcagtggtcatgccttgg

SEQ ID NO: 1518 - DNA, 120 bp, Artificial Sequence
  ENSG00000003147_40 (sequence is synthesized)
caggctcaagaccacccccaacaacgcggatggaggtgcttgccagtggtccagttagtagcagtaaactaagggatgggtacatggataatcttctctggctgactaatcagttggaac

SEQ ID NO: 1519 - DNA, 120 bp, Artificial Sequence
  ENSG00000003147_41 (sequence is synthesized)
tacatgcatttcgattattattcagcaaatattgatggagcatcttctacattccaggttggccttacgaaatcctttgtgtcgatttcaccaagaagtggagacttttcggcatcgggc

SEQ ID NO: 1520 - DNA, 80 bp, Artificial Sequence
  ENSG00000003249_0 (sequence is synthesized)
gagccggggccgagtcgctgccgcagctgttggggcgcccgggccaggcgacgccgccgtcgcccgtgcccctcccagac

SEQ ID NO: 1521 - DNA, 120 bp, Artificial Sequence
  ENSG00000003249_1 (sequence is synthesized)
cgcaccggccgcatggagcccccggagggcgccggcaccggagagatcgttaaggaggctgaggtgccgcaggctgcgctgggcgtcccagcccaggggacaggggacaatggccacacg

SEQ ID NO: 1522 - DNA, 120 bp, Artificial Sequence
  ENSG00000003249_2 (sequence is synthesized)
cctgtggaggaggaggtcgggggcatcccagtaccagcaccggggctcctgcaggtcacggagaggaggcagcctctgagcagcgtctcctctctggaggtccacttcgacctcctggac

SEQ ID NO: 1523 - DNA, 120 bp, Artificial Sequence
  ENSG00000003249_3 (sequence is synthesized)
ctcactgagctcaccgacatgtcggaccaggagctggccgaggtctttgctgactcggacgacgagaacctcaacaccgagtccccagcaggtctgcacccgctgccccgggccggctac

SEQ ID NO: 1524 - DNA, 120 bp, Artificial Sequence
  ENSG00000003249_4 (sequence is synthesized)
ctgcgctccccttcctggacgaggacaagggctgagcagagccacgagaagcagcccctaggcgaccccgagcggcaggccacagtcctggacacgtttctcactgtggagaggccccag

SEQ ID NO: 1525 - DNA, 120 bp, Artificial Sequence
  ENSG00000003249_5 (sequence is synthesized)
gaggactagaccatctccacctgccccagctcctgcagggatggggtccgaacacgatggcagatctgggcagtgctgacccagcagacacacttcacccgcccacgaggctccagccgt

SEQ ID NO: 1526 - DNA, 120 bp, Artificial Sequence
  ENSG00000003249_6 (sequence is synthesized)
cacctcctgacacacaccctgggggcagctctctgccagccccgagaccggccttgtctgctgggcacgggtcttcgcctcacttggagaccagccggctttcctgggggacacacgggg

SEQ ID NO: 1527 - DNA, 120 bp, Artificial Sequence
  ENSG00000003249_7 (sequence is synthesized)
cccccggatgcctctgggagccccagcacaagcacagcccagtggccttacgtccagctcgttcctgggccccgagtcaggaagacagcgtcacggagtcactgccaggaacgtgctgag

SEQ ID NO: 1528 - DNA, 120 bp, Artificial Sequence
  ENSG00000003249_8 (sequence is synthesized)
ccaggcctgtgacagccactccaggaactcctgggggtgctccaacctccgcgttttcctgtgctgccaagctcagaagccagaggcgggtttggtagtggctaatgggacaatgtgctg

SEQ ID NO: 1529 - DNA, 120 bp, Artificial Sequence
  ENSG00000003249_9 (sequence is synthesized)
tccagcaaagcacacatggagaagcggccccaaaattcccaccttgatttccatcctgccccttcttctactccacggaggcgctgtctcactagggtcccctccccaaggctcagctct

SEQ ID NO: 1530 - DNA, 120 bp, Artificial Sequence
  ENSG00000003249_10 (sequence is synthesized)
aagacctgcacctgcttctcttggcccctgcgtgacagacaagtccattccctccttagctcagaacaccaaatatcaccagactgcctaagagacttgatgacacctcccggaatgctc

SEQ ID NO: 1531 - DNA, 120 bp, Artificial Sequence
  ENSG00000003249_11 (sequence is synthesized)
tcggggtggggttcacctctccttgtcctgcacccactgctaggccacattctcgtttctgctcacatcccattgcccggctacaaggcctgcccacggcccttaaacttgctgggcagg

SEQ ID NO: 1532 - DNA, 120 bp, Artificial Sequence
  ENSG00000003249_12 (sequence is synthesized)
tttggagcccatgggaccccgtgggtctctgtccaggagcagcagaggaggctgacaggccctgctccctctgctctgggggtgtctgggagccccagctcacaccctcccaatgcttat

SEQ ID NO: 1533 - DNA, 120 bp, Artificial Sequence
  ENSG00000003249_13 (sequence is synthesized)
atgctgaagctcacagaatgggcttcttgcctgacagcaagtcaaagaatgagtttaatatcaaagtgtaagcttactttccatccccaagccagcctgccccctgccccatttcccatg

SEQ ID NO: 1534 - DNA, 120 bp, Artificial Sequence
  ENSG00000003249_14 (sequence is synthesized)
agcacacttctggggaaggaaaacaggctcctggccttcactctcagcagagctttggagatgccccaggcatgccctgagctccttctgtgtacctgctcccacttctgagccacccgc

SEQ ID NO: 1535 - DNA, 120 bp, Artificial Sequence
  ENSG00000003249_15 (sequence is synthesized)
tgcccctccgcactgctggcaaacccagttcctgcctcagccaggtctccttccctggtttccagtcacacagagcccagcagctttctctttcagtcccataagggcagccttgtgtcc

SEQ ID NO: 1536 - DNA, 120 bp, Artificial Sequence
  ENSG00000003249_16 (sequence is synthesized)
ctggccacacttccacccgccagggtcttcctccccatctttccatccttcctgctgagcttccacagagctcgtttgcaaacagggggattaaagcatcactgcgcattcgaaggcctg

SEQ ID NO: 1537 - DNA, 120 bp, Artificial Sequence
  ENSG00000003249_17 (sequence is synthesized)
tcagatcctgccggtgtgggctttgcaggaagctgtggttcacccacagccttgtgggaggacacagcacactctctcctagacccccggggctctgagcagccttgtgggagggcctga

SEQ ID NO: 1538 - DNA, 120 bp, Artificial Sequence
  ENSG00000003249_18 (sequence is synthesized)
ttgcttcaaaatgacccagcagtggagggaagtgaatgaggacagagaagcagtggcccaggccaggagctggcaatcgctgaatctgggcgatagggacatgggggtcagtttcatcga

SEQ ID NO: 1539 - DNA, 120 bp, Artificial Sequence
  ENSG00000003249_19 (sequence is synthesized)
aactgccttggcgctctctgcagcccgggcccgccgccctctccttacctcccatcccccatcccgccccttccagcctcccaagcacacgccctcgcccccacccgccccccgcgttaa

SEQ ID NO: 1540 - DNA, 120 bp, Artificial Sequence
  ENSG00000003249_20 (sequence is synthesized)
ttcgcgccatccagggcgctctgtgagtctgtcattacccagcgcgagtcaggcccctcctgtgcccctcgccagccccgaggggcgcccgcacacagtcggcgccccacacgcaagtac

SEQ ID NO: 1541 - DNA, 74 bp, Artificial Sequence
  ENSG00000003249_21 (sequence is synthesized)
tagccgggcgtgctggtgcatgcctgtaatcccatctactcagggggatgaggcaggagaatcgctcaaaccca

SEQ ID NO: 1542 - DNA, 120 bp, Artificial Sequence
  ENSG00000003249_22 (sequence is synthesized)
acagagcgagactccatctaaaaaaaataaataaacatgggagaaacctggaagaatatttgctcaactgtgaggcatggttggtggctaagggatcacagaatggcaggcctgcctatt

SEQ ID NO: 1543 - DNA, 120 bp, Artificial Sequence
  ENSG00000003249_23 (sequence is synthesized)
tgcctattcctcctggtttgtaactttcatttaatgagaatgtattattctgaactcaaatacgacatcagtttttaaaaggaaaagtcagtccacagtggagaggggctgttctggttt

SEQ ID NO: 1544 - DNA, 120 bp, Artificial Sequence
  ENSG00000003249_24 (sequence is synthesized)
gaaggggaccaagaggctggacatggaaatccatgggcgatccttcaggggaccctgggccgagctagaaatcagaggccaggacggcactggaatgcagccacgcgggccctggtggga

SEQ ID NO: 1545 - DNA, 120 bp, Artificial Sequence
  ENSG00000003249_25 (sequence is synthesized)
cttccacgcctgcatggtcggctttcatgggtgcttgcgtaccaaaggtgatctggatctcagattccttgttcactaggggaggccagggcccaaggggaaggagcagcctccttgaag

SEQ ID NO: 1546 - DNA, 120 bp, Artificial Sequence
  ENSG00000003249_26 (sequence is synthesized)
cccctcaaccccttgtctgggtccaggcatgaggccacaagcccagccatcccatcacctgctggtcactgcccagagtttcaaaggactggatgtgccaagtcctcacacccagccccg

SEQ ID NO: 1547 - DNA, 120 bp, Artificial Sequence
  ENSG00000003249_27 (sequence is synthesized)
tttacttttcaagtgagcaacagacggctaaagccactgtcccctcaaaagcagaatttaatgaatgtgaattttcatcataaaatgggccaagaacgaaaggtgggggtggtcaccagc

SEQ ID NO: 1548 - DNA, 120 bp, Artificial Sequence
  ENSG00000003249_28 (sequence is synthesized)
ccgggcccctcctcagctcacttaacttcctctgattcccacgggagcgttgccattggcctgaaggcagctccagtgtcctcacactgccgagcagggcccccagcacggccattgtcg

SEQ ID NO: 1549 - DNA, 120 bp, Artificial Sequence
  ENSG00000003249_29 (sequence is synthesized)
tgtctccttcctaagccgtgacgagagcacaggactcatgaggatgcgacagcgcgtcctcagtctctgacagtgaccagtgaaggacactgacgtgacctgtgtgaacttcagtaactg

SEQ ID NO: 1550 - DNA, 120 bp, Artificial Sequence
  ENSG00000003249_30 (sequence is synthesized)
tgagagcatcagggccgagccttctccgcatgggacagtttggcccagcctctgcttcccaaccccccaggccactcaggacctcattaaaaggaccagccccactgtgactcctgccgg

SEQ ID NO: 1551 - DNA, 120 bp, Artificial Sequence
  ENSG00000003249_31 (sequence is synthesized)
tggccagctgctcccatggttcctggagttgtcaggaaggggtgtcggcctgtgtgtcccaggctgctgcagccccaggtgtctgggagggaatggggcctcatgagtcagcccccagct

SEQ ID NO: 1552 - DNA, 120 bp, Artificial Sequence
  ENSG00000003249_32 (sequence is synthesized)
cacctccaggacaaggccattgcctgaccctggccagttcccaccagctccatgttggcggcaacccttcccacccagcccgtgagcccaggcatggctgttgtggctggggaggtggag

SEQ ID NO: 1553 - DNA, 120 bp, Artificial Sequence
  ENSG00000003249_33 (sequence is synthesized)
tgaggggctcagactccagcccacccgaatccccagccccacagagcctgcaccggggactcacaaggcccatgatggggcagaggctccaagaggccggggacacacaaggcccatgat

SEQ ID NO: 1554 - DNA, 120 bp, Artificial Sequence
  ENSG00000003249_34 (sequence is synthesized)
ggggcagaggctccaagaggccggggacacacaaggcccatgatggggcagaggctccaagaggcctgcagggctcatggagggtggttggctgaggtgggacacctgcggggggaacag

SEQ ID NO: 1555 - DNA, 120 bp, Artificial Sequence
  ENSG00000003249_35 (sequence is synthesized)
tttagggaggccccaccagggtcacttaatgaccaaacaggagaggctcagcctagactatacagtgactccggggagcaccagaaaagaccctgcccaggccccacccagaccacaaca

SEQ ID NO: 1556 - DNA, 120 bp, Artificial Sequence
  ENSG00000003249_36 (sequence is synthesized)
tccacctctctggtggggccagtgtgtggtgggggcctcccgttagaggtagatgtgtgcatgcctggtgcagggggctggtgcagagcattggcaggagtggcgcaggaggccggcggc

SEQ ID NO: 1557 - DNA, 120 bp, Artificial Sequence
  ENSG00000003249_37 (sequence is synthesized)
gaacaagaggacgccagcgggcgcggccgccaaatgccagtggaaaggtggaaaccagattccgcgagagccccgtccagcccgcccaacccccaggcctgaaacgggccatgccatgac

SEQ ID NO: 1558 - DNA, 120 bp, Artificial Sequence
  ENSG00000003393_0 (sequence is synthesized)
actgggttgccaagctcgcgccggatgcggagcgcggtgctgccggtggagcttcaggtcttgatagactttctgtaaagaaggaatgatttggtgatggagtgttcccactgaccgatg

SEQ ID NO: 1559 - DNA, 120 bp, Artificial Sequence
  ENSG00000003393_1 (sequence is synthesized)
gactcaaagaagagaagctcaacagaggcagaaggatccaaggaaagaggcctggtccatatctggcaggcaggatcctttcccataacaccagagagattgccaggctggggaggaaag

SEQ ID NO: 1560 - DNA, 120 bp, Artificial Sequence
  ENSG00000003393_2 (sequence is synthesized)
actgttttgcaggcagccctcggagtgaaacatggagttcttctgactgaagatggtgaggtctacagctttgggactcttccctggagaagtggaccagtggagatttgtccaagtagc

SEQ ID NO: 1561 - DNA, 120 bp, Artificial Sequence
  ENSG00000003393_3 (sequence is synthesized)
cccattctagaaaatgccctggttgggcaatatgttattactgtggcaacaggaagcttccatagtggagcagtgacagacaatggtgtcgcgtacatgtggggagagaattctgctggc

SEQ ID NO: 1562 - DNA, 120 bp, Artificial Sequence
  ENSG00000003393_4 (sequence is synthesized)
cagtgtgcagtagccaaccagcagtatgtgccggaaccaaatcctgtcagcattgctgattctgaggccagccctttgttagcagtcaggattttacagttggcgtgtggcgaggagcac

SEQ ID NO: 1563 - DNA, 120 bp, Artificial Sequence
  ENSG00000003393_5 (sequence is synthesized)
actctggcattgtcaataagcagagagatttgggcatggggtaccggttgtcagttgggtctcattaccactgccttcccagtgacaaagccgcaaaaggtagaacatcttgctgggcga

SEQ ID NO: 1564 - DNA, 120 bp, Artificial Sequence
  ENSG00000003393_6 (sequence is synthesized)
gtggtgcttcaagttgcctgtggtgctttccacagcttagcccttgtacaatgcctcccttcccaggatctgaagccagtcccagaacgatgcaaccagtgcagccagctcttgattact

SEQ ID NO: 1565 - DNA, 120 bp, Artificial Sequence
  ENSG00000003393_7 (sequence is synthesized)
atgactgacaaagaagaccatgtgattatatcagacagtcattgttgcccattaggtgtgacactgacagaatctcaggcagaaaaccatgccagcactgctctcagcccctccactgaa

SEQ ID NO: 1566 - DNA, 120 bp, Artificial Sequence
  ENSG00000003393_8 (sequence is synthesized)
acccttgacaggcaggaagaagtatttgagaacactcttgtagcaaatgatcagtctgttgctactgaactgaatgcagtaagtgctcagatcacaagcagcgatgccatgtcctctcaa

SEQ ID NO: 1567 - DNA, 120 bp, Artificial Sequence
  ENSG00000003393_9 (sequence is synthesized)
caaaatgtcatgggaacaactgaaatttcctctgccagaaacataccatcataccctgacacccaagcagtcaatgaatacctacggaaactgtcagatcattcagtaagagaggactca

SEQ ID NO: 1568 - DNA, 120 bp, Artificial Sequence
  ENSG00000003393_10 (sequence is synthesized)
gagcatggtgaaaagccagtgccatctcagcctcttttagaagaagcaattcctaatctccacagcccgcctaccacaagcacctcagccctaaacagcctggtggtctcttgtgcatct

SEQ ID NO: 1569 - DNA, 120 bp, Artificial Sequence
  ENSG00000003393_11 (sequence is synthesized)
gctgttggtgtgagagtggctgctacttatgaagctggtgccttgtcactgaagaaagttatgaacttttatagtacaaccccttgtgaaactggagctcaggcaggcagtagtgccatt

SEQ ID NO: 1570 - DNA, 120 bp, Artificial Sequence
  ENSG00000003393_12 (sequence is synthesized)
ggccccgaaggtttgaaagatagcagggaagaacaggttaaacaggaatcaatgcaaggaaagaaaagttcaagtcttgtggatatcagagaagaagaaacagagggaggcagtcgaaga

SEQ ID NO: 1571 - DNA, 120 bp, Artificial Sequence
  ENSG00000003393_13 (sequence is synthesized)
ctctccctccctggattgttgtcacaagtttcccccaggctcttaagaaaggctgcacgggtgaaaacgaggacagtggttctgacccccacatacagtggagaagcagatgcgctcctg

SEQ ID NO: 1572 - DNA, 120 bp, Artificial Sequence
  ENSG00000003393_14 (sequence is synthesized)
ccttctctgagaacagaagtgtggacctgggggaaagggaaggaagggcagctggggcacggcgatgttctgcctaggcttcaaccgttgtgtgtaaaatgtctggatggcaaagaagta

SEQ ID NO: 1573 - DNA, 120 bp, Artificial Sequence
  ENSG00000003393_15 (sequence is synthesized)
atccatctggaggcaggtggttaccattctcttgcacttactgcgaaatcccaggtttactcatggggtagcaatacctttggtcaacttgggcattccgattttccaacaacagttcct

SEQ ID NO: 1574 - DNA, 120 bp, Artificial Sequence
  ENSG00000003393_16 (sequence is synthesized)
cgtcttgcaaagataagcagtgaaaatggagtctggagcatagctgcaggcagggattattccctgtttttagtggatacagaagacttccagcctgggttatattacagtggccgacag

SEQ ID NO: 1575 - DNA, 120 bp, Artificial Sequence
  ENSG00000003393_17 (sequence is synthesized)
gaccctacagaaggtgacaaccttccagagaatcacagtggttctaagactccagtacttctctcctgtagtaagcttggatatataagcagagtgacagcaggaaaagatagctattta

SEQ ID NO: 1576 - DNA, 120 bp, Artificial Sequence
  ENSG00000003393_18 (sequence is synthesized)
gccttggtggataaaaacattatggggtatattgccagtctccacgagttagctactacagaaagacgattctattcaaaactaagtgatatcaaatctcagattctcaggcctcttctc

SEQ ID NO: 1577 - DNA, 120 bp, Artificial Sequence
  ENSG00000003393_19 (sequence is synthesized)
agtttagaaaatttgggcactacaactacagtccagctgttgcaggaggtggctagccgattcagcaagctgtgttacctcattggtcagcatggagcctcattgagcagcttccttcat

SEQ ID NO: 1578 - DNA, 120 bp, Artificial Sequence
  ENSG00000003393_20 (sequence is synthesized)
ggggtaaaggaagccaggagtttggtcatcctgaagcattcaagtctcttcttggatagttatacagagtattgcacatctattacaaatttcctggttatgggaggattccagcttctt

SEQ ID NO: 1579 - DNA, 120 bp, Artificial Sequence
  ENSG00000003393_21 (sequence is synthesized)
gctaagcctgccattgatttcctaaataaaaaccaagagctgttgcaagatttgtcagaagtgaatgacgaaaacactcagttgatggaaatactgaatactttgtttttcttgccaatc

SEQ ID NO: 1580 - DNA, 120 bp, Artificial Sequence
  ENSG00000003393_22 (sequence is synthesized)
agacgacttcataattacgcaaaagttttgctaaagcttgctacttgttttgaagtggcatctccagaatatcagaaactgcaggattccagttcttgttatgagtgtcttgctctccat

SEQ ID NO: 1581 - DNA, 120 bp, Artificial Sequence
  ENSG00000003393_23 (sequence is synthesized)
ctcggcaggaaaaggaaggaagcagaatacacactgggcttctggaagaccttccccggaaaaatgacggattccttgaggaagccagagcgtcgactgctgtgtgagagtagtaaccga

SEQ ID NO: 1582 - DNA, 120 bp, Artificial Sequence
  ENSG00000003393_24 (sequence is synthesized)
gccctgtctctgcagcatgctgggaggttttccgtgaattggttcattctctttaatgatgccctggtccatgcccagttctccacgcaccatgttttccctctggccacgctgtgggca

SEQ ID NO: 1583 - DNA, 120 bp, Artificial Sequence
  ENSG00000003393_25 (sequence is synthesized)
gagccactgtctgaagaagctggtggtgtgaatggcttaaagataactacacctgaggagcagttcactctcatttcatctacaccccaggaaaagacaaagtggctacgagctataagc

SEQ ID NO: 1584 - DNA, 120 bp, Artificial Sequence
  ENSG00000003393_26 (sequence is synthesized)
caagccgtagatcaggctttgagagggatgtctgatctccccccttatggaagtggtagcagtgttcagagacaggaaccacccatttcacgcagtgccaaatatactttctacaaggat

SEQ ID NO: 1585 - DNA, 120 bp, Artificial Sequence
  ENSG00000003393_27 (sequence is synthesized)
cctgatggaaagatgtattctggcatgttcaggaatggcttggaagatgggtatggagaatacagaatcccaaacaaggcaatgaacaaagaagaccattatgtgggccattggaaagaa

SEQ ID NO: 1586 - DNA, 120 bp, Artificial Sequence
  ENSG00000003393_28 (sequence is synthesized)
ggaaaaatgtgcggtcaaggagtctacagctatgcttctggtgaagtatttgagggctgttttcaagataatatgcgtcatggtcatggtcttctacgaagtgggaaattgacgtcctct

SEQ ID NO: 1587 - DNA, 120 bp, Artificial Sequence
  ENSG00000003393_29 (sequence is synthesized)
tctcctagtatgttcattggccagtgggtaatggataagaaagcaggatatggtgtctttgatgatatcactaggggggaaaagtatatgggaatgtggcaagatgatgtgtgtcaaggg

SEQ ID NO: 1588 - DNA, 120 bp, Artificial Sequence
  ENSG00000003393_30 (sequence is synthesized)
aatggtgtggtggttacccagtttggattatactacgagggcaactttcaccttaataaaatgatgggaaatggggttttgctttccgaagatgatactatctatgaaggagaattttca

SEQ ID NO: 1589 - DNA, 120 bp, Artificial Sequence
  ENSG00000003393_31 (sequence is synthesized)
gatgactggactcttagtggaaagggaacactgactatgccaaatggagactacattgaaggttattttagtggagaatggggatctgggataaaaatcactggaacctacttcaaacct

SEQ ID NO: 1590 - DNA, 120 bp, Artificial Sequence
  ENSG00000003393_32 (sequence is synthesized)
agtctatatgagagtgataaagacagacctaaagttttcaggaagctaggaaacctggcagtgccagctgatgagaagtggaaagcggtgtttgacgaatgttggcgccaactgggctgt

SEQ ID NO: 1591 - DNA, 120 bp, Artificial Sequence
  ENSG00000003393_33 (sequence is synthesized)
gagggcccaggccaaggggaagtttggaaagcatgggacaatattgctgtggccttgaccaccagtcggcgccagcacagagacagtccagaaatactgagtcgttcacagactcagaca

SEQ ID NO: 1592 - DNA, 120 bp, Artificial Sequence
  ENSG00000003393_34 (sequence is synthesized)
ctagagagtttggaattcattccacagcatgttggtgccttctctgtggagaaatatgatgacatcaggaaatatttaataaaggcctgtgacactcctctgcaccccctgggcaggctt

SEQ ID NO: 1593 - DNA, 120 bp, Artificial Sequence
  ENSG00000003393_35 (sequence is synthesized)
gtggagacactggttgcagtgtatagaatgacatacgtgggcgtaggagccaaccgcaggttattgcaggaggctgtaaaggagattaagtcctatcttaagcgaattttccagctggtg

SEQ ID NO: 1594 - DNA, 120 bp, Artificial Sequence
  ENSG00000003393_36 (sequence is synthesized)
aggttcttatttcctgagctgcctgaagaaggcagcacaattcctctctctgctcctctgccaaccgaaaggaagtctttttgcactgggaagtcagattcccgatctgaatcaccagag

SEQ ID NO: 1595 - DNA, 120 bp, Artificial Sequence
  ENSG00000003393_37 (sequence is synthesized)
ccaggttatgtagtaacgagttctggattattgcttcctgtgctgctacctcggctctacccaccgctgtttatgctttatgctttggataatgatcgcgaggaagacatttactgggaa

SEQ ID NO: 1596 - DNA, 120 bp, Artificial Sequence
  ENSG00000003393_38 (sequence is synthesized)
tgtgtccttcgactaaataagcagccagatattgctctcctgggctttcttggggtgcagaggaaattttggccagcaaccttgtcaatccttggagagagtaaaaaggttttgccaacc

SEQ ID NO: 1597 - DNA, 120 bp, Artificial Sequence
  ENSG00000003393_39 (sequence is synthesized)
acgaaagatgcttgttttgcctcagcagtagaatgtctgcagcagatcagcacaacatttaccccatcagacaaacttaaggtcatccagcagacttttgaggagatctctcagagtgtc

SEQ ID NO: 1598 - DNA, 120 bp, Artificial Sequence
  ENSG00000003393_40 (sequence is synthesized)
ctggcgtcactccacgaagacttcttgtggtccatggatgacttgtttcctgttttcttatatgtggtgctacgggccaggattaggaatttaggctctgaggtacacctcattgaggat

SEQ ID NO: 1599 - DNA, 120 bp, Artificial Sequence
  ENSG00000003393_41 (sequence is synthesized)
ctaatggacccctatcttcagcatggggaacagggtataatgttcaccaccttgaaggcatgttactaccagattcagcgtgagaagcttaactaggctgcataacagcttgaaaactgg

SEQ ID NO: 1600 - DNA, 120 bp, Artificial Sequence
  ENSG00000003393_42 (sequence is synthesized)
attatctactacagagtgttataacaccatctggagtcttcctgtagtggcaaaaaagaacagtgttgaaattggaaaggactttgtgttatttaggttgttagaatgagccttaccaat

SEQ ID NO: 1601 - DNA, 120 bp, Artificial Sequence
  ENSG00000003393_43 (sequence is synthesized)
aataagagccctgagcccagaaaaaaggactgtatagtttaaagggaggattgaaagggaggtaaaaaatcagattagaccagttcttggcctatgataagttccaaaaataccatttat

SEQ ID NO: 1602 - DNA, 120 bp, Artificial Sequence
  ENSG00000003393_44 (sequence is synthesized)
ctactatttgaaaaaagaagaggatatcccttcctacagtaaagggtatgtcagctacatgaagttgtaagaaaagcttccagtagagcttcttatattaaagaagttgatggatatttt

SEQ ID NO: 1603 - DNA, 120 bp, Artificial Sequence
  ENSG00000003393_45 (sequence is synthesized)
tgaatttctggtttgcctgaatccacctgcagttaccccgatccgtttgcaagaaccagatcgtacttgaaactatagtggccacactctgccttcctgagtcccttccagtcatgtgtg

SEQ ID NO: 1604 - DNA, 120 bp, Artificial Sequence
  ENSG00000003393_46 (sequence is synthesized)
catcatgtctctttgccaagggaggggagaaaggaacttttaaactgcagttttaactttttctaagctgtttcttgatgggagaggttctgtgcaaaactaccacattctgtccccaaa

SEQ ID NO: 1605 - DNA, 120 bp, Artificial Sequence
  ENSG00000003393_47 (sequence is synthesized)
atgtggaatgcatccaaataggagtcttctgcctcttaacttaaaagaacataggaattttgtttttggtttctttatcatgctacagagagtgaatacactggaattcagacaccgact

SEQ ID NO: 1606 - DNA, 120 bp, Artificial Sequence
  ENSG00000003393_48 (sequence is synthesized)
ctgagctgctaggaacctcatttgtccatgtgcaaacgctgtattccaaggcctgtgaatggcagcctgaggaagttttgcatgcaggctgtgttttcgagcaggactaacaactgggaa

SEQ ID NO: 1607 - DNA, 120 bp, Artificial Sequence
  ENSG00000003393_49 (sequence is synthesized)
ataagcaaaaaactgcatcgatccccagcctggtgttgttcttccctatacttcacactgaactcaggatgggaagaaaaaggaaacaagctttggctttttccatctcaaaagtattgt

SEQ ID NO: 1608 - DNA, 120 bp, Artificial Sequence
  ENSG00000003393_50 (sequence is synthesized)
ggcacctcaacatttcagtgttttgctttttaaaaaatgccctattgtaagttgttggtttatactgtataagtaacactagtagctgttttgaataacataggtgctcttcctcatctc

SEQ ID NO: 1609 - DNA, 120 bp, Artificial Sequence
  ENSG00000003393_51 (sequence is synthesized)
atctcctacaccgtggtgagcatacagagtgtcctgatttgtgttaagtgactgagaagatgttaattacttttgaaaaaggatcatggtttttgctctactttataatcaagacaagtg

SEQ ID NO: 1610 - DNA, 120 bp, Artificial Sequence
  ENSG00000003393_52 (sequence is synthesized)
tttattaaaatactgttttggaatgttggctgtaatgtaacagcaattttcataataaaaggcattcatctttatgtggttgttttatgattgtagaagaaatgaacagggcagcctaaa

SEQ ID NO: 1611 - DNA, 120 bp, Artificial Sequence
  ENSG00000003393_53 (sequence is synthesized)
agatgaaaggaaacccagacttagtatttctttagcccacattgtaatccatgcctctaagtattggcctcaaaagtccctctggggttttagaaatctctgtctttaaaataaacgtaa

SEQ ID NO: 1612 - DNA, 120 bp, Artificial Sequence
  ENSG00000003393_54 (sequence is synthesized)
accaatagttatagcaccctttctagcaaagagcaaattaactttctgaccccaataacccaaggacacgggtctccaaagaaatctattatttctttgaataaaaagcatattttgata

SEQ ID NO: 1613 - DNA, 120 bp, Artificial Sequence
  ENSG00000003393_55 (sequence is synthesized)
aagctcgcgccggatgcggagcgcggtgctgccggtggagcttcagcttatgtcttgatgtttgcctgcatgtagctgaactgattgatccaggtcttgatagactttctgtaaagaagg

SEQ ID NO: 1614 - DNA, 120 bp, Artificial Sequence
  ENSG00000003393_56 (sequence is synthesized)
agtcccgtgtcatgttcaatctctgcagggttattctgccaaggagaacagctccttaatcagaagagactagattagggagagtgatataaggtaatagaaattgcaaagcagtatttt

SEQ ID NO: 1615 - DNA, 120 bp, Artificial Sequence
  ENSG00000003393_57 (sequence is synthesized)
aatcttaagccaactatagttctggattgctaaaatttagtcttctctaaatgaaaaaaaatttaaaaataatgaattatcatgttttcttctatattctagcagagtgatagcataatt

SEQ ID NO: 1616 - DNA, 120 bp, Artificial Sequence
  ENSG00000003393_58 (sequence is synthesized)
tacattaaatgtactataataagtctggttctttagaaaacaattttgtttacttaactaaattgtactaaaacttggaagaaattagtaactaaacaaattatttcaagaccaactgct

SEQ ID NO: 1617 - DNA, 120 bp, Artificial Sequence
  ENSG00000003393_59 (sequence is synthesized)
gattgtaaatatggagctgttctgatgtctgcttttgacttttatataaatggaagttttaaaagacccaactatttttaacatgaagatgtttttccttaataaaacctggaatagtta

SEQ ID NO: 1618 - DNA, 120 bp, Artificial Sequence
  ENSG00000003393_60 (sequence is synthesized)
tttgagtttgattataattttgttttatcaggcaagcctagataaaggaaagaacctggattaattcaaaatcactctttatgtttgttctggccctttatgatattgaaaggtgtcatg

SEQ ID NO: 1619 - DNA, 120 bp, Artificial Sequence
  ENSG00000003393_61 (sequence is synthesized)
ttgggcttgttttataagtaggagcatttcatttttttttcttgctagtactttttttctatggctaaagtactgaattttggtgggccctgaatagtttaatataactagagattcaca

SEQ ID NO: 1620 - DNA, 120 bp, Artificial Sequence
  ENSG00000003393_62 (sequence is synthesized)
aagattcttcttacttgtgtttgtaacactcttcagaattctgtagagaaaagtcttttccttctttaacagggaagattgttttgtggcagatccttcaattgtaggcagatttaaaac

SEQ ID NO: 1621 - DNA, 120 bp, Artificial Sequence
  ENSG00000003393_63 (sequence is synthesized)
ttacaggcaattacatgtttcagtttttttcaattatagctgtggtccttactgggcttaatttgaagaggtggctaatattttatctttttgtttgtttgtttttgagatggggtcttg

SEQ ID NO: 1622 - DNA, 120 bp, Artificial Sequence
  ENSG00000003393_64 (sequence is synthesized)
ctctgtcacccaggctggagtgcagtaatgcgattgtggctcactgcagcctcgatctcccaggttcaagcgatcctcccatttcagccttccaagtagctgggactatacacatgccac

SEQ ID NO: 1623 - DNA, 120 bp, Artificial Sequence
  ENSG00000003393_65 (sequence is synthesized)
atttcagccttccaagtagctgggactatacacatgccaccacacctgctgattttatttttaagtagagtagagcctgttgcccaggctcatctcaaactcctgagctcaagcaatcct

SEQ ID NO: 1624 - DNA, 120 bp, Artificial Sequence
  ENSG00000003393_66 (sequence is synthesized)
gccatcatgcccagcctattttatatatcttattaaaactattttcattttgaagatttgtggtagaatgaacaaaagttgtttatcagtagcacatggtaaagtttgagttcccgctta

SEQ ID NO: 1625 - DNA, 120 bp, Artificial Sequence
  ENSG00000003393_67 (sequence is synthesized)
aactaaattgttttaaaaggattatttctgtgttttactcttagtgtggccttttgattttgctttaccaaaactgtaagaaaacaaaacaaaagatcatactcataaaagatctgtcct

SEQ ID NO: 1626 - DNA, 120 bp, Artificial Sequence
  ENSG00000003393_68 (sequence is synthesized)
gcagtgtttctttttaggtttttgaaaccacatagcctcttgattctcaattcttattgtttactctgtcagaatgtgaacatgaaggtatttttagaaatagtctttatttcacaatct

SEQ ID NO: 1627 - DNA, 120 bp, Artificial Sequence
  ENSG00000003393_69 (sequence is synthesized)
attcactgaaacttgtgggtatttgaatttttaaaaaaatcaaggataagctgtttggagaaaggtattataaagtctgaacaaagcaaaagtagtagtttaacaagaatgcatgtagaa

SEQ ID NO: 1628 - DNA, 120 bp, Artificial Sequence
  ENSG00000003393_70 (sequence is synthesized)
aattcttagactgtacatgcttatcacattttacttactttgttaaacattggaagtttttgttacttatgctagtaacaatgtgtgtgtttctattgaattaaatttaatttatttaaa

SEQ ID NO: 1629 - DNA, 120 bp, Artificial Sequence
  ENSG00000003393_71 (sequence is synthesized)
agctgatcccgcggacccactgggttgccaagctcgcgccggatgcggagcgcggtgctgccggtggagcttcaggatggagaaggaactgactgctgtacccaagtgaagatctttact

SEQ ID NO: 1630 - DNA, 120 bp, Artificial Sequence
  ENSG00000003393_72 (sequence is synthesized)
tcacccctttcaagtgcacgtttcagtgatttttggtcaacatggctgtacaaaccaccaccacaatccagtttcagaacatttccatcgcccaagaaaatcccttctgctcattcagtg

SEQ ID NO: 1631 - DNA, 120 bp, Artificial Sequence
  ENSG00000003393_73 (sequence is synthesized)
acttccatttccacctaaagtcccagccaaccactaatcacccttaatcactctatagatttgccttttttgggccttttgtataaatggaatcatacatgcaatctcctctatgtggct

SEQ ID NO: 1632 - DNA, 120 bp, Artificial Sequence
  ENSG00000003393_74 (sequence is synthesized)
tcttacacttagtataatgtttttgttttttccatattgtggcatgtatagtatttgttcctttttatggctgaatagtgttccaaaactacattttgtttatccttttaccagttgatg

SEQ ID NO: 1633 - DNA, 120 bp, Artificial Sequence
  ENSG00000003393_75 (sequence is synthesized)
gacattgggttatttccaactttagactattgtaaataatgctgctataaacttttgaatgcagtttcttgtgtagacatatgttttcattttcatttctcaagtagatgcctggagtgt

SEQ ID NO: 1634 - DNA, 120 bp, Artificial Sequence
  ENSG00000003393_76 (sequence is synthesized)
aattgctaagttgtatggtaaattgatgtttaacatattaagaaactgtcgaacttttttccaaagtgtctgtaccattttacattcccatcagcaatgtctgaggatactaatttctcc

SEQ ID NO: 1635 - DNA, 120 bp, Artificial Sequence
  ENSG00000003393_77 (sequence is synthesized)
atatcaaaaaatatttcttattttctgtcttttttcttatagccattccaatgggtatgaagtggtatctcctggttttaatttgcattccctagtgactaatgatgtagaacatgctta

SEQ ID NO: 1636 - DNA, 120 bp, Artificial Sequence
  ENSG00000003393_78 (sequence is synthesized)
ttagtgattcatatatcttctttgatgaaatgtctattcagatcttggcctatttctaaaattttgtttgtactcttgttgaattgtatgggttctttctgtattctggatacatgtcct

SEQ ID NO: 1637 - DNA, 120 bp, Artificial Sequence
  ENSG00000003393_79 (sequence is synthesized)
catgtcctttatcagatatgatttgtaaatattttcttgcagtctgacttgtcttttattttcttaatagtgtcttttgaaatagaaaagtttttcattttaataaactctataaaaaat

SEQ ID NO: 1638 - DNA, 120 bp, Artificial Sequence
  ENSG00000003393_80 (sequence is synthesized)
aacaagttgggaagtgttccctcctcccctattttctgaaagtttgcgaagctttggtattatttcttctttgaatgtttgggagaattcaccaatgaagtcttctgggcctaagcatta

SEQ ID NO: 1639 - DNA, 120 bp, Artificial Sequence
  ENSG00000003393_81 (sequence is synthesized)
ctattacaaatttcctggttatgggaggattccagcttcttgctaagcctgccatgtaagcaaacccacaccttccagttatcattctctccgccaaagatgacattttatagtgctctg

SEQ ID NO: 1640 - DNA, 120 bp, Artificial Sequence
  ENSG00000003393_82 (sequence is synthesized)
ggagttcttctgactgaaggaactaaaggaagacaaattctaggaaacaaggattaaatctggtcctggtggttgtatgggataaacatggatttctttctagtttgtcttatatcagtt

SEQ ID NO: 1641 - DNA, 120 bp, Artificial Sequence
  ENSG00000003393_83 (sequence is synthesized)
ttattataatattattcttcaggactttaaaaacaatcttactttaaaagtgtgaactatattcaatacctgtcctatgagatttaaaatatatagttctcaagcaaatataagtggaat

SEQ ID NO: 1642 - DNA, 120 bp, Artificial Sequence
  ENSG00000003393_84 (sequence is synthesized)
tgatgccctggtccatgcccaggaatggcttaaagataactacacctgaggagcagttcactctcatttcatctacaccccaggaaaagacaaagtggctacgagctataagccaagccg

SEQ ID NO: 1643 - DNA, 120 bp, Artificial Sequence
  ENSG00000003400_0 (sequence is synthesized)
tccctttttgacttaccaaggaaatggagatccaaaggaaagcctgaagcactttgtggcttccacgggttcgtttctaggaagcttttgctttacctggggaaaccccaagctctacag

SEQ ID NO: 1644 - DNA, 120 bp, Artificial Sequence
  ENSG00000003400_1 (sequence is synthesized)
tgagaaagttgtaaattagcctttaggagacgctgtttgtcaaagttatcttaaccctggaaaaggggagggaaaaaggcagataagcagtgatgacatcagcaggaaactagtatcagg

SEQ ID NO: 1645 - DNA, 120 bp, Artificial Sequence
  ENSG00000003400_2 (sequence is synthesized)
ctacccagtcctgaagattcagttttcacttaaacaaccagcaagtcttgaagtctcttcccaagcaaatgggagcttctttggaccttggagcacacagaggattctactttctttaaa

SEQ ID NO: 1646 - DNA, 120 bp, Artificial Sequence
  ENSG00000003400_3 (sequence is synthesized)
actttgttttcaggcaatttccctgagaaccgtttacttccagaagattggtggagcttgatctgaaggctggccatgaaatctcaaggtcaacattggtattccagttcagataaaaac

SEQ ID NO: 1647 - DNA, 120 bp, Artificial Sequence
  ENSG00000003400_4 (sequence is synthesized)
tgtaaagtgagctttcgtgagaagcttctgattattgattcaaacctgggggtccaagatgtggagaacctcaagtttctctgcataggattggtccccaacaagaagctggagaagtcc

SEQ ID NO: 1648 - DNA, 120 bp, Artificial Sequence
  ENSG00000003400_5 (sequence is synthesized)
agctcagcctcagatgtttttgaacatctcttggcagaggatctgctgagtgaggaagaccctttcttcctggcagaactcctctatatcatacggcagaagaagctgctgcagcacctc

SEQ ID NO: 1649 - DNA, 120 bp, Artificial Sequence
  ENSG00000003400_6 (sequence is synthesized)
aactgtaccaaagaggaagtggagcgactgctgcccacccgacaaagggtttctctgtttagaaacctgctctacgaactgtcagaaggcattgactcagagaacttaaaggacatgatc

SEQ ID NO: 1650 - DNA, 120 bp, Artificial Sequence
  ENSG00000003400_7 (sequence is synthesized)
ttccttctgaaagactcgcttcccaaaactgaaatgacctccctaagtttcctggcatttctagagaaacaaggtaaaatagatgaagataatctgacatgcctggaggacctctgcaaa

SEQ ID NO: 1651 - DNA, 120 bp, Artificial Sequence
  ENSG00000003400_8 (sequence is synthesized)
acagttgtacctaaacttttgagaaacatagagaaatacaaaagagagaaagctatccagatagtgacacctcctgtagacaaggaagccgagtcgtatcaaggagaggaagaactagtt

SEQ ID NO: 1652 - DNA, 120 bp, Artificial Sequence
  ENSG00000003400_9 (sequence is synthesized)
tcccaaacagatgttaagacattcttggaagccttaccgcaggagtcctggcaaaataagcatgcaggtagtaatggtaacagagccacaaatggtgcaccaagcctggtctccaggggg

SEQ ID NO: 1653 - DNA, 120 bp, Artificial Sequence
  ENSG00000003400_10 (sequence is synthesized)
atgcaaggagcatctgctaacactctaaactctgaaaccagcacaaagagggcagctgtgtacaggatgaatcggaaccacagaggcctctgtgtcattgtcaacaaccacagctttacc

SEQ ID NO: 1654 - DNA, 120 bp, Artificial Sequence
  ENSG00000003400_11 (sequence is synthesized)
tccctgaaggacagacaaggaacccataaagatgctgagatcctgagtcatgtgttccagtggcttgggttcacagtgcatatacacaataatgtgacgaaagtggaaatggagatggtc

SEQ ID NO: 1655 - DNA, 120 bp, Artificial Sequence
  ENSG00000003400_12 (sequence is synthesized)
ctgcagaagcagaagtgcaatccagcccatgccgacggggactgcttcgtgttctgtattctgacccatgggagatttggagctgtctactcttcggatgaggccctcattcccattcgg

SEQ ID NO: 1656 - DNA, 120 bp, Artificial Sequence
  ENSG00000003400_13 (sequence is synthesized)
gagatcatgtctcacttcacagccctgcagtgccctagactggctgaaaaacctaaactctttttcatccaggcctgccaaggtgaagagatacagccttccgtatccatcgaagcagat

SEQ ID NO: 1657 - DNA, 120 bp, Artificial Sequence
  ENSG00000003400_14 (sequence is synthesized)
gctctgaaccctgagcaggcacccacttccctgcaggacagtattcctgccgaggctgacttcctacttggtctggccactgtcccaggctatgtatcctttcggcatgtggaggaaggc

SEQ ID NO: 1658 - DNA, 120 bp, Artificial Sequence
  ENSG00000003400_15 (sequence is synthesized)
agctggtatattcagtctctgtgtaatcatctgaagaaattggtcccaagacatgaagacatcttatccatcctcactgctgtcaacgatgatgtgagtcgaagagtggacaaacaggga

SEQ ID NO: 1659 - DNA, 120 bp, Artificial Sequence
  ENSG00000003400_16 (sequence is synthesized)
acaaagaaacagatgccccagcctgctttcacactaaggaaaaaactagtattccctgtgcccctggatgcactttcattatagcagagagtttttgttggttcttagacctcaaacgaa

SEQ ID NO: 1660 - DNA, 120 bp, Artificial Sequence
  ENSG00000003400_17 (sequence is synthesized)
tcattggctataacctccagcctcctgcccagcacaggaatcggtggtctccacctgtcattctagaaacaggaaacaccgtgttttctgacacagtcaattctgattttctttttcttt

SEQ ID NO: 1661 - DNA, 120 bp, Artificial Sequence
  ENSG00000003400_18 (sequence is synthesized)
tgcaagtctaaatgttagaaaactttcttttttttggagatagtctcattctgtcacccagactggagtgcaggggggcaatcacggctcactgtagtctcgacctcccaggctcaagct

SEQ ID NO: 1662 - DNA, 120 bp, Artificial Sequence
  ENSG00000003400_19 (sequence is synthesized)
cagcttcccaagtagctgggaccacaggtgtgtaccaccgtgcccggattttttttattctttattttttgtagagatggagggatctcactttgttgcacaggctggtttcaaactcct

SEQ ID NO: 1663 - DNA, 120 bp, Artificial Sequence
  ENSG00000003400_20 (sequence is synthesized)
tttcaaactcctaggcccaagtgatcctcccacctctgtccccaaaatactgggattataggcacgagccaccacacctggccagaaaactttcattattgaagacttggattgtagcct

SEQ ID NO: 1664 - DNA, 120 bp, Artificial Sequence
  ENSG00000003400_21 (sequence is synthesized)
tggttttggatgtctattctgaagacagagtaattggctttggtttgtgcaggtactttttctttgagacagagtcactccgtcacctgggctggagtgcagtggtgggatcactgttca

SEQ ID NO: 1665 - DNA, 73 bp, Artificial Sequence
  ENSG00000003400_22 (sequence is synthesized)
tccatgcacagctaactttttattttttttgtggagatggggtttcactatgttgcctaagctggtctcaaac

SEQ ID NO: 1666 - DNA, 120 bp, Artificial Sequence
  ENSG00000003400_23 (sequence is synthesized)
tcaagcgatcctcccacctcagcttctcaaagttctgggactacaggcatgaaatactgtgcctggcctggggaccaggtgcattttaaggttccttggtgttcaaaaaccacgttctta

SEQ ID NO: 1667 - DNA, 120 bp, Artificial Sequence
  ENSG00000003400_24 (sequence is synthesized)
cttagattgcctctctagacaactaccccttagttataattctgtgtcccctctgcatgcccttaaacattggacagtgaggtcacagtccacccaccctctctctgatctcccccttcc

SEQ ID NO: 1668 - DNA, 120 bp, Artificial Sequence
  ENSG00000003400_25 (sequence is synthesized)
taagacttctcttttgcacatctagtgaggtgaaaatttggtctatgccaggcccatttcctgcttttgtgtaaggaaggtgctcacataggaagtttttatttggttagagacaggttt

SEQ ID NO: 1669 - DNA, 120 bp, Artificial Sequence
  ENSG00000003400_26 (sequence is synthesized)
acaggtttccctgtaggaagatgatggctcatttacactcagctgctctgcaagcagaaactttacaacctgatgtcatattccattttggactgggtgcggtgactcatgcctgtaatc

SEQ ID NO: 1670 - DNA, 120 bp, Artificial Sequence
  ENSG00000003400_27 (sequence is synthesized)
aggctgagacaggagaatctcttgaatccaggaggcagaggctgtggtgagccaagatgacacaactgcactccagcttgggcaacagggcgagaccttgtttaaaaaaaaaattcaata

SEQ ID NO: 1671 - DNA, 120 bp, Artificial Sequence
  ENSG00000003400_28 (sequence is synthesized)
tttaaaaaaaaaattcaatattggggttggaacatttcagttgccattgacagaacacccaattcaaattgactgaagcaaagaagggaatttattgcctctttcacattgaaacccagg

SEQ ID NO: 1672 - DNA, 120 bp, Artificial Sequence
  ENSG00000003400_29 (sequence is synthesized)
agtggataacactggcttcaggcaaagcttgaatcaggactcaatctacaggccagcacctttctcttggccggatgtcctcagggctggcagatgcagtagactgcagtggacagtccc

SEQ ID NO: 1673 - DNA, 120 bp, Artificial Sequence
  ENSG00000003400_30 (sequence is synthesized)
caccttgttactgctactacactttgctcctctggcccaaggcatgaggagagaggctgtgtcagaaactgaagctgttctcaggatcactgggctcttcttggcagaggggatgtctgg

SEQ ID NO: 1674 - DNA, 120 bp, Artificial Sequence
  ENSG00000003400_31 (sequence is synthesized)
cttgcctgaagggagtggctctgtaaggacgccttgatgctttcttcattaagattttgagcatttttacgtacttgagcttttttttttttttttttcaatttctagaggaactttttc

SEQ ID NO: 1675 - DNA, 120 bp, Artificial Sequence
  ENSG00000003400_32 (sequence is synthesized)
tctgttaattcctggaactgtattttgaatccttaaaggtgagccctcatagggagatccaaagtcctgtggttaacgccttcatttatagatgaggcagctgaggcctggggatgtgaa

SEQ ID NO: 1676 - DNA, 120 bp, Artificial Sequence
  ENSG00000003400_33 (sequence is synthesized)
caacctgctcacagtcctcatttactggatttgacttcagccaggtgaactggaatgccttggggcgtggaagggcattaggagtgtttcatttgatatgtgaatgctcataaaaaaatg

SEQ ID NO: 1677 - DNA, 120 bp, Artificial Sequence
  ENSG00000003400_34 (sequence is synthesized)
tcaaggaatgaagaacaacaactctcagtggtgcctgcatttataattatttatgtgaaagtcaaattcatgtacagtaaatttgttataagaatattcacaagaacactgttctgatat

SEQ ID NO: 1678 - DNA, 120 bp, Artificial Sequence
  ENSG00000003400_35 (sequence is synthesized)
ctctgattgtcatgtggatttgaatgtagcttgacagagggaatgtctaatctatattgacagggcaggaacaccgtcatcttagacaaacaccgccactttaagttccagttccctttc

SEQ ID NO: 1679 - DNA, 120 bp, Artificial Sequence
  ENSG00000003400_36 (sequence is synthesized)
ctcatgcatttcaaggaaatcacttcttttctaacagcgagcagccagaaagagaagagagtaaaatacagataagacagctctggcatagagggaggtgggggggtgggggaagtctct

SEQ ID NO: 1680 - DNA, 120 bp, Artificial Sequence
  ENSG00000003400_37 (sequence is synthesized)
ctctggcatagagggaggtgggggggtgggggaagtctcttgggtaactgccaaactttgccttcatacaatgggttccaggaaaacaatgagccttaataagcacattcctttcccttc

SEQ ID NO: 1681 - DNA, 120 bp, Artificial Sequence
  ENSG00000003400_38 (sequence is synthesized)
ggggggtggggtgtacctacagctgcagaaatattgtatgggaacggacacacaactctccctcccagataagcacagcaaagagacatagaagcaatccaagcctctgataaactctcc

SEQ ID NO: 1682 - DNA, 120 bp, Artificial Sequence
  ENSG00000003400_39 (sequence is synthesized)
caccctaaatccttaaaaactcttagtctgtaagtgagtgggctctgacctaactcggccagaagcccctttcaaatttgttttctctaaaataaacctgtccttggctgtcaagccacc

SEQ ID NO: 1683 - DNA, 120 bp, Artificial Sequence
  ENSG00000003400_40 (sequence is synthesized)
tttcatgtttctttcctctttctttaattcttacacatgtgtcaggatgatctcccaaaaccgtgttcataacagtcagggccaaaagctagtggtcacagtccttgtccagttggcaga

SEQ ID NO: 1684 - DNA, 120 bp, Artificial Sequence
  ENSG00000003400_41 (sequence is synthesized)
actgacatgtgaaggcaagtgaaggatggtgagatactgaggaaagagcaaaggatctggagatcaaagccctgcatttccattttgtcctgattcctttgctcagagacactaactaaa

SEQ ID NO: 1685 - DNA, 120 bp, Artificial Sequence
  ENSG00000003400_42 (sequence is synthesized)
tcaagctagcttttttcagccttgtctgtaaagtagagaaaacattagctgttgggaagacgaaaaagaatgtgtcctatgtgtgcatctatttaaatctaactgtgctgaggtgcatat

SEQ ID NO: 1686 - DNA, 120 bp, Artificial Sequence
  ENSG00000003400_43 (sequence is synthesized)
aaatgcctttaggtggtagggtcttccggttgtaactgcaacagaaatagcaggacttaagttcctttgtgcgtaattccagctgactttattagcggcaactcagcactagcattaccc

SEQ ID NO: 1687 - DNA, 120 bp, Artificial Sequence
  ENSG00000003400_44 (sequence is synthesized)
ctgacatactctgagtaagatctaattcttccctcactggttcgtgatgtctaccgcagcagaaggccagctcttgactctgagttcagttggacaaaatgctgttgataaaacctcctg

SEQ ID NO: 1688 - DNA, 66 bp, Artificial Sequence
  ENSG00000003400_45 (sequence is synthesized)
tgagttcagttggacaaaatgctgttgataaaaccatatatatccagatggcctgaagtaactgaa

SEQ ID NO: 1689 - DNA, 71 bp, Artificial Sequence
  ENSG00000003400_46 (sequence is synthesized)
tggctcatcctggctcaaaagctcccccagtgagcaccttgtgacccccatacccaaatcctataaaacgg

SEQ ID NO: 1690 - DNA, 120 bp, Artificial Sequence
  ENSG00000003400_47 (sequence is synthesized)
cagatgacctgtagctcctggagcttggcaaaggctgggcaaacgcccacctgaagactatgcaggcaatcaggacatgacacagagccgggagaggcctgctcttcggctctgccctga

SEQ ID NO: 1691 - DNA, 120 bp, Artificial Sequence
  ENSG00000003400_48 (sequence is synthesized)
acctcattcggcaggtggaggtatttaggcatttgagggaatctcagctttgggaggccactttgtaagtgatcttaagagattaagtacatccttaattaaaagaaatggtaacacctc

SEQ ID NO: 1692 - DNA, 120 bp, Artificial Sequence
  ENSG00000003400_49 (sequence is synthesized)
ggtggagatgggaggatctcccatctagtgttcattctggccattgggctttgaaaggaagctgcagttaagatcttttggttatctacctccttggatgataaaccaggagattctaaa

SEQ ID NO: 1693 - DNA, 120 bp, Artificial Sequence
  ENSG00000003400_50 (sequence is synthesized)
cctccttctcagcctctgatgctaatgagataagagttgggaggtcagcaaagcttcaagaccaagccctgggcccagaggtggcttccctttgttttgcttctcactagcagtgaagcc

SEQ ID NO: 1694 - DNA, 120 bp, Artificial Sequence
  ENSG00000003400_51 (sequence is synthesized)
tgattgctaacttggaccagaccatggaaattcttaaaccaattggccatgcatgatgttttgattatttgttttgttttgttttgttttgaggcagagtctcactcactctgtcaccca

SEQ ID NO: 1695 - DNA, 120 bp, Artificial Sequence
  ENSG00000003400_52 (sequence is synthesized)
tatattcagtctctgtgtaatcatctgaagaaattggtcccaaggatgctgaaatttctggaaaagacaatggaaatcaggggcaggaagagaacagtgtggggtgctaaacagatctca

SEQ ID NO: 1696 - DNA, 120 bp, Artificial Sequence
  ENSG00000003400_53 (sequence is synthesized)
gcaacctccctgcccacggccatctctgcgcagacacctcgaccccccatgcgcaggtggagcagcgtttcctagttctttccagaggcttccttctgcctgccttccagccacatcgcc

SEQ ID NO: 1697 - DNA, 120 bp, Artificial Sequence
  ENSG00000003400_54 (sequence is synthesized)
ctttacagcaccaccttgcgattctgcagccacaaagttgagacttctgaacgtggcactcttctgttcccttactgtttcacgtgtacctgtgtcatctttcttgtttcatcgtaaaca

SEQ ID NO: 1698 - DNA, 120 bp, Artificial Sequence
  ENSG00000003400_55 (sequence is synthesized)
tacttctaaaattcccattttctttatttagaaatagaactacaagcggatggttaaacaatttaaacaaatggtccatggggaaaagtgaatttcacactgtcccccaaactttcagtg

SEQ ID NO: 1699 - DNA, 120 bp, Artificial Sequence
  ENSG00000003400_56 (sequence is synthesized)
aattttttttccaaatttaatcaaaaggacggtttctttaggggctctctccctagggtccagccttcgatgattttaagggctccgagctgtttgtttcagacttgtttctccctctct

SEQ ID NO: 1700 - DNA, 120 bp, Artificial Sequence
  ENSG00000003400_57 (sequence is synthesized)
ctgtaattatctctgttcttcccacctttttctgtatcaatcagaagtgactgatccctttgactgtggaggaaatgctgttacactttgagtcatgcataccctttgggttatttctgg

SEQ ID NO: 1701 - DNA, 120 bp, Artificial Sequence
  ENSG00000003402_0 (sequence is synthesized)
acacaagccatagcaggaaacagcgagcttgcagcctcaccgacgagtctcaactaaaagggactcccggagctaggggtggggactcggcctcacacagtgagtgccggctattggact

SEQ ID NO: 1702 - DNA, 120 bp, Artificial Sequence
  ENSG00000003402_1 (sequence is synthesized)
tttgtccagtgacagctgagacaacaaggaccacgggaggaggtgtaggagagaagcgccgcgaacagcgatcgcccagcaccaagtccgcttccaggctttcggtttctttgcctccat

SEQ ID NO: 1703 - DNA, 120 bp, Artificial Sequence
  ENSG00000003402_2 (sequence is synthesized)
cttgggtgcgccttcccggcgtctaggggagcgaaggctgaggtggcagcggcaggagagtccggccgcgacaggacgaactcccccactggaaaggattctgaaagaaatgaagtcagc

SEQ ID NO: 1704 - DNA, 120 bp, Artificial Sequence
  ENSG00000003402_3 (sequence is synthesized)
cctcagaaatgaagttgactgcctgctggctttctgttgactggcccggagctgtactgcaagacccttgtgagcttccctagtctaagagtaggatgtctgctgaagtcatccatcagg

SEQ ID NO: 1705 - DNA, 120 bp, Artificial Sequence
  ENSG00000003402_4 (sequence is synthesized)
ttgaagaagcacttgatacagatgagaaggagatgctgctctttttgtgccgggatgttgctatagatgtggttccacctaatgtcagggaccttctggatattttacgggaaagaggta

SEQ ID NO: 1706 - DNA, 120 bp, Artificial Sequence
  ENSG00000003402_5 (sequence is synthesized)
agctgtctgtcggggacttggctgaactgctctacagagtgaggcgatttgacctgctcaaacgtatcttgaagatggacagaaaagctgtggagacccacctgctcaggaaccctcacc

SEQ ID NO: 1707 - DNA, 120 bp, Artificial Sequence
  ENSG00000003402_6 (sequence is synthesized)
ttgtttcggactatagagtgctgatggcagagattggtgaggatttggataaatctgatgtgtcctcattaattttcctcatgaaggattacatgggccgaggcaagataagcaaggaga

SEQ ID NO: 1708 - DNA, 120 bp, Artificial Sequence
  ENSG00000003402_7 (sequence is synthesized)
agagtttcttggaccttgtggttgagttggagaaactaaatctggttgccccagatcaactggatttattagaaaaatgcctaaagaacatccacagaatagacctgaagacaaaaatcc

SEQ ID NO: 1709 - DNA, 120 bp, Artificial Sequence
  ENSG00000003402_8 (sequence is synthesized)
agaagtacaagcagtctgttcaaggagcagggacaagttacaggaatgttctccaagcagcaatccaaaagagtctcaaggatccttcaaataacttcaggctccataatgggagaagta

SEQ ID NO: 1710 - DNA, 120 bp, Artificial Sequence
  ENSG00000003402_9 (sequence is synthesized)
aagaacaaagacttaaggaacagcttggcgctcaacaagaaccagtgaagaaatccattcaggaatcagaagcttttttgcctcagagcatacctgaagagagatacaagatgaagagca

SEQ ID NO: 1711 - DNA, 120 bp, Artificial Sequence
  ENSG00000003402_10 (sequence is synthesized)
agcccctaggaatctgcctgataatcgattgcattggcaatgagacagagcttcttcgagacaccttcacttccctgggctatgaagtccagaaattcttgcatctcagtatgcatggta

SEQ ID NO: 1712 - DNA, 120 bp, Artificial Sequence
  ENSG00000003402_11 (sequence is synthesized)
tatcccagattcttggccaatttgcctgtatgcccgagcaccgagactacgacagctttgtgtgtgtcctggtgagccgaggaggctcccagagtgtgtatggtgtggatcagactcact

SEQ ID NO: 1713 - DNA, 120 bp, Artificial Sequence
  ENSG00000003402_12 (sequence is synthesized)
cagggctccccctgcatcacatcaggaggatgttcatgggagattcatgcccttatctagcagggaagccaaagatgttttttattcagaactatgtggtgtcagagggccagctggagg

SEQ ID NO: 1714 - DNA, 120 bp, Artificial Sequence
  ENSG00000003402_13 (sequence is synthesized)
acagcagcctcttggaggtggatgggccagcgatgaagaatgtggaattcaaggctcagaagcgagggctgtgcacagttcaccgagaagctgacttcttctggagcctgtgtactgcgg

SEQ ID NO: 1715 - DNA, 120 bp, Artificial Sequence
  ENSG00000003402_14 (sequence is synthesized)
acatgtccctgctggagcagtctcacagctcaccatccctgtacctgcagtgcctctcccagaaactgagacaagaaagaaaacgcccactcctggatcttcacattgaactcaatggct

SEQ ID NO: 1716 - DNA, 120 bp, Artificial Sequence
  ENSG00000003402_15 (sequence is synthesized)
acatgtatgattggaacagcagagtttctgccaaggagaaatattatgtctggctgcagcacactctgagaaagaaacttatcctctcctacacataagaaaccaaaaggctgggcgtag

SEQ ID NO: 1717 - DNA, 120 bp, Artificial Sequence
  ENSG00000003402_16 (sequence is synthesized)
ttacttgggaggctgaggtgggaggatcttttgaacccaggagttcagggtcatagcatgctgtgattgtgcctacgaatagccactgcataccaacctgggcaatatagcaagatccca

SEQ ID NO: 1718 - DNA, 120 bp, Artificial Sequence
  ENSG00000003402_17 (sequence is synthesized)
actgcataccaacctgggcaatatagcaagatcccatctctttaaaaaaaaaaaaaaaggacaggaactatcttactcaatgtattagtcatgtttctctagagggacagaactaatagg

SEQ ID NO: 1719 - DNA, 79 bp, Artificial Sequence
  ENSG00000003402_18 (sequence is synthesized)
aagggttaggtcccacaataggtcatctgcaagcaaggaagccaattcaagtcccaaagctgaagaacttggagtccaa

SEQ ID NO: 1720 - DNA, 120 bp, Artificial Sequence
  ENSG00000003402_19 (sequence is synthesized)
gagtccaatgtttgagggcaggaagcattcagcatgagagaaagatggaggccagaagactacaccagtctagtctttccatgttttgcctgcttttattctggcagtgctggcagctga

SEQ ID NO: 1721 - DNA, 120 bp, Artificial Sequence
  ENSG00000003402_20 (sequence is synthesized)
tttcccagtccactgactcaaatgttaaatctcctttggcagcaccctcacagatgtacccgggaacactttgcatccttctattcaatcaagttgatactcagtattaaccatcacagt

SEQ ID NO: 1722 - DNA, 120 bp, Artificial Sequence
  ENSG00000003402_21 (sequence is synthesized)
ctattcaatcaagttgatactcagtattaaccatcacagtccatttgggcaactataccaaattaccatagaccaggtgacttaaacagcagttatttctcacagttccggaggctggga

SEQ ID NO: 1723 - DNA, 120 bp, Artificial Sequence
  ENSG00000003402_22 (sequence is synthesized)
aatccaacatctaagtggtagcatatctggtgtctggtaaggcatgcttccagatcttaccagatgtcagtcttttgatgttctcacatggcagaaaaagaggatgcaaactctcaagta

SEQ ID NO: 1724 - DNA, 120 bp, Artificial Sequence
  ENSG00000003402_23 (sequence is synthesized)
tatctttaagggcacaaattccattcatgagggctctaccctcatcacctaattacctcccaaaggccccaccttctgatactgtcactttggggatactgtctcccctttgaattctgg

SEQ ID NO: 1725 - DNA, 120 bp, Artificial Sequence
  ENSG00000003402_24 (sequence is synthesized)
ggggaatacaaacattcagtttgtaacaatagccttatgatttagaggttacttgttcattcacctagacctcaaattgcattttacagctagtcaagtatatctttctctgatttgata

SEQ ID NO: 1726 - DNA, 83 bp, Artificial Sequence
  ENSG00000003402_25 (sequence is synthesized)
attttacagctagtcaagtatatctttctctgatttgatagtgtgacctaaaaggggaccattgtttgaaatatcattagagt

SEQ ID NO: 1727 - DNA, 80 bp, Artificial Sequence
  ENSG00000003402_26 (sequence is synthesized)
cagatggggcggccaggcggacgcgccccccacctccctcccggacgggatagctggccgggcgggggctgaccccccac

SEQ ID NO: 1728 - DNA, 72 bp, Artificial Sequence
  ENSG00000003402_27 (sequence is synthesized)
tcacttctcagacggggcagctagctcctcacatcccagacgggggggcggggcagaggcgctccccacatc

SEQ ID NO: 1729 - DNA, 120 bp, Artificial Sequence
  ENSG00000003402_28 (sequence is synthesized)
cggccgggcagagacgctcctcacttcatcccagacggggtggcggccgggcagaagctgtaatctcggcaccctggggggccaaggcaggcggctgggaggcggaggccgtagccagct

SEQ ID NO: 1730 - DNA, 68 bp, Artificial Sequence
  ENSG00000003402_29 (sequence is synthesized)
cctggggggccaaggcaggcggctgggaggcggaggccgtagccgacgagactctgcccgcaatcccg

SEQ ID NO: 1731 - DNA, 67 bp, Artificial Sequence
  ENSG00000003402_30 (sequence is synthesized)
ccaacacagccgcaatggcaggcacgcggcaggccgaggcgggagaatcaggcagggaggctgcagt

SEQ ID NO: 1732 - DNA, 71 bp, Artificial Sequence
  ENSG00000003402_31 (sequence is synthesized)
agagagggagggggagagggctatttttaaaattttttaaaattgctgaacaggggtacctctgggcagtg

SEQ ID NO: 1733 - DNA, 120 bp, Artificial Sequence
  ENSG00000003402_32 (sequence is synthesized)
attttttaaaattgctgaacaggggtacctctgggcagtgtgtcagaataccactttttaaatattttatgatttatttatttttctatttcttgaggttttaactgatgtgtatctgta

SEQ ID NO: 1734 - DNA, 120 bp, Artificial Sequence
  ENSG00000003402_33 (sequence is synthesized)
tgtctatttgtgtatattttgtcatgatcatgtaacagagtctgaaaagtgtcgaagagacagttttcaggaacaacaagcaattattcctactttccaagttattttgatgccatggtg

SEQ ID NO: 1735 - DNA, 82 bp, Artificial Sequence
  ENSG00000003402_34 (sequence is synthesized)
caattattcctactttccaagttattttgatgccatggtggctcatacctataatctgagtactttgggaggctgaggtgga

SEQ ID NO: 1736 - DNA, 120 bp, Artificial Sequence
  ENSG00000003402_35 (sequence is synthesized)
agtcccagctacttgggaggctgaagtgagtggatcccctgagcccagagaggtcaaggttgtgatgagctgtgatcacaccactgcacttcagcatgggagacagagtgagaccctgtt

SEQ ID NO: 1737 - DNA, 120 bp, Artificial Sequence
  ENSG00000003402_36 (sequence is synthesized)
agcatgggagacagagtgagaccctgtttcagaaaaaataaataaataaaaccaccagcaccacaaacaacaacaaaaagttattttgtacttgttttgagcacaggactcctgagggta

SEQ ID NO: 1738 - DNA, 120 bp, Artificial Sequence
  ENSG00000003402_37 (sequence is synthesized)
tctttgcatttaatattacataggggtgccagtgggaagtaatgtgtatgcttggcctcatgagctaaaaccctgtgttaattatgacagaaggaaagtgtgtgagagagatcttaacta

SEQ ID NO: 1739 - DNA, 120 bp, Artificial Sequence
  ENSG00000003402_38 (sequence is synthesized)
cctagcagctctagctgccatcttgaaccatgaagatacgggccacacgtaggggtagctgggtagtgagcagcaagaagccttgttggatgagggcacgaaggagcagaatcactggaa

SEQ ID NO: 1740 - DNA, 120 bp, Artificial Sequence
  ENSG00000003402_39 (sequence is synthesized)
tcactgtgtcagccctaattacctacctctggacttttatgtgaggggaaaaaaaattgacagtttatatttatctcaacctagttaacccaagtgatgcattgttatgagattaaaatg

SEQ ID NO: 1741 - DNA, 120 bp, Artificial Sequence
  ENSG00000003402_40 (sequence is synthesized)
tacaaaaaattagccaggcgttgtggcggtcgcctgtagtccctgctatttgggaggccgaggcaagagaacggcatgaacctgggaggtggagcttgcagcgagctgagatcttgccac

SEQ ID NO: 1742 - DNA, 78 bp, Artificial Sequence
  ENSG00000003402_41 (sequence is synthesized)
acagaaaaggccttcaataaaattcaacgttaatatctcaaaataataaccatttatgacaaacccacagccattatc

SEQ ID NO: 1743 - DNA, 120 bp, Artificial Sequence
  ENSG00000003402_42 (sequence is synthesized)
tttaacatagtattggaagttctggccaagaaaatcaggcaagagaaacaaataaggggtattcaaataggaaaagaggaagtaaaactgtgtttgcagatgacatgatactatatctag

SEQ ID NO: 1744 - DNA, 120 bp, Artificial Sequence
  ENSG00000003402_43 (sequence is synthesized)
taaggggtattcaaataggaaaagaggaagtaaaactgtgtttgcagatgacatgatactatatctagaaaaccccattatctccacccaaaagttccttaagctgataagcaacttcag

SEQ ID NO: 1745 - DNA, 74 bp, Artificial Sequence
  ENSG00000003402_44 (sequence is synthesized)
ttaaactacaatggaaccaaaaaagagcccgtataaccaagacaacaataagcaaaaagaacaaagctggaagc

SEQ ID NO: 1746 - DNA, 89 bp, Artificial Sequence
  ENSG00000003402_45 (sequence is synthesized)
gtataaccaagacaacaaactacccaacttcaaagtatactgcaaggctacagtagccaaaatggcatggtactggtacaaaaacagac

SEQ ID NO: 1747 - DNA, 82 bp, Artificial Sequence
  ENSG00000003402_46 (sequence is synthesized)
tcaagattaaagactttctatttaataccattcaagacataggcacaagcaaaggtttcatgacaaaaacatcaaaagcaat

SEQ ID NO: 1748 - DNA, 120 bp, Artificial Sequence
  ENSG00000003402_47 (sequence is synthesized)
atgtggccaacaaacatataaaaaaaagctcaaccttactgatcattagagaaatgcaaaggagaaccacaatgagataccatctcatgccggtcagaatggtgattattaaaaagtcaa

SEQ ID NO: 1749 - DNA, 77 bp, Artificial Sequence
  ENSG00000003402_48 (sequence is synthesized)
gttgtggaagtgtgtgtggctattcctcaaagatctagaactagaaatactatttgtcccagcaatcccattactgg

SEQ ID NO: 1750 - DNA, 120 bp, Artificial Sequence
  ENSG00000003402_49 (sequence is synthesized)
ctgggtatatacccaaaggaatataaaccattttattataaagatacatgcacatttttgttcattgcagcactcttcacaatagcaaagacacaatagcaaatgcccatcaaagataga

SEQ ID NO: 1751 - DNA, 120 bp, Artificial Sequence
  ENSG00000003402_50 (sequence is synthesized)
acatatacaccatggaatactgtgcagtgcagccattacagcttttggtgatacagtgaatcagatttttcattaattcttttaattggttattactgaacgtgaaaaagtaatgtttgt

SEQ ID NO: 1752 - DNA, 120 bp, Artificial Sequence
  ENSG00000003402_51 (sequence is synthesized)
gttattactgaacgtgaaaaagtaatgtttgtattgaaatcttgagtctggccatgtttctattttaaattcataaagaattctaacaagaggaattccaagaatgtcataaatggatgt

SEQ ID NO: 1753 - DNA, 120 bp, Artificial Sequence
  ENSG00000003402_52 (sequence is synthesized)
ttctccatggatgaaggaactgttttattcacttgctgataattcagcctaatccagtttgacatcatatagataagtagttgaattatggatttaaaatacatatcattttctaactcc

SEQ ID NO: 1754 - DNA, 120 bp, Artificial Sequence
  ENSG00000003402_53 (sequence is synthesized)
aaaggtaatacttatttaaatggttttgaaaatatagaaaggcacaatttctttttaaatctgttattctccaccaccactcaatctgtctatcatctatctctccattcattcttccat

SEQ ID NO: 1755 - DNA, 120 bp, Artificial Sequence
  ENSG00000003402_54 (sequence is synthesized)
ttgtttatatctgttaatctttgtatgtgttcatgtatagcttttacatgattggaatcataatgcatattccattttgaagtctgcttttttttacacaaaaatatgttgtgaatattt

SEQ ID NO: 1756 - DNA, 120 bp, Artificial Sequence
  ENSG00000003402_55 (sequence is synthesized)
tcctatattatgaaatatcattagctgagcttttagaattgactgcatgttttggtaccatttagatatagtttaagatacttagaagttatgtggctttgccactatggatgaatctta

SEQ ID NO: 1757 - DNA, 88 bp, Artificial Sequence
  ENSG00000003402_56 (sequence is synthesized)
cttagaagttatgtggctttgccactatggatgaatcttatttactcaatattaattacttacaaataacctcacctaaacacattca

SEQ ID NO: 1758 - DNA, 120 bp, Artificial Sequence
  ENSG00000003402_57 (sequence is synthesized)
attgtatgttctcactcataagtgggagataagctatgaggatgcaaaggcataagaaggatacaatggactttggggacttaggggaaagggtgggaggggggtgaaggataaaagaat

SEQ ID NO: 1759 - DNA, 120 bp, Artificial Sequence
  ENSG00000003402_58 (sequence is synthesized)
gtatactgctcaggtgatgggtgcaccagaatctcacaagtaaccacttaattacttacgcatgtaaccagataccacctgttccccaaacacctatggaaataattttgtttttttttt

SEQ ID NO: 1760 - DNA, 72 bp, Artificial Sequence
  ENSG00000003402_59 (sequence is synthesized)
taattacttacgcatgtaaccagataccacctgttccccaaacacctatggaaataattttgtttttttttt

SEQ ID NO: 1761 - DNA, 120 bp, Artificial Sequence
  ENSG00000003402_60 (sequence is synthesized)
ccaaacaccacatgttctcacttgtaagcggaagctgaacaatgagaacacacggacacagggatgagatcaacacacactggggcctgatgcaggggccgtagcggggagagcatcagg

SEQ ID NO: 1762 - DNA, 90 bp, Artificial Sequence
  ENSG00000003402_61 (sequence is synthesized)
acacgtttacctatgtaacaaacccgcacatcctgcacttgtatccagaacttaaaatattttaaaaatctttagagaatacaaaaaaaa

SEQ ID NO: 1763 - DNA, 120 bp, Artificial Sequence
  ENSG00000003402_62 (sequence is synthesized)
cttaaaatattttaaaaatctttagagaatacaaaaaaaaaaaaaaagattcttcaatgcatacacaataaaattgcagttcagtcaaacattggaagtctttctctgactgtctagttg

SEQ ID NO: 1764 - DNA, 120 bp, Artificial Sequence
  ENSG00000003402_63 (sequence is synthesized)
gtatcttcattttcagcttcttcaagatcccactccaaacactgttagctcagccaaattgaacagctcatatctcctacctctggatctttggttctggtgattgtatatttctggacc

SEQ ID NO: 1765 - DNA, 120 bp, Artificial Sequence
  ENSG00000003402_64 (sequence is synthesized)
atctggaaccccagcatatcaccctaccccacatctccacatccccaaaatataaccatacttcaagggcagttcaaataccatctccttctatcctccatgaagtcagttatctcttcc

SEQ ID NO: 1766 - DNA, 120 bp, Artificial Sequence
  ENSG00000003402_65 (sequence is synthesized)
attggaattatcgccccctctcctgaacagtactatttcgtgtgaatctcctccaagccttcttttcattttatatctcatgctgtaattcttggaaagtatgctgtagctcaagtgcag

SEQ ID NO: 1767 - DNA, 120 bp, Artificial Sequence
  ENSG00000003402_66 (sequence is synthesized)
aattctcatcagttttatctttatatctctcctaaacactttacctgatgaagagcctggcatacacataaatatatattgaatgaatcagtgatggattgaaaagagaaatgatggatc

SEQ ID NO: 1768 - DNA, 120 bp, Artificial Sequence
  ENSG00000003402_67 (sequence is synthesized)
tcctaaattttaacttttataaaatattttgatacattcatgaccttactttagcaagcaatgaacgtgatgtaaactattgttgatatagtttttatattggaagtgtaagtagtttgt

SEQ ID NO: 1769 - DNA, 120 bp, Artificial Sequence
  ENSG00000003402_68 (sequence is synthesized)
ggcatgggattgtgacatatcctaggtttcctcatcttctttttattgaaatgtaattcacaagccataaaatttgcccctttaaagtaaatgatgcagtggattttagtatatttacag

SEQ ID NO: 1770 - DNA, 120 bp, Artificial Sequence
  ENSG00000003402_69 (sequence is synthesized)
agttgtgcaatcatcaccactatctaattccagaacatttccatctacctagaaactccataccagtgagctgccactctaatcctcctcttcccccagcctctagaaacaataatccat

SEQ ID NO: 1771 - DNA, 120 bp, Artificial Sequence
  ENSG00000003402_70 (sequence is synthesized)
tttctgtctctatgatttgcctgttctagatattttataaaaataaacatgtggcctttcgtgtctgacttccttcacttagcatgtttcaaggttcatctatgctatagagtgtaccag

SEQ ID NO: 1772 - DNA, 120 bp, Artificial Sequence
  ENSG00000003402_71 (sequence is synthesized)
tgcttcattacattttatggctgaataataccctattgtgtggatataccgcatttagtttattcatcagttgatcgaaatttagactgtttccacttttttgctattatggatgatgct

SEQ ID NO: 1773 - DNA, 120 bp, Artificial Sequence
  ENSG00000003402_72 (sequence is synthesized)
gctatgaatattcgtatatgaatttttatatggatatatgttttcagttcttctgggcatataccttagaagtgagagtgctcatcatatagtaactctatgtttagccttttgaggaac

SEQ ID NO: 1774 - DNA, 120 bp, Artificial Sequence
  ENSG00000003402_73 (sequence is synthesized)
tctatgtttagccttttgaggaactgccaaactgcttttcaaagtagtagcatcattttatattcccaccagcagtgtatgaggttttttttatttttttgtttttgagacggagtctca

SEQ ID NO: 1775 - DNA, 79 bp, Artificial Sequence
  ENSG00000003402_74 (sequence is synthesized)
gtagctgggtttacaggagctcgccaccatgcccaactaatttttgtattgttttttgagacggagtctcgctctgtgg

SEQ ID NO: 1776 - DNA, 120 bp, Artificial Sequence
  ENSG00000003402_75 (sequence is synthesized)
ctggcctcaggtgatctgactgccttggcttcccaaagtgctggcattacagacattagctactgtgcctggcctcaagtcctttctcattttaaaactgcgttattttattttattttt

SEQ ID NO: 1777 - DNA, 120 bp, Artificial Sequence
  ENSG00000003402_76 (sequence is synthesized)
ttacaggcgtgagccaccacacccggtgggttgtctttttattgttgagttgtaagcattctttttaatattctggatactagtttcttatcaggtacaatctttgtgaatatattctcc

SEQ ID NO: 1778 - DNA, 120 bp, Artificial Sequence
  ENSG00000003402_77 (sequence is synthesized)
tgtgaatatattctcccattccatggattgtcttctcactttctggatactatacagtacaagttttaaattttgatgaagttcacttgatttctgttttttatgttattgcttatgctt

SEQ ID NO: 1779 - DNA, 120 bp, Artificial Sequence
  ENSG00000003402_78 (sequence is synthesized)
ttggtgtcatacctaaaaaaccattgtctaaatcaattgcctatgaggtgttacccctatgttttcttctaaagttttatgattttagctctttgacccattttgagttatttttgtgta

SEQ ID NO: 1780 - DNA, 120 bp, Artificial Sequence
  ENSG00000003402_79 (sequence is synthesized)
tgcagtgcgagataagcatccagcctcattcttttgcacataaatgttcacttgtcttagcattacttattgaaaatactattttttccctatagaattattttatacttatcacaaatc

SEQ ID NO: 1781 - DNA, 120 bp, Artificial Sequence
  ENSG00000003402_80 (sequence is synthesized)
aactaactataagggtttatttctggactcaattctgttgctctatcttatggtagtaccacactgtcttgattattgtaacttcgtagtaagttttggaatccagaaatgtagtcctct

SEQ ID NO: 1782 - DNA, 89 bp, Artificial Sequence
  ENSG00000003402_81 (sequence is synthesized)
acttcgtagtaagttttggaatccagaaatgtagtcctctaactttgttgttgttgttgttcttcttttttcttttgtagagatgaggc

SEQ ID NO: 1783 - DNA, 120 bp, Artificial Sequence
  ENSG00000003402_82 (sequence is synthesized)
gctgaggggtgagccactgcaactggcctgttctttttcaaaattgttagggctgtattgggtttacctttccctaaattttcatataactgttaggattcacttgcaaatttatgtaaa

SEQ ID NO: 1784 - DNA, 120 bp, Artificial Sequence
  ENSG00000003402_83 (sequence is synthesized)
aagggcctctggaattttgatagtgattacactgaatgagaggagtttggcaggactggtttcccaagaccacaagaccctgtaagaccctgctgataagacaggatgtggtagaaaggc

SEQ ID NO: 1785 - DNA, 120 bp, Artificial Sequence
  ENSG00000003402_84 (sequence is synthesized)
caacccaaaccagccaaaaccatgatggtgacagaagagacctctggttacctttgctgcccattctatggtaattataatacattagcacgctaaaagaaacttctacagcaccatgat

SEQ ID NO: 1786 - DNA, 120 bp, Artificial Sequence
  ENSG00000003402_85 (sequence is synthesized)
agtttacaactgccatagcaactttcagaagttaccctgtatggtctaaaaggtccagacctccccacttctttcctggaaaactcatgaataagccacctcttgtttagcgtatagtca

SEQ ID NO: 1787 - DNA, 120 bp, Artificial Sequence
  ENSG00000003402_86 (sequence is synthesized)
tcatgaataagccacctcttgtttagcgtatagtcaagaagcaaccataaatatagccagtcagcagcccatcagggctactcttcctatggggtagccattcttttattcctttacttt

SEQ ID NO: 1788 - DNA, 120 bp, Artificial Sequence
  ENSG00000003402_87 (sequence is synthesized)
gctcttgaattctttcctgaacccacttgacctcttgggctgagccttaaccttggggtacttttgcctataacaaacatacaaagataagtttggctgggcgcagtggctcatgcctgt

SEQ ID NO: 1789 - DNA, 70 bp, Artificial Sequence
  ENSG00000003402_88 (sequence is synthesized)
atggtggatcgcttgagccaaggaatttgaggccaccttgggcaacacggcaaaaccctgtctctactaa

SEQ ID NO: 1790 - DNA, 120 bp, Artificial Sequence
  ENSG00000003402_89 (sequence is synthesized)
agtgagaccctgtctcaaaataaaaataaatttgaggtgtattgccatcttaacggaagttgttactggtggacggtatccaagttactggtggtaaatctgcagcaacctcaattcttt

SEQ ID NO: 1791 - DNA, 72 bp, Artificial Sequence
  ENSG00000003402_90 (sequence is synthesized)
cttggaccgaggcaagtttcagagcaacagtgaaagtttattacgctttaggctgggcacagtggctcatgc

SEQ ID NO: 1792 - DNA, 86 bp, Artificial Sequence
  ENSG00000003402_91 (sequence is synthesized)
tcatgatgatgaaacctcgtctctactaaaaatagaaaaatcagctgggcatggtggtccatgcctctaatcccagctactcggga

SEQ ID NO: 1793 - DNA, 77 bp, Artificial Sequence
  ENSG00000003402_92 (sequence is synthesized)
gaggcaggcaagtttattaagctttagaacagtaaggaaaggaaagaaaagaaggaaagtataacttggaagagggc

SEQ ID NO: 1794 - DNA, 120 bp, Artificial Sequence
  ENSG00000003402_93 (sequence is synthesized)
aaaggaaagaaaagaaggaaagtataacttggaagagggccaagcaggtgacctgagaaaccaggtgcagggcttgccctcttgacttggggttttatatgctggcatacttccgggatc

SEQ ID NO: 1795 - DNA, 120 bp, Artificial Sequence
  ENSG00000003402_94 (sequence is synthesized)
ttgtgttacttttccccactcctgagatctttttgagaagctgatgatcagtctcaggtgttttctattgcggggggggggggcgggcgggggagctgcctgtccctggcaccacctgtg

SEQ ID NO: 1796 - DNA, 120 bp, Artificial Sequence
  ENSG00000003402_95 (sequence is synthesized)
accaattattactttacagaaacatttaacaaccgcctgaccatcacctgatggttgcccaacactcttggtgtgtgtcgggggagccctctcctgccttgctcagacctgaatgtaccc

SEQ ID NO: 1797 - DNA, 120 bp, Artificial Sequence
  ENSG00000003402_96 (sequence is synthesized)
attgtaacaaaccccttctttgtatactttgatatggtgacatttcttgtcacttgcctcattgtgaatttttatagatgtggctaagtcatatgcttccttctgaaaaattatgtcaaa

SEQ ID NO: 1798 - DNA, 120 bp, Artificial Sequence
  ENSG00000003402_97 (sequence is synthesized)
tactagcagtttctcactgttttttgccctagaaacaacaaactaaccttgaagtgaaaggcctttctgcgtttatcttaccttttttgagcagcattaaaactgttttactcagaccaa

SEQ ID NO: 1799 - DNA, 120 bp, Artificial Sequence
  ENSG00000003402_98 (sequence is synthesized)
cactcagtcctggtggggtcgcacgtaacggtcctgagctatgcataagccgtttgaccacgcatggagaattttaccacccagagacacgcgagtggccctgtgcaagtttcaactgcg

SEQ ID NO: 1800 - DNA, 120 bp, Artificial Sequence
  ENSG00000003402_99 (sequence is synthesized)
cggggggcggggaattccgcagacaggattctagaatttatgtcttgtgtggtaacatttcagccggtgggtggcggggattaggcgtgaagcggttcagcaggcagaggttctcggacg

SEQ ID NO: 1801 - DNA, 120 bp, Artificial Sequence
  ENSG00000003402_100 (sequence is synthesized)
ccctccggcgaagccacctgttgatgcttttgactttctgtccttgttcctcgtcccatctggagcatttccaattctggttttgcggagcagcaggtctgagcttgtccggcgagggtg

SEQ ID NO: 1802 - DNA, 120 bp, Artificial Sequence
  ENSG00000003402_101 (sequence is synthesized)
cctgcagtgcctctcccagaaactgagacaagaaagggggacaattcccggaagtggaattacagagtcaaaggacatgcatttttcaagcctcggatgcatcttactagatgtcctata

SEQ ID NO: 1803 - DNA, 120 bp, Artificial Sequence
  ENSG00000003402_102 (sequence is synthesized)
ggatggtcatatcagctttataggagagtagctgtgtccctgaattctccctgacactgcatgctcttatatttcctcaagttttgacaatttgataggtgaaaagtggtatctgactgt

SEQ ID NO: 1804 - DNA, 120 bp, Artificial Sequence
  ENSG00000003402_103 (sequence is synthesized)
tcagatctggaaggctttgttatataaacatttttttaatgtttattggcaagaatacttttctaagagaaacatcagtgagctggtttccatttaagctgaatgaagccacaatgtacc

SEQ ID NO: 1805 - DNA, 120 bp, Artificial Sequence
  ENSG00000003402_104 (sequence is synthesized)
tcaagtataagattaactggcctttttcagttgcactctaattacaatttagaatgatgtttctgagccacctgtcaaatgcattctgggctgtacctctgcgtaccccaggaataaatc

SEQ ID NO: 1806 - DNA, 120 bp, Artificial Sequence
  ENSG00000003402_105 (sequence is synthesized)
tcatggccttctttacctggcctccttagtggtggcccagcaggaagcgggggttagagcaggagccactcagccttccaagatagatactccatgggccggtggtattactggcctttt

SEQ ID NO: 1807 - DNA, 81 bp, Artificial Sequence
  ENSG00000003402_106 (sequence is synthesized)
catacctgaagagagatacaagatgaagagcaagcccctaggaatctgcctgataatcgattgcattggcaatgagatctc

SEQ ID NO: 1808 - DNA, 120 bp, Artificial Sequence
  ENSG00000003402_107 (sequence is synthesized)
cctcagcctcccaaagtgctacgattacaggcgtcagccatcatgcctggcttattctctccattttcaaggtgaggaagctgagcagtgaactacactcctaccttctctagtactgat

SEQ ID NO: 1809 - DNA, 120 bp, Artificial Sequence
  ENSG00000003402_108 (sequence is synthesized)
tgagctgggattcaaaagctggactccaaaacctatgcttttaactactttgcctcaatataatttccatgaaggtgagggagtttatctatctcctactatgggtctccagtacctgga

SEQ ID NO: 1810 - DNA, 120 bp, Artificial Sequence
  ENSG00000003402_109 (sequence is synthesized)
cacccagaaggaaagagcccatactttcaatcttaggcataagttagcttgataagattttcagaaaaattcccttttaaccacagaactcccccactggaaaggattctgaaagaaatg

SEQ ID NO: 1811 - DNA, 120 bp, Artificial Sequence
  ENSG00000003402_110 (sequence is synthesized)
ataaatattcatttgttggataggtggatggaatggaacctggatgaccaaagcctcctttagcttgtggctagaaatcgcgtccctttatattcttcatatcccagatctgccaactcc

SEQ ID NO: 1812 - DNA, 120 bp, Artificial Sequence
  ENSG00000003402_111 (sequence is synthesized)
attgccctgtatattcatgatctctgcaaaatgctgccaagcagttcttaacatttcagtcttcaagaaagaatctgggatctgcacaggctggcagagctatggacattcaggggtttt

SEQ ID NO: 1813 - DNA, 120 bp, Artificial Sequence
  ENSG00000003402_112 (sequence is synthesized)
cacagcggtacaagctgcaccccgatggacctgagagaccggaagtaacccttggccaactctggccgccccctgcagccgcagccccagaggcccacccgcgagcttcagtggcgggcc

SEQ ID NO: 1814 - DNA, 120 bp, Artificial Sequence
  ENSG00000003402_113 (sequence is synthesized)
cttcatgatgtttggtcgaagagtcatctgaaattttgaattcagtaaggtggctagaaagtttagggtattttgaaagatggtgattgaccttggactgaaccactattgaagatttat

SEQ ID NO: 1815 - DNA, 120 bp, Artificial Sequence
  ENSG00000003402_114 (sequence is synthesized)
actccggggcatgttgctctttcaaataccaggaatggactctggggaatggggcacccttgaagtctgattatttcttccctgtagagccccaggggctaattaaactcgtgtttatgg

SEQ ID NO: 1816 - DNA, 120 bp, Artificial Sequence
  ENSG00000003402_115 (sequence is synthesized)
caatgatgaccagtctgttcaagacccaagagggctgagattggcagccctggccattgtttaccacagcctaatgaagatgagtaaaagcctatctatccccaaggacctccacatatg

SEQ ID NO: 1817 - DNA, 120 bp, Artificial Sequence
  ENSG00000003402_116 (sequence is synthesized)
acagtactcaactgagtctcacataggatagaataagataaaatgctggaagagaacacaaatagtgctacaaagcaggaagagagacttgatttggggatcaagacaagcttatagaag

SEQ ID NO: 1818 - DNA, 120 bp, Artificial Sequence
  ENSG00000003402_117 (sequence is synthesized)
agtcaggctgtctgtcgttgggcttttcccacttccttctactacgtacttcttccctattcctcctactgaggccattaaacccttagttgtaattttccctgaacatgctttacattc

SEQ ID NO: 1819 - DNA, 120 bp, Artificial Sequence
  ENSG00000003402_118 (sequence is synthesized)
gggtgatctaggcttgctgttttatgagggagggacatatttacacaggggcaagaactagtcttttaatccattgttgcataggggaggcgtgggcacttggagttgtcttaggactga

SEQ ID NO: 1820 - DNA, 88 bp, Artificial Sequence
  ENSG00000003402_119 (sequence is synthesized)
gggtgcggtggctcatgcctggaattccagcactttgtttaaaaattagctggtgtgggctcgggcacggtggcttacacctgtaatc

SEQ ID NO: 1821 - DNA, 120 bp, Artificial Sequence
  ENSG00000003402_120 (sequence is synthesized)
gctgaaccctactgccttgctctggtatttggcctcacaaccactgtccaacttcgggtgatgtcacttgggtctcataccttccttgcatgtgtcccaagtttcacaaaacctccttat

SEQ ID NO: 1822 - DNA, 120 bp, Artificial Sequence
  ENSG00000003402_121 (sequence is synthesized)
ggaaaagagcacattcgatttcttccttgataaaagggaccagattcacattggccttctgctttacttgcattcctcattgtcttttagactcagcctcagcttgggctttgttagcaa

SEQ ID NO: 1823 - DNA, 120 bp, Artificial Sequence
  ENSG00000003402_122 (sequence is synthesized)
gttcactgccaccatagcatcacagcctaaagggcatggctgagactcattgatctatagagcactcttttaccccaacatactctaaatgactgatcaaagatcaaaaacagaagagca

SEQ ID NO: 1824 - DNA, 120 bp, Artificial Sequence
  ENSG00000003402_123 (sequence is synthesized)
tttatactccattcttgttttttgagacctgcttgatttattccgattatttaacacacagggacgcaacagtgatcccaaagtgtgtaaagttaaagccttcaactgcagctgaggaga

SEQ ID NO: 1825 - DNA, 120 bp, Artificial Sequence
  ENSG00000003402_124 (sequence is synthesized)
gggcaggaatggggacggtggtgagtcaggaatgacaggcaggcagccatgaccagggcagcctcctccccagggccagggactggggagtggcctaaggagcaggacctaagggtagcc

SEQ ID NO: 1826 - DNA, 120 bp, Artificial Sequence
  ENSG00000003402_125 (sequence is synthesized)
cagagctggggaagggggcagagacctccccttggcctaggtctggagctcagaagtgccacatgcctgagggggcagcggcctgggaagggccagaggcagggtcaggagagcaccatt

SEQ ID NO: 1827 - DNA, 120 bp, Artificial Sequence
  ENSG00000003402_126 (sequence is synthesized)
tcctggggggctggggacagggaggtgccctataggagaagccaggaggggccgtctgcccctgaggtgggggctgggctggagcaggctgcagcaagaaagacctgaggcaggcacagg

SEQ ID NO: 1828 - DNA, 120 bp, Artificial Sequence
  ENSG00000003402_127 (sequence is synthesized)
gcctgagagcccagctgcctgggttcaggggggctcccagggcagcctggcccagggagcagtcctgactctgcaggggatgcccagcaaggggggctgcagacccctcagagcctcccc

SEQ ID NO: 1829 - DNA, 120 bp, Artificial Sequence
  ENSG00000003402_128 (sequence is synthesized)
tcctctctccctggaaaggagctggggaacccatagtgcaaatctgtggaccactcagttatggagggaggctgtgcctgaaggtggacactggggtgcactccctccaccatctcgccc

SEQ ID NO: 1830 - DNA, 120 bp, Artificial Sequence
  ENSG00000003402_129 (sequence is synthesized)
tgcaccgctgtcctcagtacagccacttctcgtaagagtgcaggccatggatgccaccgtcgatctgggctgacatggtctgcttctcaaacttgagctcccctgagtacatcatggacc

SEQ ID NO: 1831 - DNA, 120 bp, Artificial Sequence
  ENSG00000003402_130 (sequence is synthesized)
tggatggagcccaagacatcctgcgtgatcttcgccttatccccgtcgttgaagtattgtttctggctgctgctgctcttctccatggcatccagtgagcccatgccctggtacttcttg

SEQ ID NO: 1832 - DNA, 120 bp, Artificial Sequence
  ENSG00000003402_131 (sequence is synthesized)
agctgcattccgtctgagaagaagcactcgccgggggcctccatggtggcggccagcagggagcccatcatcactgtggaggctcctagggccagggccttgaccacatgccccatggtc

SEQ ID NO: 1833 - DNA, 120 bp, Artificial Sequence
  ENSG00000003402_132 (sequence is synthesized)
tggatgccaccatcggctatgatgggcacaccaaagttctgggtatgcttggccaccttgtacacagcagtgccctggggctgactgcaggctatcacttcctggttgatgtagatggag

SEQ ID NO: 1834 - DNA, 120 bp, Artificial Sequence
  ENSG00000003402_133 (sequence is synthesized)
ccgcgcagtccatgcccctgcccagcccatccacaccagcgtcaatcaggttgttggcctgggctgctgtcaccacgttccccccaatcacctggaggtggggttacttttgtttgatgt

SEQ ID NO: 1835 - DNA, 120 bp, Artificial Sequence
  ENSG00000003402_134 (sequence is synthesized)
aatgcaccatggcgatctgatacaccgagttcccttgggacgagtccaagcctatgacattgacgcctacctgggtgagcaggtccaggtggtatttgtcatcctcatgggtacccacag

SEQ ID NO: 1836 - DNA, 120 bp, Artificial Sequence
  ENSG00000003402_135 (sequence is synthesized)
ctgccccgcccagcagctgctcatgggaatccttggaggccacagggtagtctcggttcttcagcgcggtgcaggtgataatggccaccagctcatcgcgatcattgacgataggcagct

SEQ ID NO: 1837 - DNA, 120 bp, Artificial Sequence
  ENSG00000003402_136 (sequence is synthesized)
tcctttcttactaagctgcaggatctcatttgcctctttcaacctcacactgctggagccaccactagcttgatccttggcatcatcacctcactgaggagggtggtgtggtccttctca

SEQ ID NO: 1838 - DNA, 120 bp, Artificial Sequence
  ENSG00000003402_137 (sequence is synthesized)
gcaagaaagtcgatgtctcgggaggtgacgatgcccaccagcttgctgcccatggtacccgtctcagtgatggggatgccagagaagccatgacgcatcttggcctccaacacatcaccc

SEQ ID NO: 1839 - DNA, 120 bp, Artificial Sequence
  ENSG00000003402_138 (sequence is synthesized)
acagtgtgcaaggggctcagcaccacggggtgtgtgataaagcccggttcaaacttcttgaccttctgcacctcactggcctggaactctggggtgcagttgtggtgaatgaaaccagta

SEQ ID NO: 1840 - DNA, 120 bp, Artificial Sequence
  ENSG00000003402_139 (sequence is synthesized)
cctcccatcagagccatcacgatggccaggtcggcctctgtcacagtgtccatgggggaggagatcagcggcgtcttcagagtgaccattgggtcagggctgaggtcaggtccacctcat

SEQ ID NO: 1841 - DNA, 120 bp, Artificial Sequence
  ENSG00000003402_140 (sequence is synthesized)
cacctcatcagctatgaagtctatgaatcctgggagaatcaagaagtcgttgtaggtgagtccctggtcactggcgaagagctgctgcacggtgtggggaaaagaaagagagatcagatt

SEQ ID NO: 1842 - DNA, 63 bp, Artificial Sequence
  ENSG00000003402_141 (sequence is synthesized)
ttctgtactaagaaaaattcttctgcctcatgtcaactcagggttaagtggattaagggctgt

SEQ ID NO: 1843 - DNA, 120 bp, Artificial Sequence
  ENSG00000003402_142 (sequence is synthesized)
gaggattagtaaaagaggaaggaacgcctgtttgcagttgagagaagaggaaggcatctgtctcctgccagtccctgggcaatggaatgtctcggtgtaaaacctgattgtatgttccat

SEQ ID NO: 1844 - DNA, 82 bp, Artificial Sequence
  ENSG00000003402_143 (sequence is synthesized)
agagaagaggaaggcatctgtctcctgccagtccctgggcaatggaatgtctcggtgtaaaacctgattgtatgttccatct

SEQ ID NO: 1845 - DNA, 90 bp, Artificial Sequence
  ENSG00000003402_144 (sequence is synthesized)
gacatgcgggcagcactactgctctttaaggaagcacagcacttaattctttaccttgttcttgatgcagagacctttgttcacgtgttt

SEQ ID NO: 1846 - DNA, 120 bp, Artificial Sequence
  ENSG00000003402_145 (sequence is synthesized)
cacacccccctctccgagaaacacctaaaaatgatcaataaatactaagggaactaagaggccggcgggatcctccgtatgctgaacgccggtcccctgggcccccttttttctttctct

SEQ ID NO: 1847 - DNA, 120 bp, Artificial Sequence
  ENSG00000003402_146 (sequence is synthesized)
ccttcaaataacttcagggtgagtctggagaaaacatatggaatcccagcatgaaaccgtttcagagttctaataaaaatatgcatattctcacagcatgtactttatttaatatctgaa

SEQ ID NO: 1848 - DNA, 120 bp, Artificial Sequence
  ENSG00000003402_147 (sequence is synthesized)
aaaattgtgatagaaatgtgtatttgttttaaaaacgtgtaacttcttatatttcaaagctaatacatgttcattgagatatttggagactatagagaaagataaaagaaaataaatcac

SEQ ID NO: 1849 - DNA, 120 bp, Artificial Sequence
  ENSG00000003402_148 (sequence is synthesized)
cctttcgaaagttgttgggaacgtggactttcccaacaattgtgtatgcgctcgatctcactcagtgggagccgccgccctggagggaatttcacaatagcctgaactcccccactggaa

SEQ ID NO: 1850 - DNA, 120 bp, Artificial Sequence
  ENSG00000003402_149 (sequence is synthesized)
tcaaataacttcaggatgataacaccctatgcccattgtcctgatctgaaaattcttggaaattgttccatgtgattaacatggaactgcctctacttaatcattctgaatgattaaatc

SEQ ID NO: 1851 - DNA, 120 bp, Artificial Sequence
  ENSG00000003402_150 (sequence is synthesized)
gtttcattttctaaatgtgttataatgtgtttagccctttcttgttgctgtatgtttagatgctttccaatcttttgttactactaataatgctataaaataaatatccttgtacttctt

SEQ ID NO: 1852 - DNA, 120 bp, Artificial Sequence
  ENSG00000003402_151 (sequence is synthesized)
tttcatttcctttacaatgtaggttttcttctctgtctttttggattagtctgtttttggttctgtctaccaaggatccctttctttagacttctatagatccctttctatagaacttaa

SEQ ID NO: 1853 - DNA, 120 bp, Artificial Sequence
  ENSG00000003436_0 (sequence is synthesized)
agacagcagcgactttaggctggataatagtcaaattcttacctcgctctttcactgctagtaagatcagattgcgtttctttcagttactcttcaatcgccagtttcttgatctgcttc

SEQ ID NO: 1854 - DNA, 120 bp, Artificial Sequence
  ENSG00000003436_1 (sequence is synthesized)
taaaagaagaagtagagaagataaatcctgtcttcaatacctggaaggaaaaacaaaataacctcaactccgttttgaaaaaaacattccaagaactttcatcagagattttacttagat

SEQ ID NO: 1855 - DNA, 120 bp, Artificial Sequence
  ENSG00000003436_2 (sequence is synthesized)
gatttacacaatgaagaaagtacatgcactttgggcttctgtatgcctgctgcttaatcttgcccctgcccctcttaatgctgattctgaggaagatgaagaacacacaattatcacaga

SEQ ID NO: 1856 - DNA, 120 bp, Artificial Sequence
  ENSG00000003436_3 (sequence is synthesized)
tacggagttgccaccactgaaacttatgcattcattttgtgcattcaaggcggatgatggcccatgtaaagcaatcatgaaaagatttttcttcaatattttcactcgacagtgcgaaga

SEQ ID NO: 1857 - DNA, 120 bp, Artificial Sequence
  ENSG00000003436_4 (sequence is synthesized)
atttatatatgggggatgtgaaggaaatcagaatcgatttgaaagtctggaagagtgcaaaaaaatgtgtacaagagataatgcaaacaggattataaagacaacattgcaacaagaaaa

SEQ ID NO: 1858 - DNA, 120 bp, Artificial Sequence
  ENSG00000003436_5 (sequence is synthesized)
gccagatttctgctttttggaagaagatcctggaatatgtcgaggttatattaccaggtatttttataacaatcagacaaaacagtgtgaacgtttcaagtatggtggatgcctgggcaa

SEQ ID NO: 1859 - DNA, 120 bp, Artificial Sequence
  ENSG00000003436_6 (sequence is synthesized)
tatgaacaattttgagacactggaagaatgcaagaacatttgtgaagatggtccgaatggtttccaggtggataattatggaacccagctcaatgctgtgaataactccctgactccgca

SEQ ID NO: 1860 - DNA, 120 bp, Artificial Sequence
  ENSG00000003436_7 (sequence is synthesized)
atcaaccaaggttcccagcctttttgaatttcacggtccctcatggtgtctcactccagcagacagaggattgtgtcgtgccaatgagaacagattctactacaattcagtcattgggaa

SEQ ID NO: 1861 - DNA, 120 bp, Artificial Sequence
  ENSG00000003436_8 (sequence is synthesized)
atgccgcccatttaagtacagtggatgtgggggaaatgaaaacaattttacttccaaacaagaatgtctgagggcatgtaaaaaaggtttcatccaaagaatatcaaaaggaggcctaat

SEQ ID NO: 1862 - DNA, 120 bp, Artificial Sequence
  ENSG00000003436_9 (sequence is synthesized)
taaaaccaaaagaaaaagaaagaagcagagagtgaaaatagcatatgaagaaatttttgttaaaaatatgtgaatttgttatagcaatgtaacattaattctactaaatattttatatga

SEQ ID NO: 1863 - DNA, 120 bp, Artificial Sequence
  ENSG00000003436_10 (sequence is synthesized)
aatgtttcactatgattttctatttttcttctaaaatgcttttaattaatatgttcattaaattttctatgcttattgtacttgttatcaacacgtttgtatcagagttgcttttctaat

SEQ ID NO: 1864 - DNA, 120 bp, Artificial Sequence
  ENSG00000003436_11 (sequence is synthesized)
cttgttaaattgcttattctaggtctgtaatttattaactggctactgggaaattacttattttctggatctatctgtattttcatttaactacaaattatcatactaccggctacatca

SEQ ID NO: 1865 - DNA, 120 bp, Artificial Sequence
  ENSG00000003436_12 (sequence is synthesized)
aatcagtcctttgattccatttggtgaccatctgtttgagaatatgatcatgtaaatgattatctcctttatagcctgtaaccagattaaggaatacagctcttaaaaaatcaagaactt

SEQ ID NO: 1866 - DNA, 120 bp, Artificial Sequence
  ENSG00000003436_13 (sequence is synthesized)
cctgagtttcacatataaaatggtgacaaacacctgcttctgataaagtttatccaattttgtatttatagtattctattgtaataatagaattctattatgtgcttccctccttagaca

SEQ ID NO: 1867 - DNA, 120 bp, Artificial Sequence
  ENSG00000003436_14 (sequence is synthesized)
tagtttttctccttttgtactaaccagtacttccatctatattgagctaaactgtctttgaacagtcaactctgcatcatgtgcctgcctgatttggattggtttcacttttttttttgt

SEQ ID NO: 1868 - DNA, 120 bp, Artificial Sequence
  ENSG00000003436_15 (sequence is synthesized)
ttgaccatagcccattctatcagtcaagatgactgaataattgtgtgttaaatacaactcatgataaggagaacctttatggaaacaagaagttttatggcaatcgagagggaattattt

SEQ ID NO: 1869 - DNA, 120 bp, Artificial Sequence
  ENSG00000003436_16 (sequence is synthesized)
atgcttcccaatattttttcttactaaaaataacaaaaatatttaaaccttctgaaatctattcagttatcattaggatttgcacacaatgcaactaataattcatgctttaaaaagtag

SEQ ID NO: 1870 - DNA, 120 bp, Artificial Sequence
  ENSG00000003436_17 (sequence is synthesized)
gttatttctgttgaagagaaaattatcagcagggaagagtctactagaaaattcatgtgctagtcattcttggggatttaatattttgctggagttaattcactatatccagacctgtat

SEQ ID NO: 1871 - DNA, 120 bp, Artificial Sequence
  ENSG00000003436_18 (sequence is synthesized)
ctttcatttattgctgagccatgtgcagtctggcatctcaacaacctcaacaacctcaacaacctccaagacatgtcagtttctgtagtgttcacctcaaatctgacactggaattggaa

SEQ ID NO: 1872 - DNA, 120 bp, Artificial Sequence
  ENSG00000003436_19 (sequence is synthesized)
ctgatttagaaacaaccatttcattcatttggtatgactagcttcatgactagcttcatgaatagcttcatgaatagcttcatgacttctcgctaacaatgatagtataattctgcctgt

SEQ ID NO: 1873 - DNA, 120 bp, Artificial Sequence
  ENSG00000003436_20 (sequence is synthesized)
tcttcaggattgaaattttgaactcaatttagatttcctgttttccctcatataccacatctaaacagtctccaaatctttatgcttttttttttttttttcgaaaaagttcacccaatc

SEQ ID NO: 1874 - DNA, 120 bp, Artificial Sequence
  ENSG00000003436_21 (sequence is synthesized)
gcagtggtgcaatcacaggacactgaaacctcccacctagctgggactagaggtgcaggccaccacaccagctaatttatgtaatttttgtagagacgagtttcaccacgttacctaggc

SEQ ID NO: 1875 - DNA, 120 bp, Artificial Sequence
  ENSG00000003436_22 (sequence is synthesized)
gcctcccaaagtgctgggattacaggtataaaccacaatgcccccgtttttactctttactgcatccttcccatcagtattaattcctcagaaatttagtacattcctccaccatttcaa

SEQ ID NO: 1876 - DNA, 120 bp, Artificial Sequence
  ENSG00000003436_23 (sequence is synthesized)
taattcctcagaaatttagtacattcctccaccatttcaaaatgctcccagaactcacactagttggtacttaactacaaccttcaacctcaccatttaattttgatgtatgtttttgga

SEQ ID NO: 1877 - DNA, 120 bp, Artificial Sequence
  ENSG00000003436_24 (sequence is synthesized)
tttaccaacagtactttctttcatgactactttgatttagttaagaatgctcactgtacactgaatgttaattactcagctaattcacactgatttcctgtttaaaaatatgatcccctc

SEQ ID NO: 1878 - DNA, 120 bp, Artificial Sequence
  ENSG00000003436_25 (sequence is synthesized)
caggccattcatgtgaagtcagggtacagctgatgccagctacagaatcactatgtttcaatatggaatatgaaaagtcctaacacataattgcaaatcattttctactatggtatacaa

SEQ ID NO: 1879 - DNA, 120 bp, Artificial Sequence
  ENSG00000003436_26 (sequence is synthesized)
attttatcattacaaaatagtatcagcttttttcacttaaggaaaataatacatcttcattcaaatattcagtgcataaataattgccttaaattgagtctttgctgtggaatttgagag

SEQ ID NO: 1880 - DNA, 120 bp, Artificial Sequence
  ENSG00000003436_27 (sequence is synthesized)
ttttggaaatcaaaggcccttgtgaaacatttcctgttgccatttatttatagatagcaatagcttcaaatgagtgggaaagtctacttaggtgaagtggtaaatagtcactaagattgt

SEQ ID NO: 1881 - DNA, 120 bp, Artificial Sequence
  ENSG00000003436_28 (sequence is synthesized)
ataaatagcgcattgatgagttgcctaattgttttctccaacaataaccactggtccattggttcactacttactcaagaaagacatatactgagatggcttgaaatgtttaatgcatgt

SEQ ID NO: 1882 - DNA, 120 bp, Artificial Sequence
  ENSG00000003436_29 (sequence is synthesized)
gaacgttatttttaccgtgttttggaaaaagatcttgatgttattgtcttcctttattttccacaattaagtgcatctaactgtgaattgtatatggaattacattattcagcatataca

SEQ ID NO: 1883 - DNA, 120 bp, Artificial Sequence
  ENSG00000003436_30 (sequence is synthesized)
tatatttacctgctttgttcattctctgtattcaaaattaacagatcatgctgaaaaccactcaaacgattatattttttacattataagaagtaaaatatattattctgaataatgaaa

SEQ ID NO: 1884 - DNA, 120 bp, Artificial Sequence
  ENSG00000003436_31 (sequence is synthesized)
ccaaggttcccagcctttttgttacaaaagaaggaacaaatgatggttggaagaatgcggctcatatttaccaagtctttctgaacgccttctgcattcatgcatccatgttctttctag

SEQ ID NO: 1885 - DNA, 120 bp, Artificial Sequence
  ENSG00000003436_32 (sequence is synthesized)
gattggatagcatttcatgcctatgttaatatttgtgcttttggcatttccttaatatttatatgtatacgtgatgcctttgatagcatactgctaataaagttttaatatttacatgca

SEQ ID NO: 1886 - DNA, 120 bp, Artificial Sequence
  ENSG00000003436_33 (sequence is synthesized)
agtatgtctttaaatatatatatatacctgcgttgttgcttaataatgtgtttgttgaaatactgagattcaaattgtttaagacatttaatctcataaaagcaacaattttcctaatct

SEQ ID NO: 1887 - DNA, 120 bp, Artificial Sequence
  ENSG00000003436_34 (sequence is synthesized)
tgaaaccttcgccccctgggctcaagctagccagtcttttagtaaacatttagtcaacaaatctgcaattataacggagtacgggtggctggcaagatggccgaataggaagagctccag

SEQ ID NO: 1888 - DNA, 68 bp, Artificial Sequence
  ENSG00000003436_35 (sequence is synthesized)
cacacctggggaaaggggaggctgtgggctcagcttcagcagacttaaatgtacctgcctgccagctc

SEQ ID NO: 1889 - DNA, 120 bp, Artificial Sequence
  ENSG00000003436_36 (sequence is synthesized)
ctcagcttcagcagacttaaatgtacctgcctgccagctctgaagagagcagaggatctctcagcacaccactcgagctctggtaagagacagactgcctcctcaagtggatccctgaca

SEQ ID NO: 1890 - DNA, 120 bp, Artificial Sequence
  ENSG00000003436_37 (sequence is synthesized)
cctgtgtctcctgactgggagacaactcccagcaggggcggatggacacctcatacaggacaattccagctggcatctgccaggtgccctctgggacaaagcttccagaggaagtaacag

SEQ ID NO: 1891 - DNA, 120 bp, Artificial Sequence
  ENSG00000003436_38 (sequence is synthesized)
ccaggcaaacagggtctggagtggacctcaggcaaactccagcagacctgcactgcagcagaggagcctgactttcagaaggaaaactaacgaacagaaaggaatagcatcaacatcaac

SEQ ID NO: 1892 - DNA, 120 bp, Artificial Sequence
  ENSG00000003436_39 (sequence is synthesized)
agcagacctgcactgcagcagaggagcctgactttcagaaggaaaactaacgaacagaaaggaatagcatcaacatcaacgaaaaggacatccagacagaaaccccatctgaaggtcacc

SEQ ID NO: 1893 - DNA, 120 bp, Artificial Sequence
  ENSG00000003436_40 (sequence is synthesized)
cagatgaggaaaaaccagcgcaaaaaggctgaaaattcccaaaaccagaacacttctcctccaacagatcacactccttgccagcaagggaacagaactggacggagaatgagtttgatg

SEQ ID NO: 1894 - DNA, 84 bp, Artificial Sequence
  ENSG00000003436_41 (sequence is synthesized)
gaagtaggcttcagaaggtggataataaactcctccaagctaagtcttaaaaaaaagattatagaaattgctaactagaataac

SEQ ID NO: 1895 - DNA, 65 bp, Artificial Sequence
  ENSG00000003436_42 (sequence is synthesized)
tagcagaaaaaaggatatcagaggtagaagattgacttaatgaaatgaagtgtcaagacaagatt

SEQ ID NO: 1896 - DNA, 88 bp, Artificial Sequence
  ENSG00000003436_43 (sequence is synthesized)
atagctgaatcaatctagcagaaaaaaggatatcagaggtagaagattgacttaatgaaatgaagtgtcgagaatgaacaaagcctct

SEQ ID NO: 1897 - DNA, 62 bp, Artificial Sequence
  ENSG00000003436_44 (sequence is synthesized)
aacatgagactataggagctggaaaacactcttcgggatattatccaggagaacttccccaa

SEQ ID NO: 1898 - DNA, 77 bp, Artificial Sequence
  ENSG00000003436_45 (sequence is synthesized)
ccaacctagcaagcgatgctcctcaagaagagcaacccaaagacacataatcgtcagattcaccaaagttgaaataa

SEQ ID NO: 1899 - DNA, 60 bp, Artificial Sequence
  ENSG00000003436_46 (sequence is synthesized)
aagagctcctctaggagcactaaacatggaaaagaacaatctgtatcagccactgcaaaa

SEQ ID NO: 1900 - DNA, 89 bp, Artificial Sequence
  ENSG00000003436_47 (sequence is synthesized)
ataaccaacaacactctgaagaaactgcatcaactaaaagtcaagataaccagctagcattataatgacaggatcaaattcacacatag

SEQ ID NO: 1901 - DNA, 68 bp, Artificial Sequence
  ENSG00000003436_48 (sequence is synthesized)
cagagtcaagacccattggtatgctctattcaggagacccatgtcaagtgcaaagacacacataggct

SEQ ID NO: 1902 - DNA, 74 bp, Artificial Sequence
  ENSG00000003436_49 (sequence is synthesized)
ggctcaaaataaaaggatggaggaatattgaccaagcaaatggaaaccaaaacaaagcaggggttgcattccca

SEQ ID NO: 1903 - DNA, 86 bp, Artificial Sequence
  ENSG00000003436_50 (sequence is synthesized)
caaagaaaggcgttatataatggtaaagggatcaatgaaacaagaatagttaactgtcctaatatatatgcacccaatacaggagc

SEQ ID NO: 1904 - DNA, 72 bp, Artificial Sequence
  ENSG00000003436_51 (sequence is synthesized)
agattcataaatcaagttcttagagacctacaaagagatttagactctgacacaataatagtaggagactta

SEQ ID NO: 1905 - DNA, 66 bp, Artificial Sequence
  ENSG00000003436_52 (sequence is synthesized)
gagacagaaaattaacaaggatatttagcacttgaactcagctctggaccgagtggatctaacagg

SEQ ID NO: 1906 - DNA, 69 bp, Artificial Sequence
  ENSG00000003436_53 (sequence is synthesized)
cttctcagcaccacatcacacttattttaaaattagccacataattggattgtctgaccacagtgcaat

SEQ ID NO: 1907 - DNA, 120 bp, Artificial Sequence
  ENSG00000003436_54 (sequence is synthesized)
actcaaaactgcacaactacatggaaactaaacaaccttctcctaaatgactactgggtaaatataaaaattaaggcagaaataaataagttatttcaaaccaatgagagcaaagacaca

SEQ ID NO: 1908 - DNA, 120 bp, Artificial Sequence
  ENSG00000003436_55 (sequence is synthesized)
agcaaacaaattcaaaagctagcagaagccaagaaataactaaggttagaaacaagtgcttggtgctgcgaagaaaacgtgtgctcaataaaagattacttagtaaggcaattttacttt

SEQ ID NO: 1909 - DNA, 120 bp, Artificial Sequence
  ENSG00000003436_56 (sequence is synthesized)
aaggcaattttacttttgtagtgtagcaggacgagccacagacaaaactcctcctcagacaccaggttaaagaaggaaggagctttattcagcctggaacttcagcagacttgcatctca

SEQ ID NO: 1910 - DNA, 89 bp, Artificial Sequence
  ENSG00000003436_57 (sequence is synthesized)
agctttattcagcctggaacttcagcagacttgcatctcaaaagccgagctccccgagtgagcaattccagtcccttttaggggcttgt

SEQ ID NO: 1911 - DNA, 120 bp, Artificial Sequence
  ENSG00000003436_58 (sequence is synthesized)
gtgcactgataatcacaacggaacagaacaggaaagggattttcacaatgcttttccatacaacgtctggaatctatagataacgtaaccggttaggtcaggggtggatctttaactacc

SEQ ID NO: 1912 - DNA, 120 bp, Artificial Sequence
  ENSG00000003436_59 (sequence is synthesized)
catttctgccttttagtttttactttttccttctttggaggcagaaatgggcataagacaatatgagaggtggtctcctcccttatccccctctctttgagaacctctctcattagtggg

SEQ ID NO: 1913 - DNA, 120 bp, Artificial Sequence
  ENSG00000003436_60 (sequence is synthesized)
ccttatccccctctctttgagaacctctctcattagtgggagttctcactttcatcctcactacccatgtcttcttgcaagacagatcaatagtgattcatatagtatacttgtgctgaa

SEQ ID NO: 1914 - DNA, 120 bp, Artificial Sequence
  ENSG00000003436_61 (sequence is synthesized)
tttggtgaactaaggtagtgatgaagttttttattacttgaaggagtacaggtagcaaacaagggagtagtaagcaggttcctattactattataatttttattataagagttttaaatc

SEQ ID NO: 1915 - DNA, 120 bp, Artificial Sequence
  ENSG00000003436_62 (sequence is synthesized)
aatccttttagtgctggaaaccatttccaaccatggccccaggattaaatccatgccacacttgcaagggcacatgtgccagttttgtcatatctttaactatgtcttcaactacttgcc

SEQ ID NO: 1916 - DNA, 120 bp, Artificial Sequence
  ENSG00000003436_63 (sequence is synthesized)
tgcccttgatcatttatgtgcaaacagcaattgtttaggttaaattttccacagactacttcttcagctgctagcaagtagtctagggctagtctattttgatagatagcatttctcatc

SEQ ID NO: 1917 - DNA, 120 bp, Artificial Sequence
  ENSG00000003436_64 (sequence is synthesized)
tttttgctgggctaaaacagttaaagctctaccagttttattagttattatttttaagacagcttttaactgtatgattcggttgagcatataaatgggggtttggtatccccactagcc

SEQ ID NO: 1918 - DNA, 120 bp, Artificial Sequence
  ENSG00000003436_65 (sequence is synthesized)
taagtggcaggcccatagtactgcatgatttttttcagggggccactcatcatctttccagctgcctatagctatgcttctcttttctcgggaagcacagactgggaagcctagaagtgt

SEQ ID NO: 1919 - DNA, 120 bp, Artificial Sequence
  ENSG00000003436_66 (sequence is synthesized)
gcctgtttttatgggcactaggaaaaaggatgggttatagcacacatcaggctggtcacttccagggctatataccttgtatagaatagcattaaacaaacaagctccttttagagtcct

SEQ ID NO: 1920 - DNA, 120 bp, Artificial Sequence
  ENSG00000003436_67 (sequence is synthesized)
cacttataataaccataaaataatagaactgtagcaaccttttgtcctaccgcagtgacttgacgtatatactgggaacagtcctcagtctgggaaaggtcagttgaagtccttactgta

SEQ ID NO: 1921 - DNA, 79 bp, Artificial Sequence
  ENSG00000003436_68 (sequence is synthesized)
tccaaattttaaggaaaatgagtcccatgatgagtttcctcatgcttcggcgcttgtcatcttcttcagagtcactttg

SEQ ID NO: 1922 - DNA, 89 bp, Artificial Sequence
  ENSG00000003436_69 (sequence is synthesized)
gtctgaagctgctcccgtccacgtgcagctaccagtctactgatgttcaaggatggtctcagaggttgggcctgctagaataaactgag

SEQ ID NO: 1923 - DNA, 71 bp, Artificial Sequence
  ENSG00000003436_70 (sequence is synthesized)
tccaacacctctacacagttatgtttaactgggctctctgatacgagggattttcacagagcaagctttgg

SEQ ID NO: 1924 - DNA, 120 bp, Artificial Sequence
  ENSG00000003436_71 (sequence is synthesized)
tattctttagccaatgatgtcctttggtatttattaaagtcaccacagtatggggggcctttatctttaggttttgcccaagagttagcttatccacttcttatgctagcagggctgttg

SEQ ID NO: 1925 - DNA, 120 bp, Artificial Sequence
  ENSG00000003436_72 (sequence is synthesized)
ctgccaaagccctcaaacatgggggccaactcttagaaacgccatctagttgtttagagaggtaggccactggccccagccagggccccatggtctgggtcaaaactctaaccgccattt

SEQ ID NO: 1926 - DNA, 120 bp, Artificial Sequence
  ENSG00000003436_73 (sequence is synthesized)
gggtcaaaactctaaccgccatttttttttctctgtctgacacatatagtgtaaaaggttttgtctggtcaggtagccccagggctagggccgacatgagtttttcttttaactcatgaa

SEQ ID NO: 1927 - DNA, 120 bp, Artificial Sequence
  ENSG00000003436_74 (sequence is synthesized)
ctttaaattgatctggtattcccttttggattccaattgcatctaaatagatgtgagagttgaaaggcccataaggggcttctctcactttacaatgtcttatttttcctccctctggtt

SEQ ID NO: 1928 - DNA, 120 bp, Artificial Sequence
  ENSG00000003436_75 (sequence is synthesized)
ttcaggtctccaaggaatgctaagttttctccctgtcatgagagacacgaagtgaacctagtgttggaagacggaagcgggatggccctcgagggctgacccacagggtgctcgacttcc

SEQ ID NO: 1929 - DNA, 120 bp, Artificial Sequence
  ENSG00000003436_76 (sequence is synthesized)
gtgttggaagacggaagcgggatggccctcgagggctgacccacagggtgctcgacttccggatatagcagaaagagcttggcatgacttaatactccaggctgtagaatcctggaaaag

SEQ ID NO: 1930 - DNA, 120 bp, Artificial Sequence
  ENSG00000003436_77 (sequence is synthesized)
taacctgcttaattgccaaagtttgtattaagtctttaacttctatgatcctctagtaaaatgaacatatggttttaggaaattacaaaaaccggttggggaagtccatccttgctctgt

SEQ ID NO: 1931 - DNA, 120 bp, Artificial Sequence
  ENSG00000003436_78 (sequence is synthesized)
agtggtccacggaatgttggaccaactatggcataaaagctctacatcggggggcaagactcctagttggcactggggtctttatggaaatctccctggattaaatggtcccaatttact

SEQ ID NO: 1932 - DNA, 86 bp, Artificial Sequence
  ENSG00000003436_79 (sequence is synthesized)
ttaaatggtcccaggtcagaggtacttttctgaagtagagggctgtctttgacttggtaagtccccacagggtataacaaggcaag

SEQ ID NO: 1933 - DNA, 120 bp, Artificial Sequence
  ENSG00000003436_80 (sequence is synthesized)
atgaacaattttgagacactggaagaatgcaagaacatttgtgaagatggtcgtaagtttatttcttatttcattttagttcatttataggcatccttttaaaactaaggcatctcagat

SEQ ID NO: 1934 - DNA, 120 bp, Artificial Sequence
  ENSG00000003436_81 (sequence is synthesized)
ggcattctatactcaggttttgtttgagccatgcaaatgaagatatatttgtgtgcattcaatgtgagatttgtgactgtagttttttaaaaagcacagaaaattaagaaattattttca

SEQ ID NO: 1935 - DNA, 120 bp, Artificial Sequence
  ENSG00000003436_82 (sequence is synthesized)
tagatctaatactttttatgttgcattatttaattcttcttcctgagaatactgcagtacaattttggcacaatagaattgctgaaatctttcacatttatacaaatatgagagcaaaca

SEQ ID NO: 1936 - DNA, 120 bp, Artificial Sequence
  ENSG00000003436_83 (sequence is synthesized)
gttactgaaaaccaccacctaaagtcactcagttttatctgcctataacatttattaaagggatgacttaaacattaactgctacgcttttttgaccaagaactacagttactcatggaa

SEQ ID NO: 1937 - DNA, 120 bp, Artificial Sequence
  ENSG00000003436_84 (sequence is synthesized)
atattaccttacaattatatttaaagattcactgtttgctaatttaacatagcaatgtgaatgaaattgccagaagtctgcttttttaactgttgtacgcttcatgagtccaaatatgag

SEQ ID NO: 1938 - DNA, 67 bp, Artificial Sequence
  ENSG00000003436_85 (sequence is synthesized)
actcttcaatcgccagtttcttgatctgcttctaaaagaagaagtagagaagataaatcctgtcttc

SEQ ID NO: 1939 - DNA, 120 bp, Artificial Sequence
  ENSG00000003509_0 (sequence is synthesized)
gtctaagccccagctcctggcggagcgagctagcctgcgaatttcagcatgagtgtactgctgaggtcaggtttggggccgttgtgtgccgtggcgcgcgcagccattccttttatttgg

SEQ ID NO: 1940 - DNA, 120 bp, Artificial Sequence
  ENSG00000003509_1 (sequence is synthesized)
agagggaaatacttcagctccgggaatgagcctgcagaaaacccggtgacgccgatgctgcggcatcttatgtacaaaataaagtctactggtcccatcactgtggccgagtacatgaag

SEQ ID NO: 1941 - DNA, 120 bp, Artificial Sequence
  ENSG00000003509_2 (sequence is synthesized)
gaggtgttgactaatccagccaagggttattatgtgtaccgtgacatgctaggcgaaaaaggagatttcattacttcacctgaaataagtcaaatctttggggagctactaggtatatgg

SEQ ID NO: 1942 - DNA, 120 bp, Artificial Sequence
  ENSG00000003509_3 (sequence is synthesized)
ttcattagtgaatggatggccactggaaaaagcacagctttccagctggtggaactgggcccaggtaggggaaccctcgtgggagatattttgagggtgttcactcaacttggatctgtg

SEQ ID NO: 1943 - DNA, 120 bp, Artificial Sequence
  ENSG00000003509_4 (sequence is synthesized)
ctgaaaaattgtgacatttcagtacatctggtagaggtaagccaaaaattaagtgagattcaagcattgacactgactaaagagaaggtcccgttagagcgaaatgctggatccccagtg

SEQ ID NO: 1944 - DNA, 120 bp, Artificial Sequence
  ENSG00000003509_5 (sequence is synthesized)
tatatgaaaggtgtcactaagtctgggattccaatttcctggtaccgagatctgcacgatgttccaaaagggtacagcttttatcttgcacatgaattttttgatgttcttcctgtgcat

SEQ ID NO: 1945 - DNA, 120 bp, Artificial Sequence
  ENSG00000003509_6 (sequence is synthesized)
aaatttcagaaaacaccacagggatggcgagaagtatttgttgacattgatccacaggtttctgataaactgaggtttgttttggcaccttctgccaccccagcagaagccttcatacaa

SEQ ID NO: 1946 - DNA, 120 bp, Artificial Sequence
  ENSG00000003509_7 (sequence is synthesized)
catgacgaaacaagggatcatgttgaagtgtgtcctgatgctggtgttatcatcgaggaactttctcaacgcattgcattaactggaggtgctgcactggttgctgattatggtcatgat

SEQ ID NO: 1947 - DNA, 120 bp, Artificial Sequence
  ENSG00000003509_8 (sequence is synthesized)
ggaacaaagacagataccttcagagggttttgcgaccacaagcttcatgatgtcttaattgccccaggaacagcagatctaacagctgatgtggacttcagttatttgcgaagaatggca

SEQ ID NO: 1948 - DNA, 120 bp, Artificial Sequence
  ENSG00000003509_9 (sequence is synthesized)
ccaataaaacaacacacatttttaaaaaatatgggtattgatgtccggctgaaggttcttttagataaatcaaatgagccatcagtgaggcagcagttacttcaaggatatgatatgtta

SEQ ID NO: 1949 - DNA, 120 bp, Artificial Sequence
  ENSG00000003509_10 (sequence is synthesized)
atgaatccaaagaagatgggagagagatttaacttttttgccttgctacctcatcagagacttcaaggtggaagatatcagaggaatgcacgtcagtcaaaaccctttgcatccgttgta

SEQ ID NO: 1950 - DNA, 120 bp, Artificial Sequence
  ENSG00000003509_11 (sequence is synthesized)
gctgggtttagtgaacttgcttggcagtgatatttcagcttggacattttacccttcagtcggcccaagaaatcaaaataaaggaaacacatttcatatactgcaggtaacaaaagtcaa

SEQ ID NO: 1951 - DNA, 120 bp, Artificial Sequence
  ENSG00000003509_12 (sequence is synthesized)
agtattttatcttttcacagcaagaacagtccatgttgtatataatacaaccaacattatagaacttttagggttgtgactggctttggtgcaaatgtgtgctcaagctaataagttatt

SEQ ID NO: 1952 - DNA, 120 bp, Artificial Sequence
  ENSG00000003509_13 (sequence is synthesized)
gtgtgctcaagctaataagttattgtgaaactgagtttcctttaacttacaaagctagttgccatatttctattttattttaaaaagtaaacatgcggctgggcgtggtggctcatgcct

SEQ ID NO: 1953 - DNA, 120 bp, Artificial Sequence
  ENSG00000003509_14 (sequence is synthesized)
aaaagtaaacatgggcactgattgttttaataaaaatgggaaacagactaaatggctattcacaggaaactgataagatatatgttatttttttaaatgagctagggcaatatgttttga

SEQ ID NO: 1954 - DNA, 120 bp, Artificial Sequence
  ENSG00000003509_15 (sequence is synthesized)
cagaaaactctctaagatttagtaagtgaaaaaaagtaggatgcaagagtttttatagttgattccatttttgttgaaggagaaaaactaaataaatacgagtaatttcatagaaacgaa

SEQ ID NO: 1955 - DNA, 120 bp, Artificial Sequence
  ENSG00000003509_16 (sequence is synthesized)
gttagctcagtgattaaggatcttcttccatatcatctggattaggagccataatgaagtgctttgggtatacaaggttatgtgtgtatgcatgtatttcccagcgagcatcatcacttt

SEQ ID NO: 1956 - DNA, 120 bp, Artificial Sequence
  ENSG00000003509_17 (sequence is synthesized)
catgtgtaatgtaacgttctccaatgcgagtttcaaattctctaaggtcaagccaagtctgatagtcctaggagaaaatgaaattgtaatgatgaaacaaaagaaacaaaatactgtcaa

SEQ ID NO: 1957 - DNA, 120 bp, Artificial Sequence
  ENSG00000003509_18 (sequence is synthesized)
gtcagtcccctcgaagcccggttgccgtggaagccgcgtggggcgccttcctcagctcttcagttgagggtaccgggggatcaagggctcgggggctcacttccaccttgaagccattcc

SEQ ID NO: 1958 - DNA, 120 bp, Artificial Sequence
  ENSG00000003509_19 (sequence is synthesized)
ctcacagtattgatgggactgtaactttttacagcaatataatagattgagttactgctgccaagtcccttatccatagagagtagcctacttttttctagaaaagagcatcttaataga

SEQ ID NO: 1959 - DNA, 120 bp, Artificial Sequence
  ENSG00000003509_20 (sequence is synthesized)
gcctgacattaagtagtagtttatttcatgaagctttgtaaaatcccaaacaaaatgtaaatctcctttgtacttttgagtatttccctatagctagggttgtaccgatgacggagcagc

SEQ ID NO: 1960 - DNA, 120 bp, Artificial Sequence
  ENSG00000003509_21 (sequence is synthesized)
ccaaggcagctggggctgatggaagcagtgttagtaggtgggtttagttcagttatagagtcttttaaaaaatccttacttgcctaaagacaagcaaggtgtgggggaaaatccctgtac

SEQ ID NO: 1961 - DNA, 120 bp, Artificial Sequence
  ENSG00000003509_22 (sequence is synthesized)
tagtcaggaatactgactagtattgactagtttgagtcttgactcaaagccaaagtgggggtacgatcttgggtaagggatctcaagccattcctgcctcagccttctcaggctgagaag

SEQ ID NO: 1962 - DNA, 120 bp, Artificial Sequence
  ENSG00000003509_23 (sequence is synthesized)
cccgattttatgaaatcaaattcccttccagctaacaactctgacttctaatttctttcaagccttgtgatgaataaaagctttaactgctatttcaggtatttccattttctgacccca

SEQ ID NO: 1963 - DNA, 120 bp, Artificial Sequence
  ENSG00000003509_24 (sequence is synthesized)
tttatgtgtaaaataagaatagtaataattgttctatgttctgcagtgtaagttttccatgaagaggtagataattctgtggtagtgatgattatggaggaagtaggcattttttttaca

SEQ ID NO: 1964 - DNA, 120 bp, Artificial Sequence
  ENSG00000003509_25 (sequence is synthesized)
ctcgaagcccggttgccgtggaagccgcgtggggcgccttcctcagctcttcagttgagggtaccgggggatcaagggctcgggggctcacttccaccttgaagctactaggtatatggt

SEQ ID NO: 1965 - DNA, 120 bp, Artificial Sequence
  ENSG00000003509_26 (sequence is synthesized)
ggggatcaagggctcgggggctcacttccaccttgaaggtaccctgggctggaaacgggtccggtacaaacgcaatagggctgcgtagtcgtgggcaagtgggtgctgtctctgcgcccc

SEQ ID NO: 1966 - DNA, 120 bp, Artificial Sequence
  ENSG00000003756_0 (sequence is synthesized)
actgtgggtaggagacggccgtcggcggaggcgccattttgtgtagccgccgaaccttgttggaggttctggggcgcagaaccgctactgctgcttcggtctctccttgggaaaaaataa

SEQ ID NO: 1967 - DNA, 120 bp, Artificial Sequence
  ENSG00000003756_1 (sequence is synthesized)
aatttgaaccttttggagctgtgtgctaaatcttcagtgggacaatgggttcagacaaaagagtgagtagaacagagcgtagtggaagatacggttccatcatagacagggatgaccgtg

SEQ ID NO: 1968 - DNA, 120 bp, Artificial Sequence
  ENSG00000003756_2 (sequence is synthesized)
atgagcgtgaatcccgaagcaggcggagggactcagattacaaaagatctagtgatgatcggaggggtgatagatatgatgactaccgagactatgacagtccagagagagagcgtgaaa

SEQ ID NO: 1969 - DNA, 120 bp, Artificial Sequence
  ENSG00000003756_3 (sequence is synthesized)
gaaggaacagtgaccgatccgaagatggctaccattcagatggtgactatggtgagcacgactataggcatgacatcagtgacgagagggagagcaagaccatcatgctgcgcggccttc

SEQ ID NO: 1970 - DNA, 120 bp, Artificial Sequence
  ENSG00000003756_4 (sequence is synthesized)
ccatcaccatcacagagagcgatattcgagaaatgatggagtccttcgaaggccctcagcctgcggatgtgaggctgatgaagaggaaaacaggtgtaagccgtggtttcgccttcgtgg

SEQ ID NO: 1971 - DNA, 120 bp, Artificial Sequence
  ENSG00000003756_5 (sequence is synthesized)
agttttatcacttgcaagatgctaccagctggatggaagccaatcagaaaaagttggtgattcaaggaaagcacattgcaatgcattatagcaatcccagacctaagtttgaagattggc

SEQ ID NO: 1972 - DNA, 120 bp, Artificial Sequence
  ENSG00000003756_6 (sequence is synthesized)
tttgtaacaagtgctgccttaacaatttcaggaaaagactaaaatgcttccgatgtggagcagacaagtttgactctgaacaggaagtgcctcctggaaccacagagtcggttcagtctg

SEQ ID NO: 1973 - DNA, 120 bp, Artificial Sequence
  ENSG00000003756_7 (sequence is synthesized)
tggattactactgtgatacgatcattcttcggaacatagctccgcacactgtggtggattccatcatgacagcactgtctccttacgcgtctttagctgtcaataacatccgcctcataa

SEQ ID NO: 1974 - DNA, 120 bp, Artificial Sequence
  ENSG00000003756_8 (sequence is synthesized)
aagacaaacagacccagcagaacagaggcttcgcatttgtgcagctgtcctctgcaatggatgcttctcagctgcttcagatattacagagtctccatcctcctttgaaaattgatggca

SEQ ID NO: 1975 - DNA, 120 bp, Artificial Sequence
  ENSG00000003756_9 (sequence is synthesized)
aaactattggggttgattttgcaaaaagtgccagaaaagacttggtcctctcagatggtaaccgcgtcagcgctttctctgtagctagtacggctattgctgctgctcagtggtcatcca

SEQ ID NO: 1976 - DNA, 120 bp, Artificial Sequence
  ENSG00000003756_10 (sequence is synthesized)
cccagtctcaaagtggtgaaggaggcagtgttgactacagttatctgcaaccaggtcaagatggctatgcccaatatgctcagtattcacaggattatcagcagttttatcaacaacaag

SEQ ID NO: 1977 - DNA, 120 bp, Artificial Sequence
  ENSG00000003756_11 (sequence is synthesized)
ctggaggattggaatctgatgcatcatctgcatcaggcacagcagtgaccaccacctcagcggctgtagtgtcccagagtcctcagctgtataatcaaacctccaatccacctggctctc

SEQ ID NO: 1978 - DNA, 120 bp, Artificial Sequence
  ENSG00000003756_12 (sequence is synthesized)
cgactgaggaagcacagcctagcactagcacaagtacacaggccccagccgcttcccctactggtgtagttcctggtaccaaatatgcagtacctgacacgtccacttaccagtatgatg

SEQ ID NO: 1979 - DNA, 120 bp, Artificial Sequence
  ENSG00000003756_13 (sequence is synthesized)
aatactactataattccttgacccagcagtacctttactgggatggggaaaaagagacctacgtgccagctgcagagtctagctcccaccagcagtcgggcctgcctcctgcaaaagagg

SEQ ID NO: 1980 - DNA, 120 bp, Artificial Sequence
  ENSG00000003756_14 (sequence is synthesized)
ggaaagagaagaaggagaaacccaagagcaaaacagcccagcagattgccaaagacatggaacgctgggctaagagtttgaataagcagaaagaaaactttaaaaatagctttcagcctg

SEQ ID NO: 1981 - DNA, 120 bp, Artificial Sequence
  ENSG00000003756_15 (sequence is synthesized)
tcaattccttgagggaagaagaaaggagagaatctgctgcagcagacgctggctttgctctctttgagaagaagggagccttagctgaaaggcagcagctcatcccagaattggtgcgaa

SEQ ID NO: 1982 - DNA, 120 bp, Artificial Sequence
  ENSG00000003756_16 (sequence is synthesized)
atggagatgaggagaatcccctcaaaaggggtctggttgctgcttacagtggtgacagtgacaatgaggaggagctggtggagagacttgagagtgaggaagagaagctagctgactgga

SEQ ID NO: 1983 - DNA, 120 bp, Artificial Sequence
  ENSG00000003756_17 (sequence is synthesized)
agaagatggcctgtctgctctgccggcgccagttcccgaacaaagatgccctagtcaggcaccagcaactctcagaccttcacaagcaaaacatggacatctatcgacgatccaggctga

SEQ ID NO: 1984 - DNA, 120 bp, Artificial Sequence
  ENSG00000003756_18 (sequence is synthesized)
gcgagcaggagctggaagccttggagctaagggagagagagatgaaataccgagaccgagctgcagaaagacgggagaagtacggcattccagaacctccagagcccaagcgcaagaagc

SEQ ID NO: 1985 - DNA, 120 bp, Artificial Sequence
  ENSG00000003756_19 (sequence is synthesized)
agtttgatgccggcactgtgaattacgagcaacccaccaaagatggcattgaccacagtaacattggcaacaagatgctgcaggccatgggctggcgggaaggctctggcttgggacgaa

SEQ ID NO: 1986 - DNA, 120 bp, Artificial Sequence
  ENSG00000003756_20 (sequence is synthesized)
agtgtcaaggcattacggctcccattgaggctcaagttcggctaaagggagctggcctaggagccaaaggcagcgcatatggtttgtcgggcgccgattcctacaaagatgctgtccgga

SEQ ID NO: 1987 - DNA, 120 bp, Artificial Sequence
  ENSG00000003756_21 (sequence is synthesized)
aagccatgtttgcccggttcactgagatggagtgagagagagagagagagagagatgacaaggagcacaagaagtggtccatctcccgaattcgctgttaccgcctgtctctttaagggc

SEQ ID NO: 1988 - DNA, 120 bp, Artificial Sequence
  ENSG00000003756_22 (sequence is synthesized)
atgccttgtgctgttaatagatcttagggtgaaccacttcattctgcagggttctccctcccaccttaaagaagttccccttatgtgggttgcctggtgaatggccttccttcccgccag

SEQ ID NO: 1989 - DNA, 120 bp, Artificial Sequence
  ENSG00000003756_23 (sequence is synthesized)
agggcttgtgaacagaccggagaggacagtggattgtttatactccagtgtacatagtgtaatgtagcgtgtttacatgtgtagcctatgttgtggtccatcagcccctcacattcctag

SEQ ID NO: 1990 - DNA, 120 bp, Artificial Sequence
  ENSG00000003756_24 (sequence is synthesized)
gggtttgagatgctgtaggtggtatgtgacaccaaagccacctctgtcatttgttgtgatgtcttttcttggcaaaagccttgtgtatatttgtatattacacatttgtacagaattttg

SEQ ID NO: 1991 - DNA, 120 bp, Artificial Sequence
  ENSG00000003756_25 (sequence is synthesized)
gaagattttcagtctagttgccaaatctggctcctttacaaaagaaataccttgagaaatgggtgtcctgtgtctctttattcttgggtgggtaggtgggtcaagcatgtctgagccagt

SEQ ID NO: 1992 - DNA, 120 bp, Artificial Sequence
  ENSG00000003756_26 (sequence is synthesized)
agctctgtgctagtgtttacaccctgtgtgtggttgcctggtatccaatggattctatgtggatgggcccaatgatgagctgttgtcatggcagatgtctgaactccatgacacgcccac

SEQ ID NO: 1993 - DNA, 120 bp, Artificial Sequence
  ENSG00000003756_27 (sequence is synthesized)
ctgttctggctgcctggtttatgtaaatagtctgtggaacagagtgagacaaattgctctttgggtgccctctaggtaggcccagggattaaattaatgggaactagactttttaaattt

SEQ ID NO: 1994 - DNA, 120 bp, Artificial Sequence
  ENSG00000003756_28 (sequence is synthesized)
tctgcccaccaccacctcccaaagtgctaggattacgggcatgagccactgctcccggctgggaactaaactttttaaagaaatcatattctatttttactctagcagtgtcacacctct

SEQ ID NO: 1995 - DNA, 120 bp, Artificial Sequence
  ENSG00000003756_29 (sequence is synthesized)
ttctgggcaggaaatatcactagtccacaacatactttatcttttttttgacaaaatatgtaatcgactgacatagcagaaagtctgcattaattgttttttgtttgttgttttctagta

SEQ ID NO: 1996 - DNA, 120 bp, Artificial Sequence
  ENSG00000003756_30 (sequence is synthesized)
caggttgcttcactcaccaagtctagatattcatgaaaatggaacaagtctgtacaattttaaaaaaaggttgaaggagtggtttgttccaaaggagtgacttttttttaaaaaaaaagc

SEQ ID NO: 1997 - DNA, 120 bp, Artificial Sequence
  ENSG00000003756_31 (sequence is synthesized)
tttgtatatattaaaattgatgttactagaataagtacagtaccaaggacttcattatagaatttgttctgcctttaaacatggctacctacctggcagggctttgttaactactgaata

SEQ ID NO: 1998 - DNA, 120 bp, Artificial Sequence
  ENSG00000003756_32 (sequence is synthesized)
cctgtctggtaatcactaaaacatcttaatgtttcccttttttctagtttgttatattcctattatgtccattgagagtaagcttagtatatcaaactctccatttgacagtgaagagaa

SEQ ID NO: 1999 - DNA, 120 bp, Artificial Sequence
  ENSG00000003756_33 (sequence is synthesized)
catagtgaaagtctgtggcggcatttttataagtaattccttatttctgcctgaagaccacaaagcctcctggaggcgtaactgctcagaccggtcttcagggaatatttaaggacttag

SEQ ID NO: 2000 - DNA, 120 bp, Artificial Sequence
  ENSG00000003756_34 (sequence is synthesized)
tggaatttatgaacaataagtctgatgagattagcctgggagtggtgtcctgcagctgtctaatctagttagagtggcattaacattctaatctccttgagaatgccttttatagtctgt

SEQ ID NO: 2001 - DNA, 120 bp, Artificial Sequence
  ENSG00000003756_35 (sequence is synthesized)
tcaaagcaagtcattgatggttcttcgaggtagtgttaactgaagtgttcttcagtttgtcaagataatgttcagtgcttggcacttaaataacattttttgcaagaactccaaggcaca

SEQ ID NO: 2002 - DNA, 120 bp, Artificial Sequence
  ENSG00000003756_36 (sequence is synthesized)
ttattgaatgcctttaaccaagtgcattctgggaagtttgcttgactcattatcttgcttttctgcagcattctgtgatttgagtcatccatgaatccatgaataaaagttacattcttt

SEQ ID NO: 2003 - DNA, 120 bp, Artificial Sequence
  ENSG00000003756_37 (sequence is synthesized)
gattggtaatattgccatttataacaagactcactaatgagggtatcactttgactgactgatttgttaaagtttttaagcctctcattttcctaacccagaaatcacagcctgatttta

SEQ ID NO: 2004 - DNA, 120 bp, Artificial Sequence
  ENSG00000003756_38 (sequence is synthesized)
ttaaaagtagagcttcattcatttcataccatagataccatcctagtaaatccagaacatatacaaggttcatgtgagtctgctttcttgacatgatagcattgtttgatgcagtggata

SEQ ID NO: 2005 - DNA, 120 bp, Artificial Sequence
  ENSG00000003756_39 (sequence is synthesized)
tgtcagaatgactaacctaggagtttaaaactcctaagaaactaaaacctgtaagacatttaaaagtctccacaattttaatgtatacaaagctatgttactgtgtaacacattacagtt

SEQ ID NO: 2006 - DNA, 120 bp, Artificial Sequence
  ENSG00000003756_40 (sequence is synthesized)
caaattcactccagaaataaaaggccagtaggattagggactcactggtagtttggagtctcccagcacacatccctcctagtgggatgatctattcacatatctcccagcttttttatt

SEQ ID NO: 2007 - DNA, 120 bp, Artificial Sequence
  ENSG00000003756_41 (sequence is synthesized)
tttgcttctgtatatcacagtgagtggatggcccttcagctttttctctcctggccagacatgcagtcttgcctttagatatcgcagagacaaaattcacagcatgtcttaaatcttcca

SEQ ID NO: 2008 - DNA, 120 bp, Artificial Sequence
  ENSG00000003756_42 (sequence is synthesized)
ggatttgcaagaaccaaattgctcaacagtatgtatgtttagaggggttagactcctttttaaaatctggatatctaaccacctacttaaatctgtttgatagtgtcaaaccacccccac

SEQ ID NO: 2009 - DNA, 120 bp, Artificial Sequence
  ENSG00000003756_43 (sequence is synthesized)
ccttgatcctcccacccccaagaaaaagaaaagatgctcctgttaaatgaaggctctttaggggtaggtgctaggtatactcttggctagattgattcagctcagaattttgacttttta

SEQ ID NO: 2010 - DNA, 120 bp, Artificial Sequence
  ENSG00000003756_44 (sequence is synthesized)
aagctaagtccttgtagtcacatggttgacttgaaggatgaggtggtgtgtgcatttatgagcttttcctacccccctgaagaaacttcattggcctcctggttactcaccttgaagaga

SEQ ID NO: 2011 - DNA, 120 bp, Artificial Sequence
  ENSG00000003756_45 (sequence is synthesized)
gtaccatccattttagtgaaaaacacatctgtcacctaggacatgacatggttgcagttgacaggaaaaaaaaaatctcatttagttgttttagagttggtggcattcagaatagtccct

SEQ ID NO: 2012 - DNA, 120 bp, Artificial Sequence
  ENSG00000003756_46 (sequence is synthesized)
cttgagaaagaattgtaaccagattccctttaaaaatgagttcccctccctttccccccaaaggactcatcctgaagcagaaggtgtggggggaaggagaaatgtaaaggcttttacttt

SEQ ID NO: 2013 - DNA, 120 bp, Artificial Sequence
  ENSG00000003756_47 (sequence is synthesized)
gcataaggatgggggactggggaaaaaggtgaagcgaagcccaaggacaccatgctaagggcaaaagtaagagacagtctcagaactgagagaattgtgtcttctgctttttgaagtaga

SEQ ID NO: 2014 - DNA, 120 bp, Artificial Sequence
  ENSG00000003756_48 (sequence is synthesized)
ctttctcagcactccctgactccgtttacctttactccgcatcccattctcttactgcctatctgaaggattggatgggcagagtataggtggcggtggttggtcctccccgtatgttgt

SEQ ID NO: 2015 - DNA, 120 bp, Artificial Sequence
  ENSG00000003756_49 (sequence is synthesized)
ccatttaattccagagcactgatttttccgaagtgtgctctgccctgggaaaatggacacatgttcctcacaatgggaataactaattacttcttttcttacagaaaaagttggtgattc

SEQ ID NO: 2016 - DNA, 120 bp, Artificial Sequence
  ENSG00000003756_50 (sequence is synthesized)
gtcatgatgggaacttacctaaaacttgagtctcatggcttgtcctctgtttcccagggagccttagctgaaaggcagcagctcatcccagaattggtgcgaaatggagatgaggagaat

SEQ ID NO: 2017 - DNA, 120 bp, Artificial Sequence
  ENSG00000003756_51 (sequence is synthesized)
cgagcaggagctggaagccttggagctaagggagagagaggtgaatgggaaactgtgccacaaggaagaggatattgggataattgcctttagcttttatttgtagcatttagttccaga

SEQ ID NO: 2018 - DNA, 120 bp, Artificial Sequence
  ENSG00000003756_52 (sequence is synthesized)
tcccaggggcagggtaggaggatttgtcatacccttgtcatctgaccattgtagttcatgtagcctagacccagcctctgtgtgccttgtgagcctcacattgtcccttcatcataaggg

SEQ ID NO: 2019 - DNA, 120 bp, Artificial Sequence
  ENSG00000003756_53 (sequence is synthesized)
cataccactgcactccagcctgggcaacaaacaagaccctgcctctcaaaaaaaacaaaacaaaaatctgacaaatagggttgttaactgtgagcctgaggaaaagtatagattttagtg

SEQ ID NO: 2020 - DNA, 120 bp, Artificial Sequence
  ENSG00000003756_54 (sequence is synthesized)
gaaaagtatagattttagtgtacttaaacaacttgtctgttttctttaaatcttttcccttaggttagataatgctgctcatgattgtgagagcacagaaagttcttttgttttctagaa

SEQ ID NO: 2021 - DNA, 120 bp, Artificial Sequence
  ENSG00000003756_55 (sequence is synthesized)
ttaagtctgctcacctggtttgcattctgcatctgcctttctttagtgcagggtagtgtcagtcccactgtggcccaaagtttgcattctgcgttaaccaagtcacaattaatgaggttt

SEQ ID NO: 2022 - DNA, 120 bp, Artificial Sequence
  ENSG00000003756_56 (sequence is synthesized)
ttgtgtggttaaaataaaaacttgtggggattttaatgtatttctttggtgaaaatacattagttgtttgtctctaattggatcactttcccttctagactctgaacaggaagtgcctcc

SEQ ID NO: 2023 - DNA, 120 bp, Artificial Sequence
  ENSG00000003756_57 (sequence is synthesized)
tcccttatccaaaatgcttgggaccagaactgttttgatatttttttttaatatttgcatttacataagtttaaacatttgcatttacataagtctaaacatgaaattcatttgtatttt

SEQ ID NO: 2024 - DNA, 120 bp, Artificial Sequence
  ENSG00000003756_58 (sequence is synthesized)
atttgcatttacataagtctaaacatgaaattcatttgtattttgtatatgtcttatacatgccaaaggtaattttatacaacactttaaataattttttttttttttttttaagacaga

SEQ ID NO: 2025 - DNA, 120 bp, Artificial Sequence
  ENSG00000003756_59 (sequence is synthesized)
attgttctcttccccattcccacctcagtccctaaagaacatcctgattcccccagtcttcaagcacatgaattcagaatgaaaggtttgccatggctaaggaatgtgactctttgaaaa

SEQ ID NO: 2026 - DNA, 120 bp, Artificial Sequence
  ENSG00000003756_60 (sequence is synthesized)
ccatgttagcatctgaggaacttttttaaactttgttttagggacttttttttccttaggtaagtaatgatttataaactcctttttttttttgactatagtcggttgcatggttacttt

SEQ ID NO: 2027 - DNA, 120 bp, Artificial Sequence
  ENSG00000003756_61 (sequence is synthesized)
aagcgtggaatcaaatggagtggcatttagttcaggcggcttgttccttgccatggcaaagtatcaagaagatccccaagtcaagtcacatttgtaaagctgcttcccaattggctttgt

SEQ ID NO: 2028 - DNA, 120 bp, Artificial Sequence
  ENSG00000003756_62 (sequence is synthesized)
cacgcagtgttgaagcagtgggagagagattcacctgttataaaggaactgactaacacaagtatcccgtctatatctgaatgctgtctctaggtgtaagccgtggtttcgccttcgtgg

SEQ ID NO: 2029 - DNA, 120 bp, Artificial Sequence
  ENSG00000003756_63 (sequence is synthesized)
agtaagggagtaccaccagtgttttaaagaccctatctgtggtttgtgtctcactttaaggctcaactgcatcttggctaatgtgattcctacttaaaactgaatgtgatcactgttgat

SEQ ID NO: 2030 - DNA, 120 bp, Artificial Sequence
  ENSG00000003756_64 (sequence is synthesized)
gggtattggagcagtttctgcacatagattccatgtcggggctttgttttctgtgagagcagatgagatggagtgatgaaagaagcttcaattcctaagctcagttaattaagtttcatt

SEQ ID NO: 2031 - DNA, 120 bp, Artificial Sequence
  ENSG00000003756_65 (sequence is synthesized)
gcatctgtgagtggagagttttaatggtctggaaagagaaaattaagacaagaaaaagcttgttttactagatagatactggtctgggtgggccattattctgatatgttgtatttggga

SEQ ID NO: 2032 - DNA, 120 bp, Artificial Sequence
  ENSG00000003756_66 (sequence is synthesized)
tttttatttgtggtcagtggtttgaaaatagtcactcagtctaggcaacattgcaagacttcgtctctactgaaaattagaaacaaattagttgggtgtggtggcttgcatctgtactcc

SEQ ID NO: 2033 - DNA, 120 bp, Artificial Sequence
  ENSG00000003756_67 (sequence is synthesized)
caggagatcaaggctgcagtgagccactgcactttttggggatcataccattgcactccagcctgggcagtgagcaagaccctgtctcatttaaaaaaaaaaaaaacaaaaacagtcttg

SEQ ID NO: 2034 - DNA, 77 bp, Artificial Sequence
  ENSG00000003756_68 (sequence is synthesized)
gatcataccattgcactccagcctgggcagtgagcaagaccctgtctcatttaaaaaaaaaaaaaacaaaaacagtc

SEQ ID NO: 2035 - DNA, 86 bp, Artificial Sequence
  ENSG00000003756_69 (sequence is synthesized)
caaagaaatagaaaaaggtagtcacccaggaatccatttcttaggctccaagaaggttggtaccaggaggctgtcaggcctagcac

SEQ ID NO: 2036 - DNA, 120 bp, Artificial Sequence
  ENSG00000003756_70 (sequence is synthesized)
tccaagaaggttggtaccaggaggctgtcaggcctagcactcaaggacctgactgctccacgcagttgacaaaatgtgattcattactaaagtgtgacatgcagtaatggggatttgtta

SEQ ID NO: 2037 - DNA, 120 bp, Artificial Sequence
  ENSG00000003756_71 (sequence is synthesized)
acatttcggatgaggcattactttatccaggtacatagccaccgccatcttcctattgtacatttccagtgacctgtcctccttttgtctccagaggggtctggttgctgcttacagtgg

SEQ ID NO: 2038 - DNA, 120 bp, Artificial Sequence
  ENSG00000003756_72 (sequence is synthesized)
tttgaaatctcccacctgagatatttctgaagtgtttgtagttaaggcttttgcttttcttctccccacacccttcctgccctactatctatggttccacctccccagcgactgctgaac

SEQ ID NO: 2039 - DNA, 120 bp, Artificial Sequence
  ENSG00000003756_73 (sequence is synthesized)
cctttccaaatgttggagatgaaataccgagaccgagctgcagaaagacgggagaagtacggcattccagaacctccagagcccaagcgcaagaagcagtttgatgccggcactgtgtat

SEQ ID NO: 2040 - DNA, 120 bp, Artificial Sequence
  ENSG00000003756_74 (sequence is synthesized)
aaatgtgctgctttcctcctcaatttcactagaagtagtttcgcttagtgcatttatgaggcataaaatgaaatatttcctgcaaaagaatatatgactcagattagttttaacttcttc

SEQ ID NO: 2041 - DNA, 120 bp, Artificial Sequence
  ENSG00000003756_75 (sequence is synthesized)
tatatacaaaactcgtggctgatggggaaattttgttttgctatacaagtattaccctttcctgttgtatgagccaggattgagtaatacacacttcaaccttatttctttctgttgttt

SEQ ID NO: 2042 - DNA, 120 bp, Artificial Sequence
  ENSG00000003756_76 (sequence is synthesized)
acgttattaatgtagtagatttcagtcagctcagtatcccagcttctacgaggttttacatttttcatcagaagtgtttgaatttcatgttgctccttgtattaatgaagacacttggat

SEQ ID NO: 2043 - DNA, 120 bp, Artificial Sequence
  ENSG00000003987_0 (sequence is synthesized)
agaggcgcgcaggtgcgtgaggccgcgcccgcccgggaccctgcagacgtgggccagccatggagcacatccgtacgcccaaggttgaaaatgtccgcttggtagatcgagtgtctccta

SEQ ID NO: 2044 - DNA, 120 bp, Artificial Sequence
  ENSG00000003987_1 (sequence is synthesized)
aaaaagcagctctaggtactttgtatttgacggctacccatgtcatattcgtggaaaattcacctgacccaagaaaagaaacatggattcttcacagtcagatttccaccattgagaaac

SEQ ID NO: 2045 - DNA, 120 bp, Artificial Sequence
  ENSG00000003987_2 (sequence is synthesized)
aggcaacaaccgctaccggatgccctctgctgattcgctgcaagaactttcagataatacagctcatcatacctcaggaaagagattgccacgacgtgtacatctccctgatacgccttg

SEQ ID NO: 2046 - DNA, 120 bp, Artificial Sequence
  ENSG00000003987_3 (sequence is synthesized)
caaggccagtgaaatatgaggagttatactgcttttcattcaaccccatgctggataaagaagaaagagagcaaggctgggtgctgatcgatcttagtgaagaatacacgcggatgggcc

SEQ ID NO: 2047 - DNA, 120 bp, Artificial Sequence
  ENSG00000003987_4 (sequence is synthesized)
tccctaatcattactggcagctcagcgatgtgaatagagactacagagtctgtgactcttatcctactgaactgtacgttcccaaatcggccacggcacacatcatagtggggagttcca

SEQ ID NO: 2048 - DNA, 120 bp, Artificial Sequence
  ENSG00000003987_5 (sequence is synthesized)
aattccggagtagacggcgatttcctgtcctttcttactattataaagataaccacgcctccatctgccggagcagccagcccctgtccggcttcagtgcccggtgcctagaggacgagc

SEQ ID NO: 2049 - DNA, 120 bp, Artificial Sequence
  ENSG00000003987_6 (sequence is synthesized)
agatgctccaggccattaggaaagccaatccaggaagtgacttcgtttatgtcgttgacacccggcctaaacttaatgcaatggcaaatcgtgctgcagggaaaggctatgagaatgaag

SEQ ID NO: 2050 - DNA, 120 bp, Artificial Sequence
  ENSG00000003987_7 (sequence is synthesized)
acaattattccaatatcaagtttcagtttatcgggatagagaacatccatgtcatgaggaacagtctgcagaaaatgctggaagtgtgtgaacttaaatctccctccatgagtgatttcc

SEQ ID NO: 2051 - DNA, 120 bp, Artificial Sequence
  ENSG00000003987_8 (sequence is synthesized)
tgtggggtctggagaactctggctggttaaggcacattaaagccataatggatgcaggaatcttcattgcaaaggcagtgtcagaggaaggggcaagtgtgcttgttcactgttctgatg

SEQ ID NO: 2052 - DNA, 120 bp, Artificial Sequence
  ENSG00000003987_9 (sequence is synthesized)
gctgggacaggaccgctcaggtgtgctcggtggcaagcctgctgctggaccctcactaccggactctgaagggcttcatggtattaattgaaaaggactggatttcctttggtcataagt

SEQ ID NO: 2053 - DNA, 120 bp, Artificial Sequence
  ENSG00000003987_10 (sequence is synthesized)
ttaatcaccgatatggcaatctagatggtgacccaaaagaaatctctccagttattgaccagttcattgagtgtgtttggcagttaatggaacaatttccctgtgcctttgagttcaatg

SEQ ID NO: 2054 - DNA, 120 bp, Artificial Sequence
  ENSG00000003987_11 (sequence is synthesized)
agaggtttttgattcacattcaacatcacatttattcctgccagtttggaaacttcctatgtaacagccaaaaggagagacgagaactcaagattcaagaaagaacatactcattatggg

SEQ ID NO: 2055 - DNA, 120 bp, Artificial Sequence
  ENSG00000003987_12 (sequence is synthesized)
ctcacctgtggaagaatcgggccgactacctgaatcctctgtttagagctgatcacagccagactcagggaacccttcatctccctacaacaccatgtaacttcatgtacaagttttgga

SEQ ID NO: 2056 - DNA, 120 bp, Artificial Sequence
  ENSG00000003987_13 (sequence is synthesized)
gtggaatgtataaccgctttgaaaaggggatgcagccccgacagtcagttacagattacctaatggcagtgaaggaagaaactcagcagctagaggaagaactagaggccctggaagaaa

SEQ ID NO: 2057 - DNA, 120 bp, Artificial Sequence
  ENSG00000003987_14 (sequence is synthesized)
ggctggaaaaaattcaaaaggtccagttaaattgcactaaggtgaagagtaagcaaagtgagcccagcaagcactcagggttttctacctcagacaacagcatagccaacactccccagg

SEQ ID NO: 2058 - DNA, 120 bp, Artificial Sequence
  ENSG00000003987_15 (sequence is synthesized)
attacagtgggaatatgaaatcatttccatcccggagcccttcacaaggcgatgaagattctgctctgattctaacccaagacaatctgaaaagttcagatccagatctgtcagccaaca

SEQ ID NO: 2059 - DNA, 120 bp, Artificial Sequence
  ENSG00000003987_16 (sequence is synthesized)
gtgaccaagagtccggggtggaggatttgagctgtcggtctccaagtggtggtgagcatgcaccgagtgaagatagtggcaaggaccgggattctgatgaagccgtgtttctcactgcct

SEQ ID NO: 2060 - DNA, 120 bp, Artificial Sequence
  ENSG00000003987_17 (sequence is synthesized)
gaagtttccctttggagttccaaagtaaaggacacataagcaacacttccaaaaacaagggaacaaggtggtttattgtaaaaacaggaaatggtgcatgtcattgagaactactttaat

SEQ ID NO: 2061 - DNA, 120 bp, Artificial Sequence
  ENSG00000003987_18 (sequence is synthesized)
gcagctatgaaaagggaaaaaagtgcccagttcttgatttcttagatactgaagaggacgtagtcatttcatttatcaaatataaggaaaattattcaccattttgaagctcaccctaga

SEQ ID NO: 2062 - DNA, 120 bp, Artificial Sequence
  ENSG00000003987_19 (sequence is synthesized)
ctatgaaaattatattcactgcagagcaattacttctgtcattacctgaagtgatcagtatctatcttccttgtcatagcatgcatctctcaaaaagcctccactcctttccctcacatc

SEQ ID NO: 2063 - DNA, 120 bp, Artificial Sequence
  ENSG00000003987_20 (sequence is synthesized)
tgtgatcatcatgattcttttagttcacttctagatgcatattttgtgttttctaaagcatctgacattatcctcctttccgaccctcttatacatatttctaaaaacaggcacattggt

SEQ ID NO: 2064 - DNA, 120 bp, Artificial Sequence
  ENSG00000003987_21 (sequence is synthesized)
catcactttaacttttccttggagcatatattttgaattgtgagaataattttgttgcttttctctgagatctatagtctgtttctcctcattatttaaaaatgctaaaccttgtatctc

SEQ ID NO: 2065 - DNA, 120 bp, Artificial Sequence
  ENSG00000003987_22 (sequence is synthesized)
actttttctctaacactgatttaatagctaacgaggtagaagcaacattcattctcctggtcttacatatgaatttaagtatcagctttcttgtaataaccttttattactgttctagag

SEQ ID NO: 2066 - DNA, 120 bp, Artificial Sequence
  ENSG00000003987_23 (sequence is synthesized)
actacactaccgacagtgtgggccagccaccagcctgatctcaaagtatcacattataaagttagtagataaaacatctgtgagtgaaaatccagtttcaagaaccagagaattgggttg

SEQ ID NO: 2067 - DNA, 120 bp, Artificial Sequence
  ENSG00000003987_24 (sequence is synthesized)
tcatgtctgtttaatgaagggaataggttttgtaatctatcattttagaaattatgtaactggctaatatggtttaattaaccttagtaacatctcatgaccactgactgctgaaagttc

SEQ ID NO: 2068 - DNA, 120 bp, Artificial Sequence
  ENSG00000003987_25 (sequence is synthesized)
tgaaaagaatttttgttttgttacactgcacatttaagggagagtccctcccctatcttatgagttaaaaaagacttcactaggtgacctaaattaaacttagtggggaaaagtggccat

SEQ ID NO: 2069 - DNA, 120 bp, Artificial Sequence
  ENSG00000003987_26 (sequence is synthesized)
gtttggacataaataaatggtattcacactgtatggttttaatatattagtacattctagaatgtaaaaggattaaactttacaatttagatcaatattttgaatatgtgaaaggattaa

SEQ ID NO: 2070 - DNA, 120 bp, Artificial Sequence
  ENSG00000003987_27 (sequence is synthesized)
tttaaactttacaatttacatcaatattttgaatatctgattttttttaatgggagaattattacatttcgctgaaatgaggacgagggcaagaaagcaacattgctgatctctctagta

SEQ ID NO: 2071 - DNA, 120 bp, Artificial Sequence
  ENSG00000003987_28 (sequence is synthesized)
tgaaagatttggagggagtgttgcaatatatataaatgaaaacatttaattgtgttcatcatatttaaaaatatagaatatattagagaactgtgatttaaaagtactgttaatgtaaaa

SEQ ID NO: 2072 - DNA, 120 bp, Artificial Sequence
  ENSG00000003987_29 (sequence is synthesized)
aataaagcaagtgtaattaattctttcagaatataaaatttgggcattctctgctgagcagttcccaaattaagtacaaggaatgtttattcattttctgcaatatactatatgtaatag

SEQ ID NO: 2073 - DNA, 120 bp, Artificial Sequence
  ENSG00000003987_30 (sequence is synthesized)
ggaataccttgctaaaataaaacttaggatatagtggtaatggctttcacatttttataacataacataactcacttcacaaccttcttggagctgtccactcttagaaactctgttgcc

SEQ ID NO: 2074 - DNA, 120 bp, Artificial Sequence
  ENSG00000003987_31 (sequence is synthesized)
taatattgaggatgtggctttaatttcttccgtttgacagtgtatgtctataaaaacaataaacattttttaaaaaatgacaaagtatctatgccaaacagcactatgcttttatttgaa

SEQ ID NO: 2075 - DNA, 120 bp, Artificial Sequence
  ENSG00000003987_32 (sequence is synthesized)
aagcaaatagtataaatatttgatgttttaaaatgtagttttttaatatgacaacttccatatcagagtcataaacttttagtcccctcaacttttttacaagacagacattataattta

SEQ ID NO: 2076 - DNA, 120 bp, Artificial Sequence
  ENSG00000003987_33 (sequence is synthesized)
tgtaacatgttcgtctgcttattagaagttaacctagcactgagatttatataaaaggttacatttattgcttattaaaactttactgtactttcacagattcttcagagcatggctaac

SEQ ID NO: 2077 - DNA, 120 bp, Artificial Sequence
  ENSG00000003987_34 (sequence is synthesized)
ccaacaagactaaaatatccccaacaagactaaaatatctaataatcaaacattaatcaggaagtgttttattgagagcagtggtttaaagcatagggaataatccagtataaaactgat

SEQ ID NO: 2078 - DNA, 120 bp, Artificial Sequence
  ENSG00000003987_35 (sequence is synthesized)
ttgaggcatattacttcccaattagtaatatatagaatgcaagtaatttattttttaaagttgatatgaaataaataggtaagaattttgaccatgacccagcaaatcagtaactgagct

SEQ ID NO: 2079 - DNA, 120 bp, Artificial Sequence
  ENSG00000003987_36 (sequence is synthesized)
ttttatagaatggaaggtgatgatcagagacagaaaccatagaataaatttttattctttaagagcacattagtttactttcttctcctaaaaatgaatctgagctgtccttcaatttaa

SEQ ID NO: 2080 - DNA, 120 bp, Artificial Sequence
  ENSG00000003987_37 (sequence is synthesized)
gcatatatatgtgtcaagcaccctctattctgatataaatttcctagtctcaatttatgcctagaaatttctttcaactttgaagtgggtctgtttagtttatatctcactgattgattg

SEQ ID NO: 2081 - DNA, 120 bp, Artificial Sequence
  ENSG00000003987_38 (sequence is synthesized)
atttagaattttcttctattttaagatattaacctttaaatctctacctatgacaaattcgtacactgattagcctagtaactcctaagtattcctctttaattctgatttctatctcat

SEQ ID NO: 2082 - DNA, 120 bp, Artificial Sequence
  ENSG00000003987_39 (sequence is synthesized)
cttgtaaaatcagaatacaaactttcacatgcatttcatttttcctgtggcactgcttctccgatgtgaccaatttttatgaagaaaatatatagccataaaattagaaaaaatggtcac

SEQ ID NO: 2083 - DNA, 120 bp, Artificial Sequence
  ENSG00000003987_40 (sequence is synthesized)
ttaatctctgttgcaaaaacagaacccacattcatacgggcatattcaaatgcagattcttttcatcgtgggtgacatacataacctttatgtaaactgatttgtctatttgttaaatgc

SEQ ID NO: 2084 - DNA, 120 bp, Artificial Sequence
  ENSG00000003987_41 (sequence is synthesized)
agataactgatcacactgctctgtttcatgactgggttgtaacaaggttatccaatgaatggtatagaatgaaactgggatagttcaactttaaagaataaaaaacactgagatgaacta

SEQ ID NO: 2085 - DNA, 120 bp, Artificial Sequence
  ENSG00000003987_42 (sequence is synthesized)
gcttatgttttaggaaaactgtctcctggtgtcattctgtctttcaagcaaatcctggcagctcagattttctcagccagggtgcaaaatggcagtttgtctctttttgatgaaaggaag

SEQ ID NO: 2086 - DNA, 120 bp, Artificial Sequence
  ENSG00000003987_43 (sequence is synthesized)
gcttcattgtcactggtcttgcacaaagagcccttggagagaggggacagtgcacggggacagaacactaagggtctgtgactcttatcctactgaactgtacgttcccaaatcggccac

SEQ ID NO: 2087 - DNA, 120 bp, Artificial Sequence
  ENSG00000003987_44 (sequence is synthesized)
tcccctcatctcagaaccatccagtcttcttcggagcaaagcacacagcgggagagaagtgtgtggagttactactcacggatgccagatgagcgaatcagtcctggagatcagtgatga

SEQ ID NO: 2088 - DNA, 120 bp, Artificial Sequence
  ENSG00000003987_45 (sequence is synthesized)
aaccgataccacagctagatcacattcacattctactagattataagtaaagggtcccttccttttaaattctcagagcacgacacacagataaaagtttcaaactgaaaaaaaaaaaaa

SEQ ID NO: 2089 - DNA, 80 bp, Artificial Sequence
  ENSG00000003987_46 (sequence is synthesized)
gaggtgggctctctagggccgcgcgggagccccgggtccgcacgccgcgcgcggaacacctgggggcggagccaagaccg

SEQ ID NO: 2090 - DNA, 120 bp, Artificial Sequence
  ENSG00000003987_47 (sequence is synthesized)
tgctttctttatttttagctttccttgttttgcgttgtttgaagcaaaaagtgtttgccctccattcatttttcctcagggtgagatgggtgggcttttgtgcctggatgttggggaact

SEQ ID NO: 2091 - DNA, 120 bp, Artificial Sequence
  ENSG00000003987_48 (sequence is synthesized)
aggatcattataaccacctcacatcgtaatgaagatacgtttatggaaggcttactatgtattggacacggttcagattttttaagctgtatttactcaagtaaacctcattgaagttgt

SEQ ID NO: 2092 - DNA, 120 bp, Artificial Sequence
  ENSG00000003987_49 (sequence is synthesized)
acttgagtggtggcttctggatagaatgggaagggaaagctttagctgccagcaccaggccactctggctctgccctaattagggggggccctaaacagacgaatggacaggcagtgtca

SEQ ID NO: 2093 - DNA, 120 bp, Artificial Sequence
  ENSG00000003987_50 (sequence is synthesized)
tctattttctgtgcttatttcttgaagagcaaggcttcatgaaagcctcttaagattcagtgcaatacaaatatttcacatttttagtcagtagaacacctgaaacacaaccccatccag

SEQ ID NO: 2094 - DNA, 120 bp, Artificial Sequence
  ENSG00000003987_51 (sequence is synthesized)
gtcaggactcagataaccgaagcccaaacctaggcatttaatgcatttcacacatctggtttgtggctcagttccacaaatttttggttgttccttattttaggtcaacttgtttggtta

SEQ ID NO: 2095 - DNA, 120 bp, Artificial Sequence
  ENSG00000003987_52 (sequence is synthesized)
ctgttatttgagagtagtaaaattaatttttttctggaaagtgtgaaaaagtaacagaataaaatcaaatatatgtacttgtaaaactctttccccacttttagaaattatgttaactat

SEQ ID NO: 2096 - DNA, 120 bp, Artificial Sequence
  ENSG00000003987_53 (sequence is synthesized)
gatattaatctataattggtaaaggggagactgactgtaaagtcttatcttttggcttctatgaacttccctgtacttggacagggaggttataataaaatgcttttcctaattggataa

SEQ ID NO: 2097 - DNA, 120 bp, Artificial Sequence
  ENSG00000003989_0 (sequence is synthesized)
tcccaaaacagaaagagcagatgtctcaccacgaaactagcaactggaatgaagatagaaacaagtggttataactcagacaaactaatttgtcgagggtttattggaacacctgcccca

SEQ ID NO: 2098 - DNA, 120 bp, Artificial Sequence
  ENSG00000003989_1 (sequence is synthesized)
ccggtttgcgacagcaagtttctcctgtcgccttcgtcagacgtcagaatgattccttgcagagccgcgctgacctttgcccgatgtctgatccggagaaaaatcgtgaccctggacagt

SEQ ID NO: 2099 - DNA, 120 bp, Artificial Sequence
  ENSG00000003989_2 (sequence is synthesized)
ctagaagacaccaaattatgccgctgcttatccaccatggacctcattgccctgggcgttggaagcacccttggggccggggtttatgtcctcgctggggaggtggccaaggcagactcg

SEQ ID NO: 2100 - DNA, 120 bp, Artificial Sequence
  ENSG00000003989_3 (sequence is synthesized)
ggccccagcatcgtggtgtccttcctcattgctgccctggcttcagtgatggctggcctctgctatgccgaatttggggcccgtgttcccaagacggggtctgcatatttgtacacctac

SEQ ID NO: 2101 - DNA, 120 bp, Artificial Sequence
  ENSG00000003989_4 (sequence is synthesized)
gtgactgtcggagagctgtgggccttcatcactggctggaatctcattttatcgtatgtgataggtacatcaagtgttgcaagagcctggagtggcacctttgatgaacttcttagcaaa

SEQ ID NO: 2102 - DNA, 120 bp, Artificial Sequence
  ENSG00000003989_5 (sequence is synthesized)
cagattggtcagtttttgaggacatacttcagaatgaattacactggtcttgcagaatatcccgatttttttgctgtgtgccttatattacttctagcaggtcttttgtcttttggagta

SEQ ID NO: 2103 - DNA, 120 bp, Artificial Sequence
  ENSG00000003989_6 (sequence is synthesized)
aaagagtctgcttgggtgaataaagtcttcacagctgttaatattctcgtccttctgtttgtgatggttgctgggtttgtgaaaggaaatgtggcaaactggaagattagtgaagagttt

SEQ ID NO: 2104 - DNA, 120 bp, Artificial Sequence
  ENSG00000003989_7 (sequence is synthesized)
ctcaaaaatatatcagcaagtgccagagagccaccttctgaaaacggaacaagtatctatggggctggtggctttatgccttatggctttacgggaacgttggctggtgctgcaacttgc

SEQ ID NO: 2105 - DNA, 120 bp, Artificial Sequence
  ENSG00000003989_8 (sequence is synthesized)
ttttatgcctttgtgggatttgactgcattgcaacaactggtgaagaagttcggaatccccagaaagctattcccattggaattgtgacgtctttgcttgtttgctttatggcctatttt

SEQ ID NO: 2106 - DNA, 120 bp, Artificial Sequence
  ENSG00000003989_9 (sequence is synthesized)
ggggtctctgcagctttaacacttatgatgccgtactacctcctcgatgaaaaaagcccccttcctgtagcgtttgaatatgtgggatggggtcctgccaaatatgtcgtcgcagctggt

SEQ ID NO: 2107 - DNA, 120 bp, Artificial Sequence
  ENSG00000003989_10 (sequence is synthesized)
tctctctgcgccttgtcaacaagtcttctgggctctatgtttcctttaccccgaattctgtttgccatggcccgggatggcttactgtttagatttcttgccagagtgagtaagaggcag

SEQ ID NO: 2108 - DNA, 120 bp, Artificial Sequence
  ENSG00000003989_11 (sequence is synthesized)
tcaccagttgctgccacgttgactgcaggggtcatttctgctttgatggcctttctgtttgacctgaaggcgcttgtggacatgatgtccattggcacactcatggcctactctctggtg

SEQ ID NO: 2109 - DNA, 120 bp, Artificial Sequence
  ENSG00000003989_12 (sequence is synthesized)
gcagcctgtgttctcatcctcaggtaccagcctggcttatcttacgaccagcccaaatgttctcctgagaaagatggtctgggatcgtctcccagggtaacctcgaagagtgagtcccag

SEQ ID NO: 2110 - DNA, 120 bp, Artificial Sequence
  ENSG00000003989_13 (sequence is synthesized)
gtcaccatgctgcagagacagggcttcagcatgcggaccctcttctgcccctcccttctgccaacacagcagtcagcttctctcgtgagctttctggtaggattcctagctttcctcgtg

SEQ ID NO: 2111 - DNA, 120 bp, Artificial Sequence
  ENSG00000003989_14 (sequence is synthesized)
ttgggcctgagtgtcttgaccacttacggagttcatgccatcaccaggctggaggcctggagcctcgctctcctcgcgctgtttcttgttctcttcgttgccatcgttctcaccatctgg

SEQ ID NO: 2112 - DNA, 120 bp, Artificial Sequence
  ENSG00000003989_15 (sequence is synthesized)
aggcagccccagaatcagcaaaaagtagccttcatggttccattcttaccatttttgccagcgttcagcatcttggtgaacatttacttgatggtccagttaagtgcagacacttgggtc

SEQ ID NO: 2113 - DNA, 120 bp, Artificial Sequence
  ENSG00000003989_16 (sequence is synthesized)
agattcagcatttggatggcaattggcttcctgatttacttttcttatggcattagacacagcctggagggtcatctgagagatgaaaacaatgaagaagatgcttatccagacaacgtt

SEQ ID NO: 2114 - DNA, 120 bp, Artificial Sequence
  ENSG00000003989_17 (sequence is synthesized)
catgcagcagcagaagaaaaatctgccattcaagcaaatgaccatcacccaagaaatctcagttcacctttcatattccatgaaaagacaagtgaattctaacacttgcaggagcagagc

SEQ ID NO: 2115 - DNA, 120 bp, Artificial Sequence
  ENSG00000003989_18 (sequence is synthesized)
tggtcatcgtcttagcatacatatcctacactgagtaaaccgtaacgggatgtcatcagcatgctgggttgtcatgggtttgctgcatacatagttcaccctaatttatacttactcatc

SEQ ID NO: 2116 - DNA, 120 bp, Artificial Sequence
  ENSG00000003989_19 (sequence is synthesized)
tggacagcatctcctcagatggtgaattatgtgcacggggaaacctcctgagtggaagtttcattcatcagtgatgaatagcccccaaacagtgggagtgtgtatgtatgtgtgtatgta

SEQ ID NO: 2117 - DNA, 120 bp, Artificial Sequence
  ENSG00000003989_20 (sequence is synthesized)
tgtatctatgtatatgcttgggaacatgagtgttacaagttagctggtgttttactattattgtgttacatttttccagtgtcgtcattaatcggtggcatatactgcacatactgaaat

SEQ ID NO: 2118 - DNA, 120 bp, Artificial Sequence
  ENSG00000003989_21 (sequence is synthesized)
agagggaaatcactgaatgtaaagaggtttcatctatgccccctgcagttggggaaatactagtagctttaccttgtttgacttcattaatgtcagtttaggggatgccaaaaatgcagt

SEQ ID NO: 2119 - DNA, 120 bp, Artificial Sequence
  ENSG00000003989_22 (sequence is synthesized)
tactcatcatggtgtctgtcactggttaggggtaagatgaggggataaggaaagagacttttcaataagttgtgaatgccaacagtgggtttaatgcaaattttttttcctgtgaggtat

SEQ ID NO: 2120 - DNA, 120 bp, Artificial Sequence
  ENSG00000003989_23 (sequence is synthesized)
gacagtttgctcaaacttcagccaacaggggtgtctgcttctgctgcactacacaggccaggagtggcattccatgccactagttggcatccttttgaacttttgtctcctttgcaaaca

SEQ ID NO: 2121 - DNA, 120 bp, Artificial Sequence
  ENSG00000003989_24 (sequence is synthesized)
gtggtcctaaaatacgaggtcttcacttgctgtgaatgacgtatccccagtcagggacttaagagaggcactgtgatatacttgggaccctttaaattaaaaagtgaagatagtcaccag

SEQ ID NO: 2122 - DNA, 120 bp, Artificial Sequence
  ENSG00000003989_25 (sequence is synthesized)
ggccagaaagctcatggagtggccgtaatgagaatatgtttgaagatcaaagagttagaccaatgcttgaataagtagaccccaagcatccttttctaaaaagtgacttaaaataagcca

SEQ ID NO: 2123 - DNA, 120 bp, Artificial Sequence
  ENSG00000003989_26 (sequence is synthesized)
acagactctcccagaccacacaactagtggaatgattcctcctttttccattacttacttaatcacagtttagtttttttcttaacctcgtcaggcccagagttcacttctttgtttctc

SEQ ID NO: 2124 - DNA, 120 bp, Artificial Sequence
  ENSG00000003989_27 (sequence is synthesized)
tgtttcttttgtcttgtcttagagatgagggggctacagcagcatcatgcaaagagggaaagatgaagggatagaagaagagaaaatccccctgttctgataggaacggcctgttccatt

SEQ ID NO: 2125 - DNA, 120 bp, Artificial Sequence
  ENSG00000003989_28 (sequence is synthesized)
gttaaatggcaaatggcccaatttaagggctttggatctaatttgcctctgatgtttcctttggaaacatttaggaatatttttctccccctaccccataaattgtgtagcactttttat

SEQ ID NO: 2126 - DNA, 120 bp, Artificial Sequence
  ENSG00000003989_29 (sequence is synthesized)
tccatttgctttcaaatgactacactaagcctaataatacaagctccagtgttatacaataacccatcagtgattggggaatcaaacattttggtttaaaaaacatgattatttaaaact

SEQ ID NO: 2127 - DNA, 120 bp, Artificial Sequence
  ENSG00000003989_30 (sequence is synthesized)
ggaaactaaaaagaatcaaattgaattaaagctatataaacacagttaacccttgtaaatgagtaaacaaatttttacatgtaagattctctaattgtcatattttactttttaggattc

SEQ ID NO: 2128 - DNA, 120 bp, Artificial Sequence
  ENSG00000003989_31 (sequence is synthesized)
acattaccaggcatgctagctggcccgtgtaatcccaagacaaggaaaacattcgttttcctcatgggtcttccaagaaatgagctattttattgatgccattaaaaagcaagttgcgat

SEQ ID NO: 2129 - DNA, 120 bp, Artificial Sequence
  ENSG00000003989_32 (sequence is synthesized)
ggttttgtatagccaggagtttattgtgattaaacatcaaagaaacaggtagaaagcctgggtttctggctgctagcgttatagcatccatgacacagaactcattacggacattccaca

SEQ ID NO: 2130 - DNA, 120 bp, Artificial Sequence
  ENSG00000003989_33 (sequence is synthesized)
acttccagggtgcacatggtaaaatctgaagcccagaattttctctcaagctgcgtggtttactggagagaaggagttggataagcacaggctcgggtattttggtagggactgtaggca

SEQ ID NO: 2131 - DNA, 120 bp, Artificial Sequence
  ENSG00000003989_34 (sequence is synthesized)
tgctcataaatccttgctgttgtcacagtacgctgaaaacccgtttgattctatacccaatcaagaatagacccttcacacaggaaatgtgaacaattgttatatatgaacactcaaatc

SEQ ID NO: 2132 - DNA, 120 bp, Artificial Sequence
  ENSG00000003989_35 (sequence is synthesized)
ttttactgtaacgaaaccaagaaacttgtttagaatgtgataggcagctaaaactgttatgcccactgtgctcaatttgaagcagaatttagtgaaaaattatttttccacattgaaaca

SEQ ID NO: 2133 - DNA, 120 bp, Artificial Sequence
  ENSG00000003989_36 (sequence is synthesized)
ctttgcagacacaaatatctatgaaaagatgctttgtcagccactgtgcctttttttctgtgaagactcaacggatgtgtgtgtttgtatgtttgttaacagttacatatgtttgtatga

SEQ ID NO: 2134 - DNA, 120 bp, Artificial Sequence
  ENSG00000003989_37 (sequence is synthesized)
gtgtatatatatatctgtgtgtgtgtatctctaacgtcagtgtataagtaagttgggtttatggtgggctttgactatgtcattaggtgggtacaaaacccaactgatgtggagaaaaat

SEQ ID NO: 2135 - DNA, 120 bp, Artificial Sequence
  ENSG00000003989_38 (sequence is synthesized)
aacccaactgatgtggagaaaaattgatgtttgatgttgatagatatgcttatacctaatttttagtttttaaactattttaaaatatactatgattttatatgtatatttcctatagac

SEQ ID NO: 2136 - DNA, 120 bp, Artificial Sequence
  ENSG00000003989_39 (sequence is synthesized)
tctaatatgaaatcactaaactctagtacattatagcaggtgctttgtaatctggaatggagaagaggtaggggcatttggggattcctgtttacttgctgctgccacaccttttccgac

SEQ ID NO: 2137 - DNA, 120 bp, Artificial Sequence
  ENSG00000003989_40 (sequence is synthesized)
tgatctgtcctggtaggtgtttattagcaaaagtcagtatcaccagctctttggcacctttctgtttctgcttgtgaattcataatgttttcaactaaattttttttttctttctcagaa

SEQ ID NO: 2138 - DNA, 120 bp, Artificial Sequence
  ENSG00000003989_41 (sequence is synthesized)
ttacctaaatgttttgtagagttttgactagtaatcaatcaaaattatataaagtcttctccagtaattaagaaatacatatgcaaattcttttgtgattgagtaaaagcagcttaaatt

SEQ ID NO: 2139 - DNA, 120 bp, Artificial Sequence
  ENSG00000003989_42 (sequence is synthesized)
acttttcttttctacattaagaaatatattctcaacattttcagtgagaatttcttgtaatggcacctcaaattttatactcttaaaaaaaaacaataatttgtgaattaccaccaaaag

SEQ ID NO: 2140 - DNA, 120 bp, Artificial Sequence
  ENSG00000003989_43 (sequence is synthesized)
gcaatggcagtcctacatttaagaatagagctatgcaaactctgttaaaaactatgaggaaaacttatattagaacttttgatatatactaaaatactgattatcttaatcacattttcc

SEQ ID NO: 2141 - DNA, 120 bp, Artificial Sequence
  ENSG00000003989_44 (sequence is synthesized)
ccagagataaacattgagagaacgaaagccaaagtgtcatttaagagagatatatatgaaaaagtaacattaatatatagaactttaccatcaccagccgtagttgatagaaaatattag

SEQ ID NO: 2142 - DNA, 120 bp, Artificial Sequence
  ENSG00000003989_45 (sequence is synthesized)
accagccgtagttgatagaaaatattagtttcagaattaccctcctttaaaaaataagagactatttgttttcttttaatttctatgaataaaagaaatttttaaaaactttaaaatttt

SEQ ID NO: 2143 - DNA, 120 bp, Artificial Sequence
  ENSG00000003989_46 (sequence is synthesized)
ctgagtgcttacaggtagttgttaaaaaaattttaaggccaggcatggtggctcgctcacacctataatcctaggatcttgggaggtcgaggcaagctgatcgcttgagcccaggagttt

SEQ ID NO: 2144 - DNA, 60 bp, Artificial Sequence
  ENSG00000003989_47 (sequence is synthesized)
gggaggtcgaggcaagctgatcgcttgagcccaggagtttaagaccggcctgagtagatg

SEQ ID NO: 2145 - DNA, 120 bp, Artificial Sequence
  ENSG00000003989_48 (sequence is synthesized)
gtgagctgagattacgccactgcactctagcctgggcaacggtgagaccctgcctcaaaaaaaataaaaataaaaataaaacactttaattagaatctatttttacctattttctaaatt

SEQ ID NO: 2146 - DNA, 120 bp, Artificial Sequence
  ENSG00000003989_49 (sequence is synthesized)
ctatttttacctattttctaaatttatttaaatgcttagcaggaagcataaggaaaagccatcggcctccaatacccatgatgacagagggagcacttgagccttgccttccctcctctt

SEQ ID NO: 2147 - DNA, 120 bp, Artificial Sequence
  ENSG00000003989_50 (sequence is synthesized)
aaatcagggtgtgttccgagattacagaacatcacaccttggcgtgatgaaatcatgccaagattctgactctccctttccggtgatactgctcatgatttctcctaatacgcttcaagc

SEQ ID NO: 2148 - DNA, 120 bp, Artificial Sequence
  ENSG00000003989_51 (sequence is synthesized)
aactgttaccacaaaaaatacagtttccgcagggctttaaaggattgagtttagcatgtatatcatgcgttattaaagttcacgtgattcatgtgaaattaactgtcctttttgctagtg

SEQ ID NO: 2149 - DNA, 120 bp, Artificial Sequence
  ENSG00000003989_52 (sequence is synthesized)
ccaaaacagtgccttctctgcacactttacttgtttataaagttctcccacatgtccttaaatatcaagggggaaagtatggatattcgcgtagcaataatgccagcaaaggtcattttc

SEQ ID NO: 2150 - DNA, 120 bp, Artificial Sequence
  ENSG00000003989_53 (sequence is synthesized)
attttttagtcatatagatatgaaaataagttcatatagatatgaaattgcttgactttattgttttggggagattttttttccttacatgattatattaaacactttaaaatagccttc

SEQ ID NO: 2151 - DNA, 120 bp, Artificial Sequence
  ENSG00000003989_54 (sequence is synthesized)
cggtttctggattttgagaagcctgatctgttattgttgtggttgttggtgtttgtaatattcattattgtttgtatatacacggtttagtcttactgatttcaaatgcattttgttatt

SEQ ID NO: 2152 - DNA, 120 bp, Artificial Sequence
  ENSG00000003989_55 (sequence is synthesized)
gctcaacccaactggtaacactgtttgctgggagcattatacttaactttgattcaccatggttgatgccactgccatgatcgctgggtcttaaagagctttccctagccactgacagcc

SEQ ID NO: 2153 - DNA, 120 bp, Artificial Sequence
  ENSG00000003989_56 (sequence is synthesized)
ccgtggagatcataatcagggccccaggctggttccaggatcaggcagcctatagagtgtgagcatctatgtgtagctacccttgttgggtgggctcttagactgatggggtaggatatg

SEQ ID NO: 2154 - DNA, 120 bp, Artificial Sequence
  ENSG00000003989_57 (sequence is synthesized)
aagtgaaagacttcaaatgcaagtaaggtagtttgggctccttaattccaaacatcccatgagtatatcaagatgaataaggaccaagggacctctgtgactcatagaagggctggctga

SEQ ID NO: 2155 - DNA, 120 bp, Artificial Sequence
  ENSG00000003989_58 (sequence is synthesized)
atcctgaagtagcatagtgggacctggtctacaatttatgcacatgcactgacagccttgctgtgccacgtgtctcaccaagacccagttgggaaagagcgtcatattgccaacaggttg

SEQ ID NO: 2156 - DNA, 120 bp, Artificial Sequence
  ENSG00000003989_59 (sequence is synthesized)
ggtttctctggcctacacctgattaatgggccctttatctttggtgtcccctaggagtgtccagttgttttattgctgtattttgttattgcagtacttaataaaaattgttgatagggc

SEQ ID NO: 2157 - DNA, 120 bp, Artificial Sequence
  ENSG00000003989_60 (sequence is synthesized)
ccaaaaccctacagaaattctatgtctgtaaaaaccaacaaaggcattggacttgtgtgaatgtacagggtttttttagtagtaattttaaatttaaatgttttaagtgatcatcagtgt

SEQ ID NO: 2158 - DNA, 120 bp, Artificial Sequence
  ENSG00000003989_61 (sequence is synthesized)
tcctttttacttataaagttggattcttttttagaatttgtaataaataaaaactgctgctttaccactgtaaaatatgctttctgatgtggtgtatttttaaaataaattttaatatgt

SEQ ID NO: 2159 - DNA, 80 bp, Artificial Sequence
  ENSG00000003989_62 (sequence is synthesized)
cttctgcagcgcggccggcgggcgctcctcttcgcgggaccagcgaggcggcggccgctgctccagcgtcccccagccgc

SEQ ID NO: 2160 - DNA, 120 bp, Artificial Sequence
  ENSG00000003989_63 (sequence is synthesized)
ctctctgcgccttgtcaacaagtcttcttggatccattttcccaatgcctcgtgtaatctatgctatggcggaggatgggttgcttttcaaatgtctagctcaaatcaattccaaaacga

SEQ ID NO: 2161 - DNA, 120 bp, Artificial Sequence
  ENSG00000004059_0 (sequence is synthesized)
ccatccccccgcggccggccagttccagcccgcaccccgcgtcggtgcccgcgcccctccccgggccccgccatgggcctcaccgtgtccgcgctcttttcgcggatcttcgggaagaag

SEQ ID NO: 2162 - DNA, 120 bp, Artificial Sequence
  ENSG00000004059_1 (sequence is synthesized)
gatcttcgggaagaagcagatgcggattctcatggttggcttggatgcggctggcaagaccacaatcctgtacaaactgaagttgggggagattgtcaccaccatcccaaccataggctt

SEQ ID NO: 2163 - DNA, 120 bp, Artificial Sequence
  ENSG00000004059_2 (sequence is synthesized)
caatgtagaaacagtggaatataagaacatctgtttcacagtctgggacgtgggaggccaggacaagattcggcctctgtggcggcactacttccagaacactcagggcctcatctttgt

SEQ ID NO: 2164 - DNA, 120 bp, Artificial Sequence
  ENSG00000004059_3 (sequence is synthesized)
ggtggacagtaatgaccgggagcgggtccaagaatctgctgatgaactccagaagatgctgcaggaggacgagctgcgggatgcagtgctgctggtatttgccaacaagcaggacatgcc

SEQ ID NO: 2165 - DNA, 120 bp, Artificial Sequence
  ENSG00000004059_4 (sequence is synthesized)
ccaggccacctgtgccacccaaggcacaggtctgtacgatggtctggactggctgtcccacgagctgtcaaagcgctaaccagccaggggcaggcccctgatgcccggaagctcctgcgt

SEQ ID NO: 2166 - DNA, 120 bp, Artificial Sequence
  ENSG00000004059_5 (sequence is synthesized)
gcatccccgggatgaccagactcccggactcctcaggcagtgccctttcctcccacttttcctcccccatagccacaggcctctgctcctgctcctgcctgcatgttctctctgttgttg

SEQ ID NO: 2167 - DNA, 120 bp, Artificial Sequence
  ENSG00000004059_6 (sequence is synthesized)
gagcctggagccttgctctctgggcacagaggggtccactctcctgcctgctgggacctatggaaggggcttcctggccaaggccccctcttccagaggaggagcagggatctgggtttc

SEQ ID NO: 2168 - DNA, 120 bp, Artificial Sequence
  ENSG00000004059_7 (sequence is synthesized)
cttttttttttctgttttgggtgtactctaggggccaggttgggagggggaaggtgagggcttcgggtggtgctataatgtggcactggatcttgagtaataaatttgctgtggtttgta

SEQ ID NO: 2169 - DNA, 120 bp, Artificial Sequence
  ENSG00000004059_8 (sequence is synthesized)
agaacactcaggtggagtgttgggaggggactttctaaccccacgggaaaaggtgttagggctgggagaacagaattgttggcctaggctgggcccccaggccaaggaaaaaacccttcc

SEQ ID NO: 2170 - DNA, 120 bp, Artificial Sequence
  ENSG00000004059_9 (sequence is synthesized)
ccacttctaccccttctgtttggctatcccctactcactcttcagaactcaccttagtcttccccagcttggacttctctttagaagcaggattctgggaccaggctgcctgatttagcc

SEQ ID NO: 2171 - DNA, 120 bp, Artificial Sequence
  ENSG00000004059_10 (sequence is synthesized)
ctcataacatgtctttatttccttgcacatctttggataaactacttcctctttgcagtggggtctctagtttgtgccatgactcctgtagagcttctatagagttctgtaaacttctgt

SEQ ID NO: 2172 - DNA, 120 bp, Artificial Sequence
  ENSG00000004139_0 (sequence is synthesized)
atctcccagctcagccgagcccgtgcccaggccacgctttgttccagccgccgcctcctctaccctacggcgtccggagccatccctcgcctgctcgctctctcctttcgcccactccct

SEQ ID NO: 2173 - DNA, 120 bp, Artificial Sequence
  ENSG00000004139_1 (sequence is synthesized)
gcatctgggcctgcatcacctttgccaaccgctcccccgatcctgccgacactcctcccccaaacttctgaccggcacccttgcctggtacccttctctccattcctccccctccatctt

SEQ ID NO: 2174 - DNA, 120 bp, Artificial Sequence
  ENSG00000004139_2 (sequence is synthesized)
ctttccccgacccctctcgggtccctcttttcccaaaacccgggtctctccgcgtggccccgcctccaggccggggatgtcccccgcggccccgcgcccatggtcctgacgctgcttctc

SEQ ID NO: 2175 - DNA, 120 bp, Artificial Sequence
  ENSG00000004139_3 (sequence is synthesized)
tccgcctacaagctgtgtcgcttcttcgccatgtcgggcccacggccgggcgccgagcggctggcggtgcctgggccagatgggggcggtggcacgggcccatggtgggctgcgggtggc

SEQ ID NO: 2176 - DNA, 120 bp, Artificial Sequence
  ENSG00000004139_4 (sequence is synthesized)
catggtgggctgcgggtggccgcgggccccgcgaagtgtcgccgggggcaggcaccgaggtgcaggacgccctggagcgcgcgctgccggagctgcagcaggccttgtccgcgctgaagc

SEQ ID NO: 2177 - DNA, 120 bp, Artificial Sequence
  ENSG00000004139_5 (sequence is synthesized)
gtgggcgccggcctggccgaggtcttccaactggtggaggaggcctggctgctgccggccgtgggccgcgaggtagcccagggtctgtgcgacgccatccgcctcgatggcggcctcgac

SEQ ID NO: 2178 - DNA, 120 bp, Artificial Sequence
  ENSG00000004139_6 (sequence is synthesized)
ctgctgttgcggctgctgcaggcgccggagttggagacgcgtgtgcaggccgcgcgcctgctggagcagatcctggtggctgagaaccgagaccgcgtggcgcgcattgggctgggcgtg

SEQ ID NO: 2179 - DNA, 120 bp, Artificial Sequence
  ENSG00000004139_7 (sequence is synthesized)
atcctgaacctggcgaaggaacgcgaacccgtagagctggcgcggagcgtggcaggcatcttggagcacatgttcaagcattcggaggagacatgccagaggctggtggcggccggcggc

SEQ ID NO: 2180 - DNA, 120 bp, Artificial Sequence
  ENSG00000004139_8 (sequence is synthesized)
ctggacgcggtgctgtattggtgccgccgcacggaccccgcgctgctgcgccactgcgcgctggcgctgggcaactgcgcgctgcacgggggccaggcggtgcagcgacgcatggtagag

SEQ ID NO: 2181 - DNA, 120 bp, Artificial Sequence
  ENSG00000004139_9 (sequence is synthesized)
aagcgcgcagccgagtggctcttcccgctcgccttctccaaggaggacgagctgcttcggctgcacgcctgcctcgcagtagcggtgttggcgactaacaaggaggtggagcgcgaggtg

SEQ ID NO: 2182 - DNA, 120 bp, Artificial Sequence
  ENSG00000004139_10 (sequence is synthesized)
gagcgctcgggcacgctggcgctcgtggagccgcttgtggcctcgctggaccctggccgcttcgcccgctgtctggtggacgccagcgacacaagccagggccgcgggcccgacgacctg

SEQ ID NO: 2183 - DNA, 120 bp, Artificial Sequence
  ENSG00000004139_11 (sequence is synthesized)
cagcgcctcgtgccgttgctcgactctaaccgcttggaggcgcagtgcatcggggctttctacctctgcgccgaggctgccatcaagagcctgcaaggcaagaccaaggtgttcagcgac

SEQ ID NO: 2184 - DNA, 120 bp, Artificial Sequence
  ENSG00000004139_12 (sequence is synthesized)
atcggcgccatccagagcctgaaacgcctggtttcctactctaccaatggcactaagtcggcgctggccaagcgcgcgctgcgcctgctgggcgaggaggtgccacggcccatcctgccc

SEQ ID NO: 2185 - DNA, 120 bp, Artificial Sequence
  ENSG00000004139_13 (sequence is synthesized)
tccgtgcccagctggaaggaggccgaggttcagacgtggctgcagcagatcggtttctccaagtactgcgagagcttccgggagcagcaggtggatggcgacctgcttctgcggctcacg

SEQ ID NO: 2186 - DNA, 120 bp, Artificial Sequence
  ENSG00000004139_14 (sequence is synthesized)
gaggaggaactccagaccgacctgggcatgaaatcgggcatcacccgcaagaggttctttagggagctcacggagctcaagaccttcgccaactattctacgtgcgaccgcagcaacctg

SEQ ID NO: 2187 - DNA, 120 bp, Artificial Sequence
  ENSG00000004139_15 (sequence is synthesized)
gcggactggctgggcagcctggacccgcgcttccgccagtacacctacggcctggtcagctgcggcctggaccgctccctgctgcaccgcgtgtctgagcagcagctgctggaagactgc

SEQ ID NO: 2188 - DNA, 120 bp, Artificial Sequence
  ENSG00000004139_16 (sequence is synthesized)
ggcatccacctgggcgtgcaccgcgcccgcatcctcacggcggccagagaaatgctacactccccgctgccctgtactggtggcaaacccagtggggacactccagatgtcttcatcagc

SEQ ID NO: 2189 - DNA, 120 bp, Artificial Sequence
  ENSG00000004139_17 (sequence is synthesized)
taccgccggaactcaggttcccagctggccagtctcctgaaggtgcacctgcagctgcatggcttcagtgtcttcattgatgtggagaagctggaagcaggcaagttcgaggacaaactc

SEQ ID NO: 2190 - DNA, 120 bp, Artificial Sequence
  ENSG00000004139_18 (sequence is synthesized)
atccagagtgtcatgggtgcccgcaactttgtgttggtgctatcacctggagcactggacaagtgcatgcaagaccatgactgcaaggattgggtgcataaggagattgtgactgcttta

SEQ ID NO: 2191 - DNA, 120 bp, Artificial Sequence
  ENSG00000004139_19 (sequence is synthesized)
agctgcggcaagaacattgtgcccatcattgatggcttcgagtggcctgagccccaggtcctgcctgaggacatgcaggctgtgcttactttcaacggtatcaagtggtcccacgaatac

SEQ ID NO: 2192 - DNA, 120 bp, Artificial Sequence
  ENSG00000004139_20 (sequence is synthesized)
caggaggccaccattgagaagatcatccgcttcctgcagggccgctcctcccgggactcatctgcaggctctgacaccagtttggagggtgctgcacccatgggtccaacctaaccagtc

SEQ ID NO: 2193 - DNA, 120 bp, Artificial Sequence
  ENSG00000004139_21 (sequence is synthesized)
cccagttccccagccctgctgtgacttccatttccatcgtcctttctgaaggaacagctcctgaaaccagtctccctgggctgagacaacctgggctcttcttaggaaatggctctccct

SEQ ID NO: 2194 - DNA, 120 bp, Artificial Sequence
  ENSG00000004139_22 (sequence is synthesized)
ccccctgtcccccaccctcatggcccacctccaacccactttcctcagtatctggagagggaagggaagtcaggcttgggcacgggaggttagaactcccccaggccctgccattgggtt

SEQ ID NO: 2195 - DNA, 120 bp, Artificial Sequence
  ENSG00000004139_23 (sequence is synthesized)
gtctgtctccgtcatggggagggtccctgctcagttctggagacactggagttggggtgggggtggttctgcattcccttctcctgctgatagcagtcagcttgaggaggatgacggaag

SEQ ID NO: 2196 - DNA, 120 bp, Artificial Sequence
  ENSG00000004139_24 (sequence is synthesized)
gcagcctcagacaggaattaaggcaatgcccaggcgggcctgggcactgtattctgagcaagggcctgggcccaggagccagccagggatgagtgccatcatggctctccactcagactg

SEQ ID NO: 2197 - DNA, 120 bp, Artificial Sequence
  ENSG00000004139_25 (sequence is synthesized)
tgcctggcccctgcacttacaacttcctgccgctctgtggccttgccctgtaatcactcagtgcccttagctagcctgactaagtcccagatcccctacagcttccttcggtgtggtatc

SEQ ID NO: 2198 - DNA, 120 bp, Artificial Sequence
  ENSG00000004139_26 (sequence is synthesized)
ttttgccacatccagggcgagggttgaggcaaaccagccctccctctgacttccttgtcactgcagccagctttgctgcacttgctggtgcacaggagcctcctgtttgggcctgggtct

SEQ ID NO: 2199 - DNA, 120 bp, Artificial Sequence
  ENSG00000004139_27 (sequence is synthesized)
gggcatggggaggccgtgcctcaaagcccaccctaccccatgccttggtgctgtgcctcaggctccttcctggtctggcccagctggcttccccagcccctcagccatccagggctaccc

SEQ ID NO: 2200 - DNA, 120 bp, Artificial Sequence
  ENSG00000004139_28 (sequence is synthesized)
actgcttactcagggaccaggcagcccccatggcagtaaaagcagcctagacagaacctgcagctctgtggaaagaggcaaagtcctgaaaaggcaaagggttgtcacttagggcagctt

SEQ ID NO: 2201 - DNA, 120 bp, Artificial Sequence
  ENSG00000004139_29 (sequence is synthesized)
ctccaactttaacatgcatccaagtcacctgggaatgttgttaaaatcaggagatctggggtggggcctaggactctgcatttcttacagattcccaggtgagctgatgctggtggttaa

SEQ ID NO: 2202 - DNA, 120 bp, Artificial Sequence
  ENSG00000004139_30 (sequence is synthesized)
gggtagcaaatctctaaagcacgaagccctcacaaatctttgccatttcccaaacactccgctccatggtctccagtcatcagagcaactctacctggtattatcatccccattttacag

SEQ ID NO: 2203 - DNA, 120 bp, Artificial Sequence
  ENSG00000004139_31 (sequence is synthesized)
ataatgacactgaggctcagaaaggttgaggataagcccactttcctgtcattagtggcagccccagatccagacctaggcctcctggcacccagtccactggcagtggaattgctttcc

SEQ ID NO: 2204 - DNA, 120 bp, Artificial Sequence
  ENSG00000004139_32 (sequence is synthesized)
tgagaatcattctgaggctgggctattgcttctcccttgcttcaaagaatctagcagcgggggataggattttgcaacaaaaagctgacccagaggccatacagagcaggaatatcccat

SEQ ID NO: 2205 - DNA, 120 bp, Artificial Sequence
  ENSG00000004139_33 (sequence is synthesized)
tgccccctcctccactgggttcagagggtaagaaagcaccctccaataaacccaggctccaggccgtgggggctgctgaaggctctttccccgcaagggccaggtgttgacaccttaaag

SEQ ID NO: 2206 - DNA, 120 bp, Artificial Sequence
  ENSG00000004139_34 (sequence is synthesized)
ctggctgcgcccccagccccactcttggctgtgctggccaggtgactcctagttcttggccacatcatcagaaagtcaaaggtctcactccaggtttggggctccttccttccactcccc

SEQ ID NO: 2207 - DNA, 120 bp, Artificial Sequence
  ENSG00000004139_35 (sequence is synthesized)
tccctgccagagtctgtcttggccagtgccagcctcgatgctttggttttgaccccacctgatcctcctttcctcatgcagcacaagtgctcaccggggccagagccagggcatggatat

SEQ ID NO: 2208 - DNA, 120 bp, Artificial Sequence
  ENSG00000004139_36 (sequence is synthesized)
gacaagcagggcagcctggacactgccctcacaggacagcgccaataacaatacagtgtctgagtatctccaggggatgatttctggctctttgtctccaatcagtcccactccctcctg

SEQ ID NO: 2209 - DNA, 120 bp, Artificial Sequence
  ENSG00000004139_37 (sequence is synthesized)
aggtccccaagggcagtattcagagaggtttcctgcgttttatttctatttggtataccctccactgttgtccactgccctgtgtggccttctggttgacctctgcccgatcttctgtct

SEQ ID NO: 2210 - DNA, 120 bp, Artificial Sequence
  ENSG00000004139_38 (sequence is synthesized)
ctctgagggaatcagagtccagcatccagccccagctggaacagctgaagtcacaagcctcctctaagccaaggccagtgtgttcagaggtgactgccacccatactaggacaaacacag

SEQ ID NO: 2211 - DNA, 120 bp, Artificial Sequence
  ENSG00000004139_39 (sequence is synthesized)
ctcagatcaccaggtcaagcacctaggcctggcttctcctgagacagaggactcagaagtggcctttcctccaaagcctgctcagacacaggtctgtagggccagggtgttctgcttggc

SEQ ID NO: 2212 - DNA, 120 bp, Artificial Sequence
  ENSG00000004139_40 (sequence is synthesized)
tgggctgcagctgctacccctcggttggggctgagtcagccagatcctccccctacttctccccaagggccaagaactgctcagggacattaaaggtcaaaagtccagccacactcattc

SEQ ID NO: 2213 - DNA, 120 bp, Artificial Sequence
  ENSG00000004139_41 (sequence is synthesized)
atcctttccccaggcccatgaagagaggcatctcattgtagaatgtatgaggaagtgggaagtatctcagagaatcagctaagtttcctaacttgtccatccaaatgtgatcaccacgat

SEQ ID NO: 2214 - DNA, 120 bp, Artificial Sequence
  ENSG00000004139_42 (sequence is synthesized)
cctggctggccccacttggtaccaatccaccaggcagctcagggctcctgcccagcccagcagcttctgttgtctaacgtatggcaggcagactgggagcaggaaaacagagggccccaa

SEQ ID NO: 2215 - DNA, 120 bp, Artificial Sequence
  ENSG00000004139_43 (sequence is synthesized)
agcccaaggcaccagaaggtttgtttcagtttgctgaagctgatttgtaatgattggcactcttcagccaggggagtgggtaggccatagccaaggatcgattccccaaccacagcaaag

SEQ ID NO: 2216 - DNA, 120 bp, Artificial Sequence
  ENSG00000004139_44 (sequence is synthesized)
gcaacactcttcctccagagatcaccaagcccctcttacctccctccctccttcccaaggctggcactaaccaggtaccacattcattgttaaggaatggctgatgactgctacacgtgt

SEQ ID NO: 2217 - DNA, 120 bp, Artificial Sequence
  ENSG00000004139_45 (sequence is synthesized)
tgggaacctggttggggctgtgcagtttgggctggaaggagagatgccagccctcgtgctgcctctggtccctgaagtgtcacctctctcaggacctctcctctggcctgtggggttata

SEQ ID NO: 2218 - DNA, 120 bp, Artificial Sequence
  ENSG00000004139_46 (sequence is synthesized)
agtgatggatagcagaaagggagaactgactcctgtcccaaatagctcctctgccacctgtcctgcagtgggcctgtgtgggttatgattctagatcctagacagaggctgggtcagctg

SEQ ID NO: 2219 - DNA, 120 bp, Artificial Sequence
  ENSG00000004139_47 (sequence is synthesized)
tggatggggtggtgccttggtctctcttgactacctcgtccaaagagagcactgcccttagacaagagttgcttgtcctgctgtgggctgggcttccagctgcagacctccagttgcttg

SEQ ID NO: 2220 - DNA, 120 bp, Artificial Sequence
  ENSG00000004139_48 (sequence is synthesized)
gtgttcactttgctcctcttgccctctgtcttctggtccaggcagatcaggggctctggggaaactgctggaactcgaggtgaggatcagccttttccagcatcctgtgagagaccagag

SEQ ID NO: 2221 - DNA, 120 bp, Artificial Sequence
  ENSG00000004139_49 (sequence is synthesized)
agagagtttggatttcatgtggggaaccctcaaggcctgtctggagaagtgacacaggatttactggggtgggctggtccaggtagctctcctgaacctcctccttccccaagctgagaa

SEQ ID NO: 2222 - DNA, 88 bp, Artificial Sequence
  ENSG00000004139_50 (sequence is synthesized)
aggtagctctcctgaacctcctccttccccaagctgagaagctgagagctggaggacaatatccagggacatggctctggaaaataac

SEQ ID NO: 2223 - DNA, 82 bp, Artificial Sequence
  ENSG00000004139_51 (sequence is synthesized)
gcctcagcctccttagtagctgggactaccagtgcataccaccatgcctgggtgattttttaaattttttatacttcccggg

SEQ ID NO: 2224 - DNA, 120 bp, Artificial Sequence
  ENSG00000004139_52 (sequence is synthesized)
agtggtcctcctgcctcagcctcccacaggatcgggattacaggcaagagcctccacgcccggccatgaaatataattcttaatatcatacaggaaaaagtcagcgggtcaagctagcct

SEQ ID NO: 2225 - DNA, 120 bp, Artificial Sequence
  ENSG00000004139_53 (sequence is synthesized)
taatatcatacaggaaaaagtcagcgggtcaagctagcctgtggcccagccacaactagctgacaaagcttcctggccttccctttaacacagttctgctgccatagttccatctataaa

SEQ ID NO: 2226 - DNA, 120 bp, Artificial Sequence
  ENSG00000004139_54 (sequence is synthesized)
atgggaatggagggaaataggggaactgggagagagaacacagccttgccaagcagcaatgttagcctgatccttcctccacctagctcgccatctcgcccttggaaaatggctcctgga

SEQ ID NO: 2227 - DNA, 120 bp, Artificial Sequence
  ENSG00000004139_55 (sequence is synthesized)
ggattaggcagccatctgcaaggagaggggcaacctgggacaagacacccagagggtaaggattccaggaatgaagctgccatttctggttgggaggagaagaggaaacttttaagagaa

SEQ ID NO: 2228 - DNA, 120 bp, Artificial Sequence
  ENSG00000004139_56 (sequence is synthesized)
agggctccattatgagcatgggttcagggccctgcattacccaatcagaacagccgggatgagcaggaggccagctcccaggaggaaggggaaccccttcataaagttcagagtggctgg

SEQ ID NO: 2229 - DNA, 120 bp, Artificial Sequence
  ENSG00000004139_57 (sequence is synthesized)
gtagagtgagttgaagatgccggaggccgtcagcatggccaggctattcacacaggccacagcagaaaagagagcacctgtgaagaaataaataccatactctggagtccgaaagggcca

SEQ ID NO: 2230 - DNA, 120 bp, Artificial Sequence
  ENSG00000004139_58 (sequence is synthesized)
tattccaactctggcaccaccacctcacagctgtgtgaccgggagtagtcacttaacctatgtctccccttcctcaccagtaaatcctgctacatcatgtactgtgacaaggattcagta

SEQ ID NO: 2231 - DNA, 120 bp, Artificial Sequence
  ENSG00000004139_59 (sequence is synthesized)
aggtcatatgtggacagtagctggcacagaggggctactaaacaaatggctgctattaaatccacattaaaagtacatgtgatctgacagaacccagcacataaaagaaaaaaaaagtac

SEQ ID NO: 2232 - DNA, 120 bp, Artificial Sequence
  ENSG00000004139_60 (sequence is synthesized)
atgtgatattgtctgatgaaagcttgatggaaatggcttttttctggtttatcctctttggaatcatctcctgtttgggattaactgctggtctgatcagttccaatattcatagcggtg

SEQ ID NO: 2233 - DNA, 120 bp, Artificial Sequence
  ENSG00000004139_61 (sequence is synthesized)
tcaccactgaatagcttcttatcctttgggttcctgttcctccttctgctaaataaggataatacctatttcctagattgtgagcaacattaagttcacatggaaatcacccatcactgg

SEQ ID NO: 2234 - DNA, 120 bp, Artificial Sequence
  ENSG00000004139_62 (sequence is synthesized)
gcctggtcccctggaagtagctagttagtaagggctgttcttttctcctgtttctcttgacatctctgggcacagagaaagtgctgggaaaaaaagtttaggtgaatgaatgaagacaca

SEQ ID NO: 2235 - DNA, 120 bp, Artificial Sequence
  ENSG00000004139_63 (sequence is synthesized)
tggattctggggacaccagaacccacagtgggctctgtatggcaccagagtctctgtcatcatcagatcctcattccaggacagatggaaaaagatgaatgtttccagactggggcataa

SEQ ID NO: 2236 - DNA, 120 bp, Artificial Sequence
  ENSG00000004139_64 (sequence is synthesized)
agacccagaggctggagaagctgttctttatagatataccaggagaacccacagtttacaaaatgtgcaacaacccaacagaagttgagattaaattctgtcacatctagaggggtctgt

SEQ ID NO: 2237 - DNA, 120 bp, Artificial Sequence
  ENSG00000004139_65 (sequence is synthesized)
gatgtcatcaaaagcaaaccacccacatcacagatgaagaaacaggcctgtggcagggctcggactaaaacccagatcctgagaccagctgcttttaaacacagacgtaggtttgcatcc

SEQ ID NO: 2238 - DNA, 120 bp, Artificial Sequence
  ENSG00000004139_66 (sequence is synthesized)
tagctccaccatttactgagtaaccttgggtgagccaatgtaaccccctgggtctctgtttctttatctgtcaactgtggaaaatgaaacccatgtcacaaggttgttcacttctgggct

SEQ ID NO: 2239 - DNA, 120 bp, Artificial Sequence
  ENSG00000004139_67 (sequence is synthesized)
tgtacacgctgaccccagagaaacagggaactctggcatcaccacacccatcttacagacggaaaagctgaggtctgcagagagtaaatcctctgctctggttatctagaaagaacataa

SEQ ID NO: 2240 - DNA, 120 bp, Artificial Sequence
  ENSG00000004139_68 (sequence is synthesized)
ttgtgctctgctgactgcaaatcccaactctgcggtttgaaaatccaaggtggcatgatcctctgcccattgtgggcaatttcacagaaatgtgtttgttttggccacttacttctccag

SEQ ID NO: 2241 - DNA, 120 bp, Artificial Sequence
  ENSG00000004139_69 (sequence is synthesized)
ggtgagaggggggaaggcaagctgttcccccagccatggctgcccatcagcccgtttcgggcagcactggacatgaggaaccagacacaggtgggttctgacactcaccctgctctgtct

SEQ ID NO: 2242 - DNA, 120 bp, Artificial Sequence
  ENSG00000004139_70 (sequence is synthesized)
ctctcaccagcttggagagtttagcccggatgacaggtgtgatgactaatgacaggaaaagcaacccatatcctgtggagaaacaaacactcatcaggaaaatggggctggggagagggg

SEQ ID NO: 2243 - DNA, 120 bp, Artificial Sequence
  ENSG00000004139_71 (sequence is synthesized)
cgtccaagggaaaggcagcagagctcctatccataccccacgtggggcttaggttagacccaggaagaacttccttgatggtgagggtgggaagacagtagtcaaggaggaatggagact

SEQ ID NO: 2244 - DNA, 120 bp, Artificial Sequence
  ENSG00000004139_72 (sequence is synthesized)
gcccttgtctgggcttggccacctgctagctctcatgaatgaatgctaattcccattgattgctttcttgtctgaacctcttgtggtcacagcaggcatcacccacccacttggcactta

SEQ ID NO: 2245 - DNA, 120 bp, Artificial Sequence
  ENSG00000004139_73 (sequence is synthesized)
gtagggatatggcagggcacagaaaacaagcatgggctttggagtcagccctgagttcaaaacctgatgccattacatattatctgtgtggcctggggtacttaccctctctgatcctga

SEQ ID NO: 2246 - DNA, 120 bp, Artificial Sequence
  ENSG00000004139_74 (sequence is synthesized)
ctccctgtatgaggaagataataaggccttcatcacaggatggttctgaggcataggaggctgaataatggtgcccaatggcatcagattcatagccctggaacctgtaaatactacctt

SEQ ID NO: 2247 - DNA, 120 bp, Artificial Sequence
  ENSG00000004139_75 (sequence is synthesized)
atttggaaaatgagtctatgcaggtgtgcagttaagcctcctgagagagcagagttatcctggattaggttgggccctaaatgccgtcacacatatctttataagaggaaagcagacgga

SEQ ID NO: 2248 - DNA, 120 bp, Artificial Sequence
  ENSG00000004139_76 (sequence is synthesized)
gatttggcaccgacagaattgagaaggcacaaagaggaggagagtcaatgtgagcacagaggcagagactggtgatggccgccccaagccaaggaatgccagcagccccagaagctggaa

SEQ ID NO: 2249 - DNA, 120 bp, Artificial Sequence
  ENSG00000004139_77 (sequence is synthesized)
gaaatgagaaacacgttctctcctggaggcttgcaagggagcactgcctgctgactgcttccattcagcccggtggtactgactttggacttctggcctccagaactgtgagagaatatg

SEQ ID NO: 2250 - DNA, 120 bp, Artificial Sequence
  ENSG00000004139_78 (sequence is synthesized)
tttctgttgtgttaagcccccaagtttgtggtatgtcattacagcaatctcagggaaccaatacatgaggtaaaaaggtaacatctatgaagagcatggcatagggacacagcaaatggg

SEQ ID NO: 2251 - DNA, 120 bp, Artificial Sequence
  ENSG00000004139_79 (sequence is synthesized)
agttccttttccctttgcattcagttacttacaggcttcctgttttcttcataaccatttctctccctgtgcgactgctgactcctcagcaaaactgcaaactcctacaggacagtggat

SEQ ID NO: 2252 - DNA, 120 bp, Artificial Sequence
  ENSG00000004139_80 (sequence is synthesized)
cctccaaagaaggtatacgatgaggcatccagggaccctagcagtgtcaggcccctcaaatcccactctgttgagacctccccccgacccagagcaatgacagcatctttatcatctctg

SEQ ID NO: 2253 - DNA, 120 bp, Artificial Sequence
  ENSG00000004139_81 (sequence is synthesized)
catcccccagggccatcagcaggagggaaaggttcccttctgcttaattgtcagacaagcagttgagttaagaaatctgtgattattgtattgttgactatacacagcacattttagggc

SEQ ID NO: 2254 - DNA, 81 bp, Artificial Sequence
  ENSG00000004139_82 (sequence is synthesized)
gattattgtattgttgactatacacagcacattttagggctctatcaaaataaatctgtccctttaaaaaaagttaactaa

SEQ ID NO: 2255 - DNA, 120 bp, Artificial Sequence
  ENSG00000004139_83 (sequence is synthesized)
gagacctggactgggcaaaatggtgaggaccccatctctataaaaaatacaaaaattagcaaggtgtggtaatgtgcaccagtggtcccagctactagagaggccaaggtgggaggatca

SEQ ID NO: 2256 - DNA, 76 bp, Artificial Sequence
  ENSG00000004139_84 (sequence is synthesized)
tctgggcccgggggatgtaacaaagcgagaccctgtctctaaatacatcaatcaaataaaaattttaaaaagttaa

SEQ ID NO: 2257 - DNA, 120 bp, Artificial Sequence
  ENSG00000004139_85 (sequence is synthesized)
gcttttgggggcggggagcctgtacgcagccaccgttagggtcactcggctctgatctaggtcccatccgcctcctccacgccatctccagttccttcccttgcatcttgtgctcgaggt

SEQ ID NO: 2258 - DNA, 120 bp, Artificial Sequence
  ENSG00000004139_86 (sequence is synthesized)
tcctcacggcggccagagcaattacagactaagcacccacaagacacaagggactgagctttggctgcattcttatgcttcaaccaaagcagaaatgctacactccccgctgccctgtac

SEQ ID NO: 2259 - DNA, 120 bp, Artificial Sequence
  ENSG00000004139_87 (sequence is synthesized)
acgttgcactttacctcaagaagttcccagtctgagaaatgctacactccccgctgccctgtactggtggcaaacccagtggggacactccagatgtcttcatcagctaccgccggaact

SEQ ID NO: 2260 - DNA, 120 bp, Artificial Sequence
  ENSG00000004139_88 (sequence is synthesized)
aaagaagggtggacctctgaagccccagctgatccccatggggctacagctttagccccttcccagccctgccgtggactcaagccaggagctggacaggagctatgtcgacacactgag

SEQ ID NO: 2261 - DNA, 120 bp, Artificial Sequence
  ENSG00000004139_89 (sequence is synthesized)
aataacatgaccttcctcctggaggccccatttctcctttttggggcaggccaccctccccaggctgggctgagagggcttggtggactggggactaagtccacaagggatgatatacct

SEQ ID NO: 2262 - DNA, 120 bp, Artificial Sequence
  ENSG00000004142_0 (sequence is synthesized)
gtcgggctctgtgtcagcagccgggcgggcgctcgggcgggacatggcagcctgtacagcccggcgggccctggccgtgggcagccgctggtggtcccggtcgctgactggggcccggtg

SEQ ID NO: 2263 - DNA, 120 bp, Artificial Sequence
  ENSG00000004142_1 (sequence is synthesized)
ccgctggtggtcccggtcgctgactggggcccggtggccaaggccgctctgtgcggcggccggagctggagccttctcgccagcgtcgaccacgacgacgcggaggcacctctcgtcccg

SEQ ID NO: 2264 - DNA, 120 bp, Artificial Sequence
  ENSG00000004142_2 (sequence is synthesized)
aaaccgaccagagggcaaagtgttggagacagttggtgtgtttgaggtgccaaaacagaatggaaaatatgagaccgggcagcttttccttcatagcatttttggctaccgaggtgtcgt

SEQ ID NO: 2265 - DNA, 120 bp, Artificial Sequence
  ENSG00000004142_3 (sequence is synthesized)
cctgtttccctggcaggccagactgtatgaccgggatgtggcttctgcagctccagaaaaagcagagaaccctgctggccatggctccaaggaggtgaaaggcaaaactcacacttacta

SEQ ID NO: 2266 - DNA, 120 bp, Artificial Sequence
  ENSG00000004142_4 (sequence is synthesized)
tcaggtgctgattgatgctcgtgactgcccacatatatctcagagatctcagacagaagctgtgaccttcttggctaaccatgatgacagtcgggccctctatgccatcccaggcttgga

SEQ ID NO: 2267 - DNA, 120 bp, Artificial Sequence
  ENSG00000004142_5 (sequence is synthesized)
ctatgtcagccatgaagacatcctcccctacacctccactgatcaggttcccatccaacatgaactctttgaaagatttcttctgtatgaccagacaaaagcacctccttttgtggctcg

SEQ ID NO: 2268 - DNA, 120 bp, Artificial Sequence
  ENSG00000004142_6 (sequence is synthesized)
ggagacgctaagggcctggcaagagaagaatcacccctggctggagctctccgatgttcatcgggaaacaactgagaacatacgtgtcactgtcatccccttctacatgggcatgaggga

SEQ ID NO: 2269 - DNA, 120 bp, Artificial Sequence
  ENSG00000004142_7 (sequence is synthesized)
agcccagaattcccacgtgtactggtggcgctactgtatccgtttggagaaccttgacagtgatgtggtacagctccgggagcggcactggaggatattcagtctctctggcaccttgga

SEQ ID NO: 2270 - DNA, 120 bp, Artificial Sequence
  ENSG00000004142_8 (sequence is synthesized)
gacagtgcgaggccgaggggtagtgggcagggaaccagtgttatccaaggagcagcctgcgttccagtatagcagccacgtctcgctgcaggcttccagtgggcacatgtggggcacgtt

SEQ ID NO: 2271 - DNA, 120 bp, Artificial Sequence
  ENSG00000004142_9 (sequence is synthesized)
ccgctttgaaagacctgatggctcccactttgatgttcggattcctcccttctccctggaaagcaataaagatgagaagacaccaccctcaggccttcactggtaggccagctgaggccc

SEQ ID NO: 2272 - DNA, 120 bp, Artificial Sequence
  ENSG00000004142_10 (sequence is synthesized)
caagtgcccaggcttggtcaccgggaagaacaactctcatcccacaattgctgcagaactcttctctccccatcatgggccacagtgggtctcttaatttgattgtggggttctttttgt

SEQ ID NO: 2273 - DNA, 120 bp, Artificial Sequence
  ENSG00000004142_11 (sequence is synthesized)
gacccatgtgggacacctccaaggctggcctcctcataagccctgcctacaccatgttccagtaaacctctccaccaaggaactgtgttcagctgccacaggcctggaggagtttcctgg

SEQ ID NO: 2274 - DNA, 120 bp, Artificial Sequence
  ENSG00000004142_12 (sequence is synthesized)
cctgtcacgtgaggtttgatcagtaaaccagtgcacgcttggccacccttgccatttctgctcccagagtctcaggctccccttctgacccagtgtgcgcccttgactgctttctttgct

SEQ ID NO: 2275 - DNA, 120 bp, Artificial Sequence
  ENSG00000004142_13 (sequence is synthesized)
gcccttccagggagctgcccccctggtagggcatgtgcctgtttccctctcagcctggaggctggctggacatctcctagggtcactgtgcctctcagctagttggcgggggtgctggac

SEQ ID NO: 2276 - DNA, 120 bp, Artificial Sequence
  ENSG00000004142_14 (sequence is synthesized)
tggactcttgttcactttaccttctgccaaatgcagagagggaggccagtgtcagggtcggagtggcctggctcttagcactgaccgaccattgccatttctggcctcgctaggcccagg

SEQ ID NO: 2277 - DNA, 120 bp, Artificial Sequence
  ENSG00000004142_15 (sequence is synthesized)
agaggagggaggcaagccagtcgggtttcctggagcaatgggtgtgccagccctcagcatgactctgccaagcatccagaccacaaatgcaggaatttggctgaggagcagctttaggta

SEQ ID NO: 2278 - DNA, 120 bp, Artificial Sequence
  ENSG00000004142_16 (sequence is synthesized)
tggattgatgactaagtcaagctacttcctgagcttctctcagatttccaagagccagagatgaattgtgctgcatcttgccccaattcttaggatttcttttcctccgccactgcagtg

SEQ ID NO: 2279 - DNA, 120 bp, Artificial Sequence
  ENSG00000004142_17 (sequence is synthesized)
attgttagaggtagttttcttgaattaatattaaatcacagttccagcccttgttattcttgtccttagtcctccagggggagctggggttgcagggcaacagtacagtcgcgcttacga

SEQ ID NO: 2280 - DNA, 120 bp, Artificial Sequence
  ENSG00000004142_18 (sequence is synthesized)
cctggctagaacacaaggtcagatgataaacagaagcacaggaactcagcccatggccgcaagctggtcaaggcctgctcactgtaaacatggctctgtaccattgagtttaacacaatt

SEQ ID NO: 2281 - DNA, 120 bp, Artificial Sequence
  ENSG00000004142_19 (sequence is synthesized)
ttattagaaattagtgtttgcttccatcacttatgctgagcaaccaaatattacagttatgtgataaaggaaaaattctttcctgcccaggacctgcgccatcctttaggccgaccttgg

SEQ ID NO: 2282 - DNA, 120 bp, Artificial Sequence
  ENSG00000004142_20 (sequence is synthesized)
tcacataccaaattcaataaaacccaatactggcctgtgttgttaacagcaggctgccaggtttctcagaaactgacaagaaaatctgaccttcatccatactttgtttacttacccctg

SEQ ID NO: 2283 - DNA, 120 bp, Artificial Sequence
  ENSG00000004142_21 (sequence is synthesized)
ggctgcttggagttgaaaaatgcacacagccaagagttgctttctgaatagggctggaaactttcaaagaaaacccccaaacttttaagtcacaaagtctgattaaagaagctaagatca

SEQ ID NO: 2284 - DNA, 120 bp, Artificial Sequence
  ENSG00000004399_0 (sequence is synthesized)
cgccgttccagacgccgccgcggtgcccggtgccgctgctgttgctgctgctcctgggggcggcgcgggccggcgccctggagatccagcgtcggttcccctcgcccacgcccaccaaca

SEQ ID NO: 2285 - DNA, 120 bp, Artificial Sequence
  ENSG00000004399_1 (sequence is synthesized)
acttcgccctggacggcgcggcggggaccgtgtacctggcggccgtcaaccgcctctatcagctgtcgggcgccaacctgagcctggaggccgaggcggccgtgggcccggtgcccgaca

SEQ ID NO: 2286 - DNA, 120 bp, Artificial Sequence
  ENSG00000004399_2 (sequence is synthesized)
gcccgctgtgtcacgctccgcagctgccgcaggcctcgtgcgagcacccgcggcgcctcacggacaactacaacaagatcctgcagctggaccccggccagggcctggtagtcgtgtgcg

SEQ ID NO: 2287 - DNA, 120 bp, Artificial Sequence
  ENSG00000004399_3 (sequence is synthesized)
ggtccatctaccagggcttctgccagctgcggcgccggggcaacatctcggccgtggccgtgcgcttcccgcccgccgcgccgcccgccgagcccgtcacggtgttccccagcatgctga

SEQ ID NO: 2288 - DNA, 120 bp, Artificial Sequence
  ENSG00000004399_4 (sequence is synthesized)
acgtggcggccaaccacccgaacgcgtccaccgtggggctagttctgcctcccgccgcgggcgcggggggcagccgcctgctcgtgggcgccacgtacaccggttacggcagctccttct

SEQ ID NO: 2289 - DNA, 120 bp, Artificial Sequence
  ENSG00000004399_5 (sequence is synthesized)
tcccgcgcaaccgcagcctggaggaccaccgcttcgagaacacgcccgagatcgccatccgctccctggacacgcgcggcgacctggccaagctcttcaccttcgacctcaacccctccg

SEQ ID NO: 2290 - DNA, 120 bp, Artificial Sequence
  ENSG00000004399_6 (sequence is synthesized)
acgacaacatcctcaagatcaagcagggcgccaaggagcagcacaagctgggcttcgtgagcgccttcctgcacccgtccgacccgccgccgggtgcacagtcctacgcgtacctggcgc

SEQ ID NO: 2291 - DNA, 120 bp, Artificial Sequence
  ENSG00000004399_7 (sequence is synthesized)
tcaacagcgaggcgcgcgcgggcgacaaggagagccaggcgcggagcctgctggcgcgcatctgcctgccccacggcgccggcggcgacgccaagaagctcaccgagtcctacatccagt

SEQ ID NO: 2292 - DNA, 120 bp, Artificial Sequence
  ENSG00000004399_8 (sequence is synthesized)
tgggcttgcagtgcgcgggcggcgcgggccgcggcgacctctacagccgcctggtgtcggtcttcccagcccgggagcggctctttgctgtcttcgagcggccccaggggtcccccgcgg

SEQ ID NO: 2293 - DNA, 120 bp, Artificial Sequence
  ENSG00000004399_9 (sequence is synthesized)
cccgcgctgctccggccgcactctgcgccttccgcttcgccgacgtgcgagccgccatccgagctgcgcgcaccgcctgcttcgtggaaccggcgcccgacgtggtggcggtgctcgaca

SEQ ID NO: 2294 - DNA, 120 bp, Artificial Sequence
  ENSG00000004399_10 (sequence is synthesized)
gcgtggtgcagggcacgggaccggcctgtgagcgcaagctcaacatccagctccagccagagcagctggactgtggagctgctcacctgcagcacccgctgtccatcctgcagcccctga

SEQ ID NO: 2295 - DNA, 120 bp, Artificial Sequence
  ENSG00000004399_11 (sequence is synthesized)
aggccacgcccgtgttccgcgccccgggcctcacctccgtggccgtggccagcgtcaacaactacacagcggtcttcctgggcacggtcaacgggaggcttctcaagatcaacctgaacg

SEQ ID NO: 2296 - DNA, 120 bp, Artificial Sequence
  ENSG00000004399_12 (sequence is synthesized)
agagcatgcaggtggtgagcaggcgggtggtgactgtggcctatggggagcccgtgcaccatgtcatgcagtttgacccagcagactccggttacctttacctgatgacgtcccaccaga

SEQ ID NO: 2297 - DNA, 120 bp, Artificial Sequence
  ENSG00000004399_13 (sequence is synthesized)
tggccagggtgaaggtcgccgcctgcaacgtgcactccacctgtggggactgcgtgggtgcggcggacgcctactgcggctggtgtgccctggagacgcggtgcaccttgcagcaggact

SEQ ID NO: 2298 - DNA, 120 bp, Artificial Sequence
  ENSG00000004399_14 (sequence is synthesized)
gcaccaattccagccagcagcatttctggaccagtgccagcgagggccccagccgctgtcctgccatgaccgtcctgccttccgagatcgatgtgcgccaggagtacccaggcatgatcc

SEQ ID NO: 2299 - DNA, 120 bp, Artificial Sequence
  ENSG00000004399_15 (sequence is synthesized)
tgcagatctcgggcagcctgcccagcctcagtggcatggagatggcctgtgactatgggaacaacatccgcactgtggctcgggtcccaggccctgcctttggtcaccagattgcctact

SEQ ID NO: 2300 - DNA, 120 bp, Artificial Sequence
  ENSG00000004399_16 (sequence is synthesized)
gcaacctcctgccgagggaccagtttccgcccttcccccccaaccaggaccacgtgactgttgagatgtctgtgagggtcaatgggcggaacatcgtcaaggccaatttcaccatctacg

SEQ ID NO: 2301 - DNA, 120 bp, Artificial Sequence
  ENSG00000004399_17 (sequence is synthesized)
actgcagccgcactgcacaagtgtacccccacacagcctgtaccagctgcctgtcggcacagtggccctgtttctggtgcagccagcagcactcctgtgtttccaaccagtctcggtgcg

SEQ ID NO: 2302 - DNA, 120 bp, Artificial Sequence
  ENSG00000004399_18 (sequence is synthesized)
aggcctcaccaaaccccacgagccctcaggactgcccccggaccctgctctcacccctggcacccgtgcctacgggtggctcccagaacatcctggtgcctctggccaacactgcctttt

SEQ ID NO: 2303 - DNA, 120 bp, Artificial Sequence
  ENSG00000004399_19 (sequence is synthesized)
tccagggtgcagccctggagtgtagttttgggctggaggagatcttcgaggctgtgtgggtgaatgagtctgttgtacgctgtgaccaggtggtgctgcacacgacccggaagagccagg

SEQ ID NO: 2304 - DNA, 120 bp, Artificial Sequence
  ENSG00000004399_20 (sequence is synthesized)
tgttcccgctcagcctccaactaaaggggcggccagcccgattcctggacagccctgagcccatgacagtcatggtctataactgtgccatgggcagccccgactgttcccagtgcctgg

SEQ ID NO: 2305 - DNA, 120 bp, Artificial Sequence
  ENSG00000004399_21 (sequence is synthesized)
gccgcgaagacctgggtcacctgtgcatgtggagtgatggctgccgcctgcgggggcctctgcagcccatggctggcacctgccccgcccccgagatccacgcgattgagcccctgagtg

SEQ ID NO: 2306 - DNA, 120 bp, Artificial Sequence
  ENSG00000004399_22 (sequence is synthesized)
gcccgttggacggtgggaccctgctgaccatccgaggaaggaacctgggccggcggctcagtgacgtggcccacggcgtgtggattggtggtgtggcctgtgagccactgcctgacagat

SEQ ID NO: 2307 - DNA, 120 bp, Artificial Sequence
  ENSG00000004399_23 (sequence is synthesized)
acacggtgtcggaggagatcgtgtgtgtcacagggccagccccaggaccactctcaggtgtggtgaccgtgaacgcctctaaggagggcaagtcccgggaccgcttctcctacgtgctgc

SEQ ID NO: 2308 - DNA, 120 bp, Artificial Sequence
  ENSG00000004399_24 (sequence is synthesized)
ccctggtccactccctggagcctaccatgggccccaaggccgggggcaccaggatcaccatccatgggaatgacctccatgtaggctccgagctccaggtcctggtgaacgacacagacc

SEQ ID NO: 2309 - DNA, 120 bp, Artificial Sequence
  ENSG00000004399_25 (sequence is synthesized)
cctgcacggagctgatgcgcacagataccagcatcgcctgcaccatgcctgagggggccctgccggctccggtgcctgtgtgtgtgcgcttcgagcgtcggggctgcgtgcacggcaacc

SEQ ID NO: 2310 - DNA, 120 bp, Artificial Sequence
  ENSG00000004399_26 (sequence is synthesized)
tcaccttctggtacatgcagaacccggtcatcacggccatcagtccccgccgcagccctgtcagtggcggcaggaccatcacagtggctggtgagcgtttccacatggtgcagaatgtgt

SEQ ID NO: 2311 - DNA, 120 bp, Artificial Sequence
  ENSG00000004399_27 (sequence is synthesized)
cacattggccgggagcccacgctctgcaaggttctcaactccaccctcatcacctgcccgtcccccggggccctgagcaacgcatcagcgccagtggacttcttcatcaatgggcgggcc

SEQ ID NO: 2312 - DNA, 120 bp, Artificial Sequence
  ENSG00000004399_28 (sequence is synthesized)
tacgcagacgaggtggctgtggctgaggagctactggaccccgaggaggcacagcggggcagcaggttccgcctggactacctccccaacccacagttctctacggccaagagggagaag

SEQ ID NO: 2313 - DNA, 120 bp, Artificial Sequence
  ENSG00000004399_29 (sequence is synthesized)
tggatcaagcaccaccccggggagcctctcaccctcgttatccacaaggagcaggacagcctggggctccagagtcacgagtaccgggtcaagataggccaagtaagctgcgacatccag

SEQ ID NO: 2314 - DNA, 120 bp, Artificial Sequence
  ENSG00000004399_30 (sequence is synthesized)
attgtctctgacagaatcatccactgctcggtcaacgagtccctgggcgcggccgtggggcagctgcccatcacaatccaggtagggaacttcaaccagaccatcgccacactgcagctg

SEQ ID NO: 2315 - DNA, 120 bp, Artificial Sequence
  ENSG00000004399_31 (sequence is synthesized)
gggggcagcgagacggccatcatcgtgtccatcgtcatctgcagcgtcctgctgctgctctccgtggtggccctgttcgtcttctgtaccaagagccgacgtgctgagcgttactggcag

SEQ ID NO: 2316 - DNA, 120 bp, Artificial Sequence
  ENSG00000004399_32 (sequence is synthesized)
aagacgctgctgcagatggaggagatggaatctcagatccgagaggaaatccgcaaaggcttcgctgagctgcagacagacatgacagatctcaccaaggagctgaaccgcagccagggc

SEQ ID NO: 2317 - DNA, 120 bp, Artificial Sequence
  ENSG00000004399_33 (sequence is synthesized)
atccccttcctggagtataagcacttcgtgacccgcaccttcttccccaagtgttcctccctttatgaagagcgttacgtgctgccctcccagaccctcaactcccagggcagctcccag

SEQ ID NO: 2318 - DNA, 120 bp, Artificial Sequence
  ENSG00000004399_34 (sequence is synthesized)
gcacaggaaacccacccactgctgggagagtggaagattcctgagagctgccggcccaacatggaagagggaattagcttgttctcctcactactcaacaacaagcacttcctcatcgtc

SEQ ID NO: 2319 - DNA, 120 bp, Artificial Sequence
  ENSG00000004399_35 (sequence is synthesized)
tttgtccacgcgctggagcagcagaaggactttgcggtgcgcgacaggtgcagcctggcctcgctgctgaccatcgcgctgcacggcaagctggagtactacaccagcatcatgaaggag

SEQ ID NO: 2320 - DNA, 120 bp, Artificial Sequence
  ENSG00000004399_36 (sequence is synthesized)
ctgctggtggacctcattgacgcctcggccgccaagaaccccaagctcatgctgcggcgcacagagtctgtggtggagaagatgctcaccaactggatgtccatctgcatgtacagctgt

SEQ ID NO: 2321 - DNA, 120 bp, Artificial Sequence
  ENSG00000004399_37 (sequence is synthesized)
ctgcgggagacggtgggggagccattcttcctgctgctgtgtgccatcaagcagcaaatcaacaagggctccatcgacgccatcacaggcaaggcccgctacacactcagtgaggagtgg

SEQ ID NO: 2322 - DNA, 120 bp, Artificial Sequence
  ENSG00000004399_38 (sequence is synthesized)
ctgctgcgggagaacatcgaggccaagccccggaacctgaacgtgtccttccagggctgtggcatggactcgctgagcgtgcgggccatggacaccgacacgctgacacaggtcaaggag

SEQ ID NO: 2323 - DNA, 120 bp, Artificial Sequence
  ENSG00000004399_39 (sequence is synthesized)
aagatcctggaggccttctgcaagaatgtgccctactcccagtggccgcgtgcagaggacgtcgaccttgagtggttcgcctccagcacacagagctacatccttcgggacctggacgac

SEQ ID NO: 2324 - DNA, 120 bp, Artificial Sequence
  ENSG00000004399_40 (sequence is synthesized)
acctcagtggtggaagacggccgcaagaagcttaacacgctggcccattacaagatccctgaaggtgcctccctggccatgagtctcatagacaagaaggacaacacactgggccgagtg

SEQ ID NO: 2325 - DNA, 120 bp, Artificial Sequence
  ENSG00000004399_41 (sequence is synthesized)
aaagacttggacacagagaagtatttccatttggtgctgcctacggacgagctggcggagcccaagaagtctcaccggcagagccatcgcaagaaggtgctcccggaaatctacctgacc

SEQ ID NO: 2326 - DNA, 120 bp, Artificial Sequence
  ENSG00000004399_42 (sequence is synthesized)
cgcctgctctccaccaagggcacgttgcagaagtttctggatgacctgttcaaggccattctgagtatccgtgaagacaagcccccactggctgtcaagtactttttcgacttcctggag

SEQ ID NO: 2327 - DNA, 120 bp, Artificial Sequence
  ENSG00000004399_43 (sequence is synthesized)
gagcaggctgagaagaggggaatctccgaccccgacaccctacacatctggaagaccaacagccttcctctccggttctgggtgaacatcctgaagaacccccagtttgtctttgacatc

SEQ ID NO: 2328 - DNA, 120 bp, Artificial Sequence
  ENSG00000004399_44 (sequence is synthesized)
gacaagacagaccacatcgacgcctgcctttcagtcatcgcgcaggccttcatcgacgcctgctccatctctgacctgcagctgggcaaggattcgccaaccaacaagctcctctacgcc

SEQ ID NO: 2329 - DNA, 120 bp, Artificial Sequence
  ENSG00000004399_45 (sequence is synthesized)
aaggagattcctgagtaccggaagatcgtgcagcgctactacaagcagatccaggacatgacgccgctcagcgagcaagagatgaatgcccatctggccgaggagtcgaggaaataccag

SEQ ID NO: 2330 - DNA, 120 bp, Artificial Sequence
  ENSG00000004399_46 (sequence is synthesized)
aatgagttcaacaccaatgtggccatggcagagatttataagtacgccaagaggtatcggccgcagatcatggccgcgctggaggccaaccccacggcccggaggacacaactgcagcac

SEQ ID NO: 2331 - DNA, 120 bp, Artificial Sequence
  ENSG00000004399_47 (sequence is synthesized)
aagtttgagcaggtggtggctttgatggaggacaacatctacgagtgctacagtgaggcctgagacacatggagagttggtcaggctgctgctgggagaaatggacgcccactgggcctc

SEQ ID NO: 2332 - DNA, 120 bp, Artificial Sequence
  ENSG00000004399_48 (sequence is synthesized)
aacttgatcttctaccccgtgcctgtgactcagactgggaaatactgagcagagacggctggggcgggggcaggaggaggggctgctctctgagacaggggcgcccccgccttgacccct

SEQ ID NO: 2333 - DNA, 120 bp, Artificial Sequence
  ENSG00000004399_49 (sequence is synthesized)
gggcacctccatcccctcccacctgtccccagatcagtctctgggatggaggccagagagctggtcaggctcccccatctgcccagcacggcctgcactgtgcccacccacttgctccac

SEQ ID NO: 2334 - DNA, 120 bp, Artificial Sequence
  ENSG00000004399_50 (sequence is synthesized)
aacgtccagttggtcctgctgccaagagccccgtgcatccaggcggccaagcacaaactgggggagaggaggccgccagcccggaggctgcagcccagaaactctacctcatccacactg

SEQ ID NO: 2335 - DNA, 120 bp, Artificial Sequence
  ENSG00000004399_51 (sequence is synthesized)
gtgcagggagccctccttgaactgacctttgattggtttctgcttcaactaccaaaatgttatctccacttccccctcacccgtagaggatcctggccacagacagtttcaagtagtgtc

SEQ ID NO: 2336 - DNA, 120 bp, Artificial Sequence
  ENSG00000004399_52 (sequence is synthesized)
agatttttgttgcttgggcggctgttggtagagtgggcagtgcccgcgccatggggtgctctgtgggcttctccaggagcagggagggtggaggggagggatggggggcacaggagctgg

SEQ ID NO: 2337 - DNA, 120 bp, Artificial Sequence
  ENSG00000004399_53 (sequence is synthesized)
gagccccgtctccaggaaaaggagaggggttaagatgcaccgaggctgtagctgggctacttgatcttgctgaaagtgtttctaaagatagcaccacttttttttttaaagcttttatat

SEQ ID NO: 2338 - DNA, 120 bp, Artificial Sequence
  ENSG00000004399_54 (sequence is synthesized)
attaaaaaacgtatcatgcaccaactgtgaatagctgccgcttgcgcagaggacccggggaggggtcccgagaggctccccatgcaacactggaaatgactgttccagagagcgggcaga

SEQ ID NO: 2339 - DNA, 120 bp, Artificial Sequence
  ENSG00000004399_55 (sequence is synthesized)
cctggcagagcgcccctggcgcctgagactaccacccactccgttcctgccagaaacgaccctctgtggccgatgggccatgcgggcccctcgcagccaactcagccagtgttgggactg

SEQ ID NO: 2340 - DNA, 120 bp, Artificial Sequence
  ENSG00000004399_56 (sequence is synthesized)
gctcagagcccatgggggctggaggggggcagctgggactctggaatcttctttataataaaagccttacggacaaacctactgtgggctccagcctttgtcctgagatagccaagcggg

SEQ ID NO: 2341 - DNA, 120 bp, Artificial Sequence
  ENSG00000004399_57 (sequence is synthesized)
agcccctctgaagattggcagatgggagaaggcaggatgggatggggcacagcttgaacaaaggcttggccatgggaacaggttaggcacccagaggttgggggaggtgtgccctggctc

SEQ ID NO: 2342 - DNA, 120 bp, Artificial Sequence
  ENSG00000004399_58 (sequence is synthesized)
cagcaccaatgggtagaagatgttaggtggccaggggatatgctaggcccacgcccaggtccctgaatctcaagcagagaaatttggaaccatgttctccagtcaatagagagctactga

SEQ ID NO: 2343 - DNA, 120 bp, Artificial Sequence
  ENSG00000004399_59 (sequence is synthesized)
aggtacttaagagaggattactcaggaaaaattaacctacatgtctggtgggctataccactgttaaaataatggtcaataaagtaatagactcgatgtagcagagaaactggagccatc

SEQ ID NO: 2344 - DNA, 120 bp, Artificial Sequence
  ENSG00000004399_60 (sequence is synthesized)
atacgctactagagggaatacaaaaaagcgcagctgctttggaaaacattttggaagtttcttaggatgtgaaacatagaattaccctatgacctatgacccagcaattccacccctagc

SEQ ID NO: 2345 - DNA, 120 bp, Artificial Sequence
  ENSG00000004399_61 (sequence is synthesized)
tatctgctcaagagaaatgaaaacgtagccacacaaaaacttgtacacacgtttatagcaacattatttataataaccaggaagtcaaaacaacccaaatgtccatcaaccaataaatga

SEQ ID NO: 2346 - DNA, 120 bp, Artificial Sequence
  ENSG00000004399_62 (sequence is synthesized)
cttgtgacaaggctccaacctcaggcccttgagggacaaagccagctctctcctccacaactgtccctcgactgcttcctaccccaccctaccctcactgtctttgtcaccctaccccac

SEQ ID NO: 2347 - DNA, 120 bp, Artificial Sequence
  ENSG00000004399_63 (sequence is synthesized)
ctgtcacaaaggttaggaggcatccaccgtggaaggtaatgagctccccatcccaggaggcatacaagcagccgtcgtaagcactggctgttaggctaggcagggacactgggcccctct

SEQ ID NO: 2348 - DNA, 120 bp, Artificial Sequence
  ENSG00000004399_64 (sequence is synthesized)
gggcagctgcccatcacagtgagtggatggggcgccggagcagggcagacctggccccacccctggcccatctgccaagcatctgcccctcacccagcacctgaattcactgagcgtttt

SEQ ID NO: 2349 - DNA, 120 bp, Artificial Sequence
  ENSG00000004399_65 (sequence is synthesized)
ggggccaaggaccgctggctgaccacagcacctcccctcaggatcgtgtgtgtcacagggccagccccaggaccactctcaggtgtggtgaccgtgaacgcctctaaggagggcaagtcc

SEQ ID NO: 2350 - DNA, 120 bp, Artificial Sequence
  ENSG00000004399_66 (sequence is synthesized)
ctcctttcacctggcatgggtgcatgaatgtggggacactgagaggatccaatgaggccccctcagcaagaagctcttactctgtaggagacaagtcctgcagtgtgagtgaactacgga

SEQ ID NO: 2351 - DNA, 120 bp, Artificial Sequence
  ENSG00000004399_67 (sequence is synthesized)
cggacaacagcaaaaagccttcaggaaaggcttcctaattcctaaaggagggatgctggagtagggttggtttgtttgtttgtttttgagacgggatctcattctgtcacccaggctgga

SEQ ID NO: 2352 - DNA, 120 bp, Artificial Sequence
  ENSG00000004399_68 (sequence is synthesized)
agtgttttctcctcaggaaggcaggactgaaccaggcaggctggggtgcagtgagtcctcctgcctcttctctgaaatgcccctgtgtcaccctctccttctgtttcctctgcagagccc

SEQ ID NO: 2353 - DNA, 120 bp, Artificial Sequence
  ENSG00000004399_69 (sequence is synthesized)
cgggggtcgggggctgggcctcaatgcctccactggagtaagggcagggagcgcagagggcatttcagaagtggctgtggcctcttgctggcctgcaaattcgtcatgcattttcccaga

SEQ ID NO: 2354 - DNA, 120 bp, Artificial Sequence
  ENSG00000004399_70 (sequence is synthesized)
gtttgaggagcgggggcaggagagcaccctctggatggagaggagattggacttcagggtccgggaagccgtcttcgtccatgggacttgaggggcctcatcgctgaactgttctgtggg

SEQ ID NO: 2355 - DNA, 120 bp, Artificial Sequence
  ENSG00000004399_71 (sequence is synthesized)
gtctccccatgcgtctctgcatctctgtctcattctctctgactgtctctttggatctctgtctccgtttctgtttctctctccatctttctgtctctgcttctgtttctctccccatct

SEQ ID NO: 2356 - DNA, 120 bp, Artificial Sequence
  ENSG00000004399_72 (sequence is synthesized)
gtcaagccctcctctgccatttcccagctgtgtgttctcggatgagtgacttagcctctctgtgcttcagtttcccctccactgtaaaatgcgacccatgttaatggtgggaattaacta

SEQ ID NO: 2357 - DNA, 120 bp, Artificial Sequence
  ENSG00000004399_73 (sequence is synthesized)
gaagagtgcccagaagcatggtctaggtgttgcccttactatcattctcccgcacccctctcaggtgggcaccatcagctccacttcacagataagcacactgaggctcggagaagcagc

SEQ ID NO: 2358 - DNA, 120 bp, Artificial Sequence
  ENSG00000004399_74 (sequence is synthesized)
acctgctcaagaccacacagcctgggacagtagagccaggctcggccctacattatctgaatctcttacccagttggtagccctcctttgaggcacctcttagcttgtcggggtcatgca

SEQ ID NO: 2359 - DNA, 120 bp, Artificial Sequence
  ENSG00000004455_0 (sequence is synthesized)
gcagttggtaaggtgaagagtccgtcgtgctcaggggcgggcggaacgggctgacggacgcggctatgggccagtgtgagcggcgagtgggacgtgcgtggcgtgcgtgcgttgacctgg

SEQ ID NO: 2360 - DNA, 120 bp, Artificial Sequence
  ENSG00000004455_1 (sequence is synthesized)
gaagcactggacctgtgaggcgtgcgaactggtggcagtgagagacttcggcggacatggctcccagcgtgccagcggcagaacccgagtatcctaaaggcatccgggccgtgctgctgg

SEQ ID NO: 2361 - DNA, 120 bp, Artificial Sequence
  ENSG00000004455_2 (sequence is synthesized)
ggcctcccggggccggtaaagggacccaggtgagtgatgaaatggtagtggagctcattgagaagaatttggagacccccttgtgcaaaaatggttttcttctggatggcttccctcgga

SEQ ID NO: 2362 - DNA, 120 bp, Artificial Sequence
  ENSG00000004455_3 (sequence is synthesized)
ctgtgaggcaggcagaaatgctcgatgacctcatggagaagaggaaagagaagcttgattctgtgattgaattcagcatcccagactctctgctgatccgaagaatcacaggaaggctga

SEQ ID NO: 2363 - DNA, 120 bp, Artificial Sequence
  ENSG00000004455_4 (sequence is synthesized)
ttcaccccaagagtggccgttcctaccacgaggagttcaaccctccaaaagagcccatgaaagatgacatcaccggggaacccttgatccgtcgatcagatgataatgaaaaggccttga

SEQ ID NO: 2364 - DNA, 120 bp, Artificial Sequence
  ENSG00000004455_5 (sequence is synthesized)
aaatccgcctgcaagcctaccacactcaaaccaccccactcatagagtactacaggaaacgggggatccactccgccatcgatgcatcccagacccccgatgtcgtgttcgcaagcatcc

SEQ ID NO: 2365 - DNA, 120 bp, Artificial Sequence
  ENSG00000004455_6 (sequence is synthesized)
tagcagccttctccaaagccacatgtaaagacttggttatgtttatctaatgttgggtccaagaaggaatttctttccatccctgtgaggcaatgggtgggaatgataggacaggcaaag

SEQ ID NO: 2366 - DNA, 120 bp, Artificial Sequence
  ENSG00000004455_7 (sequence is synthesized)
agaagcttcctcaggctagcaaaaatatcatttgatgtattgattaaaaaagcacttgcttgatgtatctttggcgtgtgtgctactctcatctgtgtgtatgtgtgttgtgtgtgtgtg

SEQ ID NO: 2367 - DNA, 120 bp, Artificial Sequence
  ENSG00000004455_8 (sequence is synthesized)
tgtgtgcatgcacatatgtgttcactctgctactttgtaagttttaggctaggttgctttaccagctgtttacttcttttttgttgttgttttgagacaaggtttcgctctgccaccctg

SEQ ID NO: 2368 - DNA, 74 bp, Artificial Sequence
  ENSG00000004455_9 (sequence is synthesized)
tgcctcctggggctcaagcaattaaacacctggctgatatttgtattttttgtagagacaggattttgccaagt

SEQ ID NO: 2369 - DNA, 120 bp, Artificial Sequence
  ENSG00000004455_10 (sequence is synthesized)
tgcccaggctggtcttgaactcctaggcttaagcaatccacccaccttggcctcctgaagtgccaggatcacagacgtgagccactacacccagcccagctgtttacttctttaaccata

SEQ ID NO: 2370 - DNA, 120 bp, Artificial Sequence
  ENSG00000004455_11 (sequence is synthesized)
gccactacacccagcccagctgtttacttctttaaccatacttttgattttattttttgaccaaaatgaactaacccaggtaatcttccagggaccgcaattccagaacctcatagtatt

SEQ ID NO: 2371 - DNA, 120 bp, Artificial Sequence
  ENSG00000004455_12 (sequence is synthesized)
tcttccatttccagcagctgattagaagtccaggatcatgtgaagtcaggcagggtcacagttcctgatggcacattatggacagagaattccattttgttttctaacccatgatgaaaa

SEQ ID NO: 2372 - DNA, 120 bp, Artificial Sequence
  ENSG00000004455_13 (sequence is synthesized)
cccacgtgagtcagtgtgtgaacagggatcattaattttttccccctaggtggaaggaaaaaggcacttactttgcaggttacagaaattactgggagaggatatcgtcataaaaagagc

SEQ ID NO: 2373 - DNA, 120 bp, Artificial Sequence
  ENSG00000004455_14 (sequence is synthesized)
caggccaaattggaatatttttgtgatctgcatcatgatgctgaaaatagcaattatttgggaattgggtttgaaaactgaattgttgccagagaattaaaccaggtgaaaggtcctttt

SEQ ID NO: 2374 - DNA, 120 bp, Artificial Sequence
  ENSG00000004455_15 (sequence is synthesized)
gaattcagattgtcttctgaacatccaggctgatcatctgagagcagtcaaatctacttccccaaaaagagaccagggtaggtttatttgcttttatttttaatgtttgcctgtgtttcc

SEQ ID NO: 2375 - DNA, 120 bp, Artificial Sequence
  ENSG00000004455_16 (sequence is synthesized)
aagtgtgaacaaaacagtgtgtgatctattcttggattcattttgatcagtatttattcaaacccagtctctctccaggacataaaactgaaatcagatatgttctttttaagcccaaac

SEQ ID NO: 2376 - DNA, 120 bp, Artificial Sequence
  ENSG00000004455_17 (sequence is synthesized)
cctctcctttctagatccaacccttcacccctaattttatgatggctatagccatggacttccccaagaaaagatcacccagaaataagaccacctgtgacagttaccagcttttattca

SEQ ID NO: 2377 - DNA, 120 bp, Artificial Sequence
  ENSG00000004455_18 (sequence is synthesized)
taaccttagcttcccaactattgagcattttctaaggtccctgctgtcttttggtctctggtttgatttgtggcaaacagatgaagtaacagactgctatgaaggaccacaaaaacggca

SEQ ID NO: 2378 - DNA, 120 bp, Artificial Sequence
  ENSG00000004455_19 (sequence is synthesized)
gcctctggaaaaaccattagaaagtcagtggcagatccagtaaataatatcgccagcctcagcataatctgctgctgactcgattcagtggactctaaagtgcccagcctcctgacctga

SEQ ID NO: 2379 - DNA, 120 bp, Artificial Sequence
  ENSG00000004455_20 (sequence is synthesized)
gctctcctgccatctgtgagactaccagaggtcttatctgctgtccacatggcaactgggcatgagtacctggccaccttgcttccctctttgcctggtccaagtgagtgtctgctgcct

SEQ ID NO: 2380 - DNA, 120 bp, Artificial Sequence
  ENSG00000004455_21 (sequence is synthesized)
tggctctaaaccaactccacccactcttaatggaaactcagtctggctttgtgtgtttctgggaagcacatgacttctgggaatgggcaaggaagaggagtgaaacaaaaactgtcagct

SEQ ID NO: 2381 - DNA, 120 bp, Artificial Sequence
  ENSG00000004455_22 (sequence is synthesized)
atgtgtgcctggtctgggatccttctctgggtgacagtggcatcatgaatcttagaatcagctcccctttaactagggacaattgtaagcacttggcctcaaagttgaggttcttgaatg

SEQ ID NO: 2382 - DNA, 120 bp, Artificial Sequence
  ENSG00000004455_23 (sequence is synthesized)
tttgctaattttatgtgcatgatccttgcccaaatatttgtcatccgtccacatagattcacgtgtgcatacaacatgtacaagtaatatttgggctgcccataagaactggaagattca

SEQ ID NO: 2383 - DNA, 120 bp, Artificial Sequence
  ENSG00000004455_24 (sequence is synthesized)
tagggaatgcatatacccttctcagtatggttaggattctgtttttgcttcatttaattccagagttcctcagcctcagcaggttctgcttttacctgtcacagaaatgtccagtgttta

SEQ ID NO: 2384 - DNA, 120 bp, Artificial Sequence
  ENSG00000004455_25 (sequence is synthesized)
atgcatttggttgctggggcttacatgccagcctcctctgatatgtacttggtttttaaaaacccattttgttctctcttgtttcctctctatttcagcctagtatcagaaggccaggcg

SEQ ID NO: 2385 - DNA, 120 bp, Artificial Sequence
  ENSG00000004455_26 (sequence is synthesized)
agactgcaacactgctcatcaccccgcggcgtgatccctgctcttaggtgctgggcagaggggaagggtggtcagggtgaggatggtgagggagggctggtgaggggctcagaggaatac

SEQ ID NO: 2386 - DNA, 120 bp, Artificial Sequence
  ENSG00000004455_27 (sequence is synthesized)
ttggaacaacagcagtgttattgtagtgtggcagtttcttttatacataggtgagagtttttaaagtgtaagggaaaaattaattttttaaaaaacaccatgcttggagggtgggggtag

SEQ ID NO: 2387 - DNA, 120 bp, Artificial Sequence
  ENSG00000004455_28 (sequence is synthesized)
aaatagacacaatattatttctaaggaatcgggttttcatttactctggactggtgaaaatattttttaaagccagtgctctaagacctcagcttttatctcagaaccccatgggttcca

SEQ ID NO: 2388 - DNA, 120 bp, Artificial Sequence
  ENSG00000004455_29 (sequence is synthesized)
gaccaagagtacaggaaatcaaattgttgtcctgtctgtctatagcttggaacagggagctttgattactgactccggttccacacactgtaagatcaaaaaaccatctccacatttgaa

SEQ ID NO: 2389 - DNA, 120 bp, Artificial Sequence
  ENSG00000004455_30 (sequence is synthesized)
agagatgtaaggtgtattcatagggatggtggctcaacaaatcaagcaaactggaatcaaggggagggggaagggaatgaaatggaaagggaggctgattcccttcccctgacttaccac

SEQ ID NO: 2390 - DNA, 120 bp, Artificial Sequence
  ENSG00000004455_31 (sequence is synthesized)
taatttactaggctacctactttcatgagtaacctctcacagctacccagcacatgccacaatcctatgctcttgccttcttttatctgcactgtgtgaagggactcttttaaataaatg

SEQ ID NO: 2391 - DNA, 120 bp, Artificial Sequence
  ENSG00000004455_32 (sequence is synthesized)
agcaagtgtcctaagctatgtcatccaaagattgtcctttccattctcaaatcctgtgactgggatcactcaacagcactgtgatgtattattttcaatgaggtgcctttcttaactgac

SEQ ID NO: 2392 - DNA, 120 bp, Artificial Sequence
  ENSG00000004455_33 (sequence is synthesized)
caaatgctgccttgtttggcccctaaatcaataaaatatgttaaaatttgtatcccctgttgtggcattttttttagataatctaagctagaaaaatgacattgaattctggacctggct

SEQ ID NO: 2393 - DNA, 120 bp, Artificial Sequence
  ENSG00000004455_34 (sequence is synthesized)
ggaaggaaaagaagccctttcttgtcgctggcagctgtgtggtagggaggtccaagtatgtgcatatgagataagcctgcaacctcttgaccttcagctcctatgcaggcttctcttgag

SEQ ID NO: 2394 - DNA, 120 bp, Artificial Sequence
  ENSG00000004455_35 (sequence is synthesized)
cccagagacaaggcagcttggtctagtggagatagcactgtgcttggagttcaggggacctaggacaaatcccagccagttagttattcactgtgctcctgtttcctcagctgaaaaagg

SEQ ID NO: 2395 - DNA, 120 bp, Artificial Sequence
  ENSG00000004455_36 (sequence is synthesized)
aagttggttatgccaccttcttggccttaatggcattaaatgaaatttataggaagaaggtttttgctcagtacctggcatgcaacagacattggataaatgttagttggatccagatat

SEQ ID NO: 2396 - DNA, 120 bp, Artificial Sequence
  ENSG00000004455_37 (sequence is synthesized)
acacagaaagatatctgcttcctgccaggctggataactgttgaatggacacttgtccatagtctagaaagccagtgcttctaatccttaagccagatctttgactaccttttcagttgc

SEQ ID NO: 2397 - DNA, 120 bp, Artificial Sequence
  ENSG00000004455_38 (sequence is synthesized)
ttctttaacactctttgttgcttctctgtgtgtcctagtttaaattcatttcctctccagcaaaagtgagcttaaataatttctccaaactaaagctctcatgtttttggaagggctgcc

SEQ ID NO: 2398 - DNA, 120 bp, Artificial Sequence
  ENSG00000004455_39 (sequence is synthesized)
tttgcaagtgaggtttctgagaaatgactgttgttcccaaaacaagagggagctgggctggaagcaccactattcttctttaggcatcttgttacagagagaggcagggtcttcactgac

SEQ ID NO: 2399 - DNA, 120 bp, Artificial Sequence
  ENSG00000004455_40 (sequence is synthesized)
atattaaatcctgttccctgaaccagcccctccctcttctgctccacttcctcacctgtgcagagtcattttcaggtgttagccttactgatttgcactgatctgtttgttccctgagct

SEQ ID NO: 2400 - DNA, 120 bp, Artificial Sequence
  ENSG00000004455_41 (sequence is synthesized)
ttttaaataccctgtgaaaattttctttcctcccttggtcatcatgcatctaattgtggggaaatgtttgtcaaaccaacctgcaaagcagcatggtgtagttgagaagaataaacagag

SEQ ID NO: 2401 - DNA, 120 bp, Artificial Sequence
  ENSG00000004455_42 (sequence is synthesized)
gcctcccggggccggtaaagggacccaggcacccagattggctgaaaacttctgtgtctgccatttagctactggggacatgctgagggccatggtggcttctggctcagagctaggaaa

SEQ ID NO: 2402 - DNA, 120 bp, Artificial Sequence
  ENSG00000004455_43 (sequence is synthesized)
aagaatgcagactagtcctaccactcccggaagactgacgttgtgccaggtattatgcaaaggcttcatgtaaccctcgacttcacgtaaccctcacacagcaccctgtggagtcagaac

SEQ ID NO: 2403 - DNA, 120 bp, Artificial Sequence
  ENSG00000004455_44 (sequence is synthesized)
tgtccttcacttttataggtgaggaaaccagactcagagaggtgaagtggcattcctgaggtcatgcataagaggcagtcaggactgaaacacagtctctaacacttatccgtccccttg

SEQ ID NO: 2404 - DNA, 120 bp, Artificial Sequence
  ENSG00000004455_45 (sequence is synthesized)
atcttgttgctgaagtgatttaattacttgcgtagctctgcacacaggaagggctgctctgaataagagctcttttccatggacactcagcgctgccggaactgattttgaagaagtcac

SEQ ID NO: 2405 - DNA, 120 bp, Artificial Sequence
  ENSG00000004455_46 (sequence is synthesized)
tgccggctctgagggcctagggtatgtgtcttaggatctcctgtgtgcacaaagtgtcactgacagaacacagcaggatggagagcagcctcctcagaagcctcacaagtctttcctcag

SEQ ID NO: 2406 - DNA, 120 bp, Artificial Sequence
  ENSG00000004455_47 (sequence is synthesized)
atgaagacagagcaacgagtcagaagacagatttcaacagcgacttcaccatgcgaccttggacaagttatctcacctcatcagtagaataggaatgatccctacccctcaaaggtgctg

SEQ ID NO: 2407 - DNA, 120 bp, Artificial Sequence
  ENSG00000004455_48 (sequence is synthesized)
atgacactagtgaccaagatactcatgtgggttggactgcccaggacacagcagatgcttagtaaacacagatggaattcagagggaaaatgtaggcattgaagaaagttgtcttactga

SEQ ID NO: 2408 - DNA, 120 bp, Artificial Sequence
  ENSG00000004455_49 (sequence is synthesized)
ccatccggaaccaggctaaggatcccctagaaatcatagacctctgaaattatatgcagaattctttatgtgttttcataattaataatagtctaacatattaaattcttagctgtgtga

SEQ ID NO: 2409 - DNA, 120 bp, Artificial Sequence
  ENSG00000004455_50 (sequence is synthesized)
gcattgaacacagaaatgcctctgcttctggacacgtttgttctgacagaccaacactgctttagcctacagttgtctctaccctgtttcactaatcactgccatctgctttgtgccttc

SEQ ID NO: 2410 - DNA, 120 bp, Artificial Sequence
  ENSG00000004455_51 (sequence is synthesized)
cagaagtatgacagaagctttcaactgcaaatggaccctccattcccttctttattgtgggctgtagcttttttatgtctttgtcattttaatggtgtctcaggaaagtggtcagccaac

SEQ ID NO: 2411 - DNA, 120 bp, Artificial Sequence
  ENSG00000004455_52 (sequence is synthesized)
catcttgaaccagacatccatgaccattacttttaattgctgtgtaatatttcacagtaggttaaccattgtttacttatttccttattgttgtacatttatgtttcttccagttagcca

SEQ ID NO: 2412 - DNA, 120 bp, Artificial Sequence
  ENSG00000004455_53 (sequence is synthesized)
ctgttaaaatgatactatggccatcataatgcatgtaaatttttggattagggaaaaaatgttttcttatttcagacattattactttgatttcctaatgaggttgaacatcttttccat

SEQ ID NO: 2413 - DNA, 120 bp, Artificial Sequence
  ENSG00000004455_54 (sequence is synthesized)
gtggctatttagattaatttaattaatgtaaaaatcagttcctcagttgcactagccatatttcaagtatttaccagccaacgctgatacagaactttccatcatcaaacaaaattctgt

SEQ ID NO: 2414 - DNA, 120 bp, Artificial Sequence
  ENSG00000004455_55 (sequence is synthesized)
ttccatcatcaaacaaaattctgttgaacaaccatgtgctagagggtgttttaacaaactggcagattataggaaattttttttcttttttttttgacaaagtctcgctctgtcgcccag

SEQ ID NO: 2415 - DNA, 120 bp, Artificial Sequence
  ENSG00000004455_56 (sequence is synthesized)
gtagtcttctcccccggaggcctggcggtggctacctcacgctggaagtcagaactacagggccgccgccacgcagggcaaggactgaataccctgctcaagagcctggtgcctggcata

SEQ ID NO: 2416 - DNA, 120 bp, Artificial Sequence
  ENSG00000004455_57 (sequence is synthesized)
gacaagaatgctgaggaagattcaatagctgtgttactcaaaagctgatataaaagttcatctggaaaattggagaaactgaagtttgaatggcttgttctctaggctacatagcaagta

SEQ ID NO: 2417 - DNA, 120 bp, Artificial Sequence
  ENSG00000004455_58 (sequence is synthesized)
gaagagacaaacatgtgaatagacagcacagggttagcactattatcctggaaagcgatatgaaatacagtggactctaccttatattcattttcttttcaaatgtccaggttacatgtc

SEQ ID NO: 2418 - DNA, 120 bp, Artificial Sequence
  ENSG00000004455_59 (sequence is synthesized)
tccggctattccataggctcctttaatgcaggaacttctgtttctttgtatccccactgggcacagagtagacaaagttgatgtaggtcgagaagcagtagggttaacagtaaagacatc

SEQ ID NO: 2419 - DNA, 120 bp, Artificial Sequence
  ENSG00000004455_60 (sequence is synthesized)
actaggcctggggtctcttaggcactaagcacgtattagcagaatcaggtgatactggagacctttgattctatgggcccagcttcctgagtacctgcttcctgcatagcacagtactag

SEQ ID NO: 2420 - DNA, 120 bp, Artificial Sequence
  ENSG00000004455_61 (sequence is synthesized)
accctgggagcagaggaccacgagaggctctaggataaccatatagtgatgcccatctctgacctcagagagtcatatatgaaacttgggctgttcagtgtagtaggaagtccaagaaga

SEQ ID NO: 2421 - DNA, 120 bp, Artificial Sequence
  ENSG00000004455_62 (sequence is synthesized)
aagcctggggacagggaagaaaggctgcctaggatagagataacattaaactcttcctcgatgaagagtatttcagagagcctttcccagaagggaggagaagccggaatgattatgggt

SEQ ID NO: 2422 - DNA, 120 bp, Artificial Sequence
  ENSG00000004455_63 (sequence is synthesized)
tggtctggggggcaggaaggtagaaggaatgctgttgagaagagctttactggggagatctgccaaaccaaagagggtagacttgacggagttcaggactcatgagatagtcttgagcca

SEQ ID NO: 2423 - DNA, 120 bp, Artificial Sequence
  ENSG00000004455_64 (sequence is synthesized)
ctgggtattgtggcaaaaacagtattctaagaacattagcttggtcctggtgtacaaggtaaattacggcaaggagaaacagataaggataccatctaggagcctgtttatgatccacat

SEQ ID NO: 2424 - DNA, 120 bp, Artificial Sequence
  ENSG00000004455_65 (sequence is synthesized)
gatgtggtggagatttctaactgaggttgggtgggagagaacagagagattctgaagaacaaacagcaggattgctgtaaagggtgaaagagagaagattcattccctccatttggaagt

SEQ ID NO: 2425 - DNA, 120 bp, Artificial Sequence
  ENSG00000004455_66 (sequence is synthesized)
aggtggttagtgtgacttcctcacagagagaaggacccccgtcctcacagagcatgtcactgctgaaggtgtttttccaagtttacccaacagatgagtggcagggttagccctggaagc

SEQ ID NO: 2426 - DNA, 120 bp, Artificial Sequence
  ENSG00000004455_67 (sequence is synthesized)
ctgctttctgcctcgtagtccaaaatgttgatggttagaagaaaatgaggcaggaaccagtcagtttaatatggatctttttcttttctgtttttttttgttgttgtcattgttgttgtt

SEQ ID NO: 2427 - DNA, 120 bp, Artificial Sequence
  ENSG00000004455_68 (sequence is synthesized)
agacagagtctcactctgttgcccaggttggtcacagatgtcggctgtttgaagatgctggggaatgcaccccggacctcacacaggatctttttcaagtctgagatgatatggacccat

SEQ ID NO: 2428 - DNA, 120 bp, Artificial Sequence
  ENSG00000004455_69 (sequence is synthesized)
ccattgtaacaatcttctgaattagctctgacctcacttctagtaattttgagtcattgttctgtttcttgaatatgaatagttggtggttgtggtttttgtttttaacttattcaatat

SEQ ID NO: 2429 - DNA, 120 bp, Artificial Sequence
  ENSG00000004455_70 (sequence is synthesized)
tggctctctcaaatcctaattatcctaccagttggctctccggtattatcttaatacctggtaccatcccaattttgtggatgagaaaacaagtgtttaaagtgtcgcactgaatgttgg

SEQ ID NO: 2430 - DNA, 120 bp, Artificial Sequence
  ENSG00000004455_71 (sequence is synthesized)
gcgcagtggttcatgcctgtgatcccagcatttggtagggacctaaacaggaggattacttgaggccaggagtttcagaccagcttgagcaacatagcaagacctcgtctctactataaa

SEQ ID NO: 2431 - DNA, 120 bp, Artificial Sequence
  ENSG00000004455_72 (sequence is synthesized)
gcaaaaaaaaagttagccaggtgtggcagtgtgcacctgcggtggtggtcccagctacttgggagtctgaggtgggaggcctgcttgagctagggaggtcgaggctgcactgagccatga

SEQ ID NO: 2432 - DNA, 120 bp, Artificial Sequence
  ENSG00000004455_73 (sequence is synthesized)
ttaggccactggactccagcctgggtgacaaagcaaaaccctatctcaaaaaaataaaaataaagtatcacactcacggtagcagtgattgtagattcccagtcctgatgatacctccaa

SEQ ID NO: 2433 - DNA, 120 bp, Artificial Sequence
  ENSG00000004455_74 (sequence is synthesized)
gccacgctcagtggctcatggagctattttggttggtacttgagagcaatcccattttgagaacttggagagtggggtttctttcatttaccttctgtggaatgagccttgtattgtttt

SEQ ID NO: 2434 - DNA, 120 bp, Artificial Sequence
  ENSG00000004455_75 (sequence is synthesized)
aaaaagtggtatttgtgaatggcaaaagagcagtgtgtgggagtcatatttgttgcagcctggctgctatgtgccctgtgctctctagaaggtaaaaaaatatcctggtccgtatctcat

SEQ ID NO: 2435 - DNA, 120 bp, Artificial Sequence
  ENSG00000004455_76 (sequence is synthesized)
cttcccctttcttcactgtttttctttttcctttattctttccatcttccttttatttctaccaatattactaacttagtcatgaaaaataacactatcaagtaaatcacatggcctgtg

SEQ ID NO: 2436 - DNA, 120 bp, Artificial Sequence
  ENSG00000004468_0 (sequence is synthesized)
gcagtttcagaacccagccagcctctctcttgctgcctagcctcctgccggcctcatcttcgcccagccaaccccgcctggagccctatggccaactgcgagttcagcccggtgtccggg

SEQ ID NO: 2437 - DNA, 120 bp, Artificial Sequence
  ENSG00000004468_1 (sequence is synthesized)
gacaaaccctgctgccggctctctaggagagcccaactctgtcttggcgtcagtatcctggtcctgatcctcgtcgtggtgctcgcggtggtcgtcccgaggtggcgccagcagtggagc

SEQ ID NO: 2438 - DNA, 120 bp, Artificial Sequence
  ENSG00000004468_2 (sequence is synthesized)
ggtccgggcaccaccaagcgctttcccgagaccgtcctggcgcgatgcgtcaagtacactgaaattcatcctgagatgagacatgtagactgccaaagtgtatgggatgctttcaagggt

SEQ ID NO: 2439 - DNA, 120 bp, Artificial Sequence
  ENSG00000004468_3 (sequence is synthesized)
gcatttatttcaaaacatccttgcaacattactgaagaagactatcagccactaatgaagttgggaactcagaccgtaccttgcaacaagattcttctttggagcagaataaaagatctg

SEQ ID NO: 2440 - DNA, 120 bp, Artificial Sequence
  ENSG00000004468_4 (sequence is synthesized)
gcccatcagttcacacaggtccagcgggacatgttcaccctggaggacacgctgctaggctaccttgctgatgacctcacatggtgtggtgaattcaacacttccaaaataaactatcaa

SEQ ID NO: 2441 - DNA, 120 bp, Artificial Sequence
  ENSG00000004468_5 (sequence is synthesized)
tcttgcccagactggagaaaggactgcagcaacaaccctgtttcagtattctggaaaacggtttcccgcaggtttgcagaagctgcctgtgatgtggtccatgtgatgctcaatggatcc

SEQ ID NO: 2442 - DNA, 120 bp, Artificial Sequence
  ENSG00000004468_6 (sequence is synthesized)
cgcagtaaaatctttgacaaaaacagcacttttgggagtgtggaagtccataatttgcaaccagagaaggttcagacactagaggcctgggtgatacatggtggaagagaagattccaga

SEQ ID NO: 2443 - DNA, 120 bp, Artificial Sequence
  ENSG00000004468_7 (sequence is synthesized)
gacttatgccaggatcccaccataaaagagctggaatcgattataagcaaaaggaatattcaattttcctgcaagaatatctacagacctgacaagtttcttcagtgtgtgaaaaatcct

SEQ ID NO: 2444 - DNA, 120 bp, Artificial Sequence
  ENSG00000004468_8 (sequence is synthesized)
gaggattcatcttgcacatctgagatctgagccagtcgctgtggttgttttagctccttgactccttgtggtttatgtcatcatacatgactcagcatacctgctggtgcagagctgaag

SEQ ID NO: 2445 - DNA, 120 bp, Artificial Sequence
  ENSG00000004468_9 (sequence is synthesized)
attttggagggtcctccacaataaggtcaatgccagagacggaagcctttttccccaaagtcttaaaataacttatatcatcagcatacctttattgtgatctatcaatagtcaagaaaa

SEQ ID NO: 2446 - DNA, 120 bp, Artificial Sequence
  ENSG00000004468_10 (sequence is synthesized)
attattgtataagattagaatgaaaattgtatgttaagttacttcactttaattctcatgtgatccttttatgttatttatatattggtaacatcctttctattgaaaaatcaccacacc

SEQ ID NO: 2447 - DNA, 120 bp, Artificial Sequence
  ENSG00000004468_11 (sequence is synthesized)
aaacctctcttattagaacaggcaagtgaagaaaagtgaatgctcaagtttttcagaaagcattacatttccaaatgaatgaccttgttgcatgatgtatttttgtacccttcctacaga

SEQ ID NO: 2448 - DNA, 120 bp, Artificial Sequence
  ENSG00000004468_12 (sequence is synthesized)
tagtcaaaccataaacttcatggtcatgggtcatgttggtgaaaattattctgtaggatataagctacccacgtacttggtgctttaccccaacccttccaacagtgctgtgaggttggt

SEQ ID NO: 2449 - DNA, 120 bp, Artificial Sequence
  ENSG00000004468_13 (sequence is synthesized)
attatttcattttttagatgagaaaatgggagctcagagaggttatatatttaagttggtgcaaaagtaattgcaagttttgccaccgaaaggaatggcaaaaccacaattatttttgaa

SEQ ID NO: 2450 - DNA, 120 bp, Artificial Sequence
  ENSG00000004468_14 (sequence is synthesized)
ccaacctaataatttaccgtaagtcctacatttagtatcaagctagagactgaatttgaactcaactctgtccaactccaaaattcatgtgctttttccttctaggcctttcataccaaa

SEQ ID NO: 2451 - DNA, 120 bp, Artificial Sequence
  ENSG00000004468_15 (sequence is synthesized)
ctaatagtagtttatattctcttccaacaaatgcatattggattaaattgactagaatggaatctggaatatagttcttctggatggctccaaaacacatgtttttcttcccccgtcttc

SEQ ID NO: 2452 - DNA, 120 bp, Artificial Sequence
  ENSG00000004468_16 (sequence is synthesized)
ctcctcctcttcatgctcagtgttttatatatgtagtatacagttaaaatatacttgttgctggtactggcagcttatattttctctcttttttcatggattaaccttgcttgagggctt

SEQ ID NO: 2453 - DNA, 120 bp, Artificial Sequence
  ENSG00000004468_17 (sequence is synthesized)
taacaattgtattactttttcaaagaactaagctttagcttcattgatttttttctatttaattgggttttgctcttctctttagcattggaaacatagaaatgctttctgatttctttg

SEQ ID NO: 2454 - DNA, 120 bp, Artificial Sequence
  ENSG00000004468_18 (sequence is synthesized)
ggtagatttacgtattcagcttcttgagatggaagtttagatcactgatccttcagcttgttttcttttttgtatacatagattttaggacgatatattttcccttgagttctgctttag

SEQ ID NO: 2455 - DNA, 120 bp, Artificial Sequence
  ENSG00000004468_19 (sequence is synthesized)
ctgcagctcttatgttttgatatgcctctctttattatccttcagttaaaaatatctttcaattcattgttatataaaaatatgtgcctagtttttaacatctggagattttctagtttt

SEQ ID NO: 2456 - DNA, 87 bp, Artificial Sequence
  ENSG00000004468_20 (sequence is synthesized)
cgcctgagctcaggagtttttacaccagcctgggaataacagtgagacattatctccaaaaaaattacctgggtatggtgttgtgca

SEQ ID NO: 2457 - DNA, 90 bp, Artificial Sequence
  ENSG00000004468_21 (sequence is synthesized)
ctgggaggattgtttgagcttgggaggttgaggctgcagggagctgtgatcacaccactgcactctggcctgagtgacagattgagaccc

SEQ ID NO: 2458 - DNA, 120 bp, Artificial Sequence
  ENSG00000004468_22 (sequence is synthesized)
cacaccactgcactctggcctgagtgacagattgagaccctgtctcaataaaagcaaaaataaagaaaataaaccatatgtgttgaacaaaggattaataaattaatttgagactccttc

SEQ ID NO: 2459 - DNA, 120 bp, Artificial Sequence
  ENSG00000004468_23 (sequence is synthesized)
aacctttctgaacttcaacttccttgccactcaaataaggattacaaaacttaaaatgtggtaagtactaaagacgacagcaaaaattgagtccagcacagagcttcctaaataagcaag

SEQ ID NO: 2460 - DNA, 120 bp, Artificial Sequence
  ENSG00000004468_24 (sequence is synthesized)
cactcaacagagttggttcctttcttcctcccctgcttgacaatccagtttcccacaggagcctttgtagctgtagccaccatggtcagtccagggattcttcactagccccttctcccc

SEQ ID NO: 2461 - DNA, 120 bp, Artificial Sequence
  ENSG00000004468_25 (sequence is synthesized)
tggcagacatccttgtgggagtttagtcttggctcgacatgaggatgggggtttgggaccagttctgagtgagaatcagacttgccccaagttgccattagctccccctgcagaatgtct

SEQ ID NO: 2462 - DNA, 120 bp, Artificial Sequence
  ENSG00000004468_26 (sequence is synthesized)
tcagaatcggggcccggtcagtctcctgggtgacctgctgttttcctcttaagatcctttccactttggttgctgctttcgggactcatcgagtccttgctcaacaggataccccttgaa

SEQ ID NO: 2463 - DNA, 120 bp, Artificial Sequence
  ENSG00000004468_27 (sequence is synthesized)
gtggctgcctgggccacatccccttccaaacaagaaatcaaaatattagaaatcaatttttgaaatttcccctaggaagactcatttgagtgttcaagttcagagccagtggagacctta

SEQ ID NO: 2464 - DNA, 120 bp, Artificial Sequence
  ENSG00000004468_28 (sequence is synthesized)
ggggagggtggtcacaaggattttgcacagtgctttagagggtcccagggagccacagaggtggtgaggggctgggtgctcttttctccgtgcatgaccttgtgtgtctatcttcattac

SEQ ID NO: 2465 - DNA, 120 bp, Artificial Sequence
  ENSG00000004468_29 (sequence is synthesized)
cacaatgcctcatctctacctcctttccccctgtagttccaacgtgggtatctttgccatctctggcccgaaggactttctgacctacatgtataaataccccctcacaatatatattac

SEQ ID NO: 2466 - DNA, 120 bp, Artificial Sequence
  ENSG00000004468_30 (sequence is synthesized)
ttttcctataagtgacttctctactggattactggttgctcatacacctcatattttactcgtaaatctactactccctgtctgcctactccattctcatttgctgtagaaaattctctt

SEQ ID NO: 2467 - DNA, 120 bp, Artificial Sequence
  ENSG00000004468_31 (sequence is synthesized)
accatcccaactttcacccaccatcatgcttacccaaaggctgtgggaatgacctgggccctaatgccccttttctaaattcctaaggctcaccattttcctattgtaatggttcttgac

SEQ ID NO: 2468 - DNA, 120 bp, Artificial Sequence
  ENSG00000004468_32 (sequence is synthesized)
cttataatgtttgaggcaccttttcaaatatagtcctttgatttcagactgaatacttgaaaggacacacacacacatacgtaagtgcatatgactgcatacacccacacacacacacgt

SEQ ID NO: 2469 - DNA, 120 bp, Artificial Sequence
  ENSG00000004468_33 (sequence is synthesized)
gcctgtatacagtcatatgatacatacacaaacacacgcacacaagcctgcatacatcatatgccaacagtggggatatgttctgagaaatgcatcattagatgattttgtcattgtgtg

SEQ ID NO: 2470 - DNA, 120 bp, Artificial Sequence
  ENSG00000004468_34 (sequence is synthesized)
aacatcatagagtgtacttacactaacctagatggtctaacctactacacacccaggctacatggtatcacctattcctcctaggctacaagcctgtacagcgtgtgtctgtactaaatg

SEQ ID NO: 2471 - DNA, 86 bp, Artificial Sequence
  ENSG00000004468_35 (sequence is synthesized)
catgcagtattataatcttatgagaccgtcatcatatatgtggtccactgtttgggccatcattggctgaaaagtggttatgcgac

SEQ ID NO: 2472 - DNA, 120 bp, Artificial Sequence
  ENSG00000004468_36 (sequence is synthesized)
actgtttgggccatcattggctgaaaagtggttatgcgacacatgactgtatatatactttcctgttacaacaacagtgtctctcaatccacagtaattgcagcatccagtaggtcttac

SEQ ID NO: 2473 - DNA, 120 bp, Artificial Sequence
  ENSG00000004468_37 (sequence is synthesized)
tttagccctgagtcaccatttgtgtcaacgtgtttagtgccatgtccacgtctctcatgtaactggcagagctatcaaatattttggcaaaacacattgtttctttggctttgccttggt

SEQ ID NO: 2474 - DNA, 120 bp, Artificial Sequence
  ENSG00000004468_38 (sequence is synthesized)
aactttctgtgccttttgtagctcttgtttggaagaagctcaacccatgtctgcacactgtgatacaagggggacagcatcgacatcgacttacttcttggtgccttattcctccttaga

SEQ ID NO: 2475 - DNA, 120 bp, Artificial Sequence
  ENSG00000004468_39 (sequence is synthesized)
acaattcctaaatctgtaacttaagtttctcaggaagattccatactgcacagaaaactgcttttgtgggtttttaaaaggcaagttgttatatgtgctggatagtttttaagtatgaca

SEQ ID NO: 2476 - DNA, 120 bp, Artificial Sequence
  ENSG00000004468_40 (sequence is synthesized)
taaaaattgtataaagtaaaatattaaaatacacctagaatactgtataactttaagtcattttatcaacacattgctaatccagatattttcccgcagtttttctttgaataacagagc

SEQ ID NO: 2477 - DNA, 120 bp, Artificial Sequence
  ENSG00000004468_41 (sequence is synthesized)
aattaatttacttttactatgaagagtcatcattttagtatgtattttaagcaatccaccaagaactcagtaggcagctgagaggtgctgcccagagaagtggtgattagcttggcctta

SEQ ID NO: 2478 - DNA, 120 bp, Artificial Sequence
  ENSG00000004468_42 (sequence is synthesized)
cttagctcacccacacaaagcacaacaggctttgaactattccctaacggggcatttattcttttttttttttttttttgggagacggagtctcgctgtcgcccaggctagagtgcagtg

SEQ ID NO: 2479 - DNA, 120 bp, Artificial Sequence
  ENSG00000004468_43 (sequence is synthesized)
ggggtttcaccgtgttagccaggatagggcatttattcttgaacttgattcagagaggcacacattaccattctctaatcagaatgcaagtagcgcaaggcggtggaaactatggaattc

SEQ ID NO: 2480 - DNA, 120 bp, Artificial Sequence
  ENSG00000004468_44 (sequence is synthesized)
tggaattcggaggcaggtgatgcattgggcgagtttattaacatctgtgactctctagtttgaaatttatttgtaacagacaaaaatgaattaaacaaacaataaaagtataataaagaa

SEQ ID NO: 2481 - DNA, 120 bp, Artificial Sequence
  ENSG00000004468_45 (sequence is synthesized)
aacaaggtaattgggggcatgccattgattttaaaactggggataaaagccaatggtaacaattcataggtccaaatttttattagaatgaaggaagaggaaaaatccagacattatagt

SEQ ID NO: 2482 - DNA, 120 bp, Artificial Sequence
  ENSG00000004468_46 (sequence is synthesized)
cagtgaggctctgggccctgtgggattgcccagggatgtggagggtgaacagagtgacttctgctggaggccctgaatgattagtgtggaggacagagccacaggcacccatcctgatgc

SEQ ID NO: 2483 - DNA, 120 bp, Artificial Sequence
  ENSG00000004468_47 (sequence is synthesized)
gtagggtaccagcatccacttcgggtgaaggcctgaggctgtttccactcatggagaaggggaaggggagctggcatttacagagatcacatggtgagggaggaaagcaaggagaggtca

SEQ ID NO: 2484 - DNA, 120 bp, Artificial Sequence
  ENSG00000004468_48 (sequence is synthesized)
ggggaggtgccaggctgtttgtaatgaccagctgtcctgggaactagtagagtaagaactcattactataaggacagcaccatgccattcgtgcaggatcatccctatgacccaaacacc

SEQ ID NO: 2485 - DNA, 120 bp, Artificial Sequence
  ENSG00000004468_49 (sequence is synthesized)
tcctactagtcccgagctccaacactgggggtcgaatttcaacataaggtttggagagttaaatatccaaactatagcactacccttaatggcaactcaggctgatataaagtagcattc

SEQ ID NO: 2486 - DNA, 120 bp, Artificial Sequence
  ENSG00000004468_50 (sequence is synthesized)
cctgttttcttgaaaaattgacttcagagttggggattgcccatgctccctaattcccttcttttgagtgctcacatagcctgcttccgaattcttggtattttgctctctgtaaggtca

SEQ ID NO: 2487 - DNA, 120 bp, Artificial Sequence
  ENSG00000004468_51 (sequence is synthesized)
tcattcaggtccaaagaagtctagaacaggatgaggtctcagtgggacctagaccaaggttcttgctcttcagaatcatcacagtagccatggactggactcttccatctcaggcactgg

SEQ ID NO: 2488 - DNA, 120 bp, Artificial Sequence
  ENSG00000004468_52 (sequence is synthesized)
ctttgccatcatttttcagatgtagccttatcctgcccagaaagactcaacacctcaccaggggaagggatttcctacaaccaaaaccctactgcagttttcacttcttttttttttctt

SEQ ID NO: 2489 - DNA, 120 bp, Artificial Sequence
  ENSG00000004468_53 (sequence is synthesized)
tttgtttatatggtggatatttttactttatatagttttattcttatttttactgtttttcattgtttgtttttaaaagcttatcttattatagcttctttgtcccaggtttgcattact

SEQ ID NO: 2490 - DNA, 80 bp, Artificial Sequence
  ENSG00000004478_0 (sequence is synthesized)
cctaccccagctctcgcgccgcgtgcagaggtgctcaagcctcctcgcggtccgcagtcagtgccgccgcgcccggcctc

SEQ ID NO: 2491 - DNA, 120 bp, Artificial Sequence
  ENSG00000004478_1 (sequence is synthesized)
gtgcgctcgcgccggcaccagctcccggataaacggcgcgccgcgcggagatgacagccgaggagatgaaggcgaccgagagcggggcgcagtcggcgccgctgcccatggagggagtgg

SEQ ID NO: 2492 - DNA, 120 bp, Artificial Sequence
  ENSG00000004478_2 (sequence is synthesized)
acatcagccccaaacaggacgaaggcgtgctgaaggtcatcaagagagagggcacaggtacagagatgcccatgattggggaccgagtctttgtccactacactggctggctattagatg

SEQ ID NO: 2493 - DNA, 120 bp, Artificial Sequence
  ENSG00000004478_3 (sequence is synthesized)
gcacaaagtttgactccagtctggatcgcaaggacaaattctcctttgacctgggaaaaggggaggtcatcaaggcttgggacattgccatagccaccatgaaggtgggggaggtgtgcc

SEQ ID NO: 2494 - DNA, 120 bp, Artificial Sequence
  ENSG00000004478_4 (sequence is synthesized)
acatcacctgcaaaccagaatatgcctacggttcagcaggcagtcctccaaagattccccccaatgccacgcttgtatttgaggtggagttgtttgagtttaagggagaagatctgacgg

SEQ ID NO: 2495 - DNA, 120 bp, Artificial Sequence
  ENSG00000004478_5 (sequence is synthesized)
aagaggaagatggcggaatcattcgcagaatacagactcgcggtgaaggctatgctaagcccaatgagggtgctatcgtggaggttgcactggaagggtactacaaggacaagctctttg

SEQ ID NO: 2496 - DNA, 120 bp, Artificial Sequence
  ENSG00000004478_6 (sequence is synthesized)
accagcgggagctccgctttgagattggcgagggggagaacctggatctgccttatggtctggagagggccattcagcgcatggagaaaggagaacattccatcgtgtacctcaagccca

SEQ ID NO: 2497 - DNA, 120 bp, Artificial Sequence
  ENSG00000004478_7 (sequence is synthesized)
gctatgcttttggcagtgttgggaaggaaaagttccaaatcccaccaaatgctgagctgaaatatgaattacacctcaagagttttgaaaaggccaaggagtcttgggagatgaattcag

SEQ ID NO: 2498 - DNA, 120 bp, Artificial Sequence
  ENSG00000004478_8 (sequence is synthesized)
aagagaagctggaacagagcaccatagtgaaagagcggggcactgtgtacttcaaggaaggtaaatacaagcaagctttactacagtataagaagatcgtgtcttggctggaatatgagt

SEQ ID NO: 2499 - DNA, 120 bp, Artificial Sequence
  ENSG00000004478_9 (sequence is synthesized)
ctagtttttccaatgaggaagcacagaaagcacaggcccttcgactggcctctcacctcaacctggccatgtgtcatctgaaactacaggccttctctgctgccattgaaagctgtaaca

SEQ ID NO: 2500 - DNA, 120 bp, Artificial Sequence
  ENSG00000004478_10 (sequence is synthesized)
aggccctagaactggacagcaacaacgagaagggcctcttccgccggggagaggcccacctggccgtgaatgactttgaactggcacgggctgatttccagaaggtcctgcagctctacc

SEQ ID NO: 2501 - DNA, 120 bp, Artificial Sequence
  ENSG00000004478_11 (sequence is synthesized)
ccaacaacaaagccgccaagacccagctggctgtgtgccagcagcggatccgaaggcagcttgcccgggagaagaagctctatgccaatatgtttgagaggctggctgaggaggagaaca

SEQ ID NO: 2502 - DNA, 120 bp, Artificial Sequence
  ENSG00000004478_12 (sequence is synthesized)
aggccaaggcagaggcttcctcaggagaccatcccactgacacagagatgaaggaggagcagaagagcaacacggcagggagccagtctcaggtggagacagaagcatagcccctctcca

SEQ ID NO: 2503 - DNA, 120 bp, Artificial Sequence
  ENSG00000004478_13 (sequence is synthesized)
ccagccctactcctgcggctgcctgccccccagtctccccactccaccctgttagttttgtaaaaactgaagaattttgagtgaattagacctttatttttctatctggttggatggtgg

SEQ ID NO: 2504 - DNA, 120 bp, Artificial Sequence
  ENSG00000004478_14 (sequence is synthesized)
ctttaggggaagggggaaaggtgtaggctgggggattgaggtggggaatcattttagctggtgtcagcccctcttcccttcctccattgcacatgaacatatgtccatccatatatattc

SEQ ID NO: 2505 - DNA, 120 bp, Artificial Sequence
  ENSG00000004478_15 (sequence is synthesized)
gcagccgttttcctcatcctttccctctcccagtccatttccaaatgtggcctccatgtgggtgctagggacatgggaaaaaccactgctatgccatttcttctctctgttcccttcctc

SEQ ID NO: 2506 - DNA, 120 bp, Artificial Sequence
  ENSG00000004478_16 (sequence is synthesized)
acccccgacggtgtggctgatgatgtcttctggtgtcatggtgaccaccccctgttccctgttctggtatttcccctgtcagtttcccctctcggccaggttgtgtcccaaaatcccctc

SEQ ID NO: 2507 - DNA, 120 bp, Artificial Sequence
  ENSG00000004478_17 (sequence is synthesized)
agcctcttctctgcacgttgctgaaggtccaggcttgcctcaagttccatgcttgagcaataaagtggaaacaataaaacctgggtgtcagacaaccctttctgttcagccttggagtgg

SEQ ID NO: 2508 - DNA, 120 bp, Artificial Sequence
  ENSG00000004478_18 (sequence is synthesized)
tgggtatgggtgggtacataatgggtagtagcacaatcaaggggtcacccacttagttccagttgagcttaaataagtgagcatctcatgtagatgccatagttgggcaggaagcagccc

SEQ ID NO: 2509 - DNA, 120 bp, Artificial Sequence
  ENSG00000004478_19 (sequence is synthesized)
caccatgcatggcttcctgagcactgcacaggctgccgctgggatttgtgtctatggcttcgcccaaggttcccagcactccctccctccagcaacctggcagttttagtgcctctggtt

SEQ ID NO: 2510 - DNA, 120 bp, Artificial Sequence
  ENSG00000004478_20 (sequence is synthesized)
ttcttccctgacacttaggaagacgaaagtataaagatctagaagactgggacaccatgcatgttcattttgaagttggaattggtcttctgcctacctctgatctggcagaggtatctg

SEQ ID NO: 2511 - DNA, 120 bp, Artificial Sequence
  ENSG00000004478_21 (sequence is synthesized)
cattttggtttgttaacaaggtaaaactcctggtgtcactgacctcctcctgtcagataacttacatgattaaggttaagagtaaagcagagtgttcacgtccagcttccttctcagcct

SEQ ID NO: 2512 - DNA, 120 bp, Artificial Sequence
  ENSG00000004478_22 (sequence is synthesized)
taacaggaaaaggcttgtgctttttttctaactatgctttgacccttaactcctatggcatgatggggccctgggagaagccaggcagcacaagccagtcatgctgagctgcctccagat

SEQ ID NO: 2513 - DNA, 120 bp, Artificial Sequence
  ENSG00000004478_23 (sequence is synthesized)
aatcctggctccaggccagagcccgtgtctgccctcatccctctctcctactgtgagctctccagtcctttcccaacagcgatgtggttgtctgcttagccacatgcctgtatagttcct

SEQ ID NO: 2514 - DNA, 120 bp, Artificial Sequence
  ENSG00000004478_24 (sequence is synthesized)
tccagaagaaatgtataatggtggaagatgtatttctgtgtgaaaattttcaccaagtcatacaacacagctgatgctggagccaggattaaaattggggtgtacaagtctcccagtgtg

SEQ ID NO: 2515 - DNA, 120 bp, Artificial Sequence
  ENSG00000004478_25 (sequence is synthesized)
agtatcccttgagcccaagacaccaaggatgcagagaactgtgactgtgccactgcacgccagcctgggcaagagagtgagaccatctcttttttaaaaaagtccctgtgtaactgcttt

SEQ ID NO: 2516 - DNA, 120 bp, Artificial Sequence
  ENSG00000004478_26 (sequence is synthesized)
cttactgggcttacctcacatcacagccctgtgtttgtggtttgtgtctgggtcctcttggtatttcaaaagtagtagattcttacgcctgcagccaacaataatcactaactcaagcat

SEQ ID NO: 2517 - DNA, 120 bp, Artificial Sequence
  ENSG00000004478_27 (sequence is synthesized)
ttatggagtaagcctagcactgtactgacagcatcacatgagtgaaactgaatccttgcaaccatcctacaaagaaggtataactttaataaccctatttacagataagaaaaccaagac

SEQ ID NO: 2518 - DNA, 120 bp, Artificial Sequence
  ENSG00000004478_28 (sequence is synthesized)
tcagaagttaaatggaaaggtgaggtctctgaactaatccagactctcccatgaggttcctttggcaagtcctgggcttctgtcctcatctgcaaaatcgaaagcattcctgaggtttct

SEQ ID NO: 2519 - DNA, 120 bp, Artificial Sequence
  ENSG00000004478_29 (sequence is synthesized)
tccagctctgcatcctgtaggattccaagaatgtaaaactgcatgtaaccgtggaacatctagagataagtcttagtttatgtaacattaaaactgtctagtgaggatgttttgttaaaa

SEQ ID NO: 2520 - DNA, 120 bp, Artificial Sequence
  ENSG00000004478_30 (sequence is synthesized)
cagcggagctgccagccgcgggccgcctcgttggtggcggtgccagggctcgcccacccgggcggtggaacacgggccaggacggggagcgactccccacagtgctttcctggcccttcg

SEQ ID NO: 2521 - DNA, 120 bp, Artificial Sequence
  ENSG00000004478_31 (sequence is synthesized)
ctttcctggcccttcggcctttgtgcgacgcaggcgcgacagggttccggcgccctcccggggtcccctgccgacgccgggacccagcgaggtccccactcgccgcgcggcgccccctcc

SEQ ID NO: 2522 - DNA, 120 bp, Artificial Sequence
  ENSG00000004478_32 (sequence is synthesized)
ggggcatgccgggagctgtagtcccctcccccctccgccgcctcccggagccagggctgcggggtgtggggcggggaggaggcgctctgctgtggagcctgccgccgagtgaccgctcga

SEQ ID NO: 2523 - DNA, 120 bp, Artificial Sequence
  ENSG00000004478_33 (sequence is synthesized)
gacaacctgccttgggtcggagcaggttccagggagaatcagagatggtgaattcccagcctgcgtcttatgccttctccccatccgctgctgcgtcctcatcctggcttcccaccgctg

SEQ ID NO: 2524 - DNA, 120 bp, Artificial Sequence
  ENSG00000004478_34 (sequence is synthesized)
agctccgcgtgtgcggcacccacctcagggggcctttacctggtccagaagtgcatctgtctttgcaccagattattggggacctcaagcgtctgctccagcggctctcctgtggcatgt

SEQ ID NO: 2525 - DNA, 120 bp, Artificial Sequence
  ENSG00000004478_35 (sequence is synthesized)
gtagagacctcagtgacttaggatggcaccactgcaccccagcctgagtgacaaaatgaaaccccatctcaaaaaaagaaaagcgagatgctttttgtgtgtgattaaataaataataca

SEQ ID NO: 2526 - DNA, 120 bp, Artificial Sequence
  ENSG00000004478_36 (sequence is synthesized)
caaaccagaccttagtctgacgaccactggcatgaaggaagaaggaggaagtgtggcataaatacttccccctttgccgattataataataatctattattcaaccttttactggtctaa

SEQ ID NO: 2527 - DNA, 120 bp, Artificial Sequence
  ENSG00000004478_37 (sequence is synthesized)
tcttccaacaactgtaggagatagggattatcatcactgctttacaaataaagtgtggagaattttaaaaacttaccatacagcggaaacttgaactcagatctctcagccttttgtctc

SEQ ID NO: 2528 - DNA, 120 bp, Artificial Sequence
  ENSG00000004478_38 (sequence is synthesized)
gcagaatacagactcgcggtgaaggctatgctaagcccaatgagggtgctatcgtggagggtgagacagtacagtctgggctttcaattctcattctgatatttaggccttgtgtggctt

SEQ ID NO: 2529 - DNA, 120 bp, Artificial Sequence
  ENSG00000004478_39 (sequence is synthesized)
tgggcaagacacttccgttctccgagcctatcttcttgtccataaaatgaggggttggaccatattctcttcatatcactccagatttgagaacacaggagaatcttgggatgatggggg

SEQ ID NO: 2530 - DNA, 120 bp, Artificial Sequence
  ENSG00000004487_0 (sequence is synthesized)
ggcgcggcgggagcgcgcttggcgcgtgcgtacgcgacggcggttggcggcgcgcgggcagcgtgaagcgaggcgaggcaaggcttttcggacccacggagcgacagagcgagcggcccc

SEQ ID NO: 2531 - DNA, 120 bp, Artificial Sequence
  ENSG00000004487_1 (sequence is synthesized)
tacggccgtcggcggcccggcggcccgagatgttatctgggaagaaggcggcagccgcggcggcggcggctgcagcggcagcaaccgggacggaggctggccctgggacagcaggcggct

SEQ ID NO: 2532 - DNA, 120 bp, Artificial Sequence
  ENSG00000004487_2 (sequence is synthesized)
cagcaggcggctccgagaacgggtctgaggtggccgcgcagcccgcgggcctgtcgggcccagccgaggtcgggccgggggcggtgggggagcgcacaccccgcaagaaagagcctccgc

SEQ ID NO: 2533 - DNA, 120 bp, Artificial Sequence
  ENSG00000004487_3 (sequence is synthesized)
ccgggggcctggcggaaccgccggggtccgcagggcctcaggccggccctactgtcgtgcctgggtctgcgacccccatggaaactggaatagcagagactccggaggggcgtcggacca

SEQ ID NO: 2534 - DNA, 120 bp, Artificial Sequence
  ENSG00000004487_4 (sequence is synthesized)
gccggcgcaagcgggcgaaggtagagtacagagagatggatgaaagcttggccaacctctcagaagatgagtattattcagaagaagagagaaatgccaaagcagagaaggaaaagaagc

SEQ ID NO: 2535 - DNA, 120 bp, Artificial Sequence
  ENSG00000004487_5 (sequence is synthesized)
ttcccccaccaccccctcaagccccacctgaggaagaaaatgaaagtgagcctgaagaaccatcgggtgtggagggcgcagctttccagagccgacttcctcatgaccggatgacttctc

SEQ ID NO: 2536 - DNA, 120 bp, Artificial Sequence
  ENSG00000004487_6 (sequence is synthesized)
aagaagcagcctgttttccagatattatcagtggaccacaacagacccagaaggtttttcttttcattagaaaccgcacactgcagttgtggttggataatccaaagattcagctgacat

SEQ ID NO: 2537 - DNA, 120 bp, Artificial Sequence
  ENSG00000004487_7 (sequence is synthesized)
ttgaggctactctccaacaattagaagcaccttataacagtgatactgtgcttgtccaccgagttcacagttatttagagcgtcatggtcttatcaacttcggcatctataagaggataa

SEQ ID NO: 2538 - DNA, 120 bp, Artificial Sequence
  ENSG00000004487_8 (sequence is synthesized)
aacccctaccaactaaaaagacaggaaaggtaattattataggctctggggtctcaggcttggcagcagctcgacagttacaaagttttggaatggatgtcacacttttggaagccaggg

SEQ ID NO: 2539 - DNA, 120 bp, Artificial Sequence
  ENSG00000004487_9 (sequence is synthesized)
atcgtgtgggtggacgagttgccacatttcgcaaaggaaactatgtagctgatcttggagccatggtggtaacaggtcttggagggaatcctatggctgtggtcagcaaacaagtaaata

SEQ ID NO: 2540 - DNA, 120 bp, Artificial Sequence
  ENSG00000004487_10 (sequence is synthesized)
tggaactggccaagatcaagcaaaaatgcccactttatgaagccaacggacaagctgttcctaaagagaaagatgaaatggtagagcaagagtttaaccggttgctagaagctacatctt

SEQ ID NO: 2541 - DNA, 120 bp, Artificial Sequence
  ENSG00000004487_11 (sequence is synthesized)
accttagtcatcaactagacttcaatgtcctcaataataagcctgtgtcccttggccaggcattggaagttgtcattcagttacaagagaagcatgtcaaagatgagcagattgaacatt

SEQ ID NO: 2542 - DNA, 120 bp, Artificial Sequence
  ENSG00000004487_12 (sequence is synthesized)
aagaacttcttaataagatggtaaatttgaaagagaaaattaaagaactccatcagcaatacaaagaagcatctgaagtaaagccacccagagatattactgccgagttcttagtgaaaa

SEQ ID NO: 2543 - DNA, 120 bp, Artificial Sequence
  ENSG00000004487_13 (sequence is synthesized)
gcaaacacagggatctgaccgccctatgcaaggaatatgatgaattagctgaaacacaaggaaagctagaagaaaaacttcaggagttggaagcgaatcccccaagtgatgtatatctct

SEQ ID NO: 2544 - DNA, 120 bp, Artificial Sequence
  ENSG00000004487_14 (sequence is synthesized)
catcaagagacagacaaatacttgattggcattttgcaaatcttgaatttgctaatgccacacctctctcaactctctcccttaagcactgggatcaggatgatgactttgagttcactg

SEQ ID NO: 2545 - DNA, 120 bp, Artificial Sequence
  ENSG00000004487_15 (sequence is synthesized)
gcagccacctgacagtaaggaatggctactcgtgtgtgcctgtggctttagcagaaggcctagacattaaactgaatacagcagtgcgacaggttcgctacacggcttcaggatgtgaag

SEQ ID NO: 2546 - DNA, 120 bp, Artificial Sequence
  ENSG00000004487_16 (sequence is synthesized)
tgatagctgtgaatacccgctccacgagtcaaacctttatttataaatgcgacgcagttctctgtacccttcccctgggtgtgctgaagcagcagccaccagccgttcagtttgtgccac

SEQ ID NO: 2547 - DNA, 120 bp, Artificial Sequence
  ENSG00000004487_17 (sequence is synthesized)
ctctccctgagtggaaaacatctgcagtccaaaggatgggatttggcaaccttaacaaggtggtgttgtgttttgatcgggtgttctgggatccaagtgtcaatttgttcgggcatgttg

SEQ ID NO: 2548 - DNA, 120 bp, Artificial Sequence
  ENSG00000004487_18 (sequence is synthesized)
gcagtacgactgccagcaggggtgagctcttcctcttctggaacctctataaagctccaatactgttggcactagtggcaggagaagctgctggtatcatggaaaacataagtgacgatg

SEQ ID NO: 2549 - DNA, 120 bp, Artificial Sequence
  ENSG00000004487_19 (sequence is synthesized)
tgattgttggccgatgcctggccattctcaaagggatttttggtagcagtgcagtacctcagcccaaagaaactgtggtgtctcgttggcgtgctgatccctgggctcggggctcttatt

SEQ ID NO: 2550 - DNA, 120 bp, Artificial Sequence
  ENSG00000004487_20 (sequence is synthesized)
cctatgttgctgcaggatcatctggaaatgactatgatttaatggctcagccaatcactcctggcccctcgattccaggtgccccacagccgattccacgactcttctttgcgggagaac

SEQ ID NO: 2551 - DNA, 120 bp, Artificial Sequence
  ENSG00000004487_21 (sequence is synthesized)
atacgatccgtaactacccagccacagtgcatggtgctctgctgagtgggctgcgagaagcgggaagaattgcagaccagtttttgggggccatgtatacgctgcctcgccaggccacac

SEQ ID NO: 2552 - DNA, 120 bp, Artificial Sequence
  ENSG00000004487_22 (sequence is synthesized)
caggtgttcctgcacagcagtccccaagcatgtgagacagatgcattctaagggaagaggcccatgtgcctgtttctgccatgtaaggaaggctcttctagcaatactagatcccactga

SEQ ID NO: 2553 - DNA, 120 bp, Artificial Sequence
  ENSG00000004487_23 (sequence is synthesized)
gaaaatccaccctggcatctgggctcctgatcagctgatggagctcctgatttgacaaaggagcttgcctcctttgaatgacctagagcacagggaggaacttgtccattagtttggaat

SEQ ID NO: 2554 - DNA, 120 bp, Artificial Sequence
  ENSG00000004487_24 (sequence is synthesized)
tgtgttcttcgtaaagactgaggcaagcaagtgctgtgaaataacatcatcttagtcccttggtgtgtggggtttttgttttttttttatattttgagaataaaacttcatataaaattg

SEQ ID NO: 2555 - DNA, 120 bp, Artificial Sequence
  ENSG00000004487_25 (sequence is synthesized)
gtgagcctgaagaaccatcggggcaagcaggaggacttcaagacgacagttctggagggtatggagacggccaagcatcaggtgtggagggcgcagctttccagagccgacttcctcatg

SEQ ID NO: 2556 - DNA, 120 bp, Artificial Sequence
  ENSG00000004487_26 (sequence is synthesized)
atagcttttaagttaataattgtctgtgtaattttgcatctgttgctctattggagtaatagtttatatcatattttttatcccccttttctagtactgtgcctaccacctaagtctgtt

SEQ ID NO: 2557 - DNA, 120 bp, Artificial Sequence
  ENSG00000004487_27 (sequence is synthesized)
gcataattactcaccggatgggtgactgaagacagtcctgggcttggaggggcctgggatggctaaaagggatgtagtcattgtcatggagctatccaaggtagtcaaggttaagaattc

SEQ ID NO: 2558 - DNA, 120 bp, Artificial Sequence
  ENSG00000004487_28 (sequence is synthesized)
tgtgccaaagtaaagcgatgcttaataattcccttttattagcaagatctgaaattatatcttcagaactgctgtattttgccaggttagaagcagtgaggtgcctgagaatcttacttc

SEQ ID NO: 2559 - DNA, 120 bp, Artificial Sequence
  ENSG00000004487_29 (sequence is synthesized)
actctagtctgccagctcctactggctggtgtctggcgacaaagagttctgtatgctgtttcagaaacataatctgtctcttcgcatttgaatggtactgcgtgtgtcttgtcatcagat

SEQ ID NO: 2560 - DNA, 120 bp, Artificial Sequence
  ENSG00000004487_30 (sequence is synthesized)
ttcagagcaccaggaataaggtggggcctgataaggaagtttttgaggaaagtctgtaggaaaaccctagaattatcctttctgtttccccagctccaatactgttggcactagtggcag

SEQ ID NO: 2561 - DNA, 120 bp, Artificial Sequence
  ENSG00000004487_31 (sequence is synthesized)
aaggagggatctagggttcagactcaaccagggtttaatgtatttgcagcatgttcttggtcaggacagtttaagctagaattgaggtctgtgcttttacatgaataattaatgtttgga

SEQ ID NO: 2562 - DNA, 120 bp, Artificial Sequence
  ENSG00000004487_32 (sequence is synthesized)
gttcatggcctaagcgtggggttcagaaaaccccccaggacaagagctggggagtctgaaggctgctagctgcatttctcctccggctttagagtcacaccagatccctgacattttaga

SEQ ID NO: 2563 - DNA, 120 bp, Artificial Sequence
  ENSG00000004487_33 (sequence is synthesized)
caaaatggccaaactccagtgagtatctccgggaagttttcagagaacctcttggtactttttcgtgttctttgaaatactttaaccctttaggattcctttgaagggaaggatattgtg

SEQ ID NO: 2564 - DNA, 120 bp, Artificial Sequence
  ENSG00000004487_34 (sequence is synthesized)
aatttataaaagagaataaaggccaagccctgtgtagatctctggattcatagacaggaaggcaacatggaggggcatccttcctgtctgaagtccttttgtccatgtgtgttttaaagc

SEQ ID NO: 2565 - DNA, 120 bp, Artificial Sequence
  ENSG00000004487_35 (sequence is synthesized)
aggcattcatcacttgatcactggctctcacatgttgcccctctttctcttcacttgcatctccacccaccactgcttttccacctttcaaggattgatttgtgcttggtgtctcgtaat

SEQ ID NO: 2566 - DNA, 120 bp, Artificial Sequence
  ENSG00000004487_36 (sequence is synthesized)
acaggtgagaagctggcaaactatctgggcttatttgggaagaggccaggatctcatgatgtccctgattttttttttttttttcagattttagtcattccatcttcggaccctttcaga

SEQ ID NO: 2567 - DNA, 120 bp, Artificial Sequence
  ENSG00000004487_37 (sequence is synthesized)
taaccaagagcagagttaaaaggatgggcagcatttctgatttctcataatttggttttgtaaatctaggcagtctacattcagaatggaggagtccagagtataagtcaaataacattt

SEQ ID NO: 2568 - DNA, 120 bp, Artificial Sequence
  ENSG00000004487_38 (sequence is synthesized)
ttccttattcaggttttctccctaaaaaacaaaaccatttttaattgcacttccattttgtaatggctcataggattgctgtaaggtctcaattactaggggcttccagggcatttctga

SEQ ID NO: 2569 - DNA, 120 bp, Artificial Sequence
  ENSG00000004487_39 (sequence is synthesized)
gaaataaccctgggtccttgtctagacccttatgccagaccccactccaaagagcggtaagaattccttagtgtcatagcccagacctgctgagctgcgaggcttaagtgtccctgatca

SEQ ID NO: 2570 - DNA, 120 bp, Artificial Sequence
  ENSG00000004487_40 (sequence is synthesized)
ccaaatgtcctgtgcttcagggtagcgaggctccctcccagaaggtagttatacatgagggaaggacgctttacaactgggtatctaaactgatgagaacacatgttaagcatcacttta

SEQ ID NO: 2571 - DNA, 120 bp, Artificial Sequence
  ENSG00000004487_41 (sequence is synthesized)
ggactgagcctaggtagagttttattgtctcatttctacttgtcaattctgggaaagtgcctactgataagggagactcttcgatagaatgatgaatagtaattgggggggtcagccttt

SEQ ID NO: 2572 - DNA, 120 bp, Artificial Sequence
  ENSG00000004487_42 (sequence is synthesized)
aaaaaggtcaacagcaatttaagtacttagcaatttaagtacaagaataaaggtatatgtgcagcctgccaattttctctttttcccctaaaatagccgattccacgactcttctttgcg

SEQ ID NO: 2573 - DNA, 120 bp, Artificial Sequence
  ENSG00000004487_43 (sequence is synthesized)
ggctgataaattttacatttttaagttacggtttcaggactgtattttatatctatgatgacgttaggattttattttgattcataagactatatttaaaaatatttccaagtttatctt

SEQ ID NO: 2574 - DNA, 80 bp, Artificial Sequence
  ENSG00000004487_44 (sequence is synthesized)
tatagtctcttaataaatgtgcatttcccttaatttctagtttgatagctacttagtaaaagatactggatttccaattt

SEQ ID NO: 2575 - DNA, 120 bp, Artificial Sequence
  ENSG00000004534_0 (sequence is synthesized)
ccggtgtccgcggcgctgggtcggtggcggaggctgaggagaaggaggagcgggccgtggaggcttcgccgcctaggtactgctataaccagaatttggtagaaaaaggatttacttgtt

SEQ ID NO: 2576 - DNA, 120 bp, Artificial Sequence
  ENSG00000004534_1 (sequence is synthesized)
ggggccctcttgataaaaagagatgtggggggattctcgacctgctaacagaactggaccttttcgtgggagccaagaagaaaggtttgctcccgggtggaacagggattatcctcctcc

SEQ ID NO: 2577 - DNA, 120 bp, Artificial Sequence
  ENSG00000004534_2 (sequence is synthesized)
tccccttaagagtcatgctcaagagagacactctggcaactttcctggcagagattcacttccctttgatttccaggggcattcggggcctccttttgcaaatgtagaggagcattcttt

SEQ ID NO: 2578 - DNA, 120 bp, Artificial Sequence
  ENSG00000004534_3 (sequence is synthesized)
cagctatggagctagagacggaccgcatggtgactatcgaggaggggagggacctggacatgatttcagggggggagatttttcgtcttctgatttccagagcagagattcatcacagtt

SEQ ID NO: 2579 - DNA, 120 bp, Artificial Sequence
  ENSG00000004534_4 (sequence is synthesized)
ggacttcaggggtagggacatacattctggggattttcgggatagagaaggaccacctatggactataggggtggagatggtacttctatggattatagaggtagggaggcacctcatat

SEQ ID NO: 2580 - DNA, 120 bp, Artificial Sequence
  ENSG00000004534_5 (sequence is synthesized)
gaactacagagacagggatgctcacgctgttgacttcagaggtagggatgctcctccatctgacttcaggggccggggcacttatgatttagattttagaggccgggatggatcccatgc

SEQ ID NO: 2581 - DNA, 120 bp, Artificial Sequence
  ENSG00000004534_6 (sequence is synthesized)
agattttaggggaagggatttatcagatttggattttagggccagagaacagtcccgttctgattttaggaatagagatgtatctgatttggactttagagacaaagacggaacacaagt

SEQ ID NO: 2582 - DNA, 120 bp, Artificial Sequence
  ENSG00000004534_7 (sequence is synthesized)
agactttagaggccgaggttcaggtactactgatctagactttagggacagggatacgccacattcagatttcagaggtagacaccgatctaggactgatcaggattttaggggcagaga

SEQ ID NO: 2583 - DNA, 120 bp, Artificial Sequence
  ENSG00000004534_8 (sequence is synthesized)
gatgggatcttgtatggaatttaaagatagggagatgccccctgtggatccaaatattttggattacattcagccctctacacaagatagagaacattctggtatgaatgtgaacaggag

SEQ ID NO: 2584 - DNA, 120 bp, Artificial Sequence
  ENSG00000004534_9 (sequence is synthesized)
agaagaatccacacatgaccatacgatagaaaggcctgcttttggcattcagaagggagaatttgagcattcagaaacaagagaaggagaaacacaaggtgtagcctttgaacatgagtc

SEQ ID NO: 2585 - DNA, 120 bp, Artificial Sequence
  ENSG00000004534_10 (sequence is synthesized)
tccagcagactttcagaacagccaaagtccagttcaagaccaagataagtcacagctttctggacgtgaagagcagagttcagatgctggtctgtttaaagaagaaggcggtctggactt

SEQ ID NO: 2586 - DNA, 120 bp, Artificial Sequence
  ENSG00000004534_11 (sequence is synthesized)
tcttgggcggcaagacaccgattacagaagcatggagtaccgtgatgtggatcataggctgccaggaagccagatgtttggctatggccagagcaagtcttttccagagggcaaaactgc

SEQ ID NO: 2587 - DNA, 120 bp, Artificial Sequence
  ENSG00000004534_12 (sequence is synthesized)
ccgagatgcccaacgggaccttcaggatcaagattataggaccggcccaagtgaggagaaacccagcaggcttattcgattaagtggggtacctgaagatgccacaaaagaagagattct

SEQ ID NO: 2588 - DNA, 120 bp, Artificial Sequence
  ENSG00000004534_13 (sequence is synthesized)
taatgcttttcggactcctgatggcatgcctgtaaagaacttgcagttgaaggagtataacacaggttacgactatggctatgtctgcgtggagttttcactcttggaagatgccatcgg

SEQ ID NO: 2589 - DNA, 120 bp, Artificial Sequence
  ENSG00000004534_14 (sequence is synthesized)
atgcatggaggccaaccagggaactctaatgatccaggacaaagaagttaccctggagtatgtatcaagcctggatttttggtactgcaaacgatgtaaggcaaacattggtgggcaccg

SEQ ID NO: 2590 - DNA, 120 bp, Artificial Sequence
  ENSG00000004534_15 (sequence is synthesized)
agaagtgacagaggccaagcaagaattaataacctaccctcagcctcagaaaacatccataccagcaccattggaaaaacagcccaaccagcccctaagaccagctgataaggaacctga

SEQ ID NO: 2591 - DNA, 120 bp, Artificial Sequence
  ENSG00000004534_16 (sequence is synthesized)
acccaggaagagggaagaaggccaagagtcacgcttaggacatcaaaagagagaagcagaaaggtatctgcctccttctcgaagggaagggccaactttccgaagagaccgagagaggga

SEQ ID NO: 2592 - DNA, 120 bp, Artificial Sequence
  ENSG00000004534_17 (sequence is synthesized)
gtcatggtctggagagacacgccaggatggagagagcaaaactatcatgctaaagcgtatctatcgttccacaccacctgaggtgatagtggaagtgctggagccctatgtccgccttac

SEQ ID NO: 2593 - DNA, 120 bp, Artificial Sequence
  ENSG00000004534_18 (sequence is synthesized)
tactgccaacgtccgtatcatcaagaacagaacaggccctatggggcatacctatggctttattgacctcgactcccatgcggaagctcttcgtgtggtgaagatcttacagaaccttga

SEQ ID NO: 2594 - DNA, 120 bp, Artificial Sequence
  ENSG00000004534_19 (sequence is synthesized)
tccgccatttagcattgatgggaagatggtagctgtaaacctggccactggaaaacgaagaaatgattctggggaccattctgaccacatgcattactatcagggtaaaaaatatttccg

SEQ ID NO: 2595 - DNA, 120 bp, Artificial Sequence
  ENSG00000004534_20 (sequence is synthesized)
agataggaggggaggtggcagaaattcagactggtcttcagatacaaatcgacaaggacaacagtcatcatctgactgctacatatatgattctgctactggctactattatgacccctt

SEQ ID NO: 2596 - DNA, 120 bp, Artificial Sequence
  ENSG00000004534_21 (sequence is synthesized)
ggcaggaacttattatgaccccaatacccagcaagaagtctatgtgccccaggatcctggattacctgaggaagaagagatcaaggaaaaaaaacccaccagtcaaggaaagtcaagtag

SEQ ID NO: 2597 - DNA, 120 bp, Artificial Sequence
  ENSG00000004534_22 (sequence is synthesized)
caagaaggaaatgtctaaaagagatggcaaggagaaaaaagacagaggagtgacgaggtttcaggaaaatgccagtgaagggaaggcccctgcagaagacgtctttaagaagcccctgcc

SEQ ID NO: 2598 - DNA, 120 bp, Artificial Sequence
  ENSG00000004534_23 (sequence is synthesized)
tcctactgtgaagaaggaagagagtccccctccacctaaagtggtaaacccactgatcggcctcttgggtgaatatggaggagacagtgactatgaggaggaagaagaggaggaacagac

SEQ ID NO: 2599 - DNA, 120 bp, Artificial Sequence
  ENSG00000004534_24 (sequence is synthesized)
ccctcccccacagccccgcacagcacagccccagaagcgagaggagcaaaccaagaaggagaatgaagaagacaaactcactgactggaataaactggcttgtctgctttgcagaaggca

SEQ ID NO: 2600 - DNA, 120 bp, Artificial Sequence
  ENSG00000004534_25 (sequence is synthesized)
gtttcccaataaagaagttctgatcaaacaccagcagctgtcagacctgcacaagcaaaacctggaaatccaccggaagataaaacagtctgagcaggagctagcctatctggaaaggag

SEQ ID NO: 2601 - DNA, 120 bp, Artificial Sequence
  ENSG00000004534_26 (sequence is synthesized)
agaacgagagggaaagtttaaaggaagaggaaatgatcgcagggaaaagctccagtcttttgactctccagaaaggaaacggattaagtactccagggaaactgacagtgatcgtaaact

SEQ ID NO: 2602 - DNA, 120 bp, Artificial Sequence
  ENSG00000004534_27 (sequence is synthesized)
tgttgataaagaagatatcgacactagcagcaaaggaggctgtgtccaacaggctactggctggaggaaagggacaggcctgggatatggccatcctggattggcttcatcagaggaggc

SEQ ID NO: 2603 - DNA, 120 bp, Artificial Sequence
  ENSG00000004534_28 (sequence is synthesized)
tgaaggccggatgaggggccccagtgttggagcctcaggaagaaccagcaaaagacagtccaacgagacttaccgagatgctgttcgaagagtcatgtttgctcgatataaagaactcga

SEQ ID NO: 2604 - DNA, 120 bp, Artificial Sequence
  ENSG00000004534_29 (sequence is synthesized)
ttaagaaaggagacaagttccatgggatacaacctccctcttgttttgtttgtctctccttttcttttgttactgttcttgctgctagaacttttttaaataaactttttttcaatgtga

SEQ ID NO: 2605 - DNA, 120 bp, Artificial Sequence
  ENSG00000004534_30 (sequence is synthesized)
gcattgatgggaagatggtagctgtaaacctggccactggaaaacgaaggagtgtctggaccacccaacctgcttgctgtctagaaatgattctggggaccattctgaccacatgcatta

SEQ ID NO: 2606 - DNA, 120 bp, Artificial Sequence
  ENSG00000004534_31 (sequence is synthesized)
gggcacaagagctccgagcccggtcgtcggggcggtagaacctggaagcgggagagtggtctggtgggttctgcgcccgttaggcaatgaaggagaaggatgttttatcgtattcacgct

SEQ ID NO: 2607 - DNA, 120 bp, Artificial Sequence
  ENSG00000004534_32 (sequence is synthesized)
ttagattccattagcggtgtaaatagatgtttttctctttattttagaattgacgttaggcgaatgggttcaactttgggaatgccttttttttttttttttttttgaaggaagggccct

SEQ ID NO: 2608 - DNA, 120 bp, Artificial Sequence
  ENSG00000004534_33 (sequence is synthesized)
agccggatttaagtgaaggagttcagtagacatgcagacatggtcacctggttcattttctgaaccctggattgtgccctcggtactgctataaccagaatttggtagaaaaaggattta

SEQ ID NO: 2609 - DNA, 120 bp, Artificial Sequence
  ENSG00000004534_34 (sequence is synthesized)
tgactttcctcgtgttctgaaatgggagcataaaagtttactccgccacttcgtcttaaaatagcaaaactttgctgttttctgcagatctaggaccttgttacagaactctgccaaaaa

SEQ ID NO: 2610 - DNA, 120 bp, Artificial Sequence
  ENSG00000004534_35 (sequence is synthesized)
tttgggacaataatattctataaaccatgtaacagtagttttctaggcatatttcctataggaatctttatccagggcaaaggcatttgggctgcaccaaagtcccagatgccttgttat

SEQ ID NO: 2611 - DNA, 120 bp, Artificial Sequence
  ENSG00000004534_36 (sequence is synthesized)
aaggtagctctcaaacagtagctcatcagatcccatctgccagctctaatcagtggggaatatcagattctttttttaagctttgaggggatctgggatatggcttgtttctttcatttt

SEQ ID NO: 2612 - DNA, 120 bp, Artificial Sequence
  ENSG00000004534_37 (sequence is synthesized)
caataattttatcctgtgtatttctcttgacttttttgatgtgaaaagcagagaggtaaagcattatttgacagatgtatggattcaagcaagaaactgaggtccaattgcaaagaaatg

SEQ ID NO: 2613 - DNA, 120 bp, Artificial Sequence
  ENSG00000004534_38 (sequence is synthesized)
tgacctcgactcccatgcggtgagtttcctccaccttggattggcctagagacagatggctaaagaaccttcaagaaggtttgactgggggccgggcctggtggcttacgcctgtaatcc

SEQ ID NO: 2614 - DNA, 120 bp, Artificial Sequence
  ENSG00000004534_39 (sequence is synthesized)
tcacaagggactttgtaaactgaatctgattgatgataattgcaacctaaaagaagaggatttgaatttctgaagtttatgccagaactgacatctattctgattcctgttccaatcagt

SEQ ID NO: 2615 - DNA, 120 bp, Artificial Sequence
  ENSG00000004534_40 (sequence is synthesized)
ccttcattaaaagttgcctgtttctgccagtatgctcttactgttaaaattttgacagaatataatgtagtaaatttatcctctgagaaggaaaatccacgttcacttctctttcaaagg

SEQ ID NO: 2616 - DNA, 120 bp, Artificial Sequence
  ENSG00000004534_41 (sequence is synthesized)
aaagctaatgcttatgtgctttaggagccagtgctgatcacatgccttgcctacctaatatcagttctcctgctctgcatagcaggagaaggagctggagtagtgttggttacgactatg

SEQ ID NO: 2617 - DNA, 120 bp, Artificial Sequence
  ENSG00000004534_42 (sequence is synthesized)
gatacggttccatcatagacagggatgaccgtgatgagcgtgaatcccgaagcaggcggagggactcagattacaaaagatctagtgatgatcggaggggtgatagatatgatgactacc

SEQ ID NO: 2618 - DNA, 120 bp, Artificial Sequence
  ENSG00000004534_43 (sequence is synthesized)
gagactatgacagtccagagagagagcgtgaaagaaggaacagtgaccgatccgaagatggctaccattcagatggtgactatggtgagcacgactataggcatgacatcagtgacgaga

SEQ ID NO: 2619 - DNA, 120 bp, Artificial Sequence
  ENSG00000004534_44 (sequence is synthesized)
gggagagcaagaccatcatgctgcgcggccttcccatcaccatcacagagagcgatattcgagaaatgatggagtccttcgaaggccctcagcctgcggatgtgaggctgatgaagagga

SEQ ID NO: 2620 - DNA, 120 bp, Artificial Sequence
  ENSG00000004534_45 (sequence is synthesized)
aatgtgctgtgattagagaagaatatgctggtgtgtagatttcaaactctctggacaatatgaataacactgtctttgtttctacagtgggagccaagaagaaaggtttgctcccgggtg

SEQ ID NO: 2621 - DNA, 120 bp, Artificial Sequence
  ENSG00000004534_46 (sequence is synthesized)
agtagattaccggtcccgccgcggagcggccagctgtgaggctggggccggcgcgtggttgcggctctgtgctcctactcttcggagctgtaagcgggctgttcttgcggttttcctgtt

SEQ ID NO: 2622 - DNA, 120 bp, Artificial Sequence
  ENSG00000004534_47 (sequence is synthesized)
tcagatccaattctgtggcatcactaggaagggagctcttgtgcttagcacgtagcctcgtcctcagacttggacagacacaagggaggctccgctggaccggagggcacaagagctccg

SEQ ID NO: 2623 - DNA, 120 bp, Artificial Sequence
  ENSG00000004534_48 (sequence is synthesized)
gaaggcaagtcccctgcgcgcggggcacggcgggagtaagagtctgcgggaccggcagctgtacttcatctcccagcgggccgagcgctgaaggcagcggcgcggcgcctttgtggtagc

SEQ ID NO: 2624 - DNA, 120 bp, Artificial Sequence
  ENSG00000004534_49 (sequence is synthesized)
ttttttttttttttttacctctgtcaatgattcttttgagaaaagcacccataatttgctacttgaggattttattccctggattctctggatgctcattgcatgaaaagtggaaaagtt

SEQ ID NO: 2625 - DNA, 120 bp, Artificial Sequence
  ENSG00000004534_50 (sequence is synthesized)
tagatctatggaaacagaactgttgcctatatggaaaatcagtgccttgtggcaatacaggtaagaacagtgttgctcttgaaaaagtggacagtgggtggtctgaatgtgtcctggtcc

SEQ ID NO: 2626 - DNA, 120 bp, Artificial Sequence
  ENSG00000004534_51 (sequence is synthesized)
ctggagtgggtttttagattgatgtggactcttcttagacttgtaagtaaaaaagttgtttcttcccctaaaagggaactgtgcgccttagacctggaattgctgggaaactgaaacatt

SEQ ID NO: 2627 - DNA, 120 bp, Artificial Sequence
  ENSG00000004660_0 (sequence is synthesized)
gggcggggcggggcggggcgcgcagcaggagcgagtggggccgcccgccgggccgcggacactgtcgcccggcgcccaggttcccaacaaggctacgcagaagaacccccttgactgaag

SEQ ID NO: 2628 - DNA, 120 bp, Artificial Sequence
  ENSG00000004660_1 (sequence is synthesized)
caacaaggctacgcagaagaacccccttgactgaagcaatggaggggggtccagctgtctgctgccaggatcctcgggcagagctggtagaacgggtggcagccatcgatgtgactcact

SEQ ID NO: 2629 - DNA, 120 bp, Artificial Sequence
  ENSG00000004660_2 (sequence is synthesized)
tggaggaggcagatggtggcccagagcctactagaaacggtgtggaccccccaccacgggccagagctgcctctgtgatccctggcagtacttcaagactgctcccagcccggcctagcc

SEQ ID NO: 2630 - DNA, 120 bp, Artificial Sequence
  ENSG00000004660_3 (sequence is synthesized)
tctcagccaggaagctttccctacaggagcggccagcaggaagctatctggaggcgcaggctgggccttatgccacggggcctgccagccacatctccccccgggcctggcggaggccca

SEQ ID NO: 2631 - DNA, 120 bp, Artificial Sequence
  ENSG00000004660_4 (sequence is synthesized)
ccatcgagtcccaccacgtggccatctcagatgcagaggactgcgtgcagctgaaccagtacaagctgcagagtgagattggcaagggtgcctacggtgtggtgaggctggcctacaacg

SEQ ID NO: 2632 - DNA, 120 bp, Artificial Sequence
  ENSG00000004660_5 (sequence is synthesized)
aaagtgaagacagacactatgcaatgaaagtcctttccaaaaagaagttactgaagcagtatggctttccacgtcgccctcccccgagagggtcccaggctgcccagggaggaccagcca

SEQ ID NO: 2633 - DNA, 120 bp, Artificial Sequence
  ENSG00000004660_6 (sequence is synthesized)
agcagctgctgcccctggagcgggtgtaccaggagattgccatcctgaagaagctggaccacgtgaatgtggtcaaactgatcgaggtcctggatgacccagctgaggacaacctctatt

SEQ ID NO: 2634 - DNA, 120 bp, Artificial Sequence
  ENSG00000004660_7 (sequence is synthesized)
tggtgtttgacctcctgagaaaggggcccgtcatggaagtgccctgtgacaagcccttctcggaggagcaagctcgcctctacctgcgggacgtcatcctgggcctcgagtacttgcact

SEQ ID NO: 2635 - DNA, 120 bp, Artificial Sequence
  ENSG00000004660_8 (sequence is synthesized)
gccagaagatcgtccacagggacatcaagccatccaacctgctcctgggggatgatgggcacgtgaagatcgccgactttggcgtcagcaaccagtttgaggggaacgacgctcagctgt

SEQ ID NO: 2636 - DNA, 120 bp, Artificial Sequence
  ENSG00000004660_9 (sequence is synthesized)
ccagcacggcgggaaccccagcattcatggcccccgaggccatttctgattccggccagagcttcagtgggaaggccttggatgtatgggccactggcgtcacgttgtactgctttgtct

SEQ ID NO: 2637 - DNA, 120 bp, Artificial Sequence
  ENSG00000004660_10 (sequence is synthesized)
atgggaagtgcccattcatcgacgatttcatcctggccctccacaggaagatcaagaatgagcccgtggtgtttcctgaggagccagaaatcagcgaggagctcaaggacctgatcctga

SEQ ID NO: 2638 - DNA, 120 bp, Artificial Sequence
  ENSG00000004660_11 (sequence is synthesized)
agatgttagacaagaatcccgagacgagaattggggtgccagacatcaagttgcacccttgggtgaccaagaacggggaggagccccttccttcggaggaggagcactgcagcgtggtgg

SEQ ID NO: 2639 - DNA, 120 bp, Artificial Sequence
  ENSG00000004660_12 (sequence is synthesized)
aggtgacagaggaggaggttaagaactcagtcaggctcatccccagctggaccacggtgatcctggtgaagtccatgctgaggaagcgttcctttgggaacccgtttgagccccaagcac

SEQ ID NO: 2640 - DNA, 120 bp, Artificial Sequence
  ENSG00000004660_13 (sequence is synthesized)
ggagggaagagcgatccatgtctgctccaggaaacctactggtgaaagaagggtttggtgaagggggcaagagcccagagctccccggcgtccaggaagacgaggctgcatcctgagccc

SEQ ID NO: 2641 - DNA, 120 bp, Artificial Sequence
  ENSG00000004660_14 (sequence is synthesized)
tggggactgcagccccactcccgcccctcccccatcgtgctgcatgacctccacgcacgcacgtccagggacagactggaatgtatgtcatttggggtcttgggggcagggctcccacga

SEQ ID NO: 2642 - DNA, 120 bp, Artificial Sequence
  ENSG00000004660_15 (sequence is synthesized)
ggccatcctcctcttcttggacctccttggcctgacccattctgtggggaaaccgggtgcccatggagcctcagaaatgccacccggctggttggcatggcctggggcaggaggcagagg

SEQ ID NO: 2643 - DNA, 120 bp, Artificial Sequence
  ENSG00000004660_16 (sequence is synthesized)
caggagaccaagatggcaggtggaggccaggcttaccacaacggaagagacctcccgctggggccgggcaggcctggctcagctgccacaggcatatggtggagaggggggtaccctgcc

SEQ ID NO: 2644 - DNA, 120 bp, Artificial Sequence
  ENSG00000004660_17 (sequence is synthesized)
caccttggggtggtggcaccagagctcttgtctattcagacgctggtatgggggctcggacccctcactggggacagggccagtgttggagaattctgattccttttttgttgtctttta

SEQ ID NO: 2645 - DNA, 120 bp, Artificial Sequence
  ENSG00000004660_18 (sequence is synthesized)
cttttgtttttaacctgggggttcggggagaggccctgcttgggaacatctcacgagctttcctacatcttccgtggttcccagcacagcccaagattatttggcagccaagtggatgga

SEQ ID NO: 2646 - DNA, 120 bp, Artificial Sequence
  ENSG00000004660_19 (sequence is synthesized)
actaactttcctggactgtgtttcgcattcggcgttatctggaaagtggactgaacggaatcaagctctgagcagaggcctgaagcggaagcaccacatcgtccctgcccatctcactct

SEQ ID NO: 2647 - DNA, 120 bp, Artificial Sequence
  ENSG00000004660_20 (sequence is synthesized)
ctcccttgatgatgcccctagagctgaggctggagaagacaccagggctgactttgaccgagggccatggacgcgacaggcctgtggccctgcgcatgctgaaataactggaacccagcc

SEQ ID NO: 2648 - DNA, 120 bp, Artificial Sequence
  ENSG00000004660_21 (sequence is synthesized)
tctcctcctacaccggcctacccatctgggcccaagagctgcactcacactcctacaacgaaggacaaactgtccaggtcggagggatcacgagacacagaacctggaggggtgtgcacg

SEQ ID NO: 2649 - DNA, 120 bp, Artificial Sequence
  ENSG00000004660_22 (sequence is synthesized)
ctggcaggtggcctctgcggcaattgcctcaccctgaggacatcagcagtcagcctgctcagagcgggggtgctggagcgcgtgcagacacagctcttccggagcagccttcaccttctc

SEQ ID NO: 2650 - DNA, 120 bp, Artificial Sequence
  ENSG00000004660_23 (sequence is synthesized)
tctgggatcagtgtccggctggccgacgtggcatttgctgaccgaatgctcatagaggttgacccccacagggtcacgcaggactcggacactgccctggaaacatggatggacaagggc

SEQ ID NO: 2651 - DNA, 120 bp, Artificial Sequence
  ENSG00000004660_24 (sequence is synthesized)
ttttggccacaggtgtgggtgtcctgttggaggagggcttgtttggagaagggaggctggctgggggagaaacccggatcccgctgcatctccgcgcctgtgggtgcatgtcgcgtgctc

SEQ ID NO: 2652 - DNA, 120 bp, Artificial Sequence
  ENSG00000004660_25 (sequence is synthesized)
atctgttgcacacagctcactcgtatgtcctgcactggtacatgcatctgtaatacagtttctacgtctatttaaggctaggagccgaatgtgccccattgtcagtgggtccacgtttct

SEQ ID NO: 2653 - DNA, 120 bp, Artificial Sequence
  ENSG00000004660_26 (sequence is synthesized)
ccccggctcctctgggctaaggcagtgtggcccgaagcttaaaaagttactcggtactgtttttaagaacacttttatagagttagtggaaggcaagttaagagccaatcactgatcccc

SEQ ID NO: 2654 - DNA, 120 bp, Artificial Sequence
  ENSG00000004660_27 (sequence is synthesized)
aagtgtttcttgagcatctggtctggggggaccactttgatcggacccacccttggaaagctcaggggtaggcccaggtgggatgctcaccctgtcactgagggttttggttggcatcgt

SEQ ID NO: 2655 - DNA, 120 bp, Artificial Sequence
  ENSG00000004660_28 (sequence is synthesized)
tgtttttgaatgtagcacaagcgatgagcaaactctataagagtgttttaaaaattaacttcccaggaagtgagttaaaaacaataaaagccctttcttgagttaaaaagaaaaaaaaaa

SEQ ID NO: 2656 - DNA, 120 bp, Artificial Sequence
  ENSG00000004660_29 (sequence is synthesized)
actccctggagttgggtggggaggtctgaggcccatcctcccactctcactgtcgttgggccaaggccagagcctggggacttggccaggtctcggtgttggccccatttgcatctctgt

SEQ ID NO: 2657 - DNA, 120 bp, Artificial Sequence
  ENSG00000004660_30 (sequence is synthesized)
ccccaaggttagtcggggctagaagggaccttttgggcccagctcttgcttcattcctggggccagcatccctcacacacacacttccagggatgaggagctcacgcagcccctccatgg

SEQ ID NO: 2658 - DNA, 120 bp, Artificial Sequence
  ENSG00000004660_31 (sequence is synthesized)
gacaggaagacccttcttccatgcagcttgatgtcactctctcactgggtccagcccctctggggcttcaaatctgtggccccctcagcccttggcagcctggcagaggtttgcagacag

SEQ ID NO: 2659 - DNA, 120 bp, Artificial Sequence
  ENSG00000004660_32 (sequence is synthesized)
gctgatgttggcttcctgtaggaggctggcgggctgtagaggaggggtgctggcccctctgcctggccctggggactgttggctgctctcccaagtggcccaggctgcctgcagccattg

SEQ ID NO: 2660 - DNA, 120 bp, Artificial Sequence
  ENSG00000004660_33 (sequence is synthesized)
ctggggctctgtgcccagtcagcactttgtgagtgcttgttcagtgagtaagcagggacaggctggccggtggaccacgggagaggaacccgcattggccgagggctccctatggtgagc

SEQ ID NO: 2661 - DNA, 120 bp, Artificial Sequence
  ENSG00000004660_34 (sequence is synthesized)
cacgcctgtgggttcaccacctcctaggagggtccagaaaagcagctccccaagcctgtgcgcctcgtcctcagcagatccaccttcttcactataataaaagccagtctgggatgctaa

SEQ ID NO: 2662 - DNA, 120 bp, Artificial Sequence
  ENSG00000004660_35 (sequence is synthesized)
aaatagagacagagtttcactatgtggaccaggctgttctcaaactcctgggctcaaatgatacgctccacctcagccttccaaagggctgggattaccggcatgagctactgcacccgg

SEQ ID NO: 2663 - DNA, 120 bp, Artificial Sequence
  ENSG00000004660_36 (sequence is synthesized)
acaataatagcttttagtagggttgaggaaagacctgtaaacagcacctggcatacagtcgagctctgcccctcaatctatccaccctctcaatggtggagtccactagttgttccggat

SEQ ID NO: 2664 - DNA, 120 bp, Artificial Sequence
  ENSG00000004660_37 (sequence is synthesized)
atctgttctcccggtagcaattcagtccttggttcttggttgggcatgtggctgcccagaatggaagctgcatttcccagctttctcttgcagctgggtctggtcatgttaagtaagctc

SEQ ID NO: 2665 - DNA, 120 bp, Artificial Sequence
  ENSG00000004660_38 (sequence is synthesized)
aagcggtgtatgtgaaagtgccacgtggcaacttctgggaactttcctgaaaagagagctggtgcagaccctctgccctcttcttcatccttttctccactccactgcctggaatgcgtt

SEQ ID NO: 2666 - DNA, 120 bp, Artificial Sequence
  ENSG00000004660_39 (sequence is synthesized)
atgtgattgctggagctctagctggtatcctgaaccatgaggtcaaaagccacactcaagttgctggaattattcattcaacaacatccactgagcacctgtgccatgcgacaggctgtg

SEQ ID NO: 2667 - DNA, 120 bp, Artificial Sequence
  ENSG00000004660_40 (sequence is synthesized)
aagggctcccttgggacatgtatgaccttcaggtgggcggtgtaaatgcactgacctcctggggacagaagaaaaacacacgttctgaagccctggattcccttgcccagccctgcagaa

SEQ ID NO: 2668 - DNA, 120 bp, Artificial Sequence
  ENSG00000004660_41 (sequence is synthesized)
ccaggcccagaatatccagttagattcaacaaatatcgccaagccccactccctgcttccctctgagcagcaagacagtggatccacgtgggctgcgcgctcaggtagatgcaggaagca

SEQ ID NO: 2669 - DNA, 120 bp, Artificial Sequence
  ENSG00000004660_42 (sequence is synthesized)
ggctgcatgggttcccagacactgtagctctgtgcctcagttttcccacctataaaacagggatactagtggtgtctacctcatagggttcctgtgaagagtaaatgagtaattatatgt

SEQ ID NO: 2670 - DNA, 120 bp, Artificial Sequence
  ENSG00000004660_43 (sequence is synthesized)
aaagcacattcgttattatccttgttaatagtaatgttattattttagttccttgtgtctggttcagggctgggcttagaggaggcctcagaaaatggggcagaagaagaactggcttag

SEQ ID NO: 2671 - DNA, 120 bp, Artificial Sequence
  ENSG00000004660_44 (sequence is synthesized)
cctttaggaaaatttctgccccttctctgtgcctcagtttccccctctgtaaaagggccccatgctgatgctgatggttctcacctggcacctgaggatcagatgagacaggtccatagc

SEQ ID NO: 2672 - DNA, 120 bp, Artificial Sequence
  ENSG00000004660_45 (sequence is synthesized)
agaccccactctcatgcatttatttgctctcatatcccagggtcccctgtcctgtccctgcctcgagtatgcctgcatgcctgccccctctcctaccctccagaacagggagggaccttg

SEQ ID NO: 2673 - DNA, 120 bp, Artificial Sequence
  ENSG00000004660_46 (sequence is synthesized)
gcatcggctgctttgccagccagctacaccttaccttcttgtcttttctttcagtgtttgacctcctgagaaaggggcccgtcatggaagtgccctgtgacaagcccttctcggaggagc

SEQ ID NO: 2674 - DNA, 120 bp, Artificial Sequence
  ENSG00000004660_47 (sequence is synthesized)
aagctcgcctctacctgcgggacgtcatcctgggcctcgagtactgtgagtgcggggcagcttgcccactggggctggggctaggggatctggcaggcggcagagcccaggctgagcaga

SEQ ID NO: 2675 - DNA, 120 bp, Artificial Sequence
  ENSG00000004660_48 (sequence is synthesized)
ctctgagcagctcccgtcagtcagagctgacctgccaatcagcttcagtgggagtggggcatgcacgtgtggcggggccaaaggcctttttgtggggtggggcgggcggtggactccact

SEQ ID NO: 2676 - DNA, 120 bp, Artificial Sequence
  ENSG00000004660_49 (sequence is synthesized)
gggcatgtgccagatccttcgtcgtgtctggtcctgtgggtctgagtcctggctgttctgtatctttcttctgctgagttcttagcctagcttagcgttgccacggggcttcaagagatg

SEQ ID NO: 2677 - DNA, 120 bp, Artificial Sequence
  ENSG00000004660_50 (sequence is synthesized)
tgggaaggaagggatttatgtccagctgctggggagagtctgtcctggcatggggccggggcatggtggcagggtggatttacctgtgaggggccctagtctgataagagctcaggaggg

SEQ ID NO: 2678 - DNA, 120 bp, Artificial Sequence
  ENSG00000004660_51 (sequence is synthesized)
tgatgtgagcttggcctctgtctcatttcattcattagctacattcacttgcctgggggcataggggtgaaagacccagacccgagttcacggcctagtgggagggacaggaatctaggc

SEQ ID NO: 2679 - DNA, 120 bp, Artificial Sequence
  ENSG00000004660_52 (sequence is synthesized)
aggcagataatacagcgtggtgcctgccaaggctggggagcctagaggctgtaggagtgccggggggctggggaagtctccctgaagaggctacttatgattcgggtcctgagggatgag

SEQ ID NO: 2680 - DNA, 120 bp, Artificial Sequence
  ENSG00000004660_53 (sequence is synthesized)
tagacttccctgctcaggttttgagggatgggcgtggaagacgatgtgcctggcataggcgtgtactctgagtctggggagaagtggagtctggctgaagcctccagtgggcagaggagg

SEQ ID NO: 2681 - DNA, 120 bp, Artificial Sequence
  ENSG00000004660_54 (sequence is synthesized)
gccgtggttagtgaaagatgatgctggaaacactgtccgggccacagcatgagggctgggaatccctcccctgaggtctttgctgactgcatcctgccagctctgtgaggccctgagagc

SEQ ID NO: 2682 - DNA, 120 bp, Artificial Sequence
  ENSG00000004660_55 (sequence is synthesized)
tttaagcatggggaggggcgtgatgggatttgtgcctgagaaagctctgtctggcagctgtgtggtggctggattggagtgtgtcatcggagggtgagaggcagccagctggccagggag

SEQ ID NO: 2683 - DNA, 120 bp, Artificial Sequence
  ENSG00000004660_56 (sequence is synthesized)
gaggctgtttctgcagcccaagtgacagatggtgaggcctggattaaggcagtggcagcaggatggggataggaaggaggtggggtggtcagcatggagtgacttgccggtctggggaga

SEQ ID NO: 2684 - DNA, 120 bp, Artificial Sequence
  ENSG00000004660_57 (sequence is synthesized)
tgccggtctggggagaggagagcccctagacacctagggtcctggcgtgggttggggaccaggggagatgcccatctctaaaatcttagcttgggccaggcgcaggggctcatgcctgta

SEQ ID NO: 2685 - DNA, 120 bp, Artificial Sequence
  ENSG00000004700_0 (sequence is synthesized)
gagatccgagagtcggagatcggagagtcggacacaggacagtcggacaccggacagtcaaacaccggagagttagaccgggcttctcggtggggagaggctctgggataactactgtta

SEQ ID NO: 2686 - DNA, 120 bp, Artificial Sequence
  ENSG00000004700_1 (sequence is synthesized)
cagctttgaagggtcaagggaggattggccaccaaagcctgtttattagcagctgccatttgttgaaagaaatttggattattttagaaacaaatttggaaagaaaaagaatggcgtccg

SEQ ID NO: 2687 - DNA, 120 bp, Artificial Sequence
  ENSG00000004700_2 (sequence is synthesized)
tttcagctctaactgaggaactggattctataaccagtgagctacatgcagtagaaattcaaattcaagaacttacggaaaggcaacaagagcttattcagaaaaaaaaagtcctgacaa

SEQ ID NO: 2688 - DNA, 120 bp, Artificial Sequence
  ENSG00000004700_3 (sequence is synthesized)
agaaaataaagcagtgtttagaggattctgatgccggggcaagcaatgaatatgattcttcacctgccgcttggaataaagaagattttccatggtctggtaaagttaaagatattctgc

SEQ ID NO: 2689 - DNA, 120 bp, Artificial Sequence
  ENSG00000004700_4 (sequence is synthesized)
aaaatgtctttaaactggaaaagttcagaccacttcagcttgaaactattaacgtaacaatggctggaaaggaggtatttcttgttatgcctacaggaggtggaaagagcttatgttacc

SEQ ID NO: 2690 - DNA, 120 bp, Artificial Sequence
  ENSG00000004700_5 (sequence is synthesized)
agttaccagcattatgttcagatggttttacactcgtcatttgcccattgatctctcttatggaagaccaattaatggttttaaaacaattaggaatttcagcaaccatgttaaatgctt

SEQ ID NO: 2691 - DNA, 120 bp, Artificial Sequence
  ENSG00000004700_6 (sequence is synthesized)
ctagttctaaggagcatgttaaatgggttcatgctgaaatggtaaataaaaactccgagttaaagctgatttatgtgactccagagaaaattgcaaaaagcaaaatgtttatgtcaagac

SEQ ID NO: 2692 - DNA, 120 bp, Artificial Sequence
  ENSG00000004700_7 (sequence is synthesized)
tagagaaagcctatgaagcaaggagatttactcgaattgctgtggatgaagttcactgctgtagtcagtggggacatgatttcagacctgattataaggcacttggtatcttaaagcggc

SEQ ID NO: 2693 - DNA, 120 bp, Artificial Sequence
  ENSG00000004700_8 (sequence is synthesized)
agttccctaacgcatcactaattgggctgactgcaactgcaacaaatcacgttttgacggatgctcagaaaattttgtgcattgaaaagtgttttacttttacagcttcttttaataggc

SEQ ID NO: 2694 - DNA, 120 bp, Artificial Sequence
  ENSG00000004700_9 (sequence is synthesized)
caaatctatattatgaggttcggcagaagccctcaaacactgaagattttattgaggatattgtaaagctcattaatgggagatacaaagggcaatcaggaatcatatattgtttttctc

SEQ ID NO: 2695 - DNA, 120 bp, Artificial Sequence
  ENSG00000004700_10 (sequence is synthesized)
aggtgcttaccatgccaatttggagccagaagataagaccacagttcatagaaaatggtcagccaatgaaattcaggtagtagtggcaactgttgcatttggtatgggaattgataagcc

SEQ ID NO: 2696 - DNA, 120 bp, Artificial Sequence
  ENSG00000004700_11 (sequence is synthesized)
agatgtgaggtttgttatccatcattcaatgagtaaatccatggaaaattattaccaagagagtggacgtgcaggtcgagatgacatgaaagcagactgtattttgtactacggctttgg

SEQ ID NO: 2697 - DNA, 120 bp, Artificial Sequence
  ENSG00000004700_12 (sequence is synthesized)
agatatattcagaataagttcaatggtggtgatggaaaatgtgggacagcagaagctttatgagatggtatcatactgtcaaaacataagcaaatgtcgtcgtgtgttgatggctcaaca

SEQ ID NO: 2698 - DNA, 120 bp, Artificial Sequence
  ENSG00000004700_13 (sequence is synthesized)
ttttgatgaagtatggaactcagaagcatgtaacaaaatgtgcgataactgctgtaaagacagtgcatttgaaagaaagaacataacagagtactgcagagatctaatcaagatcctgaa

SEQ ID NO: 2699 - DNA, 120 bp, Artificial Sequence
  ENSG00000004700_14 (sequence is synthesized)
gcaggcagaggaactgaatgaaaaactcactccattgaaactgattgattcttggatgggaaagggtgcagcaaaactgagagtagcaggtgttgtggctcccacacttcctcgtgaaga

SEQ ID NO: 2700 - DNA, 120 bp, Artificial Sequence
  ENSG00000004700_15 (sequence is synthesized)
tctggagaagattattgcacactttctaatacagcagtatcttaaagaagactacagttttacagcttatgctaccatttcgtatttgaaaataggacctaaagctaatcttctgaacaa

SEQ ID NO: 2701 - DNA, 120 bp, Artificial Sequence
  ENSG00000004700_16 (sequence is synthesized)
tgaggcacatgctattactatgcaagtgacaaagtccacgcagaactctttcagggctgaatcgtctcaaacttgtcattctgaacaaggtgataaaaagatggaggaaaaaaattcagg

SEQ ID NO: 2702 - DNA, 120 bp, Artificial Sequence
  ENSG00000004700_17 (sequence is synthesized)
caacttccagaagaaggctgcaaacatgcttcagcaatctggttctaagaatacaggagctaagaaaagaaaaatcgatgatgcctgatatgaatgttactaaattttctaattaaagat

SEQ ID NO: 2703 - DNA, 120 bp, Artificial Sequence
  ENSG00000004700_18 (sequence is synthesized)
ggtttatgcatgtatatgccattatttttgtagttagacaatagtttttaaaagaatttcatagatattttatatgtatggatctatattttcagagcttatctctgaagatctaaactt

SEQ ID NO: 2704 - DNA, 120 bp, Artificial Sequence
  ENSG00000004700_19 (sequence is synthesized)
ttgagaatgtttgaaaattagagatcatgaattatataattttccagtataaaacaagggaaaaatttttatgtaaaaccctttaaatgtaaaatatttgagaataagttcatacaatcg

SEQ ID NO: 2705 - DNA, 120 bp, Artificial Sequence
  ENSG00000004700_20 (sequence is synthesized)
tcttaagttttttatgcctttatatacttagctatattttttcttttgacataactatctttttgaaagcaatattatactgacagaggctcactgagtgatactttaagttaaatatgt

SEQ ID NO: 2706 - DNA, 120 bp, Artificial Sequence
  ENSG00000004700_21 (sequence is synthesized)
catccttccctttcctgctgcagggcgaggccggtctgtagcggatcacttcctttcgcccacacattggcggaggagaaaccggaaagttaatcactgccctgctctgagaactcgggc

SEQ ID NO: 2707 - DNA, 120 bp, Artificial Sequence
  ENSG00000004700_22 (sequence is synthesized)
ttgtcttgggccgcacataaaatatgctaacactgatgatagctgatgagcttaaaaaaaaaattgcaagaaaaatctcatgttttaagaaagtttacaaaaaatgtaaaatatttgaga

SEQ ID NO: 2708 - DNA, 120 bp, Artificial Sequence
  ENSG00000004700_23 (sequence is synthesized)
ataagttcatgtaattgtcttaagttttttatgcctttatatacttagctatattttttcttttgacataaccatctttttgaaagcaatattatactgacagaggttcactgagtgata

SEQ ID NO: 2709 - DNA, 90 bp, Artificial Sequence
  ENSG00000004700_24 (sequence is synthesized)
tgaaagcaatattatactgacagaggttcactgagtgatactttaagttaaatatgtagatcagggatgtccaatcttttggcttccctg

SEQ ID NO: 2710 - DNA, 120 bp, Artificial Sequence
  ENSG00000004700_25 (sequence is synthesized)
ttaaaaaaaaaaaaattgcaagaaaaatctcatgttttaagaaagtttacagatttgtgttgggctgcattcaaagctgttctgggctgcattagacccgtgggctagagttggacaagc

SEQ ID NO: 2711 - DNA, 120 bp, Artificial Sequence
  ENSG00000004700_26 (sequence is synthesized)
ttgtagatgatttcaggttataaaaccagaagtacaattcaacaaaaaaggagtaagtcatcaatataaatattagcaaacgagatattgctacatctctatttaaagtaaaatacaacc

SEQ ID NO: 2712 - DNA, 120 bp, Artificial Sequence
  ENSG00000004700_27 (sequence is synthesized)
gattttaaagttcctgaaaccatagccatattttgacatttcacaaagaatggttctagtctactagagtacatttggctaagtagataacttacctaaatttgctccaaagctaaatca

SEQ ID NO: 2713 - DNA, 120 bp, Artificial Sequence
  ENSG00000004700_28 (sequence is synthesized)
caagtaaacatatttatgtttaaaacacagaaataaataacttaagatttttatctaagcggtcagtgttgtattggaaagatatatctataaataaactttgaactgatttcaaactta

SEQ ID NO: 2714 - DNA, 120 bp, Artificial Sequence
  ENSG00000004700_29 (sequence is synthesized)
gtagcggaaagatctgctcgaggcctgggtgctttggtgtcggagatccgagagtcggagatcggagagtcggacacaggacagtcggacaccggacagtcaaacaccggagaggcgagg

SEQ ID NO: 2715 - DNA, 120 bp, Artificial Sequence
  ENSG00000004700_30 (sequence is synthesized)
gagtagcggaaagatctgctcgaggcctgggtgctttggtgtcggagatccgagagtcggagatcggagagtcggacacaggacagtcggacaccggacagtcaaacaccggagagagga

SEQ ID NO: 2716 - DNA, 120 bp, Artificial Sequence
  ENSG00000004766_0 (sequence is synthesized)
gtgaccacccactatggcttcctagtgtcagggccagctgtgtagtggctcggtgtgatttgttagctctttgaggcagggtaccctcctcaggatttcgatatgcaaaaaatcaaatct

SEQ ID NO: 2717 - DNA, 120 bp, Artificial Sequence
  ENSG00000004766_1 (sequence is synthesized)
ctcatgacccgacagggtctgaaaagccctcaagaaagcctcagtgatcttggtgccatagagagtctccgggtccctggaaaggaagaattcagggaacttcgagaacagccaagtgac

SEQ ID NO: 2718 - DNA, 120 bp, Artificial Sequence
  ENSG00000004766_2 (sequence is synthesized)
cctcaagctgaacaagagcttattaatagtattgaacaagtatatttttctgtggattcatttgatattgttaaatatgagctggagaagcttccacctgttctcaatttgcaagaatta

SEQ ID NO: 2719 - DNA, 120 bp, Artificial Sequence
  ENSG00000004766_3 (sequence is synthesized)
gaggcgtatagagacaaattgaaacaacagcaagctgcagtatctaaaaaagtggcagatttaatccttgaaaaacagcctgcttatgtaaaggaacttgaaagagttacctcattgcag

SEQ ID NO: 2720 - DNA, 120 bp, Artificial Sequence
  ENSG00000004766_4 (sequence is synthesized)
acaggtcttcaattagctgctgttatctgtacaaatgggagaagacacttgaatattgcaaaggaaggttttactcaagctagtttaggccttcttgcaaatcaaaggaaacgtcagttg

SEQ ID NO: 2721 - DNA, 120 bp, Artificial Sequence
  ENSG00000004766_5 (sequence is synthesized)
ctgattggacttctgaaatctctgagaactataaaaacattgcaaagaacagatgtacggttaagtgaaatgctggaggaggaagattatccaggagctattcagttgtgccttgaatgt

SEQ ID NO: 2722 - DNA, 120 bp, Artificial Sequence
  ENSG00000004766_6 (sequence is synthesized)
caaaaagctgccagcacttttaaacattacagttgtataagtgaactgaattcaaagctgcaagatactttggaacagattgaggaacagctggacgtagctctttccaaaatctgcaag

SEQ ID NO: 2723 - DNA, 120 bp, Artificial Sequence
  ENSG00000004766_7 (sequence is synthesized)
aattttgacattaaccattataccaaggttcaacaagcttatcgacttcttggaaaaacacagacagcaatggatcaacttcatatgcacttcacccaagccattcacaacaccgtgttt

SEQ ID NO: 2724 - DNA, 120 bp, Artificial Sequence
  ENSG00000004766_8 (sequence is synthesized)
caagttgttcttggttatgtggaactatgtgcaggaaacacagacacaaaattccaaaagctgcaatataaggatctctgtacacatgttacaccagacagctatattccatgccttgca

SEQ ID NO: 2725 - DNA, 120 bp, Artificial Sequence
  ENSG00000004766_9 (sequence is synthesized)
gacctgtgcaaagcactatgggaagttatgctcagctattataggactatggaatggcatgaaaagcatgacaatgaggatactgcttcagcttctgaagggagtaatatgataggtact

SEQ ID NO: 2726 - DNA, 120 bp, Artificial Sequence
  ENSG00000004766_10 (sequence is synthesized)
gaagaaactaattttgatcgtggctacataaaaaagaaattagaacatggacttacacgaatatggcaggatgttcagctaaaagtaaaaacctacttgcttggaactgatttgtctata

SEQ ID NO: 2727 - DNA, 120 bp, Artificial Sequence
  ENSG00000004766_11 (sequence is synthesized)
ttcaaatatgatgatttcatctttgttttggatataatcagcaggttgatgcaagttggagaagaattttgtggtagcaagtctgaagttttacaggaatctattagaaaacaaagtgtc

SEQ ID NO: 2728 - DNA, 120 bp, Artificial Sequence
  ENSG00000004766_12 (sequence is synthesized)
aattatttcaagaattaccatagaacacggctcgatgaactgagaatgttcttagagaatgagacttgggaactttgtcctgttaagtcaaatttcagcatcttgcaacttcatgaattt

SEQ ID NO: 2729 - DNA, 120 bp, Artificial Sequence
  ENSG00000004766_13 (sequence is synthesized)
aaattcatggaacagtctcgctccccatcagtttcacctagtaaacagccagtctcaacttcttcaaaaacagtgaccttgtttgagcagtactgtagtggtgggaatccatttgaaatt

SEQ ID NO: 2730 - DNA, 120 bp, Artificial Sequence
  ENSG00000004766_14 (sequence is synthesized)
caggccaaccacaaagatgaagaaacagaagatgtcttagcttctaatgggtatgaatctgatgaacaagaaaagagtgcctatcaagagtatgacagtgacagtgatgttcctgaggaa

SEQ ID NO: 2731 - DNA, 120 bp, Artificial Sequence
  ENSG00000004766_15 (sequence is synthesized)
ctcaaacgagactatgtggatgagcagacaggagatggtcctgtgaaaagtgtttctcgggaaactctaaaaagcaggaagaaatcagattacagtctaaataaagtgaatgcacctatc

SEQ ID NO: 2732 - DNA, 120 bp, Artificial Sequence
  ENSG00000004766_16 (sequence is synthesized)
ttaacaaatacaacattgaacgtcataagacttgttggaaaatatatgcagatgatgaacattcttaagccaattgcctttgatgttattcatttcatgtctcaactatttgattattac

SEQ ID NO: 2733 - DNA, 120 bp, Artificial Sequence
  ENSG00000004766_17 (sequence is synthesized)
ttgtatgcaatatataccttttttggtcggaatgattcattggaatcaactggactcggccttagtagtagtagactaagaacaactctaaacagaatacaagaaagccttattgatcta

SEQ ID NO: 2734 - DNA, 120 bp, Artificial Sequence
  ENSG00000004766_18 (sequence is synthesized)
gaagtttcagctgatcctactgccacactcacagcagcagaagaaagaaaggagaaggtgccaagtccacacctcagtcacctagtggttttgacatctggggatacgctgtatgggttg

SEQ ID NO: 2735 - DNA, 120 bp, Artificial Sequence
  ENSG00000004766_19 (sequence is synthesized)
gcagaaagagtggtagccacggaatccttggtattcttggctgaacagtttgagttccttcagccacatctggatgctgtgatgcctgcagtcaaaaagccctttcttcagcagttctat

SEQ ID NO: 2736 - DNA, 120 bp, Artificial Sequence
  ENSG00000004766_20 (sequence is synthesized)
tctcagacagtctcaaccgccagtgaactacggaaaccaatttactggattgtagctggtaaagcccttgattatgaacagatgctgcttctcatggctaatgtgaaatgggatgtaaaa

SEQ ID NO: 2737 - DNA, 120 bp, Artificial Sequence
  ENSG00000004766_21 (sequence is synthesized)
gaaattatgtcacagcacaacatatatgtagatgcactattaaaggaatttgagcagtttaacaggaggctaaatgaagtttctaagagagttcgcatacccttgcctgtgtctaatata

SEQ ID NO: 2738 - DNA, 120 bp, Artificial Sequence
  ENSG00000004766_22 (sequence is synthesized)
ctttgggaacattgtatacgattggctaatcgaactattgtagaaggatatgccaatgtcaagaaatgcagtaatgagggtcgtgccctgatgcaattggattttcaacagtttttaatg

SEQ ID NO: 2739 - DNA, 120 bp, Artificial Sequence
  ENSG00000004766_23 (sequence is synthesized)
atttgtagaaacttatattaaagcttattacctaactgagaatgacatggaacggtggatcaaagagcacagggaatattcaacgaagcagctgaccaatctggtgaatgtttgcctggg

SEQ ID NO: 2740 - DNA, 120 bp, Artificial Sequence
  ENSG00000004766_24 (sequence is synthesized)
atcccatatcaataagaaagcaagacaaaaacttctagcagctatagatgatatagacagacctaaaagataatgaacacagctctctttcctcaatggcattgatcctcactcaacata

SEQ ID NO: 2741 - DNA, 120 bp, Artificial Sequence
  ENSG00000004766_25 (sequence is synthesized)
tatgacctgaaagccagtttttttatgcacttctgacaactatctgctaagaaaactttgtgcatgtttttttgactggaaagtggaaaatattgaaatgtgtgtggtgttctcatgact

SEQ ID NO: 2742 - DNA, 120 bp, Artificial Sequence
  ENSG00000004766_26 (sequence is synthesized)
tttatatgctgtggtctcttcaacttttggtctcatttgttgtaatctgaaatgatgttgccgccttgtcataacaatggttatgtgactacagttatacattttacagaagaatgtacc

SEQ ID NO: 2743 - DNA, 120 bp, Artificial Sequence
  ENSG00000004766_27 (sequence is synthesized)
ataagtatataattagaagaacagtggcttaatatatgtatgggaagtttatggaaaatgaagttggcacttttctaccctctgagcttggttcttaataagcataatgtgagggtgaat

SEQ ID NO: 2744 - DNA, 120 bp, Artificial Sequence
  ENSG00000004766_28 (sequence is synthesized)
atgtagtatctcctaattatgagcactgcatgagaattaaaaaacacatgtaagtaaaatagttgaaaaatcagtatgttctctgtttttaaaatgtcaaagtttatgtcagggttaatt

SEQ ID NO: 2745 - DNA, 120 bp, Artificial Sequence
  ENSG00000004766_29 (sequence is synthesized)
tagttataacaaagtgatcataatggtgaaatttaataaatatactctagtatgatcagcctatgtgagactacattttgattttttgtgtggcatgcagatgtcatgaactatagtgca

SEQ ID NO: 2746 - DNA, 120 bp, Artificial Sequence
  ENSG00000004766_30 (sequence is synthesized)
gcttttagtgtgttctaattttaattgttttatatcctgaaaccaatggtgaaaagtaatttcattgagggtaccttttcaatgcctgagtagcatacagaatcatgattatgagacttt

SEQ ID NO: 2747 - DNA, 120 bp, Artificial Sequence
  ENSG00000004766_31 (sequence is synthesized)
cttttatctttctttataaaaatatgtggtttttttgttgaaagttttggtctctttaaattcagattttgtcttaggacagtaaaacccaggttgactgactcaggaaacagttgtctg

SEQ ID NO: 2748 - DNA, 120 bp, Artificial Sequence
  ENSG00000004766_32 (sequence is synthesized)
ctagtcactcataaatgtacggtcatatgttcactcttcttaaatatccaccttttataacacaaatgtaaaatagtatcagtctagccaatgatgaactctggaatccacttagtcttc

SEQ ID NO: 2749 - DNA, 120 bp, Artificial Sequence
  ENSG00000004766_33 (sequence is synthesized)
agtaagtatgtgctgttcctctaaactttgccctgaagccagggatcttctcctaatgtatgtgacataaaaatccattttccatgtactcttgccaactgtctgataaggaattttgtg

SEQ ID NO: 2750 - DNA, 120 bp, Artificial Sequence
  ENSG00000004766_34 (sequence is synthesized)
tgtgttctttctgactggagagtggaggacatctaagcttgtgtggcattggtccaatgattgccatgcatgacctgtaacatcaacagctcacagaatcctaaggaatcatgtgagaaa

SEQ ID NO: 2751 - DNA, 120 bp, Artificial Sequence
  ENSG00000004766_35 (sequence is synthesized)
caggccttgggtcttatgagtcttctgggacctaaggtgataaaatggatggcacagaatggcatgtgatcaagcatggaggtgataaggaaacaattgctactctgtgtccatcagtcc

SEQ ID NO: 2752 - DNA, 120 bp, Artificial Sequence
  ENSG00000004766_36 (sequence is synthesized)
ctgcgatgtctgtaaatgcacagtgtaatgtgaagcactttcagaatatgtttgtgtgtgtctgtatgctgagtgttttcttttcatcctctcatgtcggagttcatttactgtcaattt

SEQ ID NO: 2753 - DNA, 120 bp, Artificial Sequence
  ENSG00000004766_37 (sequence is synthesized)
aaaactttcctcttgtaaaaaggtatgagtttggtgccattatgatttggttgtggctagattatatacttgtgaagtagattctgcctgtagccattatttatatgcagccacttgaag

SEQ ID NO: 2754 - DNA, 120 bp, Artificial Sequence
  ENSG00000004766_38 (sequence is synthesized)
aaaacaaacatgagataagcttggtccttgagtttaaatggcatatttagctgggcacataaagagctaatcaatcttttaaaatttgcagttgatgaagagctgcttatttttctcttc

SEQ ID NO: 2755 - DNA, 120 bp, Artificial Sequence
  ENSG00000004766_39 (sequence is synthesized)
tacatggattttatagttggtttcctttaatttctactttagttggccctagataatatgaacaggaatcacctgcctggtagagcccagtgttttccaaggtaataggaattgatacaa

SEQ ID NO: 2756 - DNA, 120 bp, Artificial Sequence
  ENSG00000004766_40 (sequence is synthesized)
aagaattacttatcttgttagagactcgaccatgcaatctgacagaccttttaacctacccttactttgctttctccatcttcaaaatgaaatggtggatctttttaatgctttttgaaa

SEQ ID NO: 2757 - DNA, 120 bp, Artificial Sequence
  ENSG00000004766_41 (sequence is synthesized)
aaggttttttttttttttttttttcattaaaaggtagcttaataagtgctagctagcatcaaaacagtaacaggaggtttgagtcatgaagttacctaatcacaagagagttaccagaca

SEQ ID NO: 2758 - DNA, 120 bp, Artificial Sequence
  ENSG00000004766_42 (sequence is synthesized)
tttctcaaatactttatacagtaatattgagttataaccatgtaacattttatgaaactaattttcagataaatacaattgaaaagctgagaatgtaaatggaattatacgtgttccaaa

SEQ ID NO: 2759 - DNA, 120 bp, Artificial Sequence
  ENSG00000004766_43 (sequence is synthesized)
aactatcattaccaaaaatttattatttttgagtctaaactttccttaactttgacattttccatgaaagtttcctgtagaatttaccatgggagcatggtaaattagcattccctgaga

SEQ ID NO: 2760 - DNA, 120 bp, Artificial Sequence
  ENSG00000004766_44 (sequence is synthesized)
aagaatgatcatttctacaaatacattgtcttgcatttaaaaatgctaggggggcacatagcaattcaaatgaactagtttgctttggtttataaaaccaacagagattttgtaagttca

SEQ ID NO: 2761 - DNA, 120 bp, Artificial Sequence
  ENSG00000004766_45 (sequence is synthesized)
ctttaactaataaactcatttacacaacttattaaatgaatttctcttgaaaccagggccatatggtattttatcatatctttaaataaaatttcgaaatttctatttagctgagtgcta

SEQ ID NO: 2762 - DNA, 120 bp, Artificial Sequence
  ENSG00000004766_46 (sequence is synthesized)
aagtgaaactttgttagattaaatagctttttcttaactcaccaaaaagtagtaaaaggcttgtaattcaattcaccttgtaagcatagttgtcttttgtaataaaaaactagatctgaa

SEQ ID NO: 2763 - DNA, 120 bp, Artificial Sequence
  ENSG00000004766_47 (sequence is synthesized)
atctataatttataattgattttttaaattatggatgtggtttctagaatatcattccttaagtgaacatatatcatgatctaaagactacactaagagggtttgtgggaaatatctcta

SEQ ID NO: 2764 - DNA, 120 bp, Artificial Sequence
  ENSG00000004766_48 (sequence is synthesized)
agtgtacttatgggttttaaaaaattactatttttatattatttagactagtgcttcacaaactgtttgtcgtaaagcacctacttttttctttctaaaatttccaatctgttacaggct

SEQ ID NO: 2765 - DNA, 120 bp, Artificial Sequence
  ENSG00000004766_49 (sequence is synthesized)
tcaaagagcacagggtgagagctggaaaatagttaattaagtttttattcctttttctttgtgctgttcttgttgggtgtgttatttaattcaaaatcatgagagtgaaatataaagaaa

SEQ ID NO: 2766 - DNA, 120 bp, Artificial Sequence
  ENSG00000004766_50 (sequence is synthesized)
atattatcaccttggaggatgttcagctaaaagtaaaaacctacttgcttggaactgatttgtctatattcaaatatgatgatttcatctttgttttggatataatcagcaggtagtatt

SEQ ID NO: 2767 - DNA, 120 bp, Artificial Sequence
  ENSG00000004766_51 (sequence is synthesized)
taagatcttgtcttattctttagtttgagtcattcaaccatgataaatcatgagctagtgagttatcatctataacttctttatggaaatgaagataatttttgctgctaagtttgttga

SEQ ID NO: 2768 - DNA, 120 bp, Artificial Sequence
  ENSG00000004766_52 (sequence is synthesized)
agaaaagagaaccaatgttgtttgtttgtacagtgtcagttgtagaagagtgtaggagttccataaaaatttgggaaacagtaaaatgtagtaagaggaaaatatcattgtattatttat

SEQ ID NO: 2769 - DNA, 120 bp, Artificial Sequence
  ENSG00000004766_53 (sequence is synthesized)
attagtactctccaatataactttccaagatgatagaactgttcataatctgtgctgtcccatgcaatagccattagccacatgaaactactgagtacttgagacatggctactgtgagg

SEQ ID NO: 2770 - DNA, 120 bp, Artificial Sequence
  ENSG00000004766_54 (sequence is synthesized)
gagacatggctactgtgagggagtgcaatgtttcattatatttaaatattttagtataataattttattttctttttataattatagactaacagattttaattttgttctgcttaattt

SEQ ID NO: 2771 - DNA, 120 bp, Artificial Sequence
  ENSG00000004766_55 (sequence is synthesized)
atgaagtccaagaatgtacataaactcatatccaaggcattcgttgcctggcatcagaatacctagaaaggtaaattagtaatgagaagatttctaatgagtatatcatcagatgaaagt

SEQ ID NO: 2772 - DNA, 120 bp, Artificial Sequence
  ENSG00000004766_56 (sequence is synthesized)
aaaactgagaaatttgaagtccgatgagttttcccgaccacaaattagactgcatcactcctgttgactacatggctgtgtaactgaatcagtggttctctcctggatggtgctgaagag

SEQ ID NO: 2773 - DNA, 120 bp, Artificial Sequence
  ENSG00000004766_57 (sequence is synthesized)
attgcattgtctatatgtagaattcagcagcatgtcttacgatctatactcttaatctttgaatttatggattaattattcagttagtatgtatttatttagcacttagtttgtctcaga

SEQ ID NO: 2774 - DNA, 120 bp, Artificial Sequence
  ENSG00000004766_58 (sequence is synthesized)
gaatgatgcagagggtaattagagatatggttgtgtacaacatatttaagaaagagcaagatgaataccagttataaataaagaacaacagagcagtgttcacgagtcacatttattttg

SEQ ID NO: 2775 - DNA, 120 bp, Artificial Sequence
  ENSG00000004766_59 (sequence is synthesized)
agtgctctgataatctggttatgtgaaggattatttgcaaataatatacccagtataattttcccagtataattctgggaaaactattatctttgtgttgtaactattatttgaaaagat

SEQ ID NO: 2776 - DNA, 120 bp, Artificial Sequence
  ENSG00000004766_60 (sequence is synthesized)
tgtagtgacttaattactattcatatatctctcctttagattttaaatttatatttcctttatcttggtacatacctatttgaaaatgctactaaaataaaaataaatctttgccaaaaa

SEQ ID NO: 2777 - DNA, 80 bp, Artificial Sequence
  ENSG00000004766_61 (sequence is synthesized)
gaaatcagattacagtctaaataaagtgaatgcacctatcttaacaaatacaacattgaacgtcataagacttgttcgca

SEQ ID NO: 2778 - DNA, 79 bp, Artificial Sequence
  ENSG00000004766_62 (sequence is synthesized)
cagcttatcatttcttttagagaggaaccttaagggtttctattttgttttatgggtaaattctagcagcctacacctc

SEQ ID NO: 2779 - DNA, 120 bp, Artificial Sequence
  ENSG00000004766_63 (sequence is synthesized)
ctattttgttttatgggtaaattctagcagcctacacctctaactgctggagaggagaggggaatggtggtggtggggaatgcagactgttacagtttgtcccatatgtgaacctgtagc

SEQ ID NO: 2780 - DNA, 120 bp, Artificial Sequence
  ENSG00000004766_64 (sequence is synthesized)
ttgatcgtttttcagccccgtttctgactcctgcagttccagcttgattctaagtagttactgtcctagtgaatagcttccacctcctttttggccctcttatggttttattggcttatg

SEQ ID NO: 2781 - DNA, 120 bp, Artificial Sequence
  ENSG00000004766_65 (sequence is synthesized)
tttttccatcaacgtgttcccatctactgtctgtcatctacaacagacgttttgagatgtcaaatgttttgagctgctggctgcttgtttttgtaaataaagttttattggcacacccat

SEQ ID NO: 2782 - DNA, 120 bp, Artificial Sequence
  ENSG00000004766_66 (sequence is synthesized)
attgatattctaagaggaattaaagttttttgattctgtaacttttggttagaatatgaacagagatttttttttatcaggggctttaagaaaaaatgtttctattccaatgactcctgt

SEQ ID NO: 2783 - DNA, 120 bp, Artificial Sequence
  ENSG00000004766_67 (sequence is synthesized)
gtttgttacaaaaggatgtttggatttttccttaatcaggaatttgttgtccttcatgattaagtctgaatattattaatctcatgtccttaaaaagttttatttaacgaagtacatttt

SEQ ID NO: 2784 - DNA, 120 bp, Artificial Sequence
  ENSG00000004766_68 (sequence is synthesized)
gtagactcagagggtatataatgtggttaaaacattacagtagtttgttttgaactatgaagtacttgtcaggtttaatattttcacaattttatgtagattttccaataagtatattat

SEQ ID NO: 2785 - DNA, 120 bp, Artificial Sequence
  ENSG00000004766_69 (sequence is synthesized)
aagataattcagtgggagacaacatgtagtctcttttaactcagctcttggttctgaaacaggacttcctaatttgcagcttcacgtgttgttagatagccagcatgactccctcaaaat

SEQ ID NO: 2786 - DNA, 120 bp, Artificial Sequence
  ENSG00000004766_70 (sequence is synthesized)
gatatgtcagcattgtacattttgtacctttatctgtaaaacaagtccattttatttatcacatatttcagagggtccttttatccccaaaatgtcataacttctctcataatatatggc

SEQ ID NO: 2787 - DNA, 120 bp, Artificial Sequence
  ENSG00000004766_71 (sequence is synthesized)
ttttcatactcttactgttcaagggcttccttgaaaagcttgaaacaggtgccatggttttgaaagttaattgtatcttttgtttgtataggattatatgtttacctatacaacatttaa

SEQ ID NO: 2788 - DNA, 120 bp, Artificial Sequence
  ENSG00000004766_72 (sequence is synthesized)
tgtgatagatgtaaatgttttcttcccttaaacggtcccctcttttagaaggaagtttaagattttgctaaacaatttaaactctacattttgaaatctgaataaagaaattttactgtt

SEQ ID NO: 2789 - DNA, 120 bp, Artificial Sequence
  ENSG00000004776_0 (sequence is synthesized)
actgcaacgcggaggagcaggatggagatccctgtgcctgtgcagccgtcttggctgcgccgcgcctcggccccgttgcccggactttcggcgcccggacgcctctttgaccagcgcttc

SEQ ID NO: 2790 - DNA, 120 bp, Artificial Sequence
  ENSG00000004776_1 (sequence is synthesized)
ggcgaggggctgctggaggccgagctggctgcgctctgccccaccacgctcgccccctactacctgcgcgcacccagcgtggcgctgcccgtcgcccaggtgccgacggaccccggccac

SEQ ID NO: 2791 - DNA, 120 bp, Artificial Sequence
  ENSG00000004776_2 (sequence is synthesized)
ttttcggtgctgctagacgtgaagcacttctcgccggaggaaattgctgtcaaggtggtgggcgaacacgtggaggtgcacgcgcgccacgaggagcgcccggatgagcacggattcgtc

SEQ ID NO: 2792 - DNA, 120 bp, Artificial Sequence
  ENSG00000004776_3 (sequence is synthesized)
gcgcgcgagttccaccgtcgctaccgcctgccgcctggcgtggatccggctgccgtgacgtccgcgctgtcccccgagggcgtcctgtccatccaggccgcaccagcgtcggcccaggcc

SEQ ID NO: 2793 - DNA, 120 bp, Artificial Sequence
  ENSG00000004776_4 (sequence is synthesized)
ccaccgccagccgcagccaagtaggagggggctgggccgcgcccgcaccccgggagcctcctcaggctccctctattaaagccgatctgactccgcccagccagatgtcccgagtgcgcc

SEQ ID NO: 2794 - DNA, 120 bp, Artificial Sequence
  ENSG00000004776_5 (sequence is synthesized)
aaggactgtcctctcacccactcctggattctgccctgacctccatcctggacactgccttgataacatagacccttccactgacaccctcgctctcacaccccctccagctttccgacc

SEQ ID NO: 2795 - DNA, 120 bp, Artificial Sequence
  ENSG00000004776_6 (sequence is synthesized)
cttccagaccctaccagcactaccctaaccctcagccgacagtctcagccccaccgacccactttcttggcatatagccccacttaagacccctcctctacttccttctgagtcctctac

SEQ ID NO: 2796 - DNA, 120 bp, Artificial Sequence
  ENSG00000004776_7 (sequence is synthesized)
aaagacatccgggtactacatttccatcccttccctattttgacaccaaattatggtgtagacagccctcccccaaccccaggccagtcaggcacaatccccccaccccccaaacgtcct

SEQ ID NO: 2797 - DNA, 120 bp, Artificial Sequence
  ENSG00000004776_8 (sequence is synthesized)
ggactgcacagacctcccactccagaccatccaggcctggttcccaagacccgatccttcccctgcaaccagacagtctacaactgccccctccagcccattttctgccgtgaaacccca

SEQ ID NO: 2798 - DNA, 120 bp, Artificial Sequence
  ENSG00000004776_9 (sequence is synthesized)
gccagccacaccagactctggaaccctttttcgactgccccaactcttggacaccaggccaactagaacacccaacaccaaactgtacagactctcccaccccaacctccccagactctg

SEQ ID NO: 2799 - DNA, 120 bp, Artificial Sequence
  ENSG00000004776_10 (sequence is synthesized)
cacggatgtcctaggccccctccccaactctaaccagaccccatccccctaagtccctttgtcttgacccccaagtcttcaaccagatatcctcggcaacccacctcccaccctcctcct

SEQ ID NO: 2800 - DNA, 120 bp, Artificial Sequence
  ENSG00000004776_11 (sequence is synthesized)
cttctccttcaagacccaactgagcacccgctctgattccccacagcctttctccctgccaccactcccttagtctttcccaggcttactctcccaataaatgtgctagagctctgccaa

SEQ ID NO: 2801 - DNA, 120 bp, Artificial Sequence
  ENSG00000004776_12 (sequence is synthesized)
gaccaatgaaagagaggaaacagaagtacccggagggaggtgtttcaggattggctgggacgactgcctgcccgacagggcgtgtttgattggagaacctgccgagtgtagcagtaattg

SEQ ID NO: 2802 - DNA, 120 bp, Artificial Sequence
  ENSG00000004777_0 (sequence is synthesized)
tgtgtcgccatggcggcggcagcggcgacgagaacggcgagcgaggggtcgagcgcggccggggcctgaggaggctacgcgaccatggtggcacgcagcactgacagcctggatggccca

SEQ ID NO: 2803 - DNA, 120 bp, Artificial Sequence
  ENSG00000004777_1 (sequence is synthesized)
ggggagggctcggtgcagcctctacccactgctggggggcccagtgtgaaggggaagcctgggaagaggctctcagctcctcgaggccccttcccgcggctggctgactgcgcccatttc

SEQ ID NO: 2804 - DNA, 120 bp, Artificial Sequence
  ENSG00000004777_2 (sequence is synthesized)
cactacgagaacgttgactttggccacattcagctcctgctgtctccagaccgtgaagggcccagcctctctggagagaatgagctggtgttcggggtgcaggtgacctgtcagggccgt

SEQ ID NO: 2805 - DNA, 120 bp, Artificial Sequence
  ENSG00000004777_3 (sequence is synthesized)
tcctggccggttctccggagttacgatgactttcgttccctggatgcccacctccaccggtgcatatttgaccggaggttctcctgccttccggagcttcccccgccccccgagggtgcc

SEQ ID NO: 2806 - DNA, 120 bp, Artificial Sequence
  ENSG00000004777_4 (sequence is synthesized)
agggctgcccagatgctggtgccactgctgctgcagtacctggagacactgtcaggactggtggacagtaacctcaactgcgggcctgtgctcacctggatggagctggacaatcacggc

SEQ ID NO: 2807 - DNA, 120 bp, Artificial Sequence
  ENSG00000004777_5 (sequence is synthesized)
cggcgactgctcctcagtgaggaggcgtcactcaatatccctgcagtggcggccgcccatgtgatcaaacggtatacagcccaggcgccagatgagctgtcctttgaggtgggagacatt

SEQ ID NO: 2808 - DNA, 120 bp, Artificial Sequence
  ENSG00000004777_6 (sequence is synthesized)
gtctcggtgatcgacatgccacccacagaggatcggagctggtggcggggcaagcgaggcttccaggtcgggttcttccccagtgagtgtgtggaactcttcacagagcggccaggtccg

SEQ ID NO: 2809 - DNA, 120 bp, Artificial Sequence
  ENSG00000004777_7 (sequence is synthesized)
ggcctgaaggcggatgccgatggccccccatgtggcatcccggctccccagggtatctcgtctctgacctcagctgtgccacggcctcgtgggaagctggccggcctgctccgcaccttc

SEQ ID NO: 2810 - DNA, 120 bp, Artificial Sequence
  ENSG00000004777_8 (sequence is synthesized)
atgcgctcccgcccttctcggcagcggctgcggcagcggggaatcctgcgacagagggtgtttggctgcgatcttggcgagcacctcagcaactcaggccaggatgtgccccaggtgctg

SEQ ID NO: 2811 - DNA, 120 bp, Artificial Sequence
  ENSG00000004777_9 (sequence is synthesized)
cgctgctgctccgagttcattgaggcccacggggtggtggatgggatctaccggctctcaggcgtgtcttccaacatccagaggcttcggcacgagtttgacagtgagaggatcccggag

SEQ ID NO: 2812 - DNA, 120 bp, Artificial Sequence
  ENSG00000004777_10 (sequence is synthesized)
ctgtctggccctgcattcctgcaggacatccacagcgtgtcctccctctgcaagctctacttccgagagcttccgaaccctctgctcacctaccagctctatgggaagttcagtgaggcc

SEQ ID NO: 2813 - DNA, 120 bp, Artificial Sequence
  ENSG00000004777_11 (sequence is synthesized)
atgtcagtgcctggggaggaggagcgtctggtgcgggtgcacgatgtcatccagcagctgcccccaccacattacaggaccctggagtacctgctgaggcacctggcccgcatggcgaga

SEQ ID NO: 2814 - DNA, 120 bp, Artificial Sequence
  ENSG00000004777_12 (sequence is synthesized)
cacagtgccaacaccagcatgcatgcccgcaacctggccattgtctgggcacccaacctgctacggtccatggagctggagtcagtgggaatgggtggcgcggcggcgttccgggaagtt

SEQ ID NO: 2815 - DNA, 120 bp, Artificial Sequence
  ENSG00000004777_13 (sequence is synthesized)
cgggtgcagtcggtggtggtggagtttctgctcacccatgtggacgtcctgttcagcgacaccttcacctccgccggcctcgaccctgcaggccgctgcctgctccccaggcccaagtcc

SEQ ID NO: 2816 - DNA, 120 bp, Artificial Sequence
  ENSG00000004777_14 (sequence is synthesized)
cttgcgggcagctgcccctccacccgcctgctgacgctggaggaagcccaggcacgcacccagggccggctggggacgcccacggagcccacaactcccaaggccccggcctcacctgcg

SEQ ID NO: 2817 - DNA, 120 bp, Artificial Sequence
  ENSG00000004777_15 (sequence is synthesized)
gaaaggaggaaaggggagagaggggagaagcagcggaagccagggggcagcagctggaagacgttctttgcactgggccggggccccagtgtccctcgaaagaagcccctgccctggctg

SEQ ID NO: 2818 - DNA, 120 bp, Artificial Sequence
  ENSG00000004777_16 (sequence is synthesized)
ccgcagccttcaggcagcagacccgacaccgtcacactgagatctgccaagagcgaggagtctctgtcatcgcaggccagcggggctgaactgctgggggctgggggagcacctgcctca

SEQ ID NO: 2819 - DNA, 120 bp, Artificial Sequence
  ENSG00000004777_17 (sequence is synthesized)
gccaccccaacaccagctctcagccccggccggagcctgcgcccccatctcatacccctgctgctgcgaggagccgaggccccgctgactgacgcctgccagcaggagatgtgcagcaag

SEQ ID NO: 2820 - DNA, 120 bp, Artificial Sequence
  ENSG00000004777_18 (sequence is synthesized)
ctccggggagcccagggcccactcggtcctgatatggagtcaccactgccaccccctcccctgtctctcctgcgccctgggggtgccccacccccgccccctaagaacccagcacgcctc

SEQ ID NO: 2821 - DNA, 120 bp, Artificial Sequence
  ENSG00000004777_19 (sequence is synthesized)
atggccctggccctggctgagcgggctcagcaggtggccgagcaacagagccagcaggagtgtgggggcaccccacctgcttcccaatcccccttccaccgctcgctgtctctggaggtg

SEQ ID NO: 2822 - DNA, 120 bp, Artificial Sequence
  ENSG00000004777_20 (sequence is synthesized)
ggcggggagcccctggggacctcagggagtgggccacctcccaactccctagcacacccgggtgcctgggtcccgggacccccaccctacttaccaaggcaacaaagtgatgggagcctg

SEQ ID NO: 2823 - DNA, 120 bp, Artificial Sequence
  ENSG00000004777_21 (sequence is synthesized)
ctgaggagccagcggcccatggggacctcaaggaggggactccgaggccctgcccaggtcagtgcccagctcagggcaggtggcgggggcagggatgcgccagaggcagcagcccagtcc

SEQ ID NO: 2824 - DNA, 120 bp, Artificial Sequence
  ENSG00000004777_22 (sequence is synthesized)
ccatgttctgtcccctcacaggttcctacccccggcttcttctccccagcccccagggagtgcctgccacccttcctcggggtccccaagccaggcttgtaccccctgggccccccatcc

SEQ ID NO: 2825 - DNA, 120 bp, Artificial Sequence
  ENSG00000004777_23 (sequence is synthesized)
ttccagcccagttccccagccccagtctggaggagctctctgggcccccctgcaccactcgacaggggagagaacctgtactatgagatcggggcaagtgaggggtccccctattctggc

SEQ ID NO: 2826 - DNA, 120 bp, Artificial Sequence
  ENSG00000004777_24 (sequence is synthesized)
cccacccgctcctggagtccctttcgctccatgccccccgacaggctcaatgcctcctacggcatgcttggccaatcacccccactccacaggtcccccgacttcctgctcagctacccg

SEQ ID NO: 2827 - DNA, 120 bp, Artificial Sequence
  ENSG00000004777_25 (sequence is synthesized)
ccagccccctcctgctttccccctgaccaccttggctactcagccccccagcaccctgctcggcgccctacaccgcctgagcccctctacgtcaacctagctctagggcccaggggtccc

SEQ ID NO: 2828 - DNA, 120 bp, Artificial Sequence
  ENSG00000004777_26 (sequence is synthesized)
tcacctgcctcttcctcctcctcttcccctcctgcccacccccgaagccgttcagatcccggtcccccagtcccccgccttccccagaaacaacgggcaccctggggaccccgtacccct

SEQ ID NO: 2829 - DNA, 120 bp, Artificial Sequence
  ENSG00000004777_27 (sequence is synthesized)
catagggtgccgggtccctggggccctcctgagcctctcctgctctacagggcagccccgccagcctacggaagggggggcgagctccaccgagggtccttgtacagaaatggagggcaa

SEQ ID NO: 2830 - DNA, 120 bp, Artificial Sequence
  ENSG00000004777_28 (sequence is synthesized)
agaggggagggggctggtcccccacccccttaccccactcccagctggtccctccactctgagggccagacccgaagctactgctgagcaccagctgggaggggccgtccttccttccct

SEQ ID NO: 2831 - DNA, 120 bp, Artificial Sequence
  ENSG00000004777_29 (sequence is synthesized)
tcaccctcactggatcttggcccaaccaaatcccttgttttgtattttcttgaaccccgaccactaccccaggtttctaactttgtaacttgcttctgatgtgggtccctaacctataat

SEQ ID NO: 2832 - DNA, 120 bp, Artificial Sequence
  ENSG00000004777_30 (sequence is synthesized)
ctcagcttccctaccctggactgaagggtctgcccatccccccaccaccctccatcctgggggccctcgcacaaatctggggtgggaggggctaggctgaccccatcctcctctccctcc

SEQ ID NO: 2833 - DNA, 120 bp, Artificial Sequence
  ENSG00000004777_31 (sequence is synthesized)
aggagcccccagcatgtcctgacctgtgcacggggatggggggacaactcctacccttctttccccacatgccccactaaaccatctgacaacattaatgaataaaatggtgaaaatgtg

SEQ ID NO: 2834 - DNA, 120 bp, Artificial Sequence
  ENSG00000004777_32 (sequence is synthesized)
cacctgctggctcctgcgagagcctgtcctcgtcctcctcctccgagtcctcctcctctgagtcctcctcttcctcctctgagtcctcagcagctgggctgggggcactctctgggtctc

SEQ ID NO: 2835 - DNA, 120 bp, Artificial Sequence
  ENSG00000004777_33 (sequence is synthesized)
caccgtacctcagcctggctagatgatggtgatgagctggacttcagcccaccccgctgcctggagggactccgggggctggactttgatcccttaaccttccgctgcagcagccccacc

SEQ ID NO: 2836 - DNA, 120 bp, Artificial Sequence
  ENSG00000004777_34 (sequence is synthesized)
gcacctcccgccagcccagcaccccccgcccctgcctctgccttcccacccagggtgaccccccaggccatctcgccccgggggcccaccagccccgcctcgcctgctgccctagacatc

SEQ ID NO: 2837 - DNA, 120 bp, Artificial Sequence
  ENSG00000004777_35 (sequence is synthesized)
atgctcagtattagcaggctccattgggaatggctttatggggggcataagcatgatctggcatttccccctaagcattttcctagaaaaaaaaaatcaaggctggagattggcccgtaa

SEQ ID NO: 2838 - DNA, 120 bp, Artificial Sequence
  ENSG00000004777_36 (sequence is synthesized)
taagcagtagaaggggaaacaagaaaatgtccagtgggcaggggaggccaaatcgcagaaagcctcgggttacgtcctaggcaaggtatatgaggcaacgagaaacgtccatgggcggag

SEQ ID NO: 2839 - DNA, 120 bp, Artificial Sequence
  ENSG00000004777_37 (sequence is synthesized)
gatagagaaatatttaaatactgatgctggtgccactgctgctgcagtacctggagacactgtcaggactggtggacagtaacctcaactgcgggcctgtgctcacctggatggagctgg

SEQ ID NO: 2840 - DNA, 120 bp, Artificial Sequence
  ENSG00000004777_38 (sequence is synthesized)
cctgccttgccagcccgggtgggcatgctgcggggccggggcttgggctgtggcgcttggctttgcctgtggccttgggcggccccagagctgacagctgccccctttccacactcccca

SEQ ID NO: 2841 - DNA, 120 bp, Artificial Sequence
  ENSG00000004777_39 (sequence is synthesized)
cacagagagattttagatggcaaccgtgtggcatctgctgtggaggatgaaggtgcagaggtggatggggaagccttcaggtggggaagcctttgggtgggagagtcctgggacatgtga

SEQ ID NO: 2842 - DNA, 120 bp, Artificial Sequence
  ENSG00000004777_40 (sequence is synthesized)
gaggggactccgaggccctgcccaggagcccccagcatgtcctgacctgtgcacggggatggggggacaactcctacccttctttccccacatgccccactaaaccatctgacaacatta

SEQ ID NO: 2843 - DNA, 120 bp, Artificial Sequence
  ENSG00000004779_0 (sequence is synthesized)
gcagtgcatcctgggttggcgtagccatggcgtctcgtgtcctttcagcctatgtcagccgcctgcccgcggcctttgcgccgctgccccgggtccggatgctggccgtggcccggcctc

SEQ ID NO: 2844 - DNA, 120 bp, Artificial Sequence
  ENSG00000004779_1 (sequence is synthesized)
tcagcaccgctctctgctccgcggggacccagacgaggctcgggactttgcagccggccttagtgctcgcgcaggttcctggtagagttacacagttgtgccgccagtatagcgacatgc

SEQ ID NO: 2845 - DNA, 120 bp, Artificial Sequence
  ENSG00000004779_2 (sequence is synthesized)
gacccagagaagctttcagtaaattctcattttatgaaagacctgggcttagacagtttggaccaagtggagattatcatggccatggaagacgaatttgggtttgaaattcctgatata

SEQ ID NO: 2846 - DNA, 120 bp, Artificial Sequence
  ENSG00000004779_3 (sequence is synthesized)
gatgctgaaaagttaatgtgtccacaagaaattgtagattacattgcagataagaaggatgtatatgaataaagtatcagaccctttggctttgctgagagaggactcagatgatagtga

SEQ ID NO: 2847 - DNA, 120 bp, Artificial Sequence
  ENSG00000004779_4 (sequence is synthesized)
cgaatgtctggcagtgaggacacattttggcattcttgctgactctgacagagtgattctgatggacttgtatttaaattgtatgtgttttactctttgaaaataaatctataaaaccaa

SEQ ID NO: 2848 - DNA, 120 bp, Artificial Sequence
  ENSG00000004779_5 (sequence is synthesized)
gttcttcaataaaggaaacttaagaagaaacagaaaatggaaatgcttgaccaagatttttcactacttataaaatgcaagccctttcctgttgtctgccactcaaaggggcccagccct

SEQ ID NO: 2849 - DNA, 120 bp, Artificial Sequence
  ENSG00000004779_6 (sequence is synthesized)
ggtggtgatctttgagaggttgagaactgtcattcctggatagaactcccttgattgtcagctgtcctcacaaaagcagaacattgtacaaagtactgaacagggtaacctggaaacaga

SEQ ID NO: 2850 - DNA, 120 bp, Artificial Sequence
  ENSG00000004779_7 (sequence is synthesized)
cctctgtctccctcaattactcagccaaggtaagcccagcctgctgggtaagacactgaagtgacctggctcttaagtaggcaagagaggcctcatgtataagaggatggactttggagt

SEQ ID NO: 2851 - DNA, 120 bp, Artificial Sequence
  ENSG00000004779_8 (sequence is synthesized)
tttgaccaataaggatttgaattgcgcgggtccacttatatgcggattttttttcaaccaaacgcgaccagtatttacgggatgtgccgccccgcgtataaggagggcaggctcttccta

SEQ ID NO: 2852 - DNA, 120 bp, Artificial Sequence
  ENSG00000004779_9 (sequence is synthesized)
cagagatccagttagaaggagcagcaagaccttccaggaggccatgctggaaggacatggggtgaggaggatacctaaccttcccttgcctcagtttctcatctgtaaaaaggagggtga

SEQ ID NO: 2853 - DNA, 120 bp, Artificial Sequence
  ENSG00000004779_10 (sequence is synthesized)
tagtatcatggatctcaccagaatactggagagctgaagaaagatgatgtgtgtaaagtgcaatatcatagcctgagctgataagaaattaatggaggccgggacgtggtggcttatgca

SEQ ID NO: 2854 - DNA, 120 bp, Artificial Sequence
  ENSG00000004799_0 (sequence is synthesized)
aagacttgaacttgaatctcgaaccactgcatctccgactctgcccagactcttcactccgcggcaccctcaaaccccagcccaggccggggcgcacaagccagccagcgcacctgcagt

SEQ ID NO: 2855 - DNA, 120 bp, Artificial Sequence
  ENSG00000004799_1 (sequence is synthesized)
cctcgcccggacgcgccgcgccccctcggaaccaggctctgctccgagcagccttcgcccctcaagccagccacagtccccgccaggccgggtgggcgtcaagatgaaggcggcccgctt

SEQ ID NO: 2856 - DNA, 120 bp, Artificial Sequence
  ENSG00000004799_2 (sequence is synthesized)
cgtgctgcgcagcgctggctcgctcaacggcgccggcctggtgccccgagaggtggagcatttctcgcgctacagcccgtccccgctgtccatgaagcagctactggactttggttcaga

SEQ ID NO: 2857 - DNA, 120 bp, Artificial Sequence
  ENSG00000004799_3 (sequence is synthesized)
aaatgcatgtgaaagaacttcttttgcatttttgcgacaagaattgcctgtgagactcgccaacattctgaaggaaattgatatcctcccgacccaattagtaaatacctcttcagtgca

SEQ ID NO: 2858 - DNA, 120 bp, Artificial Sequence
  ENSG00000004799_4 (sequence is synthesized)
attggttaaaagctggtatatacagagcctgatggatttggtggaattccatgagaaaagcccagatgaccagaaagcattatcagactttgtagatacactcatcaaagttcgaaatag

SEQ ID NO: 2859 - DNA, 120 bp, Artificial Sequence
  ENSG00000004799_5 (sequence is synthesized)
acaccataatgtagtccctacaatggcacaaggaatcatagagtataaagatgcctgtacagttgacccagtcaccaatcaaaatcttcaatatttcttggatcgattttacatgaaccg

SEQ ID NO: 2860 - DNA, 120 bp, Artificial Sequence
  ENSG00000004799_6 (sequence is synthesized)
tatttctactcggatgctgatgaaccagcacattcttatatttagtgactcacagacaggaaacccaagccacattggaagcattgatcctaactgtgatgtggtagcagtggtccaaga

SEQ ID NO: 2861 - DNA, 120 bp, Artificial Sequence
  ENSG00000004799_7 (sequence is synthesized)
tgcctttgagtgttcaaggatgctctgtgatcagtattatttatcatctccagaattaaagcttacacaagtgaatggaaaatttccagaccaaccaattcacatcgtgtatgttccttc

SEQ ID NO: 2862 - DNA, 120 bp, Artificial Sequence
  ENSG00000004799_8 (sequence is synthesized)
tcacctccatcatatgctctttgaactatttaagaatgcaatgcgggcaacagttgaacaccaggaaaatcagccttcccttacaccaatagaggttattgttgtcttgggaaaagaaga

SEQ ID NO: 2863 - DNA, 120 bp, Artificial Sequence
  ENSG00000004799_9 (sequence is synthesized)
ccttaccattaagatttcagacagaggaggtggtgttcccctgagaattattgaccgcctctttagttatacatactccactgcaccaacgcctgtgatggataattcccggaatgctcc

SEQ ID NO: 2864 - DNA, 120 bp, Artificial Sequence
  ENSG00000004799_10 (sequence is synthesized)
tttggctggttttggttacggcttgccaatttctcgtctgtatgcaaagtactttcaaggagatctgaatctctactctttatcaggatatggaacagatgctatcatctacttaaaggc

SEQ ID NO: 2865 - DNA, 120 bp, Artificial Sequence
  ENSG00000004799_11 (sequence is synthesized)
tttgtcttctgagtctatagaaaaacttccagtttttaacaagtcagccttcaaacattatcagatgagctctgaggctgatgactggtgtatcccaagcagggaaccaaagaacctggc

SEQ ID NO: 2866 - DNA, 120 bp, Artificial Sequence
  ENSG00000004799_12 (sequence is synthesized)
aaaagaagtggccatgtgaagagggacactcaggacactttacgggatcaaagtgggtctacaccagtgctgcttcctgaatgtttgtgtgtgaacccttgtttcctccaaaacaaacga

SEQ ID NO: 2867 - DNA, 120 bp, Artificial Sequence
  ENSG00000004799_13 (sequence is synthesized)
cagcaacgaaaactccttaatcagaacactgatccaatgaggaatggagcttgtttctgtgacccaggagaacttagtgcaagactacaggagttaacagatggccagctccttattttt

SEQ ID NO: 2868 - DNA, 120 bp, Artificial Sequence
  ENSG00000004799_14 (sequence is synthesized)
taatgtagaataactcctgagtttatatcaaatcctgaagaaataagcctcagttttccatctgtttttgataagaataagaaagggagtgagtgtgaagatggtggttagcagtttcac

SEQ ID NO: 2869 - DNA, 120 bp, Artificial Sequence
  ENSG00000004799_15 (sequence is synthesized)
aagactgatattttaggcctcttgttcacatcaaaagatattggtgtcagaataccagcattttcctgccatgcaaaggattaaaacttagtttacactatgtggttacaaatatatgtc

SEQ ID NO: 2870 - DNA, 120 bp, Artificial Sequence
  ENSG00000004799_16 (sequence is synthesized)
aatgtacattttgaacatatttatgtgctatggaaggaaatgctggtgactaaaataaggtttactctgaaagaggaggaattttattcaaagcattcaaacattttattcaagtgtttc

SEQ ID NO: 2871 - DNA, 120 bp, Artificial Sequence
  ENSG00000004799_17 (sequence is synthesized)
aaaattcaaagcattgtattcaaagttgcagtgaaggcatcaacttatgtaaaaactcagaaggaaggctcctctgataaaaacacagctcctttattatgctgcttttcttgttcactt

SEQ ID NO: 2872 - DNA, 120 bp, Artificial Sequence
  ENSG00000004799_18 (sequence is synthesized)
tacacactaagtaaacacttattgtcaggtgcctagtcttgagtgaattgttagatgtgcactgaactcgggatgttggggattggagagagagaattgccaaagtaacagcaaaaatat

SEQ ID NO: 2873 - DNA, 120 bp, Artificial Sequence
  ENSG00000004799_19 (sequence is synthesized)
ctcttactttgctttgtttataaataaattagtagattggaaaaactagtgttagggaaagaaatcacatgttcagagcctaattcagtaggaagggcttttctctaccctgaaatgaag

SEQ ID NO: 2874 - DNA, 120 bp, Artificial Sequence
  ENSG00000004799_20 (sequence is synthesized)
gtaatccaaaggcatccattttctaggcttaaaagatatatttttgatatatttaattatattctctacactccagcattaatatgtctgtttaaaaattactaattctcaaatggctca

SEQ ID NO: 2875 - DNA, 120 bp, Artificial Sequence
  ENSG00000004799_21 (sequence is synthesized)
agaacattagaatttaagtaccttttagagtaattattttaagcaaatagcctggacgtaagagattctcatgccagcatgctttcatttgtcagttgttgtgactgagagataatgaat

SEQ ID NO: 2876 - DNA, 120 bp, Artificial Sequence
  ENSG00000004799_22 (sequence is synthesized)
gacacctgaaatgcatatggtatttttgggagagttaaggtataatttgaaggttggcagaccagttgcgctgattactcttagagaagaagaaatggaaaaatgaaagaaggcaggaag

SEQ ID NO: 2877 - DNA, 120 bp, Artificial Sequence
  ENSG00000004799_23 (sequence is synthesized)
gaaagaaaggatataggaagagagggaagcagaaggcaggcatttttctattttccccacaaattatttcaaaaaaaatctgtattttctgggatatgtcattggcaagaggaagaactg

SEQ ID NO: 2878 - DNA, 120 bp, Artificial Sequence
  ENSG00000004799_24 (sequence is synthesized)
gtgttttgaaagcagtatggattctttaaatgcctctcactcttacaagatagtaggctttgagataataaacttacccgtgtcaattaacatttaaactggcatatagaaaaaaaggag

SEQ ID NO: 2879 - DNA, 120 bp, Artificial Sequence
  ENSG00000004799_25 (sequence is synthesized)
gatttttctgcattgtaaaataatcagtatggtttatatgttgaatttgacatttgtgtgtaatttcatggtggcctagtgttgtggtgcttctggtaatggtaatagaagctcaactat

SEQ ID NO: 2880 - DNA, 120 bp, Artificial Sequence
  ENSG00000004799_26 (sequence is synthesized)
ttttttgtggatttcagtttttatcatcagaagtcctagacagtgacatttcttaatggtgggagtccagctcatgcatttctgattatacaaaacagtttgcagtaggttatttgtcat

SEQ ID NO: 2881 - DNA, 120 bp, Artificial Sequence
  ENSG00000004799_27 (sequence is synthesized)
ttcagttttttactgaaatttgagctaaacatttttacatgtaaatacttgtatttaccaaagatttaaatcagttgattaattaattaactcaaatactgtgaactatctctaaaacac

SEQ ID NO: 2882 - DNA, 120 bp, Artificial Sequence
  ENSG00000004799_28 (sequence is synthesized)
tagaaaaaagaaatgttagtatctcaattacaccaactgtgcaaatgaactttgataaaatagaaataatctacattggcctttgtgaaatctggggaagagctttaggattctagtaga

SEQ ID NO: 2883 - DNA, 120 bp, Artificial Sequence
  ENSG00000004799_29 (sequence is synthesized)
tggatactgaatactcaggcccacttaaattattaatgtatacattgtgtttttgtctttatgctatgtacagagaaatgtgataattttttataataaatattttttatgatgataaaa

SEQ ID NO: 2884 - DNA, 120 bp, Artificial Sequence
  ENSG00000004799_30 (sequence is synthesized)
aactgagttaatgcaaataatgactacaggtcattcattctcttctctttctgggtgtgtgtacattatttaatatgataacttaccaaagaggaagctgggccatactacctgcctcaa

SEQ ID NO: 2885 - DNA, 120 bp, Artificial Sequence
  ENSG00000004799_31 (sequence is synthesized)
gtgaagcaaaattgtttcctaagaaggttaatacattaccaaagtttcagaatgaggacatgttcatgtgaattttttaaggcaactccttttggcatctatgagagtagctgtgctttt

SEQ ID NO: 2886 - DNA, 120 bp, Artificial Sequence
  ENSG00000004799_32 (sequence is synthesized)
accattctctgttttccttttgggtgtctcttgagagaattaaatagggtcaatagtaataaagctgtctgctttttgcaatagataacagtcatatatgccaggtgatttttaaatgaa

SEQ ID NO: 2887 - DNA, 120 bp, Artificial Sequence
  ENSG00000004799_33 (sequence is synthesized)
ggaaagccatttttatttagacaaatgcacattgtttttaatgtgtggctttgatgacttgtttgtttgttttagatttcagacagaggaggtggtgttcccctgagaattattgaccgc

SEQ ID NO: 2888 - DNA, 120 bp, Artificial Sequence
  ENSG00000004799_34 (sequence is synthesized)
agtaagttagctcatcatgatcatggtatatagacatgggtgtagaatataagccatactataactagatgtctcactaatcagcgggtcacattctcagtgatagtactaatcattatc

SEQ ID NO: 2889 - DNA, 120 bp, Artificial Sequence
  ENSG00000004799_35 (sequence is synthesized)
ccatattgaagtctctagttttgaaacagttacccgggtatgaattcttatactatgttaacatcataattggaaaacaggtgatctgaatggtaactacttttgaaagatgtaagaatt

SEQ ID NO: 2890 - DNA, 120 bp, Artificial Sequence
  ENSG00000004799_36 (sequence is synthesized)
aatggtaactacttttgaaagatgtaagaattttaaaattaatttagggtaagttatcattagagaagttataaaactataaacagacatttttaccctgaaaaagtagattactttata

SEQ ID NO: 2891 - DNA, 120 bp, Artificial Sequence
  ENSG00000004809_0 (sequence is synthesized)
ggagctcggctaactcggcgcccagtgcacggccgcaccatggggtcccgccacttcgaggggatttatgaccacgtggggcacttcggcagattccagagagtcctctatttcatatgt

SEQ ID NO: 2892 - DNA, 120 bp, Artificial Sequence
  ENSG00000004809_1 (sequence is synthesized)
gccttccagaacatctcttgtggtattcactacttggcttctgtgttcatgggagtcacccctcatcatgtctgcaggcccccaggcaatgtgagtcaggttgttttccataatcactct

SEQ ID NO: 2893 - DNA, 120 bp, Artificial Sequence
  ENSG00000004809_2 (sequence is synthesized)
aattggagtttggaggacaccggggccctgttgtcttcaggccagaaagattatgttacggtgcagttgcagaatggtgagatctgggagctctcaaggtgtagcaggaataagagggag

SEQ ID NO: 2894 - DNA, 120 bp, Artificial Sequence
  ENSG00000004809_3 (sequence is synthesized)
aacacatcgagtttgggctatgaatacactggcagtaagaaagagtttccttgtgtggatggctacatatatgaccagaacacatggaaaagcactgcggtgacccagtggaacctggtc

SEQ ID NO: 2895 - DNA, 120 bp, Artificial Sequence
  ENSG00000004809_4 (sequence is synthesized)
tgtgaccgaaaatggcttgcaatgctgatccagcccctatttatgtttggagtcctactgggatcggtgacttttggctacttttctgacaggctaggacgccgggtggtcttgtgggcc

SEQ ID NO: 2896 - DNA, 120 bp, Artificial Sequence
  ENSG00000004809_5 (sequence is synthesized)
acaagcagtagcatgtttttgtttggaatagcagcggcgtttgcagttgattattacaccttcatggctgctcgcttttttcttgccatggttgcaagtggctatcttgtggtggggttt

SEQ ID NO: 2897 - DNA, 120 bp, Artificial Sequence
  ENSG00000004809_6 (sequence is synthesized)
gtctatgtgatggaattcattggcatgaagtctcggacatgggcgtctgtccatttgcattccttttttgcagttggaaccctgctggtggctttgacaggatacttggtcaggacctgg

SEQ ID NO: 2898 - DNA, 120 bp, Artificial Sequence
  ENSG00000004809_7 (sequence is synthesized)
tggctttaccagatgatcctctccacagtgactgtcccctttatcctgtgctgttgggtgctcccagagacacctttttggcttctctcagagggacgatatgaagaagcacaaaaaata

SEQ ID NO: 2899 - DNA, 120 bp, Artificial Sequence
  ENSG00000004809_8 (sequence is synthesized)
aaactgtcagaacttttatcactggacctacaaggtcctgttagtaatagccccactgaagttcagaagcacaacctatcatatctgttttataactggagcattacgaaaaggacactt

SEQ ID NO: 2900 - DNA, 120 bp, Artificial Sequence
  ENSG00000004809_9 (sequence is synthesized)
accgtttggctaatctggttcactggaagtttgggattctactcgttttccttgaattctgttaacttaggaggcaatgaatacttaaacctcttcctcctgggtgtagtggaaattccc

SEQ ID NO: 2901 - DNA, 120 bp, Artificial Sequence
  ENSG00000004809_10 (sequence is synthesized)
gcctacaccttcgtgtgcatcgccatggacaaggtcgggaggagaacagtcctggcctactctcttttctgcagtgcactggcctgtggtgtcgttatggtgatcccccagaaacattat

SEQ ID NO: 2902 - DNA, 120 bp, Artificial Sequence
  ENSG00000004809_11 (sequence is synthesized)
attttgggtgtggtgacagctatggttggaaaatttgccatcggggcagcatttggcctcatttatctttatacagctgagctgtatccaaccattgtaagatcgctggctgtgggaagc

SEQ ID NO: 2903 - DNA, 120 bp, Artificial Sequence
  ENSG00000004809_12 (sequence is synthesized)
ggcagcatggtgtgtcgcctggccagcatcctggcgccgttctctgtggacctcagcagcatttggatcttcataccacagttgtttgttgggactatggccctcctgagtggagtgtta

SEQ ID NO: 2904 - DNA, 120 bp, Artificial Sequence
  ENSG00000004809_13 (sequence is synthesized)
acactaaagcttccagaaacccttgggaaacggctagcaactacttgggaggaggctgcaaaactggagtcagagaatgaaagcaagtcaagcaaattacttctcacaactaataatagt

SEQ ID NO: 2905 - DNA, 120 bp, Artificial Sequence
  ENSG00000004809_14 (sequence is synthesized)
gggctggaaaaaacggaagcgattacccccagggattctggtcttggtgaataaatgtgccatgcctgctgtctagcacctgaaatattatttaccctaatgcctttgtattagaggaat

SEQ ID NO: 2906 - DNA, 120 bp, Artificial Sequence
  ENSG00000004809_15 (sequence is synthesized)
agaggaatcttattctcatctcccatatgttgtttgtatgtctttttaataaattttgtaagaaaattttaaagcaaatatgttataaaagaaataaaaactaagatgaaaattctcagt

SEQ ID NO: 2907 - DNA, 120 bp, Artificial Sequence
  ENSG00000004809_16 (sequence is synthesized)
tcgaggggccagatctcactcgtagggggtgcctgtgcctggccgcccgtttctctaatccgccgccacttccctagacggctgctgcccagttctgccctgcgcctccgtagggcctcc

SEQ ID NO: 2908 - DNA, 120 bp, Artificial Sequence
  ENSG00000004809_17 (sequence is synthesized)
ctctgtgcctggcaggtgttccccagggacaaccgttagtcagagttggttgccgtttattaaaacctaatacgtgccaggtacactgtacctggcgcttacacatagttcttcatttga

SEQ ID NO: 2909 - DNA, 120 bp, Artificial Sequence
  ENSG00000004809_18 (sequence is synthesized)
agcatttggatcttcataccacagctcctaggacagcaccttcaggagtaataatgcaggcagtagctggcaattaaggaggcactccatggtgggtcatgaaggaatgaatgagtgagt

SEQ ID NO: 2910 - DNA, 120 bp, Artificial Sequence
  ENSG00000004809_19 (sequence is synthesized)
gatgagattaaacctcgttgatgaggaaaagaactcgaagtccagcacaagtaaccaaagatctcaccgagtaatcacagtgacaactgttatgtcaaattcaaatccattaccctctga

SEQ ID NO: 2911 - DNA, 120 bp, Artificial Sequence
  ENSG00000004809_20 (sequence is synthesized)
aaacagttaggaaattctattctccgaagggttcgttcctttcttgatgtgtcacttatcattatttttaattccttctagttgtttgttgggactatggccctcctgagtggagtgtta

SEQ ID NO: 2912 - DNA, 120 bp, Artificial Sequence
  ENSG00000004809_21 (sequence is synthesized)
gtaaaatcaaatatttaggattgttgtatcagtgtagggtttattttcctatctggttttcttgggacacaaggaattatgtttaaaacttgtcatttttatacttcctatctaaatacc

SEQ ID NO: 2913 - DNA, 120 bp, Artificial Sequence
  ENSG00000004809_22 (sequence is synthesized)
tacctctttgctgatccattatttagggatgtataatgataaggataggctctgaagacagtatacctagatccaaatcctggttctaccacttattaactgtggaccccaggcaaattg

SEQ ID NO: 2914 - DNA, 120 bp, Artificial Sequence
  ENSG00000004809_23 (sequence is synthesized)
tctataggctggtgataaaaaataatatcacttacttcaaaggattattgcaaaattaatacagaaaaaaagtaccctggacatataatcactcaatagatacggtttattactttgaat

SEQ ID NO: 2915 - DNA, 120 bp, Artificial Sequence
  ENSG00000004809_24 (sequence is synthesized)
attttcttctctttaaatagacttgctttttaataggagtagcctgatcctaagcagtatatctgtaaaattatgggcttgatataacagccccttttagtctttttgtgctgctgtaac

SEQ ID NO: 2916 - DNA, 120 bp, Artificial Sequence
  ENSG00000004809_25 (sequence is synthesized)
aaaataccacagactgggtaattcacaaacaatagaaatttatttcccatagttctggcggctgggaagcccaagataaggtgccaacaggattgctgactgggaaggctgttgtttgct

SEQ ID NO: 2917 - DNA, 120 bp, Artificial Sequence
  ENSG00000004809_26 (sequence is synthesized)
ttcaagatggtgccttattgctgcatcctttggatgggataaatgcagtgtcctcacatggaagaagggatggaagggcaggagagtgctcccttcaaccttgagcacttttctaagggt

SEQ ID NO: 2918 - DNA, 120 bp, Artificial Sequence
  ENSG00000004809_27 (sequence is synthesized)
gctaagggctctactgtcatgactttatcacctcccaaggccatccctcttaatagtgttgcactggagattaagtttcaacatgaattttggagggaatactatcattcaaagcataac

SEQ ID NO: 2919 - DNA, 120 bp, Artificial Sequence
  ENSG00000004809_28 (sequence is synthesized)
ctggccatatatttttaaaaatttacattaaaatgaatatgtaattcttaaaataaagcaaagtttatctctgtatgaacatggaccataccaaagcacagagatgaacttatttggtct

SEQ ID NO: 2920 - DNA, 120 bp, Artificial Sequence
  ENSG00000004809_29 (sequence is synthesized)
ccatagttgtggattttacagtcatatggtgggcactgaggacctaaagacaatagcttagatcagaaatccctgcccttgaggtataccagtctaatggggctgataaacatgtcaaaa

SEQ ID NO: 2921 - DNA, 120 bp, Artificial Sequence
  ENSG00000004809_30 (sequence is synthesized)
gcgcagtcgggacacgggcgtccagacgccggcccctagctgggcttctcctctaggcctctggcagcgggacctggcatggtgagcagaggcgctgggctcgctcggagtgcgcctgtt

SEQ ID NO: 2922 - DNA, 120 bp, Artificial Sequence
  ENSG00000004809_31 (sequence is synthesized)
gcggcgctcgcgatccgaaaacatctccacttcctcctcaccccgcgcagtcgggacacgggcgtccagacgccggcccctagctgggcttctcctctaggcctctggcagcgggacctg

SEQ ID NO: 2923 - DNA, 120 bp, Artificial Sequence
  ENSG00000004838_0 (sequence is synthesized)
aacccgtttccatggctgcgagaactgacgctccccaaccgtcccgcaactgtcctgtcccagactttggcaccgtcggggtccgtcgtccccgaatgtgacagcatccccaccccggct

SEQ ID NO: 2924 - DNA, 120 bp, Artificial Sequence
  ENSG00000004838_1 (sequence is synthesized)
gctgcccaggatccgccggaccccggcctcgatatgggagacctggaactgctgctgcccggggaagctgaagtgctggtgcggggtctgcgcagcttcccgctacgcgagatgggctcc

SEQ ID NO: 2925 - DNA, 120 bp, Artificial Sequence
  ENSG00000004838_2 (sequence is synthesized)
gaagggtggaaccagcagcatgagaacctggagaagctgaacatgcaagccatcctcgatgccacagtcagccagggcgagcccattcaggagctgctggtcacccatgggaaggtccca

SEQ ID NO: 2926 - DNA, 120 bp, Artificial Sequence
  ENSG00000004838_3 (sequence is synthesized)
acactggtggaggagctgatcgcagtggagatgtggaagcagaaggtgttccctgtgttctgcagggtggaggacttcaagccccagaacaccttccccatctacatggtggtgcaccac

SEQ ID NO: 2927 - DNA, 120 bp, Artificial Sequence
  ENSG00000004838_4 (sequence is synthesized)
gaggcctccatcatcaacctcttggagacagtgttcttccacaaggaggtgtgtgagtcagcagaagacactgtcttggacttggtagactattgccaccgcaaactgaccctgctggtg

SEQ ID NO: 2928 - DNA, 120 bp, Artificial Sequence
  ENSG00000004838_5 (sequence is synthesized)
gcccagagtggctgtggtggcccccctgagggggagggatcccaggacagcaaccccatgcaggagctgcagaagcaggcagagctgatggaatttgagattgcactgaaggccctctca

SEQ ID NO: 2929 - DNA, 120 bp, Artificial Sequence
  ENSG00000004838_6 (sequence is synthesized)
gtactacgctacatcacagactgtgtggacagcctctctctcagcaccttgagccgtatgcttagcacacacaacctgccctgcctcctggtggaactgctggagcatagtccctggagc

SEQ ID NO: 2930 - DNA, 120 bp, Artificial Sequence
  ENSG00000004838_7 (sequence is synthesized)
aagtgtggatcgccctgtacaacctgctgctaagccctgaggctcaggcgcgctactgcctcacaagttttgccaagggacggctactcaagcttcgggccttcctcacagacacactgc

SEQ ID NO: 2931 - DNA, 120 bp, Artificial Sequence
  ENSG00000004838_8 (sequence is synthesized)
tggaccagctgcccaacctggcccacttgcagagtttcctggcccatctgaccctaactgaaacccagcctcctaagaaggacctggtgttggaacagatcccagaaatctgggagcggc

SEQ ID NO: 2932 - DNA, 120 bp, Artificial Sequence
  ENSG00000004838_9 (sequence is synthesized)
tggagcgagaaaacagaggcaagtggcaggcaattgccaagcaccagctccagcatgtgttcagcccctcagagcaggacctgcggctgcaggcgcgaaggtgggctgagacctacaggc

SEQ ID NO: 2933 - DNA, 120 bp, Artificial Sequence
  ENSG00000004838_10 (sequence is synthesized)
tggatgtgctagaggcagtggctccagagcggccccgctgtgcttactgcagtgcagaggcttctaagcgctgctcacgatgccagaatgagtggtattgctgcagggagtgccaagtca

SEQ ID NO: 2934 - DNA, 120 bp, Artificial Sequence
  ENSG00000004838_11 (sequence is synthesized)
agcactgggaaaagcatggaaagacttgtgtcctggcagcccagggtgacagagccaaatgagggctgcagttgctgagggccgaccacccatgccaagggaatccacccagaatgcacc

SEQ ID NO: 2935 - DNA, 120 bp, Artificial Sequence
  ENSG00000004838_12 (sequence is synthesized)
cctgaacctcaagatcacggtccagcctctgccggagccccagtctccgcagtggagagcagagcgggcggtaaagctgctgaccgatctccctcctcctcaccccaagtgaaggctcga

SEQ ID NO: 2936 - DNA, 120 bp, Artificial Sequence
  ENSG00000004838_13 (sequence is synthesized)
gacttcctgccccacccagtgggtaggccaagtgtgttgcttcagcaaaccggaccaggagggccagggccggatgtggggaccctcttcctctagcacagtaaagctggcctccagaaa

SEQ ID NO: 2937 - DNA, 120 bp, Artificial Sequence
  ENSG00000004838_14 (sequence is synthesized)
tgcactgaaggccctctcagtactacgctacatcacagactgtgtggacaggtgagcagtccgactgggcctgggcctactgtggagggctggaagaccgggcctgtagcctgcctctac

SEQ ID NO: 2938 - DNA, 120 bp, Artificial Sequence
  ENSG00000004838_15 (sequence is synthesized)
tcacctccttcacaacgtccctgcccctagcctctctctcagcaccttgagccgtatgcttagcacacacaacctgccctgcctcctggtggaactgctggagcatagtccctggagccg

SEQ ID NO: 2939 - DNA, 120 bp, Artificial Sequence
  ENSG00000004838_16 (sequence is synthesized)
gcgggaaggaggtagggtcctcccccaccagcctaagccccaggctactgcttcagggtatctttttgatagaggggggcagcttgcacacacgaagacaaaccctgtccccaagcccac

SEQ ID NO: 2940 - DNA, 120 bp, Artificial Sequence
  ENSG00000004838_17 (sequence is synthesized)
tgaggataccaggatgcctcagccaaggttggcctagacctgagctctgcagcaggccaggcccatgtgtccactactgaggctcaccctgctctggggtcagcagccctatagcctggg

SEQ ID NO: 2941 - DNA, 120 bp, Artificial Sequence
  ENSG00000004838_18 (sequence is synthesized)
caagtcctgcagcccaggttctcccattcccaggcagtggtcagtctcccagcccccacagctggctcacttgaagagaattcaacgtctgcacccagtgtgctggttcctctccccagg

SEQ ID NO: 2942 - DNA, 120 bp, Artificial Sequence
  ENSG00000004838_19 (sequence is synthesized)
ccacaggcattctcagcccaacccagccccttccttttccttggccccctggccagcacctgcatcacactggcctccactggacacccttgcagcttcgggccttcctcacagacacac

SEQ ID NO: 2943 - DNA, 120 bp, Artificial Sequence
  ENSG00000004838_20 (sequence is synthesized)
gactctggcacaccaggctgggtgcagggcatgagttgattagggagaaagctgtaggtcctagaacagcttaggcttcaaggggaaggcccaaatgctaaaggcatctgtgaattgact

SEQ ID NO: 2944 - DNA, 120 bp, Artificial Sequence
  ENSG00000004838_21 (sequence is synthesized)
tgggagcagctggtaatgaaggtccaaggtgcaagagagaagtcaggaaggatactcatgggtctggaatagtttaggggcccagcagtgtttggggatatcagggttgagctgagccgg

SEQ ID NO: 2945 - DNA, 120 bp, Artificial Sequence
  ENSG00000004838_22 (sequence is synthesized)
gggttgtgaaagcctaggtctgggttccccaaggcctgcgcaggtgagggtggcccagcgtgaacactgtgtgacctcccaggagctgcagaagcaggcagagctgatggaatttgagat

SEQ ID NO: 2946 - DNA, 120 bp, Artificial Sequence
  ENSG00000004846_0 (sequence is synthesized)
aaattataaaagttgtcctaaaaattggttcagtgccttttacaatcgtatgtaccttatctctctctccatttctgcatgaacagtccatcctatccaaaccgttctcatttctctacc

SEQ ID NO: 2947 - DNA, 120 bp, Artificial Sequence
  ENSG00000004846_1 (sequence is synthesized)
atgagataattcaccttgcattcctaaaactatgcccttgttcctcctccacatttttctacttactgaaaccttagccttcctccagaaactaacctcagggccatcctcatctgtggg

SEQ ID NO: 2948 - DNA, 120 bp, Artificial Sequence
  ENSG00000004846_2 (sequence is synthesized)
cgaaaccattttagatcacaatgttcttcctcagtcttcttagatactagaatagtcactctttgtactattcatcacataacgtctgtcttgccaggtatattaggttcccctagagaa

SEQ ID NO: 2949 - DNA, 120 bp, Artificial Sequence
  ENSG00000004846_3 (sequence is synthesized)
gtgtgtgtgtgtgtgtgtatgtagagagagaaagagaaaacacgctcatgtaattgtggtgactggcacttccaaaatccacaagccagactagaaggctggaaattctggcaaaaaatt

SEQ ID NO: 2950 - DNA, 120 bp, Artificial Sequence
  ENSG00000004846_4 (sequence is synthesized)
gccagactagaaggctggaaattctggcaaaaaattgataccttgtatctgaaagctttatcctatcctcttcagaagacttcagtcttttctcttaaggacttcaactgactggatggg

SEQ ID NO: 2951 - DNA, 120 bp, Artificial Sequence
  ENSG00000004846_5 (sequence is synthesized)
gcccactcaaaacagcatctaaggaattaaaaagaagtaaattgtaaataagatggaaaattcagaaagagctgaagaaatgcaagaaaattatcagagaaatggaactgcagaagaaca

SEQ ID NO: 2952 - DNA, 120 bp, Artificial Sequence
  ENSG00000004846_6 (sequence is synthesized)
gccaaaactgagaaaggaagcagttggatctattgagatattccgctttgctgatggactggacatcacactcatgatcctgggtatactggcatcactggtcaatggagcctgccttcc

SEQ ID NO: 2953 - DNA, 120 bp, Artificial Sequence
  ENSG00000004846_7 (sequence is synthesized)
tttaatgccactggttttaggagaaatgagtgataaccttattagtggatgtctagtccaaactaacacaacaaattatcagaactgtactcagtctcaagagaagctgaatgaagatat

SEQ ID NO: 2954 - DNA, 120 bp, Artificial Sequence
  ENSG00000004846_8 (sequence is synthesized)
gactctgttgaccctgtattatgttggaataggtgttgctgccttgatttttggttacatacagatttccttgtggattataactgcagcacgacagaccaagaggattcgaaaacagtt

SEQ ID NO: 2955 - DNA, 120 bp, Artificial Sequence
  ENSG00000004846_9 (sequence is synthesized)
ttttcattcagttttggcacaggacatcggctggtttgatagctgtgacatcggtgaacttaacactcgcatgacagatgacattgacaaaatcagtgatggtattggagataagattgc

SEQ ID NO: 2956 - DNA, 120 bp, Artificial Sequence
  ENSG00000004846_10 (sequence is synthesized)
tctgttgtttcaaaacatgtctactttttcgattggcctggcagttggtttggtgaagggctggaaactcaccctagtgactctatccacgtctcctcttataatggcttcagcggcagc

SEQ ID NO: 2957 - DNA, 120 bp, Artificial Sequence
  ENSG00000004846_11 (sequence is synthesized)
atgttctaggatggtcatctcattgaccagtaaggaattaagtgcctattccaaagctggggctgtggcagaagaagtcttgtcatcaatccgaacagtcatagcctttagggcccagga

SEQ ID NO: 2958 - DNA, 120 bp, Artificial Sequence
  ENSG00000004846_12 (sequence is synthesized)
gaaagaacttcaaaggtatacacagaatctcaaagatgcaaaggattttggcataaaaaggactatagcttcaaaagtgtctcttggtgctgtgtacttctttatgaatggaacctatgg

SEQ ID NO: 2959 - DNA, 120 bp, Artificial Sequence
  ENSG00000004846_13 (sequence is synthesized)
acttgctttttggtatggaacctccttgattcttaatggagaacctggatataccatcgggactgttcttgctgttttctttagtgtaatccatagcagttattgcattggagcagcagt

SEQ ID NO: 2960 - DNA, 120 bp, Artificial Sequence
  ENSG00000004846_14 (sequence is synthesized)
ccctcactttgaaaccttcgcaatagcccgaggagctgcctttcatattttccaggttattgataagaaacccagtatagataacttttccacagctggatataaacctgaatccataga

SEQ ID NO: 2961 - DNA, 120 bp, Artificial Sequence
  ENSG00000004846_15 (sequence is synthesized)
aggaactgtggaatttaaaaatgtttctttcaattatccatcaagaccatctatcaagattctgaaaggtctgaatctcagaattaagtctggagagacagtcgccttggtcggtctcaa

SEQ ID NO: 2962 - DNA, 120 bp, Artificial Sequence
  ENSG00000004846_16 (sequence is synthesized)
tggcagtgggaagagtacggtagtccagcttctgcagaggttatatgatccggatgatggctttatcatggtggatgagaatgacatcagagctttaaatgtgcggcattatcgagacca

SEQ ID NO: 2963 - DNA, 120 bp, Artificial Sequence
  ENSG00000004846_17 (sequence is synthesized)
tattggagtggttagtcaagagcctgttttgttcgggaccaccatcagtaacaatatcaagtatggacgagatgatgtgactgatgaagagatggagagagcagcaagggaagcaaatgc

SEQ ID NO: 2964 - DNA, 120 bp, Artificial Sequence
  ENSG00000004846_18 (sequence is synthesized)
gtatgattttatcatggagtttcctaataaatttaatacattggtaggggaaaaaggagctcaaatgagtggagggcagaaacagaggatcgcaattgctcgtgccttagttcgaaaccc

SEQ ID NO: 2965 - DNA, 120 bp, Artificial Sequence
  ENSG00000004846_19 (sequence is synthesized)
caagattctgattttagatgaggctacgtctgccctggattcagaaagcaagtcagctgttcaagctgcactggagaaggcgagcaaaggtcggactacaatcgtggtagcacaccgact

SEQ ID NO: 2966 - DNA, 120 bp, Artificial Sequence
  ENSG00000004846_20 (sequence is synthesized)
ttctactattcgaagtgcagatttgattgtgaccctaaaggatggaatgctggcggagaaaggagcacatgctgaactaatggcaaaacgaggtctatattattcacttgtgatgtcaca

SEQ ID NO: 2967 - DNA, 120 bp, Artificial Sequence
  ENSG00000004846_21 (sequence is synthesized)
ggatattaaaaaagctgatgaacagatggagtcaatgacatattctactgaaagaaagaccaactcacttcctctgcactctgtgaagagcatcaagtcagacttcattgacaaggctga

SEQ ID NO: 2968 - DNA, 120 bp, Artificial Sequence
  ENSG00000004846_22 (sequence is synthesized)
ggaatccacccaatctaaagagataagtcttcctgaagtctctctattaaaaattttaaagttaaacaagcctgaatggccttttgtggttctggggacattggcttctgttctaaatgg

SEQ ID NO: 2969 - DNA, 120 bp, Artificial Sequence
  ENSG00000004846_23 (sequence is synthesized)
aactgttcatccagtattttccatcatctttgcaaaaattataaccatgtttggaaataatgataaaaccacattaaagcatgatgcagaaatttattccatgatattcgtcattttggg

SEQ ID NO: 2970 - DNA, 120 bp, Artificial Sequence
  ENSG00000004846_24 (sequence is synthesized)
aggggaaattttaacgatgagattaagacacttggccttcaaagccatgttatatcaggatattgcctggtttgatgaaaaggaaaacagcacaggaggcttgacaacaatattagccat

SEQ ID NO: 2971 - DNA, 120 bp, Artificial Sequence
  ENSG00000004846_25 (sequence is synthesized)
agatatagcacaaattcaaggagcaacaggttccaggattggcgtcttaacacaaaatgcaactaacatgggactttcagttatcatttcctttatatatggatgggagatgacattcct

SEQ ID NO: 2972 - DNA, 120 bp, Artificial Sequence
  ENSG00000004846_26 (sequence is synthesized)
gattctgagtattgctccagtacttgccgtgacaggaatgattgaaaccgcagcaatgactggatttgccaacaaagataagcaagaacttaagcatgctggaaagatagcaactgaagc

SEQ ID NO: 2973 - DNA, 120 bp, Artificial Sequence
  ENSG00000004846_27 (sequence is synthesized)
tttggagaatatacgtactatagtgtcattaacaagggaaaaagccttcgagcaaatgtatgaagagatgcttcagactcaacacagaaatacctcgaagaaagcacagattattggaag

SEQ ID NO: 2974 - DNA, 120 bp, Artificial Sequence
  ENSG00000004846_28 (sequence is synthesized)
ctgttatgcattcagccatgcctttatatattttgcctatgcggcagggtttcgatttggagcctatttaattcaagctggacgaatgaccccagagggcatgttcatagtttttactgc

SEQ ID NO: 2975 - DNA, 120 bp, Artificial Sequence
  ENSG00000004846_29 (sequence is synthesized)
aattgcatatggagctatggccatcggagaaacgctcgttttggctcctgaatattccaaagccaaatcgggggctgcgcatctgtttgccttgttggaaaagaaaccaaatatagacag

SEQ ID NO: 2976 - DNA, 120 bp, Artificial Sequence
  ENSG00000004846_30 (sequence is synthesized)
ccgcagtcaagaagggaaaaagccagacacatgtgaagggaatttagagtttcgagaagtctctttcttctatccatgtcgcccagatgttttcatcctccgtggcttatccctcagtat

SEQ ID NO: 2977 - DNA, 120 bp, Artificial Sequence
  ENSG00000004846_31 (sequence is synthesized)
tgagcgaggaaagacagtagcatttgtggggagcagcggctgtgggaaaagcacttctgttcaacttctgcagagactttatgaccccgtgcaaggacaagtgctgtttgatggtgtgga

SEQ ID NO: 2978 - DNA, 120 bp, Artificial Sequence
  ENSG00000004846_32 (sequence is synthesized)
tgcaaaagaattgaatgtacagtggctccgttcccaaatagcaatcgttcctcaagagcctgtgctcttcaactgcagcattgctgagaacatcgcctatggtgacaacagccgtgtggt

SEQ ID NO: 2979 - DNA, 120 bp, Artificial Sequence
  ENSG00000004846_33 (sequence is synthesized)
gccattagatgagatcaaagaagccgcaaatgcagcaaatatccattcttttattgaaggtctccctgagaaatacaacacacaagttggactgaaaggagcacagctttctggcggcca

SEQ ID NO: 2980 - DNA, 120 bp, Artificial Sequence
  ENSG00000004846_34 (sequence is synthesized)
gaaacaaagactagctattgcaagggctcttctccaaaaacccaaaattttattgttggatgaggccacttcagccctcgataatgacagtgagaaggtggttcagcatgcccttgataa

SEQ ID NO: 2981 - DNA, 120 bp, Artificial Sequence
  ENSG00000004846_35 (sequence is synthesized)
agccaggacgggaaggacatgcctagtggtcactcacaggctctctgcaattcagaacgcagatttgatagtggttctgcacaatggaaagataaaggaacaaggaactcatcaagagct

SEQ ID NO: 2982 - DNA, 120 bp, Artificial Sequence
  ENSG00000004846_36 (sequence is synthesized)
cctgagaaatcgagacatatattttaagttagtgaatgcacagtcagtgcagtgatgctgttgaggtagcacatattttgatgttcgtgtaatgcaaagaaggagtacttaataattact

SEQ ID NO: 2983 - DNA, 120 bp, Artificial Sequence
  ENSG00000004846_37 (sequence is synthesized)
tggcaagctttgatctcttttattgcatatatcaatacctagaatcatgctactcaagtacatacatgttctattcacacaccatctgaccttcagatttttaaaaggaagcaaaaattt

SEQ ID NO: 2984 - DNA, 120 bp, Artificial Sequence
  ENSG00000004846_38 (sequence is synthesized)
gcttatttcatgtaagtgaaataatgcttatatccttcactttataaaactattctagcacatttgcttgtaaagcagttttctacaaggtgaatttatttcccatcaacttctgctata

SEQ ID NO: 2985 - DNA, 120 bp, Artificial Sequence
  ENSG00000004846_39 (sequence is synthesized)
aaatcggaaatatgtttccagggggaatattatccaattaaccatgttgaaggttttagcaaaggcagtgtaagatagagtggggcctgtagcattgcagggagagtgtctttcacttgg

SEQ ID NO: 2986 - DNA, 120 bp, Artificial Sequence
  ENSG00000004846_40 (sequence is synthesized)
aattttgttttgcagcacatattacagtagttttgctagtcccttttctccagaccgtagggatttctctcaataagtattcactatttctctaaattttattctatttttttgttgagc

SEQ ID NO: 2987 - DNA, 120 bp, Artificial Sequence
  ENSG00000004846_41 (sequence is synthesized)
agggaatagaaaggattacgatgtaaaatttctgggaggattaggtagctatctcctacttcaccagtaagtgaagtgcctcacatgagccatcccaaagattcattattccaaaccttg

SEQ ID NO: 2988 - DNA, 120 bp, Artificial Sequence
  ENSG00000004846_42 (sequence is synthesized)
tcccaaagattcattattccaaaccttgggtttggcagtataagtcacaggcctacctgtttatgaaaacttacttacttaaaataagagctacttttgggccgggtgcggtggctcacg

SEQ ID NO: 2989 - DNA, 120 bp, Artificial Sequence
  ENSG00000004846_43 (sequence is synthesized)
gagcgagactccatctcaaaaaataataaataagagctaattttattgtgggtgaaaatttttaaacgtctttctctataataaaataatttccttaaattttatatatactttatcata

SEQ ID NO: 2990 - DNA, 120 bp, Artificial Sequence
  ENSG00000004846_44 (sequence is synthesized)
ttctgtgtaaataacaatattggtaaaatgagttacattttcaacttacttaaatatgtaatgtcacctggtgattttatctttattcttcagtgtattttcttccatttacacatttag

SEQ ID NO: 2991 - DNA, 120 bp, Artificial Sequence
  ENSG00000004846_45 (sequence is synthesized)
ctagcctccctaaagtgtactctaccaataattgaaatcttgttaaacaaaattaaaaccatttatatattatgctgctttctttaaaatgcaaaataaaaataagattggggacttgag

SEQ ID NO: 2992 - DNA, 120 bp, Artificial Sequence
  ENSG00000004846_46 (sequence is synthesized)
tcggccttttggctaagatcaagtgtaatctgtgttcttttttatttggtcatatcttccattctttcttacctaattcctctaatatctctctgtgagcctaaaccaataattatatat

SEQ ID NO: 2993 - DNA, 120 bp, Artificial Sequence
  ENSG00000004846_47 (sequence is synthesized)
aaagcaagtcagctgttcaagctgcactggagaagaaaaaataatacaacaaagacgtattgataatctaccacactatctacgttgaggtatctggaaccacagtggtatgaattgcac

SEQ ID NO: 2994 - DNA, 120 bp, Artificial Sequence
  ENSG00000004846_48 (sequence is synthesized)
tatctccctaatctttacactaattctggctaaaagacagcatcagctcaaattttcctgatcagttttttagcaggctttggctgccaaaatctcttctgtgttttaagtctgaagcaa

SEQ ID NO: 2995 - DNA, 120 bp, Artificial Sequence
  ENSG00000004846_49 (sequence is synthesized)
ttacagttgaatattttgttgttgttcactatgaggagtatatcggttttaggtcacatgaatgatctagtagagatgtatttttctagtacacttgatagtaccttgaatatgtacagt

SEQ ID NO: 2996 - DNA, 120 bp, Artificial Sequence
  ENSG00000004846_50 (sequence is synthesized)
acatgtaggcccattttatggacctctgaggcacagttttttcccttttaagttattagatatttctgtgatttatttgatgcactcagatacaaattcatgctataataagttaaattg

SEQ ID NO: 2997 - DNA, 120 bp, Artificial Sequence
  ENSG00000004846_51 (sequence is synthesized)
taacataatatctaccttaatcaaatatttatagtttaggccaggagcctggcaaagtaaagatgacacagatgaaatgcttgataagtaaataaatatgagaagagatatatattaaaa

SEQ ID NO: 2998 - DNA, 120 bp, Artificial Sequence
  ENSG00000004846_52 (sequence is synthesized)
ggagaatcgctgaccttgaaccagcgcccttcgacagctctggcccctcaaacctcaccctgacctcctgctgcctatgagctactgcacatacctcaaggccatatgcagttgtggccc

SEQ ID NO: 2999 - DNA, 120 bp, Artificial Sequence
  ENSG00000004846_53 (sequence is synthesized)
ttataaaccagagccttcagaccccttacaaggcttaatggcacattttactttgcatttgcttggaagtgagttaagcgtttttttttctctaagaaaatcgcaggcttctttttttaa

SEQ ID NO: 3000 - DNA, 120 bp, Artificial Sequence
  ENSG00000004846_54 (sequence is synthesized)
aatgctgactttatggaaccagaaacggatactggcaggctaaatgtccactgcttcttgaaaaatctcttagttactattatttagtagcaaatcagattgtgcaagtttgaacgcttg

SEQ ID NO: 3001 - DNA, 120 bp, Artificial Sequence
  ENSG00000004846_55 (sequence is synthesized)
tttccctcccataataacaatgccacatgttgcttgtgtgataaataatctttgtttactgtggacacttcggcaatttggttcatcttggtacagaaaatacaaagacaggactaatat

SEQ ID NO: 3002 - DNA, 120 bp, Artificial Sequence
  ENSG00000004846_56 (sequence is synthesized)
tttattcattttttatacttagtaactaggacagggatctgtatttagactatattcaagcctcgctctgtcacccatgcttgagtgcaacctctgcccactgtgttcaagcgattctcc

SEQ ID NO: 3003 - DNA, 120 bp, Artificial Sequence
  ENSG00000004846_57 (sequence is synthesized)
caaagtgctgggattacaggtgtgcgtctccgcgcccggccagttacataagattttaaaaaatgtattgtaataggctctctgattgtttagaaggtttcatgttgtgcccgcagtatt

SEQ ID NO: 3004 - DNA, 120 bp, Artificial Sequence
  ENSG00000004846_58 (sequence is synthesized)
gaaggtttcatgttgtgcccgcagtattttcatccactggtaatcactttaggtaatcaaaactagttcagacttttaaaataaatagttgcttggtgacatgataaactaataaatgtt

SEQ ID NO: 3005 - DNA, 120 bp, Artificial Sequence
  ENSG00000004846_59 (sequence is synthesized)
attcttattggttaatatgaaacatctatcaaaagtgaaaaaagaagaatgcagaatgtttgtaaactgattccaaaattacacaaaatagcaactgtgaaaaaaatgaaggcaatatat

SEQ ID NO: 3006 - DNA, 120 bp, Artificial Sequence
  ENSG00000004846_60 (sequence is synthesized)
gaaaataataacagctatgtggcataattatgggggaatttaacttatttcaaaaattcatttactgtccctgtttttcagttgtttaaaggagaaagagattaaatcaatgtagaaata

SEQ ID NO: 3007 - DNA, 120 bp, Artificial Sequence
  ENSG00000004846_61 (sequence is synthesized)
cttctgtccacaatttattcagcaagatagctgatgcagtcatggctcacagagtgcactggatcaatgtgaggaccaaaccaaaattttggcagcagctgcatggtctcattaaattaa

SEQ ID NO: 3008 - DNA, 120 bp, Artificial Sequence
  ENSG00000004846_62 (sequence is synthesized)
agattgaactcagctcaagcaacttcgggtccggactctcctcaggaatcaaaccaaaaagcactatttcactaaaagaagtgaagatagttggccagactaaatccaggtatttggaca

SEQ ID NO: 3009 - DNA, 120 bp, Artificial Sequence
  ENSG00000004846_63 (sequence is synthesized)
taaatctcaggtggctcatctgccttttcccaggaaaatgcggccccagctttcatcagtgtgtgctttgtcttgatagaaatgcataatcatcaaagctaagtattttttttacctcaa

SEQ ID NO: 3010 - DNA, 120 bp, Artificial Sequence
  ENSG00000004846_64 (sequence is synthesized)
atataagatcctttagcactgattttaaaagtattcgtaaaccacttataaactacgaatgaaaaaataaaggacgacacagatttgtaggggcaagaaaggtgagtagggaaggactag

SEQ ID NO: 3011 - DNA, 120 bp, Artificial Sequence
  ENSG00000004846_65 (sequence is synthesized)
atcatctgcatcgagatttgaaagacacttgtggcttacttgcaaagcttcttttagcattgagcgtacgagggaaattctgttcttgatgacagcgcagtgggaattcccactccaaca

SEQ ID NO: 3012 - DNA, 120 bp, Artificial Sequence
  ENSG00000004846_66 (sequence is synthesized)
acccatgaaatgttactgcataattattcaccttctgaggcccattacgacttatcagcagagaaagaaatttaatttaaactcacccctctgtgctaaagaatgactgggacatgagat

SEQ ID NO: 3013 - DNA, 120 bp, Artificial Sequence
  ENSG00000004846_67 (sequence is synthesized)
caaagcgcgaagctctgtcctccagtggtttgcaacacctaggcacaatagggtgagagaacgcggcattccagcgcttcccagctttccggaccccggagagagggggtgggggtgtgg

SEQ ID NO: 3014 - DNA, 120 bp, Artificial Sequence
  ENSG00000004846_68 (sequence is synthesized)
gctcacatcgccggctggcttgagggaggagagtggtggcggctccggaggtggacgtgtcaattatatcctggagctccgggaagccagattgcttctaccggcggctgcaggggcttg

SEQ ID NO: 3015 - DNA, 120 bp, Artificial Sequence
  ENSG00000004846_69 (sequence is synthesized)
caagcgaagataggcggccctccttccttccccactgtgggggattggggtcagtggagcccgtggatttagccacgaggggacatgactggagccctgtcacgcgcaggtgtgcgtctc

SEQ ID NO: 3016 - DNA, 120 bp, Artificial Sequence
  ENSG00000004846_70 (sequence is synthesized)
cgagagctctttcaatataagtgcgggagaagatttatgctgcagcctcatcacaggatgccttaaatgcatgtacatagtgcgtatctaaccacccataaaagccaagtttaatccttg

SEQ ID NO: 3017 - DNA, 120 bp, Artificial Sequence
  ENSG00000004848_0 (sequence is synthesized)
actacacttgttaccgcttgtcctgagcgcggagagggcgagctcgggccgcgggcagggcgggagccggcagccggcaaccaagggaggcagaaaggcacaaagatcgcaataatatcc

SEQ ID NO: 3018 - DNA, 120 bp, Artificial Sequence
  ENSG00000004848_1 (sequence is synthesized)
gttataacccgctatctaaccccacccccaacacacacccatccatcccaccctccgggagaggcagccggcgatccgctctctgcgccctgggaaaaagccccagccatgagcaatcag

SEQ ID NO: 3019 - DNA, 120 bp, Artificial Sequence
  ENSG00000004848_2 (sequence is synthesized)
taccaggaggagggctgctccgagaggcccgagtgcaaaagtaaatctccaactttgctctcctcctactgcatcgacagcatcctgggccggaggagcccgtgcaaaatgcggttgctg

SEQ ID NO: 3020 - DNA, 120 bp, Artificial Sequence
  ENSG00000004848_3 (sequence is synthesized)
ggagccgcgcagagcttgcctgctccgctgaccagccgcgccgacccggaaaaggccgtgcaaggctcccctaagagcagcagcgccccgttcgaggccgagctgcacctgccgcccaag

SEQ ID NO: 3021 - DNA, 80 bp, Artificial Sequence
  ENSG00000004848_4 (sequence is synthesized)
gccgagctgcacctgccgcccaagctgcggcgcctgtacggcccgggcgggggccgcctccttcagggtgcggcagcggc

SEQ ID NO: 3022 - DNA, 120 bp, Artificial Sequence
  ENSG00000004848_5 (sequence is synthesized)
gaacggccggacggcgcaggggccgccgcggcagccgcggccgcggccgccgcggcctgggacacgctcaagatcagccaggcgccgcaggtgagcatcagccgcagcaagtcgtaccgc

SEQ ID NO: 3023 - DNA, 120 bp, Artificial Sequence
  ENSG00000004848_6 (sequence is synthesized)
ccgcaggtgagcatcagccgcagcaagtcgtaccgcgagaacggggcgcccttcgtgccgccgccgcccgcgctggacgagctgggcggcccggggggcgtcacgcacccggaggagcgc

SEQ ID NO: 3024 - DNA, 120 bp, Artificial Sequence
  ENSG00000004848_7 (sequence is synthesized)
ctcggcgtggccggcggcccgggcagcgccccggctgcgggtggtggcaccggcaccgaggacgacgaggaggagctgctggaggacgaagaagatgaggacgaggaagaggaactgctg

SEQ ID NO: 3025 - DNA, 120 bp, Artificial Sequence
  ENSG00000004848_8 (sequence is synthesized)
gaggacgacgaggaggagctgctggaggacgacgcccgcgcgctgctcaaggagccccggcgctgtcctgtggccgccactggcgccgtggccgcagcagctgccgctgcagtggccaca

SEQ ID NO: 3026 - DNA, 120 bp, Artificial Sequence
  ENSG00000004848_9 (sequence is synthesized)
gagggcggggagctgtcacccaaggaggagctgctgctgcacccggaagacgctgagggcaaggacggcgaggacagcgtgtgcctctctgcgggcagcgactcggaggaggggctgctg

SEQ ID NO: 3027 - DNA, 120 bp, Artificial Sequence
  ENSG00000004848_10 (sequence is synthesized)
aaacgcaaacagaggcgctaccgcaccacgttcaccagctaccagctggaggaactggagcgggccttccagaagacgcactacccggacgtcttcaccagggaggaactggccatgagg

SEQ ID NO: 3028 - DNA, 120 bp, Artificial Sequence
  ENSG00000004848_11 (sequence is synthesized)
ctggacttgaccgaggcccgagtccaggtctggttccagaaccgtcgggccaagtggcgcaagcgggagaaggcaggcgcgcagacccacccccctgggctgcccttcccggggccgctc

SEQ ID NO: 3029 - DNA, 120 bp, Artificial Sequence
  ENSG00000004848_12 (sequence is synthesized)
cgctcagcccctacctggacgccagccccttccctccgcaccacccggcgctcgactccgcttggactgccgctgccgccgccgccgccgccgccttcccgagcctacctccgcctccgg

SEQ ID NO: 3030 - DNA, 120 bp, Artificial Sequence
  ENSG00000004848_13 (sequence is synthesized)
gctcggccagcctgccgcccagcggggcgccgctgggcctgagcactttcctcggagcggcagtgttccgacacccagctttcatcagcccggcattcggcaggctcttttccacaatgg

SEQ ID NO: 3031 - DNA, 120 bp, Artificial Sequence
  ENSG00000004848_14 (sequence is synthesized)
cctgaccagcgcgtcgaccgcggccgcgctcctgagacagcccacacccgccgtggagggcgcagtggcatcgggcgccctggccgacccggccacggcggccgcagacagacgcgcctc

SEQ ID NO: 3032 - DNA, 120 bp, Artificial Sequence
  ENSG00000004848_15 (sequence is synthesized)
cctctagcatagccgcgctgaggctcaaggccaaggagcacgcggcgcagctcacgcagctcaacatcctgccgggcaccagcacgggcaaggaggtgtgctaaaggctgccctccacac

SEQ ID NO: 3033 - DNA, 120 bp, Artificial Sequence
  ENSG00000004848_16 (sequence is synthesized)
ccgcgccccgcgcgcgccccgaaaggtcacctcactcagcaccactcaagaccaaatggaaacagaggaccagcacactcccgagacggcactgagagagcgcagccgccttcacagcag

SEQ ID NO: 3034 - DNA, 120 bp, Artificial Sequence
  ENSG00000004848_17 (sequence is synthesized)
tctggatgcgggcatggcagccctcggcgctccgggacgtggcacctcctcggctggctgtccacccgcccctgcccctgcccctgctactgccaacctcgctccaactccaacatccac

SEQ ID NO: 3035 - DNA, 120 bp, Artificial Sequence
  ENSG00000004848_18 (sequence is synthesized)
tctctcttgttcttactttcctgaaaatatcggggaggttttctcccccagacgcctgatattgaagtaaaaaatttaaaaagcccaacctcttcctcctgacaccccacttagcctttc

SEQ ID NO: 3036 - DNA, 120 bp, Artificial Sequence
  ENSG00000004848_19 (sequence is synthesized)
ctttctttctttctttcttttttttttttaaatagcattttggcgctcgaagttgatctccccagcgagggccccagcgtgaagccagggcccgggaagcaaatgcgagcctgtaagata

SEQ ID NO: 3037 - DNA, 120 bp, Artificial Sequence
  ENSG00000004848_20 (sequence is synthesized)
gatagctaacagtgcacttaaaggaaaggggcgtcttgttcttgttctcttctttatcatacaccaaccaaggtttttatatcaaaccaaagggaaataatactctgctagaatatggac

SEQ ID NO: 3038 - DNA, 120 bp, Artificial Sequence
  ENSG00000004848_21 (sequence is synthesized)
tgttgaagtcaccaaactgtgattattgattctgtacataccattgttattaaaaaaaaaaaaaaaagaacagagctttgtatatttgaaatgttataacgcaattgcactcagcgtggt

SEQ ID NO: 3039 - DNA, 120 bp, Artificial Sequence
  ENSG00000004848_22 (sequence is synthesized)
atggtaaaagtttgtcctcccgtagattcttactgtgttgtagatacggtagggttcctagacaaatatttatgtactcaagccctttatttaacttattaactgtagaggcttccgaaa

SEQ ID NO: 3040 - DNA, 120 bp, Artificial Sequence
  ENSG00000004848_23 (sequence is synthesized)
ccttcaagataaaggcaatggtacagtacttttgtgtaatgtgtaattgttaccacttttccttgctatctagtggagaagtgtcacgctcaaaataaaaaaattatatgtttaacaaaa

SEQ ID NO: 3041 - DNA, 120 bp, Artificial Sequence
  ENSG00000004848_24 (sequence is synthesized)
tccgacacccagctttcatcagcccggcattcggcagactccatcttccttgtcactcaagtgacccgctgccaacgacacccccatatgtgcaagccccgatctacacggcagtacaag

SEQ ID NO: 3042 - DNA, 120 bp, Artificial Sequence
  ENSG00000004864_0 (sequence is synthesized)
ggccaggaacgcacgctgcctggccgtatcgccgcccccaccgccgccgccgccgggactagaagtgagccgcccgggtcccaaacgccagccagccagtcagtgggtcccgcagtcgcc

SEQ ID NO: 3043 - DNA, 120 bp, Artificial Sequence
  ENSG00000004864_1 (sequence is synthesized)
cgcaaccggggcgaatcatggcggccgccaaggtggctttaaccaagagagcagatccagctgagcttagaacaatatttttgaagtatgcaagcattgagaaaaacggtgaatttttca

SEQ ID NO: 3044 - DNA, 120 bp, Artificial Sequence
  ENSG00000004864_2 (sequence is synthesized)
tgtcccccaatgactttgtcactcgatacttgaacatttttggagaaagccagcctaatccaaagactgtggaacttttaagtggagtggtggatcagaccaaagatggattaatatctt

SEQ ID NO: 3045 - DNA, 120 bp, Artificial Sequence
  ENSG00000004864_3 (sequence is synthesized)
ttcaagaatttgttgcctttgaatctgtcctgtgtgcccctgatgctttgtttatggtagcctttcagctgtttgacaaagctggcaaaggagaagtaacttttgaggatgttaagcaag

SEQ ID NO: 3046 - DNA, 120 bp, Artificial Sequence
  ENSG00000004864_4 (sequence is synthesized)
tttttggacagaccacaattcatcaacatattccatttaactgggattcagaatttgtgcaactacattttggaaaagaaagaaaaagacacctgacatatgcggaatttactcagtttt

SEQ ID NO: 3047 - DNA, 120 bp, Artificial Sequence
  ENSG00000004864_5 (sequence is synthesized)
tattggaaatacaactggagcacgcaaagcaagcctttgtgcaacgggacaatgctaggactgggagagtcacagccatcgacttccgagacatcatggtcaccatccgcccccatgtct

SEQ ID NO: 3048 - DNA, 120 bp, Artificial Sequence
  ENSG00000004864_6 (sequence is synthesized)
tgactccttttgtagaagaatgtctagtagctgctgctggaggtaccacatcccatcaagttagtttctcctattttaatggatttaattcgctccttaacaacatggaactcattagaa

SEQ ID NO: 3049 - DNA, 120 bp, Artificial Sequence
  ENSG00000004864_7 (sequence is synthesized)
agatctatagcactctggctggcaccaggaaagatgttgaagtgactaaggaggagtttgttctggcagctcagaaatttggtcaggttacacccatggaagttgacatcttgtttcagt

SEQ ID NO: 3050 - DNA, 120 bp, Artificial Sequence
  ENSG00000004864_8 (sequence is synthesized)
tagcagatttatatgagccaaggggacgtatgaccttagcagacattgaacggattgctcctctggaagagggaactctgccctttaacttggctgaggcccagaggcagaaggcctcag

SEQ ID NO: 3051 - DNA, 120 bp, Artificial Sequence
  ENSG00000004864_9 (sequence is synthesized)
gtgattcagctcgaccagttcttctacaagttgcagagtcggcctacaggtttggtctgggttctgttgctggagctgttggagccactgctgtgtatcctatcgatcttgtaaaaactc

SEQ ID NO: 3052 - DNA, 120 bp, Artificial Sequence
  ENSG00000004864_10 (sequence is synthesized)
gaatgcagaaccaacgatcaactggctcttttgtgggagaactcatgtataaaaacagctttgactgttttaagaaagtgctacgctatgaaggcttctttggactgtatagaggtctgt

SEQ ID NO: 3053 - DNA, 120 bp, Artificial Sequence
  ENSG00000004864_11 (sequence is synthesized)
tgccacagttattgggagttgccccagagaaggccataaaacttacagtgaacgattttgtgagggataaatttatgcacaaagatggttcggtcccacttgcagcagaaattcttgctg

SEQ ID NO: 3054 - DNA, 120 bp, Artificial Sequence
  ENSG00000004864_12 (sequence is synthesized)
gaggctgcgctggaggctcccaggtgattttcacaaatcctttagaaatcgtcaagatccgtttgcaagtggcaggagaaatcaccactggtcctcgagtcagtgctctgtctgtcgtgc

SEQ ID NO: 3055 - DNA, 120 bp, Artificial Sequence
  ENSG00000004864_13 (sequence is synthesized)
tgggatctacaagggtgccaaagcatgctttctgcgggacattcctttctcggccatctactttccgtgctatgctcatgtgaaggcttcctttgcaaatgaagatgggcaggttagccc

SEQ ID NO: 3056 - DNA, 120 bp, Artificial Sequence
  ENSG00000004864_14 (sequence is synthesized)
aggaagcctgctcttagctggtgccatagctggtatgcctgcagcatctttagtgacccctgctgatgttatcaagacgagattacaggtggctgcccgggctggccaaaccacttacag

SEQ ID NO: 3057 - DNA, 120 bp, Artificial Sequence
  ENSG00000004864_15 (sequence is synthesized)
cggagtgatagactgctttagaaagatactgcgtgaagaaggaccaaaagctctgtggaagggagctggtgctcgtgtatttcgatcctcaccccagtttggtgtaactttgctgactta

SEQ ID NO: 3058 - DNA, 120 bp, Artificial Sequence
  ENSG00000004864_16 (sequence is synthesized)
cgaattgctacagcgatggttctacattgattttggaggagtaaaacccatgggatcagagccagttcctaaatccaggatcaacctgcctgccccgaatcctgatcacgttgggggcta

SEQ ID NO: 3059 - DNA, 120 bp, Artificial Sequence
  ENSG00000004864_17 (sequence is synthesized)
caaactggcagttgctacatttgcagggattgaaaacaaatttggactttacctacctctcttcaagccatcagtatctacctcaaaggctattggtggaggcccataggaagatcagcc

SEQ ID NO: 3060 - DNA, 120 bp, Artificial Sequence
  ENSG00000004864_18 (sequence is synthesized)
ctgggatagtgctgtctttttgtgggtactgcagtaaagaacatccctcctgggaatgaagcaatgcttcatcccttttacgtccatctcttgtttaaattcaagtccaggcttttttat

SEQ ID NO: 3061 - DNA, 120 bp, Artificial Sequence
  ENSG00000004864_19 (sequence is synthesized)
catgtgaaatcattcattttctgggtgttttcttaaccagatcattgtgaaattattcataattattatttggccctctgcccagaaacctttgtttgcatctgaaaattgatgggattt

SEQ ID NO: 3062 - DNA, 120 bp, Artificial Sequence
  ENSG00000004864_20 (sequence is synthesized)
ggtcaacactaacatgatttggggaaaggagcaagtcagaatagaaattagtactcccctccttgaactaggattgtagtcccaaagaggctactgtaaggcaatcatggtgctcagagc

SEQ ID NO: 3063 - DNA, 120 bp, Artificial Sequence
  ENSG00000004864_21 (sequence is synthesized)
agtgtttcgtgtgtgttttaaactggtaggaaactaggtgcatatttataaaaataaaaaacactgggagaaatgaaaaaatatatatcaaatatattcagcctggcttcaaattgtaag

SEQ ID NO: 3064 - DNA, 120 bp, Artificial Sequence
  ENSG00000004864_22 (sequence is synthesized)
catgcacaaattctgtctctggattatattatgaagcttttatgtgaaacatgtttctttgtaatgaaaaccacattggagatgtttagtaatcatattgttactggtaccaagactact

SEQ ID NO: 3065 - DNA, 120 bp, Artificial Sequence
  ENSG00000004864_23 (sequence is synthesized)
agggaaatgcctttgtactttagggaagtacttttggcattttactgtacagacagaaaaaactgagatgtagcccctctcctggaagtgctaattttgaaaaactgctcatatgatgta

SEQ ID NO: 3066 - DNA, 120 bp, Artificial Sequence
  ENSG00000004864_24 (sequence is synthesized)
catgtactgattactgcctattttaataaacactcttgaaaaatgcatgttgccctgttgctgcctgccctattctcctcatctccccatcattggtacccacttgcttttaaaatccac

SEQ ID NO: 3067 - DNA, 120 bp, Artificial Sequence
  ENSG00000004864_25 (sequence is synthesized)
tttatcttgaataatgtaagacaaatatgttctgacataagtatttaattcatgttgccttgcataatggtcagaggcgcatgaatttgtgaaggtggaaataaactatttgtaaagtga

SEQ ID NO: 3068 - DNA, 120 bp, Artificial Sequence
  ENSG00000004864_26 (sequence is synthesized)
cgtgaagaaggaccaaaagctctgtggaagggagctggtggtatggaaataatgtgttcttaactaactctttggtatcaggtaaatttttaaaatatctaattatatctgtgatttctc

SEQ ID NO: 3069 - DNA, 120 bp, Artificial Sequence
  ENSG00000004864_27 (sequence is synthesized)
attgtccatttacttggcatgccaacacatggcaaagtaaagggggaaggagattttctgctgcatgtggctttaaccaagagagcagatccagctgagcttagaacaatatttttgaag

SEQ ID NO: 3070 - DNA, 120 bp, Artificial Sequence
  ENSG00000004864_28 (sequence is synthesized)
aggtagtactgttttaaaatctgtatttaaaattcaaaacacatttcttttctcagtcttgtccttgactttaactaccttcttctttcttctgacctatcttactttcttctgagataa

SEQ ID NO: 3071 - DNA, 80 bp, Artificial Sequence
  ENSG00000004866_0 (sequence is synthesized)
ttagcaataaggctggagaaggaaaagccggcgcgcccgcggcccgcgcgatttcccgccgagcccgcgtccccggcggc

SEQ ID NO: 3072 - DNA, 120 bp, Artificial Sequence
  ENSG00000004866_1 (sequence is synthesized)
ggcgcgagctgcgcctccgggccggtgaatcatcccggcagacaccaagagccgcggcagcagagaggagcgctgaaacatggctgaagcggccacgggctttctggagcagctcaagtc

SEQ ID NO: 3073 - DNA, 120 bp, Artificial Sequence
  ENSG00000004866_2 (sequence is synthesized)
ctgcatagtttggtcttggacgtatctgtggaccgtgtggttcttcatcgtgctattcctggtctacatcctgcgggtgcctttgaaaatcaacgacaacttgagcacagtgagcatgtt

SEQ ID NO: 3074 - DNA, 120 bp, Artificial Sequence
  ENSG00000004866_3 (sequence is synthesized)
tttgaacacattaacaccgaagttctacgtggccctaacaggcacttcctcactaatatcagggcttattttgatatttgaatggtggtattttcgcaaatacggaacttcattcattga

SEQ ID NO: 3075 - DNA, 120 bp, Artificial Sequence
  ENSG00000004866_4 (sequence is synthesized)
acaagtctcagtaagccacttgcgcccccttctgggaggggttgacaacaactcttccaacaattctaattccagtaacggggactcagattccaataggcaaagtgtctcagaatgcaa

SEQ ID NO: 3076 - DNA, 120 bp, Artificial Sequence
  ENSG00000004866_5 (sequence is synthesized)
agtatggcgaaatccactaaatttatttaggggtgctgaatacaatcggtatacttgggtgacaggacgagagcctcttacttactatgacatgaatctctctgcccaagaccaccagac

SEQ ID NO: 3077 - DNA, 120 bp, Artificial Sequence
  ENSG00000004866_6 (sequence is synthesized)
attctttacttgtgactcggaccatctgcgtcccgcagatgcaataatgcagaaagcctggagagagagaaacccccaagctaggatttctgcagctcatgaagccttggagataaatga

SEQ ID NO: 3078 - DNA, 120 bp, Artificial Sequence
  ENSG00000004866_7 (sequence is synthesized)
gtgtgcaactgcttatattctcttggctgaagaggaagcaacaaccattgctgaagcagaaaaattatttaagcaggccctgaaggctggagatggctgttaccgacgctctcagcagct

SEQ ID NO: 3079 - DNA, 120 bp, Artificial Sequence
  ENSG00000004866_8 (sequence is synthesized)
aggctagcaatgtgtgccagaagactcgggaggaccagggaagcagtgaaaatgatgagagatttaatgaaggagttcccccttctgagtatgttcaatatccatgaaaaccttttagaa

SEQ ID NO: 3080 - DNA, 120 bp, Artificial Sequence
  ENSG00000004866_9 (sequence is synthesized)
gcccttctggaactacaagcatatgctgatgttcaggcagtcttagcaaagtatgatgatataagcttaccaaagtcagcaacaatatgctacacagctgctttgctcaaagcaagagct

SEQ ID NO: 3081 - DNA, 120 bp, Artificial Sequence
  ENSG00000004866_10 (sequence is synthesized)
gtctctgacaaattctctcctgaggctgcatctcggcgggggctgagcacagcagagatgaatgcagtagaggccattcatagagctgtggaattcaatcctcatgtgccaaaataccta

SEQ ID NO: 3082 - DNA, 120 bp, Artificial Sequence
  ENSG00000004866_11 (sequence is synthesized)
ctagaaatgaaaagcttaatcctacccccagaacatatcctgaagagaggagacagtgaagcaatagcatatgcattctttcatcttgcacactggaagagagtggaaggggctttgaat

SEQ ID NO: 3083 - DNA, 120 bp, Artificial Sequence
  ENSG00000004866_12 (sequence is synthesized)
cttttgcattgtacgtgggaaggcacttttcggatgatcccttatcccttggaaaaggggcacctattttatccttacccaatctgtacagaaacagcagaccgagagctgcttccatct

SEQ ID NO: 3084 - DNA, 120 bp, Artificial Sequence
  ENSG00000004866_13 (sequence is synthesized)
ttccatgaagtctcagtttacccaaagaaggagcttcccttctttattctctttactgctggattatgttccttcacagccatgctggccctcctgacacatcagttcccggaacttatg

SEQ ID NO: 3085 - DNA, 120 bp, Artificial Sequence
  ENSG00000004866_14 (sequence is synthesized)
ggggtcttcgcaaaagctttcctcagcactttgtttgcccccttaaactttgtcatggagaaagtggagagcatcctcccatccagtctgtggcaccagctaacacggatctgagagaag

SEQ ID NO: 3086 - DNA, 120 bp, Artificial Sequence
  ENSG00000004866_15 (sequence is synthesized)
ccctgtcctccactcacctcacccgccgctgccaccatctcctctgtgccaactccttgtggaccgcaagaaagcatgactttgaaaaagggaagccattccgagattttaaaatgttca

SEQ ID NO: 3087 - DNA, 120 bp, Artificial Sequence
  ENSG00000004866_16 (sequence is synthesized)
tggactattccatattaaaagctgtttttgttgtacaaaattcactgatgttcagttctattttattttgccttcagaaaagaagaaagtcaaaaataaaacttttgtgtattacagcaa

SEQ ID NO: 3088 - DNA, 120 bp, Artificial Sequence
  ENSG00000004866_17 (sequence is synthesized)
tggtattcagagacgtagagtggcacagctcctcagactgcacgttttccctgagctctctactggaaaacatttctataaaacataagatggcaaagaggtggaagaaaaattaatgcc

SEQ ID NO: 3089 - DNA, 120 bp, Artificial Sequence
  ENSG00000004866_18 (sequence is synthesized)
tctccctacacagcgactccagcttgggagggcagggccagggttgtcacagcttcccctgtggtgtctgcctgccaagcacagctctggagttagccctgggtgtgagattctctcctg

SEQ ID NO: 3090 - DNA, 120 bp, Artificial Sequence
  ENSG00000004866_19 (sequence is synthesized)
ctaagaaacttcgtgtggttcacctcaggctaggtggaaatagaggctgcctagaaacatgcattaacaggtgcttcttgggccaccctagcctgaagaaggacaaccagagagtataac

SEQ ID NO: 3091 - DNA, 120 bp, Artificial Sequence
  ENSG00000004866_20 (sequence is synthesized)
agtggcacctcaatgccttggccttgaggaccctcagtgtcccttcaggcctccagatttgaggggaggctctagcatgttctggctgcagctattgtcttcagggattctgcagcttgt

SEQ ID NO: 3092 - DNA, 120 bp, Artificial Sequence
  ENSG00000004866_21 (sequence is synthesized)
ctacagcagggctggggattgcagtatccgctgttgctgctgctcccagtcctgcccctgctgctacctagtccagcctcaccgcatcccagaagaggcacgtcggccttcatttgccta

SEQ ID NO: 3093 - DNA, 120 bp, Artificial Sequence
  ENSG00000004866_22 (sequence is synthesized)
gtggattttcaaaagcagctcttcggtttttggtgctgttaagagaccttgcatttcaatcacaccgggagaaaactgaagctcgtaacaggagaatctggcagctggacacagcttgga

SEQ ID NO: 3094 - DNA, 120 bp, Artificial Sequence
  ENSG00000004866_23 (sequence is synthesized)
ctgcattgtctggcttcatgacccctgctgtgtagccggctcatctcttcactctcacatgtacactctcctcgcttttctttcttttttttttcccttttctttcttctaatttttaaa

SEQ ID NO: 3095 - DNA, 120 bp, Artificial Sequence
  ENSG00000004866_24 (sequence is synthesized)
gggggatcagaattgtaaaaattattaatcagagcaaatttttagtccagttcaaaatatgattctcctagacaagagaaaatattggcttttgctttgtttttattaattttcttcttt

SEQ ID NO: 3096 - DNA, 120 bp, Artificial Sequence
  ENSG00000004866_25 (sequence is synthesized)
cctataagtgcagttagtaaataattaacttacagcttcattgctgtttatattcacattctctttcctgcccatagattcctaaccgcagaaataaatggcagtaacctttaatagtaa

SEQ ID NO: 3097 - DNA, 120 bp, Artificial Sequence
  ENSG00000004866_26 (sequence is synthesized)
ccttttttcctcctgagttcttacatatttctgttcatcagttgcttctgctcacaactttaaaacccagatgggaaacaggatttaaattagccatagtgttagcaaaggttttatctt

SEQ ID NO: 3098 - DNA, 120 bp, Artificial Sequence
  ENSG00000004866_27 (sequence is synthesized)
atagatcttctacaacatggattgaaataggacaattaagaatataagttattggtgattgtatcagcatttatctcttacataagaaacattggtattggcttccagagagaaagagcc

SEQ ID NO: 3099 - DNA, 120 bp, Artificial Sequence
  ENSG00000004866_28 (sequence is synthesized)
atgagctcctagttatttatcttttttatattaaaataatgcctttttaaactccccaaaaaacgcctttttaaatttaagataactctttaaaatctgagacctttcacttcagtatac

SEQ ID NO: 3100 - DNA, 120 bp, Artificial Sequence
  ENSG00000004866_29 (sequence is synthesized)
taaactgaaagccaatgacatttcgtgggggaacagtatagaaacaaaacaacgaaatcatttctggaattccctgagcccctcgactcatcagtttgtttgttgttgaagcagaaattt

SEQ ID NO: 3101 - DNA, 120 bp, Artificial Sequence
  ENSG00000004866_30 (sequence is synthesized)
agcagtccttgtggtaagagagttaagtatttccatggtccaaccaaaatttgagagtatttccatggtccaaccaaaattcacaaagttattttgtttctcacttagtttctccctcct

SEQ ID NO: 3102 - DNA, 120 bp, Artificial Sequence
  ENSG00000004866_31 (sequence is synthesized)
gaaacttagagagtagggatgtatctccttcatatttgagattataaaattaaatgttaacgttaaacttgggtttggtgtagaaactgactgcattagtccccataactaaggtgccag

SEQ ID NO: 3103 - DNA, 120 bp, Artificial Sequence
  ENSG00000004866_32 (sequence is synthesized)
caaaatctttgcattatagcctgcatatacatgagtatgtcctcacatgtaccacatcaattcctaagtttttatttttattctgcagcatatatatgctaataaagtctctaatcacca

SEQ ID NO: 3104 - DNA, 120 bp, Artificial Sequence
  ENSG00000004866_33 (sequence is synthesized)
tcttgagggttgagctgcagccactgaagattgtggaaaaacatgcctcttgtttctcaccccatatcatgaaatgggttctttcaagtttatccctgctgcttttcctggagacgtcta

SEQ ID NO: 3105 - DNA, 120 bp, Artificial Sequence
  ENSG00000004866_34 (sequence is synthesized)
ttgctccacttgtccttgagggttattaagagaaaaatatttgttgaatgagtgaacgtgggatctctgttcattttggtatattactttgctttctgggctgagctcaggacagatgcc

SEQ ID NO: 3106 - DNA, 120 bp, Artificial Sequence
  ENSG00000004866_35 (sequence is synthesized)
ccggcacctcaatctcaacatttccaaaactgaactcatcacccctcttcccccaccaccaaaactgctcctcctcctgtattcctgacctccgccatccaccccgttgctcaagccgga

SEQ ID NO: 3107 - DNA, 120 bp, Artificial Sequence
  ENSG00000004866_36 (sequence is synthesized)
aactcggcagcccttccaaactcttccctctctcactccccacatcccatcgtctcggccttcacaatctgtcagttctaacctcctaagcaactaggccttcagtaaatgtgattcacc

SEQ ID NO: 3108 - DNA, 120 bp, Artificial Sequence
  ENSG00000004866_37 (sequence is synthesized)
tcttctttccctccttttcccaaagcatccctcttagtctaggtccttgttgtttcttgcctgaactcctgccatagtcttaactggtctccttgcttcctgtcttatcctccaccgtct

SEQ ID NO: 3109 - DNA, 120 bp, Artificial Sequence
  ENSG00000004866_38 (sequence is synthesized)
ttcttttatactgacacaagaatggtctttctgaattgcacatgtgagcatgtcacttccctgcttaaatttctccagtggattcccagggacttcaggatcaagtcctagttgttcagc

SEQ ID NO: 3110 - DNA, 120 bp, Artificial Sequence
  ENSG00000004866_39 (sequence is synthesized)
atggcatccaagactctttatgatctggcccttgcttacctctcagccttagctctcccaactcttgcacagtcactgctcttcagccatagtggatcactcaccattcccagatgtacc

SEQ ID NO: 3111 - DNA, 120 bp, Artificial Sequence
  ENSG00000004866_40 (sequence is synthesized)
aggctctcgcacacctctgcacctttgcacgtgctgtttgctgtgcgtggaatgcccttcactgtcaccaccctgctcatccactctactaatgcctcttcattcttttatactcagctt

SEQ ID NO: 3112 - DNA, 120 bp, Artificial Sequence
  ENSG00000004866_41 (sequence is synthesized)
tctttaaagttcttctaagctgagttaggtgtctgtcctttatgatcccgcagtattccatgaatacgtatattctcacatttattgtactgtattataattgttgaaaacttgtctgtc

SEQ ID NO: 3113 - DNA, 120 bp, Artificial Sequence
  ENSG00000004866_42 (sequence is synthesized)
ccatttagaatgtgagctccttgagagcagaacggtgtcttcattatctctgtatccccaaggctttgcacagtgccttgctcatagtaggttttcaataaatgattattaaataaataa

SEQ ID NO: 3114 - DNA, 120 bp, Artificial Sequence
  ENSG00000004866_43 (sequence is synthesized)
gtatgcgagcaaacaaggtaggaactggagtgcatgagcgctggagtcagctggccacttgggcactggcaggatcaaactccactcagacccactgccttccaccccttgtgggaggga

SEQ ID NO: 3115 - DNA, 120 bp, Artificial Sequence
  ENSG00000004866_44 (sequence is synthesized)
gtcacatggcaggaggcttccccagaacggttcgtcagtccagggagccgtttcattttctggctgatagagttgtacttggaaaatactcagtttcctgcttactgcttcattatggat

SEQ ID NO: 3116 - DNA, 120 bp, Artificial Sequence
  ENSG00000004866_45 (sequence is synthesized)
cgtttcattttctggctgatagagttgtacttggaaaatactcagtttcctgcttactgcttcattatggattatacagagaaaaatatttgttgaatgagtgaacgtgggatctctgtt

SEQ ID NO: 3117 - DNA, 120 bp, Artificial Sequence
  ENSG00000004866_46 (sequence is synthesized)
cattttggtatattactttgctttctgggctgagctcaggacagatgccaaagcctttccctctaatgacatcaaagccctacttctaaaaccagactggatgtgattcccttctacaaa

SEQ ID NO: 3118 - DNA, 120 bp, Artificial Sequence
  ENSG00000004866_47 (sequence is synthesized)
ggccgttctagctggtattcagagacgtagagtggcacagctcctcagactgcacgttttccctgagctctctactgatataagcttaccaaagtcagcaacaatatgctacacagctgc

SEQ ID NO: 3119 - DNA, 120 bp, Artificial Sequence
  ENSG00000004866_48 (sequence is synthesized)
agagctggaatttctgagggtttcggttgcagttttcagtgatctttgctcgtctcccttccctgtaaagctacatatgctcagcaagtgccgcgtgcctcccatccttggtcggtggta

SEQ ID NO: 3120 - DNA, 120 bp, Artificial Sequence
  ENSG00000004866_49 (sequence is synthesized)
aatgcaggaggtaattaacaggatcttcacaaacttggagccagcccactgagtcgttaaaaaaacacccgcaaagaaaacacacgagccttaacactccagagagttccgaaacacaaa

SEQ ID NO: 3121 - DNA, 120 bp, Artificial Sequence
  ENSG00000004866_50 (sequence is synthesized)
tcgtctgagatcttgctccacttgtccttgagggttattaagtgagcatgtttttgaacacattaacaccgaagttctacgtggccctaacaggcacttcctcactaatatcagggctta

SEQ ID NO: 3122 - DNA, 120 bp, Artificial Sequence
  ENSG00000004897_0 (sequence is synthesized)
gctcggcctcccccatcccccggtaacggtcgctggtgagtttaaatgagcaggggctggccgggccggagccgctacagggggggcctgaggcactgcagaaagtgggcctgagcctcg

SEQ ID NO: 3123 - DNA, 120 bp, Artificial Sequence
  ENSG00000004897_1 (sequence is synthesized)
atatggcaagcactaaaccactatgcttaccgagatgcggttttcctcgcagaacgcctttatgcagaagtacactcagaagaagccttgtttttactggcaacctgttattaccgctca

SEQ ID NO: 3124 - DNA, 120 bp, Artificial Sequence
  ENSG00000004897_2 (sequence is synthesized)
gccttgtttttactggcaacctgttattaccgctcaggaaaggcatataaagcatatagactcttgaaaggacacagttgtactacaccgcaatgcaaatacctgcttgcaaaatgttgt

SEQ ID NO: 3125 - DNA, 120 bp, Artificial Sequence
  ENSG00000004897_3 (sequence is synthesized)
gttgatctcagcaagcttgcagaaggggaacaaatcttatctggtggagtgtttaataagcagaaaagccatgatgatattgttactgagtttggtgattcagcttgctttactctttca

SEQ ID NO: 3126 - DNA, 120 bp, Artificial Sequence
  ENSG00000004897_4 (sequence is synthesized)
ttgttgggacatgtatattgcaagacagatcggcttgccaaaggatcagaatgttaccaaaagagccttagtttaaatcctttcctctggtctccctttgaatcattatgtgaaataggt

SEQ ID NO: 3127 - DNA, 120 bp, Artificial Sequence
  ENSG00000004897_5 (sequence is synthesized)
gaaaagccagatcctgaccaaacatttaaattcacatctttacagaactttagcaactgtctgcccaactcttgcacaacacaagtacctaatcatagtttatctcacagacagcctgag

SEQ ID NO: 3128 - DNA, 86 bp, Artificial Sequence
  ENSG00000004897_6 (sequence is synthesized)
acaagtacctaatcatagtttatctcacagacagcctgagacagttcttacggaaacaccccaggacacaattgaattaaacagat

SEQ ID NO: 3129 - DNA, 120 bp, Artificial Sequence
  ENSG00000004897_7 (sequence is synthesized)
atttcacctgatactgtcccactgggaacaggaacttccatattatctaaacaggttcaaaataaaccaaaaactggtcgaagtttattaggaggaccagcagctcttagtccattaacc

SEQ ID NO: 3130 - DNA, 120 bp, Artificial Sequence
  ENSG00000004897_8 (sequence is synthesized)
ccaagttttgggattttgccattagaaaccccaagtcctggagatggatcctatttacaaaactacactaatacacctcctgtaattgatgtgccatccaccggagccccttcaaaaaag

SEQ ID NO: 3131 - DNA, 120 bp, Artificial Sequence
  ENSG00000004897_9 (sequence is synthesized)
tctgttgccagaatcggccaaactggaacaaagtctgtcttctcacagagtggaaatagccgagaggtaactccaattcttgcacaaacacaaagttctggtccacaaacaagtacaaca

SEQ ID NO: 3132 - DNA, 120 bp, Artificial Sequence
  ENSG00000004897_10 (sequence is synthesized)
cctcaggtattgagccccactattacatctcccccaaacgcactgcctcgaagaagttcacgactctttactagtgacagctccacaaccaaggagaatagcaaaaaattaaaaatgaag

SEQ ID NO: 3133 - DNA, 120 bp, Artificial Sequence
  ENSG00000004897_11 (sequence is synthesized)
tttccacctaaaatcccaaacagaaaaacaaaaagtaaaactaataaaggaggaataactcaacctaacataaatgatagcctggaaattacaaaattggactcttccatcatttcagaa

SEQ ID NO: 3134 - DNA, 120 bp, Artificial Sequence
  ENSG00000004897_12 (sequence is synthesized)
gggaaaatatccacaatcacacctcagattcaggcctttaatctacaaaaagcagcagcagaaggtttgatgagccttcttcgtgaaatggggaaaggttatttagctttgtgttcatac

SEQ ID NO: 3135 - DNA, 120 bp, Artificial Sequence
  ENSG00000004897_13 (sequence is synthesized)
aactgcaaagaagctataaatattttgagccatctaccttctcaccactacaatactggttgggtactgtgccaaattggaagggcctattttgaactttcagagtacatgcaagctgaa

SEQ ID NO: 3136 - DNA, 120 bp, Artificial Sequence
  ENSG00000004897_14 (sequence is synthesized)
agaatattctcagaggttagaaggattgagaattatagagttgaaggcatggagatctactctacaacactttggcatcttcaaaaagatgttgctctttcagttctgtcaaaagactta

SEQ ID NO: 3137 - DNA, 120 bp, Artificial Sequence
  ENSG00000004897_15 (sequence is synthesized)
acagacatggataaaaattcgccagaggcctggtgtgctgcagggaactgtttcagtctgcaacgggaacatgatattgcaattaaattcttccagagagctatccaagttgatccaaat

SEQ ID NO: 3138 - DNA, 120 bp, Artificial Sequence
  ENSG00000004897_16 (sequence is synthesized)
tacgcttatgcctatactctattagggcatgagtttgtcttaactgaagaattggacaaagcattagcttgttttcgaaatgctatcagagtcaatcctagacattataatgcatggtat

SEQ ID NO: 3139 - DNA, 120 bp, Artificial Sequence
  ENSG00000004897_17 (sequence is synthesized)
ggtttaggaatgatttattacaagcaagaaaaattcagccttgcagaaatgcatttccaaaaagcgcttgatatcaaccctcaaagttcagttttactttgccacattggagtagttcaa

SEQ ID NO: 3140 - DNA, 120 bp, Artificial Sequence
  ENSG00000004897_18 (sequence is synthesized)
catgcactgaaaaaatcagagaaggctttggataccctaaacaaagccattgtcattgatcccaagaaccctctatgcaaatttcacagagcctcagttttatttgcaaatgaaaaatat

SEQ ID NO: 3141 - DNA, 120 bp, Artificial Sequence
  ENSG00000004897_19 (sequence is synthesized)
aagtctgctttacaagaacttgaagaattgaaacaaattgttcccaaagaatccctcgtttacttcttaataggaaaggtttacaagaagttaggtcaaacgcacctcgccctgatgaat

SEQ ID NO: 3142 - DNA, 120 bp, Artificial Sequence
  ENSG00000004897_20 (sequence is synthesized)
ttctcttgggctatggatttagatcctaaaggagccaataaccagattaaagaggcaattgataagcgttatcttccagatgatgaggagccaataacccaagaagaacagatcatggga

SEQ ID NO: 3143 - DNA, 120 bp, Artificial Sequence
  ENSG00000004897_21 (sequence is synthesized)
acagatgaatcccaggagagcagcatgacagatgcggatgacacacaacttcatgcagctgaaagtgatgaattttaacttctggaaatcagacttttacaactggatgtgtgactagtg

SEQ ID NO: 3144 - DNA, 120 bp, Artificial Sequence
  ENSG00000004897_22 (sequence is synthesized)
ctgacgtgtttcttgtccctctgtatactgagtctttactcttgagctggcggtgtcatcgtccgtcacttataccatgagtgtgccactttcattggaccctgactgtatacagaatga

SEQ ID NO: 3145 - DNA, 120 bp, Artificial Sequence
  ENSG00000004897_23 (sequence is synthesized)
aaggcagtgcaatatttagctgctaacaagactggctcttttaccagtatgaatgacaatttatggggggtagggtggggaactttcttttctgtttttctttaatctccctttgttgga

SEQ ID NO: 3146 - DNA, 120 bp, Artificial Sequence
  ENSG00000004897_24 (sequence is synthesized)
agagtttcttggttgctttttcaaaaatttgtttttatttggttctgttcctgataaacagagtaactgaccttcatttctaggttcttcaagaatggtgtttgcaagtgccagatggaa

SEQ ID NO: 3147 - DNA, 120 bp, Artificial Sequence
  ENSG00000004897_25 (sequence is synthesized)
caataaaagacgttgcctataacagtgacttgattgccaaggaatgtaaattaccttaaacttgcagtatctcccataaacaaatgtaatgggcatattgggactcgtatgtaggaatca

SEQ ID NO: 3148 - DNA, 120 bp, Artificial Sequence
  ENSG00000004897_26 (sequence is synthesized)
aatatccctccatacagtgtactcttattcttggcaagaatgctttaatgtctaaccaagaattttaatttattcatcttgcttcaaagtgttgatcattgttgtcttggtattgcaaac

SEQ ID NO: 3149 - DNA, 120 bp, Artificial Sequence
  ENSG00000004897_27 (sequence is synthesized)
tttaaaattgtttcttaccatattgcctcttctctttgagctctgtgggatcacctttaacattcagagatgatagagtggttccccactgagaagccaaaacaaggcccttaataaccc

SEQ ID NO: 3150 - DNA, 120 bp, Artificial Sequence
  ENSG00000004897_28 (sequence is synthesized)
cttaagttcaccatatgaatcagaaggagaacactaaagtggagagacttttaagagatcatgatagtgaaagccttaatataatcagaattgtaccataaccttgaatctatatttgtt

SEQ ID NO: 3151 - DNA, 120 bp, Artificial Sequence
  ENSG00000004897_29 (sequence is synthesized)
caaaacatccctttgacttttctaagtgtttgcttaagcagagtgtaagaatgtgtggttacctttggttgagatcctttccattctttttgactctctgcttcagattttttcagtagt

SEQ ID NO: 3152 - DNA, 120 bp, Artificial Sequence
  ENSG00000004897_30 (sequence is synthesized)
gtgagtcaccaaaacatttactaagagtaattgggtttaggatgttggaaatttttagcttgggggaaaaaacattcttatgaaggagataggttctcttctgagtttgtcataatatag

SEQ ID NO: 3153 - DNA, 120 bp, Artificial Sequence
  ENSG00000004897_31 (sequence is synthesized)
attggtgtctttggaaaatggccacaattttaagaattcaattatgcatataaaatgataattattggaattccacagtaacagatttaaacagtcttaaattgtttatctcctttactg

SEQ ID NO: 3154 - DNA, 120 bp, Artificial Sequence
  ENSG00000004897_32 (sequence is synthesized)
taatgtattgaaatttttagagaaattttagttgttaacattttattaagtgccagtgtcagaatataacaaattatagtttcttatgaatgacaggcctacagttattattctggatta

SEQ ID NO: 3155 - DNA, 120 bp, Artificial Sequence
  ENSG00000004897_33 (sequence is synthesized)
tttgatggaggacaaacttacctgtatttgttagtcaagctgtgaaaataaggtggattacaaaagatgtgaaaaaaattttagtctgtagactcagtaattttctataatttactgtta

SEQ ID NO: 3156 - DNA, 120 bp, Artificial Sequence
  ENSG00000004897_34 (sequence is synthesized)
atctcatttgaacatggattaggtacaatttataaattaattcaagtcagggtctttaggtatcaggtgccagagagatatttaacagatttccctacctaaatttatgtatatgtactg

SEQ ID NO: 3157 - DNA, 120 bp, Artificial Sequence
  ENSG00000004897_35 (sequence is synthesized)
tctaaaacaatacttttttaaaaaaaaggaacagttgggagaaaataaatataatgaaaaattcccagaggctagcacttggattctaacacgtatgctattgtattatccattagttct

SEQ ID NO: 3158 - DNA, 120 bp, Artificial Sequence
  ENSG00000004897_36 (sequence is synthesized)
gtaatatttaattttagattcttttatttttttaattggcaaagcacaaggtgctgtataacagtgtcatttagagttttatagaaagcttcaacctgagttctgcgttataaagcctgg

SEQ ID NO: 3159 - DNA, 120 bp, Artificial Sequence
  ENSG00000004897_37 (sequence is synthesized)
agaaagctaagcttagaacataacttgctgaagtataattatctttttgtagcaggaatttatgtgccagaggtgagagtctttctggtactgattttttgagaccaaggataaaaggat

SEQ ID NO: 3160 - DNA, 120 bp, Artificial Sequence
  ENSG00000004897_38 (sequence is synthesized)
cgttttgtaagacatgccatggcaatggctggttgggggacagtttccgcccaagcttggcctattttatttttcctcatacctactttcaaagtcatttaggtatttgaagccttattt

SEQ ID NO: 3161 - DNA, 120 bp, Artificial Sequence
  ENSG00000004897_39 (sequence is synthesized)
cccacgtagtaacactttctggcttttgcagtttctttttttgtttggttttgttttttgcatggaatggggatcaaacaacccgaagaagaacacattttgatcaagcaaaatgtttgc

SEQ ID NO: 3162 - DNA, 120 bp, Artificial Sequence
  ENSG00000004897_40 (sequence is synthesized)
ttcaaatttcagaagtttattttacagaaattaaattaagtagtttgacatccttttctctgtttcacacatatattaggttggtgcataagtaattgtggtttttgccatgacttttat

SEQ ID NO: 3163 - DNA, 120 bp, Artificial Sequence
  ENSG00000004897_41 (sequence is synthesized)
ggcaaaacctgcaattacttttgcaccaacttaatacatctatatacatatatatatacgcgcacacacttgttcagaagttatgttgtggccttggatttgtttttccccttggaaatg

SEQ ID NO: 3164 - DNA, 120 bp, Artificial Sequence
  ENSG00000004897_42 (sequence is synthesized)
gttcttaactctgggattttagaaggttagaatattttttcaagagaacagtggtactcaaaagaatgaaaggtggtccctacattttctgtattcatcacttaaaatttttaatttttc

SEQ ID NO: 3165 - DNA, 120 bp, Artificial Sequence
  ENSG00000004897_43 (sequence is synthesized)
cgagaactacaagtaacatttgaaccatgctgctgttgtaccttaaacaaaaactcagtgataaccagtatttagtctattaaaaatgctctttttgaagaaaaaagtttggaagtctct

SEQ ID NO: 3166 - DNA, 120 bp, Artificial Sequence
  ENSG00000004897_44 (sequence is synthesized)
gattagccagagtatagtatgagtcttcactgagaaatatggtgacccattttctttgtgaaaacctgggaaaatgcaagtgtgggtatgaagtgtgtgttctgtttgcattgaaacaat

SEQ ID NO: 3167 - DNA, 120 bp, Artificial Sequence
  ENSG00000004897_45 (sequence is synthesized)
gtaattttgtgtcttctttttgctttaactgacttatttcagaaattgtacagtgttgagggggaaagtcttttctgttaatatatttgcaattcattaaaggatatggaaaatccaaat

SEQ ID NO: 3168 - DNA, 120 bp, Artificial Sequence
  ENSG00000004897_46 (sequence is synthesized)
aagttacttttgaaagcaatttataatcaagttgttaaagctatatgaaagctgtgccatctgtattttaataagaaggcacagaaaaacagagatacagttttatgtttcacaaaaaac

SEQ ID NO: 3169 - DNA, 120 bp, Artificial Sequence
  ENSG00000004897_47 (sequence is synthesized)
acagaaaaacagagatacagttttatgtttcacaaaaaactagagcaatgtttatctaattttttaaaacttacactcttaatatatttatatttttaaacggtcatactcttttttagt

SEQ ID NO: 3170 - DNA, 120 bp, Artificial Sequence
  ENSG00000004897_48 (sequence is synthesized)
aacggttttctctctcgtcgaccaacctcgggtatttccgactcccttcgggcttttccgtctggttcccgctcggctttctccacttcgggtattcccgtgtcccgctcggaagcactc

SEQ ID NO: 3171 - DNA, 120 bp, Artificial Sequence
  ENSG00000004897_49 (sequence is synthesized)
acatatatgaaattccataactttttatcactgtaacaagattctagctatcatcatcttgttgtttttctgattgacactagttcataaaatctttactttttttctgtgtagttccct

SEQ ID NO: 3172 - DNA, 120 bp, Artificial Sequence
  ENSG00000004897_50 (sequence is synthesized)
tacatactacttttaataactatgtagaattgattcaggtttatatgctatgatttacttaatcatttttcaatctttaggtttttttttcccccagggtttttgttgttttgggttttt

SEQ ID NO: 3173 - DNA, 120 bp, Artificial Sequence
  ENSG00000004897_51 (sequence is synthesized)
agagggagagaaacacagttctgggagctgtgaatgtgatgaggaaaaaaattgatgaggcagctgaggagagaccctgaagtcaagagagtgctgcaaaggaaaggataattaataggc

SEQ ID NO: 3174 - DNA, 120 bp, Artificial Sequence
  ENSG00000004897_52 (sequence is synthesized)
gtgagcggcttcggcgaaaataaccgcctttcccgtccgagccaacgtccggccagcctttcctgtcagtccaggggcctggcttgactgggggtgggagatgaggggccgaaaatgcac

SEQ ID NO: 3175 - DNA, 120 bp, Artificial Sequence
  ENSG00000004939_0 (sequence is synthesized)
agaacgagtgggaacgtagctggtcgcagagggcaccagcggctgcaggacttcaccaagggaccctgaggctcgtgagcagggacccgcggtgcgggttatgctgggggctcagatcac

SEQ ID NO: 3176 - DNA, 120 bp, Artificial Sequence
  ENSG00000004939_1 (sequence is synthesized)
cgtagacaactggacactcaggaccacgccatggaggagctgcaggatgattatgaagacatgatggaggagaatctggagcaggaggaatatgaagacccagacatccccgagtcccag

SEQ ID NO: 3177 - DNA, 120 bp, Artificial Sequence
  ENSG00000004939_2 (sequence is synthesized)
atggaggagccggcagctcacgacaccgaggcaacagccacagactaccacaccacatcacacccgggtacccacaaggtctatgtggagctgcaggagctggtgatggacgaaaagaac

SEQ ID NO: 3178 - DNA, 120 bp, Artificial Sequence
  ENSG00000004939_3 (sequence is synthesized)
caggagctgagatggatggaggcggcgcgctgggtgcaactggaggagaacctgggggagaatggggcctggggccgcccgcacctctctcacctcaccttctggagcctcctagagctg

SEQ ID NO: 3179 - DNA, 120 bp, Artificial Sequence
  ENSG00000004939_4 (sequence is synthesized)
cgtagagtcttcaccaagggtactgtcctcctagacctgcaagagacctccctggctggagtggccaaccaactgctagacaggtttatctttgaagaccagatccggcctcaggaccga

SEQ ID NO: 3180 - DNA, 120 bp, Artificial Sequence
  ENSG00000004939_5 (sequence is synthesized)
gaggagctgctccgggccctgctgcttaaacacagccacgctggagagctggaggccctggggggtgtgaagcctgcagtcctgacacgctctggggatccttcacagcctctgctcccc

SEQ ID NO: 3181 - DNA, 120 bp, Artificial Sequence
  ENSG00000004939_6 (sequence is synthesized)
caacactcctcactggagacacagctcttctgtgagcagggagatgggggcacagaagggcactcaccatctggaattctggaaaagattcccccggattcagaggccacgttggtgcta

SEQ ID NO: 3182 - DNA, 120 bp, Artificial Sequence
  ENSG00000004939_7 (sequence is synthesized)
gtgggccgcgccgacttcctggagcagccggtgctgggcttcgtgaggctgcaggaggcagcggagctggaggcggtggagctgccggtgcctatacgcttcctctttgtgttgctggga

SEQ ID NO: 3183 - DNA, 120 bp, Artificial Sequence
  ENSG00000004939_8 (sequence is synthesized)
cctgaggccccccacatcgattacacccagcttggccgggctgctgccaccctcatgtcagagagggtgttccgcatagatgcctacatggctcagagccgaggggagctgctgcactcc

SEQ ID NO: 3184 - DNA, 120 bp, Artificial Sequence
  ENSG00000004939_9 (sequence is synthesized)
ctagagggcttcctggactgcagcctagtgctgcctcccaccgatgccccctccgagcaggcactgctcagtctggtgcctgtgcagagggagctacttcgaaggcgctatcagtccagc

SEQ ID NO: 3185 - DNA, 120 bp, Artificial Sequence
  ENSG00000004939_10 (sequence is synthesized)
cctgccaagccagactccagcttctacaagggcctagacttaaatgggggcccagatgaccctctgcagcagacaggccagctcttcgggggcctggtgcgtgatatccggcgccgctac

SEQ ID NO: 3186 - DNA, 120 bp, Artificial Sequence
  ENSG00000004939_11 (sequence is synthesized)
ccctattacctgagtgacatcacagatgcattcagcccccaggtcctggctgccgtcatcttcatctactttgctgcactgtcacccgccatcaccttcggcggcctcctgggagaaaag

SEQ ID NO: 3187 - DNA, 120 bp, Artificial Sequence
  ENSG00000004939_12 (sequence is synthesized)
acccggaaccagatgggagtgtcggagctgctgatctccactgcagtgcagggcattctcttcgccctgctgggggctcagcccctgcttgtggtcggcttctcaggacccctgctggtg

SEQ ID NO: 3188 - DNA, 120 bp, Artificial Sequence
  ENSG00000004939_13 (sequence is synthesized)
tttgaggaagccttcttctcgttctgcgagaccaacggtctagagtacatcgtgggccgcgtgtggatcggcttctggctcatcctgctggtggtgttggtggtggccttcgagggtagc

SEQ ID NO: 3189 - DNA, 120 bp, Artificial Sequence
  ENSG00000004939_14 (sequence is synthesized)
ttcctggtccgcttcatctcccgctatacccaggagatcttctccttcctcatttccctcatcttcatctatgagactttctccaagctgatcaagatcttccaggaccacccactacag

SEQ ID NO: 3190 - DNA, 120 bp, Artificial Sequence
  ENSG00000004939_15 (sequence is synthesized)
aagacttataactacaacgtgttgatggtgcccaaacctcagggccccctgcccaacacagccctcctctcccttgtgctcatggccggtaccttcttctttgccatgatgctgcgcaag

SEQ ID NO: 3191 - DNA, 120 bp, Artificial Sequence
  ENSG00000004939_16 (sequence is synthesized)
ttcaagaacagctcctatttccctggcaagctgcgtcgggtcatcggggacttcggggtccccatctccatcctgatcatggtcctggtggatttcttcattcaggatacctacacccag

SEQ ID NO: 3192 - DNA, 120 bp, Artificial Sequence
  ENSG00000004939_17 (sequence is synthesized)
aaactctcggtgcctgatggcttcaaggtgtccaactcctcagcccggggctgggtcatccacccactgggcttgcgttccgagtttcccatctggatgatgtttgcctccgccctgcct

SEQ ID NO: 3193 - DNA, 120 bp, Artificial Sequence
  ENSG00000004939_18 (sequence is synthesized)
gctctgctggtcttcatcctcatattcctggagtctcagatcaccacgctgattgtcagcaaacctgagcgcaagatggtcaagggctccggcttccacctggacctgctgctggtagta

SEQ ID NO: 3194 - DNA, 120 bp, Artificial Sequence
  ENSG00000004939_19 (sequence is synthesized)
ggcatgggtggggtggccgccctctttgggatgccctggctcagtgccaccaccgtgcgttccgtcacccatgccaacgccctcactgtcatgggcaaagccagcaccccaggggctgca

SEQ ID NO: 3195 - DNA, 120 bp, Artificial Sequence
  ENSG00000004939_20 (sequence is synthesized)
gtggactcctggtcgctgtgcttgtgggcctgtccatcctcatggagcccatcctgtcccgcatccccctggctgtactgtttggcatcttcctctacatgggggtcacgtcgctcagcg

SEQ ID NO: 3196 - DNA, 120 bp, Artificial Sequence
  ENSG00000004939_21 (sequence is synthesized)
gcatccagctctttgaccgcatcttgcttctgttcaagccacccaagtatcacccagatgtgccctacgtcaagcgggtgaagacctggcgcatgcacttattcacgggcatccagatca

SEQ ID NO: 3197 - DNA, 120 bp, Artificial Sequence
  ENSG00000004939_22 (sequence is synthesized)
tctgcctggcagtgctgtgggtggtgaagtccacgccggcctccctggccctgcccttcgtcctcatcctcactgtgccgctgcggcgcgtcctgctgccgctcatcttcaggaacgtgg

SEQ ID NO: 3198 - DNA, 120 bp, Artificial Sequence
  ENSG00000004939_23 (sequence is synthesized)
agcttcagtgtctggatgctgatgatgccaaggcaacctttgatgaggaggaaggtcgggatgaatacgacgaagtggccatgcctgtgtgaggggcgggcccaggccctagaccctccc

SEQ ID NO: 3199 - DNA, 120 bp, Artificial Sequence
  ENSG00000004939_24 (sequence is synthesized)
ccaccattccacatccccaccttccaaggaaaagcagaagttcatgggcacctcatggactccaggatcctcctggagcagcagctgaggccccagggctgtgggtggggaaggaaggcg

SEQ ID NO: 3200 - DNA, 120 bp, Artificial Sequence
  ENSG00000004939_25 (sequence is synthesized)
tgtccaggagaccttccacaaagggtagcctggcttttctggctggggatggccgatggggcccacattagggggtttgttgcacagtccctcctgttgccacactttcactggggatcc

SEQ ID NO: 3201 - DNA, 120 bp, Artificial Sequence
  ENSG00000004939_26 (sequence is synthesized)
cgtgctggaagacttagatctgagccctccctcttcccagcacaggcaggggtagaagcaaaggcaggaggtgggtgagcgggtggggtgcttgctgtgtgaccttgggcaagtcccttg

SEQ ID NO: 3202 - DNA, 120 bp, Artificial Sequence
  ENSG00000004939_27 (sequence is synthesized)
acctttccagcctatatttcctcttctgtaaaatgggtatattgatgataatacccacattacaggatggttactgaggaccaaagatacatgtaaaatagggctttgtaaactccacag

SEQ ID NO: 3203 - DNA, 120 bp, Artificial Sequence
  ENSG00000004939_28 (sequence is synthesized)
ggactgttctatagcagtcatcatttgtctttgaacgtacccaaggtcacatagctgggatttgaactgagccgtgcagctgggatttgaaccaggccttctgatttcaaggtccgagct

SEQ ID NO: 3204 - DNA, 120 bp, Artificial Sequence
  ENSG00000004939_29 (sequence is synthesized)
ctgtcctctgtcagtcatgcgtccactttcccttcccctgtgactcctcccttccccactctgctcccagcccctaccttgagaccctcttctctgggcccagagagaggcgtcctggtg

SEQ ID NO: 3205 - DNA, 120 bp, Artificial Sequence
  ENSG00000004939_30 (sequence is synthesized)
aggacaaggtacaggcaaggatgatccagggattgggcctgggactcaggcctcctaagtgtttggttcctccctccaaacactcattagttcactcattcattcattccacaaacattt

SEQ ID NO: 3206 - DNA, 120 bp, Artificial Sequence
  ENSG00000004939_31 (sequence is synthesized)
actgagggccccggaatcagtggactccgaggggactgagacaagccctgccctggggtgggggtggggggcaaggtacagttgattctacatttggatagggagtgggggagggtggga

SEQ ID NO: 3207 - DNA, 120 bp, Artificial Sequence
  ENSG00000004939_32 (sequence is synthesized)
aggtaggggcgggagagtgagggggtttgtaatttattaattgcgtattttctaagagttttcaacatagtttggcttcacacacaacttcaggcccctcatttgagagccattatcctc

SEQ ID NO: 3208 - DNA, 120 bp, Artificial Sequence
  ENSG00000004939_33 (sequence is synthesized)
aactccatctaaactgaatcttggggagaacccagatctgaccaattggggtaggagacagcaggctctccaagaacatgggcaaatttatttttttataaaacaaaaagataaaaagag

SEQ ID NO: 3209 - DNA, 120 bp, Artificial Sequence
  ENSG00000004939_34 (sequence is synthesized)
aaacaaaaagataaaaagagttgaaagacgtgaaagtggtgagagatggaggaaacagaatcaggaagtggtagaaaagagaggaggtggctgggcgcagtggctcacgtttgtaatccc

SEQ ID NO: 3210 - DNA, 120 bp, Artificial Sequence
  ENSG00000004939_35 (sequence is synthesized)
aaaaaaaaaaaaaaaacggaaggaaacatcagccttgggggccacagactcaacatgtgtgtgtggtggggttccagcccaacatagagtaacattatttgtacctcccaggctagctca

SEQ ID NO: 3211 - DNA, 120 bp, Artificial Sequence
  ENSG00000004939_36 (sequence is synthesized)
ctcagtccatgggaggctctcctgtccctgaaagctgacacccacctttcaccacttcgcccatgctacagttcagtttcctcgtctgtaaaatggggatgataatggtacctaccttgc

SEQ ID NO: 3212 - DNA, 120 bp, Artificial Sequence
  ENSG00000004939_37 (sequence is synthesized)
agtgttgttataaggattaaaggagacagtgcaagaaaaggccttggttggtgaagagcccaacctcggaggggagctgctgggatcctccttatcttgactgggatgtccctgtctccc

SEQ ID NO: 3213 - DNA, 120 bp, Artificial Sequence
  ENSG00000004939_38 (sequence is synthesized)
cctccccttgctccttgaacatggccaaggaaagtgaaaaacaaaaattattcactctgctagcacccttccccttgatgcctgggaataggttttgccaataaacgtatctgtgttgga

SEQ ID NO: 3214 - DNA, 120 bp, Artificial Sequence
  ENSG00000004948_0 (sequence is synthesized)
agttataagagacaggaataccagtgagaagtatgagagagtgggtgggagataatgtttagaatctcttttgctgcccgcaatttatgaaaatggcttgaaaatatttatggtcaaaga

SEQ ID NO: 3215 - DNA, 120 bp, Artificial Sequence
  ENSG00000004948_1 (sequence is synthesized)
ccgaaatatttcttcaaagaagattagctttgctccattaaaagtaatgagtagaaatattaaaaaaaaaaaaagttttaagtacctgagtatcttgccagcaactgaccaccactgcta

SEQ ID NO: 3216 - DNA, 120 bp, Artificial Sequence
  ENSG00000004948_2 (sequence is synthesized)
aaagtgaggagagacacagctttcatcattgggactgcagtttatttcaggacaaagagatcttcaaaaatcaaaaatgaggttcacatttacaagccggtgcttggcactgtttcttct

SEQ ID NO: 3217 - DNA, 120 bp, Artificial Sequence
  ENSG00000004948_3 (sequence is synthesized)
tctaaatcacccaaccccaattcttcctgccttttcaaatcaaacctatccaacaatagagcccaagccatttctttacgtcgtaggacgaaagaagatgatggatgcacagtacaaatg

SEQ ID NO: 3218 - DNA, 120 bp, Artificial Sequence
  ENSG00000004948_4 (sequence is synthesized)
ctatgaccgaatgcagcagttacccgcataccaaggagaaggtccatattgcaatcgcacctgggatggatggctgtgctgggatgacacaccggctggagtattgtcctatcagttctg

SEQ ID NO: 3219 - DNA, 120 bp, Artificial Sequence
  ENSG00000004948_5 (sequence is synthesized)
cccagattattttccggattttgatccatcagaaaaggttacaaaatactgtgatgaaaaaggtgtttggtttaaacatcctgaaaacaatcgaacctggtccaactatactatgtgcaa

SEQ ID NO: 3220 - DNA, 120 bp, Artificial Sequence
  ENSG00000004948_6 (sequence is synthesized)
tgctttcactcctgagaaactgaagaatgcatatgttctgtactatttggctattgtgggtcattctttgtcaattttcaccctagtgatttccctggggattttcgtgtttttcaggag

SEQ ID NO: 3221 - DNA, 120 bp, Artificial Sequence
  ENSG00000004948_7 (sequence is synthesized)
cccaatggagagctcgtgcgaagggacccggtgagctgcaagattttgcattttttccaccagtacatgatggcctgcaactatttctggatgctctgtgaagggatctatcttcataca

SEQ ID NO: 3222 - DNA, 120 bp, Artificial Sequence
  ENSG00000004948_8 (sequence is synthesized)
ctcattgtcgtggctgtgtttactgagaagcaacgcttgcggtggtattatctcttgggctgggggttcccgctggtgccaaccactatccatgctattaccagggccgtgtacttcaat

SEQ ID NO: 3223 - DNA, 120 bp, Artificial Sequence
  ENSG00000004948_9 (sequence is synthesized)
gacaactgctggctgagtgtggaaacccatttgctttacataatccatggacctgtcatggcggcacttgtggtcaatttcttctttttgctcaacattgtccgggtgcttgtgaccaaa

SEQ ID NO: 3224 - DNA, 120 bp, Artificial Sequence
  ENSG00000004948_10 (sequence is synthesized)
atgagggaaacccatgaggcggaatcccacatgtacctgaaggctgtgaaggccaccatgatccttgtgcccctgctgggaatccagtttgtcgtctttccctggagaccttccaacaag

SEQ ID NO: 3225 - DNA, 120 bp, Artificial Sequence
  ENSG00000004948_11 (sequence is synthesized)
atgcttgggaagatatatgattacgtgatgcactctctgattcatttccagggcttctttgttgcgaccatctactgcttctgcaacaatgaggtccaaaccaccgtgaagcgccaatgg

SEQ ID NO: 3226 - DNA, 120 bp, Artificial Sequence
  ENSG00000004948_12 (sequence is synthesized)
gcccaattcaaaattcagtggaaccagcgttgggggaggcgcccctccaaccgctctgctcgcgctgcagccgctgctgcggaggctggcgacatcccaatttacatctgccatcaggag

SEQ ID NO: 3227 - DNA, 120 bp, Artificial Sequence
  ENSG00000004948_13 (sequence is synthesized)
ctgaggaatgaaccagccaacaaccaaggcgaggagagtgctgagatcatccctttgaatatcatagagcaagagtcatctgcttgaatgtgaagcaaacacagcatcgtgatcactgag

SEQ ID NO: 3228 - DNA, 120 bp, Artificial Sequence
  ENSG00000004948_14 (sequence is synthesized)
agcttcacagctgggagagcgcaggaaggcgccgggaaggaaagccagcccaccagcgtctgggtgggctgcgccgcgcggctggcggaccttcccgggttggagaagtgcgcacgtccg

SEQ ID NO: 3229 - DNA, 120 bp, Artificial Sequence
  ENSG00000004948_15 (sequence is synthesized)
cacctcaccctgcggctgacatctcctgcccaggagatgggcgctgaagcttgagcgcctgagtccctggagccacacctgcgaacaccctttgcttctattgagctgtgcccagccgcc

SEQ ID NO: 3230 - DNA, 120 bp, Artificial Sequence
  ENSG00000004948_16 (sequence is synthesized)
aaatctgaagaaagttattcttggtactgttgctttgggagacagtctaggaatggagtctcccactgcaacttgtgaactccatcattcatccaggactgagatgcaaatgtcacagta

SEQ ID NO: 3231 - DNA, 120 bp, Artificial Sequence
  ENSG00000004948_17 (sequence is synthesized)
atgcaagcaaagtatcaaagaaaaacaatgaaattgacctagttcagatacagggtgctccttgtcaatactgagccatttatacctttgaaatattaaaatcactgtcaatatttttat

SEQ ID NO: 3232 - DNA, 120 bp, Artificial Sequence
  ENSG00000004948_18 (sequence is synthesized)
ttttaactctggattttgaattagattatttctgtatttggctatggatctgatttttaatttttttaaatttcagtcaattctgatgttactgagatgttttaccatccttacaatgta

SEQ ID NO: 3233 - DNA, 120 bp, Artificial Sequence
  ENSG00000004948_19 (sequence is synthesized)
aaccacatgaactacgtgacctctgcaagacaaagcggctttctaatagagagattagtaaatatgtgaagaaaaagacctgcatttggcaggaagatgtatgctttgaatgcaaaagaa

SEQ ID NO: 3234 - DNA, 120 bp, Artificial Sequence
  ENSG00000004948_20 (sequence is synthesized)
atttagagtcaatttgctgaaaacattacatgctcagcttggttttggacaagcctgtccattgggcaggacctagctgttgtaaagaattggtcttaatgttgaatgtattttggttgc

SEQ ID NO: 3235 - DNA, 120 bp, Artificial Sequence
  ENSG00000004948_21 (sequence is synthesized)
tgatgtttataaactgagaggtcacaaagaatctatcactaaaaatttttacaaaactgccaaaaatataattcttagtggaagacaatactccctttaaagagagtttgccactcccct

SEQ ID NO: 3236 - DNA, 120 bp, Artificial Sequence
  ENSG00000004948_22 (sequence is synthesized)
aaactccaggatttataaagcaaattactccaaggtttataaagcagattacctcttgcccttgggtgctatctagcagtaaaagataaatttgttgaatattggtaattaaaagactcc

SEQ ID NO: 3237 - DNA, 120 bp, Artificial Sequence
  ENSG00000004948_23 (sequence is synthesized)
acataagtccattaactgctttccacccagcttcaaagcttaaaaagagctcaggcttttccaggaagatccaggagggctaattagaaatcaacttgtggttgaccgcttgtttcttgt

SEQ ID NO: 3238 - DNA, 120 bp, Artificial Sequence
  ENSG00000004948_24 (sequence is synthesized)
tattaccaaaacaggaggggaaaaaattaactgctccaaatttaaccataaatcaattcatgtttaacgtttctcattaaaatccagtattatattatcatatctctctttacttcccag

SEQ ID NO: 3239 - DNA, 120 bp, Artificial Sequence
  ENSG00000004948_25 (sequence is synthesized)
tataagatttttgaaaatcctgaataaaccagtatcgttactggcacctgaaattaatttgtgaatttgcaacagtaatcagagttaccattatttaatttgtatgctaaatgaggaggt

SEQ ID NO: 3240 - DNA, 120 bp, Artificial Sequence
  ENSG00000004948_26 (sequence is synthesized)
acattgaaaccctccaaatctccagtctcatctatgtcatattttgccactgcctttcagaagtgatttagttgtggaaagataataaattgatttgttatggttacatatttagcgcac

SEQ ID NO: 3241 - DNA, 120 bp, Artificial Sequence
  ENSG00000004948_27 (sequence is synthesized)
ccagagaaaattaattatatttctacagagaaaatgaatttgggatactaaagtagtttaagtctcctttactgaatgtaagggggggatcgaaaagaaggtatttttccaatcacagtg

SEQ ID NO: 3242 - DNA, 120 bp, Artificial Sequence
  ENSG00000004948_28 (sequence is synthesized)
ttatgtagtattgttctatttttgtttacaaacatggaaaacagagtatttctggcagctgtggtacaaatgtgataatatattgctaaaatattttagatgttattatgctaatatagt

SEQ ID NO: 3243 - DNA, 120 bp, Artificial Sequence
  ENSG00000004948_29 (sequence is synthesized)
aggggttgaagaaaacaaaatagcttattatagaattgcacatagttctgcccaaattatgtgaaatgcttatgcttgtgtatatgtataaattaatacagagtacgttaaaagcaaaaa

SEQ ID NO: 3244 - DNA, 120 bp, Artificial Sequence
  ENSG00000004948_30 (sequence is synthesized)
cagtgacagaattccagaataaatgattcccactgatccacccacttttgccaccccaggatgcaattttctggagagaagattagtggacaaagagatcttcaaaaatcaaaaatgagg

SEQ ID NO: 3245 - DNA, 120 bp, Artificial Sequence
  ENSG00000004948_31 (sequence is synthesized)
agcttcacagctgggagagcgcaggaaggcgccgggaaggtgagcctcctggactctggggaggtagaaagcaagccaggggaaagaacagttgtcttttagctgataatacaacctaga

SEQ ID NO: 3246 - DNA, 120 bp, Artificial Sequence
  ENSG00000004948_32 (sequence is synthesized)
cttgggtctgaaccacctaagacagatttaaagtgtcagaaaaccaggagaggggcggagagggaggactgagactaacgcagtttgctctcgcatcaaactaggaaagccagcccacca

SEQ ID NO: 3247 - DNA, 120 bp, Artificial Sequence
  ENSG00000004948_33 (sequence is synthesized)
ctttgaattggaaatataggaaggcattgagccttggctgccaaagggtaaccctgcacaagaacatgtttcttacttacattctgaattctatgattatcatcatccacctggttgaag

SEQ ID NO: 3248 - DNA, 120 bp, Artificial Sequence
  ENSG00000004948_34 (sequence is synthesized)
gtttactgagaagcaacgcttgcggtggtattatctcttgggctgggccccagccttccacagagactaatctttcctttccctggccttctcatccggttcccgctggtgccaaccact

SEQ ID NO: 3249 - DNA, 120 bp, Artificial Sequence
  ENSG00000004961_0 (sequence is synthesized)
gtgcgtgagaacgccggcggtgaccgcagccacagcggtgaccgagtgagaggaaggcggcggcggcggcggcggcggcgtgaagtcactgctgctctgggttcgggttggcgactgaag

SEQ ID NO: 3250 - DNA, 120 bp, Artificial Sequence
  ENSG00000004961_1 (sequence is synthesized)
gcggtaccggcctcccggaacagcccgggggagggcttaggtggaaatttaaaattgtttacagtcaacactgtttccagccatgggtttgtctccatctgctcctgctgttgcagttca

SEQ ID NO: 3251 - DNA, 120 bp, Artificial Sequence
  ENSG00000004961_2 (sequence is synthesized)
ggcctcaaatgcttcagcgtccccaccttcaggatgcccgatgcatgaagggaaaatgaaaggctgtccagtgaatacagagccatctggcccaacctgtgagaagaaaacatactctgt

SEQ ID NO: 3252 - DNA, 120 bp, Artificial Sequence
  ENSG00000004961_3 (sequence is synthesized)
gcctgcccaccaggaacgcgcctatgagtacgtggagtgtcccattaggggcactgcggctgagaataaggagaacctagatccttcaaatctgatgccaccaccaaatcaaacaccagc

SEQ ID NO: 3253 - DNA, 120 bp, Artificial Sequence
  ENSG00000004961_4 (sequence is synthesized)
tccagatcagccatttgcattgtctactgtcagagaagagtcatccattccgagagcagattcagagaaaaagtgggtttacccttctgagcagatgttctggaatgcaatgttaaagaa

SEQ ID NO: 3254 - DNA, 120 bp, Artificial Sequence
  ENSG00000004961_5 (sequence is synthesized)
agggtggaagtggaaggatgaggatatcagtcagaaggatatgtataatatcattagaattcacaatcagaataacgagcaggcttggaaggagattttgaagtgggaagcccttcatgc

SEQ ID NO: 3255 - DNA, 120 bp, Artificial Sequence
  ENSG00000004961_6 (sequence is synthesized)
tgcagagtgtccttgtggtccatcattgatccggtttggagggaaagcaaaagagtattcaccaagggcacgaattcgttcctggatggggtatgagttgccttttgataggcacgattg

SEQ ID NO: 3256 - DNA, 120 bp, Artificial Sequence
  ENSG00000004961_7 (sequence is synthesized)
gatcataaaccgttgcgggacagaagttagatatgtgattgattattatgatggtggtgaagtcaacaaggactaccagttcaccatcctggacgtccgtcctgccttagattcactttc

SEQ ID NO: 3257 - DNA, 120 bp, Artificial Sequence
  ENSG00000004961_8 (sequence is synthesized)
ggcagtatgggacagaatgaaagtcgcttggtggcgttggacctcgtaaagcactgtttcagatggaaaaatataaactatttttttctgagcgatacattaaactattttccccagatt

SEQ ID NO: 3258 - DNA, 120 bp, Artificial Sequence
  ENSG00000004961_9 (sequence is synthesized)
gcagatcattttgttttcttcctacttagcttaagtgggaagcagtctctcagtttttcctttacctgcagtattgtctgtatatttcatctcgaaaagcctgaacaacctctgaaaaag

SEQ ID NO: 3259 - DNA, 120 bp, Artificial Sequence
  ENSG00000004961_10 (sequence is synthesized)
agcttttaaaaagtgatgaaagttgcttttttttcttactattttctcaggaatactccagagatgtaaagcctgagagtccatggtgatgctcaagagctttcatctggccaaatattt

SEQ ID NO: 3260 - DNA, 120 bp, Artificial Sequence
  ENSG00000004961_11 (sequence is synthesized)
taactaaagctgttcattataaataagaggtgattataccttttttaaaaaaagttaccattatttctaaagcccctatggtatgattgtgacctttaacaaaatgcaaaggtatacact

SEQ ID NO: 3261 - DNA, 120 bp, Artificial Sequence
  ENSG00000004961_12 (sequence is synthesized)
ggaaaggtactcagcaaaattctctccaaattctgatttatatgaatttcttggactggatagagtactttcaactataccttcctttggaacataccttttaaaaaatgttccctttaa

SEQ ID NO: 3262 - DNA, 120 bp, Artificial Sequence
  ENSG00000004961_13 (sequence is synthesized)
atcctgttattctaatatgtaactctgctcccaacaaacaggtctcctcattgtccttggcatttgacaagttatcccaacttcgaatctcatttcttcctttgctggcagcctccaccc

SEQ ID NO: 3263 - DNA, 120 bp, Artificial Sequence
  ENSG00000004961_14 (sequence is synthesized)
ttccccacatcagtcggcctaatccaaaccttgaaagcctggcttaagtcccagtatcagtgatggtccccctctaaaacatgattttatatttggctgagtgttaaaattcacaagatg

SEQ ID NO: 3264 - DNA, 120 bp, Artificial Sequence
  ENSG00000004961_15 (sequence is synthesized)
agcatttttttcccagatggagaacgcttcaactcagtctagattttttttgtttgttttaaggaagctctaagtttgccattgaaactttttgtaccagtaatccataaactggttgtt

SEQ ID NO: 3265 - DNA, 120 bp, Artificial Sequence
  ENSG00000004961_16 (sequence is synthesized)
ctatttatagcagcatgttacaaatgactgctttttttttttaactgtctatactattaaatcctttaatttatcctgaatgctgtagtgttaaattagtggatgaaattggcagtctgt

SEQ ID NO: 3266 - DNA, 120 bp, Artificial Sequence
  ENSG00000004961_17 (sequence is synthesized)
gggtgattaatttggtatggatttgtcagttttgtgtggagtttaagaaatagaacagccttaaactctacatttcaaaatacttgtatattttaaaataaagctgattagttcacaggt

SEQ ID NO: 3267 - DNA, 120 bp, Artificial Sequence
  ENSG00000004961_18 (sequence is synthesized)
ccgagtgagaggaaggcggcggcggcggcggcggcggcgtgaagtcactgctgctctgggttcgggttggcgactgaaggcggtggaaatttaaaattgtttacagtcaacactgtttcc

SEQ ID NO: 3268 - DNA, 120 bp, Artificial Sequence
  ENSG00000004975_0 (sequence is synthesized)
gggtacctggaggaagctcgcggcgtcggtggcggtggcgcgcggcggccgctgagaccggggctttgagtcgcaccccgcggcccgccccccgccgccaccctcgcagatccgtgcttt

SEQ ID NO: 3269 - DNA, 120 bp, Artificial Sequence
  ENSG00000004975_1 (sequence is synthesized)
ttcccctttgcttctctcccgtactgggtcagtcctgtccgcgctcgcgcgtcggtttgcgggtgtgcgcaggcgcggcaggggccattagccctttgggtgggcggtggagcccgggag

SEQ ID NO: 3270 - DNA, 120 bp, Artificial Sequence
  ENSG00000004975_2 (sequence is synthesized)
cgcgcgggcgagaccatggcgggtagcagcactgggggcggtggggttggggagacgaaggtgatttaccacctggatgaggaagagactccctacctggtgaagatccctgtccccgcc

SEQ ID NO: 3271 - DNA, 120 bp, Artificial Sequence
  ENSG00000004975_3 (sequence is synthesized)
gagcgcatcaccctcggcgatttcaagagcgtcctgcagcggcccgcgggcgccaagtactttttcaagtctatggatcaggatttcggggtggtgaaggaagaaatttcagatgacaac

SEQ ID NO: 3272 - DNA, 120 bp, Artificial Sequence
  ENSG00000004975_4 (sequence is synthesized)
gcccgcctcccctgcttcaacggaagggtggtatcctggctggtgtcctcagataatccccaacccgagatggcccctccagtccatgagcctcgggcagaactggcgcctccagcccca

SEQ ID NO: 3273 - DNA, 120 bp, Artificial Sequence
  ENSG00000004975_5 (sequence is synthesized)
cctttacctcctttgccacccgagaggaccagcggcattggggactcaaggcctccatccttccaccctaatgtgtccagcagccatgagaatctggagcctgagacagaaaccgagtca

SEQ ID NO: 3274 - DNA, 120 bp, Artificial Sequence
  ENSG00000004975_6 (sequence is synthesized)
gtagtgtcactgaggcgggagcggcctcgcaggagagacagcagtgagcatggcgctgggggccacaggactggtggcccctcaaggctggagcgccacctggccggatacgagagctcc

SEQ ID NO: 3275 - DNA, 120 bp, Artificial Sequence
  ENSG00000004975_7 (sequence is synthesized)
tctaccctcatgaccagcgagctggagagtaccagcctgggggactcggacgaggaggacaccatgagcaggttcagcagctccacggagcagagcagtgcctcccgcctccttaagcgc

SEQ ID NO: 3276 - DNA, 120 bp, Artificial Sequence
  ENSG00000004975_8 (sequence is synthesized)
caccggcggcgaaggaagcagaggccaccccgcctggagaggacgtcatccttcagcagcgtcacagattccacaatgtctctcaatatcatcacagtcacgctaaacatggagaagtac

SEQ ID NO: 3277 - DNA, 120 bp, Artificial Sequence
  ENSG00000004975_9 (sequence is synthesized)
aacttcctgggtatctccattgttggccagagcaatgagcggggagacggaggcatctacattggctccatcatgaagggtggggctgtggcggccgacgggcgcattgagccaggggac

SEQ ID NO: 3278 - DNA, 120 bp, Artificial Sequence
  ENSG00000004975_10 (sequence is synthesized)
atgcttttgcaggtgaatgacatgaactttgagaacatgagcaacgatgacgctgtgcgggtgctgagggacattgtgcacaagcctggccccattgtgctgactgtggccaagtgctgg

SEQ ID NO: 3279 - DNA, 120 bp, Artificial Sequence
  ENSG00000004975_11 (sequence is synthesized)
gatccctctcctcaggcctatttcactctcccccgaaatgagcccatccagccaattgaccctgctgcctgggtgtcccattccgcggctctgactggcaccttcccagcctatccaggt

SEQ ID NO: 3280 - DNA, 120 bp, Artificial Sequence
  ENSG00000004975_12 (sequence is synthesized)
ctccagagtctggactggaagtccgggaccgcatgtggctcaagatcaccatccctaatgcctttctgggctcggatgtggttgactggctctaccatcacgtggagggctttcctgagc

SEQ ID NO: 3281 - DNA, 120 bp, Artificial Sequence
  ENSG00000004975_13 (sequence is synthesized)
ggcgggaggcccgcaagtatgccagcgggctgctcaaagcaggcctgatccgacacaccgtcaacaagatcaccttctctgagcagtgctattacgtcttcggagacctcagtggtggct

SEQ ID NO: 3282 - DNA, 120 bp, Artificial Sequence
  ENSG00000004975_14 (sequence is synthesized)
gtgagagctacctagtcaacctgtctctcaatgacaacgatggctccagtggggcttcagaccaggataccctggctcctctgcctggggccaccccctggcccctgctgcccactttct

SEQ ID NO: 3283 - DNA, 120 bp, Artificial Sequence
  ENSG00000004975_15 (sequence is synthesized)
cctaccaataccctgccccacacccctacagcccgcagcctccaccctaccatgagctttcatcttacacctatggtgggggcagtgccagcagccagcatagtgagggcagccggagca

SEQ ID NO: 3284 - DNA, 120 bp, Artificial Sequence
  ENSG00000004975_16 (sequence is synthesized)
gtgggtcgacacggagtgatgggggggcagggcgcacggggaggcccgaggagcgggcccccgagtccaagtccggcagtggcagtgagtctgagccctccagccgagggggcagccttc

SEQ ID NO: 3285 - DNA, 120 bp, Artificial Sequence
  ENSG00000004975_17 (sequence is synthesized)
ggcggggtggggaagcaagtgggactagcgatgggggccctcctccatccagaggctcaactgggggtgcccctaatctccgagcccacccagggctccatccctatggaccgccccctg

SEQ ID NO: 3286 - DNA, 120 bp, Artificial Sequence
  ENSG00000004975_18 (sequence is synthesized)
gcatggccctcccctacaaccccatgatggtggtcatgatgcccccacctccacctccagtccctccagcagtgcagcctccgggggcccctccagtcagagacctgggctctgtgcccc

SEQ ID NO: 3287 - DNA, 120 bp, Artificial Sequence
  ENSG00000004975_19 (sequence is synthesized)
cagaactgacagccagccgccaaagcttccacatggccatgggcaatcccagcgagttctttgtggatgttatgtagcccactgtggggccaggctgggccgggcgctcctggtgtgtga

SEQ ID NO: 3288 - DNA, 120 bp, Artificial Sequence
  ENSG00000004975_20 (sequence is synthesized)
ctgggtgtcctggccgtcatgtgcttgctcttacagtgcctgggctcagcctaccagctgctgccatacaggagattgtggccactgtgactctcaccagcagtgcctggttcctccccc

SEQ ID NO: 3289 - DNA, 120 bp, Artificial Sequence
  ENSG00000004975_21 (sequence is synthesized)
ttccctcaggggtagacaagggacctttgattatttttagctttgtttttttataagcctttttgggggttaaaatagagtttcttacatttttgggacttttttaataggcatttcctc

SEQ ID NO: 3290 - DNA, 120 bp, Artificial Sequence
  ENSG00000004975_22 (sequence is synthesized)
ttttatatgaagaattcccatccattgggccccttctaaccccagaatgtgacctcctcctccagttacccacagccctgccctttgcagggttgggggtggtcagcggtaccccggggt

SEQ ID NO: 3291 - DNA, 120 bp, Artificial Sequence
  ENSG00000004975_23 (sequence is synthesized)
taggcatcctagacagcagcctgaggaagctgggagatttgggccatgtagctgcctttgttactctatttattttagtcacttgtataaaacaccaaataaagcaatagaggcaaactc

SEQ ID NO: 3292 - DNA, 120 bp, Artificial Sequence
  ENSG00000004975_24 (sequence is synthesized)
caagcaggttgccggtcctcagtcctctttttttttctctttcatgttttgttttggaattttaataagtactaagacagccgggcgtggtggctcgagcctgtaaacccagcactttgg

SEQ ID NO: 3293 - DNA, 86 bp, Artificial Sequence
  ENSG00000004975_25 (sequence is synthesized)
gaccagcctgaccaatgtggtgaaaccgtgtctctactaaaaatagaaaaattaaggtgaggtggctgagacaggagaatcacttg

SEQ ID NO: 3294 - DNA, 120 bp, Artificial Sequence
  ENSG00000004975_26 (sequence is synthesized)
cccgaagtgagtgacactcagggaggggcctgaagttgggggtgggggctgcccaggaggctggggccgggcctgtggtcatggggaatgggtgggaggagggtccaggcagaggtggaa

SEQ ID NO: 3295 - DNA, 120 bp, Artificial Sequence
  ENSG00000004975_27 (sequence is synthesized)
ccagaaaccgcagccagggccaccatggatggtcgagcagtgtgtgtcccgcactaggtcctgcactggccgaggatgggggctgacgtccacccatgtgctgctggacaagccatgtgc

SEQ ID NO: 3296 - DNA, 120 bp, Artificial Sequence
  ENSG00000004975_28 (sequence is synthesized)
caggtgcaggactgtgtccaccgggggaaggtgcacctcttacctgagtcccgcaaagacgtgggctagtggctgtgcccctgccctcatggcagaagtagatgggagtttcttgtcaga

SEQ ID NO: 3297 - DNA, 120 bp, Artificial Sequence
  ENSG00000004975_29 (sequence is synthesized)
gacccttgtgaacccctgttttgagccccatcgtgggtgggtctgggagaactgttcccagttcctctccattcggtgtcttggggccctagcctcttgaagcagtgatttcttcctctc

SEQ ID NO: 3298 - DNA, 120 bp, Artificial Sequence
  ENSG00000004975_30 (sequence is synthesized)
atcaccataacaaagaaaagctttgcctcactggatagttaccacccttgcacgtatccttgaacactgcagtttcgttttacctgtttttggactttctgtgaatggaactgtacagcg

SEQ ID NO: 3299 - DNA, 120 bp, Artificial Sequence
  ENSG00000004975_31 (sequence is synthesized)
tgtactctcttgtctcacttggcagtatgtttttaagagttttccatgttgatgagtcatccacattgtggtgccttccaccctcaccttctctagcccagccgcgatgtgcttgcttct

SEQ ID NO: 3300 - DNA, 120 bp, Artificial Sequence
  ENSG00000004975_32 (sequence is synthesized)
tcactctcccccgaacctatccaggttcctcctccatgagcaccattacatctggatcgtctttgcctgatggctgtgaaggccggggtctctccgtccatacggacatggcatcggtga

SEQ ID NO: 3301 - DNA, 120 bp, Artificial Sequence
  ENSG00000004975_33 (sequence is synthesized)
cacgctaaacatgggtatggggagagcctgtggctagggcgtggggagggcctggtctctagggttccgggcgtcctgtggcaggggctcctcttttcacatggcctctctccacagaga

SEQ ID NO: 3302 - DNA, 120 bp, Artificial Sequence
  ENSG00000004975_34 (sequence is synthesized)
ctgggtaagaggttctgacaccgaggaccaggccccctcagcattgccaagctccctcaagcctcagtctgtttctgtatcctccccaggccgcgcgttagcagccctggctctttacct

SEQ ID NO: 3303 - DNA, 120 bp, Artificial Sequence
  ENSG00000004975_35 (sequence is synthesized)
cctgtctgtttggagagccggcgagaggccctcagccttctccttctggagtctctaatacttgctaggtttttttgctcttctccagctctctgagaccctttctcattctttcactta

SEQ ID NO: 3304 - DNA, 120 bp, Artificial Sequence
  ENSG00000004975_36 (sequence is synthesized)
gggcaggtggctggagaaggggaggaggtggtgaccaaagccaggaatggcacaggcagaggcgagagcaggagttggaagaagaacctgaggcctttttccactgtgggtgctcccagg

SEQ ID NO: 3305 - DNA, 120 bp, Artificial Sequence
  ENSG00000004975_37 (sequence is synthesized)
caaggcctagataggaccggcgggggctttgctagagtggattgggcgacatggaggggcacacgtctactttgggccacactgggattttctggcctatggtggagcagattgtactat

SEQ ID NO: 3306 - DNA, 120 bp, Artificial Sequence
  ENSG00000004975_38 (sequence is synthesized)
ggtgaggggcaggcctgggggccgggaagggctgggccagaccccagccttggtggggtgagcagggggaagcttggttcttgagcttcctgtccatatgtagctgggggccacaggact

SEQ ID NO: 3307 - DNA, 120 bp, Artificial Sequence
  ENSG00000004975_39 (sequence is synthesized)
ctcgtcttccagtcaatcctcttgttctttctcttggccccatgaccactttggcctacgtttgctctccttcccaacctcctggtaggttcagcagctccacggagcagagcagtgcct

SEQ ID NO: 3308 - DNA, 120 bp, Artificial Sequence
  ENSG00000004975_40 (sequence is synthesized)
gcggtgccaggacaccggcagcaccccagggttgaccctgggttattgaagggcactctggctccttttcccaccacagacgtcatccttcagcagcgtcacagattccacaatgtctct

SEQ ID NO: 3309 - DNA, 120 bp, Artificial Sequence
  ENSG00000004975_41 (sequence is synthesized)
caatatcatcacagtcacgctaaacatgggtatggggagagcctgtggctagggcgtggggagggcctggtctctagggttccgggcgtcctgtggcaggggctcctcttttcacatggc

SEQ ID NO: 3310 - DNA, 120 bp, Artificial Sequence
  ENSG00000005001_0 (sequence is synthesized)
acacaccctgacccgcatcgccctgggtctctcgagcctgctgcctgctcccccgccccaccagccatggtggtttctggagcgcccccagccctgggtgggggctgtctcggcaccttc

SEQ ID NO: 3311 - DNA, 120 bp, Artificial Sequence
  ENSG00000005001_1 (sequence is synthesized)
acctccctgctgctgctggcgtcgacagccatcctcaatgcggccaggatacctgttcccccagcctgtgggaagccccagcagctgaaccgggttgtgggcggcgaggacagcactgac

SEQ ID NO: 3312 - DNA, 120 bp, Artificial Sequence
  ENSG00000005001_2 (sequence is synthesized)
agcgagtggccctggatcgtgagcatccagaagaatgggacccaccactgcgcaggttctctgctcaccagccgctgggtgatcactgctgcccactgtttcaaggacaacctgaacaaa

SEQ ID NO: 3313 - DNA, 120 bp, Artificial Sequence
  ENSG00000005001_3 (sequence is synthesized)
ccatacctgttctctgtgctgctgggggcctggcagctggggaaccctggctctcggtcccagaaggtgggtgttgcctgggtggagccccaccctgtgtattcctggaaggaaggtgcc

SEQ ID NO: 3314 - DNA, 120 bp, Artificial Sequence
  ENSG00000005001_4 (sequence is synthesized)
tgtgcagacattgccctggtgcgtctcgagcgctccatacagttctcagagcgggtcctgcccatctgcctacctgatgcctctatccacctccctccaaacacccactgctggatctca

SEQ ID NO: 3315 - DNA, 120 bp, Artificial Sequence
  ENSG00000005001_5 (sequence is synthesized)
gttcctatcatcgactcggaagtctgcagccatctgtactggcggggagcaggacagggacccatcactgaggacatgctgtgtgccggctacttggagggggagcgggatgcttgtctg

SEQ ID NO: 3316 - DNA, 120 bp, Artificial Sequence
  ENSG00000005001_6 (sequence is synthesized)
ggcgactccgggggccccctcatgtgccaggtggacggcgcctggctgctggccggcatcatcagctggggcgagggctgtgccgagcgcaacaggcccggggtctacatcagcctctct

SEQ ID NO: 3317 - DNA, 120 bp, Artificial Sequence
  ENSG00000005001_7 (sequence is synthesized)
gcgcaccgctcctgggtggagaagatcgtgcaaggggtgcagctccgcgggcgcgctcaggggggtggggccctcagggcaccgagccagggctctggggccgccgcgcgctcctagggc

SEQ ID NO: 3318 - DNA, 120 bp, Artificial Sequence
  ENSG00000005001_8 (sequence is synthesized)
gcagcgggacgcggggctcggatctgaaaggcggccagatccacatctggatctggatctgcggcggcctcgggcggtttcccccgccgtaaataggctcatctacctctacctctgggg

SEQ ID NO: 3319 - DNA, 120 bp, Artificial Sequence
  ENSG00000005001_9 (sequence is synthesized)
gcccggacggctgctgcggaaaggaaaccccctccccgacccgcccgacggcctcaggccccgcctccaaggcatcaggccccgcccaacggcctcatgtccccgcccccacgacttccg

SEQ ID NO: 3320 - DNA, 120 bp, Artificial Sequence
  ENSG00000005001_10 (sequence is synthesized)
gccccgccccgggccccagcgcttttgtgtatataaatgttaatgatttttataggtatttgtaaccctgcccacatatcttatttattcctccaatttcaataaattatttattctcca

SEQ ID NO: 3321 - DNA, 120 bp, Artificial Sequence
  ENSG00000005001_11 (sequence is synthesized)
gttcaatcttggtgcccctcgattctacctagaagcctctcctgccttcaggggccttcacacccatgctgttcccccaggtacctcctcccagaccaggcctggctgatcctccccttc

SEQ ID NO: 3322 - DNA, 120 bp, Artificial Sequence
  ENSG00000005001_12 (sequence is synthesized)
atctcctttccgcttctgctctgtttatctcttgctccttaactgctctgtgcctcggtttcttctacggctgtgaggatgaaacagaaaacgcagcaagtacgcagcgcgcctcggtct

SEQ ID NO: 3323 - DNA, 120 bp, Artificial Sequence
  ENSG00000005001_13 (sequence is synthesized)
ccagttaccgtcggcgtcgccatcgcctgctccctctcgcctccgtgttctcccatctcctcgtcctccgctgcttgcctctggggaagcaccgttttgtgttgttcctgccgcaggagg

SEQ ID NO: 3324 - DNA, 120 bp, Artificial Sequence
  ENSG00000005001_14 (sequence is synthesized)
gcagtcccagtgctggatgaagtaatgcagtatctgagacaggaagggctctaaccatctgtggatataagaaaatttattaaagagttcccttgccccaccctcagaccctgcagaagc

SEQ ID NO: 3325 - DNA, 120 bp, Artificial Sequence
  ENSG00000005001_15 (sequence is synthesized)
gggaccccttcccactgggcactggaccccttctcactgggtgctgggggcttctcgctgggcgctgagggaccctcctcactgggtactgggacccctcctcactgggcgctgagggac

SEQ ID NO: 3326 - DNA, 120 bp, Artificial Sequence
  ENSG00000005001_16 (sequence is synthesized)
cctcctcagggggtgctgggacccctcctcactgggcgctgagggaccctcctcactgggtgctgggacctccacctcactgggcactgggatcccttcttactgggtgttgggggcctt

SEQ ID NO: 3327 - DNA, 120 bp, Artificial Sequence
  ENSG00000005007_0 (sequence is synthesized)
ggcgacggcggcggtggcggcagttcctgctctaggctgcgagcggctggcggcttcgaggggagctgaggcgcggaggggctcggcggcagcggcggcggctcggcactgttacctctc

SEQ ID NO: 3328 - DNA, 120 bp, Artificial Sequence
  ENSG00000005007_1 (sequence is synthesized)
ctgttacctctcggtccggctggcgccggggcgcgcggtttggtcctttccgggcgcgcgggggcgacagcggcagcgacccgaggcctgcggcctaggcctcagcgcggcggcgggctc

SEQ ID NO: 3329 - DNA, 120 bp, Artificial Sequence
  ENSG00000005007_2 (sequence is synthesized)
gaaccggcccgagggccctacccggaggcaccatgagcgtggaggcgtacgggcccagctcgcagactctcactttcctggacacggaggaggccgagctgcttggcgccgacacacagg

SEQ ID NO: 3330 - DNA, 120 bp, Artificial Sequence
  ENSG00000005007_3 (sequence is synthesized)
cacacagggctccgagttcgagttcaccgactttactcttcctagccagacgcagacgccccccggcggccccggcggcccgggcggtggcggcgcgggaggcccgggcggcgcgggcgc

SEQ ID NO: 3331 - DNA, 120 bp, Artificial Sequence
  ENSG00000005007_4 (sequence is synthesized)
cggcgggacagctcgacgcgcaggttgggcccgaaggcatcctgcagaacggggctgtggacgacagtgtagccaagaccagccagttgttggctgagttgaacttcgaggaagatgaag

SEQ ID NO: 3332 - DNA, 120 bp, Artificial Sequence
  ENSG00000005007_5 (sequence is synthesized)
aagacacctattacacgaaggacctccccatacacgcctgcagttactgtggaatacacgatcctgcctgcgtggtttactgtaataccagcaagaagtggttctgcaacggacgtggaa

SEQ ID NO: 3333 - DNA, 120 bp, Artificial Sequence
  ENSG00000005007_6 (sequence is synthesized)
atacttctggcagccacattgtaaatcaccttgtgagggcaaaatgcaaagaggtgaccctgcacaaggacgggcccctgggggagacagtcctggagtgctacaactgcggctgtcgca

SEQ ID NO: 3334 - DNA, 120 bp, Artificial Sequence
  ENSG00000005007_7 (sequence is synthesized)
acgtcttcctcctcggcttcatcccggccaaagctgactcagtggtggtgctgctgtgcaggcagccctgtgccagccagagcagcctcaaggacatcaactgggacagctcgcagtggc

SEQ ID NO: 3335 - DNA, 120 bp, Artificial Sequence
  ENSG00000005007_8 (sequence is synthesized)
agccgctgatccaggaccgctgcttcctgtcctggctggtcaagatcccctccgagcaggagcagctgcgggcacgccagatcacggcacagcagatcaacaagctggaggagctgtgga

SEQ ID NO: 3336 - DNA, 120 bp, Artificial Sequence
  ENSG00000005007_9 (sequence is synthesized)
aggaaaacccttctgccacgctggaggacctggagaagccgggggtggacgaggagccgcagcatgtcctcctgcggtacgaggacgcctaccagtaccagaacatattcgggcccctgg

SEQ ID NO: 3337 - DNA, 120 bp, Artificial Sequence
  ENSG00000005007_10 (sequence is synthesized)
tcaagctggaggccgactacgacaagaagctgaaggagtcccagactcaagataacatcactgtcaggtgggacctgggccttaacaagaagagaatcgcctacttcactttgcccaaga

SEQ ID NO: 3338 - DNA, 120 bp, Artificial Sequence
  ENSG00000005007_11 (sequence is synthesized)
ctgactctgacatgcggctcatgcagggggatgagatatgcctgcggtacaaaggggaccttgcgcccctgtggaaagggatcggccacgtcatcaaggtccctgataattatggcgatg

SEQ ID NO: 3339 - DNA, 120 bp, Artificial Sequence
  ENSG00000005007_12 (sequence is synthesized)
agatcgccattgagctgcggagcagcgtgggtgcacctgtggaggtgactcacaacttccaggtggattttgtgtggaagtcgacctcctttgacaggatgcagagcgcattgaaaacgt

SEQ ID NO: 3340 - DNA, 120 bp, Artificial Sequence
  ENSG00000005007_13 (sequence is synthesized)
ttgccgtggatgagacctcggtgtctggctacatctaccacaagctgttgggccacgaggtggaggacgtaatcatcaagtgccagctgcccaagcgcttcacggcgcagggcctccccg

SEQ ID NO: 3341 - DNA, 120 bp, Artificial Sequence
  ENSG00000005007_14 (sequence is synthesized)
acctcaaccactcccaggtttatgccgtgaagactgtgctgcaaagaccactgagcctgatccagggcccgccaggcacggggaagacggtgacgtcggccaccatcgtctaccacctgg

SEQ ID NO: 3342 - DNA, 120 bp, Artificial Sequence
  ENSG00000005007_15 (sequence is synthesized)
cccggcaaggcaacgggccggtgctggtgtgtgctccgagcaacatcgccgtggaccagctaacggagaagatccaccagacggggctaaaggtcgtgcgcctctgcgccaagagccgtg

SEQ ID NO: 3343 - DNA, 120 bp, Artificial Sequence
  ENSG00000005007_16 (sequence is synthesized)
aggccatcgactccccggtgtcttttctggccctgcacaaccagatcaggaacatggacagcatgcctgagctgcagaagctgcagcagctgaaagacgagactggggagctgtcgtctg

SEQ ID NO: 3344 - DNA, 120 bp, Artificial Sequence
  ENSG00000005007_17 (sequence is synthesized)
ccgacgagaagcggtaccgggccttgaagcgcaccgcagagagagagctgctgatgaacgcagatgtcatctgctgcacatgtgtgggcgccggtgacccgaggctggccaagatgcagt

SEQ ID NO: 3345 - DNA, 120 bp, Artificial Sequence
  ENSG00000005007_18 (sequence is synthesized)
tccgctccattttaatcgacgaaagcacccaggccaccgagccggagtgcatggttcccgtggtcctcggggccaagcagctgatccttgtaggcgaccactgccagctgggcccagtgg

SEQ ID NO: 3346 - DNA, 120 bp, Artificial Sequence
  ENSG00000005007_19 (sequence is synthesized)
tgatgtgcaagaaggcggccaaggccgggctgtcacagtcgctcttcgagcgcctggtggtgctgggcatccggcccatccgcctgcaggtccagtaccggatgcaccctgcactcagcg

SEQ ID NO: 3347 - DNA, 120 bp, Artificial Sequence
  ENSG00000005007_20 (sequence is synthesized)
ccttcccatccaacatcttctacgagggctccctccagaatggtgtcactgcagcggatcgtgtgaagaagggatttgacttccagtggccccaacccgataaaccgatgttcttctacg

SEQ ID NO: 3348 - DNA, 120 bp, Artificial Sequence
  ENSG00000005007_21 (sequence is synthesized)
tgacccagggccaagaggagattgccagctcgggcacctcctacctgaacaggaccgaggctgcgaacgtggagaagatcaccacgaagttgctgaaggcaggcgccaagccggaccaga

SEQ ID NO: 3349 - DNA, 120 bp, Artificial Sequence
  ENSG00000005007_22 (sequence is synthesized)
ctgcacaccaagctctaccaggaggtggagatcgccagtgtggacgcctttcagggacgcgagaaggacttcatcatcctgtcctgtgtgcgggccaacgagcaccaaggcattggcttt

SEQ ID NO: 3350 - DNA, 120 bp, Artificial Sequence
  ENSG00000005007_23 (sequence is synthesized)
ttaaatgaccccaggcgtctgaacgtggccctgaccagagcaaggtatggcgtcatcattgtgggcaacccgaaggcactatcaaagcagccgctctggaaccacctgctgaactactat

SEQ ID NO: 3351 - DNA, 120 bp, Artificial Sequence
  ENSG00000005007_24 (sequence is synthesized)
aaggagcagaaggtgctggtggaggggccgctcaacaacctgcgtgagagcctcatgcagttcagcaagccacggaagctggtcaacactatcaacccgggagcccgcttcatgaccaca

SEQ ID NO: 3352 - DNA, 120 bp, Artificial Sequence
  ENSG00000005007_25 (sequence is synthesized)
gccatgtatgatgcccgggaggccatcatcccaggctccgtctatgatcggagcagccagggccggccttccagcatgtacttccagacccatgaccagattggcatgatcagtgccggc

SEQ ID NO: 3353 - DNA, 120 bp, Artificial Sequence
  ENSG00000005007_26 (sequence is synthesized)
cctagccacgtggctgccatgaacattcccatccccttcaacctggtcatgccacccatgccaccgcctggctattttggacaagccaacgggcctgctgcagggcgaggcaccccgaaa

SEQ ID NO: 3354 - DNA, 120 bp, Artificial Sequence
  ENSG00000005007_27 (sequence is synthesized)
ggcaagactggtcgtgggggacgccagaagaaccgctttgggcttcctggacccagccagactaacctccccaacagccaagccagccaggatgtggcgtcacagcccttctctcagggc

SEQ ID NO: 3355 - DNA, 120 bp, Artificial Sequence
  ENSG00000005007_28 (sequence is synthesized)
gccctgacgcagggctacatctccatgagccagccttcccagatgagccagcccggcctctcccagccggagctgtcccaggacagttaccttggtgacgagtttaaatcacaaatcgac

SEQ ID NO: 3356 - DNA, 120 bp, Artificial Sequence
  ENSG00000005007_29 (sequence is synthesized)
gtggcgctctcacaggactccacgtaccagggagagcgggcttaccagcatggcggggtgacggggctgtcccagtattaaaaggtggcggcggaagagctaagcaacgtggcttagtcc

SEQ ID NO: 3357 - DNA, 120 bp, Artificial Sequence
  ENSG00000005007_30 (sequence is synthesized)
atcagcatcttattctgggtaataaaaaataaaaataaacggatacctgttttccactgctaaaactgaagcaccactgtgtgagcaacaggaagggagagcgcacgagggagaggagcc

SEQ ID NO: 3358 - DNA, 120 bp, Artificial Sequence
  ENSG00000005007_31 (sequence is synthesized)
gcggcgaggagcagagggagcggaggaggggccggcccgcgggagccgcggccaccaggaggccccgctccgtcccatcggggctgcggccagggcggagggaggaagaccctcatctca

SEQ ID NO: 3359 - DNA, 120 bp, Artificial Sequence
  ENSG00000005007_32 (sequence is synthesized)
gggcggagggaggaagaccctcatctcagagtagccctttcctctgttcttttatttctttttctctttgattgaaaggggactacgtcttagcaggaaaaaaaacttcgcatttctgtg

SEQ ID NO: 3360 - DNA, 120 bp, Artificial Sequence
  ENSG00000005007_33 (sequence is synthesized)
cccgagcaggctccttgcaaagacagcagcgtgcggggcagagccccgggagggcgcgtctgtccacgcctaccggacgcgccgaggtcgcgctgcctgtgttctccgagggccttcatt

SEQ ID NO: 3361 - DNA, 120 bp, Artificial Sequence
  ENSG00000005007_34 (sequence is synthesized)
taaagaaaataagggtgttttgggtttttctctttgtttttttcaagattcttttaaaggagtactgaagaatactttcctaagtttgtctgtaaaatcttagcggtggacctgggagat

SEQ ID NO: 3362 - DNA, 120 bp, Artificial Sequence
  ENSG00000005007_35 (sequence is synthesized)
ttgagaagcttccagaaacagtttaaacaagccagcgctactggagaagaggagcaacacctgtgccgcggccggaggagttttgttgttggttttagcttccagtggcttctttctgcg

SEQ ID NO: 3363 - DNA, 120 bp, Artificial Sequence
  ENSG00000005007_36 (sequence is synthesized)
gggcatcaggctgctggggtagccgcccgccgagcctggaagctgctcgttctccgctggactcagaagccaagctgcttcccgcctagactcggcgcagggccccgcaccggtgaggaa

SEQ ID NO: 3364 - DNA, 120 bp, Artificial Sequence
  ENSG00000005007_37 (sequence is synthesized)
ggtgcttttggccccattgcgaggggccttggccaggactggccctgtggccaggaggcgagaaggtggctgttcccggattgacggctttttcccgggggcctttggaagatttggtgg

SEQ ID NO: 3365 - DNA, 120 bp, Artificial Sequence
  ENSG00000005007_38 (sequence is synthesized)
aaggacaagagggcctgtccctgtccccgtccccaggaggtaccgacagtccctgtgctggttagacacggagcgctgcacaccgaaagcccaaattgggagctctgcctgccggcaact

SEQ ID NO: 3366 - DNA, 120 bp, Artificial Sequence
  ENSG00000005007_39 (sequence is synthesized)
ttgctgatggggtgattgctgcttctggggggtaaggaaacaagttacagaaattaccgcgttctgtgtgaagggactgagggtgtggtgtcattggcagagggtcattttaggagagct

SEQ ID NO: 3367 - DNA, 120 bp, Artificial Sequence
  ENSG00000005007_40 (sequence is synthesized)
gccccagcccctcgaacgcctggcttggggtgtcattctgcctggcggccaggcctccagcttcccctgccccgggcctggggctgtcactggccctgatccgaacacctccagattccg

SEQ ID NO: 3368 - DNA, 120 bp, Artificial Sequence
  ENSG00000005007_41 (sequence is synthesized)
gcttctacatgggacagacggggacgcacaggccaccttccttctggcagggactcttatttattcccattgctctagggctttcggtttccccttcttccggtaggccgcgtagaggca

SEQ ID NO: 3369 - DNA, 120 bp, Artificial Sequence
  ENSG00000005007_42 (sequence is synthesized)
tgcaccgggtaggtttccgcggtgaccccgcggcggcctgagggacgctccctgccccatcccggctgttgggctgggccgctttgcctctgcttcgccctgtgctgtgttctccagctt

SEQ ID NO: 3370 - DNA, 120 bp, Artificial Sequence
  ENSG00000005007_43 (sequence is synthesized)
tgtagcagcagccttgacaaacccaggcgcactgtaccaaggcaatgtaacttttgattttcggtcaatttaagttcttttgtcaccaaatattaataaacagttttgacttcacaccaa

SEQ ID NO: 3371 - DNA, 120 bp, Artificial Sequence
  ENSG00000005007_44 (sequence is synthesized)
ggatttttaaaaaaggcaggaactatgtgaaccgtgttaaggaagttttccttaaagtggttcaagttgggattgatttttgtgctcagtggggagctagtttgggggagggctggcccc

SEQ ID NO: 3372 - DNA, 120 bp, Artificial Sequence
  ENSG00000005007_45 (sequence is synthesized)
ggtgcgcgccgtcctcagcgcgcggggcctcgcccatgggccgggacgcaagcggaggctgcccctaacggccgcttgtattgaaggtttatgccgtgaagactgtgctgcaaagaccac

SEQ ID NO: 3373 - DNA, 120 bp, Artificial Sequence
  ENSG00000005007_46 (sequence is synthesized)
tgagcatatttggatagccagcacctgaacccagaaccacctgaccagctgtgagaagccgcctcatccctgcaggtggccactgtccaggggtgcgcatccacagcagcccctgggctg

SEQ ID NO: 3374 - DNA, 120 bp, Artificial Sequence
  ENSG00000005007_47 (sequence is synthesized)
agggacttctgagctcatccggcggcccctgtgctcgctgtaacagcagtgatccacttggcctcattttcagctcgacgtgggatcatatgatgtgtcctggcgtgtctggcttcctct

SEQ ID NO: 3375 - DNA, 120 bp, Artificial Sequence
  ENSG00000005007_48 (sequence is synthesized)
gtccatgtcaggctggtgctgtgcaaaaacaccggttttctccactgatggaagctcccagtagagtgaggagggcacctgtgaattgagaaactggttttacagttttaaggaaacgca

SEQ ID NO: 3376 - DNA, 120 bp, Artificial Sequence
  ENSG00000005007_49 (sequence is synthesized)
acagggcccagaaaagccaagatgagcatgaagagcccgaagaaagtggctgctcacatggcaggacgccccggcccccaagctgcagtgttgggccccggcccaggagggagcccagag

SEQ ID NO: 3377 - DNA, 120 bp, Artificial Sequence
  ENSG00000005007_50 (sequence is synthesized)
gcagagccaccggtcaacaggccctcagcaggaatggacaaggctgcagggcagggggacactgttggctcaacagtgtcacacacaagtcagttgtaggggctgtggcgcctttaaggc

SEQ ID NO: 3378 - DNA, 120 bp, Artificial Sequence
  ENSG00000005007_51 (sequence is synthesized)
aagcttctggaaggaagcaggagaatatcctgtatcctggggttggcagagatccaggctgcaagaaagccctggctgagaccctgttccctgttcaggggctgagccagctctgtgctg

SEQ ID NO: 3379 - DNA, 120 bp, Artificial Sequence
  ENSG00000005007_52 (sequence is synthesized)
gccatggtgctctcggtggcctctcctcagccttgcccaatcctgggcatctctggccaggggaccggctcaggtgacctcaccagggcctcacagatcgaagtctcctgccccaggacc

SEQ ID NO: 3380 - DNA, 120 bp, Artificial Sequence
  ENSG00000005007_53 (sequence is synthesized)
tgcagcactgtagcgtagcaactacattgccctgtgtctgaactcatttgaggcgggctagggcttttgaagtgttacttctttccctcccctcacagcggatcgtgtgaagaagggatt

SEQ ID NO: 3381 - DNA, 120 bp, Artificial Sequence
  ENSG00000005007_54 (sequence is synthesized)
acctgaccgagaagatcctggccttggggaaaggaaagctctggctgctggaatttttcttgtcttgccggggaaaacccttctgccacgctggaggacctggagaagccgggggtggac

SEQ ID NO: 3382 - DNA, 120 bp, Artificial Sequence
  ENSG00000005007_55 (sequence is synthesized)
atctgggcaccccacctttcacagtcacggagcgtaggttcgactttccccatgcataggggcgctggccagcggaaggttgaggcagagaagaatttttgcctcccatggaggagcaca

SEQ ID NO: 3383 - DNA, 120 bp, Artificial Sequence
  ENSG00000005007_56 (sequence is synthesized)
cattaacgggaggatgttcccaaggcagtaacgggcatccaggggcgctggttcctgagcaagcttgctctggcctgagctcatcggagctgtccggaggctaattcaggccagatcctg

SEQ ID NO: 3384 - DNA, 120 bp, Artificial Sequence
  ENSG00000005007_57 (sequence is synthesized)
aatcatcggcttcaattaagttcacttgaccgtcggcgctgggcttgccttcctgatgttgatcagctgcagctggactgtgtcgcttgttctgtgtttgggacaggacagtgttctccc

SEQ ID NO: 3385 - DNA, 120 bp, Artificial Sequence
  ENSG00000005007_58 (sequence is synthesized)
tggtgctccttccggctcatatgcgcggtggttctcctctaggtcaccatggctttgtcattggttactccctctttctaaggcgccctcttgtttggtgggcagtattgggtgggtccc

SEQ ID NO: 3386 - DNA, 120 bp, Artificial Sequence
  ENSG00000005007_59 (sequence is synthesized)
cccacagcttcgtgaggtgggctagaggagctgggcatcgggtcagtgccccggcctgctgggggccctgtggggccgcgtgtgccccggtgcctggaaggccgactctcttgacagcag

SEQ ID NO: 3387 - DNA, 120 bp, Artificial Sequence
  ENSG00000005007_60 (sequence is synthesized)
gtcttctctccaaacgtatccacccagccaggtgtctgccatggggctgcttagagtcggccacaaaatcaacccgtgtgcagggtcagtggcttggcattgggctttggggcctgtccc

SEQ ID NO: 3388 - DNA, 120 bp, Artificial Sequence
  ENSG00000005007_61 (sequence is synthesized)
tgtggctggcagcctgcctgctgcccggtccacgcctctgttgccttggatttgggttctgagtgaatgcagccttgcctcttggaccgtcctgtgagacgggcagctctccacctgcgt

SEQ ID NO: 3389 - DNA, 120 bp, Artificial Sequence
  ENSG00000005007_62 (sequence is synthesized)
cttgggctctgtcacaccgaagagagcacgtggcgggtagtgtcgccatggtgcctaccgctctctatgtgacattattcgtgtcagctccaaccttaggattgcattttagtaaccagg

SEQ ID NO: 3390 - DNA, 120 bp, Artificial Sequence
  ENSG00000005007_63 (sequence is synthesized)
tctgctactggtttagaaaactgggggcagggggggcatggctgcagcagcgtgagttccgtgtgcggcactttatagtgtggcgggatggtgcaagttccagccttggcattgcttgcg

SEQ ID NO: 3391 - DNA, 120 bp, Artificial Sequence
  ENSG00000005007_64 (sequence is synthesized)
gtgggtagagctgtgaagcctgggctgtctggatctgagctccttcggcatcgtgtcattactgcctgttaaaaatgtcaggagtttaaggccagcctgaacagggtgagacgtctctac

SEQ ID NO: 3392 - DNA, 120 bp, Artificial Sequence
  ENSG00000005007_65 (sequence is synthesized)
agagtggccatggctggttagagaatcctgggcctcgtggcagggagaagggttagaagattagctgagctgaagcttttggcaagaatggttttccagaggggaagagagagggcgcgg

SEQ ID NO: 3393 - DNA, 120 bp, Artificial Sequence
  ENSG00000005007_66 (sequence is synthesized)
tgaggaaggctgggaggccctgcaggcgtgttcagagctgctggagacaccggaagagcccaaaggcagagcagctgggcatccttgttagatacggcagataggtgctggagggtggct

SEQ ID NO: 3394 - DNA, 120 bp, Artificial Sequence
  ENSG00000005020_0 (sequence is synthesized)
gacttccttgttgtgagccccggcccggcagtgtcccgactcgtagccccgctgttcttaatccgggccgctagcctgagtctaggtcgcagccgcagccccaccccgtcggtcaccttt

SEQ ID NO: 3395 - DNA, 120 bp, Artificial Sequence
  ENSG00000005020_1 (sequence is synthesized)
tcagcgcaggtcctttccccgcacgccctgcgctccctaacatgcccaaccccagcagcacctcctctccctaccccctccctgaggaaattaggaacctgttggcagatgttgaaacat

SEQ ID NO: 3396 - DNA, 120 bp, Artificial Sequence
  ENSG00000005020_2 (sequence is synthesized)
ttgtagcagatatactgaaaggagaaaatttatccaagaaagcaaaggaaaagagagaatcccttattaagaagataaaagatgtaaagtctatctatcttcaggaatttcaagacaaag

SEQ ID NO: 3397 - DNA, 120 bp, Artificial Sequence
  ENSG00000005020_3 (sequence is synthesized)
gtgatgcagaagatggggaagaatatgatgacccttttgctgggcctccagacactatttcattagcctcagaacgatatgataaagacgatgaagccccctctgatggagcccagtttc

SEQ ID NO: 3398 - DNA, 120 bp, Artificial Sequence
  ENSG00000005020_4 (sequence is synthesized)
ctccaattgcagcacaagaccttccttttgttctaaaggctggctaccttgaaaaacgcagaaaagatcacagctttctgggatttgaatggcagaaacggtggtgtgctctcagtaaaa

SEQ ID NO: 3399 - DNA, 120 bp, Artificial Sequence
  ENSG00000005020_5 (sequence is synthesized)
cggtattctattattatggaagtgataaagacaaacaacagaaaggtgaatttgcaatagatggctacagtgtcagaatgaataacactctaagaaaggatggaaagaaagattgctgtt

SEQ ID NO: 3400 - DNA, 120 bp, Artificial Sequence
  ENSG00000005020_6 (sequence is synthesized)
ttgaaatctctgctcctgataaacgtatatatcagtttacagcagcttctcccaaagatgctgaagaatgggtacagcagctgaaatttgtattgcaagatatggaatctgatattattc

SEQ ID NO: 3401 - DNA, 120 bp, Artificial Sequence
  ENSG00000005020_7 (sequence is synthesized)
ctgaggattatgatgagagaggagaattatatgatgatgttgatcatcctctaccaataagcaatccactaacaagcagtcaaccaatagatgatgaaatttatgaagaacttccagaag

SEQ ID NO: 3402 - DNA, 120 bp, Artificial Sequence
  ENSG00000005020_8 (sequence is synthesized)
aagaagaggacagtgctccagtgaaagtggaagaacaaaggaagatgagtcaggatagtgtccatcacacctcaggggataagagcactgattatgctaatttttaccagggattgtggg

SEQ ID NO: 3403 - DNA, 120 bp, Artificial Sequence
  ENSG00000005020_9 (sequence is synthesized)
attgtactggagctttttctgatgagttgtcatttaagcgtggtgatgtgatttacattcttagcaaggaatacaatagatatggctggtgggtaggagaaatgaagggagccattggct

SEQ ID NO: 3404 - DNA, 120 bp, Artificial Sequence
  ENSG00000005020_10 (sequence is synthesized)
tggtgcctaaagcctacataatggagatgtatgatatttgagagtcctggaaaaggaaaattcttctgcttgtctgcaaatgctttggatttagaagcgtcatgaaagcacgagtgacag

SEQ ID NO: 3405 - DNA, 120 bp, Artificial Sequence
  ENSG00000005020_11 (sequence is synthesized)
ctcctaacctctccttgttttattaaacattacttatctttgactgttattttatgcagtcgctcattaaaatattcctctgatgtgaaattaaatgaaggatattaatgtaaattagat

SEQ ID NO: 3406 - DNA, 120 bp, Artificial Sequence
  ENSG00000005020_12 (sequence is synthesized)
gcaaccagttaagttatacctgttgctattttgcaaagaaataattatagtttttatttacccatttgatttgtgtgaagaattcatcactattttatacgtaacatatagtctactata

SEQ ID NO: 3407 - DNA, 120 bp, Artificial Sequence
  ENSG00000005020_13 (sequence is synthesized)
gcatagtatgctactattgctacttctggtgtgatttgtaatgtttcttaatcattggacatcaattatttttagagagtaatgtataatttcatagcattttaaatttagtgtatcatg

SEQ ID NO: 3408 - DNA, 120 bp, Artificial Sequence
  ENSG00000005020_14 (sequence is synthesized)
cgagttttttttggtagatgctgaagaatgtggttgctaaacaaagaatgctaaagaatgttcaaactttatagataactttattgttattatttattttcacacatttaattcctatta

SEQ ID NO: 3409 - DNA, 120 bp, Artificial Sequence
  ENSG00000005020_15 (sequence is synthesized)
ggtgcgatgatgggcctggcaacattttctactgtacttttgtttaaatttaatgaaacaaaaaattcctaagaaataccaccctaccactaacaaaatggtataaagaatctcccagcc

SEQ ID NO: 3410 - DNA, 120 bp, Artificial Sequence
  ENSG00000005020_16 (sequence is synthesized)
tgaaaccctgtctctactaaaaattagccaagtgtggtaatgttcacctgcagtcccagctacttgggaggccaaggcacgagaattgcttgaacaaggtaggcagaggttgcagtgagc

SEQ ID NO: 3411 - DNA, 75 bp, Artificial Sequence
  ENSG00000005020_17 (sequence is synthesized)
cagaatctcagtgtattctcaaagtaaaaaggcataaccaagcactctcttatcttgccttattgctatactatt

SEQ ID NO: 3412 - DNA, 120 bp, Artificial Sequence
  ENSG00000005020_18 (sequence is synthesized)
aaccaagcactctcttatcttgccttattgctatactatttacatcccactgcagaacagcagatttgaggcttttctatatacttctcagagcactgaaaagaaaggaagggtttgcag

SEQ ID NO: 3413 - DNA, 120 bp, Artificial Sequence
  ENSG00000005020_19 (sequence is synthesized)
aggagagtgtagaaatcccagtggtagcatgtaccaacaggtgagtagaaaggtagtgttagcctgacatttgagttatactctgtgctgcctgagcaagatttgtagaatcatataatt

SEQ ID NO: 3414 - DNA, 120 bp, Artificial Sequence
  ENSG00000005020_20 (sequence is synthesized)
accttttcatgtatatttgaaatcagaggtgtttaaaatacctatgagataccaatgtagccttaacatatgtcaaaatgcattgctggttagataattatttggactacacataaactc

SEQ ID NO: 3415 - DNA, 120 bp, Artificial Sequence
  ENSG00000005020_21 (sequence is synthesized)
ctaatattgaatcattacctatcaggtattatctttatggaacttttcaatatctttgctttataaagattctaaacatgtatctgagctggtaatattttaaaatctccattatttgtg

SEQ ID NO: 3416 - DNA, 120 bp, Artificial Sequence
  ENSG00000005020_22 (sequence is synthesized)
taaaactgtttataagcagtgtttgagagggtctgctttaccattaccccctcaatatcatgatcatccaatctcaaatgtgaaaaaaaaaaagaaatttgattttagggattgtgagta

SEQ ID NO: 3417 - DNA, 120 bp, Artificial Sequence
  ENSG00000005020_23 (sequence is synthesized)
aacaagtttatatagagagacattgtgaagttaaagttttcagaagttacatttgtgcagttcttaccttttcctcatatagtgccattgaaatagactgaaattatcttggcaaaagtt

SEQ ID NO: 3418 - DNA, 120 bp, Artificial Sequence
  ENSG00000005020_24 (sequence is synthesized)
agacaaccaaagacgactttagtggactggttttcaaaacttgagcagctgaaaagcaaaagccgttgtttcccatgacaatgtagcctttgtggatttgggtttgtgctttgggttgaa

SEQ ID NO: 3419 - DNA, 120 bp, Artificial Sequence
  ENSG00000005020_25 (sequence is synthesized)
aagaagtttttagtcctaggccagtagatggcagcagcttttcattgcagacaaaacctcttgaaacccttcccccatggcacaaactcgcccatgatggaaagcatctagatttctgcc

SEQ ID NO: 3420 - DNA, 120 bp, Artificial Sequence
  ENSG00000005020_26 (sequence is synthesized)
tccttttacagttaatccaggagagggagtcctttgccaactgatgaccaacagttccaagccagatagtctcgtgaacagtgacaatacagaaataaggtgttatttctgttcagatct

SEQ ID NO: 3421 - DNA, 120 bp, Artificial Sequence
  ENSG00000005020_27 (sequence is synthesized)
ccaccggcctttgttcttttaaaacttgaatataggtgggagacataagaaaggaaagaaaagacttaaaactggagtgacaggacaaataatcattactttcaattcatgactgcttta

SEQ ID NO: 3422 - DNA, 120 bp, Artificial Sequence
  ENSG00000005020_28 (sequence is synthesized)
tattcatttgatgaaatcatttgtatacaaaccagggagagttttctttacacccttgacaatatatcacatactcttcaagatcataataatatcattaatataaatttaaacaacatg

SEQ ID NO: 3423 - DNA, 120 bp, Artificial Sequence
  ENSG00000005020_29 (sequence is synthesized)
gcttgttagaaaatatgctaattgctatggtctcattatgtttgcttagcttttatttgtttttctgtgaacagttagagagctaatttttttcaaaggtgattgtaagtcatattttat

SEQ ID NO: 3424 - DNA, 120 bp, Artificial Sequence
  ENSG00000005020_30 (sequence is synthesized)
atagcattttgcttgattatttgctctgtactgaatttgtactctattgccattagatcttacaataatgttccactctgcaaatttttaaggttcaaataaagtttaattgtttgcaaa

SEQ ID NO: 3425 - DNA, 120 bp, Artificial Sequence
  ENSG00000005020_31 (sequence is synthesized)
attgaacgctagtaaattctaatttcccttctccttttccttttcccccacttcctctcccctctcccttcttcccatctctctctgtctcctttttgaccagtaacattttagagttga

SEQ ID NO: 3426 - DNA, 120 bp, Artificial Sequence
  ENSG00000005020_32 (sequence is synthesized)
gttttaaaagaagaaattgagtccagagaggctcagtgacatgtttaaggtaaaaaaaaaaaaaaaaaaaggtatggaactgagatcacattacagacttctttaacctgtgccatggat

SEQ ID NO: 3427 - DNA, 120 bp, Artificial Sequence
  ENSG00000005020_33 (sequence is synthesized)
agactggcttcgcccggacgactggcggaagacgagacttcgttacctccgttcaatcggacaaagaaggccataatagtttaggacaagagaaaattccttgtgggttaaactgcggtg

SEQ ID NO: 3428 - DNA, 120 bp, Artificial Sequence
  ENSG00000005020_34 (sequence is synthesized)
ggactgactgttacgcagaaggcgtaatcgcaaaacttgtatacactctgtatcatggatacattattttctggaatcctgcagaaacgatcagcagttgtgatggcaccagtaccgaaa

SEQ ID NO: 3429 - DNA, 120 bp, Artificial Sequence
  ENSG00000005020_35 (sequence is synthesized)
actgctccgcctgagaggaaccctggggtttaacgctgaagtgcgtttctcagagggcagagctggagcatctcgcagccctacaacttctttgcggcgcttggtctgtctttgcgttgc

SEQ ID NO: 3430 - DNA, 120 bp, Artificial Sequence
  ENSG00000005020_36 (sequence is synthesized)
gagatcaggatcggtgtgttgctcagacaccggccgaacgccaccggcacgtctaggagtctcctgtgcctggaagaggctggtttcattcgattctaaaagaaacggatgttgaaacat

SEQ ID NO: 3431 - DNA, 120 bp, Artificial Sequence
  ENSG00000005020_37 (sequence is synthesized)
tactttccttgacatgttaacaataataaaaatactgatgtttaaatatattatgcattgaacattcatataagaggaaatttttaaaaatttcagattaattcacacactatcttcttg

SEQ ID NO: 3432 - DNA, 120 bp, Artificial Sequence
  ENSG00000005020_38 (sequence is synthesized)
agttaaaccctttcccgcgggcgcagagtgggcctcccacgcttctctcccgtggccagtatgcgtgagagtgtgagttgagcccctgcctccgaggaagaattctaaaaaccgggctaa

SEQ ID NO: 3433 - DNA, 120 bp, Artificial Sequence
  ENSG00000005020_39 (sequence is synthesized)
gggtcgagcgagggaggctgaccttttcttgttatcaaattactgcgtttccctgaattacgggcactcaggaatggtgaaatctacatattaaccgaggaacacgaccctcaaaggaag

SEQ ID NO: 3434 - DNA, 120 bp, Artificial Sequence
  ENSG00000005020_40 (sequence is synthesized)
aatttttctctgcttgttggacatgaagagagggagacaaaggctctcagaaagagaaagacgggctggtgaaggacaaactaaggaatttgattattcacttttccaagataaagtggc

SEQ ID NO: 3435 - DNA, 120 bp, Artificial Sequence
  ENSG00000005020_41 (sequence is synthesized)
aattataggaaggtgatgcagaagatggggaagaatatgatgacccttttgctgggcctccagacactatttcattagcctcagaacgatatgataaagacgatgaagccccctctgatg

SEQ ID NO: 3436 - DNA, 120 bp, Artificial Sequence
  ENSG00000005022_0 (sequence is synthesized)
ccccgcagcgccggagtcaaagccggttcccggcccagtcccgtcctgcagcagtctgcctcctctttcaacatgacagatgccgctgtgtccttcgccaaggacttcctggcaggtgga

SEQ ID NO: 3437 - DNA, 120 bp, Artificial Sequence
  ENSG00000005022_1 (sequence is synthesized)
gtggccgcagccatctccaagacggcggtagcgcccatcgagcgggtcaagctgctgctgcaggtgcagcatgccagcaagcagatcactgcagataagcaatacaaaggcattatagac

SEQ ID NO: 3438 - DNA, 120 bp, Artificial Sequence
  ENSG00000005022_2 (sequence is synthesized)
tgcgtggtccgtattcccaaggagcagggagttctgtccttctggcgcggtaacctggccaatgtcatcagatacttccccacccaggctcttaacttcgccttcaaagataaatacaag

SEQ ID NO: 3439 - DNA, 120 bp, Artificial Sequence
  ENSG00000005022_3 (sequence is synthesized)
cagatcttcctgggtggtgtggacaagagaacccagttttggctctactttgcagggaatctggcatcgggtggtgccgcaggggccacatccctgtgttttgtgtaccctcttgatttt

SEQ ID NO: 3440 - DNA, 120 bp, Artificial Sequence
  ENSG00000005022_4 (sequence is synthesized)
gcccgtacccgtctagcagctgatgtgggtaaagctggagctgaaagggaattccgaggcctcggtgactgcctggttaagatctacaaatctgatgggattaagggcctgtaccaaggc

SEQ ID NO: 3441 - DNA, 120 bp, Artificial Sequence
  ENSG00000005022_5 (sequence is synthesized)
cagctggatgatcgcacagactgtcactgctgttgccgggttgacttcctatccatttgacactgttcgccgccgcatgatgatgcagtcagggcgcaaaggaactgacatcatgtacac

SEQ ID NO: 3442 - DNA, 120 bp, Artificial Sequence
  ENSG00000005022_6 (sequence is synthesized)
aggcacgcttgactgctggcggaagattgctcgtgatgaaggaggcaaagcttttttcaagggtgcatggtccaatgttctcagaggcatgggtggtgcttttgtgcttgtcttgtatga

SEQ ID NO: 3443 - DNA, 120 bp, Artificial Sequence
  ENSG00000005022_7 (sequence is synthesized)
tgaaatcaagaagtacacataagttatttcctaggatttttccccctgtgaacaggcatgttgtattatataacatatcttgagcattcttgacagactcctggctgtcagtttctcagt

SEQ ID NO: 3444 - DNA, 120 bp, Artificial Sequence
  ENSG00000005022_8 (sequence is synthesized)
ggcaactatttactggttgaaaatgggaagcaataatattcatctgaccagttttctcttaaagccatttccatgatgatgatgatgggactcaattgtattttttatttcagtcactcc

SEQ ID NO: 3445 - DNA, 120 bp, Artificial Sequence
  ENSG00000005022_9 (sequence is synthesized)
tgataaataacaaatttggagaaataaaaatatctaaaataaattttgtctgcagtatattttcatataaaaatgcatatttgagtgctacattcgaataaatactacctttttagtgaa

SEQ ID NO: 3446 - DNA, 120 bp, Artificial Sequence
  ENSG00000005022_10 (sequence is synthesized)
caagatcatccaatgcaacccttgtgtacagatgacgtgtttaggggatgtggggaaaggaagtcagtaaaactctgctttttggtaaaagcatctctttcctattcccaggaatgcttc

SEQ ID NO: 3447 - DNA, 120 bp, Artificial Sequence
  ENSG00000005022_11 (sequence is synthesized)
ggagcgagacggaagcagctcaggagacttgaggcgtaggctgcggtccccaaggtgaccgcgccctatgtgggactcgccctaatgcctctgaacctgggtttgaggtgcagcatgcca

SEQ ID NO: 3448 - DNA, 120 bp, Artificial Sequence
  ENSG00000005059_0 (sequence is synthesized)
acagctcggagccaccaggcgctgacgaggagcccggctgagggaggatgcgccgctgacgcctgcgggagccgcgcgcctggggcgggaggatgctccagaggggcctctggccgtggc

SEQ ID NO: 3449 - DNA, 120 bp, Artificial Sequence
  ENSG00000005059_1 (sequence is synthesized)
gcacgcggctgctgccgacccctggcacctggcgcccagcgcgcccgtggccgctgccgcctccgccccaggttttgcgtgtgaagctgtgtggaaatgtgaaatactaccagtcacacc

SEQ ID NO: 3450 - DNA, 120 bp, Artificial Sequence
  ENSG00000005059_2 (sequence is synthesized)
attatagtaccgtggtgccacctgatgaaataacagttatttatagacatggccttcccttggtaacacttaccttgccatctagaaaagaacgttgtcaattcgtagtcaaaccaatgt

SEQ ID NO: 3451 - DNA, 120 bp, Artificial Sequence
  ENSG00000005059_3 (sequence is synthesized)
tgtcaacagttggttcattccttcaggacctacaaaatgaagataagggtatcaaaactgcagccatcttcacagcagatggcaacatgatttcagcttctaccttgatggatattttgc

SEQ ID NO: 3452 - DNA, 120 bp, Artificial Sequence
  ENSG00000005059_4 (sequence is synthesized)
taatgaatgattttaaacttgtcattaataaaatagcatatgatgtgcagtgtccaaagagagaaaaaccaagtaatgagcacactgctgagatggaacacatgaaatctttggttcaca

SEQ ID NO: 3453 - DNA, 120 bp, Artificial Sequence
  ENSG00000005059_5 (sequence is synthesized)
gactatttacaatcttgcatttagaagagtctcagaaaaagagagagcaccatttactggagaaaattgaccacctgaaggaacagctgcagccccttgaacaggtgaaagctggaatag

SEQ ID NO: 3454 - DNA, 120 bp, Artificial Sequence
  ENSG00000005059_6 (sequence is synthesized)
aagctcattcggaagccaaaaccagtggactcctgtgggctggattggcactgctgtccattcagggtggggcactggcctggctcacgtggtgggtgtactcctgggatatcatggagc

SEQ ID NO: 3455 - DNA, 120 bp, Artificial Sequence
  ENSG00000005059_7 (sequence is synthesized)
cagttacatacttcatcacatttgcaaattctatggtcttttttgcatactttatagtcactcgacaggattatacttactcagctgttaagagtaggcaatttcttcagttcttccaca

SEQ ID NO: 3456 - DNA, 120 bp, Artificial Sequence
  ENSG00000005059_8 (sequence is synthesized)
agaaatcaaagcaacagcactttgatgtgcagcaatacaacaagttaaaagaagaccttgctaaggctaaagaatccctgaaacaggcgcgtcattctctctgtttgcaaatgcaagtag

SEQ ID NO: 3457 - DNA, 120 bp, Artificial Sequence
  ENSG00000005059_9 (sequence is synthesized)
gcaacttaggatgtttttgagtcccatggttcattttgattgtttaatctttgttattaaattcttgtaaaacagaagtattgtttgaagttctcaactgagatttttactttttggatt

SEQ ID NO: 3458 - DNA, 120 bp, Artificial Sequence
  ENSG00000005059_10 (sequence is synthesized)
tttatgacttgctaatgttagaaagggcttgtatgcgtctatcaaagcaacggtggctgctgttagctaaaaatccttgtcagcttgtcccacgtttattctctatgtggaggtgaaagg

SEQ ID NO: 3459 - DNA, 120 bp, Artificial Sequence
  ENSG00000005059_11 (sequence is synthesized)
gtctgtgcttggcattcacttccattcttagacttaatttggaatcatccttttaaaaaaatcagagaccaggtcttgccaaatcaaactcctgggctcaagcaaccctcctgcctcaac

SEQ ID NO: 3460 - DNA, 120 bp, Artificial Sequence
  ENSG00000005059_12 (sequence is synthesized)
ctcccacggaatcgtcttgtcattaacttctttttttaatatgcagtagttgggagtaagatctttttatcatttatcaaaaaggcataaatgttccaccaaccataaagtatagttggt

SEQ ID NO: 3461 - DNA, 120 bp, Artificial Sequence
  ENSG00000005059_13 (sequence is synthesized)
actttttgaacttcaactgaaacagtgtatataaacgattgcttttgaacctgcaaatcacaagtttcaggtatcgaagccaaaacagttaactttcttcagcctctggcagattattaa

SEQ ID NO: 3462 - DNA, 120 bp, Artificial Sequence
  ENSG00000005059_14 (sequence is synthesized)
caaaacagtattattcagattctatatcatattaataagaattgaaccttgaaagtaacatctgttattctattaatgtgattgtgtgtgaatgggtctgatgactgttggactgtttgt

SEQ ID NO: 3463 - DNA, 120 bp, Artificial Sequence
  ENSG00000005059_15 (sequence is synthesized)
aggaacttaacatggaagatgctgacagaatcagattttgcaggtgttcaacctatagtggctaagaattatgttttctatttcatcctcagaatgccatacaacaattctggaatgctg

SEQ ID NO: 3464 - DNA, 120 bp, Artificial Sequence
  ENSG00000005059_16 (sequence is synthesized)
attttttttaaagtaggaattaaagtcatacacaaaatgtggtaattcatatgtagatgaaatattaaacatttaaatgaccgagtaaaaaacatctatcaattacacaaatgaacaaga

SEQ ID NO: 3465 - DNA, 120 bp, Artificial Sequence
  ENSG00000005059_17 (sequence is synthesized)
atgtgagttagaaaaatgtaataaaatatgaatttcgaatattttattaagggatgatttaattcctggatttcaaaaacctttaaaaacatcaaacaataaacttttataaaaaagtga

SEQ ID NO: 3466 - DNA, 120 bp, Artificial Sequence
  ENSG00000005059_18 (sequence is synthesized)
acatctttgcaaagaatgtcttatctaagcaatgagcaaaaaagcctttttatttactgaattactgccatctggtttttatgagctggtaaattttttattgtttttcacaagactgaa

SEQ ID NO: 3467 - DNA, 120 bp, Artificial Sequence
  ENSG00000005059_19 (sequence is synthesized)
tgaagactcacaacacagagaaattatatataacttctttggagaagtaattagtgtaacacacaaattcctccattgggataaatatgtgttctctgtgccctcatttataaaaaaaac

SEQ ID NO: 3468 - DNA, 120 bp, Artificial Sequence
  ENSG00000005059_20 (sequence is synthesized)
tttaatatgccaaaaatctcccttttcttatttcttccttcttctttcccattatgtgtaatttctcttcccagcttgcctgtttttgaaaggagcagcagatcttaaatgagactaaat

SEQ ID NO: 3469 - DNA, 120 bp, Artificial Sequence
  ENSG00000005059_21 (sequence is synthesized)
gttttgtgttggcttatgcttactctcatggccattgcaaatatttcactcattcatctgccttcttttgctttggtgttgctgagtcaagtatctttcttgcagaggcattatgttcat

SEQ ID NO: 3470 - DNA, 120 bp, Artificial Sequence
  ENSG00000005059_22 (sequence is synthesized)
gagagacgggtgaatcatgagtgtgctgtcattttgtggattaactactcgtcttgggctgtccagaccagaagaagaaaaaatttattttcacagtgatgattcatgtagtacctgaga

SEQ ID NO: 3471 - DNA, 120 bp, Artificial Sequence
  ENSG00000005059_23 (sequence is synthesized)
ctgaaatattaagataactttctagtctgtgctacaaaatgcagtttttgttagggagatacatagatctagaggttttgcgtgtgaagctgtgtggaaatgtgaaatactaccagtcac

SEQ ID NO: 3472 - DNA, 120 bp, Artificial Sequence
  ENSG00000005059_24 (sequence is synthesized)
atgctaattttctcctttacgcctcacaaaaaacctgtaagttcagtgcttttatcttcctcatttttcagatgaggaaactgagcaacagagctgtatcgctaatacatggtagagcct

SEQ ID NO: 3473 - DNA, 120 bp, Artificial Sequence
  ENSG00000005059_25 (sequence is synthesized)
ggacttgagctcacgtggcctgtgttcagagctgccatcttaaactctatgccatgcctcctctccagagatcagtcataatgtctctgtaaataagtataatatgagcagggcagcact

SEQ ID NO: 3474 - DNA, 120 bp, Artificial Sequence
  ENSG00000005059_26 (sequence is synthesized)
agctggagtcctacctccctttcctttttagagaataggcccagagcccctgctgtgcctaacagaattgcagctggaaagttggtaatggctagcatctaaagttaatcaatggtgtgg

SEQ ID NO: 3475 - DNA, 120 bp, Artificial Sequence
  ENSG00000005073_0 (sequence is synthesized)
cttcaaagaggcagctgcagtggagaatcatgttaagctcggctactgcggagagcccaaggtagcccaataatggattttgatgagcgtggtccctgctcctctaacatgtatttgcca

SEQ ID NO: 3476 - DNA, 120 bp, Artificial Sequence
  ENSG00000005073_1 (sequence is synthesized)
agttgtacttactacgtctcgggtccagatttctccagcctcccttcttttctgccccagaccccgtcttcgcgcccaatgacatactcctactcctccaacctgccccaggtccaaccc

SEQ ID NO: 3477 - DNA, 120 bp, Artificial Sequence
  ENSG00000005073_2 (sequence is synthesized)
gtgcgcgaagtgaccttcagagagtacgccattgagcccgccactaaatggcacccccgcggcaatctggcccactgctactccgcggaggagctcgtgcacagagactgcctgcaggcg

SEQ ID NO: 3478 - DNA, 120 bp, Artificial Sequence
  ENSG00000005073_3 (sequence is synthesized)
cccagcgcggccggcgtgcctggcgacgtgctggccaagagctcggccaacgtctaccaccaccccacccccgcagtctcgtccaatttctatagcaccgtgggcaggaacggcgtcctg

SEQ ID NO: 3479 - DNA, 120 bp, Artificial Sequence
  ENSG00000005073_4 (sequence is synthesized)
ccacaggctttcgaccagtttttcgagacagcctacggcaccccggaaaacctcgcctcctccgactaccccggggacaagagcgccgagaaggggcccccggcggccacggcgacctcc

SEQ ID NO: 3480 - DNA, 120 bp, Artificial Sequence
  ENSG00000005073_5 (sequence is synthesized)
ggcggcggctgcaacgggcgcgccggcaacttcaagttcggacagcggcggcggcggcggctgccgggagacggcggcggcagcagaggagaaagagcggcggcggcgccccgagagcag

SEQ ID NO: 3481 - DNA, 120 bp, Artificial Sequence
  ENSG00000005073_6 (sequence is synthesized)
gagagcagcagcagccccgagtcgtcttccggccacactgaggacaaggccggcggctccagtggccaacgcacccgcaaaaagcgctgcccctataccaagtaccagatccgagagctg

SEQ ID NO: 3482 - DNA, 120 bp, Artificial Sequence
  ENSG00000005073_7 (sequence is synthesized)
gaacgggagttcttcttcagcgtctacattaacaaagagaagcgcctgcaactgtcccgcatgctcaacctcactgatcgtcaagtcaaaatctggtttcagaacaggagaatgaaggaa

SEQ ID NO: 3483 - DNA, 120 bp, Artificial Sequence
  ENSG00000005073_8 (sequence is synthesized)
aaaaaaattaacagagaccgtttacagtactactcagcaaatccactcctctaagactccagcggctggaattgggtggggggcttcatacacatgagataatatgcagattttgccctt

SEQ ID NO: 3484 - DNA, 120 bp, Artificial Sequence
  ENSG00000005073_9 (sequence is synthesized)
catggtgacttttgaaaagaggtgtgcaagagagggatgcatggagatagccccacaggaggtggtctgggactctcttgattaagatctcagtggttaagattcctaataatcattgga

SEQ ID NO: 3485 - DNA, 120 bp, Artificial Sequence
  ENSG00000005073_10 (sequence is synthesized)
ttctgagagctgtgcatcagctagaatgacaggtttgggacccctggtggttcactcttggagcctgcagagctgcgggctgggtgtggtctccactggggattgggcccctgccagacc

SEQ ID NO: 3486 - DNA, 120 bp, Artificial Sequence
  ENSG00000005073_11 (sequence is synthesized)
ccctggagactaaccccaccacaccctccctctactgggagcctacccacccccaggacccctgagtaaaaaagctgtgtgctctccaagcccagttcagcttggggacaggggcaggag

SEQ ID NO: 3487 - DNA, 120 bp, Artificial Sequence
  ENSG00000005073_12 (sequence is synthesized)
gaaggggtaggattactaggtgcccagaatgaggctgctttccaaagccaatgtgaacagcggctggacttggaggtagctttgaggtggaagagggctgcaaatccttgtgggaaaaga

SEQ ID NO: 3488 - DNA, 120 bp, Artificial Sequence
  ENSG00000005073_13 (sequence is synthesized)
aatctatgattccaggtggcatcagtgtctttccactcctcctagccacccaccacactgatccagccctgagttcctagccaccgcctcctacagcccacctggcttttctttctacca

SEQ ID NO: 3489 - DNA, 120 bp, Artificial Sequence
  ENSG00000005073_14 (sequence is synthesized)
aatgagggtcttggttccagcctgccactcaggcccaaagcctcgacacagagtggactgttccctgaggtgggagatgtggaaaagccaagaggctgcagccaggccactggcccctga

SEQ ID NO: 3490 - DNA, 120 bp, Artificial Sequence
  ENSG00000005073_15 (sequence is synthesized)
gatctctgcaggaaatggctgtggagtgtggcagtttggcaaactctccaccacacgtaatgaaacttggatttgctcagtgtctggctgcagagcagtgggcctggccagcaggtcccc

SEQ ID NO: 3491 - DNA, 120 bp, Artificial Sequence
  ENSG00000005073_16 (sequence is synthesized)
agctttggctatgagggccttgagtcccccaaaacaccgggttccagcaccacactcagccctcattggctcttgaactgagcttggaagcttctggtgaccttccaagagcctgagagt

SEQ ID NO: 3492 - DNA, 120 bp, Artificial Sequence
  ENSG00000005073_17 (sequence is synthesized)
gaggtggaattattttaaaagataaatattatattatatatatatatatttccctgaaggaaccaaagcgaattttaaaagatgcaatgtagaggggaaaagagatgatgaaaatattta

SEQ ID NO: 3493 - DNA, 120 bp, Artificial Sequence
  ENSG00000005073_18 (sequence is synthesized)
aaggccctatctgtttacagtgttccgtggttaaactcgctcactgctaagaatatttgaatgtatgcttcatacagggatggtgttcaaaaaacttgtaaataaaggaaccataatcaa

SEQ ID NO: 3494 - DNA, 120 bp, Artificial Sequence
  ENSG00000005075_0 (sequence is synthesized)
gcggcggcggcggacccttggggtctggacgcaacggcggcgggagcatgaacgcccctccagccttcgagtcgttcttgctcttcgagggcgagaagaagatcaccattaacaaggaca

SEQ ID NO: 3495 - DNA, 120 bp, Artificial Sequence
  ENSG00000005075_1 (sequence is synthesized)
ccaaggtacccaatgcctgtttattcaccatcaacaaagaagaccacacactgggaaacatcattaaatcacaactcctaaaagacccgcaagtgctatttgctggctacaaagtccccc

SEQ ID NO: 3496 - DNA, 120 bp, Artificial Sequence
  ENSG00000005075_2 (sequence is synthesized)
accccttggagcacaagatcatcatccgagtgcagaccacgccggactacagcccccaggaagcctttaccaacgccatcaccgacctcatcagtgagctgtccctgctggaggagcgct

SEQ ID NO: 3497 - DNA, 120 bp, Artificial Sequence
  ENSG00000005075_3 (sequence is synthesized)
gaccctccgctccaggtaccacaccgaggagagcggccggtcccagccatggcccgccttgtggccacccctcaccctgacaccgacgtgtcctgtacatagattaggttttatattcct

SEQ ID NO: 3498 - DNA, 120 bp, Artificial Sequence
  ENSG00000005075_4 (sequence is synthesized)
aataaagtatagcgggagagacctggatgtggacttgagcagcggtgacttcgcaagcaaatggattgtcaggcttgatgcaggcagatgacctgtttcaggggcgtccggctggcaggg

SEQ ID NO: 3499 - DNA, 120 bp, Artificial Sequence
  ENSG00000005075_5 (sequence is synthesized)
atgaattcattctggaccaaagatccggggtccaggggctgctgcgggggctgtgctgagccggagagaagtgtgcaaacccatgagctcccaagagtctctgctctagaagcctcaact

SEQ ID NO: 3500 - DNA, 120 bp, Artificial Sequence
  ENSG00000005075_6 (sequence is synthesized)
cctgggcctgcctgtcagtcaaagcaggaacacttcttcctgcataactcgaaacacctttccacaggcttcttgtccacagtagagtttaataaaaatattcactgaaagacccccccc

SEQ ID NO: 3501 - DNA, 120 bp, Artificial Sequence
  ENSG00000005075_7 (sequence is synthesized)
gggacagccctggcctgtttcttcggaggtcctgggggagaggcggcagtgatggaagagcagggacttccaccacaggctccaggacatgtggactgaggggctgtggagtctgggcct

SEQ ID NO: 3502 - DNA, 120 bp, Artificial Sequence
  ENSG00000005075_8 (sequence is synthesized)
gtggctcccgtctgccccatgggacttctgtagtgctgcagggtccctcgggtgctgtgggccagatcggggcggggacctactgtcctttgggggtgctcttctacgtcccttgttggt

SEQ ID NO: 3503 - DNA, 120 bp, Artificial Sequence
  ENSG00000005075_9 (sequence is synthesized)
gattggcaaggcctggtccttccaggtctctgggaggcagctcacccccgggtggcccacacctgttcctggcagggcgcatgggaatctagaacagtttagaggggaaagagccacagc

SEQ ID NO: 3504 - DNA, 120 bp, Artificial Sequence
  ENSG00000005100_0 (sequence is synthesized)
ggtggtcgccgggagccgccagcacgtggcggcgaggaaggggcggtgtgctcctgttgtctgcacctgagagggggcaggagctctcggcgcttgcgcctcccgccgcggtgccctccc

SEQ ID NO: 3505 - DNA, 120 bp, Artificial Sequence
  ENSG00000005100_1 (sequence is synthesized)
gacatgccggaggaggcgggcttcccgccggccaagagattccggccaggctctggacctccgagccgcgctgggtccttccctcccgggaggcaagtggtgatgctgctgactgcgggc

SEQ ID NO: 3506 - DNA, 120 bp, Artificial Sequence
  ENSG00000005100_2 (sequence is synthesized)
agcggcggcagaggaggaggaggaggccggaggcagcagccgcccctggcccagccctcggccagtccctaccctgaagctgtggagctgcagcgccggagtctgcccatcttccaagcg

SEQ ID NO: 3507 - DNA, 120 bp, Artificial Sequence
  ENSG00000005100_3 (sequence is synthesized)
cgggggcaactgttggcccagctccgaaacctggacaacgcggtcctcatcggggaaactggctctgggaagacaactcagatccctcagtacctgtatgaaggagggatcagccgccag

SEQ ID NO: 3508 - DNA, 120 bp, Artificial Sequence
  ENSG00000005100_4 (sequence is synthesized)
ggcatcattgctgtgacccagcctcgtcgagtagctgccatctctcttgctactagagtctcagatgagaagagaactgaacttgggaagctggttggctatacagtgcgctttgatgat

SEQ ID NO: 3509 - DNA, 120 bp, Artificial Sequence
  ENSG00000005100_5 (sequence is synthesized)
gtcacctcagaagacaccaggatcaagtttctgacagatggcatgcttctgcgtgaagcaatttcagactctttgcttcggaaatacagctgtgtcattttggatgaagctcacgaacgg

SEQ ID NO: 3510 - DNA, 120 bp, Artificial Sequence
  ENSG00000005100_6 (sequence is synthesized)
actatccacacagatgtgctctttggagtggtgaaagctgcacagaagaggagaaaggaactcgggaaacttcctctgaaagtgattgtgatgtcagctacgatggatgtggacctgttc

SEQ ID NO: 3511 - DNA, 120 bp, Artificial Sequence
  ENSG00000005100_7 (sequence is synthesized)
tctcagtatttcaatggcgcccccgtcctctacctagagggtcggcagcatccgatccaggtgttttacaccaaacagcctcagaatgattacctgcacgccgcgcttgtctccgtcttc

SEQ ID NO: 3512 - DNA, 120 bp, Artificial Sequence
  ENSG00000005100_8 (sequence is synthesized)
cagatccaccaggaagccccttcttcacaggacatcctggtgttcctcactgggcaggaggagatcgaagccatgagcaagacgtgccgagacattgcaaagcacctcccagacggctgc

SEQ ID NO: 3513 - DNA, 120 bp, Artificial Sequence
  ENSG00000005100_9 (sequence is synthesized)
cctgcgatgctggtccttcctctgtacgcctccctgccctatgcacagcagctccgagtcttccaaggggccccaaagggctatcgcaaagtgatcatttcaaccaacatcgctgaaacc

SEQ ID NO: 3514 - DNA, 120 bp, Artificial Sequence
  ENSG00000005100_10 (sequence is synthesized)
tccataaccattacaggaataaaatatgtagttgacacgggcatggttaaagcaaagaagtataaccctgacagtggtcttgaggtgttagcagtgcagcgggtatcgaagacgcaggct

SEQ ID NO: 3515 - DNA, 120 bp, Artificial Sequence
  ENSG00000005100_11 (sequence is synthesized)
tggcagcgcacagggagggctggcagagaggacagtggcatctgctaccggctctacacggaggacgagtttgagaagtttgataagatgaccgtgccagagatccagaggtgtaacctg

SEQ ID NO: 3516 - DNA, 120 bp, Artificial Sequence
  ENSG00000005100_12 (sequence is synthesized)
gccagtgtgatgcttcagcttctagcaatgaaagtcccaaatgtgctcacctttgacttcatgtcgaagccatctccagatcacattcaggcggccattgcccaactggacctgttaggt

SEQ ID NO: 3517 - DNA, 120 bp, Artificial Sequence
  ENSG00000005100_13 (sequence is synthesized)
gctcttgaacataaggatgaccagcttaccctgactccaatgggaagaaagatggcagcatttcctttagaacccaaatttgccaaaaccatcctcatgtcccccaaattccactgtaca

SEQ ID NO: 3518 - DNA, 120 bp, Artificial Sequence
  ENSG00000005100_14 (sequence is synthesized)
gaggagatcctgaccattgtctccctgctgtctgtggacagcgtcctccacaaccctccttcccggcgagaggaagtgcaaggggtccgcaagaagttcatatccagcgagggggatcac

SEQ ID NO: 3519 - DNA, 120 bp, Artificial Sequence
  ENSG00000005100_15 (sequence is synthesized)
atgaccctgctcaatatctatcggaccttcaaaaacctaggcggaaataaggattggtgcaaagagaattttgtcaacagcaagaatatgacgctggtagcagaagtcagagcacagctg

SEQ ID NO: 3520 - DNA, 120 bp, Artificial Sequence
  ENSG00000005100_16 (sequence is synthesized)
agggacatctgcttaaagatgtcaatgccaatcgcatcatcccgaggagacgtggagagtgtccgccgctgcctggctcacagcctcttcatgagcaccgccgagcttcagccagatggc

SEQ ID NO: 3521 - DNA, 120 bp, Artificial Sequence
  ENSG00000005100_17 (sequence is synthesized)
acctatgccaccacggacacccaccagccagtggccatccacccgtcgtctgtcctcttccactgcaagccggcctgcgtcgtgtacactgagctgctctacaccaacaagtgctacatg

SEQ ID NO: 3522 - DNA, 120 bp, Artificial Sequence
  ENSG00000005100_18 (sequence is synthesized)
cgggacctctgcgtcatagatgcacagtggctgtacgaggctgcccctgagtactttaggaggaagctgagaaccgccagaaactgagccgccccaggatgccgccagaatcactggtcc

SEQ ID NO: 3523 - DNA, 120 bp, Artificial Sequence
  ENSG00000005100_19 (sequence is synthesized)
ctgggagcttggactacagttgtccttacagcaggcttccaggttggcgcttagagaagccttggaatcagctgaaggtgcctgacttccaggagcgtgaaagcatctttgctcaactcc

SEQ ID NO: 3524 - DNA, 120 bp, Artificial Sequence
  ENSG00000005100_20 (sequence is synthesized)
tgggactgaaccatatagacatggacatatcatttgtacctggaaacctcaaaattatgcttttggttcttactgggtgactttgacttaatttaacacctgagcctcagttttctcatc

SEQ ID NO: 3525 - DNA, 120 bp, Artificial Sequence
  ENSG00000005100_21 (sequence is synthesized)
tgccaaatgggagtaataataataatccttataaaattgggttcataaagtttagagaaaaggaatggaaagtacccagaactatgcctggagcacgcacgacacacgtacagtgagttg

SEQ ID NO: 3526 - DNA, 120 bp, Artificial Sequence
  ENSG00000005100_22 (sequence is synthesized)
ggagccgttaggctgaatgttactgcttgccatatgatgtgaagtacagcaatatcccaagttcttgtgactgagggagattttctggaagggccacaggaggttgcggagcttggatgt

SEQ ID NO: 3527 - DNA, 120 bp, Artificial Sequence
  ENSG00000005100_23 (sequence is synthesized)
tttaatgtctctctgaatgcagttttaaaatagaaaacaaaactgacttctgtagaagtttccagagggaggtgctgttatctcgtacctcctgggatggcgatccctactgaacgcttg

SEQ ID NO: 3528 - DNA, 120 bp, Artificial Sequence
  ENSG00000005100_24 (sequence is synthesized)
tgtctcagggtggaccactctgtgtctgtctccaagcagagaccagtaaaggagcctcctggtcctcagtgcgtgaccctgtcagtgctttcaggagacatgtaagcttcctgggtgaag

SEQ ID NO: 3529 - DNA, 120 bp, Artificial Sequence
  ENSG00000005100_25 (sequence is synthesized)
gttgatttgtaccttctgaatcctgtcacgtgtagacatgggaaactgacctatcagtgttttgtgtgtgtaggtgactcccacatacacagttgccatttttctctctaactgggcacc

SEQ ID NO: 3530 - DNA, 120 bp, Artificial Sequence
  ENSG00000005100_26 (sequence is synthesized)
agtgaacatgcgggcatgaggagtgactgtgtaccatttcagctgtttcttttcgggcagtcccctggtcagagggggtgggggtgggggaggggagaggggtacctagaacccagagaa

SEQ ID NO: 3531 - DNA, 120 bp, Artificial Sequence
  ENSG00000005100_27 (sequence is synthesized)
cattggcttatgccagataccacaccacatctgggcttacattcttgtatcttttttggtgtgtgggcggggggggtggggggcagttcagtgaagtctagaagacctgctggacaaatt

SEQ ID NO: 3532 - DNA, 120 bp, Artificial Sequence
  ENSG00000005100_28 (sequence is synthesized)
ctaaaagagctagagctgtaacacttattcttgcatcttattaattttctatgatattttttccttcttcgtagggacttgggacaatctggctttgctgctttctaactgctaggcacc

SEQ ID NO: 3533 - DNA, 120 bp, Artificial Sequence
  ENSG00000005100_29 (sequence is synthesized)
tctctctaaccctcattgtcagagggaattggaggatatccacagtctgttcctgttctgatattctgagcagagaaaaggcactaacggttcctcttagctatttaattatcagaagca

SEQ ID NO: 3534 - DNA, 120 bp, Artificial Sequence
  ENSG00000005100_30 (sequence is synthesized)
agtaatctttccccagataatattttgccctagaagaagccgtgatttagctcttttattgtgcttacttggtccaaatacatctgtggggtgttttgtcatttcttaatgaatgaatca

SEQ ID NO: 3535 - DNA, 120 bp, Artificial Sequence
  ENSG00000005100_31 (sequence is synthesized)
tagttataaccaggggccaagctgcccaagaggctcttcagagatcatggatgctctctttctggaagctgtggcctgatggagcagccccattccagggtcccatctgtccggagttgt

SEQ ID NO: 3536 - DNA, 120 bp, Artificial Sequence
  ENSG00000005100_32 (sequence is synthesized)
gtatgtcaagtccggctcagtctttatttccaacactagccgtggtcctgtgcagtcaagctctcagctagtgtttagggctgtctgtcagaaatggttatacgtgggcaaaagaagatc

SEQ ID NO: 3537 - DNA, 120 bp, Artificial Sequence
  ENSG00000005100_33 (sequence is synthesized)
tgacagctcctatataccttatcttactgaattcttaaactttgaaccagttcttccacttactgacttgttaccactgctgactttctgaaaagttttccagtttttgttttttgtttt

SEQ ID NO: 3538 - DNA, 120 bp, Artificial Sequence
  ENSG00000005100_34 (sequence is synthesized)
ttttgttttttgttttttgttttccagtaggggattagaatgtttagtcctacttagtaagaaaaatattgtatttttaatcattcatagtgctggtaaaaaaaaaaaaaaaaaaaaaaa

SEQ ID NO: 3539 - DNA, 86 bp, Artificial Sequence
  ENSG00000005100_35 (sequence is synthesized)
caagatcacgccactgcattccagcctggccgacagtgtgagacggtctcagcttggggtaatttatgtccagcttaagtacctga

SEQ ID NO: 3540 - DNA, 120 bp, Artificial Sequence
  ENSG00000005100_36 (sequence is synthesized)
tggggtaatttatgtccagcttaagtacctgaacagtttccggaaatgtatattttttttctgagaggcaaaggatgtaaacagcttctaagtagctttaatgtttctgtacagaaataa

SEQ ID NO: 3541 - DNA, 120 bp, Artificial Sequence
  ENSG00000005100_37 (sequence is synthesized)
gtttatccctgtaacattgtggtagagttttaatacagtatttagttttttattgggcttttttaaaaagttaacttttaacatagctgctcagggattaaatcagattggaaaacccat

SEQ ID NO: 3542 - DNA, 120 bp, Artificial Sequence
  ENSG00000005100_38 (sequence is synthesized)
tctgactccacatactgctacaaagaaatacatcgttgtttatattgagctgcaggagatagtacactttaaacttaagaaagttaaatgtttcacaataacattgcaatataatcttca

SEQ ID NO: 3543 - DNA, 120 bp, Artificial Sequence
  ENSG00000005100_39 (sequence is synthesized)
gctactctctttccattggtaaaatctctgatggtgtgataactctttgccaacctacgaaacccatatctggaagaatcaccagctcccgtgagcagcttcatgtaaatagatgcactc

SEQ ID NO: 3544 - DNA, 120 bp, Artificial Sequence
  ENSG00000005100_40 (sequence is synthesized)
caagcagattgcatgcctcaggtgtttgtcttctagtaatcatggagtgtgcaacacccagagtaacactacaaggggcaggactgcaaacagcaggtcctggctaaaaacccttaatgc

SEQ ID NO: 3545 - DNA, 120 bp, Artificial Sequence
  ENSG00000005100_41 (sequence is synthesized)
tgcattgctgccagttgtaaagagatgcctgaatggaggcaagttctgccctgtgggtgaaactgatgatgtactgtactgtcatatataaatccactaaatccagctaccaggaactgc

SEQ ID NO: 3546 - DNA, 120 bp, Artificial Sequence
  ENSG00000005100_42 (sequence is synthesized)
ctggaactgtggccatgcatttttttttttctttaaagaccagtgtgatagtaggccatgcatctgagatacgatattccttggtaactagagggagaaaaaaaaatcaagtaggttcag

SEQ ID NO: 3547 - DNA, 120 bp, Artificial Sequence
  ENSG00000005100_43 (sequence is synthesized)
gcttatgttgtattttgagagtctggttttatttgaacagaaataactctacagaaagctcttgtaaataatgctcaaatttgcacccgacgatcaaatccattaaaaatgaatcttgta

SEQ ID NO: 3548 - DNA, 120 bp, Artificial Sequence
  ENSG00000005100_44 (sequence is synthesized)
aaactccatctcaaaaaaaaaaaaagaaggaaaggaaaggaaacagacctgtgtgctctagcagggtgttttcctctgcctgttctgctcagagccttggaagaaagtaaactgtgatgg

SEQ ID NO: 3549 - DNA, 120 bp, Artificial Sequence
  ENSG00000005100_45 (sequence is synthesized)
tcagagccttggaagaaagtaaactgtgatgggggtggcacaggcctcaatcatctgcttttggggctcgagagggacacggaaaggccttcccactatttgtttctggtcctcctcttc

SEQ ID NO: 3550 - DNA, 120 bp, Artificial Sequence
  ENSG00000005102_0 (sequence is synthesized)
agccctctgcaggcatttgctctgggctccaggacgaactcctcgtcagctggtgcgtctgggttgggacagtgaaaatgtttagtgtcattggcgacaaatacacatacaggggatccc

SEQ ID NO: 3551 - DNA, 120 bp, Artificial Sequence
  ENSG00000005102_1 (sequence is synthesized)
agtaggtaggctggtgcattggaggggcaggagcaagcccgacataggtgtgtgcacacacataggagtagctggccacatgtgtgtgtactttaaggagagactttagttttgggtttt

SEQ ID NO: 3552 - DNA, 120 bp, Artificial Sequence
  ENSG00000005102_2 (sequence is synthesized)
tttttttttttggttcctggggtaaattttctgttgaacatttttccctcctatttagttttttttcttttgcatttttaaaaatttgaacataaaaagtataaagaatcaaatctttga

SEQ ID NO: 3553 - DNA, 120 bp, Artificial Sequence
  ENSG00000005102_3 (sequence is synthesized)
aaggaccgaggcgtgcagcggacagcagatggatcccgcggccagcagctgcatgaggagcctccagcccccagcccctgtctggggctgccttcgaaacccccactcggaaggcaatgg

SEQ ID NO: 3554 - DNA, 120 bp, Artificial Sequence
  ENSG00000005102_4 (sequence is synthesized)
ggcctcagggctaccccactacccgcccaccccgttctccttccaccagaaaccagacttcctggcgacagcgacggcagcgtaccctgacttctcagcctcctgcctggcagccacccc

SEQ ID NO: 3555 - DNA, 120 bp, Artificial Sequence
  ENSG00000005102_5 (sequence is synthesized)
acacagcctgccccaggaggagcacatcttcactgagcagcaccccgctttcccacagtcccccaactggcacttccctgtctcagacgcccggcgcaggcccaactcaggcccggcagg

SEQ ID NO: 3556 - DNA, 120 bp, Artificial Sequence
  ENSG00000005102_6 (sequence is synthesized)
gggttccaaggaaatggggaccagcagcctgggcctggtggacaccacaggaggcccaggcgatgactacggggtgcttgggagcactgccaatgagacagagaagaaatcatccaggcg

SEQ ID NO: 3557 - DNA, 120 bp, Artificial Sequence
  ENSG00000005102_7 (sequence is synthesized)
gagaaaggagagttcagacaaccaggagaacagagggaagccggagggcagcagcaaagcccgcaaggagaggacggccttcaccaaggagcagctgcgagagctggaggcagagtttgc

SEQ ID NO: 3558 - DNA, 120 bp, Artificial Sequence
  ENSG00000005102_8 (sequence is synthesized)
ccatcataactacctgactcggctccgcagatatgagattgcggtaaacctggacctctctgagcgccaggtcaaagtgtggttccagaaccgaaggatgaagtggaagcgtgtgaaggg

SEQ ID NO: 3559 - DNA, 120 bp, Artificial Sequence
  ENSG00000005102_9 (sequence is synthesized)
aggtcagcccatctcccccaatgggcaggaccctgaggatggggactccacagcctctccaagttcagagtgagattctgcatggaggaaaaatgactaaggactgagccccctacccaa

SEQ ID NO: 3560 - DNA, 120 bp, Artificial Sequence
  ENSG00000005102_10 (sequence is synthesized)
ctacccccaccccaatcccaccttcaccctcttccttccccagccagggcagcctctccacatctttccctgactcttggatatgaaactgcccagcattcctgggagtcttaggatttt

SEQ ID NO: 3561 - DNA, 120 bp, Artificial Sequence
  ENSG00000005102_11 (sequence is synthesized)
tccctagggcctttgctcccacactctcatggaatcagacagagatcctaccgggccggatgaatctggaaacagcttcagagatactgcttctcagcgtctcttggctgccacccatgc

SEQ ID NO: 3562 - DNA, 120 bp, Artificial Sequence
  ENSG00000005102_12 (sequence is synthesized)
ctcctcctaccgctgttctcctaggtcagccaggcctcctcctggtctggacaccacctggcctggtgggagaggagctttggaaccagctggcgactcggaaagtaaatgcttcaaaag

SEQ ID NO: 3563 - DNA, 120 bp, Artificial Sequence
  ENSG00000005102_13 (sequence is synthesized)
gaaggaaatgacagagacacacgcccttgcccaccttcctctgtaggctgcacatctgaggctttggggccccttagttgtcccgaaaccccaagaaaaatcagaatgaggagagtcaag

SEQ ID NO: 3564 - DNA, 120 bp, Artificial Sequence
  ENSG00000005102_14 (sequence is synthesized)
gacagcaactcagctgctgcaagccagaaacacatccctgtctccaaatttgttggctaagtggagacacttctgagaactgactagagaagacagaaaaatagcccgatgtaggtttcg

SEQ ID NO: 3565 - DNA, 120 bp, Artificial Sequence
  ENSG00000005102_15 (sequence is synthesized)
gtgtccccatataggcccgtccacacaggcttgactgggtggacaagaatgaacccatgacagcacctgctgcttcaaaatcaaaatcaatttagggatacagcaggggctgttgggctg

SEQ ID NO: 3566 - DNA, 120 bp, Artificial Sequence
  ENSG00000005102_16 (sequence is synthesized)
tgctccagagaaaaggagcagctactccttttaaatccacgatttctggattgaaaacctgtccagatgctgagttgttgggctgaacaactaggagctgaaaacaacgtagaggctgga

SEQ ID NO: 3567 - DNA, 120 bp, Artificial Sequence
  ENSG00000005102_17 (sequence is synthesized)
aagtgtcccctgcattctggaggggaggggagataataaggagggctgctgggtgagggcctggagatgtggaaccctggagtggaaggttctccagtgacagtgtcctgtgactgcaaa

SEQ ID NO: 3568 - DNA, 120 bp, Artificial Sequence
  ENSG00000005102_18 (sequence is synthesized)
aggggacaagaaaatccctcttcctccatgggatggatttaagctcttgctgtgtgttctacaaatgctgttattgtgggaggaaatgctaggtttttgtgtgtggactgcccagacctc

SEQ ID NO: 3569 - DNA, 120 bp, Artificial Sequence
  ENSG00000005102_19 (sequence is synthesized)
agccaggtcttctggagatgacatttgaggactgatggccaaagagcatgggggactgaagccctggctgcctcagcgctctgtctcccaacaccagctggtgttgcagagggaggtcaa

SEQ ID NO: 3570 - DNA, 120 bp, Artificial Sequence
  ENSG00000005102_20 (sequence is synthesized)
cgtgagtttggatctcttgtacgcagatgtaatcattcacatgtaaaaataaccccacctccccaccccaaaaagggcaagagctgtggaaaatgattgccaaatgagatggctggttag

SEQ ID NO: 3571 - DNA, 120 bp, Artificial Sequence
  ENSG00000005102_21 (sequence is synthesized)
agcatgattttttctaaagcatacttcatatattttcttaagattacatcaagctaattgtgcgagctcaattcactttgtaagaaaactctcggagaaataaaatcaataaaaagcaaa

SEQ ID NO: 3572 - DNA, 120 bp, Artificial Sequence
  ENSG00000005108_0 (sequence is synthesized)
attctgcgaggaatggcagcggcagcagcatccccgccagaggcggcggcggcggcggcagcggccacggccaccaccgcggacgctattgttccctggtgttagacgcgctctccctcc

SEQ ID NO: 3573 - DNA, 120 bp, Artificial Sequence
  ENSG00000005108_1 (sequence is synthesized)
ttctcatctgaagcgaacaatagcaggaaagagctttgctttctgtactctttgaaaagacgttccaagagcggagaaaaattccctgccgagcgtgctacggctctggaccctggagtg

SEQ ID NO: 3574 - DNA, 80 bp, Artificial Sequence
  ENSG00000005108_2 (sequence is synthesized)
gaccctggagtggctgcaggcggcatggggctgcaagccaggcgctgggcgtccgggagccggggcgctgcggggccgcg

SEQ ID NO: 3575 - DNA, 120 bp, Artificial Sequence
  ENSG00000005108_3 (sequence is synthesized)
ctgctgctgctacgcccgggcgccggcagggctgcggcgcagggcgaggcggaggcgcccaccctctatctgtggaagactggtccatggggccgatgtatgggagatgaatgtggtccc

SEQ ID NO: 3576 - DNA, 120 bp, Artificial Sequence
  ENSG00000005108_4 (sequence is synthesized)
ggaggcatccaaacgagggctgtgtggtgtgctcatgtggagggatggactacactgcatactaactgtaagcaggccgagagacccaataaccagcagaattgtttcaaagtttgcgat

SEQ ID NO: 3577 - DNA, 120 bp, Artificial Sequence
  ENSG00000005108_5 (sequence is synthesized)
tggcacaaagagttgtacgactggagactgggaccttggaatcagtgtcagcccgtgatttcaaaaagcctagagaaacctcttgagtgcattaagggggaagaaggtattcaggtgagg

SEQ ID NO: 3578 - DNA, 120 bp, Artificial Sequence
  ENSG00000005108_6 (sequence is synthesized)
gagatagcgtgcatccagaaagacaaagacattcctgcggaggatatcatctgtgagtactttgagcccaagcctctcctggagcaggcttgcctcattccttgccagcaagattgcatc

SEQ ID NO: 3579 - DNA, 120 bp, Artificial Sequence
  ENSG00000005108_7 (sequence is synthesized)
gtgtctgaattttctgcctggtccgaatgctccaagacctgcggcagcgggctccagcaccggacgcgtcatgtggtggcgcccccgcagttcggaggctctggctgtccaaacctgacg

SEQ ID NO: 3580 - DNA, 120 bp, Artificial Sequence
  ENSG00000005108_8 (sequence is synthesized)
gagttccaggtgtgccaatccagtccatgcgaggccgaggagctcaggtacagcctgcatgtggggccctggagcacctgctcaatgccccactcccgacaagtaagacaagcaaggaga

SEQ ID NO: 3581 - DNA, 120 bp, Artificial Sequence
  ENSG00000005108_9 (sequence is synthesized)
cgcgggaagaataaagaacgggaaaaggaccgcagcaaaggagtaaaggatccagaagcccgcgagcttattaagaaaaagagaaacagaaacaggcagaacagacaagagaacaaatat

SEQ ID NO: 3582 - DNA, 120 bp, Artificial Sequence
  ENSG00000005108_10 (sequence is synthesized)
tgggacatccagattggatatcagaccagagaggttatgtgcattaacaagacggggaaagctgctgatttaagcttttgccagcaagagaagcttccaatgaccttccagtcctgtgtg

SEQ ID NO: 3583 - DNA, 120 bp, Artificial Sequence
  ENSG00000005108_11 (sequence is synthesized)
atcaccaaagagtgccaggtttccgagtggtcagagtggagcccctgctcaaaaacatgccatgacatggtgtcccctgcaggcactcgtgtaaggacacgaaccatcaggcagtttccc

SEQ ID NO: 3584 - DNA, 120 bp, Artificial Sequence
  ENSG00000005108_12 (sequence is synthesized)
attggcagtgaaaaggagtgtccagaatttgaagaaaaagaaccctgtttgtctcaaggagatggagttgtcccctgtgccacgtatggctggagaactacagagtggactgagtgccgt

SEQ ID NO: 3585 - DNA, 120 bp, Artificial Sequence
  ENSG00000005108_13 (sequence is synthesized)
gtggaccctttgctcagtcagcaggacaagaggcgcggcaaccagacggccctctgtggagggggcatccagacccgagaggtgtactgcgtgcaggccaacgaaaacctcctctcacaa

SEQ ID NO: 3586 - DNA, 120 bp, Artificial Sequence
  ENSG00000005108_14 (sequence is synthesized)
ttaagtacccacaagaacaaagaagcctcaaagccaatggacttaaaattatgcactggacctatccctaatactacacagctgtgccacattccttgtccaactgaatgtgaagtttca

SEQ ID NO: 3587 - DNA, 120 bp, Artificial Sequence
  ENSG00000005108_15 (sequence is synthesized)
ccttggtcagcttggggaccttgtacttatgaaaactgtaatgatcagcaagggaaaaaaggcttcaaactgaggaagcggcgcattaccaatgagcccactggaggctctggggtaacc

SEQ ID NO: 3588 - DNA, 120 bp, Artificial Sequence
  ENSG00000005108_16 (sequence is synthesized)
ggaaactgccctcacttactggaagccattccctgtgaagagcctgcctgttatgactggaaagcagtgagactgggaaactgcgagccagataacggaaaggagtgtggtccaggcacg

SEQ ID NO: 3589 - DNA, 120 bp, Artificial Sequence
  ENSG00000005108_17 (sequence is synthesized)
caagttcaagaggttgtgtgcatcaacagtgatggagaagaagttgacagacagctgtgcagagatgccatcttccccatccctgtggcctgtgatgccccatgcccgaaagactgtgtg

SEQ ID NO: 3590 - DNA, 120 bp, Artificial Sequence
  ENSG00000005108_18 (sequence is synthesized)
ctcagcacatggtctacgtggtcctcctgctcacacacctgctcagggaaaacgacagaagggaaacagatacgagcacgatccattctggcctatgcgggtgaagaaggtggaattcgc

SEQ ID NO: 3591 - DNA, 120 bp, Artificial Sequence
  ENSG00000005108_19 (sequence is synthesized)
tgtccaaatagcagtgctttgcaagaagtacgaagctgtaatgagcatccttgcacagtgtaccactggcaaactggtccctggggccagtgcattgaggacacctcagtatcgtccttc

SEQ ID NO: 3592 - DNA, 120 bp, Artificial Sequence
  ENSG00000005108_20 (sequence is synthesized)
aacacaactacgacttggaatggggaggcctcctgctctgtcggcatgcagacaagaaaagtcatctgtgtgcgagtcaatgtgggccaagtgggacccaaaaaatgtcctgaaagcctt

SEQ ID NO: 3593 - DNA, 120 bp, Artificial Sequence
  ENSG00000005108_21 (sequence is synthesized)
cgacctgaaactgtaaggccttgtctgcttccttgtaagaaggactgtattgtgaccccatatagtgactggacatcatgcccctcttcgtgtaaagaaggggactccagtatcaggaag

SEQ ID NO: 3594 - DNA, 120 bp, Artificial Sequence
  ENSG00000005108_22 (sequence is synthesized)
cagtctaggcatcgggtcatcattcagctgccagccaacgggggccgagactgcacagatcccctctatgaagagaaggcctgtgaggcacctcaagcgtgccaaagctacaggtggaag

SEQ ID NO: 3595 - DNA, 120 bp, Artificial Sequence
  ENSG00000005108_23 (sequence is synthesized)
actcacaaatggcgcagatgccaattagtcccttggagcgtgcaacaagacagccctggagcacaggaaggctgtgggcctgggcgacaggcaagagccattacttgtcgcaagcaagat

SEQ ID NO: 3596 - DNA, 120 bp, Artificial Sequence
  ENSG00000005108_24 (sequence is synthesized)
ggaggacaggctggaatccatgagtgcctacagtatgcaggccctgtgccagcccttacccaggcctgccagatcccctgccaggatgactgtcaattgaccagctggtccaagttttct

SEQ ID NO: 3597 - DNA, 120 bp, Artificial Sequence
  ENSG00000005108_25 (sequence is synthesized)
tcatgcaatggagactgtggtgcagttaggaccagaaagcgcactcttgttggaaaaagtaaaaagaaggaaaaatgtaaaaattcccatttgtatcccctgattgagactcagtattgt

SEQ ID NO: 3598 - DNA, 120 bp, Artificial Sequence
  ENSG00000005108_26 (sequence is synthesized)
ccttgtgacaaatataatgcacaacctgtggggaactggtcagactgtattttaccagagggaaaagtggaagtgttgctgggaatgaaagtacaaggagacatcaaggaatgcggacaa

SEQ ID NO: 3599 - DNA, 120 bp, Artificial Sequence
  ENSG00000005108_27 (sequence is synthesized)
ggatatcgttaccaagcaatggcatgctacgatcaaaatggcaggcttgtggaaacatctagatgtaacagccatggttacattgaggaggcctgcatcatcccctgcccctcagactgc

SEQ ID NO: 3600 - DNA, 120 bp, Artificial Sequence
  ENSG00000005108_28 (sequence is synthesized)
aagctcagtgagtggtccaactggtcgcgctgcagcaagtcctgtgggagtggtgtgaaggttcgttctaaatggctgcgtgaaaaaccatataatggaggaaggccttgccccaaactg

SEQ ID NO: 3601 - DNA, 120 bp, Artificial Sequence
  ENSG00000005108_29 (sequence is synthesized)
gaccatgtcaaccaggcacaggtgtatgaggttgtcccatgccacagtgactgcaaccagtacctatgggtcacagagccctggagcatctgcaaggtgacctttgtgaatatgcgggag

SEQ ID NO: 3602 - DNA, 120 bp, Artificial Sequence
  ENSG00000005108_30 (sequence is synthesized)
aactgtggagagggcgtgcaaacccgaaaagtgagatgcatgcagaatacagcagatggcccttctgaacatgtagaggattacctctgtgacccagaagagatgcccctgggctctaga

SEQ ID NO: 3603 - DNA, 120 bp, Artificial Sequence
  ENSG00000005108_31 (sequence is synthesized)
gtgtgcaaattaccatgccctgaggactgtgtgatatctgaatggggtccatggacccaatgtgttttgccttgcaatcaaagcagtttccggcaaaggtcagctgatcccatcagacaa

SEQ ID NO: 3604 - DNA, 120 bp, Artificial Sequence
  ENSG00000005108_32 (sequence is synthesized)
ccagctgatgaaggaagatcttgccctaatgctgttgagaaagaaccctgtaacctgaacaaaaactgctaccactatgattataatgtaacagactggagtacatgtcagctgagtgag

SEQ ID NO: 3605 - DNA, 120 bp, Artificial Sequence
  ENSG00000005108_33 (sequence is synthesized)
aaggcagtttgtggaaatggaataaaaacaaggatgttggattgtgttcgaagtgatggcaagtcagttgacctgaaatattgtgaagcgcttggcttggagaagaactggcagatgaac

SEQ ID NO: 3606 - DNA, 120 bp, Artificial Sequence
  ENSG00000005108_34 (sequence is synthesized)
acgtcctgcatggtggaatgccctgtgaactgtcagctttctgattggtctccttggtcagaatgttctcaaacatgtggcctcacaggaaaaatgatccgaagacgaacagtgacccag

SEQ ID NO: 3607 - DNA, 120 bp, Artificial Sequence
  ENSG00000005108_35 (sequence is synthesized)
ccctttcaaggtgatggaagaccatgcccttccctgatggaccagtccaaaccctgcccagtgaagccttgttatcggtggcaatatggccagtggtctccatgccaagtgcaggaggcc

SEQ ID NO: 3608 - DNA, 120 bp, Artificial Sequence
  ENSG00000005108_36 (sequence is synthesized)
cagtgtggagaagggaccagaacaaggaacatttcttgtgtagtaagtgatgggtcagctgatgatttcagcaaagtggtggatgaggaattctgtgctgacattgaactcattatagat

SEQ ID NO: 3609 - DNA, 120 bp, Artificial Sequence
  ENSG00000005108_37 (sequence is synthesized)
ggtaataaaaatatggttctggaggaatcctgcagccagccttgcccaggtgactgttatttgaaggactggtcttcctggagcctgtgtcagctgacctgtgtgaatggtgaggatcta

SEQ ID NO: 3610 - DNA, 120 bp, Artificial Sequence
  ENSG00000005108_38 (sequence is synthesized)
ggctttggtggaatacaggtcagatccagaccggtgattatacaagaactagagaatcagcatctgtgcccagagcagatgttagaaacaaaatcatgttatgatggacagtgctatgaa

SEQ ID NO: 3611 - DNA, 120 bp, Artificial Sequence
  ENSG00000005108_39 (sequence is synthesized)
tataaatggatggccagtgcttggaagggctcttcccgaacagtgtggtgtcaaaggtcagatggtataaatgtaacagggggctgcttggtgatgagccagcctgatgccgacaggtct

SEQ ID NO: 3612 - DNA, 120 bp, Artificial Sequence
  ENSG00000005108_40 (sequence is synthesized)
tgtaacccaccgtgtagtcaaccccactcgtactgtagcgagacaaaaacatgccattgtgaagaagggtacactgaagtcatgtcttctaacagcacccttgagcaatgcacacttatc

SEQ ID NO: 3613 - DNA, 120 bp, Artificial Sequence
  ENSG00000005108_41 (sequence is synthesized)
cccgtggtggtattacccaccatggaggacaaaagaggagatgtgaaaaccagtcgggctgtacatccaacccaaccctccagtaacccagcaggacggggaaggacctggtttctacag

SEQ ID NO: 3614 - DNA, 120 bp, Artificial Sequence
  ENSG00000005108_42 (sequence is synthesized)
ccatttgggccagatgggagactaaagacctgggtttacggtgtagcagctggggcatttgtgttactcatctttattgtctccatgatttatctagcttgcaaaaagccaaagaaaccc

SEQ ID NO: 3615 - DNA, 120 bp, Artificial Sequence
  ENSG00000005108_43 (sequence is synthesized)
caaagaaggcaaaacaaccgactgaaacctttaaccttagcctatgatggagatgccgacatgtaacatataacttttcctggcaacaaccagtttcggctttctgacttcatagatgtc

SEQ ID NO: 3616 - DNA, 120 bp, Artificial Sequence
  ENSG00000005108_44 (sequence is synthesized)
ccactggagatatttaagacagtaccacttatatacagaccatcaaccgtgagaattataggagatttagctgaatacatgctgcattctgaaagttttatgtcatcttttctgaaatct

SEQ ID NO: 3617 - DNA, 120 bp, Artificial Sequence
  ENSG00000005108_45 (sequence is synthesized)
accgactgaaaaaccactttcatctctaaaaaataatggtggaattggccagttaggatgcctgatacaagaccgtctgcagtgttaatccataaaacttcctagcatgaagagtttcta

SEQ ID NO: 3618 - DNA, 120 bp, Artificial Sequence
  ENSG00000005108_46 (sequence is synthesized)
ccaagatctccacaatactatggtcaaattaacatgtgtactcagttgaatgacacacattatgtcagattatgtacttgctaataagcaattttaacaatgcataacaaataaactcta

SEQ ID NO: 3619 - DNA, 120 bp, Artificial Sequence
  ENSG00000005108_47 (sequence is synthesized)
agctaagcagaaaatccactgaataaattcagcatcttggtggtcgatggtagattttattgacctgcatttcagagacaaagcctcttttttaagacttcttgtctctctccaaagtaa

SEQ ID NO: 3620 - DNA, 120 bp, Artificial Sequence
  ENSG00000005108_48 (sequence is synthesized)
gaatgctggacaagtactagtgtcttagaagaacgagtcctcaagttcagtattttatagtggtaattgtctggaaaactaatttacttgtgttaatacaatacgtttctactttccctg

SEQ ID NO: 3621 - DNA, 120 bp, Artificial Sequence
  ENSG00000005108_49 (sequence is synthesized)
attttcaaactggttgcctgcatcttttttgctatatggaaggcacatttttgcactatattagtgcagcacgataggcgcttaaccagtattgccatagaaactgcctcttttcatgtg

SEQ ID NO: 3622 - DNA, 120 bp, Artificial Sequence
  ENSG00000005108_50 (sequence is synthesized)
ggatgaagacatctgtgccaagagtggcatgaagacatttgcaagttcttgtatcctgaagagagtaaagttcagtttggatggcagcaagatgaaatcagctattacacctgctgtaca

SEQ ID NO: 3623 - DNA, 120 bp, Artificial Sequence
  ENSG00000005108_51 (sequence is synthesized)
cacacttcctcatcactgcagccattgtgaaattgacaacatggcggtaatttaagtgttgaagtccctaaccccttaaccctctaaaaggtggattcctctagttggtttgtaattgtt

SEQ ID NO: 3624 - DNA, 120 bp, Artificial Sequence
  ENSG00000005108_52 (sequence is synthesized)
ctttgaaggctgtttatgactagatttttatatttgttatctttgttaagaaaaaaaaagaaaaaggaactggatgtctttttaattttgagcagatggagaaaataaataatgtatcaa

SEQ ID NO: 3625 - DNA, 120 bp, Artificial Sequence
  ENSG00000005108_53 (sequence is synthesized)
tgacctttgtaactaaaggaaatcaaaattatatgttgatttttctttctctctgatttcccagtttcagattgaatgtctgtcttgcaggcagttatttcaaaatccatagtcttttgc

SEQ ID NO: 3626 - DNA, 120 bp, Artificial Sequence
  ENSG00000005108_54 (sequence is synthesized)
ctttctcactggcaaaatttgaagcaatctctctcttcaatgtatgatttcaaaactaaaattttaaaagagaagaataaatatcttatccaagacttcattgcatatctagagcaagag

SEQ ID NO: 3627 - DNA, 120 bp, Artificial Sequence
  ENSG00000005108_55 (sequence is synthesized)
tggcaaactttttctgtaaaggactatatagaaaatattttccacaaggtctatgttgcaacttctcaactttgccattctgctaatgcaatcttagtaaataaaagaatgaacataact

SEQ ID NO: 3628 - DNA, 120 bp, Artificial Sequence
  ENSG00000005108_56 (sequence is synthesized)
gttttcctatataacttcccttacaaaaacagccagtaggccacctttgcaggtcatattttgctgacccctggtctggatgttttttaatgctagctctccatggtgtcatctttcgtt

SEQ ID NO: 3629 - DNA, 120 bp, Artificial Sequence
  ENSG00000005108_57 (sequence is synthesized)
ttcattcatttttcaaaggtgagaatttacagtcattacatttcccactgtatcagaagtagctgtattttctacagatgtagccctgggaatggcacagtggaacaatatttaactaac

SEQ ID NO: 3630 - DNA, 120 bp, Artificial Sequence
  ENSG00000005108_58 (sequence is synthesized)
tcagcagacttcttgcaaatgaaaagaaaactcaaaaggtgccattaaaaagcaataccattttcaggcaacattattgcaacaacctttgtgagagaggacactagcttttcaggatat

SEQ ID NO: 3631 - DNA, 120 bp, Artificial Sequence
  ENSG00000005108_59 (sequence is synthesized)
ttgaaaaataatataactaacatgctattttatcttaaacagctgtgttcctgtaaaagtgttttggattagaaggtatttttaccttcatactggagtatgaactccccctgctgttca

SEQ ID NO: 3632 - DNA, 120 bp, Artificial Sequence
  ENSG00000005108_60 (sequence is synthesized)
ttagagtatttgcaaagattacaaaagacatcaggttaggatgtcattgtccccaaaatgaaaatatttgtatgtatttcaataagaactaaatgcagtaagcgctaattcctcattcaa

SEQ ID NO: 3633 - DNA, 120 bp, Artificial Sequence
  ENSG00000005108_61 (sequence is synthesized)
tattcactatattaggaaatgtaaatcatttcaaagagaacaggtagtcaggaagatgaaaattttactttaaagcaaggatttaaacaaagaaaaccataaaaacaaagtccattttat

SEQ ID NO: 3634 - DNA, 120 bp, Artificial Sequence
  ENSG00000005108_62 (sequence is synthesized)
ctgttttattaaagaggaagaaaaaataatattgttactttaaaactgtgattgtcaatatatataatcaggggtcttccagataatcctaaagttgatctctttgaataaaataaactc

SEQ ID NO: 3635 - DNA, 120 bp, Artificial Sequence
  ENSG00000005108_63 (sequence is synthesized)
catttgtccaaaatagttaagaaagactctattgtggttacttgaaaaattcagctaaccctcttatgaaatgtgtgcaacacctattaattttgaaatgtgggatagaatacctactaa

SEQ ID NO: 3636 - DNA, 120 bp, Artificial Sequence
  ENSG00000005108_64 (sequence is synthesized)
tgggatagaatacctactaaagctatatttaaggtattgtaaaatgtcattaattcagaaaagattagtatcatcctacctataagaattaaattagcaaatcaaaattatagaatgtta

SEQ ID NO: 3637 - DNA, 120 bp, Artificial Sequence
  ENSG00000005108_65 (sequence is synthesized)
atatatacacacacacacacacacacccatatatatgagagagaggaaattaggttcaacatgacctaatattagagaacatattggaaggtcactgtttgttaggataaataaatactg

SEQ ID NO: 3638 - DNA, 120 bp, Artificial Sequence
  ENSG00000005108_66 (sequence is synthesized)
atattggaaggtcactgtttgttaggataaataaatactggataacctcgttagaaaggtggaaagaggagaacgtagcaatctggctattttggacaaagggaaggttattatattcat

SEQ ID NO: 3639 - DNA, 120 bp, Artificial Sequence
  ENSG00000005108_67 (sequence is synthesized)
gtttataacatgaaaatggccttatttttgtttctgacatgagacaataatgagttaaatattttattggaatttcatcaaaaccttatttttactgttccttctaaaaatttgggaggg

SEQ ID NO: 3640 - DNA, 120 bp, Artificial Sequence
  ENSG00000005108_68 (sequence is synthesized)
gaatatagtagtaacttctctattgacacttttacctcaccgagggggtaaaagatgtagaactgctgttccctagaatgaaggtctgttgtttggtttttaaaaaaagaagagcagaaa

SEQ ID NO: 3641 - DNA, 120 bp, Artificial Sequence
  ENSG00000005108_69 (sequence is synthesized)
aagtttgacacagtattatatgattttgctggactatttcactagaaaccacgtagaataggactaactgatctcttttgaaaggggctgatttgcttattcatcaataactaatccaat

SEQ ID NO: 3642 - DNA, 120 bp, Artificial Sequence
  ENSG00000005108_70 (sequence is synthesized)
atgtggacagtaatcttaatttcaaagccttttttgaggatactacggtgtagcttaagtgaatttaaaaagagtgcataaaagcttgtttttaattacttataacaaagcacaaattac

SEQ ID NO: 3643 - DNA, 120 bp, Artificial Sequence
  ENSG00000005108_71 (sequence is synthesized)
ttctaacaaggcaaatatttattgacatataagacattctgctaggcattgtaaaaaaaaaaaaaaaagtaatggcttttgtatacataggtacttaagacagacatccaaaagaaggaa

SEQ ID NO: 3644 - DNA, 120 bp, Artificial Sequence
  ENSG00000005108_72 (sequence is synthesized)
aaaatgcttaatgagtgaagatagcactgaaacatgttgacttttactctaggtttgtttttagatggggttagtattttcccctacgtaatgtacatgtctttaggccacagtattagg

SEQ ID NO: 3645 - DNA, 120 bp, Artificial Sequence
  ENSG00000005108_73 (sequence is synthesized)
agtttgatttttccctgccccaccctcaggtaggtggcagtggtcattgtagcttaatcagacccctgttaagttcctgggcatttcaaggtaaattcacgtcttccttctcacagaaat

SEQ ID NO: 3646 - DNA, 120 bp, Artificial Sequence
  ENSG00000005108_74 (sequence is synthesized)
tgaatagacctctcacacacttatttacctcccccaacaacctgtatccttggccctttctgattttctctgcttggtctctttctactcttgacagctattcttacctacttcccacta

SEQ ID NO: 3647 - DNA, 120 bp, Artificial Sequence
  ENSG00000005108_75 (sequence is synthesized)
aacatgcccaattttttaattaaaaaaaaaagaattcctatatttccttccctattagaatcaaagtgtcactcactcagagtgtgaacatcctgatttacaccaaatccactggtcaaa

SEQ ID NO: 3648 - DNA, 120 bp, Artificial Sequence
  ENSG00000005108_76 (sequence is synthesized)
gaaatgaataaagggaaaaggaaaaatgtggaaggcatgcaggaaaaaaaaaaaaaaaaaagcccttttctgtaaaaatgtccatgcctacacttgctttagaccatcccatatcctcct

SEQ ID NO: 3649 - DNA, 120 bp, Artificial Sequence
  ENSG00000005108_77 (sequence is synthesized)
gcctccatctcgagtctttgttcacattccacaccacaagacagtgagggaggactgtacttttcagtaccatacagaagggagagcctgttctaaagctgacgtgggtctcaatagtac

SEQ ID NO: 3650 - DNA, 120 bp, Artificial Sequence
  ENSG00000005108_78 (sequence is synthesized)
atgagaagcacaattcccaaatgatctgggatctcctgtttataaatatattaccaaattcaagtgtgggttcttcttctatttccactgtaagattgagggtgttgaaaaaacagtagt

SEQ ID NO: 3651 - DNA, 120 bp, Artificial Sequence
  ENSG00000005108_79 (sequence is synthesized)
ccttgagcaaatctgtgaggaatcttgtcagaatgtgatctttcctgggactagtttagttgtgagaactacatctgcttgttctgggaataagggtctccccaggtcctgccctcaggt

SEQ ID NO: 3652 - DNA, 120 bp, Artificial Sequence
  ENSG00000005108_80 (sequence is synthesized)
ggccctggctgcaggacaggatttcaggtatcagaaactggtgtgtgagccaagcaaatagttatccatttataaaaaggatggtttgcagtgtgttataataattttatatctagcagg

SEQ ID NO: 3653 - DNA, 120 bp, Artificial Sequence
  ENSG00000005108_81 (sequence is synthesized)
gacaatgaaaaatggttatgtctacattattaaatgaatgaaactaatgctaaacagttaattttgcatttttatttttctgtgtttctaccaagtcagatcttaaaaatgggcagtata

SEQ ID NO: 3654 - DNA, 120 bp, Artificial Sequence
  ENSG00000005108_82 (sequence is synthesized)
tgaagagctttagtttgtgggagtcatgttttcagtgatcaaaaatctctatattatttagaatataattgtcagtcttgttgtgttttgtagatttattgtttttaagccatagtttct

SEQ ID NO: 3655 - DNA, 120 bp, Artificial Sequence
  ENSG00000005108_83 (sequence is synthesized)
agattacctacttttaaccctcaagtaaacttttccctatttttcagaaatctgtttgtgtttatttttagaaagtaaacatttagattccttttctggtactttttttctccatttcta

SEQ ID NO: 3656 - DNA, 120 bp, Artificial Sequence
  ENSG00000005108_84 (sequence is synthesized)
acagatttgaagagatcagtatctatcattgtaaaatataactttattaaaatttgcaatctgtctttctataaattattattccctaaatgtgtattttatgttaatttaactacctga

SEQ ID NO: 3657 - DNA, 120 bp, Artificial Sequence
  ENSG00000005108_85 (sequence is synthesized)
ctgaatatttattttgtttaaataaggaggcagctgtctaagaatttttgttaatattactttgtaaattgcgtaatgtaatttattttacattatgtacatttcctttttaacgcacaa

SEQ ID NO: 3658 - DNA, 120 bp, Artificial Sequence
  ENSG00000005108_86 (sequence is synthesized)
aatgtctatgtacaattaactacagatttgcaaataatgtcactaagctttattcagtcaatacagatggcatgtgaagatgtaatatgcttttttacattttcatatgggttatttgta

SEQ ID NO: 3659 - DNA, 120 bp, Artificial Sequence
  ENSG00000005108_87 (sequence is synthesized)
aataactatattgctgacaaacataaatacggaaatcattttcattctaatcatgtgtatctgtgttttgatttgcaccaattgcttcttaaatatggattaaaatttttttccagtgaa

SEQ ID NO: 3660 - DNA, 120 bp, Artificial Sequence
  ENSG00000005108_88 (sequence is synthesized)
gacagagtgcagccttttcctcccctaatagaaaagccattgccctcttttcctcccctaatagaaaagccattgccctcttttcctccacccttaagaagacctgcatctgttggacca

SEQ ID NO: 3661 - DNA, 120 bp, Artificial Sequence
  ENSG00000005108_89 (sequence is synthesized)
acagacaactatccggcttacggccaggggagcccctgcagctgcacagaaccagtttcttatgtatctggcggtaattgggaaagcttctgagaaagtccatggggccgatgtatggga

SEQ ID NO: 3662 - DNA, 120 bp, Artificial Sequence
  ENSG00000005156_0 (sequence is synthesized)
gctctaggacccggatttaaagagacaggcgctccaaccgtcgtgggctgcccgcggcctgtaatgagcaagttccgaggcctacggtgagcgccggagccggagaggcagctatatgtc

SEQ ID NO: 3663 - DNA, 120 bp, Artificial Sequence
  ENSG00000005156_1 (sequence is synthesized)
tttggctttcaagatcttctttccacaaaccctccgtgcactcagccgaaaagaactgtgcctattccgaaaacatcactggcgtgatgtaagacaattcagccagtggtcagaaacaga

SEQ ID NO: 3664 - DNA, 120 bp, Artificial Sequence
  ENSG00000005156_2 (sequence is synthesized)
tctgcttcatggacatcccctcttcctgagaagaaagcctgttctatcattccagggaagccatctaagatcacgtgccacctaccttgttttcttgccagggttgcatgtgggactctg

SEQ ID NO: 3665 - DNA, 120 bp, Artificial Sequence
  ENSG00000005156_3 (sequence is synthesized)
cagtggcccctgtgagatggctgagcaacggttctgtgtggactatgccaagcgtggcacagctggctgcaaaaaatgcaaggaaaagattgtgaagggcgtatgccgaattggcaaagt

SEQ ID NO: 3666 - DNA, 120 bp, Artificial Sequence
  ENSG00000005156_4 (sequence is synthesized)
ggtgcccaatcccttctcagagtctgggggtgatatgaaagagtggtaccacattaaatgcatgtttgagaaactagagcgggcccgggccaccacaaaaaaaatcgaggacctcacaga

SEQ ID NO: 3667 - DNA, 120 bp, Artificial Sequence
  ENSG00000005156_5 (sequence is synthesized)
gctggaaggctgggaagagctggaagataatgagaaggaacagataacccagcacattgcagatctgtcttctaaggcagcaggtacaccaaagaagaaagctgttgtccaggctaagtt

SEQ ID NO: 3668 - DNA, 120 bp, Artificial Sequence
  ENSG00000005156_6 (sequence is synthesized)
gacaaccactggccaggtgacttctccagtgaaaggcgcctcatttgtcaccagtaccaatccccggaaattttctggcttttcagccaagcccaacaactctggggaagccccctcgag

SEQ ID NO: 3669 - DNA, 120 bp, Artificial Sequence
  ENSG00000005156_7 (sequence is synthesized)
ccccacccctaagagaagtctgtcttcaagcaaatgtgaccccaggcataaggactgtctgctacgggagtttcgaaagttatgcgccatggtggccgataatcctagctacaacacgaa

SEQ ID NO: 3670 - DNA, 120 bp, Artificial Sequence
  ENSG00000005156_8 (sequence is synthesized)
gacccagatcatccaggacttccttcggaaaggctcagcaggagatggtttccacggtgatgtgtacctaacagtgaagctgctgctgccaggagtcattaagactgtttacaacttgaa

SEQ ID NO: 3671 - DNA, 120 bp, Artificial Sequence
  ENSG00000005156_9 (sequence is synthesized)
cgataagcagattgtgaagcttttcagtcgcatttttaactgcaacccagatgatatggcacgggacctagagcagggtgacgtgtcagagacaatcagagtcttctttgagcagagcaa

SEQ ID NO: 3672 - DNA, 120 bp, Artificial Sequence
  ENSG00000005156_10 (sequence is synthesized)
gtctttccccccagctgccaagagcctccttaccatccaggaagtggatgagttccttctgcggctgtccaagctcaccaaggaggatgagcagcaacaggccctacaggacattgcctc

SEQ ID NO: 3673 - DNA, 120 bp, Artificial Sequence
  ENSG00000005156_11 (sequence is synthesized)
caggtgtacagccaatgaccttaaatgcatcatcaggttgatcaaacatgatctgaagatgaactcaggtgcaaaacatgtgttagacgcccttgaccccaatgcctatgaagccttcaa

SEQ ID NO: 3674 - DNA, 120 bp, Artificial Sequence
  ENSG00000005156_12 (sequence is synthesized)
agcctcgcgcaacctgcaggatgtggtggagcgggtccttcacaacgcgcaggaggtggagaaggagccgggccagagacgagctctgagcgtccaggcctcgctgatgacacctgtgca

SEQ ID NO: 3675 - DNA, 120 bp, Artificial Sequence
  ENSG00000005156_13 (sequence is synthesized)
gcccatgttggcggaggcctgcaagtccgttgagtatgcaatgaagaaatgtcccaatggcatgttctctgagatcaagtacgatggagagcgagtccaggtgcataagaatggagacca

SEQ ID NO: 3676 - DNA, 120 bp, Artificial Sequence
  ENSG00000005156_14 (sequence is synthesized)
cttcagctacttcagccgcagtctcaagcccgtccttcctcacaaggtggcccactttaaggactacattccccaggcttttcctgggggccacagcatgatcttggattctgaagtgct

SEQ ID NO: 3677 - DNA, 120 bp, Artificial Sequence
  ENSG00000005156_15 (sequence is synthesized)
tctgattgacaacaagacaggcaaaccactgccctttgggactctgggagtacacaagaaagcagccttccaggatgctaatgtctgcctgtttgtttttgattgtatctactttaatga

SEQ ID NO: 3678 - DNA, 120 bp, Artificial Sequence
  ENSG00000005156_16 (sequence is synthesized)
tgtcagcttgatggacagacctctgtgtgagcggcggaagtttcttcatgacaacatggttgaaattccaaaccggatcatgttctcagaaatgaagcgagtcacaaaagctttggactt

SEQ ID NO: 3679 - DNA, 120 bp, Artificial Sequence
  ENSG00000005156_17 (sequence is synthesized)
ggctgacatgataacccgggtgatccaggagggattggaggggctggtgctgaaggatgtgaagggtacatatgagcctgggaagcggcactggctgaaagtgaagaaagactatttgaa

SEQ ID NO: 3680 - DNA, 120 bp, Artificial Sequence
  ENSG00000005156_18 (sequence is synthesized)
cgagggggccatggccgacacagctgacctggtggtccttggagccttctatgggcaagggagcaaaggcggcatgatgtcaatcttcctcatgggctgctacgaccctggcagccagaa

SEQ ID NO: 3681 - DNA, 120 bp, Artificial Sequence
  ENSG00000005156_19 (sequence is synthesized)
gtggtgcacagtcaccaagtgtgcaggaggccatgatgatgccacgcttgcccgcctgcagaatgaactagacatggtgaagatcagcaaggaccccagcaaaatacccagctggttgaa

SEQ ID NO: 3682 - DNA, 120 bp, Artificial Sequence
  ENSG00000005156_20 (sequence is synthesized)
ggtcaacaagatctactatcctgacttcatcgtcccagacccaaagaaagctgccgtgtgggagatcacaggggctgaattctccaaatcggaggctcatacagctgacgggatctccat

SEQ ID NO: 3683 - DNA, 120 bp, Artificial Sequence
  ENSG00000005156_21 (sequence is synthesized)
ccgattccctcgctgcacccgaatccgagatgataaggactggaaatctgccactaaccttccccaactcaaggaactgtaccagttgtccaaggagaaggcagacttcactgtagtggc

SEQ ID NO: 3684 - DNA, 120 bp, Artificial Sequence
  ENSG00000005156_22 (sequence is synthesized)
tggagatgaggggagctccactacagggggtagcagtgaagagaataagggtccctcagggtctgctgtgtcccgcaaggcccccagcaagccctcagccagtaccaagaaagcagaagg

SEQ ID NO: 3685 - DNA, 120 bp, Artificial Sequence
  ENSG00000005156_23 (sequence is synthesized)
gaagctgagtaactccaacagcaaagatggcaacatgcagactgcaaagccttccgctatgaaggtgggggagaagctggccacaaagtcttctccagtgaaagtaggggagaagcggaa

SEQ ID NO: 3686 - DNA, 120 bp, Artificial Sequence
  ENSG00000005156_24 (sequence is synthesized)
agctgctgatgagacgctgtgccaaacaaaggtattgctggacatcttcactggggtgcggctttacttgccaccctccacaccagacttcagccgtctcagacgctactttgtggcatt

SEQ ID NO: 3687 - DNA, 120 bp, Artificial Sequence
  ENSG00000005156_25 (sequence is synthesized)
cgacggggacctggtacaggaatttgatatgacttcagccacgcacgtgctgggtagcagggacaagaaccctgcggcccagcaggtctccccagagtggatttgggcatgtatccggaa

SEQ ID NO: 3688 - DNA, 120 bp, Artificial Sequence
  ENSG00000005156_26 (sequence is synthesized)
acggagactggtagctccctgctaggtttgctgtcttccctctccctcaggccatactctcctttaccatactactggactggactcaggctggaggcagatagacacagtataggggga

SEQ ID NO: 3689 - DNA, 120 bp, Artificial Sequence
  ENSG00000005156_27 (sequence is synthesized)
atgggcttgcttctcccaaacccaccagttctccactgtctcttctggaccaggaattagttgctgtgggtgccacagctgaagtcagtttgtcttgctggtttaaatagatctttcaga

SEQ ID NO: 3690 - DNA, 120 bp, Artificial Sequence
  ENSG00000005156_28 (sequence is synthesized)
gctgggtgctgggtttgccatctttttgttttctttgaaaagcagcttagttaccctttttataaataaaatatcttgcagttatctttgtcctttccccacctacacccccaataattt

SEQ ID NO: 3691 - DNA, 120 bp, Artificial Sequence
  ENSG00000005156_29 (sequence is synthesized)
ccctagagattaaggagtaaaggctgggctatggcagctctgtccacaaagccttctctcccatccttgcctgttcctttgtacttccaggctcattttaaagttgtatttaaaggactg

SEQ ID NO: 3692 - DNA, 120 bp, Artificial Sequence
  ENSG00000005156_30 (sequence is synthesized)
ccctcggaaatgcttctgtttagcggaacttgtattcagcctgacacgctttgccaggaacaaacctcatgtgaaagaaaacaaaatgaatttttttactttcttctctgtgttctccta

SEQ ID NO: 3693 - DNA, 120 bp, Artificial Sequence
  ENSG00000005156_31 (sequence is synthesized)
ttacatggtgaggatccccagtttgaagggaggggactagggtcaggtaggaaaatggggcctttatgaagaaaggggaggttatttgggccactcctctggagggatagagggctccag

SEQ ID NO: 3694 - DNA, 120 bp, Artificial Sequence
  ENSG00000005156_32 (sequence is synthesized)
gaagatctgcatccccaaaacctggaaacaagactgttctttaagaataaaaatccacatggggcttgaggccaagaacagcccttgttgccaccaacatggagactttgtaccatatcc

SEQ ID NO: 3695 - DNA, 120 bp, Artificial Sequence
  ENSG00000005156_33 (sequence is synthesized)
cattcttagtgctcgagtgttccaacctgaagttgaagaagccaccctggctgcacatgccatcagccatgactgtgtatgctctggtggtggtgtcttacttcctcatgactggaggaa

SEQ ID NO: 3696 - DNA, 120 bp, Artificial Sequence
  ENSG00000005156_34 (sequence is synthesized)
ggaaggatttgcatccagcttcctgtttacaatgggaggtttaggtttcataatgctggaccagtcgaatgcaccaaatatcccaaaactcaatcgattttttttcttctattcattgga

SEQ ID NO: 3697 - DNA, 120 bp, Artificial Sequence
  ENSG00000005156_35 (sequence is synthesized)
ttcgtctgtgtcctactgagttttttcatggctggagtattcatgtgaatgaaactgccgggctatctgatgggttagagcgcctttaagaagaaatcagtggatactggatttgctcct

SEQ ID NO: 3698 - DNA, 120 bp, Artificial Sequence
  ENSG00000005156_36 (sequence is synthesized)
gtcaatgaagttctaaaggctgtaccaatcctccaatatgaaatgtgggaaagaatgaagagcagcagtaaaagaaatacctagcgaaaaaaacaggaagcatattgaagctcggactag

SEQ ID NO: 3699 - DNA, 120 bp, Artificial Sequence
  ENSG00000005156_37 (sequence is synthesized)
aatttcttcttggtatcagagagacaagtttatcacagtatttttttttttcctgctgacctattgataataccaacaatgttgagtggcattttcttcttagtttttaatttcttaaag

SEQ ID NO: 3700 - DNA, 120 bp, Artificial Sequence
  ENSG00000005156_38 (sequence is synthesized)
aaaatatactccatatctgcagggaaaaaaataaaaatccacacctgagaacagatccatacaacctgcttacaaagaacagctcctgtgctacctgaggctgatttatttgaagaacaa

SEQ ID NO: 3701 - DNA, 120 bp, Artificial Sequence
  ENSG00000005156_39 (sequence is synthesized)
aaggaagagagacaatttagtgtagacaagtgctattcaatagaactttttgcagcagtggaaatatccataaatctgcagtatccaaccaaactagccacagacagctgctgagcaatt

SEQ ID NO: 3702 - DNA, 120 bp, Artificial Sequence
  ENSG00000005156_40 (sequence is synthesized)
gaaatgaagctggcacaactaaggaactgaagttcttattttaattcaacttcaaatggtcacatgtcactagtgactaccacactggacagtgcaggtgtagacggagttcagatcaga

SEQ ID NO: 3703 - DNA, 120 bp, Artificial Sequence
  ENSG00000005156_41 (sequence is synthesized)
ctcctgaaacttaatggctctaaccttaggcaagttacgttaacatctaagcctcaatccctccaagtagaatgggtgcacctaaatcatagggttgtcctgttgtcctgagcaacatta

SEQ ID NO: 3704 - DNA, 120 bp, Artificial Sequence
  ENSG00000005156_42 (sequence is synthesized)
tgtaaagcacttagcccagagcctagcacatagttatctagagttgggaacgtcactcctggtgtgcatgtccagaccctacccgggagaagggcctaacctatgactttagaaccctca

SEQ ID NO: 3705 - DNA, 120 bp, Artificial Sequence
  ENSG00000005156_43 (sequence is synthesized)
gttgcaggtgtgcatgttccagccaacactccactctgagtgcaggctcatcaggacaccatatggttgtaaactggctgccatgtcccaatccttccagctcttgagggtcagttctca

SEQ ID NO: 3706 - DNA, 120 bp, Artificial Sequence
  ENSG00000005156_44 (sequence is synthesized)
ccttatgaacaaattaacaggctctggacctataagatcaaggaccactgcgccccctggccaccccaccgcccccccccaactttgatctgattgactttggcttccacctactgttta

SEQ ID NO: 3707 - DNA, 120 bp, Artificial Sequence
  ENSG00000005156_45 (sequence is synthesized)
aaatgtgtatgttgggggagtagggacagcacgggggaggggtttactttcctgactctagcccaggacatttggtgtttttgaataggcaccattcagccttgcttcagtattaggaat

SEQ ID NO: 3708 - DNA, 120 bp, Artificial Sequence
  ENSG00000005156_46 (sequence is synthesized)
aagatactttttattccatcctctatggagacaaaaagctgctcctcctttgagtactgacctacatagatttccatttctctcttcagcctcaggccaaacaaacaaccggacagggca

SEQ ID NO: 3709 - DNA, 120 bp, Artificial Sequence
  ENSG00000005156_47 (sequence is synthesized)
gcagaacaaggctgtctcctcaggatcctgccaaaggcactgtcctctccaacctggacccagccccacttgcccttattggttgcttacacccagagtgcacactcacaggaaagggcc

SEQ ID NO: 3710 - DNA, 120 bp, Artificial Sequence
  ENSG00000005156_48 (sequence is synthesized)
tctgctggctgcaggtgatcatcttgtcccttctctgccttagtgtgtgttattgccatttcaatgtcagtggttttttatgtattttcttccagtctttgctgctgagatctgactgta

SEQ ID NO: 3711 - DNA, 120 bp, Artificial Sequence
  ENSG00000005156_49 (sequence is synthesized)
tatactattttgtatcctttcatgtatttctttcatgtatttcaatgcagccctcaacatcatcatcataaatctctccagcagaatgctggaggcctccctcttctgaacctctacatg

SEQ ID NO: 3712 - DNA, 120 bp, Artificial Sequence
  ENSG00000005156_50 (sequence is synthesized)
ctgctggctggcatcaagcagaggtcatcactgggtgctgaacaggtcagctccctagggcaatgtgagcaaagtgttgtggctcatcctcgatcctttatgcccttttggcaagattcc

SEQ ID NO: 3713 - DNA, 120 bp, Artificial Sequence
  ENSG00000005156_51 (sequence is synthesized)
tttctcttctcagtcacagcagatggacacataatcttgttctcccaggggctgcattctcagtagtcttttccctgctccttgggcgcctggtcagggaggtttgtacaagcctgcgca

SEQ ID NO: 3714 - DNA, 120 bp, Artificial Sequence
  ENSG00000005156_52 (sequence is synthesized)
gggaggtttgtacaagcctgcgcacacacagcagtctgtcacgaggctgggccaaccttttttttttttttaaacagactcttgctctgtcattcaggctggagtgcagtggtgcaatct

SEQ ID NO: 3715 - DNA, 89 bp, Artificial Sequence
  ENSG00000005156_53 (sequence is synthesized)
tgcaacctctgcttcccgggttcaggctaagacttaacaaacaggcacacaccatcactcgcagctaagtttttgtatttttagtagag

SEQ ID NO: 3716 - DNA, 75 bp, Artificial Sequence
  ENSG00000005156_54 (sequence is synthesized)
taagtttttgtatttttagtagagaccacgtttcgccatgttgtccagactggtctcaaactcctggcctcgagt

SEQ ID NO: 3717 - DNA, 120 bp, Artificial Sequence
  ENSG00000005156_55 (sequence is synthesized)
agtccagctgtactacagctgtatccaaaaggtaccatgtatctcccagggtaacctgaagacctaactgggcatactaactgtcctcagatttcagttctttaaggcccatctcttcta

SEQ ID NO: 3718 - DNA, 120 bp, Artificial Sequence
  ENSG00000005156_56 (sequence is synthesized)
gatcagtgtaaatatctgaactcacttggtgcttcaacccaattggtcttgggattcatcctttacctacccagctctcattctcttctaggttgttccatggcctcttccatatattac

SEQ ID NO: 3719 - DNA, 120 bp, Artificial Sequence
  ENSG00000005156_57 (sequence is synthesized)
atttgtggtcttgagcaagttagttagttacaacaacactgagcatcttgaccaaggtcacttggcccaaccacaggctaatcccaggccatgtgcacatcccaggattagcttgtggtt

SEQ ID NO: 3720 - DNA, 120 bp, Artificial Sequence
  ENSG00000005156_58 (sequence is synthesized)
tatcagttgtcaatttttttttttttttaatacagggtctcactctgtcaccctggctggagtgcggtggcgatcagagctcactgcagcttcaatctcctggctcaagtgatcctccca

SEQ ID NO: 3721 - DNA, 86 bp, Artificial Sequence
  ENSG00000005156_59 (sequence is synthesized)
tcctcccacctcagccttccaagtagttgggactacccacatgcaccaccatgcacggctaattttttggtttttttggggagaca

SEQ ID NO: 3722 - DNA, 80 bp, Artificial Sequence
  ENSG00000005156_60 (sequence is synthesized)
ggcgtgagccaccgcacccggcccttgtttgtttttttaagtagagacaaggtctcactacatcccaccttggcctccta

SEQ ID NO: 3723 - DNA, 120 bp, Artificial Sequence
  ENSG00000005156_61 (sequence is synthesized)
cctaaagtgtggaaattatagcatgaaccactgtcaggctcttttgtcagtcctatcaacctctaacatcctcgcaccagacaggacaggtgtctgtattgaaactttattacaaaatta

SEQ ID NO: 3724 - DNA, 120 bp, Artificial Sequence
  ENSG00000005156_62 (sequence is synthesized)
taaagcagagctctgtaacaaaataatacacatttgggtttgctttaacctccaagtaagtctgagaaaatcttaataaaagccacttgaagtaacaattcacatccaagagatttccac

SEQ ID NO: 3725 - DNA, 120 bp, Artificial Sequence
  ENSG00000005156_63 (sequence is synthesized)
aaatttatacaatgtatattgagcactagttcctgtacagcttattcttattagtttggatccaactattccaatgtattatgaaccagtcagctatctgtcttttgaaacaagtcttaa

SEQ ID NO: 3726 - DNA, 120 bp, Artificial Sequence
  ENSG00000005156_64 (sequence is synthesized)
ctgaaatctcagagtaatcagcaaaagctacggaataattctaagaattagatgtttccatatcattaaaaccaaggatccatgaggggcagaagggaggattcaaagatttaaaaaaaa

SEQ ID NO: 3727 - DNA, 120 bp, Artificial Sequence
  ENSG00000005156_65 (sequence is synthesized)
tcaaattttagaccttggttaaatattaactggaatgggatcttggaactcccaactttaatttggtgtaataaaaatgatgcaaaaaaaaaaaaaatcagggttgtttgacaccttttt

SEQ ID NO: 3728 - DNA, 120 bp, Artificial Sequence
  ENSG00000005156_66 (sequence is synthesized)
tcctaaagggaaaccttcaccaaaaggggataaaagatttaaaggcaaaatgagtaaacaacctcagttttaattcttactgaggttactaaccagctatcagtatattattttcgattt

SEQ ID NO: 3729 - DNA, 80 bp, Artificial Sequence
  ENSG00000005156_67 (sequence is synthesized)
gaggctcgcggctccccgggacccccacggggccgcgtgaggcggggaggccggcgcccgggctgtgttccctgtggaac

SEQ ID NO: 3730 - DNA, 120 bp, Artificial Sequence
  ENSG00000005156_68 (sequence is synthesized)
ccacggggccttctcgtaccctggcccggcgtgcgtcctcctgcgctgaaccgggagcgctcgggtgggactcagggagccttgatcacttcccgcctgcgtcccggacccggtggagga

SEQ ID NO: 3731 - DNA, 120 bp, Artificial Sequence
  ENSG00000005156_69 (sequence is synthesized)
aagcggcggcggccaggcctcagcgatttccttctcgggcccctgggctgcggcagttgtgaggagagctcagaacagcctccctcccccacaaccagcgcattcatggattccttgtaa

SEQ ID NO: 3732 - DNA, 120 bp, Artificial Sequence
  ENSG00000005156_70 (sequence is synthesized)
gggtgcacgctgcggtctgaaaagggaggaaatatcccttagtgtggcccttattcttcgcttctgacctgtttctggtttggatttttgtcttttgtttttctcctaaaaaggggctgg

SEQ ID NO: 3733 - DNA, 120 bp, Artificial Sequence
  ENSG00000005156_71 (sequence is synthesized)
aggttgtgttcccaaccttctgtacaagaagtttgaaagaggatgagcaaaggtgtttggggaacatcggctaaacctcttccctgcctgcagccactcctctgtcgtgggcagggtcag

SEQ ID NO: 3734 - DNA, 120 bp, Artificial Sequence
  ENSG00000005156_72 (sequence is synthesized)
gcaggcaggagatagaacagcccggcctagccaggagagactgcagggactcactcagctgctggccccaagtcaaaatttacattaaagggaaaagaccagtctgggtgtgggaatgca

SEQ ID NO: 3735 - DNA, 120 bp, Artificial Sequence
  ENSG00000005156_73 (sequence is synthesized)
gcattgagtttgtggtcagggtattgctggacatcttcactggggtgcggctttacttgccaccctccacaccagacttcagccgtctcagacgctactttgtggcattcgacggggacc

SEQ ID NO: 3736 - DNA, 120 bp, Artificial Sequence
  ENSG00000005156_74 (sequence is synthesized)
taactgcaacccagatgatatggcacgggacctagagcaggtcagaggaacgggagggagggtaggctacattccaggtggggttttgccaagccaggcacctgcagcctcttttttttt

SEQ ID NO: 3737 - DNA, 120 bp, Artificial Sequence
  ENSG00000005156_75 (sequence is synthesized)
ttctggttgggacacatactgttttaggaaactgaaacccatttgagcaagcttccgttatagggggagctgaatgtgaggctatagctcttaatttcttaagtttctgagggtggaaac

SEQ ID NO: 3738 - DNA, 120 bp, Artificial Sequence
  ENSG00000005156_76 (sequence is synthesized)
gtggcacccctgggggcataaggcagatggttttcagctcagaggttttgatttcagaagagactgacaacaggaagctccggattataggggaggccatgggtgggaccatcttggaga

SEQ ID NO: 3739 - DNA, 120 bp, Artificial Sequence
  ENSG00000005156_77 (sequence is synthesized)
gaattagcagtcttgacttagctgcatccatatgcttgtgcctgagaaaccagtatcagccctttcctcacttagaaatgtatctctacccctgttcctcctgcaacagccacatccttg

SEQ ID NO: 3740 - DNA, 120 bp, Artificial Sequence
  ENSG00000005156_78 (sequence is synthesized)
attggggaaggagaaggaagtagagagggaaggaattggtgggggtaggatttggggtttgggtcccaaggcctgtctcagcctgcctaccccggggttggccttgggatcggggcaaag

SEQ ID NO: 3741 - DNA, 120 bp, Artificial Sequence
  ENSG00000005156_79 (sequence is synthesized)
cagggtgcaggggataaaaaatgagagttggagtcgtatttcaagtgggaccagaatttatacaatctgggctacaggccagttctcccttggctcgcttgatgaagtagaactaggaac

SEQ ID NO: 3742 - DNA, 120 bp, Artificial Sequence
  ENSG00000005156_80 (sequence is synthesized)
tacaactatgaactggctctatgccacagctcacaattttccatcttcggtcacgatggagcccttgtagcccttgacagcagaactgttacacatgaggtctttgatccatggcaaacc

SEQ ID NO: 3743 - DNA, 120 bp, Artificial Sequence
  ENSG00000005156_81 (sequence is synthesized)
ctttcttgaagtagcagttttatcattgtggcccttccttcctcagaattcctaataagggagggaggatcccggcctaacctcagctctcctgttctcctcagacctctgtgtgagcgg

SEQ ID NO: 3744 - DNA, 120 bp, Artificial Sequence
  ENSG00000005156_82 (sequence is synthesized)
cggaagtttcttcatgacaacatggttgaaattccaaaccggatcatgttctcagaaatgaagcgagtcacagtaagtgaagaccctatgctaggcagtgtcctagaagtttgaaagcag

SEQ ID NO: 3745 - DNA, 120 bp, Artificial Sequence
  ENSG00000005156_83 (sequence is synthesized)
ggcagagaactccttgggtcaactgcgactggaagaataaatcttaatgtcttatggagcctcctgataatgttggcctttgactattgcatatgttgcctgctagtcttcacccagaag

SEQ ID NO: 3746 - DNA, 120 bp, Artificial Sequence
  ENSG00000005156_84 (sequence is synthesized)
ggtagggcatggaaatccttcctaggtaagcctcctgtgtttcaaagccacagcagccctctgtttgggatgagaagcaacctgctttctaaccctttgtcccttatatttcaagtaagg

SEQ ID NO: 3747 - DNA, 120 bp, Artificial Sequence
  ENSG00000005156_85 (sequence is synthesized)
aggtacaggctggccttgttactggcttgatctgccagcatggccagttatgacttccgaagtcctaggatctagggccccaagctggcctgagtcacctcaggcagagctgcttactcg

SEQ ID NO: 3748 - DNA, 120 bp, Artificial Sequence
  ENSG00000005156_86 (sequence is synthesized)
gttagggagaagtcagaatagagtaccctatgctagcctagcagaaggacgcttaccaccaattatttcgtcagggcctgacagctttctcctcaggcaaaatctctttcctgactggaa

SEQ ID NO: 3749 - DNA, 120 bp, Artificial Sequence
  ENSG00000005156_87 (sequence is synthesized)
aggaagctggagtctgaggaactaatacttttaagcaatctatcatgtgtccaacacagttcaatgccccagagcccaacaggttgggtgtgattatccctcatttacagaagaggaaat

SEQ ID NO: 3750 - DNA, 120 bp, Artificial Sequence
  ENSG00000005156_88 (sequence is synthesized)
tggggcttataaaggttaaaattacacagttagtaagaggtagctccaagaggtaaactctggcactctgacggccaggacccaaggtcctctccctggccctgggctcttgggactggc

SEQ ID NO: 3751 - DNA, 120 bp, Artificial Sequence
  ENSG00000005156_89 (sequence is synthesized)
agccttttccctgttacattttcttgtcagtcttgggtttggcaacatctcctgagcaattctttttttttttgagataagtctcgctctgttgcctaggctggagtgaagtggtgcaat

SEQ ID NO: 3752 - DNA, 71 bp, Artificial Sequence
  ENSG00000005156_90 (sequence is synthesized)
gtctcgctctgttgcctaggctggagtgaagtggtgcaatcacagcgcactgcaattcagcctcccgagta

SEQ ID NO: 3753 - DNA, 120 bp, Artificial Sequence
  ENSG00000005156_91 (sequence is synthesized)
atacccggcctcttttgagcactttctgatgccaagaactaggtttagtactggctcaactctgggggagctgatgcctcaaaggacagatagagaagtaaacatatgattgacacccat

SEQ ID NO: 3754 - DNA, 120 bp, Artificial Sequence
  ENSG00000005156_92 (sequence is synthesized)
gtcattgcgcccccacgctccccaccgccatccaggagtaagcatagaagtctcacagcacaaggcctgaactcggtccccaacagacctgtagaaacctttcccctctctcttcccagc

SEQ ID NO: 3755 - DNA, 120 bp, Artificial Sequence
  ENSG00000005156_93 (sequence is synthesized)
ctgaagtccttgaacccattgagagtagtaagcaggactcctgacccctcagtctagcaggttgtacagagtagactgcttggtctcaggggacatcactgagtctgggggcactgagtc

SEQ ID NO: 3756 - DNA, 120 bp, Artificial Sequence
  ENSG00000005156_94 (sequence is synthesized)
agagccagctccgcctgcccaccatgactgggtggctcttatacacatgtactcttcccatctccaggtcccagatgtcgaggcctgtccactctccttttcccctaggcagggatggag

SEQ ID NO: 3757 - DNA, 120 bp, Artificial Sequence
  ENSG00000005156_95 (sequence is synthesized)
gggcgtgtcagtcctgtataatttggagtgactggaggggtgggggtattgatgcatggtattccagtaaacttctctgcttgtgtcctaactctaggctccctcattctgtcccgtgct

SEQ ID NO: 3758 - DNA, 120 bp, Artificial Sequence
  ENSG00000005156_96 (sequence is synthesized)
ccttcggaaaggctcagcaggaggtgtggcatgagcatcctgaataggcctttcctccggagagctcaaggccatggctgccttcctgggcatgtgagctgtatagttgcccgggatccc

SEQ ID NO: 3759 - DNA, 120 bp, Artificial Sequence
  ENSG00000005156_97 (sequence is synthesized)
atgcttggtttaatgctgtactgtagtgctatctggaaattcttaataattttgaacaaggggcctcgcatttgcattttgcactgtactccacaaattatgtagccagtttttctcaga

SEQ ID NO: 3760 - DNA, 120 bp, Artificial Sequence
  ENSG00000005156_98 (sequence is synthesized)
ggcccgggccaccacaaaaaaaatcgaggacctcacagagctggaaggctgggaagagctggaagataatgagaaggaacagataacccagcacattgcagagatcgttcactgaaggat

SEQ ID NO: 3761 - DNA, 120 bp, Artificial Sequence
  ENSG00000005175_0 (sequence is synthesized)
gcgtgagtcactgccgggctcggcgtgagtcgctgcggggctgacggggtggcagtgcggcgggttacggcctggtcagaccataatgacttcagcaaataaagcaatcgaattacaact

SEQ ID NO: 3762 - DNA, 120 bp, Artificial Sequence
  ENSG00000005175_1 (sequence is synthesized)
acaagtgaaacaaaatgcagaagaattacaagactttatgcgggatttagaaaactgggaaaaagacattaaacaaaaggatatggaactaagaagacagaatggtgttcctgaagagaa

SEQ ID NO: 3763 - DNA, 120 bp, Artificial Sequence
  ENSG00000005175_2 (sequence is synthesized)
tttacctcctattcgaaatgggaattttaggaaaaagaagaaaggcaaagctaaagagtcttccaaaaaaaccagagaggaaaacacaaaaaacaggataaaatcttatgattatgaggc

SEQ ID NO: 3764 - DNA, 120 bp, Artificial Sequence
  ENSG00000005175_3 (sequence is synthesized)
atgggcaaaacttgatgtggaccgtatccttgatgagcttgacaaagacgatagtacccatgagtctctgtctcaagaatcagagtcggaagaagatgggattcatgtagattcacaaaa

SEQ ID NO: 3765 - DNA, 120 bp, Artificial Sequence
  ENSG00000005175_4 (sequence is synthesized)
ggctcttgttttaaaagaaaagggcaataaatacttcaaacaaggaaaatatgatgaagcaattgactgctacacaaaaggcatggatgccgatccatataatcccgtgttgccaacgaa

SEQ ID NO: 3766 - DNA, 120 bp, Artificial Sequence
  ENSG00000005175_5 (sequence is synthesized)
cagagcgtcagcatattttagactgaaaaaatttgctgttgctgagtctgattgtaatttagcagttgccttgaatagaagttatacaaaggcttattccagacgaggtgctgctcgatt

SEQ ID NO: 3767 - DNA, 120 bp, Artificial Sequence
  ENSG00000005175_6 (sequence is synthesized)
tgctttgcaaaaattagaagaggccaaaaaagattatgaaagagtattagaactagaaccaaataactttgaagcaacaaatgaactcaggaaaatcagtcaggctttagcatccaaaga

SEQ ID NO: 3768 - DNA, 120 bp, Artificial Sequence
  ENSG00000005175_7 (sequence is synthesized)
aaactcatatccaaaggaagctgacatagtgattaagtcaacagaaggagagcgaaagcaaattgaagcacaacagaataagcagcaggccatttcagagaaagatcgggggaatggatt

SEQ ID NO: 3769 - DNA, 120 bp, Artificial Sequence
  ENSG00000005175_8 (sequence is synthesized)
tttcaaagaggggaaatatgaaagagcaattgaatgctatactcgagggatagcagcagatggtgctaatgcccttcttccagctaacagagctatggcctatctgaagattcagaaata

SEQ ID NO: 3770 - DNA, 120 bp, Artificial Sequence
  ENSG00000005175_9 (sequence is synthesized)
tgaagaagctgaaaaagactgcacacaagccattttattagatggctcatattctaaagcttttgccagaagaggaactgcaagaacatttttgggaaagctaaatgaggcaaaacaaga

SEQ ID NO: 3771 - DNA, 120 bp, Artificial Sequence
  ENSG00000005175_10 (sequence is synthesized)
ttttgaaactgttttacttctggaacctggaaataagcaagcagtaactgaactctccaaaattaaaaaggaattaattgagaaaggacactgggatgatgtctttcttgattccacaca

SEQ ID NO: 3772 - DNA, 120 bp, Artificial Sequence
  ENSG00000005175_11 (sequence is synthesized)
aagacaaaatgtggtaaaacccattgataatccaccgcatcctggatcaactaaaccactcaagaaggttattattgaagaaactggtaatttgatacagactattgatgtgccagatag

SEQ ID NO: 3773 - DNA, 120 bp, Artificial Sequence
  ENSG00000005175_12 (sequence is synthesized)
cactactgctgctgctccagagaataatcctattaatctagcaaatgtaatagcagccacaggcaccacaagtaagaagaattcaagccaagatgacctttttcccacaagtgatactcc

SEQ ID NO: 3774 - DNA, 120 bp, Artificial Sequence
  ENSG00000005175_13 (sequence is synthesized)
aagagcaaaagtattgaaaatagaagaagtcagtgatacttcatccctgcaacctcaagccagtttgaagcaggatgtatgtcagtcttacagcgagaaaatgcccatagagatagaaca

SEQ ID NO: 3775 - DNA, 120 bp, Artificial Sequence
  ENSG00000005175_14 (sequence is synthesized)
aaaacctgctcagtttgccacaactgttcttcctccaattcctgcaaactcgttccagctcgaatctgatttcagacaattgaaaagttctccagatatgttgtatcagtatttaaagca

SEQ ID NO: 3776 - DNA, 120 bp, Artificial Sequence
  ENSG00000005175_15 (sequence is synthesized)
aattgaaccatctttgtatcctaagttgtttcagaaaaatctggatccagatgtattcaaccagatcgttaaaattctgcatgacttttacattgagaaagaaaagccattactcatctt

SEQ ID NO: 3777 - DNA, 120 bp, Artificial Sequence
  ENSG00000005175_16 (sequence is synthesized)
tgaaatcttacaaagactttctgaactaaaaaggtttgatatggcagtgatgtttatgtcagaaacagagaaaaagattgcacgtgcattatttaatcacatagacaagtcaggattgaa

SEQ ID NO: 3778 - DNA, 120 bp, Artificial Sequence
  ENSG00000005175_17 (sequence is synthesized)
ggatagttctgtcgaagaactcaagaaaagatacggtggttgatttccatttttgctgaaataattgtttttgactttcatatgtaaattttttctactgaaagtgttttgctttttaag

SEQ ID NO: 3779 - DNA, 120 bp, Artificial Sequence
  ENSG00000005175_18 (sequence is synthesized)
ggaaaggactatctttgaacataagttaattaactataaggtgaattgtgatttaactagtgagaattgtattcaagtgaactctgtttttctgaaaataaaaatataaacaatgagata

SEQ ID NO: 3780 - DNA, 120 bp, Artificial Sequence
  ENSG00000005175_19 (sequence is synthesized)
catttgtaaggatcagcattttattttatgagtcattttaaatgttaaatttagatacattcttcagtgacccataaatgtaacattatttttatattttcatgagtttttgtaaccact

SEQ ID NO: 3781 - DNA, 120 bp, Artificial Sequence
  ENSG00000005175_20 (sequence is synthesized)
tgccaaagctgcttcattagcatatgaataattacctttgtaaagaggaagttaaatagatagtgagatcctttctttataaaacttttaaatgttattgtgccaattcactaacatgaa

SEQ ID NO: 3782 - DNA, 120 bp, Artificial Sequence
  ENSG00000005175_21 (sequence is synthesized)
gttatttagttgcagggtatgtatgtatttttagtatttatgttgaaagaaagaagacttttaactagactttcaaactaggttaattgaagtatcacagtattcttacattttaatgcc

SEQ ID NO: 3783 - DNA, 120 bp, Artificial Sequence
  ENSG00000005175_22 (sequence is synthesized)
atagggttttttcccttaagatatccatgttacataccagttaaggacagataatctaatgcaaggtgtaaaaatgtaaaaattagtaatgtttaaagtactaattagcatatagcccat

SEQ ID NO: 3784 - DNA, 120 bp, Artificial Sequence
  ENSG00000005175_23 (sequence is synthesized)
atgtatttgttggatgtgagtgtagcgtttgtaaacttttgaaagtagggctagaactctgctcatccctgtactctgcatagtacctagcacagacgtttgcacatagttaggtgctca

SEQ ID NO: 3785 - DNA, 120 bp, Artificial Sequence
  ENSG00000005175_24 (sequence is synthesized)
actgatacttataaaatttaattgaatttgacgcaagaatcatattaagtaaatgtttaaagtagcagcctagcaaatttttgggcatggtgtaagcactggtaaaaccagttaatttta

SEQ ID NO: 3786 - DNA, 120 bp, Artificial Sequence
  ENSG00000005175_25 (sequence is synthesized)
gagactatcaagttgttaaaaaatattaggacaccatcctttaattgttatcagcatcaataagacagttcagtttacaattttatacgatattgtggttaatttttattgccattatac

SEQ ID NO: 3787 - DNA, 120 bp, Artificial Sequence
  ENSG00000005175_26 (sequence is synthesized)
atattactattcttatgaattgtttgagaagtaatcataatttatttacaaagataatttcttcagattgtggtataaattattgagatatgtttgtaatttggatagtttgaatgcttt

SEQ ID NO: 3788 - DNA, 120 bp, Artificial Sequence
  ENSG00000005175_27 (sequence is synthesized)
aaaatacacttgatagagtttattaactttgtttattgctaaatgtattatgatatataaacaggcaattgaatttagctttttatctgctatgatctgaatgtttatatcccccacaaa

SEQ ID NO: 3789 - DNA, 120 bp, Artificial Sequence
  ENSG00000005175_28 (sequence is synthesized)
ttcatatgttgaaatcctaaccctgaaggcgatggtcttcggaggtggggcctttgggaagtgattgggtcaagagggcaggcccttgtaaaagaggccccagagagcttgttcaccaat

SEQ ID NO: 3790 - DNA, 120 bp, Artificial Sequence
  ENSG00000005175_29 (sequence is synthesized)
tacaccatgtaaggacacataagaaggcaccatctacgaacaagaaggtgggccttcaccagacaccagagaccagaatctactggcatcttcatcttggactccccatcctccagaact

SEQ ID NO: 3791 - DNA, 120 bp, Artificial Sequence
  ENSG00000005175_30 (sequence is synthesized)
gtaagaaataaatttctgtttttattaatgtaagctacccagtttgatattttattatagcaacccgaatggactacggtatgatcctttgaagaaacttacaaggtagtcagggcaggt

SEQ ID NO: 3792 - DNA, 120 bp, Artificial Sequence
  ENSG00000005175_31 (sequence is synthesized)
aatgttattgtcattcttaacataagaaaaggaggctcagagggttaatgttctctgcatgattatagagctaaaaattggccaaaacagttcagaacgtgctgtcttctcttaatgtag

SEQ ID NO: 3793 - DNA, 120 bp, Artificial Sequence
  ENSG00000005175_32 (sequence is synthesized)
agctatttgaactacttccagctgcagtttttatgttgtgttacctgtgtagagactgttaactgaagaagtacagatcacaagatttactatagaatttgaattttaaaaaatttctga

SEQ ID NO: 3794 - DNA, 120 bp, Artificial Sequence
  ENSG00000005175_33 (sequence is synthesized)
tgttagcctgatttctccccagagacattttcatgtagtgatttaagaccagaggctctggattcagacttcttgagtttgaattctggctccatctggctttagggccttggacaagtt

SEQ ID NO: 3795 - DNA, 120 bp, Artificial Sequence
  ENSG00000005175_34 (sequence is synthesized)
acttttctattctttgtttttgaaatctgtagaatgggtataagtgagattgaatgaatgcacacattttgtttttggagcagggctggatgtatagtaagctactgttactattattat

SEQ ID NO: 3796 - DNA, 120 bp, Artificial Sequence
  ENSG00000005175_35 (sequence is synthesized)
tacaattaccaacatttcctaaaagtgattagaataaagaacagtctttaggggctgtcatattgttgccttattgcaaaatagcatagtggttaataaagtcatttttgggtcaaataa

SEQ ID NO: 3797 - DNA, 71 bp, Artificial Sequence
  ENSG00000005175_36 (sequence is synthesized)
acttgatgtgtgtacacctgtgaaaccactgtttggatcaagatacagaacattctgggaggctgaggcac

SEQ ID NO: 3798 - DNA, 120 bp, Artificial Sequence
  ENSG00000005175_37 (sequence is synthesized)
aatgaaagctccatgacagcaggaactttgtctacctcgttcactgggcctcagtgctagcgcataataacccctcagtgtcagtgtgttgaatgaatgaatttactgttactctaatgt

SEQ ID NO: 3799 - DNA, 120 bp, Artificial Sequence
  ENSG00000005175_38 (sequence is synthesized)
gataagttcaaggtatccgagaatgcaggtgggctcttcagactggctgaccaatagtactgtcttgatggggtttccactgtctgctaagttaaacatggaaagcgcttagaatggttc

SEQ ID NO: 3800 - DNA, 120 bp, Artificial Sequence
  ENSG00000005175_39 (sequence is synthesized)
tgagtaaaattttctgggagttagctgataatcatgggttaagtgaaaaataatgtagagttatggcctgtgtttttctcttattcatgattttatgtggaataaacatttaatgacata

SEQ ID NO: 3801 - DNA, 120 bp, Artificial Sequence
  ENSG00000005175_40 (sequence is synthesized)
gctctttagttaatgagataatttttttttctgcaatcctctttcagcaaatggtggctaaaacagccaggattttattcttttttctttctttttacaaaaattactgtttacttatta

SEQ ID NO: 3802 - DNA, 120 bp, Artificial Sequence
  ENSG00000005175_41 (sequence is synthesized)
ttgaaaatgtattgcattttcttttcaactgtaaattcttatagctcactcctttttattgaattattttgtttaagccattttaaacatctggtgctaaaaccttgttcccatagctca

SEQ ID NO: 3803 - DNA, 120 bp, Artificial Sequence
  ENSG00000005175_42 (sequence is synthesized)
ctttactgaggtattcctctaaagatttagtaatagtgttcttttctaattcacaaagctaaaaaagttagttggatatttttagaaattaatatcctgtcattttgaaaaaccatttat

SEQ ID NO: 3804 - DNA, 120 bp, Artificial Sequence
  ENSG00000005187_0 (sequence is synthesized)
cttctttagactgccacgaggaaaaagcagatgtgagaactcaaggttcagggctgctcttctaagaaacaagtctgccataatctccatctgtgttggaatctgttaactaatgaactg

SEQ ID NO: 3805 - DNA, 120 bp, Artificial Sequence
  ENSG00000005187_1 (sequence is synthesized)
gtctctgtgcaaatcctgagtgctaaagcttccaacaagactgatgctagctcgtgtcaccaggaagatgctacgtcatgccaagtgttttcagcgcctagcaatttttggttctgtgag

SEQ ID NO: 3806 - DNA, 120 bp, Artificial Sequence
  ENSG00000005187_2 (sequence is synthesized)
ggcactgcataaagataatagaacagcaacccctcagaatttctccaactatgaatccatgaaacaggacttcaaactggggattccagagtatttcaactttgctaaagatgtcctgga

SEQ ID NO: 3807 - DNA, 120 bp, Artificial Sequence
  ENSG00000005187_3 (sequence is synthesized)
ccaatggactgataaggaaaaggctggaaagaaaccttcaaatccagccttctggtggatcaacagaaatggagaagagatgcgatggagttttgaggaactgggatctctgtccagaaa

SEQ ID NO: 3808 - DNA, 120 bp, Artificial Sequence
  ENSG00000005187_4 (sequence is synthesized)
atttgccaatatactttcagaagcctgttccctacaaagaggagatcgggtaattctgattctgcccagggtcccagagtggtggcttgcaaatgtggcctgtctgcgaacagggacagt

SEQ ID NO: 3809 - DNA, 120 bp, Artificial Sequence
  ENSG00000005187_5 (sequence is synthesized)
tttaattccaggaaccactcagctgacccagaaagacattctctacagactacaatcttcaaaagcaaactgcattatcaccaatgatgttttagccccagcagtagacgctgttgcatc

SEQ ID NO: 3810 - DNA, 120 bp, Artificial Sequence
  ENSG00000005187_6 (sequence is synthesized)
caaatgtgaaaatctgcactccaagctgattgtatcagagaactccagagaggggtgggggaacctcaaggagttgatgaaacatgccagtgacagccacacctgtgtgaagacaaaaca

SEQ ID NO: 3811 - DNA, 120 bp, Artificial Sequence
  ENSG00000005187_7 (sequence is synthesized)
caatgagatcatggccatattctttaccagtggaacaagtggatatccgaaaatgactgcacacacccacagcagttttggtttaggattatctgtaaatggaaggttctggctagattt

SEQ ID NO: 3812 - DNA, 120 bp, Artificial Sequence
  ENSG00000005187_8 (sequence is synthesized)
gacaccctcagatgtgatgtggaatacctcagatacgggctgggcaaagtctgcatggagtagtgttttttctccgtggatccagggagcatgtgtattcacacaccatttaccccgttt

SEQ ID NO: 3813 - DNA, 120 bp, Artificial Sequence
  ENSG00000005187_9 (sequence is synthesized)
tgagccgacttctatcttgcaaacactctccaagtaccccatcacagtcttctgttcagcaccaactgtataccgaatgcttgtacagaatgatataaccagctataagtttaaaagctt

SEQ ID NO: 3814 - DNA, 120 bp, Artificial Sequence
  ENSG00000005187_10 (sequence is synthesized)
agtgctggggaaccaattacccctgacgtgactgaaaaatggagaaacaagacgggcctggatatctacgaaggatatggacagactgaaacggtgctaatctgtggaaattttaaggga

SEQ ID NO: 3815 - DNA, 120 bp, Artificial Sequence
  ENSG00000005187_11 (sequence is synthesized)
atgaaaattaaacctggctcaatgggaaaaccttctcctgctttcgatgttaagattgtagatgtaaatggcaatgttctacctcctggacaagaaggagatattggcattcaagttcta

SEQ ID NO: 3816 - DNA, 120 bp, Artificial Sequence
  ENSG00000005187_12 (sequence is synthesized)
cccaaccgaccatttggcctttttactcattacgtagataatccttcaaaaacagcttcaactctacgaggcaatttctatatcactggggacagaggatatatggataaagatgggtat

SEQ ID NO: 3817 - DNA, 120 bp, Artificial Sequence
  ENSG00000005187_13 (sequence is synthesized)
ttctggtttgttgcaagagcagatgatgtcatattatcctctggctatcgaattggaccatttgaggtagaaaatgccctgaatgaacacccttcagttgcagagtcagctgttgtcagc

SEQ ID NO: 3818 - DNA, 120 bp, Artificial Sequence
  ENSG00000005187_14 (sequence is synthesized)
agcccagaccccatcagaggagaggtagtaaaggcttttgtcgttctaaatcctgattacaagtcacatgatcaagaacaactaataaaggagattcaggagcatgttaaaaaaactaca

SEQ ID NO: 3819 - DNA, 120 bp, Artificial Sequence
  ENSG00000005187_15 (sequence is synthesized)
gcaccttacaaatatcccagaaaggtagaatttattcaagagctgccaaagactatcagtgggaagacaaaaagaaatgaactgaggaagaaagaatggaagacaatttaaagttgtttc

SEQ ID NO: 3820 - DNA, 120 bp, Artificial Sequence
  ENSG00000005187_16 (sequence is synthesized)
attaattaccatatctataaaacaaacatagtatctgtcaatctctagaaaccacaagatgatggagaggtcataaaaactgtggtagtatgcttagaaactgttgatttaaaatatctt

SEQ ID NO: 3821 - DNA, 120 bp, Artificial Sequence
  ENSG00000005187_17 (sequence is synthesized)
gtggttatgatatcagaggctaaattttgaaataaaatatttggcaaattcctccacattagtgtcaatgttcctatcatttcttaatataaaaataataccatcaattgctgattaatt

SEQ ID NO: 3822 - DNA, 120 bp, Artificial Sequence
  ENSG00000005187_18 (sequence is synthesized)
tttaaatgtatagtatagaagcagtttctgaaccagatctctgctacataggttttcaaactttagttgactaattcttctgatatgttgatatacaaatcagaaccaatgttcaagcct

SEQ ID NO: 3823 - DNA, 120 bp, Artificial Sequence
  ENSG00000005187_19 (sequence is synthesized)
gcctgaaataaaactaaagaacttataaaagtttttagaaaaatataaaatatcagttagaagattatgataatctcaaagtacaagaatctacctgaaaatagactagggatttttatt

SEQ ID NO: 3824 - DNA, 120 bp, Artificial Sequence
  ENSG00000005187_20 (sequence is synthesized)
acattttttgcaaataatttaaaaatagtttagacttgtttcaaggtctaactataaaagaaggatcatatactattgttgcttattatatgtaatctaataaatactgtttacaaaaga

SEQ ID NO: 3825 - DNA, 120 bp, Artificial Sequence
  ENSG00000005187_21 (sequence is synthesized)
ccaagctgattgtatcagagaactccagagaggggtgggggaacctcaaggagttgatgaaagtctttctctgtcacccaggctggagtacggtggctcgatcttggctcactgcaacct

SEQ ID NO: 3826 - DNA, 120 bp, Artificial Sequence
  ENSG00000005187_22 (sequence is synthesized)
tgggatcaaactttattaaaacacactggcccaccccaccaggcatgtagattctcagagcaagcaaacaagacatactaaaacatacaaatgcataactcattttcctggtgtttcaaa

SEQ ID NO: 3827 - DNA, 120 bp, Artificial Sequence
  ENSG00000005187_23 (sequence is synthesized)
ttggctggtgcacctaaataatacatatatcctcctcaaccccatcggtctctctgattcctaaatcatccccaaacatttctggtggcccatatggggattggagataacagatttact

SEQ ID NO: 3828 - DNA, 120 bp, Artificial Sequence
  ENSG00000005187_24 (sequence is synthesized)
gtctcctttgcccatgggactagggccctggggctgtggaagacctggcatccaaggcatgccatgggggagtttcacccggatggagactggctctccccgcatcctgcccagcagtgc

SEQ ID NO: 3829 - DNA, 120 bp, Artificial Sequence
  ENSG00000005187_25 (sequence is synthesized)
aactgaacctgagatggggctgcaggatgacaccagcacttcaggaaccgcgttgcaggtgtcacaccttggattcaccatagctggctgaaactagcagcagcagtgactcccgactat

SEQ ID NO: 3830 - DNA, 120 bp, Artificial Sequence
  ENSG00000005187_26 (sequence is synthesized)
gaccagtggattaaccaacaagaccctgattgccccacccgaatagacctacggcgaatcccaaccaccagtaagaaggacaactgccctgctctgaccacactggaggctggtcagtct

SEQ ID NO: 3831 - DNA, 120 bp, Artificial Sequence
  ENSG00000005187_27 (sequence is synthesized)
acacatggctgaagcttgaagatcttgcaagctctgctctagtcacatcctggaagctgactagtctacacacagccgaagctaagaggaccatctctagataagtaaatgtagataaaa

SEQ ID NO: 3832 - DNA, 120 bp, Artificial Sequence
  ENSG00000005187_28 (sequence is synthesized)
tttataagcctagttataattgttctgttgttacattattactgcaaatgctgcaaatgtccatgcccagaggaaggtttgccattcctatgtgtagtgtaagcatgtttctattacata

SEQ ID NO: 3833 - DNA, 120 bp, Artificial Sequence
  ENSG00000005187_29 (sequence is synthesized)
cactaatgttgttaccatttctgcctatactagaaggggagaaatctctagaaggatgcccacactgtgtacatactacctgggtaaggaataccatagttaaaactctactgtaccata

SEQ ID NO: 3834 - DNA, 120 bp, Artificial Sequence
  ENSG00000005187_30 (sequence is synthesized)
cctacagtacaggaaccaagttaggaacctgcacatacaaccagaccacctattcggtctgtgacccaggaaataatcagctatatgtatgttatgaccctaagctcttaccctatgaat

SEQ ID NO: 3835 - DNA, 120 bp, Artificial Sequence
  ENSG00000005187_31 (sequence is synthesized)
tctggtttgaaatacatattaaatcagagggagaaaaagaaggagagttatagctcgaacaaaagaagcccctccctcctgtaaagggcctatttccttgtactttgatgcctgctatgc

SEQ ID NO: 3836 - DNA, 120 bp, Artificial Sequence
  ENSG00000005187_32 (sequence is synthesized)
tgcatatgttcacaatcctaaaaaaaaacagaagcagtctgcaatggtgtaacacaagagaggcttagcaggagcagccctaagcatctgtacaaagaaccacaaatcggatgcccagac

SEQ ID NO: 3837 - DNA, 120 bp, Artificial Sequence
  ENSG00000005187_33 (sequence is synthesized)
tgtaacattcagtggtccacactaacacaactccaatatttatattcaggaaggagtgctctgctaagtagtatgttaaccaaaccaaactgtaagacaagaacatgcaatcctttacat

SEQ ID NO: 3838 - DNA, 120 bp, Artificial Sequence
  ENSG00000005187_34 (sequence is synthesized)
tttactatcttaaagccagagatacctttctggtctacaggacagacagcactataacgacttgatagactaggagcaggccttggagttccactactaattgtcaaaaagactaaaagg

SEQ ID NO: 3839 - DNA, 120 bp, Artificial Sequence
  ENSG00000005187_35 (sequence is synthesized)
actcaaatgcatccaaccccgcaattctgggtccataatcattctataagcatttggataagccagtgcctgagcttcccccaccaaccaaaaacttatttgctcaactagctgaaaaca

SEQ ID NO: 3840 - DNA, 80 bp, Artificial Sequence
  ENSG00000005187_36 (sequence is synthesized)
tgtacgtggaggaactaatatggggaaccagtggccatgggaggcaaaggaattaatgccacaagataacttcacttcgc

SEQ ID NO: 3841 - DNA, 120 bp, Artificial Sequence
  ENSG00000005187_37 (sequence is synthesized)
cgttggggaaaggctttcacagaggcagtaggagaaataacctgcctagggcaacagtattatgatgagactaaaaacaaaactctatggagaagcacccagaattactcctacttacca

SEQ ID NO: 3842 - DNA, 120 bp, Artificial Sequence
  ENSG00000005187_38 (sequence is synthesized)
gatccaaatcctttatctccattctctaccctaagccacacttggcatcaactagaggttccaaatgcttcgaaagcaccctctggcctatattggatctgtggagcatgggcatattgg

SEQ ID NO: 3843 - DNA, 120 bp, Artificial Sequence
  ENSG00000005187_39 (sequence is synthesized)
caactgccagctaaatggacaggagcatgtgtgtagtaacaatcaagccattcttctttctaattcctctaaagcaaggggaactcttatggtatccagttgatgatgaaaataaaagaa

SEQ ID NO: 3844 - DNA, 120 bp, Artificial Sequence
  ENSG00000005187_40 (sequence is synthesized)
gaactagaagagcataatcacaaaaatagacacaaatgtcaaaaaggatgtggacataggagactggaaagataatgaatggcctcctgaaagaataattaaatattattggccagctac

SEQ ID NO: 3845 - DNA, 120 bp, Artificial Sequence
  ENSG00000005187_41 (sequence is synthesized)
ctgggtgcaagatgggtcatggggttaccacaccccaatctatatgctcaactgcatcataaggttgcaggcagtctttgaaattataaccaatgaaacatcaagggcactagatttatt

SEQ ID NO: 3846 - DNA, 120 bp, Artificial Sequence
  ENSG00000005187_42 (sequence is synthesized)
ggcaatacaagcaacacaaatgagaaatgctatatattgaaatagattggcattagattatcacttagcctctgaaggaagagtatgtggaaaatttaatttaaccaactgttgcctaga

SEQ ID NO: 3847 - DNA, 120 bp, Artificial Sequence
  ENSG00000005187_43 (sequence is synthesized)
aattgctaataatggccgggttgtcatggaaatcagagctagaatgcacaagttggcccatgttccaattcagacttggtcctaatggtccctggattctttgtttggaggatggttctc

SEQ ID NO: 3848 - DNA, 120 bp, Artificial Sequence
  ENSG00000005187_44 (sequence is synthesized)
aacctttggaggattcaaaaccctcactggtgggtttttgtttattcttggcatctgcctcatcctcccttaccttttacccctgtttattaggaggattcagtcaactatagaggcagt

SEQ ID NO: 3849 - DNA, 120 bp, Artificial Sequence
  ENSG00000005187_45 (sequence is synthesized)
aataactcaacacactaccgcacagttgatggcattaaccaaatatcagccactgccagtagaagaagctcagctctgtgaagaggtggcaaatagtggtgctttctattaacacctttg

SEQ ID NO: 3850 - DNA, 120 bp, Artificial Sequence
  ENSG00000005187_46 (sequence is synthesized)
ttataaaaagcaacaaaggggggaaatggaacaggaattaaaagaaattaaagaatgcataagcaaaaactcaattgtatgtagggaaacccaattcctcctgaggaagagaaagaggtg

SEQ ID NO: 3851 - DNA, 78 bp, Artificial Sequence
  ENSG00000005187_47 (sequence is synthesized)
gtagggaaacccaattcctcctgaggaagagaaagaggtggagtcctttaaaaattcactgcctgtttttccgtctgt

SEQ ID NO: 3852 - DNA, 120 bp, Artificial Sequence
  ENSG00000005187_48 (sequence is synthesized)
ttccttgaaaagtaagaaatgatgtaatacatgtctcaactgaataactgtctttgtttctcacttctgtagtaagcttccccctgcacagatctcccctctcaccccatgaaatgctta

SEQ ID NO: 3853 - DNA, 60 bp, Artificial Sequence
  ENSG00000005187_49 (sequence is synthesized)
tttgtttctcacttctgtagtaagcttccccctgcacagatctcccctctcaccccatga

SEQ ID NO: 3854 - DNA, 120 bp, Artificial Sequence
  ENSG00000005187_50 (sequence is synthesized)
cctgcttctcagcttatgttagaagcctgggaaaggggagaagagtattttcaccccctttgctgtcagggttaccaagggaatcccctgtgaaggtgagaggtggttctaagaagagac

SEQ ID NO: 3855 - DNA, 120 bp, Artificial Sequence
  ENSG00000005187_51 (sequence is synthesized)
tggcatcacattccttggttgatattcccctctgcctggctgagtgagaaactgagccagaaagagaagtagagacagatggcaaggcagagacagtagagcaggggtggaggacagcag

SEQ ID NO: 3856 - DNA, 120 bp, Artificial Sequence
  ENSG00000005187_52 (sequence is synthesized)
aggagaagcctgaagcataagatagggtgttgcaagtatatgtgcatatctggtacatcaaatggatcttcagaagttgcctgggcttgaccaggtagacccaacagacagaggatgaaa

SEQ ID NO: 3857 - DNA, 120 bp, Artificial Sequence
  ENSG00000005187_53 (sequence is synthesized)
ttgtttcctcgccctcaacaatggaggctccagagtgtaaaagaaggagaagggaaaggtgtcagtgacaaataaggccatgtgtctctattccaggtgtcagagccagaggagaagagt

SEQ ID NO: 3858 - DNA, 120 bp, Artificial Sequence
  ENSG00000005187_54 (sequence is synthesized)
ggacaacccaactgcccaccacaggtccctagaagtacaggtcaagcctatgctggggagaggcaaacagtttcctggtacatagccgctaaaacccctggaatttctgaagtgatgaac

SEQ ID NO: 3859 - DNA, 120 bp, Artificial Sequence
  ENSG00000005187_55 (sequence is synthesized)
aatctgtacactacctacctaccgcttacccccatataaactttctttgttatgatggtgattccattttacttccatgatactttaatttttataaatatgtgaaaatgattagaaatg

SEQ ID NO: 3860 - DNA, 120 bp, Artificial Sequence
  ENSG00000005187_56 (sequence is synthesized)
agataacccaaagataagaatgaagagacactaaacctctgatttttgcattctaaagagaattgtcaacaaggactaagtgaagcatctctctccaggtttgtgaaaaggtgtcagagc

SEQ ID NO: 3861 - DNA, 90 bp, Artificial Sequence
  ENSG00000005187_57 (sequence is synthesized)
atcacttgggaaattacaaaggttttagaagctctgggccaggaacccaggatgaagactcagtacagaccagaagtcttttggatttca

SEQ ID NO: 3862 - DNA, 120 bp, Artificial Sequence
  ENSG00000005187_58 (sequence is synthesized)
gattgttttggattttggaatatttgcattatactggttgggctgccctaatccaaaaacatgaaacctgaaatcctccaatgagcatttcctttgagcatcatgttggtactaaaaaag

SEQ ID NO: 3863 - DNA, 120 bp, Artificial Sequence
  ENSG00000005189_0 (sequence is synthesized)
aaaaagcccgcgaggctgaggggcggttgttgttggcagctgtggctaaggaggggagaacctctgctccccgcccgtcttctcttctgcgtttcccgggctagggggcgtggggagtgg

SEQ ID NO: 3864 - DNA, 120 bp, Artificial Sequence
  ENSG00000005189_1 (sequence is synthesized)
ttttaggcggcgaagccgctcggcagcaccttccttctttgccaggcagacgcccgttgtagccgttggggaaccgttgagaatccgccatggagccagagagggaagggaccgagagac

SEQ ID NO: 3865 - DNA, 120 bp, Artificial Sequence
  ENSG00000005189_2 (sequence is synthesized)
accccaggaaggtcagggaaagcaggcaggccccaaataagctggtcggggcagctgaggcgatgaaagccggttgggatctcgaggagagtcagcccgaggccaagaaagcccgcttat

SEQ ID NO: 3866 - DNA, 120 bp, Artificial Sequence
  ENSG00000005189_3 (sequence is synthesized)
ctaccattttatttactgacaactgtgaagtaacccatgaccagctgtgtgaattgctgaagtatgcagttctgggcaaatccaatgttccaaaacccagctggtgccagctttttcatc

SEQ ID NO: 3867 - DNA, 120 bp, Artificial Sequence
  ENSG00000005189_4 (sequence is synthesized)
aaaaccacctaaacaacgtagtggtttttgttctgcagggaatgagtcagctacacttttacaggttctatttggagtttggatgtcttcgaaaagcattcagacataaattccgcttgc

SEQ ID NO: 3868 - DNA, 120 bp, Artificial Sequence
  ENSG00000005189_5 (sequence is synthesized)
ctccaccatcatctgattttctagctgatgttgttgggctacaaactgaacaaagagctggagatctgcccaagacaatggaagggcctttaccttctaatgcaaaagccgccatcaacc

SEQ ID NO: 3869 - DNA, 120 bp, Artificial Sequence
  ENSG00000005189_6 (sequence is synthesized)
ttcaggatgatcccatcattcaaaagtatggctctaagaaagtgggcttgaccagatgccttctgacaaaggaggaaatgagaacgtttcactttccattacaaggttttcctgattgtg

SEQ ID NO: 3870 - DNA, 120 bp, Artificial Sequence
  ENSG00000005189_7 (sequence is synthesized)
aaaactttttacttaccaaatgtaatggttctatagcagacaatagtcctctctttggacttgactgtgaaatgtgcctcacatccaaggggagagagctaacacgcatctcactggttg

SEQ ID NO: 3871 - DNA, 120 bp, Artificial Sequence
  ENSG00000005189_8 (sequence is synthesized)
ctgaaggaggctgctgtgttatggatgaactggtcaaacctgaaaacaagattctggactacctcaccagcttttcgggaatcacgaagaagattcttaacccagtgacgaccaaactca

SEQ ID NO: 3872 - DNA, 120 bp, Artificial Sequence
  ENSG00000005189_9 (sequence is synthesized)
aagatgtacagaggcagttaaaagcactgcttcctcctgatgctgtgttagtgggccactccttagatttggatctcagagcactgaaaatgatacatccatatgttattgatacatcgt

SEQ ID NO: 3873 - DNA, 120 bp, Artificial Sequence
  ENSG00000005189_10 (sequence is synthesized)
tgctttatgtcagagagcagggcagaagatttaagctcaagttcttagccaaagttattttggggaaggatatacagtgtccagacagacttggtcatgatgccacagaagatgctagaa

SEQ ID NO: 3874 - DNA, 120 bp, Artificial Sequence
  ENSG00000005189_11 (sequence is synthesized)
ccaagaaatacaagcagcaggccaagagcctaaaaacacagcagaagtacttcagcacccaaacacaagtgttttagaatgcttggattcagtgggtcagaagcttctttttttgacccg

SEQ ID NO: 3875 - DNA, 120 bp, Artificial Sequence
  ENSG00000005189_12 (sequence is synthesized)
ggagacagatgctggtgaacttccatcttccagaaattgtcaaactattaagtgtctttcaaataaagaggttcttgagcaggccagagtggaaatccccctgtttcccttcagcattgt

SEQ ID NO: 3876 - DNA, 120 bp, Artificial Sequence
  ENSG00000005189_13 (sequence is synthesized)
tcagttctcttttaaggccttttcacctgtcctcactgaggagatgaacaaaaggatgaggatcaagtggacagagatatcaactgtctatgctgggccatttagcaaaaattgcaatct

SEQ ID NO: 3877 - DNA, 120 bp, Artificial Sequence
  ENSG00000005189_14 (sequence is synthesized)
cagggctctgaagaggctgtttaaaagctttggcccagtccagtcaatgacttttgttcttgaaacccgtcagcctcatctctgtatacagtatgaagtcctagaagctgcccagctggc

SEQ ID NO: 3878 - DNA, 120 bp, Artificial Sequence
  ENSG00000005189_15 (sequence is synthesized)
catagaatccttggatggtattctggtagatggtatctgcatcaaggtgcagaggcctgtgacagagctcacgcttgattgtgacaccctcgtgaatgagctggaaggagattctgaaaa

SEQ ID NO: 3879 - DNA, 120 bp, Artificial Sequence
  ENSG00000005189_16 (sequence is synthesized)
ccaaggctctatatatctgtctggagtgagtgaaaccttcaaagaacagctattgcaggagccccgcctctttcttggcctggaagctgtgatcttgcctaaagatcttaaaagtggaaa

SEQ ID NO: 3880 - DNA, 120 bp, Artificial Sequence
  ENSG00000005189_17 (sequence is synthesized)
gcagaaaaaatactgtttcctgaaattcaaaagttttggcagtgcccagcaggccctcaacattctcacaggcaaggactggaagctgaaaggcaggcatgccctaacccccaggcacct

SEQ ID NO: 3881 - DNA, 120 bp, Artificial Sequence
  ENSG00000005189_18 (sequence is synthesized)
ccatgcctggctcagaggcttaccacctgaatcaacaaggctcccagggcttcgtgttgtacctcccccctttgaacaggaggccttgcagactctgaaactggaccacccgaagatagc

SEQ ID NO: 3882 - DNA, 120 bp, Artificial Sequence
  ENSG00000005189_19 (sequence is synthesized)
agcctggcgctggagccggaagattggaaagctctacaacagcttgtgcccgggcactctctgcctcatcctgctgccaggaaccaagagcactcatggttcactctctggtctaggact

SEQ ID NO: 3883 - DNA, 120 bp, Artificial Sequence
  ENSG00000005189_20 (sequence is synthesized)
gatgggaataaaagaggaagaagaaagcgctggcccaggcctgtgttcgtgagtcggcctgccatgtttccatgtgccatttcttaccccttgtaggcaatggcaaagaatgtggtcagg

SEQ ID NO: 3884 - DNA, 120 bp, Artificial Sequence
  ENSG00000005189_21 (sequence is synthesized)
ctgtagcctccccaaccagcagacagctttatggaaacttggtatagcagctaaaagagtttagtttgtttatatggcatgtataagttttcaataaatgcctaaagttcaagcatagta

SEQ ID NO: 3885 - DNA, 120 bp, Artificial Sequence
  ENSG00000005189_22 (sequence is synthesized)
agaatccggtaaccgatgcggacggtaaagccgtttgggttagagcggcgcgggtgtccagtccgcggaacggggagatcgttggcaccttcgcttttttaggggaacggggatagttcg

SEQ ID NO: 3886 - DNA, 120 bp, Artificial Sequence
  ENSG00000005189_23 (sequence is synthesized)
acacactccataaatggtagatacaattattaatattatttgcattcatcttctttgtgcagactacactgtgttgatcctcttaagtgtaacattcagcagcctgcccagctttaattt

SEQ ID NO: 3887 - DNA, 120 bp, Artificial Sequence
  ENSG00000005189_24 (sequence is synthesized)
cactcacactagatcctctagaaagcaagtttgtgccattgctgcagggaccctggtagattacagtagatggcagttgacatagtgtaaatagtaagaagaagcaataacttccacagt

SEQ ID NO: 3888 - DNA, 120 bp, Artificial Sequence
  ENSG00000005189_25 (sequence is synthesized)
aaccgatgcggacggtaaagccgtttgggttagagcggcgcgggtgtccagtccgcggaacggggagatcgttggcaccttcgcttttttaggggaacggggatagttcggtaaactgaa

SEQ ID NO: 3889 - DNA, 120 bp, Artificial Sequence
  ENSG00000005189_26 (sequence is synthesized)
ttgagaagcggatccgagggaggttgaaagctgtcaagcccgtgtagctctcccgctaggaggcggcacgcgggggaataggggcgctggagtttccccagctctacctcatctttctcc

SEQ ID NO: 3890 - DNA, 120 bp, Artificial Sequence
  ENSG00000005189_27 (sequence is synthesized)
caaaagggtaagtgaatgggttctgctgaatgatttatttagtgacttattataacctctcatcattaaggaaagtaatacatgctttatttaatttgttgtgtttttctctagattttt

SEQ ID NO: 3891 - DNA, 120 bp, Artificial Sequence
  ENSG00000005189_28 (sequence is synthesized)
actatctgcatattaacatttaaaaatatttttatgaaaatgggaatcagactatgcatactgttttgcaactttattttttcatttaacagtatatcatacatctttctgtatcactac

SEQ ID NO: 3892 - DNA, 120 bp, Artificial Sequence
  ENSG00000005189_29 (sequence is synthesized)
atatcttatttcccttgtttttaatggctacatagtattctgctatatgatatacctattaacatttgtgctttatacatttttgctattacaaataatacttcagtgaacatccttgga

SEQ ID NO: 3893 - DNA, 120 bp, Artificial Sequence
  ENSG00000005189_30 (sequence is synthesized)
aaaaatctttggtgaataatcccatgcattgactcatgatttcagttctctttccatattcattcccatactatattctgttgtttttcctacagatgaggatcaagtggacagagatat

SEQ ID NO: 3894 - DNA, 120 bp, Artificial Sequence
  ENSG00000005189_31 (sequence is synthesized)
cgccgtcgggggcactggattcgggcgggctctccgccctggcctctccgaacctgatccctgatcattaaaatgggaatgagtgtaataccaccttcctgcaacaaggctgtcattggc

SEQ ID NO: 3895 - DNA, 120 bp, Artificial Sequence
  ENSG00000005194_0 (sequence is synthesized)
gagtcgacggctggagagaagccgggagcgagcccaggcggcagtcttgattcccttttggccagcagtttttaggtctgtcagtactgcactgcaagaatggcagattttgggatctct

SEQ ID NO: 3896 - DNA, 120 bp, Artificial Sequence
  ENSG00000005194_1 (sequence is synthesized)
gctggccagtttgtggcagtggtctgggataagtcatccccagtggaggctctgaaaggtctggtggataagcttcaagcgttaaccggcaatgagggccgcgtgtctgtggaaaacatc

SEQ ID NO: 3897 - DNA, 120 bp, Artificial Sequence
  ENSG00000005194_2 (sequence is synthesized)
aagcagctgttgcaatctgcccacaaagaatccagctttgacattattttgtcaggtttagtcccaggaagcaccactctgcacagtgctgagattttggctgaaatcgcccggatcctt

SEQ ID NO: 3898 - DNA, 120 bp, Artificial Sequence
  ENSG00000005194_3 (sequence is synthesized)
cggcctggtggatgtctttttctgaaggagccagtagagacagctgtagataacaatagcaaagtgaagacagcatctaagctgtgttcagccctgactctttctggtcttgtggaagtg

SEQ ID NO: 3899 - DNA, 120 bp, Artificial Sequence
  ENSG00000005194_4 (sequence is synthesized)
aaagagctgcagcgggagcccctaacccctgaggaagtacagtctgttcgagaacaccttggtcatgaaagtgacaacctgctgtttgttcagatcacaggcaaaaaaccaaactttgaa

SEQ ID NO: 3900 - DNA, 120 bp, Artificial Sequence
  ENSG00000005194_5 (sequence is synthesized)
gtgggttcttctaggcagcttaagctttccatcaccaagaagtcttctccttcagtgaaacctgctgtggaccctgctgctgccaagctgtggaccctctcagccaacgatatggaggac

SEQ ID NO: 3901 - DNA, 120 bp, Artificial Sequence
  ENSG00000005194_6 (sequence is synthesized)
gacagcatggatctcattgactcagatgagctgctggatccagaagatttgaagaagccagatccagcttccctgcgggctgcttcttgtggggaagggaaaaagaggaaggcctgtaag

SEQ ID NO: 3902 - DNA, 120 bp, Artificial Sequence
  ENSG00000005194_7 (sequence is synthesized)
aactgcacctgtggccttgccgaagaactggaaaaagagaagtcaagggaacagatgagctcccaacccaagtcagcttgtggaaactgctacctgggcgatgccttccgctgtgccagc

SEQ ID NO: 3903 - DNA, 120 bp, Artificial Sequence
  ENSG00000005194_8 (sequence is synthesized)
ctgctcctccagccaactcctgtccctcacatcccaccatggtggctcctcccacctcctctggatttgttcactctgagatctgtttgcagagtgggtgcttagcagacagagtgaagc

SEQ ID NO: 3904 - DNA, 120 bp, Artificial Sequence
  ENSG00000005194_9 (sequence is synthesized)
tggctggggggcacagtggtgtgtagtgctgctgtgtatcaaaagaccaaggtattatgggacctggtttcagaatgggatgggtttcttcacctcatgttaagagaagggagtgtgtcc

SEQ ID NO: 3905 - DNA, 120 bp, Artificial Sequence
  ENSG00000005194_10 (sequence is synthesized)
tgaagaagcccttcttctgatgttaaaatgctgaccagaacgctcttgagcccaggcatcgttgagcattaacactctgtgacagagctgcagacccctgccttgagtctcatctcagca

SEQ ID NO: 3906 - DNA, 120 bp, Artificial Sequence
  ENSG00000005194_11 (sequence is synthesized)
atgctgccaccctcttgtctttcagagttgttagtttactccattctttgtgacacgagtcaagtggctcacaacctcctcagggcaccagaggactcactcactggttgctgtgatgat

SEQ ID NO: 3907 - DNA, 120 bp, Artificial Sequence
  ENSG00000005194_12 (sequence is synthesized)
atccagtgtccctctgcccccttccatccccaaccacatttgactgtagcattgcatctgtgtcctgttgtcatttatgttaaccttcaggtattaaacttgctgcatatcttgacatat

SEQ ID NO: 3908 - DNA, 120 bp, Artificial Sequence
  ENSG00000005194_13 (sequence is synthesized)
cttgagattctgcatgtcttgtaaagagaggggatgtgcatttgtgtgtgatgttggatagtcatccacgctcagtttggaccattggaggaacttagtgtcacgcacaaatggggctat

SEQ ID NO: 3909 - DNA, 120 bp, Artificial Sequence
  ENSG00000005194_14 (sequence is synthesized)
tcctacgcttagaatagggcttgtctgcccactttagaagagtccaggttggtgagcatttagagggaagcagggcagaactctgaacgacaatacgtctctctgagcagagaccccttt

SEQ ID NO: 3910 - DNA, 120 bp, Artificial Sequence
  ENSG00000005194_15 (sequence is synthesized)
gttcttgttatccacccatatggacttggaatcaatcttgccaaatatttggagagattgtgtggatttaagagacctggatttttatattttaccagtaaataaaagttttcattgata

SEQ ID NO: 3911 - DNA, 120 bp, Artificial Sequence
  ENSG00000005194_16 (sequence is synthesized)
tcccttctgttcttgaatttggaaaatatggcaatctgggtccactttccccagcatgataaccagctgaagcttgagtagtggctgccctctgtagacagagcacacacggtacttccc

SEQ ID NO: 3912 - DNA, 120 bp, Artificial Sequence
  ENSG00000005194_17 (sequence is synthesized)
tcatcctcctcccacttctgtctccctcagcagcctctcatattgctgctgtctgcctggcctataggcttctgagttatgacactggtgtgaagagaaaaggcttaaagcacattttgg

SEQ ID NO: 3913 - DNA, 120 bp, Artificial Sequence
  ENSG00000005194_18 (sequence is synthesized)
ggcctcttgagcatgtggtcaggttgaacatgatgatcaaccaaaaggaggacagggtggacaccttctttaccctggactccaagtttcctctcgaagcctgcagtcactttagctttt

SEQ ID NO: 3914 - DNA, 120 bp, Artificial Sequence
  ENSG00000005194_19 (sequence is synthesized)
attagcagagaccacgactgtatcactcattgctttgaacactctccaggatctcattgactcagatgagctgctggatccagaagatttgaagaagccagatccagcttccctgcgggc

SEQ ID NO: 3915 - DNA, 120 bp, Artificial Sequence
  ENSG00000005194_20 (sequence is synthesized)
ggagcctcctcctctcgcgagaggcgcaaggcgtggagtcgacggctggagagaagccgggagcgagcccaggcggcaggtttagtcccaggaagcaccactctgcacagtgctgagatt

SEQ ID NO: 3916 - DNA, 120 bp, Artificial Sequence
  ENSG00000005194_21 (sequence is synthesized)
tgggcatattaggatccaaaactgaaataatacataggtattatctagttcagctccttcttctgcaccagaagataccgaggcctcctaattttacaggactgagtcacacagtttaat

SEQ ID NO: 3917 - DNA, 120 bp, Artificial Sequence
  ENSG00000005194_22 (sequence is synthesized)
taatgaggtccttccaggtcccagaattaacgtttctcctcagaagacctcacagtgtagtggtaatggtgtatgagagtgccctgttcctgttctcatgtgcttttttccccatgccag

SEQ ID NO: 3918 - DNA, 120 bp, Artificial Sequence
  ENSG00000005194_23 (sequence is synthesized)
gtttctttttaaaaacattgaatctgtggttgggttatttctgtcaatttatttgccttccttgccaagtcacactttgcctaattgatgtcctgtgtgttttccattccgttcatgctg

SEQ ID NO: 3919 - DNA, 120 bp, Artificial Sequence
  ENSG00000005194_24 (sequence is synthesized)
aattatcttaggtcaaagaggaaatcatctttctgcctccaaccttcttacttgcctctaatcccctttcttgactcttccaagtcaggattctcaccaaggaagctatctgccttcttt

SEQ ID NO: 3920 - DNA, 120 bp, Artificial Sequence
  ENSG00000005194_25 (sequence is synthesized)
gggaatgttgggcttatgaagacttgagataatggggttcatgtattcagactctttagcatatacagtagagtttctaatgttgtcagcattccctagtgggcggttacaagttaggtt

SEQ ID NO: 3921 - DNA, 120 bp, Artificial Sequence
  ENSG00000005194_26 (sequence is synthesized)
gggacattcttctgtttgaatgggcttagagggacatgttagaaattgagccagcaataaatgagatggtgatatttttagaggattagtcctttgatttctgccatttccacaaagaag

SEQ ID NO: 3922 - DNA, 120 bp, Artificial Sequence
  ENSG00000005206_0 (sequence is synthesized)
gttggttgcggcgggcaccggccgacatggcggcagcggtggcggctgcgctggcgcggcttttggcggcctttctgctcctcgcggcccaggtggcctgtgagtacggcatggtgcacg

SEQ ID NO: 3923 - DNA, 120 bp, Artificial Sequence
  ENSG00000005206_1 (sequence is synthesized)
tggtctcccaggccgggggccccgaaggcaaagactactgcatcctctacaacccgcagtgggcccatcttccgcacgacctcagcaaggcatctttcctgcagctgcgcaactggacgg

SEQ ID NO: 3924 - DNA, 120 bp, Artificial Sequence
  ENSG00000005206_2 (sequence is synthesized)
cctccctgctctgctccgcagccgacctccccgcccgtggcttcagcaaccagatcccgctggtggcgcgggggaactgcaccttctatgagaaagtgaggctggcccagggcagcggag

SEQ ID NO: 3925 - DNA, 120 bp, Artificial Sequence
  ENSG00000005206_3 (sequence is synthesized)
cacgcgggctgctcatcgtcagcagggagaggctggtccccccggggggtaataagacgcagtatgatgagattggcattcccgtggccctgctcagctacaaagacatgctggacatct

SEQ ID NO: 3926 - DNA, 120 bp, Artificial Sequence
  ENSG00000005206_4 (sequence is synthesized)
tcacgcgtttcggccgcacggtgagggcggcgctgtatgcgcctaaggagccggtgctggactacaacatggtcatcatcttcatcatggctgtgggcaccgtcgccatcggcggctact

SEQ ID NO: 3927 - DNA, 120 bp, Artificial Sequence
  ENSG00000005206_5 (sequence is synthesized)
gggccgggagtcgggacgtgaagaaaaggtacatgaagcacaagcgcgacgatgggcccgagaagcaggaggacgaggcggtggacgtgacgccggtgatgacctgcgtgtttgtggtga

SEQ ID NO: 3928 - DNA, 120 bp, Artificial Sequence
  ENSG00000005206_6 (sequence is synthesized)
tgtgctgctccatgctggtgctgctctactatttctacgatctcctcgtgtacgtggtcatcgggatcttctgcctggcctccgccaccggcctctacagctgcctggcgccctgtgtgc

SEQ ID NO: 3929 - DNA, 120 bp, Artificial Sequence
  ENSG00000005206_7 (sequence is synthesized)
ggcggctgcccttcggcaagtgcaggatccccaacaacagcctgccctacttccacaagcgcccgcaggcccgtatgctgctcctggcgctcttctgcgtggccgtcagcgtggtgtggg

SEQ ID NO: 3930 - DNA, 120 bp, Artificial Sequence
  ENSG00000005206_8 (sequence is synthesized)
gcgtcttccgcaacgaggaccagtgggcctgggtcctccaggatgccctgggcatcgccttctgcctctacatgctgaagaccatccgtctgcccaccttcaaggcctgcacgctgctgc

SEQ ID NO: 3931 - DNA, 120 bp, Artificial Sequence
  ENSG00000005206_9 (sequence is synthesized)
tgctggtgctgttcctctacgacatcttcttcgtgttcatcacgcccttcctgaccaagagtgggagcagcatcatggtggaggtggccactgggccctcggactcagccacccgtgaga

SEQ ID NO: 3932 - DNA, 120 bp, Artificial Sequence
  ENSG00000005206_10 (sequence is synthesized)
agctgcccatggtcctgaaggtgcccaggctgaactcctcacctctggccctgtgtgaccggcccttctccctcctgggtttcggagacattttggtgccagggctgctggtggcctact

SEQ ID NO: 3933 - DNA, 120 bp, Artificial Sequence
  ENSG00000005206_11 (sequence is synthesized)
gccacaggtttgacatccaggtacagtcctccagggtatacttcgtggcctgcaccatcgcctatggcgttggcctccttgtgacattcgtggcactggccctgatgcagcgtggccagc

SEQ ID NO: 3934 - DNA, 120 bp, Artificial Sequence
  ENSG00000005206_12 (sequence is synthesized)
ccgctctcctctacctggtgccctgcacgctggtgacgagctgcgctgtggcgctctggcgccgggagctgggcgtgttctggacgggcagcggctttgcgaaagtcctacctccatctc

SEQ ID NO: 3935 - DNA, 120 bp, Artificial Sequence
  ENSG00000005206_13 (sequence is synthesized)
cgtgggccccagcaccagccgacggcccgcagcctcccaaagactctgccacgccactctccccgcagccgcccagcgaagaaccagccacatccccctggcctgctgagcagtccccaa

SEQ ID NO: 3936 - DNA, 120 bp, Artificial Sequence
  ENSG00000005206_14 (sequence is synthesized)
aatcacgcacgtccgaggagatgggggctggagcccccatgcgggagcctgggagcccagctgaatccgagggccgggaccaggcccagccgtccccggtaacccagcctggcgcctcgg

SEQ ID NO: 3937 - DNA, 120 bp, Artificial Sequence
  ENSG00000005206_15 (sequence is synthesized)
ctgtcccccgggaccgaggcctgtgccgtccccacccgccccaacatggtgctcatccttgccgagacccctgcggtctgtgcccgcgcccagcccagctgccccggctgcacgcctgct

SEQ ID NO: 3938 - DNA, 120 bp, Artificial Sequence
  ENSG00000005206_16 (sequence is synthesized)
gctcccagctcgcccggctgccacaagctctctgcgggtccatcctccccaccggggtccgtcctcgcaggccctgcccggcctctctgcagaccctcaagcgtcgtctgcatgagtgag

SEQ ID NO: 3939 - DNA, 120 bp, Artificial Sequence
  ENSG00000005206_17 (sequence is synthesized)
caggcgtgggtggactctggccgcggccacacttggtgctcaccagctgcttcggccttcaggtgacctccctccccacggcatcctgctctccgggtggaagagcagctttctgtctcc

SEQ ID NO: 3940 - DNA, 120 bp, Artificial Sequence
  ENSG00000005206_18 (sequence is synthesized)
cagaaggcatcgcttttccctcttgagcagatcggagcccctgggaggtttggaagctgcctccaagcctaggacacggaccagtggccggggcggcctctggcccctgacgctggctga

SEQ ID NO: 3941 - DNA, 120 bp, Artificial Sequence
  ENSG00000005206_19 (sequence is synthesized)
gacaggcccgtggggcggggttttggggcgtgaacaaggctggcagtaagtggacaagctgctcccctggctaaggccctgccctgccctcagccagaggtgcctggccatgcctgcaca

SEQ ID NO: 3942 - DNA, 120 bp, Artificial Sequence
  ENSG00000005206_20 (sequence is synthesized)
ctcctccccattttaataaatggtcgcaacttctagaagtcctgctggtgccacctggtggggtggacgtctctcagactgcccttctgacaagcaggggtgggcgccaggcaggctggg

SEQ ID NO: 3943 - DNA, 120 bp, Artificial Sequence
  ENSG00000005206_21 (sequence is synthesized)
tcaggccctcaggggtccctggagccctgggagggagggactgggtcgtgggaggtcctggtagctcccggcacccaacctcgcttcccgtgtgggccccgtgttgcttttctgctgaga

SEQ ID NO: 3944 - DNA, 120 bp, Artificial Sequence
  ENSG00000005206_22 (sequence is synthesized)
ggggcttgggcctcggttctccctgtggcagcggcattggtgcctgggttcttaaccctctggacccagcagctaggagcttctggaacccacgaggacatctgccactggcatggtcta

SEQ ID NO: 3945 - DNA, 120 bp, Artificial Sequence
  ENSG00000005206_23 (sequence is synthesized)
ctcactgatggggtcctcctgactccagggcagagacgtccgtgcgggaactgaccgaggcgtggccccaggccccggcatcctcccctcgctgcacgtggtcacttccgaagcagcgct

SEQ ID NO: 3946 - DNA, 120 bp, Artificial Sequence
  ENSG00000005206_24 (sequence is synthesized)
ccctgtggccgcagagacagagcccgcaccctggctgtctgtggtgcctgggccccagctcccgcccgccacccgccctgttgagtgcggcctccagactcgagtccagaatctgtttct

SEQ ID NO: 3947 - DNA, 120 bp, Artificial Sequence
  ENSG00000005206_25 (sequence is synthesized)
gtcaagtcagtcgtccccagctgcacacggggactgctgagcgctgcgctctcacgggtctgttccggacagagggtggcaggggtgagccctgatcccttacaaaaaataccagcttcc

SEQ ID NO: 3948 - DNA, 120 bp, Artificial Sequence
  ENSG00000005206_26 (sequence is synthesized)
cagggagtaatggcgccttcactgaagccattttgtacatggggacggggtggggacgtctcttttttggtgttggacgtttgaccagtggggaggggttcagaggcggcggtcctgtcc

SEQ ID NO: 3949 - DNA, 120 bp, Artificial Sequence
  ENSG00000005206_27 (sequence is synthesized)
ttggctccgtctgtccgtgtggccttgctgccattccgtctgatcattaaacacagcttttgatacatatggcccggcctctgcctccgcagtgcacggcttggggcatctgctctgtgc

SEQ ID NO: 3950 - DNA, 120 bp, Artificial Sequence
  ENSG00000005206_28 (sequence is synthesized)
aggtcccggtgagcagaactgagagctggcaggccgcctggctgtcctgcagaggacggattggaattgccaccgcagggccggccagtgctgtgaggtgcccagcgtcactcccatggg

SEQ ID NO: 3951 - DNA, 120 bp, Artificial Sequence
  ENSG00000005206_29 (sequence is synthesized)
ctctgtgggccatgtggtccctgtcacgcttctcagctctgccactgttgctggaaagcatcacagaccatgtgtaaaatgggccaaaataccttttacaaaattaaaatagagatgggg

SEQ ID NO: 3952 - DNA, 90 bp, Artificial Sequence
  ENSG00000005206_30 (sequence is synthesized)
gttggttgcggcgggcaccggccgacatggcggcagcggtggcggctgcgctggcgcggcttttggcggcctttctgctcctcgcggccc

SEQ ID NO: 3953 - DNA, 76 bp, Artificial Sequence
  ENSG00000005206_31 (sequence is synthesized)
tcggccccgaggtggcctgtgagtacggcatggtgcacgtggtctcccaggccgggggccccgaaggcaaagacta

SEQ ID NO: 3954 - DNA, 120 bp, Artificial Sequence
  ENSG00000005206_32 (sequence is synthesized)
gccccagcctggagctgcttcagcaccgcgtgatgaagagccctggccccgggctgctctgacagggctgcgagggcgtttcacctggggtttgtccgggtgtcatgggaaccctgactg

SEQ ID NO: 3955 - DNA, 120 bp, Artificial Sequence
  ENSG00000005206_33 (sequence is synthesized)
gaatccgggaggagaggccggagcccctgtggccaggagccacgtcctccagcctggatgggactcctttgtggggcatcgctgcccagggccacagtctgtcccccgctgtccctttcc

SEQ ID NO: 3956 - DNA, 120 bp, Artificial Sequence
  ENSG00000005206_34 (sequence is synthesized)
tggcacccacgtgcacgccgcaggttcgaggcccagggtgtgggcaccagggcacccggtcctcttggtcatgactgctgcggcttctgagcagtggtggaggtggggcaggcactgctc

SEQ ID NO: 3957 - DNA, 120 bp, Artificial Sequence
  ENSG00000005206_35 (sequence is synthesized)
cggggcggttccttgcacttcagtcccccccgggtcccctcctgctcccgggttttctgccccgttcccccgggtggctgtgggctcccgagccccgtgtcggccagccggccccagggc

SEQ ID NO: 3958 - DNA, 120 bp, Artificial Sequence
  ENSG00000005206_36 (sequence is synthesized)
ctcacctcccacgtggcctggacttgtggctgcctcccgctggccgggcctcccccatgaggccgagtgcctggtgccgtgttgggaggacagagctggcccgtccccgcccggtcccca

SEQ ID NO: 3959 - DNA, 120 bp, Artificial Sequence
  ENSG00000005206_37 (sequence is synthesized)
ccgctgtcgctgataccatctggcacttcctcccagccttcctgaggcagccaagtacgcttggctttggtgtgtattggagccacggcacgtttaactggcagaaggaagatgtgaaaa

SEQ ID NO: 3960 - DNA, 120 bp, Artificial Sequence
  ENSG00000005206_38 (sequence is synthesized)
tattttgaatcctttgtacacaaagagaaaatgaatcttttcagttatttccaagccaggaaactcgctccgtcacatgaagttagagcaggcctcagtcagctgggcgcaggggctcac

SEQ ID NO: 3961 - DNA, 86 bp, Artificial Sequence
  ENSG00000005206_39 (sequence is synthesized)
agttagagcaggcctcagtcagctgggcgcaggggctcacgcctgggatcccagcatttggtaggccaaggcaggacgatcacttc

SEQ ID NO: 3962 - DNA, 120 bp, Artificial Sequence
  ENSG00000005206_40 (sequence is synthesized)
catggaggcctctgctgttagcagccgccccgccctggagatgtttttatcccattttcaaatgaagcctttgatgtttgagacgctgaggaacgctggggaactcgtccagcaagtgac

SEQ ID NO: 3963 - DNA, 120 bp, Artificial Sequence
  ENSG00000005206_41 (sequence is synthesized)
aggcagagcctgcattgggggcaggggccagcggggaggggactctggggcttcgtggggccaggagagagccgaagttgcggctggctgcaggggccgtggccttgtgcaggaggcagt

SEQ ID NO: 3964 - DNA, 120 bp, Artificial Sequence
  ENSG00000005206_42 (sequence is synthesized)
tctgtgctttgccccagggcaccaaccgcatggcagccccacccactgtggacccagaggttctttgaggaaacctggtgtggcacaagttttaatttaataaacagtttgggcacgggg

SEQ ID NO: 3965 - DNA, 120 bp, Artificial Sequence
  ENSG00000005206_43 (sequence is synthesized)
ccatgttggtcaggctggtctcgaacttcagacctcaggtgttctgaatgatgagtaggagtttgccgggtcggcaggaggggaagggtgttggaagcaccagaagcagcataagcgggg

SEQ ID NO: 3966 - DNA, 120 bp, Artificial Sequence
  ENSG00000005206_44 (sequence is synthesized)
gagctggcaggttatttggggttggcaaggggtgggctgtggctggagtgtagggtggaataatgctggaaggaagggtttacaccctgaaagatgtcaccaccaaggaggcccgggggg

SEQ ID NO: 3967 - DNA, 120 bp, Artificial Sequence
  ENSG00000005206_45 (sequence is synthesized)
tgggccgtggagggttgctggagcaggggcacagaggagggggcagtggtgcgagtggccccaggcagagagtgaaggcagagcattcagcctcctagtctggatgacaggttgtctggt

SEQ ID NO: 3968 - DNA, 120 bp, Artificial Sequence
  ENSG00000005206_46 (sequence is synthesized)
cctcccccacgcgcatgcgcggcgcatgcgtggcccggggtctcggggcgttgctgggaaacatctgccgttggttgcggcgggcaccggccgacatggcggcagcggtggcctgaagcc

SEQ ID NO: 3969 - DNA, 120 bp, Artificial Sequence
  ENSG00000005206_47 (sequence is synthesized)
tggccccttttccatcttctgtgaaatggggctgtggttgagagctgggggcctggcagggctggtcacagcacagggacatgccgactgctgggctgggcagggtgcgtggccgcccct

SEQ ID NO: 3970 - DNA, 120 bp, Artificial Sequence
  ENSG00000005206_48 (sequence is synthesized)
aatccacggaggcctggtgcaggggctcagggccgagggcagagcaggccgggcagagccgagagtgccatccctgtccgcacacgctgccgtcgtagttgagagaggccctcagtgggt

SEQ ID NO: 3971 - DNA, 120 bp, Artificial Sequence
  ENSG00000005206_49 (sequence is synthesized)
gcggggctcaaggcggcttagtgggcaggcatgggctgtgacaagtatcactcaggacttgtatgtgcggttcgggagtcccacggccgagggagggattagtggcgcttttaggcctgg

SEQ ID NO: 3972 - DNA, 120 bp, Artificial Sequence
  ENSG00000005206_50 (sequence is synthesized)
cccctgcctacagcctgtgacccctgcctacagcgtgacgcccaccatccggggacagtgactgaggggacgcagccggccaggcccgtgtccaccatcctggccccaccatccggggac

SEQ ID NO: 3973 - DNA, 120 bp, Artificial Sequence
  ENSG00000005206_51 (sequence is synthesized)
agcgactgaggggacgcagccggccaggcccgtgtccaccgtcctggccccaccatctggggacagcgaccgaggagacgcagccggccaggcctgtgtccactgtcctggctgccgagt

SEQ ID NO: 3974 - DNA, 120 bp, Artificial Sequence
  ENSG00000005206_52 (sequence is synthesized)
ggtgggctcctctacctgcttccgcagggtgggccctggggtggggcctgtgccgccagccctgctggagttgtaacagcaggggtcctcccacaggtctggggtcctcagagtcatccc

SEQ ID NO: 3975 - DNA, 120 bp, Artificial Sequence
  ENSG00000005206_53 (sequence is synthesized)
ctgggcaggtggaagggcagtggggctgcgtgctggctgagagcaagggccctgtgtggctcgtgggaggcggcgtcctgggtggtcagccagcctctgccccggcgaggatgctgcttt

SEQ ID NO: 3976 - DNA, 120 bp, Artificial Sequence
  ENSG00000005206_54 (sequence is synthesized)
ctgcggtggggacccacttggtcttgctgagtgatctgtgacggctcgcggggtggctcaggtatcaggggacagccatgtctgtgaggactccggccccgctcagatgaggcagcccag

SEQ ID NO: 3977 - DNA, 120 bp, Artificial Sequence
  ENSG00000005206_55 (sequence is synthesized)
cccgtcgcccagggtccggctgtgggagctgcagtagggatggctctgcctaggtgggccgaggccgtgcggggctttagtctttcctgcagctgcgcaactggacggcctccctgctct

SEQ ID NO: 3978 - DNA, 120 bp, Artificial Sequence
  ENSG00000005206_56 (sequence is synthesized)
cagcagctggggctggtcttccgacttctcgctaaaggcagatccatctgtggggaggatctgggccgagtgtgaacatggggaggatccgggccgagtgtggccgtggggagggcggag

SEQ ID NO: 3979 - DNA, 120 bp, Artificial Sequence
  ENSG00000005206_57 (sequence is synthesized)
atgagtctgttcttcctgagctgctggctggggctgtggaactttggccgtggtcttgttgggtgcctgtcctagagcagcccccaggggtgacggagaccacactctctgtggggatgg

SEQ ID NO: 3980 - DNA, 120 bp, Artificial Sequence
  ENSG00000005238_0 (sequence is synthesized)
ggtttgcaggcggaggctacagctagggctgctcagtaactgccccaaccactaccacgtccccaagtgcaacgggacccacggaactacagggtcctgctgagctcaggagctgcacgg

SEQ ID NO: 3981 - DNA, 120 bp, Artificial Sequence
  ENSG00000005238_1 (sequence is synthesized)
aatggtggcagtcaccttgccagtgcagcaggcatggatcagactgcaagctaggggcacgaggcatcagttgggaagaggggacgcacagctaggcttgaggcctcttcatcgggatgt

SEQ ID NO: 3982 - DNA, 120 bp, Artificial Sequence
  ENSG00000005238_2 (sequence is synthesized)
ccccaggccccccagcccaggcccagcataaaggccgtgttggggggcccccctgacccaaggggggcttcatgcgccacgtgcaggcggagccgtctccatcctcagagccggaggctg

SEQ ID NO: 3983 - DNA, 120 bp, Artificial Sequence
  ENSG00000005238_3 (sequence is synthesized)
gcccttcacagcctccagtcaggcagggggccctccagggtggcctgctcatgggctacagcccagcagggggggcgacatcccccggggtctaccaggtatccatcttttcccctccgg

SEQ ID NO: 3984 - DNA, 120 bp, Artificial Sequence
  ENSG00000005238_4 (sequence is synthesized)
ctggtacctctgagcctcatagggccctgaaacgacaagccccatccactgagggtccccgggagctgaagagaggccctgggctgggggccagagagggactaccccctgaagaaccat

SEQ ID NO: 3985 - DNA, 120 bp, Artificial Sequence
  ENSG00000005238_5 (sequence is synthesized)
ctactgtggggctcttaggcccagagggaccggggctgggactaggtgtggccagccagcatttctcccaccgtggcctctgtgttgtggaacagagaagtagtgtcacctcatcttgga

SEQ ID NO: 3986 - DNA, 120 bp, Artificial Sequence
  ENSG00000005238_6 (sequence is synthesized)
cttcgggggcctggagtcccccctgccccccatcaaatgcttcctgcaatactttgcacaccagagactgggcctccccagatccagggggacaggggtccctgggggagtccccagggc

SEQ ID NO: 3987 - DNA, 120 bp, Artificial Sequence
  ENSG00000005238_7 (sequence is synthesized)
cagcccctccaggccagctgcacacacttgacactgatttgcacagtcttgcacaaatagggggtaagagcccagtggctggggtgggcaatgggggtagcctctggcctagggagtccc

SEQ ID NO: 3988 - DNA, 120 bp, Artificial Sequence
  ENSG00000005238_8 (sequence is synthesized)
ctggcactgccaatgggcacagtcccgagcacacaccccctggccctggacccccaggcccctgccccaccaagcgaaggctgcttcctgctggagaagccccagatgtcagctctgagg

SEQ ID NO: 3989 - DNA, 120 bp, Artificial Sequence
  ENSG00000005238_9 (sequence is synthesized)
aagaggggccagcccctcggaggcgccggggatccctgggccaccctactgctgccaacagttctgatgccaaagccacacccttctggagccacctgctgcctgggcccaaagagcctg

SEQ ID NO: 3990 - DNA, 120 bp, Artificial Sequence
  ENSG00000005238_10 (sequence is synthesized)
ttttggacccaacagactgcggtcccatggggcggaggctgaaaggagcccgtcgcctgaagctgagcccccttcgaagcctccggaaggggccaggcctgctgagcccccccagtgcct

SEQ ID NO: 3991 - DNA, 120 bp, Artificial Sequence
  ENSG00000005238_11 (sequence is synthesized)
cccctgttcctacccctgctgtcagccgtaccctgctgggcaactttgaggaatcattgctgcgaggacgttttgcaccatctggccacattgagggcttcacagcagaaattggagcta

SEQ ID NO: 3992 - DNA, 120 bp, Artificial Sequence
  ENSG00000005238_12 (sequence is synthesized)
gctgcctgtcactgtcacattctttgatgtttctgagcaaaatgccccggctcccttcctgggcatcgtggatctgaaccccttggggaggaagggttacagcgtgcccaaggtgggcac

SEQ ID NO: 3993 - DNA, 120 bp, Artificial Sequence
  ENSG00000005238_13 (sequence is synthesized)
cgtccaagtgaccttatttaaccccaaccagactgtggtaaagatgttccttgtgacctttgacttctcggacatgcctgctgcccacatgaccttcctgcgccatcgcctctttttggt

SEQ ID NO: 3994 - DNA, 120 bp, Artificial Sequence
  ENSG00000005238_14 (sequence is synthesized)
gcctgtgggtgaggagggaaatgctaaccccacccaccgcctcctctgctacttgctgcacctcaggttccggagctcccgctcaggccgcttaagcctgcatggagatatccgcctgct

SEQ ID NO: 3995 - DNA, 120 bp, Artificial Sequence
  ENSG00000005238_15 (sequence is synthesized)
tttttcccgccggagcctggagctggacacagggctcccctacgaactgcaggctgtgaccgaggcccctcataatccacgttattcacctttgccctgattgccagcactctgaaccca

SEQ ID NO: 3996 - DNA, 120 bp, Artificial Sequence
  ENSG00000005238_16 (sequence is synthesized)
tgcgggctaatgacctgcccatcctgctccatcttagagaacatatatggagagacagcaagagacccttcaggcttgaattaaagccctcaccatgctcacgcccaaatggattatttg

SEQ ID NO: 3997 - DNA, 120 bp, Artificial Sequence
  ENSG00000005238_17 (sequence is synthesized)
ggtgtttaaagcttctgattcttactacaccctgccctacttcgggtactccatgtgcctgtcccctcccttgggtttcccaggccagcttaggtagtagggaggaactggagctaccct

SEQ ID NO: 3998 - DNA, 120 bp, Artificial Sequence
  ENSG00000005238_18 (sequence is synthesized)
gagattttctcaagttcccaggcaagttatgccagcgttgcctccctgtcctgggcaggggccacttgttattttatttatttttaatttataatttattcaaattggattgccttggta

SEQ ID NO: 3999 - DNA, 120 bp, Artificial Sequence
  ENSG00000005238_19 (sequence is synthesized)
acctcccacacctgataattggcatcactcctccccgcttcccactctcagatattgctccaacctcaggagttgaagaggcttatgcggtgggggcaggaggagaactgctttccctca

SEQ ID NO: 4000 - DNA, 120 bp, Artificial Sequence
  ENSG00000005238_20 (sequence is synthesized)
gctgagggaagaggggctattccagagggactgagtcagtagccaaagactcagcttcccctgtccttccccagtcccttcacttcccctaccctctgacctatctctgaaagccaagtt

SEQ ID NO: 4001 - DNA, 120 bp, Artificial Sequence
  ENSG00000005238_21 (sequence is synthesized)
atgcgtatgtgtgtgtgcacaagcttgtctttgtgtggtatgtgtgtgtgagtgtgcatgtatgcacacacacaggggttaaccacccctcacctagggctccagactccagttgtccct

SEQ ID NO: 4002 - DNA, 120 bp, Artificial Sequence
  ENSG00000005238_22 (sequence is synthesized)
ctcctcctacctgtgtctccttgttttggggtcctgactgaagaaggtgtccagggggcagagtcagggccaagcactggggtgcctcctctcacctggccagactctgacccacctacc

SEQ ID NO: 4003 - DNA, 120 bp, Artificial Sequence
  ENSG00000005238_23 (sequence is synthesized)
tcagctggggtgaggggcacccctcaaactcagtcatgtggttccaaactaccccattccccactccagactctgacccagcctcagtcctaactcctggggctgggctgaggggaacaa

SEQ ID NO: 4004 - DNA, 120 bp, Artificial Sequence
  ENSG00000005238_24 (sequence is synthesized)
gcatttgctgaaacttgaaaaaacaaagcaaatcaaaaacaggaaaaaattgtacctggtacttttttttagaaaaaaagattaaaaaagaaagaataaattcttgtttggaaacttgaa

SEQ ID NO: 4005 - DNA, 120 bp, Artificial Sequence
  ENSG00000005238_25 (sequence is synthesized)
agcctagcagagcagggctcagcctgagccaccctttgtctgggttgggggcccgtggcagggaggaccggggaaccaaggggagggaccgggacgggacgggacggaagggcccggagc

SEQ ID NO: 4006 - DNA, 120 bp, Artificial Sequence
  ENSG00000005238_26 (sequence is synthesized)
ggagccggggcggccccggggagggaccgtcgcagggaggggcgcggcagcggctggggggctgcgggcgccagggcccgctagtgttgcacacgaagctgaacagcgaagagcctagca

SEQ ID NO: 4007 - DNA, 120 bp, Artificial Sequence
  ENSG00000005238_27 (sequence is synthesized)
cctgtcccaggctgtggggaggagaggagtgagaagggacctgggaggctgggcagggggtaagggatcgtccagaagaaggagtccaggagtcaggtgagtctgcctggcttagtttag

SEQ ID NO: 4008 - DNA, 120 bp, Artificial Sequence
  ENSG00000005238_28 (sequence is synthesized)
agagtctgctaaggtctgctctctcccctctgaagatagagggctctaggctgggggccgaggggttggtaagagagaagaagtcgaccttcctacccacagtggtggtccgtgggaaca

SEQ ID NO: 4009 - DNA, 120 bp, Artificial Sequence
  ENSG00000005238_29 (sequence is synthesized)
gcccccctagcttgtgtggatgtatgtagggacaaaatagagagcagctggcagcagttctctttgcataggatgagggtggaaagcacatggataggaattcatcctgtcactctcctt

SEQ ID NO: 4010 - DNA, 120 bp, Artificial Sequence
  ENSG00000005238_30 (sequence is synthesized)
gatcatggtagaaatggaaatctttaatactgaagggaaggggagaatgagccttgaagctgatacctataccaatacccacctcacccacctcccaggcctcaaaagtgtctaaaggta

SEQ ID NO: 4011 - DNA, 120 bp, Artificial Sequence
  ENSG00000005238_31 (sequence is synthesized)
cagacgtattctgggacttgttgtttttgctggccttgctccctcagcatgttgggagctgtagtccttgccagccacagcctggcacagctgtttgatgccagctgctgcccaccccct

SEQ ID NO: 4012 - DNA, 120 bp, Artificial Sequence
  ENSG00000005238_32 (sequence is synthesized)
gaacgaagagtgaggcttggcctactctgccctgcccccctcccctgcagtcctgccccatgagtcagcttgaagccatggtctagagccagactggctgggtggcaggggagtgaatat

SEQ ID NO: 4013 - DNA, 120 bp, Artificial Sequence
  ENSG00000005238_33 (sequence is synthesized)
agagcgtcttgttgacagggtgggaactgagagggctctggggttaataagcagatgccaggtatgctggggtcaagtagggcatcatgtcatcccctggcttccccagggcaaggggtc

SEQ ID NO: 4014 - DNA, 120 bp, Artificial Sequence
  ENSG00000005238_34 (sequence is synthesized)
aagagggcaactgggatgacctggaagtggtggtgctagggaaaaggcccctcctgaatctgtatggcttgggtggaggaaagaagggtagaaattagtgcaggttgtaccttctgacaa

SEQ ID NO: 4015 - DNA, 120 bp, Artificial Sequence
  ENSG00000005238_35 (sequence is synthesized)
ggttggttgcaggtaggatagtgcaggttgcgattggtgttctgccctttccagccatcccgcccaccacagggaaccaggattttcttagggatcccaattcttaggagaatttggtga

SEQ ID NO: 4016 - DNA, 120 bp, Artificial Sequence
  ENSG00000005238_36 (sequence is synthesized)
aatgggatagtggggtacaatgatgggaacttggtgtaggagagcttttcagtccctgggtacaaatctctcctttctgcctgctccccacccccacctctgttcctgattttcccttgt

SEQ ID NO: 4017 - DNA, 120 bp, Artificial Sequence
  ENSG00000005238_37 (sequence is synthesized)
acaattaatctctctgcttctctcatctgggaaatttttctctccactctcaggactgctgctcagatgtctgggacttgcattctactttttttgagccctgctgtgtgcttacccctg

SEQ ID NO: 4018 - DNA, 120 bp, Artificial Sequence
  ENSG00000005238_38 (sequence is synthesized)
tacttggggttggatggaggggtgggacacagatctgtcctcaggaactctatggtcggtctagaagatgccttacccacaggagtgagcagaactgttagtgagcttacaggaagtagt

SEQ ID NO: 4019 - DNA, 120 bp, Artificial Sequence
  ENSG00000005238_39 (sequence is synthesized)
aacactgccataggtgaggtctcagagaagggagagatgcttatggtctggggtggacagagcagactttctggaggagatggcatttgacctatccaaggaggaaaagtcttgggtagg

SEQ ID NO: 4020 - DNA, 120 bp, Artificial Sequence
  ENSG00000005238_40 (sequence is synthesized)
cattcaaagggcacttcttgaaggggaaagagcaccgtgaatgtcagacagcaaaagagaaggctgaccctgggggcagctggctttcaacttgacattcccctcaccctagtatgggct

SEQ ID NO: 4021 - DNA, 120 bp, Artificial Sequence
  ENSG00000005238_41 (sequence is synthesized)
ggaatagttagtgaagaccatcttatgcacccgtggtttggggttttggtgttgggtgtgtgagcactgggggaggggcgtggagaggtactccctagttgcttccagctgactgactgc

SEQ ID NO: 4022 - DNA, 120 bp, Artificial Sequence
  ENSG00000005238_42 (sequence is synthesized)
tgcggccttatctctagtttgcagggccttgcgggagggccctggaaagtgccttctggcagtgaccccttccccttccccttcttgtttttggtcggatttgttgcctcttgttaaaga

SEQ ID NO: 4023 - DNA, 120 bp, Artificial Sequence
  ENSG00000005238_43 (sequence is synthesized)
gacaggctgctggaggcaatttggagttcagggctgaaaggccagctctgagctgacttgaaatttgtacctctgaggaccgctgatggggtataactgtgtgggagacctctgccctta

SEQ ID NO: 4024 - DNA, 120 bp, Artificial Sequence
  ENSG00000005238_44 (sequence is synthesized)
gtgccctaggatggcacttgtccctttggagatagacatataagaaggagttgtgcaatttggtggctttgagtaagaaagctgaattcttcccctggccgcctctcagctgacacggtc

SEQ ID NO: 4025 - DNA, 120 bp, Artificial Sequence
  ENSG00000005238_45 (sequence is synthesized)
tcttggatcttgggggtctctcatcccttcctccatgtagggcaggagtcctcaaatggtggccctgacaagtagttattctacctcaactcacttgtcacatccttattatactgagcc

SEQ ID NO: 4026 - DNA, 120 bp, Artificial Sequence
  ENSG00000005238_46 (sequence is synthesized)
aagacctgcctctttgactccttaggtagcccaactctgccatctgtgccctggaccccaagcctaccctttctgttcctgaagagcctctcacatgggagaaggatgtcctggagtgta

SEQ ID NO: 4027 - DNA, 120 bp, Artificial Sequence
  ENSG00000005238_47 (sequence is synthesized)
agtaactgccccaaccactaccacgtccccaagtgcaacgggacccacggaactacaggtgtggggcagggtgagcgtggaagaagggacgcggatgggggtgcgctttgcagacgatct

SEQ ID NO: 4028 - DNA, 120 bp, Artificial Sequence
  ENSG00000005238_48 (sequence is synthesized)
agggagaagagggggaagtgtgtccagtaagaagcctgagctaaacctgtcaccctctcaggagttctgagagtggtctctatattccattagtccatccagggatttgtacacattcat

SEQ ID NO: 4029 - DNA, 120 bp, Artificial Sequence
  ENSG00000005238_49 (sequence is synthesized)
ccttgggaacccatcaaagtcacccctttaggcaaggagagggtctgaaactcagctggaaggaagaagactcattgattcccctgaccaccttttcttctcttctcttacacagatgtc

SEQ ID NO: 4030 - DNA, 80 bp, Artificial Sequence
  ENSG00000005243_0 (sequence is synthesized)
cggcccaggccgggggcccggcgccgcctgctcgagccggggagccctcggggctgcggttgcaggaaccttccctctac

SEQ ID NO: 4031 - DNA, 120 bp, Artificial Sequence
  ENSG00000005243_1 (sequence is synthesized)
cggggctgcggttgcaggaaccttccctctacaccatcaaggctgttttcatcctagataatgacgggcgccggctgctggccaagtattatgatgacacattcccctccatgaaggagc

SEQ ID NO: 4032 - DNA, 120 bp, Artificial Sequence
  ENSG00000005243_2 (sequence is synthesized)
agatggttttcgagaaaaatgtcttcaacaagaccagccggactgagagtgagattgcattttttgggggtatgaccatcgtctacaagaacagcattgacctcttcctatacgtggtgg

SEQ ID NO: 4033 - DNA, 120 bp, Artificial Sequence
  ENSG00000005243_3 (sequence is synthesized)
aggaagaacgtggagaagcgctggttgctggagaacatggacggagccttcttggtgctggacgagattgtggatggcggtgtgattctggagagtgacccccagcaagtgatccagaag

SEQ ID NO: 4034 - DNA, 120 bp, Artificial Sequence
  ENSG00000005243_4 (sequence is synthesized)
gtgaattttagggcagatgatggcggcttgactgaacagagtgtggcccaggttcttcagtctgccaaggaacaaattaaatggtcgttattgaaatgaaggctgtggattcaaggctcc

SEQ ID NO: 4035 - DNA, 120 bp, Artificial Sequence
  ENSG00000005243_5 (sequence is synthesized)
ctgccccccagatcatttccccaatcctggcaaaagcccaaagatcccagggtcaggagagacccctctgtatccccaggtccctcccagaactgactcctaaggtctccagccagggct

SEQ ID NO: 4036 - DNA, 120 bp, Artificial Sequence
  ENSG00000005243_6 (sequence is synthesized)
tctgagatgcaaaggtttggcctcaggagagtcaccttttctcacggccctggccttaactcatatcttaggcattcctggccccagggccctaataaacctgcttttgtcttctgccaa

SEQ ID NO: 4037 - DNA, 120 bp, Artificial Sequence
  ENSG00000005243_7 (sequence is synthesized)
cagtttcaaagattttgcccagggatgacaaagcatgtggaccactgggttgaagcatcaaagaatcagagctgagggctctccatgctgagggagagttctgacttgagggctatcagt

SEQ ID NO: 4038 - DNA, 120 bp, Artificial Sequence
  ENSG00000005243_8 (sequence is synthesized)
gggaagggacctggaaggtggagatgttgcaggatgccttcggagagggaagaggcttggcaaggagaaggggcggaggggaggattgtgccactgatttgcctcctggtttttcctctc

SEQ ID NO: 4039 - DNA, 120 bp, Artificial Sequence
  ENSG00000005243_9 (sequence is synthesized)
ggaggggacagtcagggacactcacagcaggagtgcctttgataatcatcagccccagatggcacccagcatggctagaactctgaccaacttctcactcccttcccccagcatattccc

SEQ ID NO: 4040 - DNA, 120 bp, Artificial Sequence
  ENSG00000005243_10 (sequence is synthesized)
ccttactagcgccccactcatgaagatagaagttgatttcaatgttagccaaagtcaagccaaacaagagactaacctgatgtcaaactatgggagactgttgaataggcagggtttggg

SEQ ID NO: 4041 - DNA, 120 bp, Artificial Sequence
  ENSG00000005243_11 (sequence is synthesized)
gaaaatccagtttggtctccaatgcccaggggaagcactggcacagatgctggccctctctggaaggacttcagacagtcccaccagccccacatgtcctgctcttagggctcaattcca

SEQ ID NO: 4042 - DNA, 120 bp, Artificial Sequence
  ENSG00000005243_12 (sequence is synthesized)
acacaagctagatgcgtgacctgggtcaattactgaccctccccgaggcttactttctccatctttaggatggaggtaataagggattgtggggattaaatacatgtgtgagaagataca

SEQ ID NO: 4043 - DNA, 80 bp, Artificial Sequence
  ENSG00000005249_0 (sequence is synthesized)
cggggcccagtgcgccgcgctcgcagccggtagcgcgccagcgccgtaggcgctcgctcggcagccgcggggccctaggc

SEQ ID NO: 4044 - DNA, 120 bp, Artificial Sequence
  ENSG00000005249_1 (sequence is synthesized)
ggggccctaggccgtgccggggagggggcgagggcggcgcccaggcgcctgccgccccggaggcaggatgagcatcgagatcccggcgggactgacggagctgctgcagggcttcacggt

SEQ ID NO: 4045 - DNA, 120 bp, Artificial Sequence
  ENSG00000005249_2 (sequence is synthesized)
tgcagggcttcacggtggaggtgctgaggcaccagcccgcggacctgctggagttcgcgctgcagcacttcacccgcctgcagcaggagaacgagcgcaaaggcaccgcgcgcttcggcc

SEQ ID NO: 4046 - DNA, 120 bp, Artificial Sequence
  ENSG00000005249_3 (sequence is synthesized)
atgagggcaggacctggggggacctgggcgccgctgccgggggcggcacccccagcaagggggtcaacttcgccgaggagcccatgcagtccgactccgaggacggggaggaggaggagg

SEQ ID NO: 4047 - DNA, 120 bp, Artificial Sequence
  ENSG00000005249_4 (sequence is synthesized)
cggcgcccgcggacgcaggggcgttcaatgctccagtaataaaccgattcacaaggcgtgcctcagtatgtgcagaagcttataatcctgatgaagaagaagatgatgcagagtccagga

SEQ ID NO: 4048 - DNA, 120 bp, Artificial Sequence
  ENSG00000005249_5 (sequence is synthesized)
ttatacatccaaaaactgatgatcaaagaaataggttgcaagaggcttgcaaagacatcctgctgtttaagaatctggatccggagcagatgtctcaagtattagatgccatgtttgaaa

SEQ ID NO: 4049 - DNA, 120 bp, Artificial Sequence
  ENSG00000005249_6 (sequence is synthesized)
aattggtcaaagatggggagcatgtaattgatcaaggtgacgatggtgacaacttttatgtaattgatagaggcacatttgatatttatgtgaaatgtgatggtgttggaagatgtgttg

SEQ ID NO: 4050 - DNA, 120 bp, Artificial Sequence
  ENSG00000005249_7 (sequence is synthesized)
gtaactatgataatcgtgggagtttcggcgaactggccttaatgtacaatacacccagagcagctacaatcactgctacctctcctggtgctctgtggggtttggacagggtaaccttca

SEQ ID NO: 4051 - DNA, 120 bp, Artificial Sequence
  ENSG00000005249_8 (sequence is synthesized)
ggagaataattgtgaaaaacaatgccaaaaagagaaaaatgtatgaaagctttattgagtcactgccattccttaaatctttggagttttctgaacgcctgaaagtagtagatgtgatag

SEQ ID NO: 4052 - DNA, 120 bp, Artificial Sequence
  ENSG00000005249_9 (sequence is synthesized)
gaaagtagtagatgtgataggcaccaaagtatacaacgatggagaacaaatcattgctcagggagattcggctgattcttttttcattgtagaatctggagaagtgaaaattactatgaa

SEQ ID NO: 4053 - DNA, 120 bp, Artificial Sequence
  ENSG00000005249_10 (sequence is synthesized)
tggaagagaatggtgcagtagaaatcgctcgatgctcgcggggacagtactttggagagcttgccctggtaactaacaaacctcgagcagcttctgcccacgccattgggactgtcaaat

SEQ ID NO: 4054 - DNA, 120 bp, Artificial Sequence
  ENSG00000005249_11 (sequence is synthesized)
gtttagcaatggatgtgcaagcatttgaaaggcttctgggaccttgcatggaaattatgaaaaggaacatcgctacctatgaagaacagttagttgccctgtttggaacgaacatggata

SEQ ID NO: 4055 - DNA, 120 bp, Artificial Sequence
  ENSG00000005249_12 (sequence is synthesized)
ttgttgaacccactgcatgaagcaaaagtatggagcaagacctgtagtgacaaaattacacagtagtggttagtccactgagaatgtgtttgtgtagatgccaagcattttctgtgattt

SEQ ID NO: 4056 - DNA, 120 bp, Artificial Sequence
  ENSG00000005249_13 (sequence is synthesized)
caggttttttcctttttttacatttacaacgtatcaataaacagtagtgatttaatagtcaataggctttaacatcactttctaaagagtagttcataaaaaaatcaacatactgataaa

SEQ ID NO: 4057 - DNA, 120 bp, Artificial Sequence
  ENSG00000005249_14 (sequence is synthesized)
atgactttgtactccacaaaattatgactgaaaggtttattaaaatgattgtaatatatagaaagtatctgtgtttaagaagataattaaaggatgttatcataggctatatgtgtttta

SEQ ID NO: 4058 - DNA, 120 bp, Artificial Sequence
  ENSG00000005249_15 (sequence is synthesized)
tttttataactcattaaacacagtaaaattttaatcatttttgttttaaagttttctagcttgataagttatgtgctggccttggcctattggtgaaatggtataaaatatcatatgcag

SEQ ID NO: 4059 - DNA, 120 bp, Artificial Sequence
  ENSG00000005249_16 (sequence is synthesized)
ttttaaaactttttatatttttgcaataaagtacattttgactttgttggcataatgtcagtaacatacatattccagtggttttatggacaggcaatttagtcattatgataataagga

SEQ ID NO: 4060 - DNA, 120 bp, Artificial Sequence
  ENSG00000005249_17 (sequence is synthesized)
aaacagtgttttagatgagagatcattaatgcatttttccctcatcaagcatatatctgcttttttttattttgcaattctctgtattctatgtctttaaaaatttgatcttgacattta

SEQ ID NO: 4061 - DNA, 120 bp, Artificial Sequence
  ENSG00000005249_18 (sequence is synthesized)
atgtcacaaagttttgtttttttaaaaagtgatttaaacttaagatccgacattttttgtattctttaagattttacacctaaaaaatctctcctatcccaaaaataatgtgggatcctt

SEQ ID NO: 4062 - DNA, 120 bp, Artificial Sequence
  ENSG00000005249_19 (sequence is synthesized)
atcagcatgcccacagtttatttctttgttcttcactaggcctgcataatacagtcctatgtagacatctgttcccttgggtttccgttctttcttaggatggttgccaacccacaatct

SEQ ID NO: 4063 - DNA, 120 bp, Artificial Sequence
  ENSG00000005249_20 (sequence is synthesized)
cattgatcagcagccaatatgggtttgtttggtttttttaattcttaaaaacatcctctagaggaatagaaacaaatttttatgagcataaccctatataaagacaaaatgaatttctga

SEQ ID NO: 4064 - DNA, 120 bp, Artificial Sequence
  ENSG00000005249_21 (sequence is synthesized)
ccttaccatatataccattaggccttgccattgctttaatgtagactcatagttgaaattagtgcagaaagaactcagatgtactagattttcattgttcattgatatgctcagtatgct

SEQ ID NO: 4065 - DNA, 120 bp, Artificial Sequence
  ENSG00000005249_22 (sequence is synthesized)
gccacataagatgaatttaattatattcaaccaaagcaatatactcttacatgatttctaggccccatgacccagtgtctagagacattaattctaaccagttgtttgcttttaaatgag

SEQ ID NO: 4066 - DNA, 120 bp, Artificial Sequence
  ENSG00000005249_23 (sequence is synthesized)
tgatttcattttgggaaacaggtttcaaatgaatatatatacatgggtaaaattactctgtgctagtgtagtcttactagagaatgtttatggtcccacttgtatatgaaaatgtggtta

SEQ ID NO: 4067 - DNA, 120 bp, Artificial Sequence
  ENSG00000005249_24 (sequence is synthesized)
gaatgttaattggataatgtatatataagaagttaaagtatgtaaagtataacttcagccacatttttagaacactgtttaacatttttgcaaaaccttcttgtaggaaaagagagctct

SEQ ID NO: 4068 - DNA, 120 bp, Artificial Sequence
  ENSG00000005249_25 (sequence is synthesized)
ctacatgaagatgacttgttttatatttcagattttattttaaaagccatgtctgttaaacaagaaaaaacacaaaagaactccagattcctggttcatcattctgtattcttactcact

SEQ ID NO: 4069 - DNA, 120 bp, Artificial Sequence
  ENSG00000005249_26 (sequence is synthesized)
ttttcaagttatctattttgttgcataaactaattgttaactattcatggaacagcaaacgcctgtttaataaagaactttgaccaaggctataaatgccacgtacattattttcagtat

SEQ ID NO: 4070 - DNA, 120 bp, Artificial Sequence
  ENSG00000005249_27 (sequence is synthesized)
tgttggttatatttaaattttccttacaataaagcacacttttataataaaatacatgaattattgtttttcatacttttttgcttgtttctttaaagttttctgacgtgcataatgcat

SEQ ID NO: 4071 - DNA, 120 bp, Artificial Sequence
  ENSG00000005249_28 (sequence is synthesized)
aattcattgaaaagcatgatagcaatgtggcatgtggaagcgaacccccagggcataacatagtaagaaagtatggttctgtatggcaataggtttttaaaattattagctattcatcat

SEQ ID NO: 4072 - DNA, 120 bp, Artificial Sequence
  ENSG00000005249_29 (sequence is synthesized)
gtgtgggagaaataattgtggtgtgttgcagatttatttggccatttagaataaccaaatcaatctggctaactaggaatttatgtgtaaaattatctgattaaaacagctcaagtttga

SEQ ID NO: 4073 - DNA, 120 bp, Artificial Sequence
  ENSG00000005249_30 (sequence is synthesized)
ctagtgcttacaaggaaaaggcaatcagttttaatggtggaaatgccactattttggacttcttgtagggctatgtgacagtctccagcagtggcttcctatgggattttcaagaataac

SEQ ID NO: 4074 - DNA, 120 bp, Artificial Sequence
  ENSG00000005249_31 (sequence is synthesized)
ctggacgatagaagatttttgcctcatatgttgtttagaatttatcacccatgtaagatgcgaatctactgaaacagaaacataaataagtatgtgcagaagcttataatcctgatgaag

SEQ ID NO: 4075 - DNA, 120 bp, Artificial Sequence
  ENSG00000005249_32 (sequence is synthesized)
gggcagatggtaggcttgccagctgagtggtgcgcacaccaggatgagattgcagctttcagtggacagatttgcgtgttatggacatttggattgcacaaaaactgtcagaactataaa

SEQ ID NO: 4076 - DNA, 120 bp, Artificial Sequence
  ENSG00000005249_33 (sequence is synthesized)
tctgagactttcaaggatatactatccttcagctaaagatgatttcaacatacatgagcaatttctgttctgttttctaattttatcatttaagaaatgatgctgctgaatagatttatt

SEQ ID NO: 4077 - DNA, 120 bp, Artificial Sequence
  ENSG00000005302_0 (sequence is synthesized)
agcctcgccctccgccacgatgagcaaatgagcgcgagcgagggcatgaaatttaaattccactcaggggagaaagtgctgtgcttcgagcctgaccccaccaaggcgcgagtgctgtac

SEQ ID NO: 4078 - DNA, 120 bp, Artificial Sequence
  ENSG00000005302_1 (sequence is synthesized)
gatgccaagattgttgatgttattgttgggaaagacgaaaaaggcagaaagatcccagaatatctgatccattttaatggttggaacagaagctgggatagatgggcagcagaagatcat

SEQ ID NO: 4079 - DNA, 120 bp, Artificial Sequence
  ENSG00000005302_2 (sequence is synthesized)
gtgcttcgtgataccgatgaaaatcgtagattacagcgtaaattggcaagaaaagctgtagctcgcctgaggagcacaggaagaaagaagaagcgctgcaggttgcctggtgtggactct

SEQ ID NO: 4080 - DNA, 120 bp, Artificial Sequence
  ENSG00000005302_3 (sequence is synthesized)
gtcttaaaaggcctccccactgaagaaaaagatgaaaatgatgaaaactcattaagcagttcctctgactgtagtgaaaacaaggatgaagaaataagtgaagaaagtgatattgaagaa

SEQ ID NO: 4081 - DNA, 120 bp, Artificial Sequence
  ENSG00000005302_4 (sequence is synthesized)
aagactgaagtgaaagaagaaccagagcttcaaacaagaagggaaatggaagaaagaacaataactatagaaatccctgaagttctgaagaagcagctggaggatgattgttactacatt

SEQ ID NO: 4082 - DNA, 120 bp, Artificial Sequence
  ENSG00000005302_5 (sequence is synthesized)
aacaggaggaaacggttagtgaaacttccatgccagaccaacatcataacgattttggaatcctatgtgaagcattttgctatcaatgcagccttttcagccaatgagaggcctcgtcac

SEQ ID NO: 4083 - DNA, 120 bp, Artificial Sequence
  ENSG00000005302_6 (sequence is synthesized)
catcacgttatgccacatgccaacatgaacgtgcattatatcccagcagaaaagaatgttgacctttgtaaggagatggtggatggattaagaataacctttgattacactctcccgttg

SEQ ID NO: 4084 - DNA, 120 bp, Artificial Sequence
  ENSG00000005302_7 (sequence is synthesized)
gttttactctatccatatgaacaagctcagtataaaaaggtgacttcgtctaaattttttcttccaattaaggaaagtgccacaagcactaacaggagccaggaggaactctctcccagt

SEQ ID NO: 4085 - DNA, 120 bp, Artificial Sequence
  ENSG00000005302_8 (sequence is synthesized)
ccgcctttgttgaatccatccacgccacagtccacagagagtcagccgaccaccggtgaaccagccacccccaaaaggcgcaaagctgagccagaagcattgcagtctctgaggcggtcc

SEQ ID NO: 4086 - DNA, 120 bp, Artificial Sequence
  ENSG00000005302_9 (sequence is synthesized)
cacagtgccaactgtgacaggctttctgagagcagcgcttcacctcagcccaagcgccggcagcaggacacatccgccagcatgcccaagctcttcctgcacctggaaaagaagacacct

SEQ ID NO: 4087 - DNA, 120 bp, Artificial Sequence
  ENSG00000005302_10 (sequence is synthesized)
gtgcatagcagatcatcttcacctattcctctgactcctagcaaggaagggagtgctgtgtttgctggctttgaagggagaagaactaatgaaataaacgaggtcctctcctggaagctt

SEQ ID NO: 4088 - DNA, 120 bp, Artificial Sequence
  ENSG00000005302_11 (sequence is synthesized)
gtgcctgacaattaccccccaggtgaccagccgcctccaccctcttacatttatggggcacaacatttgctgcgattgtttgtgaaacttccagaaatccttggaaagatgtccttttct

SEQ ID NO: 4089 - DNA, 120 bp, Artificial Sequence
  ENSG00000005302_12 (sequence is synthesized)
gagaagaatctgaaggctttattgaagcactttgatctctttttgaggtttttagcagaataccacgatgacttcttcccagagtcggcttatgtcgctgcctgtgaggcacattacagc

SEQ ID NO: 4090 - DNA, 120 bp, Artificial Sequence
  ENSG00000005302_13 (sequence is synthesized)
accaagaacccccgggcaatttattaaaatgttgttggttctgtaagagcaactgctctgtctagtttggcgctctgggttccaggtgaataactaacaaggtggtgggtctttacccac

SEQ ID NO: 4091 - DNA, 120 bp, Artificial Sequence
  ENSG00000005302_14 (sequence is synthesized)
agcgcaaacacaatgcccaccttggggctctgttgtttgagttgcccacatactgcagttattctgttaggaatgattccctgggtgcctgaaagtgctctgacacgacacttgttactt

SEQ ID NO: 4092 - DNA, 120 bp, Artificial Sequence
  ENSG00000005302_15 (sequence is synthesized)
tgcaggccatctgtgatggcaaggaaaaagcaactatgttcacagtgaaatattcgtggaataggttaggccatttcagtagacattgcagttagttagcaagaaccacattgtctcttt

SEQ ID NO: 4093 - DNA, 120 bp, Artificial Sequence
  ENSG00000005302_16 (sequence is synthesized)
atttgttagcattaaacaaatttttttttgcaaattggttttatttttttgatgaagccgagcaactctgtccaaaaaggtttagtttgtactcggaaaccacaaagtagtctcaaagta

SEQ ID NO: 4094 - DNA, 120 bp, Artificial Sequence
  ENSG00000005302_17 (sequence is synthesized)
ttttagagggaatcgatattgatggcaaaagaaaatttgcagctatgcatttgcttctaacggttccctctctgtgaaacattatttttggtgatctaaagaaagcattgcctttcttat

SEQ ID NO: 4095 - DNA, 120 bp, Artificial Sequence
  ENSG00000005302_18 (sequence is synthesized)
ttgagattttacagctatactttgttgtgtaatgttatggttccctttctgtaaaatgttatttttggtgatctaaataaagcctgtcttgtttgaaagaaccaggagagagagttttca

SEQ ID NO: 4096 - DNA, 120 bp, Artificial Sequence
  ENSG00000005302_19 (sequence is synthesized)
aaaaatgaaaggaaaaatatttcaacccggctgtcggtctaaaagaggagagaatgctttctttaaaaaagggtctgtgaattagttttcctgatctaacttctaattttctgtatgttc

SEQ ID NO: 4097 - DNA, 120 bp, Artificial Sequence
  ENSG00000005302_20 (sequence is synthesized)
actgtgagtagcttcacttcatttcttttggctgaaagaacttccacctagactgagagaaggattcactgaaattctagacagggaaacacttcaagctcattatgtataatatttgcc

SEQ ID NO: 4098 - DNA, 120 bp, Artificial Sequence
  ENSG00000005302_21 (sequence is synthesized)
aacaggtaagttatatagcctgcactttcaccctcacatgtcagcagtacaatgatcagatccttgttttgaagagttcaatctgatggtgtgggccaacatgtttggaggagggaagga

SEQ ID NO: 4099 - DNA, 120 bp, Artificial Sequence
  ENSG00000005302_22 (sequence is synthesized)
aatgaaaagtgtgtgtcctggtggttttcttttttcctgggtaagctaagtcatcattcactttcatatggctctggcagattttaccaagtgaagaccccagcatagagaacttaggtg

SEQ ID NO: 4100 - DNA, 120 bp, Artificial Sequence
  ENSG00000005302_23 (sequence is synthesized)
ggatgatgagcagctctcccattttggggaagacggtagtgggtggggtgaagagagcacaggccggggagggtggaaggggcaggtttgaattgagtcccctcactggctgtttgtgtt

SEQ ID NO: 4101 - DNA, 120 bp, Artificial Sequence
  ENSG00000005302_24 (sequence is synthesized)
agttgcagaggtttcttaggagcctccttcttttgcaggtgtgggatggacggaaggcaggcctagctagtagtattaaatgggaatgttcacacagggcctgcaaactttggccttcag

SEQ ID NO: 4102 - DNA, 120 bp, Artificial Sequence
  ENSG00000005302_25 (sequence is synthesized)
taaaagttacttctcttcttgctctgcgatgtcaccacttttcctccctcagttaccgagcatgctctgttcttttttgagggggcagggagggggatcctgcaacctaaagtctttccc

SEQ ID NO: 4103 - DNA, 120 bp, Artificial Sequence
  ENSG00000005302_26 (sequence is synthesized)
ttaatctctataaggtattgtgctcgctccctcttccctctcttcctgagagagtggtctgttctcatgatttccactcatctgtctcctctgttaaccacttattatctgccttcatct

SEQ ID NO: 4104 - DNA, 120 bp, Artificial Sequence
  ENSG00000005302_27 (sequence is synthesized)
actgctgtgctgcaaaactttgcctgcacgtgaactgataacctcccacttgcagtgtgctgccctttttctcggccaccttgccctgccctccctttctccctctgcttcatggctgtc

SEQ ID NO: 4105 - DNA, 120 bp, Artificial Sequence
  ENSG00000005302_28 (sequence is synthesized)
ctctctctcctttccctttccccatgtcagtttcaccccaggtgagaggcctgcaggactcactggggacctatgtcaaagtccccagggcctacttcaaaccttgagactcctccgggg

SEQ ID NO: 4106 - DNA, 120 bp, Artificial Sequence
  ENSG00000005302_29 (sequence is synthesized)
tgggttgtgtgttttcacacagcaaccccaatgcttttcttagtcctgccagtagttacgtttcaacgaggtggtagggtattcttgttctctagaccagcgtttctcagcctcggccct

SEQ ID NO: 4107 - DNA, 120 bp, Artificial Sequence
  ENSG00000005302_30 (sequence is synthesized)
attgatgttttgaatcagatctttctttgttgtggggctgcctgtgcaatataggatgtttagcagaattagtggccttcacccactagatgcggataacacctctttcctcagttgcag

SEQ ID NO: 4108 - DNA, 120 bp, Artificial Sequence
  ENSG00000005302_31 (sequence is synthesized)
caaccaaaattgtctccagacattgccatctgttccctgtcagggcaacattgctcccacttgagacccactgctctaagacacatataacaggggcatcacaatctttaatgccagcgt

SEQ ID NO: 4109 - DNA, 120 bp, Artificial Sequence
  ENSG00000005302_32 (sequence is synthesized)
gccttgcagagttatggagagggtccaagtgacttcggtacatatttacgaccctcctggagtagagagagcatttcgtgtcttcagaagcactccatgttctggaaaggccctttgagc

SEQ ID NO: 4110 - DNA, 120 bp, Artificial Sequence
  ENSG00000005302_33 (sequence is synthesized)
tctgtgttcaggtgcccatttccttgtgtacatcctgtccctgccacatccataagctcctgagagaaaggtctgacttgttgattgtgtcaccccatcacagctcagtgttggtggcat

SEQ ID NO: 4111 - DNA, 120 bp, Artificial Sequence
  ENSG00000005302_34 (sequence is synthesized)
agttccaggtgcgtgaaagtatttgctgattctttgaagattgggaaggctcagaagggcagagttgaagaaggcatacctttaagagaagccctttgaataatcaagtgctaaaacaaa

SEQ ID NO: 4112 - DNA, 120 bp, Artificial Sequence
  ENSG00000005302_35 (sequence is synthesized)
atcaggtgcttttttaaaacagcttgattgagatataatccacataccttaaaattcacacatttaaagtttttagtgtctccagacacagtggttcatgcctgtgagactggggcagga

SEQ ID NO: 4113 - DNA, 87 bp, Artificial Sequence
  ENSG00000005302_36 (sequence is synthesized)
ggagttcaagatcagcctgggcaatatagtgaaaccccatctcttaaagaaaaagttagccaggtgtgatgatcagctgtggctgtg

SEQ ID NO: 4114 - DNA, 120 bp, Artificial Sequence
  ENSG00000005302_37 (sequence is synthesized)
tgcagctgtggctgtggctgaagctggcggatcgcttgaggcccagagtctaagactgcagtgagctctcattgggccactgcagtcgagcctgggcgacacaaagagaccaccctgtct

SEQ ID NO: 4115 - DNA, 120 bp, Artificial Sequence
  ENSG00000005302_38 (sequence is synthesized)
aatcagtttcagacattttcaccactccaaaaaagaaaccccacatcgactagcagttactcatttgcttctccctatgtcccctgacaaccactaatctatttgtctctatagatttgc

SEQ ID NO: 4116 - DNA, 120 bp, Artificial Sequence
  ENSG00000005302_39 (sequence is synthesized)
cagtttggggcatttcatataaatggaatcatctgtatgtaagtggttaataaggattggttgattgaagattgaaaagggtcagctgggaaaatttttaaaaagactgtttttaaaaag

SEQ ID NO: 4117 - DNA, 120 bp, Artificial Sequence
  ENSG00000005302_40 (sequence is synthesized)
gtgctacaaaataaagtgctatctttttctgtttctctttgtactttttattttttatttgtatttattgatgtgaaattcacatataaaattaaccattgtaaagtgaataattcagtg

SEQ ID NO: 4118 - DNA, 120 bp, Artificial Sequence
  ENSG00000005302_41 (sequence is synthesized)
gcacttaacagcttcattgacacatccacatatacagttcaatccagtagtttttagtgtattcacagagttgtgcgaccatctgcacagtcaattccagaacattttcagcaccccccc

SEQ ID NO: 4119 - DNA, 120 bp, Artificial Sequence
  ENSG00000005302_42 (sequence is synthesized)
acgagaaaccccatacccagtagcaatcactccccacttccccttctgcaagctcctggcaaccactaagctgctttcggtctctctggatttgcctaccctgggtatttcatataaatg

SEQ ID NO: 4120 - DNA, 120 bp, Artificial Sequence
  ENSG00000005302_43 (sequence is synthesized)
gaaacatagtatgtggccctttgtgattggctccattcactaagcatagtcttttaaggttcatccacattgtagcatatgtcagtgctttattccttatttttttaaccaaataaaatt

SEQ ID NO: 4121 - DNA, 120 bp, Artificial Sequence
  ENSG00000005302_44 (sequence is synthesized)
caggtgctatctgttaggaaagtcttatcgttaaaggttggtaatttctgagaaccaagtttagatttatgttctgcagtttttaacagtcttgaggcagtctttaattcagttgctgtg

SEQ ID NO: 4122 - DNA, 120 bp, Artificial Sequence
  ENSG00000005302_45 (sequence is synthesized)
cacttccttccgtcaggccgggcggcgcacgcgcggttgggagcctcgcccatgctttgtcgcgttaccggggctaccgtttgcgcccccgactgcaacggtggccgctgagggaggagg

SEQ ID NO: 4123 - DNA, 120 bp, Artificial Sequence
  ENSG00000005302_46 (sequence is synthesized)
ggtgccccaggccggggagagccagcgtgtactttgtgtttagtcagtgccaggcatggtgctgaggttacatgtgtgtgtgtacagtgcgtgtgattcccatgtccaaagtgctgtcat

SEQ ID NO: 4124 - DNA, 120 bp, Artificial Sequence
  ENSG00000005302_47 (sequence is synthesized)
gctgcctgctttctggagctgtagaaagttgaaacacctggcgcagattgcagcgcagctgtgttggaggcaggactgggctgtttcctcagcctttcttttttgccatcactctaccac

SEQ ID NO: 4125 - DNA, 120 bp, Artificial Sequence
  ENSG00000005302_48 (sequence is synthesized)
ttgtgagcaaattgagttatcagaattctatgtattgtgtagctaggcctaatgaagcattcaaaatgagcaatgctaatgggttgtttagctttttgttttctttgtactctgtctctg

SEQ ID NO: 4126 - DNA, 120 bp, Artificial Sequence
  ENSG00000005302_49 (sequence is synthesized)
tagtctctccattctaaagtttaatttggaaaggtctgtcctgaattatcaaagtaagaatactcagatttccataagctcttctcacctcctcttagcccaactcaaactccatcagat

SEQ ID NO: 4127 - DNA, 120 bp, Artificial Sequence
  ENSG00000005302_50 (sequence is synthesized)
ttctttttttccaaaatacacacaggttgatttgctgtaatataaaacttagaagtaaaccactgctaattaatcattttaaactttcaaaaactgctaaaacaggtgccatgaatcagg

SEQ ID NO: 4128 - DNA, 120 bp, Artificial Sequence
  ENSG00000005302_51 (sequence is synthesized)
tacaattactgtagaaactaacattagctattatacactaaccaggcatttttcccaaattaattacaatctggttgtttagcctatgctaattaagccctcttagtagtagtattcact

SEQ ID NO: 4129 - DNA, 120 bp, Artificial Sequence
  ENSG00000005302_52 (sequence is synthesized)
ttacattgaagacctcattcacaaatacagggtgctctgtgcttatatccttccacccttgactgccaaaaatgtgtgaaatggaaagttgatggcagcagggccgacgatgtcacctgg

SEQ ID NO: 4130 - DNA, 120 bp, Artificial Sequence
  ENSG00000005302_53 (sequence is synthesized)
tgcctcgcgggctcagtgagttaggaagtcagcagcaggggaggcagcttgcatgcctgtcccccggcacactgtgtggaggtggaaacagagctacgccagcaggcgccaagcacccaa

SEQ ID NO: 4131 - DNA, 120 bp, Artificial Sequence
  ENSG00000005302_54 (sequence is synthesized)
ctccagagatggaagcctggtggccttcctttcacagagctcagctgctcgcaggctgtgaaatctaagacacccctcataaatatcaaaaacacctccaaagctaacgtcagggtaaaa

SEQ ID NO: 4132 - DNA, 120 bp, Artificial Sequence
  ENSG00000005302_55 (sequence is synthesized)
ctacttggagtcgaatccccatgccccagtaggtgtatcttgtgtatgacctgtgccctgttcttccctcagcctcgcctgctgtgctgactccttcaggggtccttctaagcatcatcc

SEQ ID NO: 4133 - DNA, 120 bp, Artificial Sequence
  ENSG00000005302_56 (sequence is synthesized)
gtatttggattctgtctgggtgattctggaaaccccagttgtttctgtgtctgaatgagttactttttcagtttatttgcctcctctttgtgattttaaaatatttaaatcgttttctaa

SEQ ID NO: 4134 - DNA, 120 bp, Artificial Sequence
  ENSG00000005302_57 (sequence is synthesized)
gtttcatttcctgtctttactttgtagcgttgcaaacttctttaagttttagaaacacttgtagagaagtttgattcatttcctgtttttactttgttaccagaacttgcctattgtgac

SEQ ID NO: 4135 - DNA, 120 bp, Artificial Sequence
  ENSG00000005302_58 (sequence is synthesized)
gccctctcggccagcatctttgtacaaacccctcatgggtgtgttctcatgggatctgttctctttttggcacctcccaggccttggtcccatttatgaatgcaacaggaaactgtagga

SEQ ID NO: 4136 - DNA, 120 bp, Artificial Sequence
  ENSG00000005302_59 (sequence is synthesized)
tcctaactgacaatacactttccgatcattagctagtgtgatttttgcatccattgaaattggttgtcaaaataaatttctattgtgaaagatacagtatttgtgtttggcatttaaaaa

SEQ ID NO: 4137 - DNA, 120 bp, Artificial Sequence
  ENSG00000005302_60 (sequence is synthesized)
tacatggaattgcagtttattatttccagtagcacccacactacacgtgaagatctgtagacataagggttggtgaagtataaaatgcgagtttaccggatgcttttgtttcacctagca

SEQ ID NO: 4138 - DNA, 120 bp, Artificial Sequence
  ENSG00000005302_61 (sequence is synthesized)
ttaagcagttcctctgactgtagtgaaaacaaggatgaagaaataagtgaagaaagtgatattgaagaaaagactgaagtggtataaagtttttattgtaaaaactttctctttgttata

SEQ ID NO: 4139 - DNA, 120 bp, Artificial Sequence
  ENSG00000005302_62 (sequence is synthesized)
tattttagtggtaaaaattcacagtgaaatactccagttgtgaattgttttctaaagatacatcttttaaaccaataatgtaaatttttatttgacatttaaagaaaaacaacccttatt

SEQ ID NO: 4140 - DNA, 120 bp, Artificial Sequence
  ENSG00000005302_63 (sequence is synthesized)
tatagtcgccgtatgagtctctcagtggctctttatgcccctaaaatgtttccacaaattatagttatctttctttccagtcaaattatttgttttataatgattaattttttaatggag

SEQ ID NO: 4141 - DNA, 120 bp, Artificial Sequence
  ENSG00000005302_64 (sequence is synthesized)
cctacagactgtgatgtcttctgcctgcatccaaagttaatataaatccgagtggtaaactgaaatgggaaagaaatgaaatacatatttgcattgtgtttagtgcccccaaacaagtta

SEQ ID NO: 4142 - DNA, 120 bp, Artificial Sequence
  ENSG00000005302_65 (sequence is synthesized)
acttttggcctttaacatacttttaattagaacacgtggcatactatgattgttgaggattagctgggtttgtttcatagcaggccttccttggatattgactcttctactgttttaaat

SEQ ID NO: 4143 - DNA, 120 bp, Artificial Sequence
  ENSG00000005302_66 (sequence is synthesized)
aacgaggtaaagaatgtttgatgtttgttcccaatggttcctttatttgtgattacttcaattctataggtggaagtcaaggttcttaaagcatcatgttgctgctattactgtaaacat

SEQ ID NO: 4144 - DNA, 120 bp, Artificial Sequence
  ENSG00000005302_67 (sequence is synthesized)
tatcaaaattgtacgtaattttatgcttaacactgtgggttttggtttctaaagtgagaaaattgttaggattccagccctacactgacaatcatcttttaaataagtgcaattattgaa

SEQ ID NO: 4145 - DNA, 120 bp, Artificial Sequence
  ENSG00000005302_68 (sequence is synthesized)
aacagggagggattccagagtctccagctagccatcctggcactggacataggggagcccaggagactacaactcccagagctctcagggctgcagctttcatctagcctggagtctctc

SEQ ID NO: 4146 - DNA, 120 bp, Artificial Sequence
  ENSG00000005302_69 (sequence is synthesized)
atgtcaatttccacagagggccagagggtaaatactttcggctttgtgggccatatggtgtctgtcaaggctacttaactccaaaagtagccacagatagtatgtaaataaaatgagtgt

SEQ ID NO: 4147 - DNA, 120 bp, Artificial Sequence
  ENSG00000005302_70 (sequence is synthesized)
gacgccctggccgtccgatccaggttctaattcatagttacacggcgctggccgctgacttgcgacgttgtgtccctgggaccctagtccagtttaggccccatcccgcctgtaggccgt

SEQ ID NO: 4148 - DNA, 120 bp, Artificial Sequence
  ENSG00000005302_71 (sequence is synthesized)
gggtctgaccatagttgatgggaatcgcgccccgggccggtccacctaagtctccgggagctgagccacatcttgcagctcctcagatttgggtggcgggcaggagttggcaccaggtct

SEQ ID NO: 4149 - DNA, 120 bp, Artificial Sequence
  ENSG00000005302_72 (sequence is synthesized)
cccagatccccaaggaaagcacccaggtgctttcatttcagagacctgggttcctagggccacctgggcgaagccttaggcggcagggacaggggcagtcccaggtgtgtctttggcgat

SEQ ID NO: 4150 - DNA, 120 bp, Artificial Sequence
  ENSG00000005302_73 (sequence is synthesized)
gtctggacagctctgtccattagagatgctaaaggacatccctaaagggatgagcatattctgccttcagttccctcccctgctgctcctgtcttttaaccgcgtctgctatccctcttt

SEQ ID NO: 4151 - DNA, 120 bp, Artificial Sequence
  ENSG00000005302_74 (sequence is synthesized)
tgatccattttaatggttggaacagaaggaggagcacaggaagaaagaagaagcgctgcaggttgcctggtgtggactctgtcttaaaaggcctccccactgaagaaaaagatgaaaatg

SEQ ID NO: 4152 - DNA, 120 bp, Artificial Sequence
  ENSG00000005339_0 (sequence is synthesized)
ttcttttttttttaattgaggaatcaacagccgccatcttgtcgcggacccgaccggggcttcgagcgcgatctactcggccccgccggtcccgggccccacaaccgcccgcgcaccccg

SEQ ID NO: 4153 - DNA, 120 bp, Artificial Sequence
  ENSG00000005339_1 (sequence is synthesized)
gcggcggcgaccccgctcggcgcattgtttttcctcacggcggcggcggcggcgggccgcgggccgggagcggagcccggagccccctcgtcgtcgggccgcgagcgaattcattaagtg

SEQ ID NO: 4154 - DNA, 120 bp, Artificial Sequence
  ENSG00000005339_2 (sequence is synthesized)
gtcgggccgcgagcgaattcattaagtggggcgcggggggggagcgaggcggcggcggcggcggcaccatgttctcggggactgcctgagccgcccggccgggcgccgtcgctgccagcc

SEQ ID NO: 4155 - DNA, 80 bp, Artificial Sequence
  ENSG00000005339_3 (sequence is synthesized)
tgagcgctgcggggcgctgttgctgtggctgagatttggccgccgcctcccccacccggcctgcgccctccctctccctc

SEQ ID NO: 4156 - DNA, 120 bp, Artificial Sequence
  ENSG00000005339_4 (sequence is synthesized)
ccctcgcagccggcagggcccccgacccccgtccgggccctcgccggcccggccgcccgtgcccggggctgttttcgcgagcaggtgaaaatggctgagaacttgctggacggaccgccc

SEQ ID NO: 4157 - DNA, 120 bp, Artificial Sequence
  ENSG00000005339_5 (sequence is synthesized)
aaccccaaaagagccaaactcagctcgcccggtttctcggcgaatgacagcacagattttggatcattgtttgacttggaaaatgatcttcctgatgagctgatacccaatggaggagaa

SEQ ID NO: 4158 - DNA, 120 bp, Artificial Sequence
  ENSG00000005339_6 (sequence is synthesized)
ttaggccttttaaacagtgggaaccttgttccagatgctgcttccaaacataaacaactgtcggagcttctacgaggaggcagcggctctagtatcaacccaggaataggaaatgtgagc

SEQ ID NO: 4159 - DNA, 120 bp, Artificial Sequence
  ENSG00000005339_7 (sequence is synthesized)
gccagcagccccgtgcagcagggcctgggtggccaggctcaagggcagccgaacagtgctaacatggccagcctcagtgccatgggcaagagccctctgagccagggagattcttcagcc

SEQ ID NO: 4160 - DNA, 120 bp, Artificial Sequence
  ENSG00000005339_8 (sequence is synthesized)
cccagcctgcctaaacaggcagccagcacctctgggcccacccccgctgcctcccaagcactgaatccgcaagcacaaaagcaagtggggctggcgactagcagccctgccacgtcacag

SEQ ID NO: 4161 - DNA, 120 bp, Artificial Sequence
  ENSG00000005339_9 (sequence is synthesized)
actggacctggtatctgcatgaatgctaactttaaccagacccacccaggcctcctcaatagtaactctggccatagcttaattaatcaggcttcacaagggcaggcgcaagtcatgaat

SEQ ID NO: 4162 - DNA, 120 bp, Artificial Sequence
  ENSG00000005339_10 (sequence is synthesized)
ggatctcttggggctgctggcagaggaaggggagctggaatgccgtaccctactccagccatgcagggcgcctcgagcagcgtgctggctgagaccctaacgcaggtttccccgcaaatg

SEQ ID NO: 4163 - DNA, 120 bp, Artificial Sequence
  ENSG00000005339_11 (sequence is synthesized)
actggtcacgcgggactgaacaccgcacaggcaggaggcatggccaagatgggaataactgggaacacaagtccatttggacagccctttagtcaagctggagggcagccaatgggagcc

SEQ ID NO: 4164 - DNA, 120 bp, Artificial Sequence
  ENSG00000005339_12 (sequence is synthesized)
actggagtgaacccccagttagccagcaaacagagcatggtcaacagtttgcccaccttccctacagatatcaagaatacttcagtcaccaacgtgccaaatatgtctcagatgcaaaca

SEQ ID NO: 4165 - DNA, 120 bp, Artificial Sequence
  ENSG00000005339_13 (sequence is synthesized)
tcagtgggaattgtacccacacaagcaattgcaacaggccccactgcagatcctgaaaaacgcaaactgatacagcagcagctggttctactgcttcatgctcataagtgtcagagacga

SEQ ID NO: 4166 - DNA, 120 bp, Artificial Sequence
  ENSG00000005339_14 (sequence is synthesized)
gagcaagcaaacggagaggttcgggcctgctcgctcccgcattgtcgaaccatgaaaaacgttttgaatcacatgacgcattgtcaggctgggaaagcctgccaagttgcccattgtgca

SEQ ID NO: 4167 - DNA, 120 bp, Artificial Sequence
  ENSG00000005339_15 (sequence is synthesized)
tcttcacgacaaatcatctctcattggaagaactgcacacgacatgactgtcctgtttgcctccctttgaaaaatgccagtgacaagcgaaaccaacaaaccatcctggggtctccagct

SEQ ID NO: 4168 - DNA, 120 bp, Artificial Sequence
  ENSG00000005339_16 (sequence is synthesized)
agtggaattcaaaacacaattggttctgttggcacagggcaacagaatgccacttctttaagtaacccaaatcccatagaccccagctccatgcagcgagcctatgctgctctcggactc

SEQ ID NO: 4169 - DNA, 120 bp, Artificial Sequence
  ENSG00000005339_17 (sequence is synthesized)
ccctacatgaaccagccccagacgcagctgcagcctcaggttcctggccagcaaccagcacagcctcaaacccaccagcagatgaggactctcaaccccctgggaaataatccaatgaac

SEQ ID NO: 4170 - DNA, 120 bp, Artificial Sequence
  ENSG00000005339_18 (sequence is synthesized)
attccagcaggaggaataacaacagatcagcagcccccaaacttgatttcagaatcagctcttccgacttccctgggggccacaaacccactgatgaacgatggctccaactctggtaac

SEQ ID NO: 4171 - DNA, 120 bp, Artificial Sequence
  ENSG00000005339_19 (sequence is synthesized)
attggaaccctcagcactataccaacagcagctcctccttctagcaccggtgtaaggaaaggctggcacgaacatgtcactcaggacctgcggagccatctagtgcataaactcgtccaa

SEQ ID NO: 4172 - DNA, 120 bp, Artificial Sequence
  ENSG00000005339_20 (sequence is synthesized)
gccatcttcccaacacctgatcccgcagctctaaaggatcgccgcatggaaaacctggtagcctatgctaagaaagtggaaggggacatgtacgagtctgccaacagcagggatgaatat

SEQ ID NO: 4173 - DNA, 120 bp, Artificial Sequence
  ENSG00000005339_21 (sequence is synthesized)
tatcacttattagcagagaaaatctacaagatacaaaaagaactagaagaaaaacggaggtcgcgtttacataaacaaggcatcttggggaaccagccagccttaccagccccgggggct

SEQ ID NO: 4174 - DNA, 120 bp, Artificial Sequence
  ENSG00000005339_22 (sequence is synthesized)
cagccccctgtgattccacaggcacaacctgtgagacctccaaatggacccctgtccctgccagtgaatcgcatgcaagtttctcaagggatgaattcatttaaccccatgtccttgggg

SEQ ID NO: 4175 - DNA, 120 bp, Artificial Sequence
  ENSG00000005339_23 (sequence is synthesized)
aacgtccagttgccacaagcacccatgggacctcgtgcagcctccccaatgaaccactctgtccagatgaacagcatgggctcagtgccagggatggccatttctccttcccgaatgcct

SEQ ID NO: 4176 - DNA, 120 bp, Artificial Sequence
  ENSG00000005339_24 (sequence is synthesized)
cagcctccgaacatgatgggtgcacacaccaacaacatgatggcccaggcgcccgctcagagccagtttctgccacagaaccagttcccgtcatccagcggggcgatgagtgtgggcatg

SEQ ID NO: 4177 - DNA, 120 bp, Artificial Sequence
  ENSG00000005339_25 (sequence is synthesized)
gggcagccgccagcccaaacaggcgtgtcacagggacaggtgcctggtgctgctcttcctaaccctctcaacatgctggggcctcaggccagccagctaccttgccctccagtgacacag

SEQ ID NO: 4178 - DNA, 120 bp, Artificial Sequence
  ENSG00000005339_26 (sequence is synthesized)
tcaccactgcacccaacaccgcctcctgcttccacggctgctggcatgccatctctccagcacacgacaccacctgggatgactcctccccagccagcagctcccactcagccatcaact

SEQ ID NO: 4179 - DNA, 120 bp, Artificial Sequence
  ENSG00000005339_27 (sequence is synthesized)
cctgtgtcgtcttccgggcagactcccaccccgactcctggctcagtgcccagtgctacccaaacccagagcacccctacagtccaggcagcagcccaggcccaggtgaccccgcagcct

SEQ ID NO: 4180 - DNA, 120 bp, Artificial Sequence
  ENSG00000005339_28 (sequence is synthesized)
caaaccccagttcagcccccgtctgtggctacccctcagtcatcgcagcaacagccgacgcctgtgcacgcccagcctcctggcacaccgctttcccaggcagcagccagcattgataac

SEQ ID NO: 4181 - DNA, 120 bp, Artificial Sequence
  ENSG00000005339_29 (sequence is synthesized)
agagtccctaccccctcctcggtggccagcgcagaaaccaattcccagcagccaggacctgacgtacctgtgctggaaatgaagacggagacccaagcagaggacactgagcccgatcct

SEQ ID NO: 4182 - DNA, 120 bp, Artificial Sequence
  ENSG00000005339_30 (sequence is synthesized)
ggtgaatccaaaggggagcccaggtctgagatgatggaggaggatttgcaaggagcttcccaagttaaagaagaaacagacatagcagagcagaaatcagaaccaatggaagtggatgaa

SEQ ID NO: 4183 - DNA, 120 bp, Artificial Sequence
  ENSG00000005339_31 (sequence is synthesized)
aagaaacctgaagtgaaagtagaagttaaagaggaagaagagagtagcagtaacggcacagcctctcagtcaacatctccttcgcagccgcgcaaaaaaatctttaaaccagaggagtta

SEQ ID NO: 4184 - DNA, 120 bp, Artificial Sequence
  ENSG00000005339_32 (sequence is synthesized)
cgccaggccctcatgccaaccctagaagcactgtatcgacaggacccagagtcattacctttccggcagcctgtagatccccagctcctcggaattccagactattttgacatcgtaaag

SEQ ID NO: 4185 - DNA, 120 bp, Artificial Sequence
  ENSG00000005339_33 (sequence is synthesized)
aatcccatggacctctccaccatcaagcggaagctggacacagggcaataccaagagccctggcagtacgtggacgacgtctggctcatgttcaacaatgcctggctctataatcgcaag

SEQ ID NO: 4186 - DNA, 120 bp, Artificial Sequence
  ENSG00000005339_34 (sequence is synthesized)
acatcccgagtctataagttttgcagtaagcttgcagaggtctttgagcaggaaattgaccctgtcatgcagtcccttggatattgctgtggacgcaagtatgagttttccccacagact

SEQ ID NO: 4187 - DNA, 120 bp, Artificial Sequence
  ENSG00000005339_35 (sequence is synthesized)
ttgtgctgctatgggaagcagctgtgtaccattcctcgcgatgctgcctactacagctatcagaataggtatcatttctgtgagaagtgtttcacagagatccagggcgagaatgtgacc

SEQ ID NO: 4188 - DNA, 120 bp, Artificial Sequence
  ENSG00000005339_36 (sequence is synthesized)
ctgggtgacgacccttcacagccccagacgacaatttcaaaggatcagtttgaaaagaagaaaaatgataccttagaccccgaacctttcgttgattgcaaggagtgtggccggaagatg

SEQ ID NO: 4189 - DNA, 120 bp, Artificial Sequence
  ENSG00000005339_37 (sequence is synthesized)
catcagatttgcgttctgcactatgacatcatttggccttcaggttttgtgtgcgacaactgcttgaagaaaactggcagacctcgaaaagaaaacaaattcagtgctaagaggctgcag

SEQ ID NO: 4190 - DNA, 120 bp, Artificial Sequence
  ENSG00000005339_38 (sequence is synthesized)
accacaagactgggaaaccacttggaagaccgagtgaacaaatttttgcggcgccagaatcaccctgaagccggggaggtttttgtccgagtggtggccagctcagacaagacggtggag

SEQ ID NO: 4191 - DNA, 120 bp, Artificial Sequence
  ENSG00000005339_39 (sequence is synthesized)
gtcaagcccgggatgaagtcacggtttgtggattctggggaaatgtctgaatctttcccatatcgaaccaaagctctgtttgcttttgaggaaattgacggcgtggatgtctgctttttt

SEQ ID NO: 4192 - DNA, 120 bp, Artificial Sequence
  ENSG00000005339_40 (sequence is synthesized)
ggaatgcacgtccaagaatacggctctgattgcccccctccaaacacgaggcgtgtgtacatttcttatctggatagtattcatttcttccggccacgttgcctccgcacagccgtttac

SEQ ID NO: 4193 - DNA, 120 bp, Artificial Sequence
  ENSG00000005339_41 (sequence is synthesized)
catgagatccttattggatatttagagtatgtgaagaaattagggtatgtgacagggcacatctgggcctgtcctccaagtgaaggagatgattacatcttccattgccacccacctgat

SEQ ID NO: 4194 - DNA, 120 bp, Artificial Sequence
  ENSG00000005339_42 (sequence is synthesized)
caaaaaatacccaagccaaaacgactgcaggagtggtacaaaaagatgctggacaaggcgtttgcagagcggatcatccatgactacaaggatattttcaaacaagcaactgaagacagg

SEQ ID NO: 4195 - DNA, 120 bp, Artificial Sequence
  ENSG00000005339_43 (sequence is synthesized)
accagtgccaaggaactgccctattttgaaggtgatttctggcccaatgtgttagaagagagcattaaggaactagaacaagaagaagaggagaggaaaaaggaagagagcactgcagcc

SEQ ID NO: 4196 - DNA, 120 bp, Artificial Sequence
  ENSG00000005339_44 (sequence is synthesized)
agtgaaaccactgagggcagtcagggcgacagcaagaatgccaagaagaagaacaacaagaaaaccaacaagaacaaaagcagcatcagccgcgccaacaagaagaagcccagcatgccc

SEQ ID NO: 4197 - DNA, 120 bp, Artificial Sequence
  ENSG00000005339_45 (sequence is synthesized)
aacgtgtccaatgacctgtcccagaagctgtatgccaccatggagaagcacaaggaggtcttcttcgtgatccacctgcacgctgggcctgtcatcaacaccctgccccccatcgtcgac

SEQ ID NO: 4198 - DNA, 120 bp, Artificial Sequence
  ENSG00000005339_46 (sequence is synthesized)
cccgaccccctgctcagctgtgacctcatggatgggcgcgacgccttcctcaccctcgccagagacaagcactgggagttctcctccttgcgccgctccaagtggtccacgctctgcatg

SEQ ID NO: 4199 - DNA, 120 bp, Artificial Sequence
  ENSG00000005339_47 (sequence is synthesized)
ctggtggagctgcacacccagggccaggaccgctttgtctacacctgcaacgagtgcaagcaccacgtggagacgcgctggcactgcactgtgtgcgaggactacgacctctgcatcaac

SEQ ID NO: 4200 - DNA, 120 bp, Artificial Sequence
  ENSG00000005339_48 (sequence is synthesized)
tgctataacacgaagagccatgcccataagatggtgaagtgggggctgggcctggatgacgagggcagcagccagggcgagccacagtcaaagagcccccaggagtcacgccggctgagc

SEQ ID NO: 4201 - DNA, 120 bp, Artificial Sequence
  ENSG00000005339_49 (sequence is synthesized)
atccagcgctgcatccagtcgctggtgcacgcgtgccagtgccgcaacgccaactgctcgctgccatcctgccagaagatgaagcgggtggtgcagcacaccaagggctgcaaacgcaag

SEQ ID NO: 4202 - DNA, 120 bp, Artificial Sequence
  ENSG00000005339_50 (sequence is synthesized)
accaacgggggctgcccggtgtgcaagcagctcatcgccctctgctgctaccacgccaagcactgccaagaaaacaaatgccccgtgcccttctgcctcaacatcaaacacaagctccgc

SEQ ID NO: 4203 - DNA, 120 bp, Artificial Sequence
  ENSG00000005339_51 (sequence is synthesized)
cagcagcagatccagcaccgcctgcagcaggcccagctcatgcgccggcggatggccaccatgaacacccgcaacgtgcctcagcagagtctgccttctcctacctcagcaccgcccggg

SEQ ID NO: 4204 - DNA, 120 bp, Artificial Sequence
  ENSG00000005339_52 (sequence is synthesized)
acccccacacagcagcccagcacaccccagacgccgcagccccctgcccagccccaaccctcacccgtgagcatgtcaccagctggcttccccagcgtggcccggactcagccccccacc

SEQ ID NO: 4205 - DNA, 120 bp, Artificial Sequence
  ENSG00000005339_53 (sequence is synthesized)
acggtgtccacagggaagcctaccagccaggtgccggcccccccacccccggcccagccccctcctgcagcggtggaagcggctcggcagatcgagcgtgaggcccagcagcagcagcac

SEQ ID NO: 4206 - DNA, 120 bp, Artificial Sequence
  ENSG00000005339_54 (sequence is synthesized)
ctgtaccgggtgaacatcaacaacagcatgcccccaggacgcacgggcatggggaccccggggagccagatggcccccgtgagcctgaatgtgccccgacccaaccaggtgagcgggccc

SEQ ID NO: 4207 - DNA, 120 bp, Artificial Sequence
  ENSG00000005339_55 (sequence is synthesized)
gtcatgcccagcatgcctcccgggcagtggcagcaggcgccccttccccagcagcagcccatgccaggcttgcccaggcctgtgatatccatgcaggcccaggcggccgtggctgggccc

SEQ ID NO: 4208 - DNA, 120 bp, Artificial Sequence
  ENSG00000005339_56 (sequence is synthesized)
cggatgcccagcgtgcagccacccaggagcatctcacccagcgctctgcaagacctgctgcggaccctgaagtcgcccagctcccctcagcagcaacagcaggtgctgaacattctcaaa

SEQ ID NO: 4209 - DNA, 120 bp, Artificial Sequence
  ENSG00000005339_57 (sequence is synthesized)
tcaaacccgcagctaatggcagctttcatcaaacagcgcacagccaagtacgtggccaatcagcccggcatgcagccccagcctggcctccagtcccagcccggcatgcaaccccagcct

SEQ ID NO: 4210 - DNA, 120 bp, Artificial Sequence
  ENSG00000005339_58 (sequence is synthesized)
ggcatgcaccagcagcccagcctgcagaacctgaatgccatgcaggctggcgtgccgcggcccggtgtgcctccacagcagcaggcgatgggaggcctgaacccccagggccaggccttg

SEQ ID NO: 4211 - DNA, 120 bp, Artificial Sequence
  ENSG00000005339_59 (sequence is synthesized)
aacatcatgaacccaggacacaaccccaacatggcgagtatgaatccacagtaccgagaaatgttacggaggcagctgctgcagcagcagcagcaacagcagcagcaacaacagcagcaa

SEQ ID NO: 4212 - DNA, 120 bp, Artificial Sequence
  ENSG00000005339_60 (sequence is synthesized)
cagcagcagcagcaagggagtgccggcatggctgggggcatggcggggcacggccagttccagcagcctcaaggacccggaggctacccaccggccatgcagcagcagcagcgcatgcag

SEQ ID NO: 4213 - DNA, 120 bp, Artificial Sequence
  ENSG00000005339_61 (sequence is synthesized)
cagcatctccccctccagggcagctccatgggccagatggcggctcagatgggacagcttggccagatggggcagccggggctgggggcagacagcacccccaacatccagcaagccctg

SEQ ID NO: 4214 - DNA, 120 bp, Artificial Sequence
  ENSG00000005339_62 (sequence is synthesized)
cagcagcggattctgcagcaacagcagatgaagcagcagattgggtccccaggccagccgaaccccatgagcccccagcaacacatgctctcaggacagccacaggcctcgcatctccct

SEQ ID NO: 4215 - DNA, 120 bp, Artificial Sequence
  ENSG00000005339_63 (sequence is synthesized)
ggccagcagatcgccacgtcccttagtaaccaggtgcggtctccagcccctgtccagtctccacggccccagtcccagcctccacattccagcccgtcaccacggatacagccccagcct

SEQ ID NO: 4216 - DNA, 120 bp, Artificial Sequence
  ENSG00000005339_64 (sequence is synthesized)
tcgccacaccacgtctcaccccagactggttccccccaccccggactcgcagtcaccatggccagctccatagatcagggacacttggggaaccccgaacagagtgcaatgctcccccag

SEQ ID NO: 4217 - DNA, 120 bp, Artificial Sequence
  ENSG00000005339_65 (sequence is synthesized)
ctgaacacccccagcaggagtgcgctgtccagcgaactgtccctggtcggggacaccacgggggacacgctagagaagtttgtggagggcttgtagcattgtgagagcatcaccttttcc

SEQ ID NO: 4218 - DNA, 120 bp, Artificial Sequence
  ENSG00000005339_66 (sequence is synthesized)
ctttcatgttcttggaccttttgtactgaaaatccaggcatctaggttctttttattcctagatggaactgcgacttccgagccatggaagggtggattgatgtttaaagaaacaataca

SEQ ID NO: 4219 - DNA, 120 bp, Artificial Sequence
  ENSG00000005339_67 (sequence is synthesized)
aagaatatatttttttgttaaaaaccagttgatttaaatatctggtctctctctttggtttttttttggcgggggggtggggggggttcttttttttccgttttgtttttgtttgggggg

SEQ ID NO: 4220 - DNA, 120 bp, Artificial Sequence
  ENSG00000005339_68 (sequence is synthesized)
aggggggttttgtttggattctttttgtcgtcattgctggtgactcatgcctttttttaacgggaaaaacaagttcattatattcatattttttatttgtattttcaagactttaaacat

SEQ ID NO: 4221 - DNA, 120 bp, Artificial Sequence
  ENSG00000005339_69 (sequence is synthesized)
ttatgtttaaaagtaagaagaaaaataatattcagaactgattcctgaaataatgcaagcttataatgtatcccgataactttgtgatgtttcgggaagatttttttctatagtgaactc

SEQ ID NO: 4222 - DNA, 120 bp, Artificial Sequence
  ENSG00000005339_70 (sequence is synthesized)
tgtgggcgtctcccagtattaccctggatgataggaattgactccggcgtgcacacacgtacacacccacacacatctatctatacataatggctgaagccaaacttgtcttgcagatgt

SEQ ID NO: 4223 - DNA, 120 bp, Artificial Sequence
  ENSG00000005339_71 (sequence is synthesized)
agaaattgttgctttgtttctctgataaaactggttttagacaaaaaatagggatgatcactcttagaccatgctaatgttactagagaagaagccttcttttctttcttctatgtgaaa

SEQ ID NO: 4224 - DNA, 120 bp, Artificial Sequence
  ENSG00000005339_72 (sequence is synthesized)
cttgaaatgaggaaaagcaattctagtgtaaatcatgcaagcgctctaattcctataaatacgaaactcgagaagattcaatcactgtatagaatggtaaaataccaactcatttcttat

SEQ ID NO: 4225 - DNA, 120 bp, Artificial Sequence
  ENSG00000005339_73 (sequence is synthesized)
atcatattgttaaataaactgtgtgcaacagacaaaaagggtggtccttcttgaattcatgtacatggtattaacacttagtgttcggggttttttgttatgaaaatgctgttttcaaca

SEQ ID NO: 4226 - DNA, 120 bp, Artificial Sequence
  ENSG00000005339_74 (sequence is synthesized)
ttgtatttggactatgcatgtgttttttccccattgtatataaagtaccgcttaaaattgatataaattactgaggtttttaacatgtattctgttctttaagatccctgtaagaatgtt

SEQ ID NO: 4227 - DNA, 120 bp, Artificial Sequence
  ENSG00000005339_75 (sequence is synthesized)
taaggtttttatttatttatatatattttttgagtctgttctttgtaagacatggttctggttgttcgctcatagcggagaggctggggctgcggttgtggttgtggcggcgtgggtggt

SEQ ID NO: 4228 - DNA, 120 bp, Artificial Sequence
  ENSG00000005339_76 (sequence is synthesized)
ggctgggaactgtggcccaggcttagcggccgcccggaggcttttcttcccggagactgaggtgggcgactgaggtgggcggctcagcgttggccccacacattcgaggctcacaggtga

SEQ ID NO: 4229 - DNA, 120 bp, Artificial Sequence
  ENSG00000005339_77 (sequence is synthesized)
ttgtcgctcacacagttagggtcgtcagttggtctgaaactgcatttggcccactcctccatcctccctgtccgtcgtagctgccacccccagaggcggcgcttcttcccgtgttcaggc

SEQ ID NO: 4230 - DNA, 120 bp, Artificial Sequence
  ENSG00000005339_78 (sequence is synthesized)
ggctccccccccccgtacacgactcccagaatctgaggcagagagtgctccaggctcgcgaggtgctttctgacttccccccaaatcctgccgctgccgcgcagcatgtcccgtgtggcg

SEQ ID NO: 4231 - DNA, 120 bp, Artificial Sequence
  ENSG00000005339_79 (sequence is synthesized)
tttgaggaaatgctgagggacagacaccttggagcaccagctccggtccctgttacagtgagaaaggtcccccacttcgggggatacttgcacttagccacatggtcctgcctcccttgg

SEQ ID NO: 4232 - DNA, 120 bp, Artificial Sequence
  ENSG00000005339_80 (sequence is synthesized)
agtccagttccaggctcccttactgagtgggtgagacaagttcacaaaaaccgtaaaactgagaggaggaccatgggcaggggagctgaagttcatcccctaagtctaccacccccagca

SEQ ID NO: 4233 - DNA, 120 bp, Artificial Sequence
  ENSG00000005339_81 (sequence is synthesized)
cccagagaacccactttatccctagtcccccaacaaaggctggtctaggtgggggtgatggtaattttagaaatcacgccccaaatagcttccgtttgggcccttacattcacagatagg

SEQ ID NO: 4234 - DNA, 120 bp, Artificial Sequence
  ENSG00000005339_82 (sequence is synthesized)
ttttaaatagctgaatacttggtttgggaatctgaattcgaggaacctttctaagaagttggaaaggtccgatctagttttagcacagagctttgaaccttgagttataaaatgcagaat

SEQ ID NO: 4235 - DNA, 120 bp, Artificial Sequence
  ENSG00000005339_83 (sequence is synthesized)
aattcaagtaaaaataagaccaccatctggcacccctgaccagcccccattcaccccatcccaggaggggaagcacaggccgggcctccggtggagattgctgccactgctcggcctgct

SEQ ID NO: 4236 - DNA, 120 bp, Artificial Sequence
  ENSG00000005339_84 (sequence is synthesized)
gggttcttaacctccagtgtcctcttcatcttttccacccgtagggaaaccttgagccatgtgttcaaacaagaagtggggctagagcccgagagcagcagctctaagcccacactcaga

SEQ ID NO: 4237 - DNA, 120 bp, Artificial Sequence
  ENSG00000005339_85 (sequence is synthesized)
aagtggcgccctcctggttgtgcagccttttaatgtgggcagtggaggggcctctgtttcaggttatcctggaattcaaaacgttatgtaccaacctcatcctctttggagtctgcatcc

SEQ ID NO: 4238 - DNA, 120 bp, Artificial Sequence
  ENSG00000005339_86 (sequence is synthesized)
tgtgcaaccgtcttgggcaatccagatgtcgaaggatgtgaccgagagcatggtctgtggatgctaaccctaagtttgtcgtaaggaaatttctgtaagaaacctggaaagccccaacgc

SEQ ID NO: 4239 - DNA, 120 bp, Artificial Sequence
  ENSG00000005339_87 (sequence is synthesized)
tgtgtctcatgctgtatacttaagaggagaagaaaaagtcctatatttgtgatcaaaaagaggaaacttgaaatgtgatggtgtttataataaaagatggtaaaactacttggattcaaa

SEQ ID NO: 4240 - DNA, 120 bp, Artificial Sequence
  ENSG00000005339_88 (sequence is synthesized)
ggggaaggggaggaggaagccaccctgtagacttgagactgagtcttaattcaagttcaaactctgttgttaaccaacatccaaagttatgcaatagcttacactgcctctgttaaaaac

SEQ ID NO: 4241 - DNA, 120 bp, Artificial Sequence
  ENSG00000005339_89 (sequence is synthesized)
ttgtgaaatatcactcattgataaactattgtaatacttttccttagctcggtttctcaactgaggcactgttgacatttcaggccaggtaaccctctgttttaggggctgtcctgcgca

SEQ ID NO: 4242 - DNA, 120 bp, Artificial Sequence
  ENSG00000005339_90 (sequence is synthesized)
ttacaggattttagcagcatgcctggcctctgcccactcagtgccagtaacaccttcctcagcaattcattacgtctgtcagaaatgtctccagacattgccagatgtcccctggagggg

SEQ ID NO: 4243 - DNA, 120 bp, Artificial Sequence
  ENSG00000005339_91 (sequence is synthesized)
cacagttgcctccatttgagaggccctgcttcagaggattcactctgagtgagttcgctaatgcatttgagcaaattggaagttcttccctgggccagaggctcagtagccaaaacagaa

SEQ ID NO: 4244 - DNA, 120 bp, Artificial Sequence
  ENSG00000005339_92 (sequence is synthesized)
ttacccagagaactaggcctccgtagaacagtcattgcctgaaaggggcaggaggtgactgggcggaatggcacaagtggccccagagcaggtccagccccctcccaccgcagcatccag

SEQ ID NO: 4245 - DNA, 120 bp, Artificial Sequence
  ENSG00000005339_93 (sequence is synthesized)
aaagacccgtgggcattcggtagatgagcccaagatctagaaatggaacattactggagaaaagggcctaggagactagaggtagctctactctcagtgtgagcgtgtgtcagcacaggc

SEQ ID NO: 4246 - DNA, 120 bp, Artificial Sequence
  ENSG00000005339_94 (sequence is synthesized)
gttgtggtgtctgatcacagagtaaaggtatgcttccttaatcttgcattgaaaaccatctccttcgcatacaccatatgcaaaaccaaattcaggtagattaaaaagcgagaaaagtaa

SEQ ID NO: 4247 - DNA, 120 bp, Artificial Sequence
  ENSG00000005339_95 (sequence is synthesized)
acaaaactgcagatgcattcaggataaaagtaagataataattttattgtgttgagttatgaaaagccttccttaaaaagatacagcccagagatgagaaaggaaaaggcacaaaaggcc

SEQ ID NO: 4248 - DNA, 120 bp, Artificial Sequence
  ENSG00000005339_96 (sequence is synthesized)
cctgtcatgcgccatggatgaagatacaagttgaatgccagaaagcgaggggcacaatttaaagtgttcatttttagatttagcaagtctactttcacacatgtatcctataaaaatatt

SEQ ID NO: 4249 - DNA, 120 bp, Artificial Sequence
  ENSG00000005339_97 (sequence is synthesized)
tgcacatatgcataacggcacatacaaggacataactgcagcaatggcaaggagtgatgaaaaagtaggaacagtggccaaatcgagtgataacagaaaaggaggcagcactgtgaggaa

SEQ ID NO: 4250 - DNA, 120 bp, Artificial Sequence
  ENSG00000005339_98 (sequence is synthesized)
ggttgcgcagagtgcaccgcagtgagcacggcctgcgcctagacccctgtgctgtctgagaccacctctggagtatgcagccatgtgtggatcacaggtgtcaaatagcgaagttactct

SEQ ID NO: 4251 - DNA, 120 bp, Artificial Sequence
  ENSG00000005339_99 (sequence is synthesized)
gttttttttttgttttgttttgtttgtgcagacagagtctcgctctgtcgcccacactggagtgcagtcacgtgatgtcggctcactgcaagctcttgcctcccgggttcacgccattcg

SEQ ID NO: 4252 - DNA, 120 bp, Artificial Sequence
  ENSG00000005339_100 (sequence is synthesized)
ttacaggcatgagccattgtgcccggccacatttttctttttaaatcatttttattcaggtacaacttatccaaaaatcagcaccactggtttgtttattgcagaaaaatgaaatttaga

SEQ ID NO: 4253 - DNA, 120 bp, Artificial Sequence
  ENSG00000005339_101 (sequence is synthesized)
gcagaaaaatgaaatttagaagtttggtctaaattttctagctcgctaaggaatcttcgaaaattcccaattttcctatttctcactaatgtaggaaatatttaaaagccagcaaagaag

SEQ ID NO: 4254 - DNA, 120 bp, Artificial Sequence
  ENSG00000005339_102 (sequence is synthesized)
aaaacatcttttaaaatctcattgtctatacgtaatcactaagaaccttttgcaactttcccttatagttttttaacctgtatatgaggcgttctctgtcctgaagtaatgtcctgcctc

SEQ ID NO: 4255 - DNA, 120 bp, Artificial Sequence
  ENSG00000005339_103 (sequence is synthesized)
tggctagctcctgtgacggtagccctcccggggctggccctgggtgaggaggggtggcggcggggaggtgagcccaggaaaggctgccctcgccaaggctcggaaacttcattcgtgcac

SEQ ID NO: 4256 - DNA, 120 bp, Artificial Sequence
  ENSG00000005339_104 (sequence is synthesized)
cgcacgaggcgatggctcagggcaggcttggacaccaatactttgccagctcctgaggcaccggacaggctctggccagagcttaattggttagccctagaacgttccacgttcacgtca

SEQ ID NO: 4257 - DNA, 120 bp, Artificial Sequence
  ENSG00000005339_105 (sequence is synthesized)
gactccatagtagggactttctcctcagagctgggcaggaggagcccactgagggtgtgccatctctgccctccagggaaagcgggaagcaacagggaaacatccatctgctccgcccta

SEQ ID NO: 4258 - DNA, 120 bp, Artificial Sequence
  ENSG00000005339_106 (sequence is synthesized)
gagcccctgtcaattttggacccaccgctataggtcttctgccccatactgttagaaaaagatgcaggttacctgggcacgtaaacggttttcaggagtggagtgcctgagatcccagag

SEQ ID NO: 4259 - DNA, 120 bp, Artificial Sequence
  ENSG00000005339_107 (sequence is synthesized)
tccacctttcctttatataacactcgtgtcacaggacagattagatttcttccgtgtttggagaacattagtcctttaaaatatcagcctgtgctgcaaagtggggtggattctctagtc

SEQ ID NO: 4260 - DNA, 120 bp, Artificial Sequence
  ENSG00000005339_108 (sequence is synthesized)
gcttgcatttgctcaggataaagttcgagccttgcccccaccacacccagctttgtgggcattcattctctctctctggttacttctgtcctggctttagtccttgctcctctgctataa

SEQ ID NO: 4261 - DNA, 120 bp, Artificial Sequence
  ENSG00000005339_109 (sequence is synthesized)
ccatgtggaggattaaaagctaaagtagaaacataattctatctgcccttttacctttcttgcctgccattccccagactttcccctgcagaaacactcaggctgagcaggacccctgcc

SEQ ID NO: 4262 - DNA, 120 bp, Artificial Sequence
  ENSG00000005339_110 (sequence is synthesized)
ctgtgcctgtggggctcatggcaggagtgagagatgagctgctgctccgagggcacccaggctgcagagctgtcttctgatggtgctggcaggggccgagttgaaatgtgtctgggtcct

SEQ ID NO: 4263 - DNA, 120 bp, Artificial Sequence
  ENSG00000005339_111 (sequence is synthesized)
tgagcaggttaaggagcttggctttactcataaaagtataaagaaccagtgatgtatgtgagtaggagaataaccaaaaaagccataatttaaggaagatggtcattatgacagcacagg

SEQ ID NO: 4264 - DNA, 120 bp, Artificial Sequence
  ENSG00000005339_112 (sequence is synthesized)
ctccttccagggcgtgtcattcagtgagccgtgttaggatagaccagggctcttaagtgtcccagaggagcctgtgagccttcataggggattaaagtaaatgaaaccacaattaactaa

SEQ ID NO: 4265 - DNA, 120 bp, Artificial Sequence
  ENSG00000005339_113 (sequence is synthesized)
ggtggcttttgtcacaactgaggggaggatatttgtgtgcctttttcttgcattcgcatacttgttaattaccttcacttatgaggattagaaagcagaaaaataaaagcctaaagtgag

SEQ ID NO: 4266 - DNA, 120 bp, Artificial Sequence
  ENSG00000005339_114 (sequence is synthesized)
gaaatatgtatttgtcgcagcaatttttaaaaagtaaagtttcctttctggttgcaaagggagattgggagaaaagaggaatgaagcgcttgtacaaacaaaagaagaaagctttttcct

SEQ ID NO: 4267 - DNA, 120 bp, Artificial Sequence
  ENSG00000005339_115 (sequence is synthesized)
gtagaagatatcatacggatgcattgtaaaatatagctgaatcagccaacacacgcattaatgtcagcactactcaaagtaacccagagaacaaggtgtggacgcacacacagacttcta

SEQ ID NO: 4268 - DNA, 120 bp, Artificial Sequence
  ENSG00000005339_116 (sequence is synthesized)
cacaggtactgtgccccactgggaccgtggctccctaggaaataaaattcttgtgttaagttttggttttttttttctgtcttccttcgtggaaattaaaattccagaatgcacatttca

SEQ ID NO: 4269 - DNA, 120 bp, Artificial Sequence
  ENSG00000005379_0 (sequence is synthesized)
aattctgaggctcagccctcctcggagcccaccatctcgaggctcctggactgtaagggacccctgcagtccccagagcagaggccagcaggggctgagactatgaggcaagcagcccat

SEQ ID NO: 4270 - DNA, 120 bp, Artificial Sequence
  ENSG00000005379_1 (sequence is synthesized)
cgacccaggcctccttaggaccagcccagccacccagcaagcgaaagagcagcagcagagagcagagccggagataaaggaccacagcggaccactggggatcacccccagcagctcctg

SEQ ID NO: 4271 - DNA, 120 bp, Artificial Sequence
  ENSG00000005379_2 (sequence is synthesized)
aagcctctggccgggctgaggggttgcgacagacggccagacccacagacactgacagacacacaacgacaccgatgcacacagctgcacgacactgacacactcagatacaaccaggga

SEQ ID NO: 4272 - DNA, 120 bp, Artificial Sequence
  ENSG00000005379_3 (sequence is synthesized)
cagcatcacatactgccacagccctgcaatacagacacccacacacacacacacaaacaactggcaactctgaaatgggcagacagtgacacacagcaccacccccctcaacacacagaa

SEQ ID NO: 4273 - DNA, 120 bp, Artificial Sequence
  ENSG00000005379_4 (sequence is synthesized)
gtgggggcacccatcttcccaacacatgagacagcattgacctgcacggacagacctggagacacacacacgcaccctcacccaggcgcagctgtcggtggcctctgcacatcctcccta

SEQ ID NO: 4274 - DNA, 120 bp, Artificial Sequence
  ENSG00000005379_5 (sequence is synthesized)
cccccacagggacaccctcgctcctccacatactcgcgcacacacacagctaccagcaaacatagctcacatacccctggctccagctccagcagccctggcgccttctgcagcctcctt

SEQ ID NO: 4275 - DNA, 120 bp, Artificial Sequence
  ENSG00000005379_6 (sequence is synthesized)
tgtgggtggggaagagctcagccaaccttggatggagcgtcggtgaagcaagagctcagaggggagaggggctggcctggcatgaccctcgccagtccccccacctggctgggtgatgtc

SEQ ID NO: 4276 - DNA, 120 bp, Artificial Sequence
  ENSG00000005379_7 (sequence is synthesized)
ccccggcccgggttctggggccccttggcagtaccatggagcaactgacaaccctcccacggcctggggaccctggagccatggagccatgggcactgcccacctggcatagctggactc

SEQ ID NO: 4277 - DNA, 120 bp, Artificial Sequence
  ENSG00000005379_8 (sequence is synthesized)
caggtcgagggggtgaacctagcagtgcagccccaagcatcgctgatactcctccggcagctctgcagcttcaagaactgaggtctgaggagagttccaagcccaaaggagacgggagct

SEQ ID NO: 4278 - DNA, 120 bp, Artificial Sequence
  ENSG00000005379_9 (sequence is synthesized)
ccaggcccgtggggggaactgaccctgaaggagcagaggcttgtctgcccagcctgggccagcaagcatccagctctggacccgcctgccagaggccagaggatgaggaagtggaggctt

SEQ ID NO: 4279 - DNA, 120 bp, Artificial Sequence
  ENSG00000005379_10 (sequence is synthesized)
tcctgaaggccaagctgaatatgagctttggggacaggcccaatctggagctgctgagggccctgggggagctgcggcagcgctgtgccatccttaaggaggaaaaccagatgctgagga

SEQ ID NO: 4280 - DNA, 120 bp, Artificial Sequence
  ENSG00000005379_11 (sequence is synthesized)
agagcagcttccctgagacagaagagaaggtgcggaggctgaagaggaagaacgccgagctggcggtcattgccaagcgcctggaggagagggcccgaaagctgcaggaaacgaacctga

SEQ ID NO: 4281 - DNA, 120 bp, Artificial Sequence
  ENSG00000005379_12 (sequence is synthesized)
gggtggtgagtgcccccttgccccggccggggaccagcttggagttgtgtcggaaggccctagcccgccagcgagcccgggacctcagtgagacagccagtgcactgctggccaaggaca

SEQ ID NO: 4282 - DNA, 120 bp, Artificial Sequence
  ENSG00000005379_13 (sequence is synthesized)
agcagattgctgccttgcagcgggagtgcagggagctgcaggccaggctcactctggtgggcaaggagggtccccagtggctccacgtgcgggacttcgatcggctgctgcgcgagtccc

SEQ ID NO: 4283 - DNA, 120 bp, Artificial Sequence
  ENSG00000005379_14 (sequence is synthesized)
agcgggaggtgctgcggctgcagaggcagatcgcgctgcgcaaccagcgggagacgctcccgctcccgccgtcctggcccccgggccctgctctccaggccagagcaggggcgcctgctc

SEQ ID NO: 4284 - DNA, 120 bp, Artificial Sequence
  ENSG00000005379_15 (sequence is synthesized)
ccggggccccgggagaggccacgccccaggaggatgcggacaacctacccgtgattctaggggagccagagaaagagcagagggtgcagcagctggaatcggagctcagcaagaagcgga

SEQ ID NO: 4285 - DNA, 120 bp, Artificial Sequence
  ENSG00000005379_16 (sequence is synthesized)
agaaatgcgagagcctggagcaggaagcccggaaaaagcagaggcgatgtgaggagctggaactgcagctgagacaagcgcagaatgagaatgcccgcctggtggaggagaactcccggc

SEQ ID NO: 4286 - DNA, 120 bp, Artificial Sequence
  ENSG00000005379_17 (sequence is synthesized)
tcagtgggagagccacagagaaggagcaggtggagtgggagaatgcggagctgaggggccagctcctgggggtgacacaggagagggactcagcccttcgcaagagccagggcctgcaga

SEQ ID NO: 4287 - DNA, 120 bp, Artificial Sequence
  ENSG00000005379_18 (sequence is synthesized)
gcaagctggagagcctggagcaagtgctgaagcacatgcgggaggtggcccagcggcggcagcagctggaggtggagcatgaacaggctcggctcagcctacgggagaagcaggaggagg

SEQ ID NO: 4288 - DNA, 120 bp, Artificial Sequence
  ENSG00000005379_19 (sequence is synthesized)
tccggagactgcagcaggcccaggctgaagcccagagggaacatgaaggagccgtgcagctgctggagtctaccttggattccatgcaggcccgggttcgagagctcgaagaacagtgcc

SEQ ID NO: 4289 - DNA, 120 bp, Artificial Sequence
  ENSG00000005379_20 (sequence is synthesized)
gcagccaaaccgagcagttcagcctcctggcacaggaactccaggctttccgcctgcacccgggccccttggatctgctcacatctgccctggactgtgggagccttggagactgcccac

SEQ ID NO: 4290 - DNA, 120 bp, Artificial Sequence
  ENSG00000005379_21 (sequence is synthesized)
cacccccctgctgctgctccattccccagccttgccgggggtctggccccaaagaccttgacctcccgccgggctcccctgggcgctgcaccccaaagtcttccgagcctgcccctgcca

SEQ ID NO: 4291 - DNA, 120 bp, Artificial Sequence
  ENSG00000005379_22 (sequence is synthesized)
ctctcactggggtccctcgaaggacagccaagaaggcagagtctctctccaactcctcccactccgagtccatccacaacagccccaagtcatgccctacacctgaggtggacacagcca

SEQ ID NO: 4292 - DNA, 120 bp, Artificial Sequence
  ENSG00000005379_23 (sequence is synthesized)
gtgaggtagaggagctggaggcagacagtgtctccctgctcccagctgcgccagagggcagccggggaggagccaggatccaggtcttcctagcacgttatagctacaacccctttgagg

SEQ ID NO: 4293 - DNA, 120 bp, Artificial Sequence
  ENSG00000005379_24 (sequence is synthesized)
gtcccaatgagaatccagaagcagagcttccgctgacagctggcgagtacatctacatctatggcaacatggatgaggatggcttttttgaaggagagctcatggatggccgaaggggcc

SEQ ID NO: 4294 - DNA, 120 bp, Artificial Sequence
  ENSG00000005379_25 (sequence is synthesized)
tggtcccttccaattttgtagagcgtgtgtcggatgatgacctcctgacctccctccctccagagctggccgatttgtcccacagctcaggccctgaactcagtttcctgagtgtaggtg

SEQ ID NO: 4295 - DNA, 120 bp, Artificial Sequence
  ENSG00000005379_26 (sequence is synthesized)
ggggtggcagcagtagcgggggccaaagcagtgtgggaaggagccagcccagacctgaggaggaggatgcaggggacgagctcagtctgagcccatcaccggagggcctgggcgagcctc

SEQ ID NO: 4296 - DNA, 120 bp, Artificial Sequence
  ENSG00000005379_27 (sequence is synthesized)
ctgccgtgccttacccccgccgtctggtggtcctcaagcagctggcccacagcgtggtgctggcctgggagccgcctcctgagcaagtggagctacacggcttccatatctgtgtgaatg

SEQ ID NO: 4297 - DNA, 120 bp, Artificial Sequence
  ENSG00000005379_28 (sequence is synthesized)
gggagctgcgacaggccctggggcctggggcgccacccaaggccgtgctggagaacctggacctgtgggccgggccccttcacatttctgtccaggccctgactagccggggcagctctg

SEQ ID NO: 4298 - DNA, 120 bp, Artificial Sequence
  ENSG00000005379_29 (sequence is synthesized)
acccactgcgctgttgcttggcggtgggtgcccgggccggagtggtgcccagccagctgcgggtccatcggttgacagccacatctgctgagatcacctgggtgcccggcaatagcaact

SEQ ID NO: 4299 - DNA, 120 bp, Artificial Sequence
  ENSG00000005379_30 (sequence is synthesized)
tggcccatgccatctacctcaatggggaagagtgcccacctgccagccccagtacctactgggccaccttctgccacttacggcctggcacaccctatcaggcccaagtggaggctcagc

SEQ ID NO: 4300 - DNA, 120 bp, Artificial Sequence
  ENSG00000005379_31 (sequence is synthesized)
tcccaccccaagggccctgggaaccaggctgggagaggctggagcagcgggctgccaccctgcagttcaccacactcccagcaggcccacctgatgcccctctggatgtgcagatcgagc

SEQ ID NO: 4301 - DNA, 120 bp, Artificial Sequence
  ENSG00000005379_32 (sequence is synthesized)
tcttgatcatcagttggctcccagtcaccatcgatgctgctggcacatccaacggtgtccgggtcacaggctatgccatctacgctgatgggcagaagatcatggaggtggcctcaccca

SEQ ID NO: 4302 - DNA, 120 bp, Artificial Sequence
  ENSG00000005379_33 (sequence is synthesized)
cggcaggcagtgtactggtggagttgtcccagctgcagctgctgcaggtgtgtcgtgaggtggtcgtgcgcaccatgtcgccccacggggagtcggcggactccatcccggctcctatca

SEQ ID NO: 4303 - DNA, 120 bp, Artificial Sequence
  ENSG00000005379_34 (sequence is synthesized)
ctcccgccctggctccggccagcctgccagcccgagtctcctgcccctcaccgcacccaagcccagaggccagagcgccccttgcttcagcctccccagggcctggagaccccagctctc

SEQ ID NO: 4304 - DNA, 120 bp, Artificial Sequence
  ENSG00000005379_35 (sequence is synthesized)
ctctccagcaccctgctccccttggaactcaagagcctccaggagcaccccctgcaagcccttccagagagatggcaaaagggtcccacgaggaccctccagcaccttgctcccaggagg

SEQ ID NO: 4305 - DNA, 120 bp, Artificial Sequence
  ENSG00000005379_36 (sequence is synthesized)
aggctggggcagcagtgctgggcacctcagaggagaggacagccagcacatctaccctgggtgagaaggaccctggccccgcagctccctcactggccaagcaggaggccgagtggactg

SEQ ID NO: 4306 - DNA, 120 bp, Artificial Sequence
  ENSG00000005379_37 (sequence is synthesized)
caggagaggcctgtccggcctccagctccacccagggagcacgggcccagcaggcgccaaataccgagatgtgccaaggaggagacccagggtctgggctgaggcccagggctgagaagg

SEQ ID NO: 4307 - DNA, 120 bp, Artificial Sequence
  ENSG00000005379_38 (sequence is synthesized)
aggacacagcagagcttggggttcatctggtgaactccctcgtggaccacggccgcaactcagacctgtcagacatccaggaggaagaggaagaggaggaggaggaggaggaagaggagc

SEQ ID NO: 4308 - DNA, 120 bp, Artificial Sequence
  ENSG00000005379_39 (sequence is synthesized)
tgggttccaggacttgctccttccagaagcaggttgctggcaacagcatcagggagaatggggccaagtcccagcccgaccccttttgtgagactgacagcgatgaggagatcttggagc

SEQ ID NO: 4309 - DNA, 120 bp, Artificial Sequence
  ENSG00000005379_40 (sequence is synthesized)
agatcctggagctgcccctccagcagttctgtagcaagaagctctttagcatcccggaggaggaggaagaggaagaggaggacgaggaggaggagaagtcaggggcaggctgttcttccc

SEQ ID NO: 4310 - DNA, 120 bp, Artificial Sequence
  ENSG00000005379_41 (sequence is synthesized)
gagaccctggcccgcctgaacctgcattgctggggctgggctgtgacagtggtcagccccgaagacctggccagtgtcccttgtctcctgagtcctccagggctggagactgcctggaag

SEQ ID NO: 4311 - DNA, 120 bp, Artificial Sequence
  ENSG00000005379_42 (sequence is synthesized)
acatgcctggattagttggtggaagcagccggaggagaggagggggctcccctgagaagcccccaagccgcaggcggcctccagatccccgagaacactgcagccgacttctcagcaaca

SEQ ID NO: 4312 - DNA, 120 bp, Artificial Sequence
  ENSG00000005379_43 (sequence is synthesized)
atgggccccaggcctctggacgactgggccccacacgggagaggggtggcctccccgtaattgagggccccaggactggactagaggctagcgggagaggccggctgggcccttcccgga

SEQ ID NO: 4313 - DNA, 120 bp, Artificial Sequence
  ENSG00000005379_44 (sequence is synthesized)
ggtgctcccgtggccgggcgctggagcctggcctggccagctgcctttcccccaagtgcttggaaatcagcattgaatatgattcggaggatgagcaggaggcgggcagcgggggcatca

SEQ ID NO: 4314 - DNA, 120 bp, Artificial Sequence
  ENSG00000005379_45 (sequence is synthesized)
gcatcaccagctcctgctaccctggagatggggaggcctggggcacagcaactgtaggaaggcccagggggcctccgaaggccaattcaggccccaagccctacccacgcctcccagcct

SEQ ID NO: 4315 - DNA, 120 bp, Artificial Sequence
  ENSG00000005379_46 (sequence is synthesized)
gggagaaaggggaaccagagcggagaggccgcagtgcgacgggcagagccaaggagccactctcccgggcaacagagaccggagaggccagagggcaggacggctctgggcggaggggcc

SEQ ID NO: 4316 - DNA, 120 bp, Artificial Sequence
  ENSG00000005379_47 (sequence is synthesized)
cccagaagagaggtgtccgagtcctcaggccaagcactgcagagctagtccctgcgaggagcccctcagaaacactggcttaccagcacctacccgtcaggatctttgtggctctgtttg

SEQ ID NO: 4317 - DNA, 120 bp, Artificial Sequence
  ENSG00000005379_48 (sequence is synthesized)
actatgaccccgtgtcaatgtcgcccaatcctgatgctggagaagaagagcttcccttccgagagggtcagatcctgaaggtgtttggggacaaggatgccgatggcttctaccagggcg

SEQ ID NO: 4318 - DNA, 120 bp, Artificial Sequence
  ENSG00000005379_49 (sequence is synthesized)
aaggtgggggccggacaggctacattccctgcaacatggtggctgaggtggctgtggacagccctgctgggagacagcaactgctccagcggggttatttgtccccagatattctccttg

SEQ ID NO: 4319 - DNA, 120 bp, Artificial Sequence
  ENSG00000005379_50 (sequence is synthesized)
agggctcagggaatggtccgtttgtgtactccacagcccacacaactgggcctcctcccaagccccgccgctccaagaaagctgagtcggaaggccctgcccagccctgtccaggccccc

SEQ ID NO: 4320 - DNA, 120 bp, Artificial Sequence
  ENSG00000005379_51 (sequence is synthesized)
ctaagctggtcccctctgctgacctgaaagctccccactccatggtggctgcatttgactacaacccccaggagagttcccccaatatggacgtggaggcagagctgcccttccgggcag

SEQ ID NO: 4321 - DNA, 120 bp, Artificial Sequence
  ENSG00000005379_52 (sequence is synthesized)
gggatgtcattactgtgtttgggggcatggacgatgacggtttctactatggggaattaaatggacaaaggggcctggttccatccaacttcctggagggccctgggcctgaggcaggcg

SEQ ID NO: 4322 - DNA, 120 bp, Artificial Sequence
  ENSG00000005379_53 (sequence is synthesized)
gcctggacagggaacccaggacaccccaggctgagagtcagagaacgaggaggagaagagtccagtgctagatggagatagatatatgtagagagagcaacatgactggggctgcaccac

SEQ ID NO: 4323 - DNA, 120 bp, Artificial Sequence
  ENSG00000005379_54 (sequence is synthesized)
acaagggtccccagggcccccaggtgggccttgtacccccagctctggcagcgcccccaggattgaacgtggggagccccagggcagaagcgagaaggtgtggggtttcttctccaaggg

SEQ ID NO: 4324 - DNA, 120 bp, Artificial Sequence
  ENSG00000005379_55 (sequence is synthesized)
gaagcagctcctcaggaggctgggctctgggaagaaggagtgaagctgtggcccatcctgcaggcagaagaggccctgagaggcccccagatcactgtctctgctgagcagggaaggctc

SEQ ID NO: 4325 - DNA, 120 bp, Artificial Sequence
  ENSG00000005379_56 (sequence is synthesized)
agactgggcccagagcccccgttcttctgcgttaacactgtggcattcagagggaatcaaagagccttggtgaaggtcagagctaaatggctccttaaggatgaactctctagagaagca

SEQ ID NO: 4326 - DNA, 120 bp, Artificial Sequence
  ENSG00000005379_57 (sequence is synthesized)
ccttcctcctacaggaggggaaactgagcccacagtgagtatgtaacttgaccaaggtcactgagccaggactggacccaggaccctcgcgtcctggtccacccacctcgtctactagtg

SEQ ID NO: 4327 - DNA, 120 bp, Artificial Sequence
  ENSG00000005379_58 (sequence is synthesized)
tcccacagtgctgcgctagtcccttctgccacccttcccagtcccaggacgggccctggagggagaaaggagcctgtgccccctgatggctctggctgtcctgatcctgtcttccctccc

SEQ ID NO: 4328 - DNA, 120 bp, Artificial Sequence
  ENSG00000005379_59 (sequence is synthesized)
ctgaaggaaagtttgcactggattttattggagccccatctccccagcgggcaggcgggcggagcctgtatatatgtatatactcagtgcctcagttcagcttcctccacctcgcttcca

SEQ ID NO: 4329 - DNA, 120 bp, Artificial Sequence
  ENSG00000005379_60 (sequence is synthesized)
ctgcacaggcccaggaaggagaaaggccaagccaaagtgggccccaccctgcccccgtcgtgctccatccttccctgccggggcctgctggcccctgtaaggtcccgcccccaaagaccc

SEQ ID NO: 4330 - DNA, 120 bp, Artificial Sequence
  ENSG00000005379_61 (sequence is synthesized)
tggggccagcggggccgaaagcggagttgggtttgccttattttgctcattggattcaagttcttttgcatagttttcttctaacccctgttggagtccaggggctggagaaaaggacag

SEQ ID NO: 4331 - DNA, 120 bp, Artificial Sequence
  ENSG00000005379_62 (sequence is synthesized)
atttatgcagctattttcatacattccctgttcagagtggggtaggggttctccgccgttacccgatccactccatcccccaccctctgaggggtgagtgtgtctttgcatgtttccttt

SEQ ID NO: 4332 - DNA, 120 bp, Artificial Sequence
  ENSG00000005379_63 (sequence is synthesized)
gctgtggtgggagatagtttgactgaacccccaccttgaccttggtctccaggggtgtggaatggtgggggaatttgtttaaaaagacattttattataataaagtctattttcacaaaa

SEQ ID NO: 4333 - DNA, 120 bp, Artificial Sequence
  ENSG00000005379_64 (sequence is synthesized)
ttccctcctccctcctttcctccactggaggtagcacagaatcatggtggagaacatggcttctagagcagatgacatgggtttggacctgactctgctgcttctagctgtgtaaccttg

SEQ ID NO: 4334 - DNA, 120 bp, Artificial Sequence
  ENSG00000005379_65 (sequence is synthesized)
gacaccccaggctgagagtcaggacactcccaccctgggggtggtctccatacctcccaggtgcctttggaagccagttgcccagccaggcccagcttcctgggttctcgttccttgagc

SEQ ID NO: 4335 - DNA, 120 bp, Artificial Sequence
  ENSG00000005379_66 (sequence is synthesized)
atgtgagaacattgttggggagggtgtaccatatcccagccccccagacttcggacagggggataggcaaggaaccctcaggaagtccggaggaatggaacgggtcacctccctggacag

SEQ ID NO: 4336 - DNA, 120 bp, Artificial Sequence
  ENSG00000005379_67 (sequence is synthesized)
tggttttggccccagctgttccccaggggcatcagagtcgaggggcagggccagagcctctttcctgatctcagtctcaccggcctcttctctccagggggaattaaatggacaaagggg

SEQ ID NO: 4337 - DNA, 120 bp, Artificial Sequence
  ENSG00000005379_68 (sequence is synthesized)
cctggttccatccaacttcctggagggccctgggcctgaggcaggcggcctggacagggaacccaggacaccccaggctgagagtcaggtcagtgaggagctgggctcccagcttggcag

SEQ ID NO: 4338 - DNA, 120 bp, Artificial Sequence
  ENSG00000005379_69 (sequence is synthesized)
ggcagtctaccctactggtggggtggtagggccagggcagtgttgcggcaggggtgcagctggggtggtcatgcaggtaagcactgtgtccagcgtgcagccgctaattgaccaccagag

SEQ ID NO: 4339 - DNA, 120 bp, Artificial Sequence
  ENSG00000005379_70 (sequence is synthesized)
gggagccccaccaagcagctgccccccagtatgtgcccctctctgcagagggatgatagctgtgaccctgaccctcaggccatctcgccagctgccaacacctggtggctgacgcaggtg

SEQ ID NO: 4340 - DNA, 120 bp, Artificial Sequence
  ENSG00000005379_71 (sequence is synthesized)
agggggccctgtggaaaaggacccctctgcctcacacctgtggccaatcaaagtccctgtttcaggacactcccaccctgggggtggtctccatacctcccaggtgcctttggaagccag

SEQ ID NO: 4341 - DNA, 120 bp, Artificial Sequence
  ENSG00000005379_72 (sequence is synthesized)
ttgcccagccaggcccagcttcctgggttctcgttccttgagcttgcctctccttggggtgagtggaatacaactaagcctccactctcagagggcagggagagagggtgaagaggccaa

SEQ ID NO: 4342 - DNA, 120 bp, Artificial Sequence
  ENSG00000005379_73 (sequence is synthesized)
gccccagccagaaaactcagggcttccatgtgtgaacacaaaggccttggagagtagggcccacccctgcgcagggccacctggtggccgggcggagaaggtgcgggtctgtcggtaacc

SEQ ID NO: 4343 - DNA, 120 bp, Artificial Sequence
  ENSG00000005379_74 (sequence is synthesized)
catctcctctctttgttccctgtcctcagagaacgaggaggagaagagtccagtgctagatggagatagatatatgtagagagagcaacatgtaagtgggggactgcccccctgtgtgac

SEQ ID NO: 4344 - DNA, 120 bp, Artificial Sequence
  ENSG00000005379_75 (sequence is synthesized)
cgtccacccccacttgaccataatcagacagtgctcctttgtctcaaatactggagctgacccagctttcccactgtagtccagggaatggcgaaggagagcttgccatgagccagattt

SEQ ID NO: 4345 - DNA, 120 bp, Artificial Sequence
  ENSG00000005379_76 (sequence is synthesized)
gcatgaagagtcatccctccccctccctgctccccttgccttgcctttacccagggcagtgccagctgtcataggattacatgtcatcttagtgtgtgatgtcccatattagctgatgct

SEQ ID NO: 4346 - DNA, 120 bp, Artificial Sequence
  ENSG00000005379_77 (sequence is synthesized)
tcctattctataacacatgtggtttatagaacatgacgtgacatccatattaggactcatcagtggtattatgatactgtgtggctatggtattataatatcataattattactggtgcc

SEQ ID NO: 4347 - DNA, 120 bp, Artificial Sequence
  ENSG00000005379_78 (sequence is synthesized)
agggtgacactgtaatgccaccagtaataataggcttcccacccttgtcctctgcattgtgacctgttagggtgatcagatgcatgatttacctccaactctcagttttctctacttggg

SEQ ID NO: 4348 - DNA, 120 bp, Artificial Sequence
  ENSG00000005379_79 (sequence is synthesized)
gttttctctacttgggggataaaaggggaggtttggccaggtgtggtggctcatgcctttaatactagctacttgggaggctgaggtgggagtcacttgagcccaggaggtcgaggctgc

SEQ ID NO: 4349 - DNA, 120 bp, Artificial Sequence
  ENSG00000005379_80 (sequence is synthesized)
gcaagactctgtctcaaaaataaaaaaataaaagggaagtttgagtagttcaaatccataaataaccccaaaccattattctctggggctcagaaacaccctccttttgtttccctaaca

SEQ ID NO: 4350 - DNA, 120 bp, Artificial Sequence
  ENSG00000005379_81 (sequence is synthesized)
gaaacaccctccttttgtttccctaacaacctctccctcctggatgttgtggaaggagccctaagagggagtgggaagggcctggggctcgccagccggctattggctctggctggttgg

SEQ ID NO: 4351 - DNA, 120 bp, Artificial Sequence
  ENSG00000005379_82 (sequence is synthesized)
gggtagatgctttggcctctgtgggcagccctgccacatcactgcaggcctggggcgggggtggggcctcggttgtgcacccactttccttgcctctggcctgggctctatagttggttc

SEQ ID NO: 4352 - DNA, 120 bp, Artificial Sequence
  ENSG00000005379_83 (sequence is synthesized)
gctgtgcaggtaccagaggtgaaggtgggaacataggtgtagggggctttctggtggcttctctgttctcccagctccctggccttagatcactaaggagcgccgtctgggcgggcttga

SEQ ID NO: 4353 - DNA, 120 bp, Artificial Sequence
  ENSG00000005379_84 (sequence is synthesized)
ggcaaagggagtggagtcaggaggagattcagtaaggaaaaagatgctagagcctccagagcctgtggtgggggctgagtgatgcccccagctgtgagtccctctgggtccttggcctcc

SEQ ID NO: 4354 - DNA, 120 bp, Artificial Sequence
  ENSG00000005379_85 (sequence is synthesized)
cggcagtcctcttaggggcccttaagggagagtcccaatcttcctccccatggagtgggtactggctccacaccctgaaggcctgggggggccacatctgctgggtttggggagacgctc

SEQ ID NO: 4355 - DNA, 120 bp, Artificial Sequence
  ENSG00000005379_86 (sequence is synthesized)
tttctgtctatgaggggctgtagaagctaccttcctgggcagtgacagctgcttctaagcagtccttgtccttgcgctccatgtttttggagggaggtgacatgtgagaagttgggggca

SEQ ID NO: 4356 - DNA, 120 bp, Artificial Sequence
  ENSG00000005379_87 (sequence is synthesized)
cccatcctgaggggcaggttccaagaactcttgggccctgtcagccctgcaccctggagggagaagggaaggggcctgcccagggtcacaggtgagcgatccagaaccgagactgcatcc

SEQ ID NO: 4357 - DNA, 120 bp, Artificial Sequence
  ENSG00000005379_88 (sequence is synthesized)
cctgggactcccagcttagtgctccctcggcatcaccctccccattcaccacctgtgctgtgtgtttctgacagtggtgggaggtgaggccctggttctcagcgtcagccatggttctgt

SEQ ID NO: 4358 - DNA, 120 bp, Artificial Sequence
  ENSG00000005379_89 (sequence is synthesized)
ccctgctgggagacagcaactgctccagcggggttatttgtccccagatattctccttgagggctcaggtatgacctgctgctgtccctcacccacctcccaccagcccccttccaactc

SEQ ID NO: 4359 - DNA, 120 bp, Artificial Sequence
  ENSG00000005379_90 (sequence is synthesized)
cacctgaccctgagcaattgttgtgtctggggtgctcccacttacccagactctagcagagccttggagcctgccttgaaccctgctgcgtagtggtcagactgtacgtgggctggccgc

SEQ ID NO: 4360 - DNA, 120 bp, Artificial Sequence
  ENSG00000005379_91 (sequence is synthesized)
gtggagtgggcgtctgttgcagaggggaatacagccatgcagccaggaattttgggtcctggaggttgggtggggctcttgtcagggatgggagatgaatgcccttacgaaacaagctca

SEQ ID NO: 4361 - DNA, 120 bp, Artificial Sequence
  ENSG00000005379_92 (sequence is synthesized)
gcaggtggggcggcagtgagggaagctggcaggctgctggacaccagctttgccactcactcattccacaagcatttactgtgtgcccggcactgtgctaggcgtcggggagactgtggg

SEQ ID NO: 4362 - DNA, 120 bp, Artificial Sequence
  ENSG00000005379_93 (sequence is synthesized)
gaacaaagaccaggtccctgagcagtcagcaaattagcatccaggagtgagctgatttcagacactgatgagcacagtggtggagaagaacagggtgatgtgacaaagtgactgggatgg

SEQ ID NO: 4363 - DNA, 120 bp, Artificial Sequence
  ENSG00000005379_94 (sequence is synthesized)
ccactgtaccctgggagtgggggtgggtcccttcttgctatgctcagaggtctaggctctctggcttggcacggagatgcccagcccctggcatttgggtaccatgaggcagatgggtta

SEQ ID NO: 4364 - DNA, 120 bp, Artificial Sequence
  ENSG00000005381_0 (sequence is synthesized)
gacaatatcaggtgagctgtggaggtggggtccttggaagctggatgacagcagctggcaaggggataagagagcagtgagcccctccctcaaggaggtctggctttatccatagacagg

SEQ ID NO: 4365 - DNA, 120 bp, Artificial Sequence
  ENSG00000005381_1 (sequence is synthesized)
gccctctgaggtggggctgaggtacaaagggggattgagcagcccaggagaagagagatgggggttcccttcttctcttctctcagatgcatggtggacttaggaccttgctgggctggg

SEQ ID NO: 4366 - DNA, 120 bp, Artificial Sequence
  ENSG00000005381_2 (sequence is synthesized)
ggtctcactgcagagatgaagctgcttctggccctagcagggctcctggccattctggccacgccccagccctctgaaggtgctgctccagctgtcctgggggaggtggacacctcgttg

SEQ ID NO: 4367 - DNA, 120 bp, Artificial Sequence
  ENSG00000005381_3 (sequence is synthesized)
gtgctgagctccatggaggaggccaagcagctggtggacaaggcctacaaggagcggcgggaaagcatcaagcagcggcttcgcagcggctcagccagccccatggaactcctatcctac

SEQ ID NO: 4368 - DNA, 120 bp, Artificial Sequence
  ENSG00000005381_4 (sequence is synthesized)
ttcaagcagccggtggcagccaccaggacggcggtgagggccgctgactacctgcacgtggctctagacctgctggagaggaagctgcggtccctgtggcgaaggccattcaatgtcact

SEQ ID NO: 4369 - DNA, 120 bp, Artificial Sequence
  ENSG00000005381_5 (sequence is synthesized)
gatgtgctgacgcccgcccagctgaatgtgttgtccaagtcaagcggctgcgcctaccaggacgtgggggtgacttgcccggagcaggacaaataccgcaccatcaccgggatgtgcaac

SEQ ID NO: 4370 - DNA, 120 bp, Artificial Sequence
  ENSG00000005381_6 (sequence is synthesized)
aacagacgcagccccacgctgggggcctccaaccgtgcctttgtgcgctggctgccggcggagtatgaggacggcttctctcttccctacggctggacgcccggggtcaagcgcaacggc

SEQ ID NO: 4371 - DNA, 120 bp, Artificial Sequence
  ENSG00000005381_7 (sequence is synthesized)
ttcccggtggctctggctcgcgcggtctccaacgagatcgtgcgcttccccactgatcagctgactccggaccaggagcgctcactcatgttcatgcaatggggccagctgttggaccac

SEQ ID NO: 4372 - DNA, 120 bp, Artificial Sequence
  ENSG00000005381_8 (sequence is synthesized)
gacctcgacttcacccctgagccggccgcccgggcctccttcgtcactggcgtcaactgcgagaccagctgcgttcagcagccgccctgcttcccgctcaagatcccgcccaatgacccc

SEQ ID NO: 4373 - DNA, 120 bp, Artificial Sequence
  ENSG00000005381_9 (sequence is synthesized)
cgcatcaagaaccaagccgactgcatcccgttcttccgctcctgcccggcttgccccgggagcaacatcaccatccgcaaccagatcaacgcgctcacttccttcgtggacgccagcatg

SEQ ID NO: 4374 - DNA, 120 bp, Artificial Sequence
  ENSG00000005381_10 (sequence is synthesized)
gtgtacggcagcgaggagcccctggccaggaacctgcgcaacatgtccaaccagctggggctgctggccgtcaaccagcgcttccaagacaacggccgggccctgctgccctttgacaac

SEQ ID NO: 4375 - DNA, 120 bp, Artificial Sequence
  ENSG00000005381_11 (sequence is synthesized)
ctgcacgatgacccctgtctcctcaccaaccgctcagcgcgcatcccctgcttcctggcaggggacacccgttccagtgagatgcccgagctcacctccatgcacaccctcttacttcgg

SEQ ID NO: 4376 - DNA, 120 bp, Artificial Sequence
  ENSG00000005381_12 (sequence is synthesized)
gagcacaaccggctggccacagagctcaagagcctgaaccctaggtgggatggggagaggctctaccaggaagcccggaagatcgtgggggccatggtccagatcatcacttaccgggac

SEQ ID NO: 4377 - DNA, 120 bp, Artificial Sequence
  ENSG00000005381_13 (sequence is synthesized)
ttcaccaatgccttccgctacggccacaccctcatccaacccttcatgttccgcctggacaatcggtaccagcccatggaacccaacccccgtgtccccctcagcagggtcttttttgcc

SEQ ID NO: 4378 - DNA, 120 bp, Artificial Sequence
  ENSG00000005381_14 (sequence is synthesized)
tcctggagggtcgtgctggaaggtggcattgaccccatcctccggggcctcatggccacccctgccaagctgaatcgtcagaaccaaattgcagtggatgagatccgggagcgattgttt

SEQ ID NO: 4379 - DNA, 120 bp, Artificial Sequence
  ENSG00000005381_15 (sequence is synthesized)
gagcaggtcatgaggattgggctggacctgcctgctctgaacatgcagcgcagcagggaccacggcctcccaggatacaatgcctggaggcgcttctgtgggctcccgcagcctgaaact

SEQ ID NO: 4380 - DNA, 120 bp, Artificial Sequence
  ENSG00000005381_16 (sequence is synthesized)
gtgggccagctgggcacggtgctgaggaacctgaaattggcgaggaaactgatggagcagtatggcacgcccaacaacatcgacatctggatgggcggcgtgtccgagcctctgaagcgc

SEQ ID NO: 4381 - DNA, 120 bp, Artificial Sequence
  ENSG00000005381_17 (sequence is synthesized)
aaaggccgcgtgggcccactcctcgcctgcatcatcggtacccagttcaggaagctccgggatggtgatcggttttggtgggagaacgagggtgtgttcagcatgcagcagcgacaggcc

SEQ ID NO: 4382 - DNA, 120 bp, Artificial Sequence
  ENSG00000005381_18 (sequence is synthesized)
ctggcccagatctcattgccccggatcatctgcgacaacacaggcatcaccaccgtgtctaagaacaacatcttcatgtccaactcatatccccgggactttgtcaactgcagtacactt

SEQ ID NO: 4383 - DNA, 120 bp, Artificial Sequence
  ENSG00000005381_19 (sequence is synthesized)
cctgcattgaacctggcttcctggagggaagcctcctagaggccaggtaagggggtgcagcagtgaggggtatatctgggctggccagttggaaccacggagatctccttgccctagatg

SEQ ID NO: 4384 - DNA, 120 bp, Artificial Sequence
  ENSG00000005381_20 (sequence is synthesized)
agcccagccctgttctgggtgcagctgagaaaatgagtgactagacgttcatttgtgtgctcatgtatgtgcgaagtatataaattggcttttcatgcgtgtgtgttgtctgaacatggg

SEQ ID NO: 4385 - DNA, 120 bp, Artificial Sequence
  ENSG00000005381_21 (sequence is synthesized)
gagtgtttcatgggttatgtgtatgtgccatttatgtgagtgtgtgtttgtgctgatgagaatactgagtatgtggaaggcagcagagcggactggtgaggagcacagctcaggaactag

SEQ ID NO: 4386 - DNA, 120 bp, Artificial Sequence
  ENSG00000005381_22 (sequence is synthesized)
actgcctgggttccaatcctggctctgtggcttgctagctatgtgaccttgagcaaattaccctccttaaacaagagttttcttccttgtaaattacatctgtcatggtttcttggaggg

SEQ ID NO: 4387 - DNA, 120 bp, Artificial Sequence
  ENSG00000005381_23 (sequence is synthesized)
cccacttgtatcctctggttcttcatttattgagcacctactacatgcaaggcactgtactaggcgtgagaagcatatagaggcaagaaagagataccaagatgccatctgtgtcctggt

SEQ ID NO: 4388 - DNA, 120 bp, Artificial Sequence
  ENSG00000005381_24 (sequence is synthesized)
tagcagagctggaccagtggtgccttggagggataagccagctgcagctgggctgtgtggttgacttatgggcccagccagccaggctcaggccatggctcccctttttcttcctcaccc

SEQ ID NO: 4389 - DNA, 120 bp, Artificial Sequence
  ENSG00000005381_25 (sequence is synthesized)
tgatttcttgcttattcactgaagttctcctgaagaggaactgggcctgttgccctttctgtaccatttatttgctcccaatgtttatgataataaaggcaccgctgatggggacctcca

SEQ ID NO: 4390 - DNA, 120 bp, Artificial Sequence
  ENSG00000005381_26 (sequence is synthesized)
acaaggagcggcgggaaaggtggggcacgaggcactgcccagctctgggcaaggatgtcccaggcctttcagagaagcagcaggcagcagggagcttgaagcatcaagcagcggcttcgc

SEQ ID NO: 4391 - DNA, 120 bp, Artificial Sequence
  ENSG00000005381_27 (sequence is synthesized)
tggaaggggccatctcccttctgtgcccaggtttcctttcccagacgctgaggaaggctggccctgcctcccttgtgtccacagcactggctgctcagctatgacctgtctccttcctgc

SEQ ID NO: 4392 - DNA, 120 bp, Artificial Sequence
  ENSG00000005381_28 (sequence is synthesized)
cccctgtctcctcaccaaccgctcagcgcgcatcccctgcttcctggcaggtcagctttggggtggggaccagaggtggcataggagatgttccctgttggagccacagggacacccgtt

SEQ ID NO: 4393 - DNA, 120 bp, Artificial Sequence
  ENSG00000005421_0 (sequence is synthesized)
agagcctcctagcccgtcggtgtctgcgcccatcgatccctttgtctatccccgaccatggcgaagctgattgcgctcaccctcttggggatgggactggcactcttcaggaaccaccag

SEQ ID NO: 4394 - DNA, 120 bp, Artificial Sequence
  ENSG00000005421_1 (sequence is synthesized)
tcttcttaccaaacacgacttaatgctctccgagaggtacaacccgtagaacttcctaactgtaatttagttaaaggaatcgaaactggctctgaagacttggagatactgcctaatgga

SEQ ID NO: 4395 - DNA, 120 bp, Artificial Sequence
  ENSG00000005421_2 (sequence is synthesized)
ctggctttcattagctctggattaaagtatcctggaataaagagcttcaaccccaacagtcctggaaaaatacttctgatggacctgaatgaagaagatccaacagtgttggaattgggg

SEQ ID NO: 4396 - DNA, 120 bp, Artificial Sequence
  ENSG00000005421_3 (sequence is synthesized)
atcactggaagtaaatttgatgtatcttcatttaaccctcatgggattagcacattcacagatgaagataatgccatgtacctcctggtggtgaaccatccagatgccaagtccacagtg

SEQ ID NO: 4397 - DNA, 120 bp, Artificial Sequence
  ENSG00000005421_4 (sequence is synthesized)
gagttgtttaaatttcaagaagaagaaaaatcgcttttgcatctaaaaaccatcagacataaacttctgcctaatttgaatgatattgttgctgtgggacctgagcacttttatggcaca

SEQ ID NO: 4398 - DNA, 120 bp, Artificial Sequence
  ENSG00000005421_5 (sequence is synthesized)
aatgatcactattttcttgacccctacttacaatcctgggagatgtatttgggtttagcgtggtcgtatgttgtctactatagtccaagtgaagttcgagtggtggcagaaggatttgat

SEQ ID NO: 4399 - DNA, 120 bp, Artificial Sequence
  ENSG00000005421_6 (sequence is synthesized)
tttgctaatggaatcaacatttcacccgatggcaagtatgtctatatagctgagttgctggctcataagattcatgtgtatgaaaagcatgctaattggactttaactccattgaagtcc

SEQ ID NO: 4400 - DNA, 120 bp, Artificial Sequence
  ENSG00000005421_7 (sequence is synthesized)
cttgactttaataccctcgtggataacatatctgtggatcctgagacaggagacctttgggttggatgccatcccaatggcatgaaaatcttcttctatgactcagagaatcctcctgca

SEQ ID NO: 4401 - DNA, 120 bp, Artificial Sequence
  ENSG00000005421_8 (sequence is synthesized)
tcagaggtgcttcgaatccagaacattctaacagaagaacctaaagtgacacaggtttatgcagaaaatggcacagtgttgcaaggcagtacagttgcctctgtgtacaaagggaaactg

SEQ ID NO: 4402 - DNA, 120 bp, Artificial Sequence
  ENSG00000005421_9 (sequence is synthesized)
cccagtgttcttagctgaacaatgaatgctgaccctaaatgtggacatcatgaagcatcaaagcactgtttaactgggagtgatatgatgtgtagggcttttttttgagaatacactatc

SEQ ID NO: 4403 - DNA, 120 bp, Artificial Sequence
  ENSG00000005421_10 (sequence is synthesized)
aaatcagtcttggaatacttgaaaacctcatttaccataaaaatccttctcactaaaatggataaatcagttatgtcaattgtcagatattaaataacagtgtgtgaccccaaaagtact

SEQ ID NO: 4404 - DNA, 120 bp, Artificial Sequence
  ENSG00000005421_11 (sequence is synthesized)
taccctaaaacatgtgttgcctggaagcacatgtgtgtatcgctgccttgccatgtcttgttcagaagacacaggggagcagggttagctcacgtgtctttagaactccagtactcaccc

SEQ ID NO: 4405 - DNA, 120 bp, Artificial Sequence
  ENSG00000005421_12 (sequence is synthesized)
agggactccagttcacaggccagaaaacatatgcattatgaagttcccctctactccatgcacatagtaagtctgactatggcagtcagacttacttactcccattttcccttcgatata

SEQ ID NO: 4406 - DNA, 120 bp, Artificial Sequence
  ENSG00000005421_13 (sequence is synthesized)
tgactttttctcagtaaatattaacctgaattattccaactccccttgtactcttgctttttcaattctcctgttgcaatgacacataggaaaatcttaaaattcttgggagtgttgtca

SEQ ID NO: 4407 - DNA, 120 bp, Artificial Sequence
  ENSG00000005421_14 (sequence is synthesized)
cacctgaaaattatgagtctctatgatcttggcacaaattgtacatttgagtgtctttgacttggttaaaggaagtttgttcacttcgatgactggatacagaatgaatcccataattga

SEQ ID NO: 4408 - DNA, 120 bp, Artificial Sequence
  ENSG00000005421_15 (sequence is synthesized)
catgggcgaagctaaaagtgtccccaaagactacactgttgttgaggtggtggtagtgctggtgggtttttgtttaatatttaaacttcttgttgtggaggctgaaaagaaaaaaaataa

SEQ ID NO: 4409 - DNA, 120 bp, Artificial Sequence
  ENSG00000005421_16 (sequence is synthesized)
tagaaaggtaaacaaacaaataaatagaaaagatcaacaacccctttggctatctactgagacatgactaggaagaaaacatgactttatcattttgttatagaaactgatatataaagg

SEQ ID NO: 4410 - DNA, 120 bp, Artificial Sequence
  ENSG00000005421_17 (sequence is synthesized)
ttacacattttcatttatttgtttttctgatttgaaggtataaccttcatgatgaattacttcttcagggtgttaaggcagtgactttagaaacaaatttttttcttgtttttgttttgt

SEQ ID NO: 4411 - DNA, 120 bp, Artificial Sequence
  ENSG00000005421_18 (sequence is synthesized)
aaaaactaaatattgtacccagagttccccacttgtcttgccctggccttgcctggaaaaattgcaggaaaaactctggagttgaaactcaggcaaagtacagtgaaggagaacttttgt

SEQ ID NO: 4412 - DNA, 120 bp, Artificial Sequence
  ENSG00000005436_0 (sequence is synthesized)
actgaagctgcggcttgcggttcagcgggttctagggcgccgggcgctcgggcctcggccatggctcacaggccgaaaaggacttttcggcagcgcgcggctgattccagcgacagcgat

SEQ ID NO: 4413 - DNA, 120 bp, Artificial Sequence
  ENSG00000005436_1 (sequence is synthesized)
ggcgccgaggagtcgcctgctgagcctggggcgccgagggaacttccggtcccgggttctgcggaggaagagccgccctctggaggaggccgcgcgcaggtggcgggactgccccaccgg

SEQ ID NO: 4414 - DNA, 120 bp, Artificial Sequence
  ENSG00000005436_2 (sequence is synthesized)
gttcggggccctcgtggccggggccgggtctgggcgagctcccggcgtgccaccaaagcggctccccgcgcggacgaaggctcagaatccagaacccttgatgtgtccacagatgaagag

SEQ ID NO: 4415 - DNA, 120 bp, Artificial Sequence
  ENSG00000005436_3 (sequence is synthesized)
gataaaatacatcactcctcagaaagtaaggatgatcagggtttgtcttctgacagttctagctctcttggagaaaaagaactttcatcaacagttaagatcccagatgcagcttttatt

SEQ ID NO: 4416 - DNA, 120 bp, Artificial Sequence
  ENSG00000005436_4 (sequence is synthesized)
caggcagcccgcagaaaacgtgaattggccagggcccaagatgactatatttctttggatgtacaacatacctcctccatctctggtatgaagagagagagcgaagatgaccctgagagt

SEQ ID NO: 4417 - DNA, 120 bp, Artificial Sequence
  ENSG00000005436_5 (sequence is synthesized)
gagcctgatgaccatgaaaagagaataccatttactctaagacctcaaacacttagacaaaggatggctgaggaatcaataagcagaaatgaagaaacaagtgaagaaagtcaggaagat

SEQ ID NO: 4418 - DNA, 120 bp, Artificial Sequence
  ENSG00000005436_6 (sequence is synthesized)
gaaaagcaagatacttgggaacaacagcaaatgaggaaagcagttaaaatcatagaggaaagagacatagatctttcctgtggcaatggatcttcaaaagtgaagaaatttgatacttcc

SEQ ID NO: 4419 - DNA, 120 bp, Artificial Sequence
  ENSG00000005436_7 (sequence is synthesized)
atttcatttccgccagtaaatttagaaattataaagaagcaattaaatactagattaacattactacaggaaactcaccgctcacacctgagggagtatgaaaaatacgtacaagatgtc

SEQ ID NO: 4420 - DNA, 120 bp, Artificial Sequence
  ENSG00000005436_8 (sequence is synthesized)
aaaagctcaaagagtaccatccagaacctagagagttcatcaaatcaagctctaaattgtaaattctataaaagcatgaaaatttatgtggaaaatttaattgactgccttaatgaaaag

SEQ ID NO: 4421 - DNA, 120 bp, Artificial Sequence
  ENSG00000005436_9 (sequence is synthesized)
attatcaacatccaagaaatagaatcatccatgcatgcactccttttaaaacaagctatgacctttatgaaacgcaggcaagatgaattaaaacatgaatcaacgtatttacaacagtta

SEQ ID NO: 4422 - DNA, 120 bp, Artificial Sequence
  ENSG00000005436_10 (sequence is synthesized)
tcacgcaaagatgagacatccacaagtggaaacttctcagtagatgaaaaaactcagtggattttagaagagattgaatctcgaaggacaaaaagaagacaagcaagggtgctttctggg

SEQ ID NO: 4423 - DNA, 120 bp, Artificial Sequence
  ENSG00000005436_11 (sequence is synthesized)
aattgtaaccatcaggaaggaacatctagtgatgatgaactgccttcagcagagatgattgacttccaaaaaagccaaggtgacattttacagaaacagaagaaagtttttgaagaagtg

SEQ ID NO: 4424 - DNA, 120 bp, Artificial Sequence
  ENSG00000005436_12 (sequence is synthesized)
caagatgatttttgtaacatccagaatattttgttgaaatttcagcaatggcgagaaaagtttcctgactcctattatgaagctttcattagtttatgcataccaaagcttttaaatccc

SEQ ID NO: 4425 - DNA, 120 bp, Artificial Sequence
  ENSG00000005436_13 (sequence is synthesized)
ctaatacgagttcagttgattgattggaatcctcttaagttggaatccacaggtttaaaagagatgccatggttcaaatctgtagaagaatttatggatagcagtgtggaagattcaaag

SEQ ID NO: 4426 - DNA, 120 bp, Artificial Sequence
  ENSG00000005436_14 (sequence is synthesized)
aaggaaagtagttcagataaaaaagtcttgtctgcaatcatcaacaaaacaattattccccgacttacagactttgtagaattcctttgggatcctttgtcaacctcacagacaacaagt

SEQ ID NO: 4427 - DNA, 120 bp, Artificial Sequence
  ENSG00000005436_15 (sequence is synthesized)
ttaataacacattgcagagtgattcttgaagaacattccacttgtgaaaatgaagttagtaaaagcagacaggatttacttaaatccattgtttcaagaatgaaaaaggcagtagaagat

SEQ ID NO: 4428 - DNA, 120 bp, Artificial Sequence
  ENSG00000005436_16 (sequence is synthesized)
gatgtttttattcctctgtatccaaagagtgctgtagaaaacaaaacatcacctcattcaaagttccaagaaagacagttctggtcaggcctaaagctcttccgcaatattcttctttgg

SEQ ID NO: 4429 - DNA, 120 bp, Artificial Sequence
  ENSG00000005436_17 (sequence is synthesized)
aatggactccttacagatgacaccttgcaagaactaggactagggaagctgctaaatcgttaccttattatagcacttctcaatgccacacctgggccagatgtggttaaaaagtgcaac

SEQ ID NO: 4430 - DNA, 120 bp, Artificial Sequence
  ENSG00000005436_18 (sequence is synthesized)
gaggacatctattccacagctagaaaacttcattcagtttttattgcagtctgcacataaattatctagaagtgaattcagggatgaagtcgaagaaataattcttattttggtgaaaat

SEQ ID NO: 4431 - DNA, 120 bp, Artificial Sequence
  ENSG00000005436_19 (sequence is synthesized)
aaaagctttgaatcaagcagaatccttcataggagagcatcacctagaccatcttaaatcactaattaaagaagattgaataaactttattggaaaatgctaaaattttaatatagttac

SEQ ID NO: 4432 - DNA, 120 bp, Artificial Sequence
  ENSG00000005436_20 (sequence is synthesized)
actcagttcctttgtttgagaagaagctggtgcctctctcttctttattccctgtaatagaaggtaggatttgaaaaaaagcaggactccacctctgtattcccccgtgctttaccttct

SEQ ID NO: 4433 - DNA, 120 bp, Artificial Sequence
  ENSG00000005436_21 (sequence is synthesized)
ggcatcatgaaaagctgccatgattctgtggtgttctaaggaattaaatgcactggagctttaagagctcaacgtgtttccctttgattcttttggctggtctttcaattttcttaagag

SEQ ID NO: 4434 - DNA, 120 bp, Artificial Sequence
  ENSG00000005436_22 (sequence is synthesized)
gggaactggagaaaccttgctaaaggttttagcttaagtgagcatgctactaagtcttctgtcctgaaccacaataatatcttttagttctctttaactacctttatttaaaaataagtc

SEQ ID NO: 4435 - DNA, 120 bp, Artificial Sequence
  ENSG00000005436_23 (sequence is synthesized)
aatatgaaaatctcagttggagtgaattatttgctaagtattaaatgattaaggcatgtgccgattgtcaaattatccttcagaaatctgtaccaatttaatgtaccaacataagcataa

SEQ ID NO: 4436 - DNA, 120 bp, Artificial Sequence
  ENSG00000005436_24 (sequence is synthesized)
gtgagtgccaatgaatccctaccagcagtagttattatcctttttaaaaatgcattgaaaatttgaaaggtaaaaatcttattttaatagcgtattttgtgttggctattagagagtaaa

SEQ ID NO: 4437 - DNA, 120 bp, Artificial Sequence
  ENSG00000005436_25 (sequence is synthesized)
catattggttttggccatttgtaattatttctgaaatatccatctttttcttatggactttaagacctttatatttttaaagatattgattttttgcccatgcttgtggcagaagttttc

SEQ ID NO: 4438 - DNA, 79 bp, Artificial Sequence
  ENSG00000005436_26 (sequence is synthesized)
agatattgattttttgcccatgcttgtggcagaagttttccttatttgccatttttcttttattttttttttaattgta

SEQ ID NO: 4439 - DNA, 74 bp, Artificial Sequence
  ENSG00000005436_27 (sequence is synthesized)
cttcaagatttttgtaattttttgtagagatggggtttcgtgacattgcccaggctggtctcgaactcttgagc

SEQ ID NO: 4440 - DNA, 86 bp, Artificial Sequence
  ENSG00000005436_28 (sequence is synthesized)
aaccatgtttggcctttcttttaaatttgttgatgttttttgaagcattaagtcattacttattagcaagttactattttgttttt

SEQ ID NO: 4441 - DNA, 120 bp, Artificial Sequence
  ENSG00000005436_29 (sequence is synthesized)
attaagtcattacttattagcaagttactattttgtttttttgtcattggtggtaggactaagaaggaaacagatattttaaatactcacaacatgtgattcattttctgataaaatatt

SEQ ID NO: 4442 - DNA, 120 bp, Artificial Sequence
  ENSG00000005436_30 (sequence is synthesized)
tgtctaataaaacagaggcaagataatttaatcaaaagaaattaagaaaattttccaaaaatgttagtttactagtaatttttctaagtctacttattaaataacttaagggaaactgta

SEQ ID NO: 4443 - DNA, 120 bp, Artificial Sequence
  ENSG00000005436_31 (sequence is synthesized)
aatatattttgcaaattgttgttcaaaagataattggaaaaaattgaatatattgtaggatttgaatatacagcctacttttatgtcacctctaccttcaaaactacatataatttattt

SEQ ID NO: 4444 - DNA, 120 bp, Artificial Sequence
  ENSG00000005436_32 (sequence is synthesized)
taggagttggatttgttatgtctgttgcagtgaggacttgtgattcactggtatgaagaattttttgatgtttatattagtaacaaaattatacaaggatagaatctcatctagaaaatg

SEQ ID NO: 4445 - DNA, 120 bp, Artificial Sequence
  ENSG00000005436_33 (sequence is synthesized)
caaactattgttgaaaagcagttagcatttccacacaaccgctgtccccagagataactgctgttttcattttaatgttatccttttagaccttttctctatttacaaaaatgttacgtg

SEQ ID NO: 4446 - DNA, 120 bp, Artificial Sequence
  ENSG00000005436_34 (sequence is synthesized)
tttctatgtgtacatagttttgggttttttttttttttttacgtaagtggcagacactttattgcacatgaaatttgtaatttttttctatttaagtacacatttggaaattatcctctg

SEQ ID NO: 4447 - DNA, 120 bp, Artificial Sequence
  ENSG00000005436_35 (sequence is synthesized)
acttttggatttttaactaaatatgttggacgtgttcctttatatatttaagttcagcacagaaactttcctacctttttgtggaagataaaatattaaaactgctttcaaaactacaaa

SEQ ID NO: 4448 - DNA, 120 bp, Artificial Sequence
  ENSG00000005436_36 (sequence is synthesized)
tttgtataatctcaaaaaatgttggcttgctgcaattaaaatggaaaaatactaaacgtttacatgtgagctttttttccgctagtaagcagaaatgaagaaacaagtgaagaaagtcag

SEQ ID NO: 4449 - DNA, 120 bp, Artificial Sequence
  ENSG00000005436_37 (sequence is synthesized)
ttgtttgagaagaagctggtgcctctctcttctttattccctgtaatagaagaggatctgttcttccccttcgaggaatgaattcaggactcaagaacctgtaaaaaatacaaataaata

SEQ ID NO: 4450 - DNA, 120 bp, Artificial Sequence
  ENSG00000005436_38 (sequence is synthesized)
attaaaagtaaactcaaaaggctgctagaagaaaaattgttgcttttcaaagaaattaaatatgatattgatgtattttattcttcattgtctaaataaaagtcaatcttatttctaaaa

SEQ ID NO: 4451 - DNA, 120 bp, Artificial Sequence
  ENSG00000005436_39 (sequence is synthesized)
gcatcattgagcaagtacttttcactactgaaatataattaaccacatgatgtcattaactatacctgatatacattattaatttgtaagaataatagaaaagcaaaatttagtaaaacc

SEQ ID NO: 4452 - DNA, 120 bp, Artificial Sequence
  ENSG00000005436_40 (sequence is synthesized)
gaatataatatgagagaatctccataaaaaatgtaatatgctggctcacattttatagtgttgataatggtttttaacatcgatttggtccatgatattgtgacctctaaaagatgtatc

SEQ ID NO: 4453 - DNA, 120 bp, Artificial Sequence
  ENSG00000005436_41 (sequence is synthesized)
tgtatcaaaatgttattatcaaggagtatgtgtaataatgtttattaatgcctgacctcccaccttgatgtttttggacaggttaaaaaaaatgtgcagtatcttactttcaaagcattg

SEQ ID NO: 4454 - DNA, 120 bp, Artificial Sequence
  ENSG00000005436_42 (sequence is synthesized)
aaaacgatcgtttttacctgtataaatatattttttttaacatggaagcatctatagagattttagatgtcatgtattaaaatcttccctgctgtaataaaaaatttcctctaccaataa

SEQ ID NO: 4455 - DNA, 120 bp, Artificial Sequence
  ENSG00000005436_43 (sequence is synthesized)
gcggacgaaggctcaggtgtccagggagacgcggggaagcggggaggtgacggcacagggcgggaaggggccgcggggtctctggatccttctctgggggttctataacttgctgccgac

SEQ ID NO: 4456 - DNA, 120 bp, Artificial Sequence
  ENSG00000005448_0 (sequence is synthesized)
gtgcgtacgtgcgtcgtctctatggtggcggcggatttggagggaccctacgaaccaggagtcaggcgagccgatctggggctgcaggatgttccgctgggagcgctccattcccctgcg

SEQ ID NO: 4457 - DNA, 120 bp, Artificial Sequence
  ENSG00000005448_1 (sequence is synthesized)
aggctcggccgccgccctgtgcaacaacctcagtgtgctgcagctgccggctcgcaacctcacgtattttggcgtggttcatggaccaagcgcccagcttctcagcgctgctcctgaggg

SEQ ID NO: 4458 - DNA, 120 bp, Artificial Sequence
  ENSG00000005448_2 (sequence is synthesized)
tgtgcccttggcccagcgccagctccacgctaaggagggtgctggagtgagtcccccacttatcactcaggtccactggtgtgtcctccccttccgagtgctgctggtactcacctcaca

SEQ ID NO: 4459 - DNA, 120 bp, Artificial Sequence
  ENSG00000005448_3 (sequence is synthesized)
tcgaggaatacagatgtacgagtccaatggctacaccatggtctactggcatgcactggactctggagatgcctccccagtacaggctgtgtttgcccggggaattgctgccagtggcca

SEQ ID NO: 4460 - DNA, 120 bp, Artificial Sequence
  ENSG00000005448_4 (sequence is synthesized)
attgtactgagcgaggagctggctgggcaccagatgccaatcacagacattgccaccgagcctgcccagggacaggattgtgtggctgacatggtgacggcagatgactcaggcttgctg

SEQ ID NO: 4461 - DNA, 120 bp, Artificial Sequence
  ENSG00000005448_5 (sequence is synthesized)
tgtgtctggcggtcagggccagaattcacattattgacccgcattccaggatttggagttccgtgcccctctgtgcagctgtggcaggggatcatagcagcaggctatgggaacggacaa

SEQ ID NO: 4462 - DNA, 120 bp, Artificial Sequence
  ENSG00000005448_6 (sequence is synthesized)
gtgcatctatatgaggccactacaggaaatctacatgtccagatcaatgcccatgcccgggccatctgcgccctggacctggcttctgaggtgggcaagctactctctgcaggtgaggac

SEQ ID NO: 4463 - DNA, 120 bp, Artificial Sequence
  ENSG00000005448_7 (sequence is synthesized)
acctttgtgcatatctggaagctgagcagaaacccagagagtggctacattgaggtggaacactgtcatggtgagtgtgtcgccgacacccagctgtgtggtgctcgattttgtgattcc

SEQ ID NO: 4464 - DNA, 120 bp, Artificial Sequence
  ENSG00000005448_8 (sequence is synthesized)
tcaggcaactcctttgctgtgactggctatgaccttgcggagatccggagattcagcagtgtgtgagaagagcagccttcctttgtccctgtggtattcataaagtacccgctccaccca

SEQ ID NO: 4465 - DNA, 120 bp, Artificial Sequence
  ENSG00000005448_9 (sequence is synthesized)
ttggagggaccctacgaaccaggagtcaggcgagccgatctggggctgcaggtgttacctctgatctaggccgggggcttcagggatccgagccgagggagaaagccttgggggcttcat

SEQ ID NO: 4466 - DNA, 120 bp, Artificial Sequence
  ENSG00000005448_10 (sequence is synthesized)
cacacttatttggctcgcgggcttggggccatcgggtggtcctgtgtcatccccattcctcctctgcgattcccccgtcgccccaaaacagccctgggactcccctgtcttgctcctcga

SEQ ID NO: 4467 - DNA, 120 bp, Artificial Sequence
  ENSG00000005448_11 (sequence is synthesized)
gaccctcccccatcaccgtcctctgggcaccccatcctatgacccagtctcaggcatcttccgaaatgctcgatgatagccgccctcgggcatctccgctgcgtctgtttgtagcgcgcc

SEQ ID NO: 4468 - DNA, 120 bp, Artificial Sequence
  ENSG00000005448_12 (sequence is synthesized)
tatcactcaggtgaggcatggagctgggagtgatgttgctgaacccagtcctacccccagccttttctctccaaaccttcaggagcaggcatgtcctaacctcagaatctccccaggcat

SEQ ID NO: 4469 - DNA, 66 bp, Artificial Sequence
  ENSG00000005448_13 (sequence is synthesized)
aggagcaggcatgtcctaacctcagaatctccccaggcatgtcctaacctcagaatctcccctctc

SEQ ID NO: 4470 - DNA, 120 bp, Artificial Sequence
  ENSG00000005448_14 (sequence is synthesized)
cagcctgggccacagagcaagactccgtcccccaaaaaaaaaaaaaaaacaaacaaactcatcttccctgctttgattttctccctacactgatgcacctccctccaggtccactggtgt

SEQ ID NO: 4471 - DNA, 120 bp, Artificial Sequence
  ENSG00000005448_15 (sequence is synthesized)
tagggctgcaggaggggatatttctgatcattctcccctttcatattcagtacaggctgtgtttgcccggggaattgctgccagtggccacttcatctgtgtgggtgagggagccaagtg

SEQ ID NO: 4472 - DNA, 120 bp, Artificial Sequence
  ENSG00000005448_16 (sequence is synthesized)
cagggcatggaggggtgctggggcatgtgggctgtggccaggagaataatgagggcctgaggaaattgtggaaagttagagggaagggtggaagtggagtggaatcagagactccagtaa

SEQ ID NO: 4473 - DNA, 120 bp, Artificial Sequence
  ENSG00000005448_17 (sequence is synthesized)
accatggaagggttcagagggtcagggtgggataagacaaggctagtgaatgaaggggcatggccgttggagcagtgagagggggttttgttactaaggtttctgggatggagtaagtgt

SEQ ID NO: 4474 - DNA, 120 bp, Artificial Sequence
  ENSG00000005448_18 (sequence is synthesized)
tgagtatggtggctggagacccaggagggtcaggaagtcatcactggagtactggttctggatacaggaacgtggtcaggccgggtgctggtgtttgacatcccagcaaagggtcccaac

SEQ ID NO: 4475 - DNA, 120 bp, Artificial Sequence
  ENSG00000005448_19 (sequence is synthesized)
ggcggatttggagggaccctacgaaccaggagtcaggcgagccgatctggggctgcagcgcgcctggtgattcggctgcacccccacacaggatgttccgctgggagcgctccattcccc

SEQ ID NO: 4476 - DNA, 120 bp, Artificial Sequence
  ENSG00000005448_20 (sequence is synthesized)
cgtgcgtacgtgcgtcgtctctatggtggcggcggatttggagggaccctacgaaccaggagtcaggcgagccgatctggggctgcaggtccactggtgtgtcctccccttccgagtgct

SEQ ID NO: 4477 - DNA, 120 bp, Artificial Sequence
  ENSG00000005448_21 (sequence is synthesized)
ttgaggcaactcctttgctgtgactggctatgaccttgcggagatccggagattcagcagtgtgtgagaagagcagccttcctttgtccctgtggtattcataaagtacccgctccaccc

SEQ ID NO: 4478 - DNA, 120 bp, Artificial Sequence
  ENSG00000005448_22 (sequence is synthesized)
aggattgtgtggctgacatggtgacggcagatgactcaggcttgctgtgtgtctggcggtcagggccagaattcacattattgacccgcattccaggatttgggtaggtgaggcagaaag

SEQ ID NO: 4479 - DNA, 120 bp, Artificial Sequence
  ENSG00000005448_23 (sequence is synthesized)
ggtagagggcttcctgagatagcttcaggctggggagtaggatttgatctgggcaaaacaaagttgggtgtcacccttgcagagttccgtgcccctctgtgcagctgtggcaggggatca

SEQ ID NO: 4480 - DNA, 120 bp, Artificial Sequence
  ENSG00000005448_24 (sequence is synthesized)
tccagactttcccacttgcctctaaacacttccagacttttcacatgcttggcccactcactctttttctatttcttatcttcaatctttccatcttttccagtttccaagtgccacctc

SEQ ID NO: 4481 - DNA, 120 bp, Artificial Sequence
  ENSG00000005469_0 (sequence is synthesized)
gggagcgagccggtgctgctgcaggctgaggctgcggcagaggcggcgaggcgcgggcggtgaggacggacagtcaccgacttagtccagttccctgtgatctcaaaacaattgttgcag

SEQ ID NO: 4482 - DNA, 120 bp, Artificial Sequence
  ENSG00000005469_1 (sequence is synthesized)
caggctcctggcagtctcaagcagttcatcttcttggtgtactggtttcctattgtgattttatcatggaaaatcaattggctaaatcaactgaagaacgaacatttcagtaccaggatt

SEQ ID NO: 4483 - DNA, 120 bp, Artificial Sequence
  ENSG00000005469_2 (sequence is synthesized)
ctcttccatcactgcctgttccttcacttgaagaatcattaaaaaaataccttgaatcagtgaaaccatttgcaaatcaagaagaatataagaaaactgaagaaatagttcaaaaatttc

SEQ ID NO: 4484 - DNA, 120 bp, Artificial Sequence
  ENSG00000005469_3 (sequence is synthesized)
aaagtgggattggagaaaaattgcaccagaaattgcttgaaagagcaaaaggaaaaagaaattggctggaagagtggtggctgaatgttgcctatctggatgttcgtataccatcacaat

SEQ ID NO: 4485 - DNA, 120 bp, Artificial Sequence
  ENSG00000005469_4 (sequence is synthesized)
tgaatgtcaactttgcgggtcctgcagctcattttgaacactactggcctccaaaggaagggactcaattagaaagaggaagtataactctttggcataacttgaactactggcagctat

SEQ ID NO: 4486 - DNA, 120 bp, Artificial Sequence
  ENSG00000005469_5 (sequence is synthesized)
taagaaaagaaaaagtgcctgttcataaagttggaaatactcctctagatatgaatcaattccgaatgctattttctacctgcaaggttccaggaattactagagactccattatgaatt

SEQ ID NO: 4487 - DNA, 120 bp, Artificial Sequence
  ENSG00000005469_6 (sequence is synthesized)
attttaggactgagagtgaagggcgttccccaaaccacattgtagtgctgtgtcgaggccgagcttttgtctttgatgtaatacatgaaggatgtttggtcaccccgccagagcttctca

SEQ ID NO: 4488 - DNA, 120 bp, Artificial Sequence
  ENSG00000005469_7 (sequence is synthesized)
gacaactgacatatatccacaagaagtgccatagtgaacctgatggacctgggattgcagcattaactagtgaggagcgaactcgatgggctaaggcacgagaatatctgattggtcttg

SEQ ID NO: 4489 - DNA, 120 bp, Artificial Sequence
  ENSG00000005469_8 (sequence is synthesized)
atccagagaacttggctttgttagaaaaaattcagagtagtttactggtatattccatggaggatagcagtccacatgtaacaccagaggattattctgagattattgcagccatcctta

SEQ ID NO: 4490 - DNA, 120 bp, Artificial Sequence
  ENSG00000005469_9 (sequence is synthesized)
ttggagatccaacagtacgctggggtgacaaatcctataacttgatttccttttctaatggagtatttggctgtaattgtgatcatgctccttttgatgcaatgattatggtgaacatca

SEQ ID NO: 4491 - DNA, 120 bp, Artificial Sequence
  ENSG00000005469_10 (sequence is synthesized)
gttattatgtggatgagaaaatttttcagaatgaaggaagatggaagggttcagagaaggtacgagatataccacttccagaagagctcattttcattgtggatgagaaagttttaaatg

SEQ ID NO: 4492 - DNA, 120 bp, Artificial Sequence
  ENSG00000005469_11 (sequence is synthesized)
acatcaaccaagctaaagcccagtatctcagggaggcatctgatctacagattgcggcttatgcctttacatcttttggcaaaaagctaaccaagaacaagatgcttcacccggatacgt

SEQ ID NO: 4493 - DNA, 120 bp, Artificial Sequence
  ENSG00000005469_12 (sequence is synthesized)
ttattcagcttgcacttcagctggcctattacagacttcatggacaccctggttgttgctatgaaacagctatgacaagacatttttatcatggccgtacagagactatgcgatcatgca

SEQ ID NO: 4494 - DNA, 120 bp, Artificial Sequence
  ENSG00000005469_13 (sequence is synthesized)
tgagcggcagcaaaagatgttacaagcttttgcaaagcataataaaatgatgaaagattgttcagctggaaaaggatttgatcgtcaccttttaggtctcttactcatagcaaaagagga

SEQ ID NO: 4495 - DNA, 120 bp, Artificial Sequence
  ENSG00000005469_14 (sequence is synthesized)
aggtcttcctgttccagaactctttacggacccacttttttccaaaagcggaggaggtggaaattttgttctctcaacaagtctggttggctatttacgagtccagggagtggtagttcc

SEQ ID NO: 4496 - DNA, 120 bp, Artificial Sequence
  ENSG00000005469_15 (sequence is synthesized)
catggtacacaatggttatggatttttctaccatatcagagatgacaggtttgttgtggcctgttcagcctggaaatcctgtcccgagactgatgcggaaaagctagttcagctgacttt

SEQ ID NO: 4497 - DNA, 120 bp, Artificial Sequence
  ENSG00000005469_16 (sequence is synthesized)
ttgtgcttttcatgatatgatacagctgatgaactctactcatctttagagatgaatcatctattaagcacttaccaaaacatatcattaaactgagtgctgggagtgagttggtaatat

SEQ ID NO: 4498 - DNA, 120 bp, Artificial Sequence
  ENSG00000005469_17 (sequence is synthesized)
gagatgggaaggaatgttgacttgctaacattcctttaacaagttaagaaaacttgttaaatgtagaaattagtagaatcatgctctctaaatttattctgccatagaaggtagaaatat

SEQ ID NO: 4499 - DNA, 120 bp, Artificial Sequence
  ENSG00000005469_18 (sequence is synthesized)
ttttaagctcctctgatgcagcagcaatgcaaattatgacatagtgaatatagaactatgcagtatttaagcctcaacaatccaaatctacaaactttaacaatgcaagtcttactctaa

SEQ ID NO: 4500 - DNA, 120 bp, Artificial Sequence
  ENSG00000005469_19 (sequence is synthesized)
tttttaagtatttttgttggtacttacatgggttataaatcctctctctggacatcaatgtagagtccatctttcaagcactttaatttttttagctgccaaagggtatgaattacatta

SEQ ID NO: 4501 - DNA, 120 bp, Artificial Sequence
  ENSG00000005469_20 (sequence is synthesized)
ttgtatgctaatttccctgaaatcaatgccttctatgttcaccacagggatacaagcctgttatgtttgatgggaaagaccactacaatctaatggtgatctaaaataacttttttgggc

SEQ ID NO: 4502 - DNA, 90 bp, Artificial Sequence
  ENSG00000005469_21 (sequence is synthesized)
aggccaaggtaggaggattgcttgaagggtaaggtcctgtctctacaagatcaaaaacttagccgggtatggtggtgcatgtgtgcctgt

SEQ ID NO: 4503 - DNA, 120 bp, Artificial Sequence
  ENSG00000005469_22 (sequence is synthesized)
tcaaaaacttagccgggtatggtggtgcatgtgtgcctgtagtccaagctacttgaaggctgagacaggaggatcggttgagcccaggaggttgtggctgcagtgagctgtgatgtgccc

SEQ ID NO: 4504 - DNA, 120 bp, Artificial Sequence
  ENSG00000005469_23 (sequence is synthesized)
ttatgctatagcctgggcaagagcgtgagaccctgtctcaaagaagaaaaaaagagaaaaataactcttttgaacaaacagacaaattagctagtagtatggagatgtataccctctatt

SEQ ID NO: 4505 - DNA, 120 bp, Artificial Sequence
  ENSG00000005469_24 (sequence is synthesized)
acacacataaaaccgtaacaaaattcattgtggtgtattataattagttttgtgaatagaaaaataaagcacttatgtttaaatttgttacagtgacttttaaaggattaatgttgaatc

SEQ ID NO: 4506 - DNA, 120 bp, Artificial Sequence
  ENSG00000005469_25 (sequence is synthesized)
acattgtcagaattttttcctcctcgctgttcaattttgtagtttttactctcaaaaaatgaaattctcaaaattatatagctttttgttttgtttgaataaatgattcattcctgtttg

SEQ ID NO: 4507 - DNA, 120 bp, Artificial Sequence
  ENSG00000005469_26 (sequence is synthesized)
gattttagttagataagatgtacattatatttgtgaaattgattaccaggatatttttcaagttctccattgtaaggatatttacagtaaaaaggatatttacttgcaacctagaagtgc

SEQ ID NO: 4508 - DNA, 120 bp, Artificial Sequence
  ENSG00000005469_27 (sequence is synthesized)
atgcacatttccaaagtatatatcagcgaaactaaatttagccaataactaaatttatttactgaaattaaattattgtcaaatatgcttttggtgttaatagaacacaatcacttaaaa

SEQ ID NO: 4509 - DNA, 120 bp, Artificial Sequence
  ENSG00000005469_28 (sequence is synthesized)
taatgattttttcttttaacaaccatatgtaaaaatttggctgtcatccaagcatgtctgcacaaaacattttaaaattatgcctttaacacctttaattctttatgtctggtgattact

SEQ ID NO: 4510 - DNA, 120 bp, Artificial Sequence
  ENSG00000005469_29 (sequence is synthesized)
atctacagatatggctttaccttcaattgtgtcaggttacatttacctaatgtcagcaagacttcacatttcatgtatgaatatccagatgaaataaagtcctggttgtattcaccatca

SEQ ID NO: 4511 - DNA, 80 bp, Artificial Sequence
  ENSG00000005469_30 (sequence is synthesized)
ttgcctttcaaggtgatagtaagctgaaaaataagaattttatgcatgcttttttaaaaaaaaatctatttgtatttttt

SEQ ID NO: 4512 - DNA, 120 bp, Artificial Sequence
  ENSG00000005469_31 (sequence is synthesized)
agtgcatagtttttatttttaaattattgctgtaaaaatttttacagttattattgttattttcataatccaaaagaaggaatgaatcacttaactttgggagttttcagtgggtggatt

SEQ ID NO: 4513 - DNA, 120 bp, Artificial Sequence
  ENSG00000005469_32 (sequence is synthesized)
aaatgcagatttgctgggataagtgattctgattcacatggctggaatgaggcccagagattcttattttaacaatcacttcatgtggtttggctgcaggtaatctgtagaccatgctga

SEQ ID NO: 4514 - DNA, 120 bp, Artificial Sequence
  ENSG00000005469_33 (sequence is synthesized)
aggaaaacattttgtccaggtgactagcttgaaaaatcagaaacactaaaatagacatgtcacataggtggcatagaaatattttcgtagtacaatggagaaagggaatcattaaaaatc

SEQ ID NO: 4515 - DNA, 120 bp, Artificial Sequence
  ENSG00000005469_34 (sequence is synthesized)
agagtggagaatggttatgtatattgtatatttcagttagataaattgaggaagctagtataataattattgaaggtctcaataattttccacaaaattctttaacttcttcagctcaac

SEQ ID NO: 4516 - DNA, 120 bp, Artificial Sequence
  ENSG00000005469_35 (sequence is synthesized)
catttctgtacttctctactatgaatcagaggatgaggttgtataattcaaaagcattgccttagtctagaaataattattgtacctatcatttagttttagaaataaaaagcaagctga

SEQ ID NO: 4517 - DNA, 120 bp, Artificial Sequence
  ENSG00000005469_36 (sequence is synthesized)
ttttttttgatgaaccatttatatctgtgatggaataataaaatttcacacttccggattcctttgttctcaattttgagccttgagttgttttaattaaagaggggtaaaggtaaagaa

SEQ ID NO: 4518 - DNA, 120 bp, Artificial Sequence
  ENSG00000005471_0 (sequence is synthesized)
gggcgggggcgggggcgggggcgaggccgcggcgagcaaagtccaggcccctctgctgcagcgcccgcgcgtccagaggccctgccagacacgcgcgaggttcgaggctgagatggatct

SEQ ID NO: 4519 - DNA, 120 bp, Artificial Sequence
  ENSG00000005471_1 (sequence is synthesized)
tgaggcggcaaagaacggaacagcctggcgccccacgagcgcggagggcgactttgaactgggcatcagcagcaaacaaaaaaggaaaaaaacgaagacagtgaaaatgattggagtatt

SEQ ID NO: 4520 - DNA, 120 bp, Artificial Sequence
  ENSG00000005471_2 (sequence is synthesized)
aacattgtttcgatactccgattggcaggataaattgtttatgtcgctgggtaccatcatggccatagctcacggatcaggtctccccctcatgatgatagtatttggagagatgactga

SEQ ID NO: 4521 - DNA, 120 bp, Artificial Sequence
  ENSG00000005471_3 (sequence is synthesized)
caaatttgttgatactgcaggaaacttctcctttccagtgaacttttccttgtcgctgctaaatccaggcaaaattctggaagaagaaatgactagatatgcatattactactcaggatt

SEQ ID NO: 4522 - DNA, 120 bp, Artificial Sequence
  ENSG00000005471_4 (sequence is synthesized)
gggtgctggagttcttgttgctgcctatatacaagtttcattttggactttggcagctggtcgacagatcaggaaaattaggcagaagttttttcatgctattctacgacaggaaatagg

SEQ ID NO: 4523 - DNA, 120 bp, Artificial Sequence
  ENSG00000005471_5 (sequence is synthesized)
atggtttgacatcaacgacaccactgaactcaatacgcggctaacagatgacatctccaaaatcagtgaaggaattggtgacaaggttggaatgttctttcaagcagtagccacgttttt

SEQ ID NO: 4524 - DNA, 120 bp, Artificial Sequence
  ENSG00000005471_6 (sequence is synthesized)
tgcaggattcatagtgggattcatcagaggatggaagctcacccttgtgataatggccatcagccctattctaggactctctgcagccgtttgggcaaagatactctcggcatttagtga

SEQ ID NO: 4525 - DNA, 120 bp, Artificial Sequence
  ENSG00000005471_7 (sequence is synthesized)
caaagaactagctgcttatgcaaaagcaggcgccgtggcagaagaggctctgggggccatcaggactgtgatagctttcgggggccagaacaaagagctggaaaggtatcagaaacattt

SEQ ID NO: 4526 - DNA, 120 bp, Artificial Sequence
  ENSG00000005471_8 (sequence is synthesized)
agaaaatgccaaagagattggaattaaaaaagctatttcagcaaacatttccatgggtattgccttcctgttaatatatgcatcatatgcactggccttctggtatggatccactctagt

SEQ ID NO: 4527 - DNA, 120 bp, Artificial Sequence
  ENSG00000005471_9 (sequence is synthesized)
catatcaaaagaatatactattggaaatgcaatgacagtttttttttcaatcctaattggagctttcagtgttggccaggctgccccatgtattgatgcttttgccaatgcaagaggagc

SEQ ID NO: 4528 - DNA, 120 bp, Artificial Sequence
  ENSG00000005471_10 (sequence is synthesized)
agcatatgtgatctttgatattattgataataatcctaaaattgacagtttttcagagagaggacacaaaccagacagcatcaaagggaatttggagttcaatgatgttcacttttctta

SEQ ID NO: 4529 - DNA, 120 bp, Artificial Sequence
  ENSG00000005471_11 (sequence is synthesized)
cccttctcgagctaacgtcaagatcttgaagggcctcaacctgaaggtgcagagtgggcagacggtggccctggttggaagtagtggctgtgggaagagcacaacggtccagctgataca

SEQ ID NO: 4530 - DNA, 120 bp, Artificial Sequence
  ENSG00000005471_12 (sequence is synthesized)
gaggctctatgaccctgatgagggcacaattaacattgatgggcaggatattaggaactttaatgtaaactatctgagggaaatcattggtgtggtgagtcaggagccggtgctgttttc

SEQ ID NO: 4531 - DNA, 120 bp, Artificial Sequence
  ENSG00000005471_13 (sequence is synthesized)
caccacaattgctgaaaatatttgttatggccgtggaaatgtaaccatggatgagataaagaaagctgtcaaagaggccaacgcctatgagtttatcatgaaattaccacagaaatttga

SEQ ID NO: 4532 - DNA, 120 bp, Artificial Sequence
  ENSG00000005471_14 (sequence is synthesized)
caccctggttggagagagaggggcccagctgagtggtgggcagaagcagaggatcgccattgcacgtgccctggttcgcaaccccaagatccttctgctggatgaggccacgtcagcatt

SEQ ID NO: 4533 - DNA, 120 bp, Artificial Sequence
  ENSG00000005471_15 (sequence is synthesized)
ggacacagaaagtgaagctgaggtacaggcagctctggataaggccagagaaggccggaccaccattgtgatagcacaccgactgtctacggtccgaaatgcagatgtcatcgctgggtt

SEQ ID NO: 4534 - DNA, 120 bp, Artificial Sequence
  ENSG00000005471_16 (sequence is synthesized)
gtacttcaaacttgtcaacatgcagacatcaggaagccagatccagtcagaagaatttgaactaaatgatgaaaaggctgccactagaatggccccaaatggctggaaatctcgcctatt

SEQ ID NO: 4535 - DNA, 120 bp, Artificial Sequence
  ENSG00000005471_17 (sequence is synthesized)
taggcattctactcagaaaaaccttaaaaattcacaaatgtgtcagaagagccttgatgtggaaaccgatggacttgaagcaaatgtgccaccagtgtcctttctgaaggtcctgaaact

SEQ ID NO: 4536 - DNA, 120 bp, Artificial Sequence
  ENSG00000005471_18 (sequence is synthesized)
gaataaaacagaatggccctactttgtcgtgggaacagtatgtgccattgccaatggggggcttcagccggcattttcagtcatattctcagagatcatagcgatttttggaccaggcga

SEQ ID NO: 4537 - DNA, 120 bp, Artificial Sequence
  ENSG00000005471_19 (sequence is synthesized)
tgatgcagtgaagcagcagaagtgcaacatattctctttgattttcttatttctgggaattatttctttttttactttcttccttcagggtttcacgtttgggaaagctggcgagatcct

SEQ ID NO: 4538 - DNA, 120 bp, Artificial Sequence
  ENSG00000005471_20 (sequence is synthesized)
caccagaagactgcggtcaatggcttttaaagcaatgctaagacaggacatgagctggtttgatgaccataaaaacagtactggtgcactttctacaagacttgccacagatgctgccca

SEQ ID NO: 4539 - DNA, 120 bp, Artificial Sequence
  ENSG00000005471_21 (sequence is synthesized)
agtccaaggagccacaggaaccaggttggctttaattgcacagaatatagctaaccttggaactggtattatcatatcatttatctacggttggcagttaaccctattgctattagcagt

SEQ ID NO: 4540 - DNA, 120 bp, Artificial Sequence
  ENSG00000005471_22 (sequence is synthesized)
tgttccaattattgctgtgtcaggaattgttgaaatgaaattgttggctggaaatgccaaaagagataaaaaagaactggaagctgctggaaagattgcaacagaggcaatagaaaatat

SEQ ID NO: 4541 - DNA, 120 bp, Artificial Sequence
  ENSG00000005471_23 (sequence is synthesized)
taggacagttgtgtctttgacccaggaaagaaaatttgaatcaatgtatgttgaaaaattgtatggaccttacaggaattctgtgcagaaggcacacatctatggaattacttttagtat

SEQ ID NO: 4542 - DNA, 120 bp, Artificial Sequence
  ENSG00000005471_24 (sequence is synthesized)
ctcacaagcatttatgtatttttcctatgccggttgttttcgatttggtgcatatctcattgtgaatggacatatgcgcttcagagatgttattctggtgttttctgcaattgtatttgg

SEQ ID NO: 4543 - DNA, 120 bp, Artificial Sequence
  ENSG00000005471_25 (sequence is synthesized)
tgcagtggctctaggacatgccagttcatttgctccagactatgctaaagctaagctgtctgcagcccacttattcatgctgtttgaaagacaacctctgattgacagctacagtgaaga

SEQ ID NO: 4544 - DNA, 120 bp, Artificial Sequence
  ENSG00000005471_26 (sequence is synthesized)
ggggctgaagcctgataaatttgaaggaaatataacatttaatgaagtcgtgttcaactatcccacccgagcaaacgtgccagtgcttcaggggctgagcctggaggtgaagaaaggcca

SEQ ID NO: 4545 - DNA, 120 bp, Artificial Sequence
  ENSG00000005471_27 (sequence is synthesized)
gacactagccctggtgggcagcagtggctgtgggaagagcacggtggtccagctcctggagcggttctacgaccccttggcggggacagtgtttgtggactttggttttcagcttctcga

SEQ ID NO: 4546 - DNA, 120 bp, Artificial Sequence
  ENSG00000005471_28 (sequence is synthesized)
tggtcaagaagcaaagaaactcaatgtccagtggctcagagctcaactcggaatcgtgtctcaggagcctatcctatttgactgcagcattgccgagaatattgcctatggagacaacag

SEQ ID NO: 4547 - DNA, 120 bp, Artificial Sequence
  ENSG00000005471_29 (sequence is synthesized)
ccgggttgtatcacaggatgaaattgtgagtgcagccaaagctgccaacatacatcctttcatcgagacgttaccccacaaatatgaaacaagagtgggagataaggggactcagctctc

SEQ ID NO: 4548 - DNA, 120 bp, Artificial Sequence
  ENSG00000005471_30 (sequence is synthesized)
aggaggtcaaaaacagaggattgctattgcccgagccctcatcagacaacctcaaatcctcctgttggatgaagctacatcagctctggatactgaaagtgaaaaggttgtccaagaagc

SEQ ID NO: 4549 - DNA, 120 bp, Artificial Sequence
  ENSG00000005471_31 (sequence is synthesized)
cctggacaaagccagagaaggccgcacctgcattgtgattgctcaccgcctgtccaccatccagaatgcagacttaatagtggtgtttcagaatgggagagtcaaggagcatggcacgca

SEQ ID NO: 4550 - DNA, 120 bp, Artificial Sequence
  ENSG00000005471_32 (sequence is synthesized)
tcagcagctgctggcacagaaaggcatctatttttcaatggtcagtgtccaggctgggacacagaacttatgaacttttgctacagtatattttaaaaataaattcaaattattctacca

SEQ ID NO: 4551 - DNA, 120 bp, Artificial Sequence
  ENSG00000005471_33 (sequence is synthesized)
tgaaatttgagagttagaagtgacacctgtcttgatgaagtattgaaacaacaggctagctctccctaagttattagaaacatccagaaaaagaacaaaattcaaggtaagtacaggtgt

SEQ ID NO: 4552 - DNA, 120 bp, Artificial Sequence
  ENSG00000005471_34 (sequence is synthesized)
agaaatatagaagccacagacatagggaaatggtcttatggtcctgaatgggttgggtagacaggaaagtttgggaataattttcccaagtacaaaagaaaaataaattgttcaatagcc

SEQ ID NO: 4553 - DNA, 120 bp, Artificial Sequence
  ENSG00000005471_35 (sequence is synthesized)
ttaagcagccttaaattaaactaagccaaagtccttaaatcccttttgagaaaagctgtgagggaaaagataagtagcctttgaatcactctaagttatgatattaatgaaattataaaa

SEQ ID NO: 4554 - DNA, 120 bp, Artificial Sequence
  ENSG00000005471_36 (sequence is synthesized)
tgtaaaatcaatgaagaaggcattctaatgagctctcttcatttggtgaaactggtgtcagacaatgatccccaatctgtttgtgtagaaaagctggtacaagtcgcacagtgaggtgga

SEQ ID NO: 4555 - DNA, 120 bp, Artificial Sequence
  ENSG00000005471_37 (sequence is synthesized)
gaaactgttattgactctaaatgtttttcttgtaaatagaactgtcaactgttaagcaacagttcattcaacatatttataatttggttaacttgcagaaatatgaaacaagagtgggag

SEQ ID NO: 4556 - DNA, 120 bp, Artificial Sequence
  ENSG00000005471_38 (sequence is synthesized)
tagaaaatcaggtggagatgatagtggcttgcatgatggtggtagagctggaggtgcagggcaaaggtcagattctgaatatattttgaaagtaaaggcaacaagatttcctgacagatt

SEQ ID NO: 4557 - DNA, 120 bp, Artificial Sequence
  ENSG00000005471_39 (sequence is synthesized)
gattatggtgtgtcaaagaaagagaggaatgcaggatgattccagtgtttttgttgacaactataagtctggagctgccaactggatgcagaagttcactggagggcccagcctggggaa

SEQ ID NO: 4558 - DNA, 120 bp, Artificial Sequence
  ENSG00000005471_40 (sequence is synthesized)
aggatcaggagcaggttaggcatgttaagcttgagatgtctgttaaacatccagataggaatgtcaaagatgcacttgtgtttaagagtcaggaatgcaagagggaattttaggctagaa

SEQ ID NO: 4559 - DNA, 120 bp, Artificial Sequence
  ENSG00000005471_41 (sequence is synthesized)
acaaaaagttagaaattattcgatacagatggtatttaaagctgtgtgactgactgacatgacagaagtggcgagaatagactgagaagtccaaggaatgagccttggaccactccagtg

SEQ ID NO: 4560 - DNA, 120 bp, Artificial Sequence
  ENSG00000005471_42 (sequence is synthesized)
ttaggtaagtagttgaaaaaaagagagagagagaaggcatcaaaggagactgaggaagagtgatcaggaaagcataggaaaatccgagaaacatatggtgtcctggaatctatatgaaaa

SEQ ID NO: 4561 - DNA, 120 bp, Artificial Sequence
  ENSG00000005471_43 (sequence is synthesized)
agatatattcagaaagacagagtgataaatctgtcaaattattgaatttgtcaggtaaaataagaacagagaattgatctttggacttagcaaagcagagattatcagtgacttttataa

SEQ ID NO: 4562 - DNA, 120 bp, Artificial Sequence
  ENSG00000005471_44 (sequence is synthesized)
aaatagtttcggtagtgtggaaagatcaaacttctgtttagagtgggtttcagagagaacaacaggaattgaagaaagtaataaactttgccaaccagtttagctccaaaggaaaagagg

SEQ ID NO: 4563 - DNA, 120 bp, Artificial Sequence
  ENSG00000005471_45 (sequence is synthesized)
gaaatatgatggtagctggcaggggaagtgtggtcaagagaggttttttgtttgtttttcaagatggaagaaataacagtatgtatgtaagctcacaggagggatccagcaggcatgggg

SEQ ID NO: 4564 - DNA, 120 bp, Artificial Sequence
  ENSG00000005471_46 (sequence is synthesized)
gactggctgcaaagagaggcatgaatagttcatttacagaaacagcaaaggcagagtgttggtacagatgctggtaagtggaaaaatatcatggtaggaggttatggagttccattctaa

SEQ ID NO: 4565 - DNA, 120 bp, Artificial Sequence
  ENSG00000005471_47 (sequence is synthesized)
acacttcaacttcatcagtgaaataagcacggtaatttagcagaatgtgaagatgtaaaagaacagaatttgagaaaacagacgatatgaaataattattagaaaagcagagactgaaga

SEQ ID NO: 4566 - DNA, 120 bp, Artificial Sequence
  ENSG00000005471_48 (sequence is synthesized)
aactgtcatctccttatgtgctaatgagtttaataatgtcctccagtcaccacaagccttctttcaaactacacaattccaactgcttccgtctcagagtatcttgaaataatgatctga

SEQ ID NO: 4567 - DNA, 120 bp, Artificial Sequence
  ENSG00000005471_49 (sequence is synthesized)
ccgcctgttagaccagtgaagggaaggaatttgggttgatttaagaagagaatcctcatggtcatggtagactgatatggagagaaaacattttgaggaaaaatactcaactaaattcat

SEQ ID NO: 4568 - DNA, 120 bp, Artificial Sequence
  ENSG00000005471_50 (sequence is synthesized)
ttctactccagcatgcagtttcaagtcaagttccaccttagctccaggtggcaggcagagcaggatgcagaggcacagcacaagtaagggatccaatgactgagtcaagaattacataac

SEQ ID NO: 4569 - DNA, 120 bp, Artificial Sequence
  ENSG00000005471_51 (sequence is synthesized)
ctggccagacagctggtacatgggaaagtgctaagagggcaccaacagcgttcctcctccccaaggagcataatgtgatggttcctgccggccctggctgactctcgccgtccttggaga

SEQ ID NO: 4570 - DNA, 120 bp, Artificial Sequence
  ENSG00000005471_52 (sequence is synthesized)
ccactgaactcaatacgcggctaacagagtaggtacattgttaatgtcacactttcatatagaaattaattactgtgtgaaaatatgtcaaggaaagattttaaatgaaaaatgttacta

SEQ ID NO: 4571 - DNA, 120 bp, Artificial Sequence
  ENSG00000005471_53 (sequence is synthesized)
gattgagcatctgatctatattagaaatcgatcatctggcagccatgtctagcagcatctatagcctatgccattgcatgttggctttcccccaaggtgcatagtaggtttatttgagga

SEQ ID NO: 4572 - DNA, 120 bp, Artificial Sequence
  ENSG00000005471_54 (sequence is synthesized)
ctgaattcacatcttatacctgtttatttctcatggaactttctactgcaggacgtgacaggtgctagactgtcagtaaagatggttgaatcaatgaatagatgattgaattaatttaca

SEQ ID NO: 4573 - DNA, 120 bp, Artificial Sequence
  ENSG00000005471_55 (sequence is synthesized)
aagagacttgctttagtaattgtcaactcttcacttattcaacaaatatttgagggtgtttcatgtgcgaagtaccattctgtgtgttcgtaatatatcagtgaacaaagcacagatctc

SEQ ID NO: 4574 - DNA, 120 bp, Artificial Sequence
  ENSG00000005471_56 (sequence is synthesized)
cagatctctgtccttttggtgcttacattccagtagagggagatagatgataaactttcctgactgggagtcctggcaaaggcatcctgagcaaataagtcaaaaaaaaaaaaaaaaaaa

SEQ ID NO: 4575 - DNA, 120 bp, Artificial Sequence
  ENSG00000005471_57 (sequence is synthesized)
aagagtagctgaaatcagaagagactactttttatcccccaaacaattaccaaagttatgccaacaaaatcttgtaacaaaatatgttgatttactaacattaacaacttggacaaggca

SEQ ID NO: 4576 - DNA, 120 bp, Artificial Sequence
  ENSG00000005471_58 (sequence is synthesized)
cttcaggataccaagcttccttatttgtaaatgggaatacattatgcctacctcatacaaatgtagtgagaagctcaaaaccaccatacttcaggttacagactggtggttgagggctgc

SEQ ID NO: 4577 - DNA, 120 bp, Artificial Sequence
  ENSG00000005471_59 (sequence is synthesized)
atttagactgcagtcatgtttggtttagccctatggtacttttaaaacaattatagtttttattttgagataattatggatttacatgtaattgtaaggaatacagagatcttatgtacc

SEQ ID NO: 4578 - DNA, 120 bp, Artificial Sequence
  ENSG00000005483_0 (sequence is synthesized)
cgccgccattttcccagagcgagaggcagtgacactgagcgggcgcagggggccgagtcggagaccgtgccggagttcgggagcggcaacagagtgggcatagacactccgagcagcctc

SEQ ID NO: 4579 - DNA, 120 bp, Artificial Sequence
  ENSG00000005483_1 (sequence is synthesized)
gccgtcgtctctgcgttcctgttgactgcctggctgccccctcccctactcctcggttcctggtgaagaggctgcgcgctgctgtttggggagggggtgtgtggagccgggtcctgtgtc

SEQ ID NO: 4580 - DNA, 120 bp, Artificial Sequence
  ENSG00000005483_2 (sequence is synthesized)
cgcagtggctgctgtcggggggtcgcctgttcgcggaggtgcggagagactccttgggggtcgagcactgtggctggcatgccccagtgttttggataccaatgcataggactccatagt

SEQ ID NO: 4581 - DNA, 120 bp, Artificial Sequence
  ENSG00000005483_3 (sequence is synthesized)
aatcgaatttaccagaggcgaacgtcatgagcatagtgatcccattgggggttgatacagcagagacgtcatacttggaaatggctgcaggttcagaaccagaatccgtagaagctagcc

SEQ ID NO: 4582 - DNA, 120 bp, Artificial Sequence
  ENSG00000005483_4 (sequence is synthesized)
ctgtggtagttgagaaatccaacagttatccccaccagttatataccagcagctcacatcattcacacagttacattggtttgccctatgcggaccataattatggtgctcgtcctcctc

SEQ ID NO: 4583 - DNA, 120 bp, Artificial Sequence
  ENSG00000005483_5 (sequence is synthesized)
cgacacctccggcttcccctcctccatcagtccttattagcaaaaatgaagtaggcatatttaccactcctaattttgatgaaacttccagtgctactacaatcagcacatctgaggatg

SEQ ID NO: 4584 - DNA, 120 bp, Artificial Sequence
  ENSG00000005483_6 (sequence is synthesized)
gaagttatggtactgatgtaaccaggtgcatatgtggttttacacatgatgatggatacatgatctgttgtgacaaatgcagcgtttggcaacatattgactgcatggggattgataggc

SEQ ID NO: 4585 - DNA, 120 bp, Artificial Sequence
  ENSG00000005483_7 (sequence is synthesized)
agcatattcctgatacatatctatgtgaacgttgtcagcctaggaatttggataaagagagggcagtgctactacaacgccggaaaagggaaaatatgtcagatggtgataccagtgcaa

SEQ ID NO: 4586 - DNA, 120 bp, Artificial Sequence
  ENSG00000005483_8 (sequence is synthesized)
ctgagagtggtgatgaggttcctgtggaattatatactgcatttcagcatactccaacatcaattactttaactgcttcaagagtttccaaagttaatgataaaagaaggaaaaaaagcg

SEQ ID NO: 4587 - DNA, 120 bp, Artificial Sequence
  ENSG00000005483_9 (sequence is synthesized)
gggagaaagaacaacacatttcaaaatgtaaaaaggcatttcgtgaaggatctaggaagtcatcaagagttaagggttcagctccagagattgatccttcatctgatggttcaaattttg

SEQ ID NO: 4588 - DNA, 120 bp, Artificial Sequence
  ENSG00000005483_10 (sequence is synthesized)
gatgggagacaaagatcaaagcatggatggatcgatatgaagaagcaaataacaaccagtacagtgagggtgttcagagggaggcacaaagaatagctctgagattaggcaatggaaatg

SEQ ID NO: 4589 - DNA, 120 bp, Artificial Sequence
  ENSG00000005483_11 (sequence is synthesized)
acaaaaaagagatgaataaatccgatttgaataccaacaatttgctcttcaaacctcctgtagagagccatatacaaaagaataagaaaattcttaaatctgcaaaagatttgcctcctg

SEQ ID NO: 4590 - DNA, 120 bp, Artificial Sequence
  ENSG00000005483_12 (sequence is synthesized)
atgcacttatcattgaatacagagggaagtttatgctgagagaacagtttgaagcaaatgggtatttctttaaaagaccatacccttttgtgttattctactctaaatttcatgggctag

SEQ ID NO: 4591 - DNA, 120 bp, Artificial Sequence
  ENSG00000005483_13 (sequence is synthesized)
aaatgtgtgttgatgcaaggacttttgggaatgaggctcgattcatcaggcggtcttgtacacccaatgcagaggtgaggcatgaaattcaagatggaaccatacatctttatatttatt

SEQ ID NO: 4592 - DNA, 120 bp, Artificial Sequence
  ENSG00000005483_14 (sequence is synthesized)
ctatacacagtattccaaagggaactgaaattactattgcctttgattttgactatggaaattgtaagtacaaggtggactgtgcatgcctcaaagaaaacccagagtgccctgttctaa

SEQ ID NO: 4593 - DNA, 120 bp, Artificial Sequence
  ENSG00000005483_15 (sequence is synthesized)
aacgtagttctgaatccatggaaaatatcaatagtggttatgagaccagacggaaaaaaggaaaaaaagacaaagatatttcaaaagaaaaagatacacaaaatcagaatattactttgg

SEQ ID NO: 4594 - DNA, 120 bp, Artificial Sequence
  ENSG00000005483_16 (sequence is synthesized)
attgtgaaggaacgaccaacaaaatgaagagcccagaaactaaacaaagaaagctttctccactgagactatcagtatcaaataatcaggaaccagattttattgatgatatagaagaaa

SEQ ID NO: 4595 - DNA, 120 bp, Artificial Sequence
  ENSG00000005483_17 (sequence is synthesized)
aaactcctattagtaatgaagtagaaatggaatcagaggagcagattgcagaaaggaaaaggaagatgacaagagaagaaagaaaaatggaagcaattttgcaagcttttgccagacttg

SEQ ID NO: 4596 - DNA, 120 bp, Artificial Sequence
  ENSG00000005483_18 (sequence is synthesized)
aaaagagagagaaaagaagagaacaagctttggaaaggatcagcacagccaaaactgaagttaaaactgaatgtaaagatacacagattgtcagtgatgctgaagttattcaggaacaag

SEQ ID NO: 4597 - DNA, 120 bp, Artificial Sequence
  ENSG00000005483_19 (sequence is synthesized)
caaaagaagaaaatgctagcaagccaacccctgccaaagtaaatagaactaaacagagaaaaagtttttctcggagtaggactcacattggacagcagcgtcggagacacagaactgtca

SEQ ID NO: 4598 - DNA, 120 bp, Artificial Sequence
  ENSG00000005483_20 (sequence is synthesized)
gcatgtgttcagatatccagccatcttctcctgatatagaagttacttcacaacaaaatgatattgaaaatactgtacttacaatagaaccagaaactgaaactgcactagcagaaataa

SEQ ID NO: 4599 - DNA, 120 bp, Artificial Sequence
  ENSG00000005483_21 (sequence is synthesized)
ttactgaaactgaagttccagcacttaataaatgtcctaccaagtaccccaaaacaaagaagcacttggttaatgaatggttaagtgagaagaatgagaagacaggaaaaccttcagatg

SEQ ID NO: 4600 - DNA, 120 bp, Artificial Sequence
  ENSG00000005483_22 (sequence is synthesized)
gcctttcagaaaggcctctacgcataactacagatcctgaagtgttagctacacaactcaattctttaccaggtctcacttacagcccccatgtatactccactcctaagcattatatta

SEQ ID NO: 4601 - DNA, 120 bp, Artificial Sequence
  ENSG00000005483_23 (sequence is synthesized)
gatttacttcaccattcctttcagaaaaaaggagaagaaaagaacctactgaaaacatttctggttcatgcaagaagcgatggttgaaacaagctctggaagaagaaaattcagcaattt

SEQ ID NO: 4602 - DNA, 120 bp, Artificial Sequence
  ENSG00000005483_24 (sequence is synthesized)
tacatagatttaattcaccctgtcaagaaagatccagaagtcctgcagtcaatggtgaaaataaaagtccactactattaaatgacagctgttcccttccagatttaactacaccactaa

SEQ ID NO: 4603 - DNA, 120 bp, Artificial Sequence
  ENSG00000005483_25 (sequence is synthesized)
aaaaacgaagattttatcagttgctagattcggtttactcagaaacctccacacctactccttccccgtatgctacaccaactcacaccgatattactcctatggacccatcttttgcca

SEQ ID NO: 4604 - DNA, 120 bp, Artificial Sequence
  ENSG00000005483_26 (sequence is synthesized)
cgcctccacggataaaatcagatgatgaaacttgtagaaatggttataaacccatatattcaccagttaccccagtaactcctggtacaccaggaaataccatgcactttgagaatattt

SEQ ID NO: 4605 - DNA, 120 bp, Artificial Sequence
  ENSG00000005483_27 (sequence is synthesized)
tgggtctgcaagaaataaagactattggttatacgagccctaggagtaggactgaagtcaacaggcagtgtcctggagaaaaggaacctgtgtcagaccttcagctaggactcgatgcag

SEQ ID NO: 4606 - DNA, 120 bp, Artificial Sequence
  ENSG00000005483_28 (sequence is synthesized)
ttgagccaactgccctacataaaaccctggaaacgcctgcacatgacagggctgagcccaacagccaactggactcgactcactctggacggggcacaatgtattcttcctgggtaaaga

SEQ ID NO: 4607 - DNA, 120 bp, Artificial Sequence
  ENSG00000005483_29 (sequence is synthesized)
gccctgacagaacaggagttaacttctcagtgaactccaacttgagggacctgacaccctcgcatcagttggaggttggaggaggcttccgaataagtgagtcaaagtgcctgatgcagg

SEQ ID NO: 4608 - DNA, 120 bp, Artificial Sequence
  ENSG00000005483_30 (sequence is synthesized)
atgatactagaggcatgtttatggaaacaactgtgttttgtacttccgaagatgggcttgtatctggtttcggacggactgttaatgacaatttgatcgacgggaattgcacaccccaga

SEQ ID NO: 4609 - DNA, 120 bp, Artificial Sequence
  ENSG00000005483_31 (sequence is synthesized)
atccaccacaaaagaaaaaggtttctctattagaataccgtaagagacaacgtgaagctaggaaaagtggctctaagacagagaactttccactcattagtgtatcaccccatgcaagtg

SEQ ID NO: 4610 - DNA, 120 bp, Artificial Sequence
  ENSG00000005483_32 (sequence is synthesized)
gaagcttgagcaacaatggtgatggctgtgccagcagtaatgacaatggggagcaggtggaccacactgctagcctacctttaccaacaccagctacagtttataatgccacttctgaag

SEQ ID NO: 4611 - DNA, 120 bp, Artificial Sequence
  ENSG00000005483_33 (sequence is synthesized)
aaactagcaataactgccctgttaaggatgctactgctagtgagaagaatgaaccagaagttcaatggactgcctcaacttcagtggaacaagtcagagaaaggagttatcagagagctt

SEQ ID NO: 4612 - DNA, 120 bp, Artificial Sequence
  ENSG00000005483_34 (sequence is synthesized)
tacttctcagtgatcaccgaaaagataaagatagtgggggagaatcaccatgtgtctcatgttcaccgagtcatgttcagtcttcaccttcatctcattcaaatcacataccccagttgc

SEQ ID NO: 4613 - DNA, 120 bp, Artificial Sequence
  ENSG00000005483_35 (sequence is synthesized)
aagctaagggcccagtcccttctttcagtgaacttatggaagaccctgatcctgaaaatccagaacccacaactacgaatgaatgtccatccccagatacttctcaaaatacttgtaaaa

SEQ ID NO: 4614 - DNA, 120 bp, Artificial Sequence
  ENSG00000005483_36 (sequence is synthesized)
gtcctccaaaaatgagcaagcctggttcacctggatctgtaattcctgctcaagcacacgggaaaatattcacaaaaccagatccccaatgggactccacagttagtgcatccgaagctg

SEQ ID NO: 4615 - DNA, 120 bp, Artificial Sequence
  ENSG00000005483_37 (sequence is synthesized)
aaaatggtgttcacctaaaaacagagctccaacaaaaacagctatcaaataacaaccaagcactttcaaagaatcatcctcctcagacacacgttcgtaattcatctgagcaactttcac

SEQ ID NO: 4616 - DNA, 120 bp, Artificial Sequence
  ENSG00000005483_38 (sequence is synthesized)
aaaagctgccttctgtgccaacaaagttgcactgtcctccatcacctcacctagaaaatcctccaaagtcatccacgcctcacacacctgtacagcatggttatctttcaccaaagcctc

SEQ ID NO: 4617 - DNA, 120 bp, Artificial Sequence
  ENSG00000005483_39 (sequence is synthesized)
cttcacagcagttaggatctccctacaggcctcatcattcacagtcacctcaagttggaacacctcagcgagagcctcaaagaaacttttatccagcagcacagaaccttccagccaata

SEQ ID NO: 4618 - DNA, 120 bp, Artificial Sequence
  ENSG00000005483_40 (sequence is synthesized)
ctcagcaggcaacttctggaacattatttacacagacaccctcaggacaatcttcagcaacatacagtcagtttaaccaacaaagtctgaacagcacggcaccaccccctccacctcctc

SEQ ID NO: 4619 - DNA, 120 bp, Artificial Sequence
  ENSG00000005483_41 (sequence is synthesized)
cacctccttcttcgtcttactatcaaaaccagcagccctctgcaaactttcagaattataatcagctcaaaggtagtctttctcaacaaactgtgtttacatcaggaccaaatcaagcac

SEQ ID NO: 4620 - DNA, 120 bp, Artificial Sequence
  ENSG00000005483_42 (sequence is synthesized)
ttcctggcaccacaagccagcaaacagttccaggacaccacgtgactccagggcattttttgccctctcagaaccctaccattcaccatcaaactgctgctgccgtagtcccccctcctc

SEQ ID NO: 4621 - DNA, 120 bp, Artificial Sequence
  ENSG00000005483_43 (sequence is synthesized)
ctccaccaccacctgctccaggaccgcaccttgtacaacagccgaattcccatcagcaacactctgtagcacatgtagtagggcctgttcatgcggtcacccctgggtcgcatattcatt

SEQ ID NO: 4622 - DNA, 120 bp, Artificial Sequence
  ENSG00000005483_44 (sequence is synthesized)
ctcaaactgctggacaccacttacccccacccccaccccctcctggtcctgcccctcatcaccatccaccaccccatccatccacaggactccaaggtctacaagcacaacaccagcatg

SEQ ID NO: 4623 - DNA, 120 bp, Artificial Sequence
  ENSG00000005483_45 (sequence is synthesized)
ttgtaaattcagcacccccaccaccccctccgccgccaccttccagtgttttggcttctgggcatcataccacatcagctcaagccttacaccacccacctcatcaaggacctccacttt

SEQ ID NO: 4624 - DNA, 120 bp, Artificial Sequence
  ENSG00000005483_46 (sequence is synthesized)
ttccttcgagtgctcatccaactgtaccaccgtatccctcacaagctacacatcataccactttgggaccgggaccccagcaccagccttctggaacagggccacattgtccattacctg

SEQ ID NO: 4625 - DNA, 120 bp, Artificial Sequence
  ENSG00000005483_47 (sequence is synthesized)
tcacaggtcctcatctccagccccaaggaccaaacagtattccaacacctactgcttcagggttctgtcctcatcctggctctgtggccctgccacatggggttcaaggacctcagcagg

SEQ ID NO: 4626 - DNA, 120 bp, Artificial Sequence
  ENSG00000005483_48 (sequence is synthesized)
catctccagtgcctggacagattccaattcacagagcacaggtgccaccaacatttcaaaacaattaccatgggtcagggtggcattaaaatggactccaaaaacatttttttaaatgtt

SEQ ID NO: 4627 - DNA, 120 bp, Artificial Sequence
  ENSG00000005483_49 (sequence is synthesized)
ctgtaagataaactgtatatttcatatgtacctgttaaggtactttttaaagcttgtacatgaacctttgtataaaaaacaccagtgctctttcgttgtatttttctcatttttgctttt

SEQ ID NO: 4628 - DNA, 120 bp, Artificial Sequence
  ENSG00000005483_50 (sequence is synthesized)
taaaattcctttaaaaaatgtgctgttaagccagtattaggtatctttattttgtaagtgaacattccagctgtttttttctggcagatctgatgctgatttgatgctgtatgatctttt

SEQ ID NO: 4629 - DNA, 120 bp, Artificial Sequence
  ENSG00000005483_51 (sequence is synthesized)
ttttttttttagttaaattcatttagtgaatgttctattattttatacatacacattaagtactcagctaagtaatggcactatgaggattttttttttctttcctgtcagcagcagttc

SEQ ID NO: 4630 - DNA, 120 bp, Artificial Sequence
  ENSG00000005483_52 (sequence is synthesized)
tgtgaatgcatcttaggtataaaaatgcaatacagatttttatattttggtgtggacatggctcattttgttttaccagttatttgcaagcaaaatgtaatttaatgtatagatgatttc

SEQ ID NO: 4631 - DNA, 120 bp, Artificial Sequence
  ENSG00000005483_53 (sequence is synthesized)
taatgtctcctgacaaactgtaaatactgcatttcttttgcgtatataattgcttacagcttttctcatttgatatatagcattgtacatatgacaagtcttttgcaaaactgtgtgatc

SEQ ID NO: 4632 - DNA, 120 bp, Artificial Sequence
  ENSG00000005483_54 (sequence is synthesized)
tttgtgaaagtagtacagtatatgacctttaatttcttttttattttaaatatactgtcacactgaagcactggttgggcattttaattcatgttaataaatcacaattatgtcagtttt

SEQ ID NO: 4633 - DNA, 120 bp, Artificial Sequence
  ENSG00000005483_55 (sequence is synthesized)
gacatttattctttcttggacctcagatttaccagacatctcatgggtttgtggatgcacttagatgtttgcaatgagcactgtggctggcatgccccagtgttttggataccaatgcat

SEQ ID NO: 4634 - DNA, 120 bp, Artificial Sequence
  ENSG00000005483_56 (sequence is synthesized)
ctttagcgactactacctcagcaacaggaggcagcaaggggctgttcctgtggtggtttctgtttgcatttttgcaggagccataggaaactactgaaatgattgtgctgggtaaattaa

SEQ ID NO: 4635 - DNA, 120 bp, Artificial Sequence
  ENSG00000005483_57 (sequence is synthesized)
ggatctggcatcatacaaaatgaagccagaccactaatgcattacagtagttcttgaatacaaggtacaacaactgtttgaaaatatgggtagtttgcccaaaacaggaaaatttgtctt

SEQ ID NO: 4636 - DNA, 120 bp, Artificial Sequence
  ENSG00000005483_58 (sequence is synthesized)
gggtgtaaaaactaaagaaaaaaggcattattcctagatctctcagtgaaatgaaaatggcctcttaagtgaacgtttttattgctaaaatataaaatgctagttagttattaattatta

SEQ ID NO: 4637 - DNA, 120 bp, Artificial Sequence
  ENSG00000005483_59 (sequence is synthesized)
atcttcaaaaaattaaaaatttcccagcctttgtcttctacctctgaggattcagtaagtacatccaataataatgatactgttttatcaatcaacatatttttcatcatccaattacct

SEQ ID NO: 4638 - DNA, 120 bp, Artificial Sequence
  ENSG00000005483_60 (sequence is synthesized)
gacataatttggcacaggatacaaattctgtgcatcagagaaagtaaacactaaaatgactgcgtgacctcattcagtcatgtttttacactttgaacctctatttatttccttttgaaa

SEQ ID NO: 4639 - DNA, 120 bp, Artificial Sequence
  ENSG00000005483_61 (sequence is synthesized)
attagctaatgatggtacattaacgcagctcacttagggctcaatcctaatcacagcttcaaattttagaagaacatataggccaagtttgccatcctcaatttgtccaacaaaattcta

SEQ ID NO: 4640 - DNA, 120 bp, Artificial Sequence
  ENSG00000005483_62 (sequence is synthesized)
tttatggtatttagtaaagaaacatttgtctgagaagaaatggttttacatcatctatcctgatagtttcaaacagaataaaggtaactagcatgtgaaataaaaatattcttcttaaaa

SEQ ID NO: 4641 - DNA, 120 bp, Artificial Sequence
  ENSG00000005483_63 (sequence is synthesized)
ttgttgctgcctttacatgggcttttacattattctttgaagttagcgaatgatgtgccattgagcatttttatttggtttggtcattgccatttaaataaattccattaatcttgtatt

SEQ ID NO: 4642 - DNA, 120 bp, Artificial Sequence
  ENSG00000005483_64 (sequence is synthesized)
tttattggttgttcattagagatttaagaatgtatgacatttaagaaatatgaacattttggaagtaataatattttaataatgccacactgaactattaataaattttaatgccacaat

SEQ ID NO: 4643 - DNA, 120 bp, Artificial Sequence
  ENSG00000005483_65 (sequence is synthesized)
caggcactgtgcagtttggaagacaagcagcaatagcacaaatagaagtcattgtctgaaggaagtttgtggcaagctctttactgaaacatctcaagtgtgggtttgtggatgcactta

SEQ ID NO: 4644 - DNA, 120 bp, Artificial Sequence
  ENSG00000005483_66 (sequence is synthesized)
ttaatgagagagagggaaactatatttgaaattggattgggacatttattttacttaaacagaagtttgcttatgacacataatctagatgggatatatcttatctatagtgtatccacc

SEQ ID NO: 4645 - DNA, 68 bp, Artificial Sequence
  ENSG00000005483_67 (sequence is synthesized)
ttctggataagcaggttttgtgaagacatttattctttcttggacctcagatttaccagacatctcat

SEQ ID NO: 4646 - DNA, 120 bp, Artificial Sequence
  ENSG00000005483_68 (sequence is synthesized)
ggggggtcgcctgttcgcggaggtgcggagagactccttgggggtcgagcacataacggggttcgggtgtctcgtgtgtgaacatcacagggtttgtggatgcacttagatgtttgcaat

SEQ ID NO: 4647 - DNA, 120 bp, Artificial Sequence
  ENSG00000005483_69 (sequence is synthesized)
gcagcactctggagtctccttgaaccagaaccacagtctcccctcccccaaccctggttcagccaccaagaaaggcctcctcccctagagaagcgtttggcaacatattgactgcatggg

SEQ ID NO: 4648 - DNA, 120 bp, Artificial Sequence
  ENSG00000005483_70 (sequence is synthesized)
taccaagtaccccaaaacaaagaaggtatgattctaatgaatgtaagaactgtttttctaacagtttcttatattaattatattgttgttttaaaaattggatttttaagacctcataat

SEQ ID NO: 4649 - DNA, 120 bp, Artificial Sequence
  ENSG00000005483_71 (sequence is synthesized)
aataagaggcagtttttatacttgcagattttaaaactaagaatgagaattccaaaactgtaaaattaatataaatgtttgcattactgtgaagataaagttacattcagtttatcagga

SEQ ID NO: 4650 - DNA, 120 bp, Artificial Sequence
  ENSG00000005483_72 (sequence is synthesized)
cttttatggtattgcaattcatgatttctttaaataagtttgtctactttatgtacaaaatatatacttctctgaaactggttttagatgtgttatcctttatatttttataaatttcat

SEQ ID NO: 4651 - DNA, 120 bp, Artificial Sequence
  ENSG00000005483_73 (sequence is synthesized)
tgtataggtagattataagaattaaatgtgaagaaattgatttccacagaatgtactatgaaaatttgtaagaaagagtagttttaggtgtaattattaataaaaatctctgaaacacta

SEQ ID NO: 4652 - DNA, 120 bp, Artificial Sequence
  ENSG00000005483_74 (sequence is synthesized)
cccagaatccaccacaaaagaaaaagagtccagttggcaactttgtgggaagcaatgtagtatagtggaaagagcacgggctttcaagtaagacctaggttcgaatcccggctccaacac

SEQ ID NO: 4653 - DNA, 120 bp, Artificial Sequence
  ENSG00000005483_75 (sequence is synthesized)
tcaccgaaaagataaagatagtgaccctgatcctgaaaatccagaacccacaactacgaatgaatgtccatccccagatacttctcaaaatacttgtaaaagtcctccaaaaatgagcaa

SEQ ID NO: 4654 - DNA, 120 bp, Artificial Sequence
  ENSG00000005483_76 (sequence is synthesized)
attttacaccattattttatttttcttgaatgctgataacctttggtaatgttggaaaagataactaaagtcactttcaagggaattaatggatacatattttaagtgggacttctacta

SEQ ID NO: 4655 - DNA, 120 bp, Artificial Sequence
  ENSG00000005483_77 (sequence is synthesized)
ttgatgcagtcctagaaaaagcctcctatgtgaaaaaagagtttactagaaatccctgttgttaactgagtaatagacagtcagttctgaactttttttcatgtaggatcacatttttct

SEQ ID NO: 4656 - DNA, 120 bp, Artificial Sequence
  ENSG00000005483_78 (sequence is synthesized)
gaacagtgactgatgataatttttgaactacgataaactaaaacaacataaaaaaatgcaaagatatattccggtctcttgctcatgtctgtcttgctgaaaatcctaaaacaatctact

SEQ ID NO: 4657 - DNA, 120 bp, Artificial Sequence
  ENSG00000005483_79 (sequence is synthesized)
tcaaagattaaccaacagcaatataggttggatatagaaggatatcagtcaggaattctgattgattgagattacaaggaaccctttccatctgggactcatgataattcctcataacgt

SEQ ID NO: 4658 - DNA, 120 bp, Artificial Sequence
  ENSG00000005486_0 (sequence is synthesized)
agaggaccggcagccggcgtcgaggcggggcgcgggaacgacggcggccatggcggcctcggggcccgggtgtcgcagctggtgcttgtgtcccgaggtgccatccgccaccttcttcac

SEQ ID NO: 4659 - DNA, 120 bp, Artificial Sequence
  ENSG00000005486_1 (sequence is synthesized)
tgcgctgctctcgctgctggtttccgggcctcgcctgttcctgctgcagcagcccctggcgccctcgggcctcacgctgaagtccgaggcccttcgcaactggcaagtttacaggctggt

SEQ ID NO: 4660 - DNA, 120 bp, Artificial Sequence
  ENSG00000005486_2 (sequence is synthesized)
aacctacatctttgtctacgagaatcccatctccctgctctgcggcgctatcatcatctggcgctttgctggcaatttcgagagaaccgtgggcaccgtccgccactgcttcttcaccgt

SEQ ID NO: 4661 - DNA, 120 bp, Artificial Sequence
  ENSG00000005486_3 (sequence is synthesized)
gatcttcgccatcttctccgctatcatcttcctgtcattcgaggctgtgtcatcactgtcaaagctgggggaagtggaggatgccagaggtttcaccccagtggcctttgccatgctggg

SEQ ID NO: 4662 - DNA, 120 bp, Artificial Sequence
  ENSG00000005486_4 (sequence is synthesized)
agtcaccaccgtccgttctcggatgaggcgggccctggtgtttggcatggttgtgccctcagtcctggttccgtggctcctgctgggtgcctcgtggctcattccccagacctctttcct

SEQ ID NO: 4663 - DNA, 120 bp, Artificial Sequence
  ENSG00000005486_5 (sequence is synthesized)
cagtaatgtctgcgggctgtccatcgggctggcctatggcctcacctactgctattccatcgacctctcagagcgagtggcactgaagctcgatcagaccttccccttcagcctgatgag

SEQ ID NO: 4664 - DNA, 120 bp, Artificial Sequence
  ENSG00000005486_6 (sequence is synthesized)
gaggatatccgtgttcaagtacgtctcagggtcttcagccgagaggagggcagcccagagccggaaactgaacccggtgcctggctcctaccccacacagagctgccaccctcacctgtc

SEQ ID NO: 4665 - DNA, 120 bp, Artificial Sequence
  ENSG00000005486_7 (sequence is synthesized)
agaagctggcctcctggccctcctgcacccccgggcacatgcccaccttgcctccgtaccagcctgcctccggcctgtgctatgtgcagaaccactttggtccaaaccccacctcctcca

SEQ ID NO: 4666 - DNA, 120 bp, Artificial Sequence
  ENSG00000005486_8 (sequence is synthesized)
gtgtctacccagcttctgcgggcacctccctgggcatccagccccccacgcctgtgaacagccctggcacggtgtattctggggccttgggcacaccaggggctgcaggctccaaggagt

SEQ ID NO: 4667 - DNA, 120 bp, Artificial Sequence
  ENSG00000005486_9 (sequence is synthesized)
cctccagggtccccatgccctgagagaatttctagggaagtcatctcacttggccttctgaaggtcctccctaagagtctcctgacaaaagttacttattgaacacctctatgtgccagg

SEQ ID NO: 4668 - DNA, 120 bp, Artificial Sequence
  ENSG00000005486_10 (sequence is synthesized)
ctctgtgttgggtactttgatcaatgcccctgtttcagtctcatctgtactcacggcagccctgtggagtacggtgtactggcccagcttacagatgcagaaagcgagacgttctgccat

SEQ ID NO: 4669 - DNA, 120 bp, Artificial Sequence
  ENSG00000005486_11 (sequence is synthesized)
cagataaagtcacgtggctctttagtaacacggacaaggctcctcgccaaggaactcgtggcagaagagggcagcagttggcagtagctgccgatgtctgtccccagctccaccattcct

SEQ ID NO: 4670 - DNA, 120 bp, Artificial Sequence
  ENSG00000005486_12 (sequence is synthesized)
ccctgtggctgtgccgtgctcgtggtttcagtgtccgtgtgtccatgtgtctgcccttcaggagctcgcagctggtgtgcttggcggtcccaggcctgtgtagtgtctctcccctgctgc

SEQ ID NO: 4671 - DNA, 120 bp, Artificial Sequence
  ENSG00000005486_13 (sequence is synthesized)
gggcgcccccaccccgattcctctccccagaagcggtgggatgggcccccatgaactgcagcagcatgctgaggtgtccatgttgtctgcctttgtataaagaaacagcctctgacctgc

SEQ ID NO: 4672 - DNA, 120 bp, Artificial Sequence
  ENSG00000005486_14 (sequence is synthesized)
gagtgagactccatctcaaaaaaaaaaacaaacctttggctctgggtttcccctgagctgcaaactccagccagagtgtgcagcgtgctaagcatgaaggcttctgtagagtgagtggga

SEQ ID NO: 4673 - DNA, 120 bp, Artificial Sequence
  ENSG00000005486_15 (sequence is synthesized)
gagtgagtgggaacctgtgttctccccggggagtgttcggccctcctccctttgctgcctccagtttcacttaacacgccaacctcagatggcctcacctactgctattccatcgacctc

SEQ ID NO: 4674 - DNA, 120 bp, Artificial Sequence
  ENSG00000005486_16 (sequence is synthesized)
agaggagactggcacacagagtgttaagtgacacccactcaatccaccccgaagctgttacacttaattaaccctcaaactgcccagtgagactgaacccggtgcctggctcctacccca

SEQ ID NO: 4675 - DNA, 120 bp, Artificial Sequence
  ENSG00000005486_17 (sequence is synthesized)
agtcctgtttcctctttggtgtaatagggatgaatacagatgggaagatcgtgatatgaaagagttctgtgagctgtaaggcataataatcatgagccactatggaaggaggggtcagga

SEQ ID NO: 4676 - DNA, 120 bp, Artificial Sequence
  ENSG00000005486_18 (sequence is synthesized)
tttccttcttgctgcatcaggatgatgagaattgaagtctggtttaaccctgtccttaaccttccctggggccctggatgggtagttctgtagctcccggcctcttgctgaccactggac

SEQ ID NO: 4677 - DNA, 120 bp, Artificial Sequence
  ENSG00000005513_0 (sequence is synthesized)
tctcctgtgcgcgcccctccgcgcgcggccccgatgctggacatgagcgaggcccgctcccagccgccctgcagcccgtccggcaccgccagctccatgtcgcacgtggaggactcggac

SEQ ID NO: 4678 - DNA, 80 bp, Artificial Sequence
  ENSG00000005513_1 (sequence is synthesized)
cgtggaggactcggactcggacgcgccgccgtctcccgccggctccgagggcctgggccgcgcgggggtcgcggtggggg

SEQ ID NO: 4679 - DNA, 120 bp, Artificial Sequence
  ENSG00000005513_2 (sequence is synthesized)
gacgccgtgtcgcaggtgctcaagggctacgactggagtctggtgcccatgccggtgcgcggcggcggcggcggcgcgctcaaagccaagccgcatgtgaagcggcccatgaacgcattc

SEQ ID NO: 4680 - DNA, 120 bp, Artificial Sequence
  ENSG00000005513_3 (sequence is synthesized)
atggtgtgggcgcaggcggcgcgccgcaagctggccgaccagtacccgcacctgcacaacgccgagctcagcaagacgctgggcaagctgtggcgcttgctgagcgagagcgagaagcgg

SEQ ID NO: 4681 - DNA, 120 bp, Artificial Sequence
  ENSG00000005513_4 (sequence is synthesized)
cccttcgtggaggaggcagagcgccttcgcgtgcagcacaagaaggaccaccccgactacaagtaccagccacggcgcaggaagagcgccaaagccggccacagcgactccgactcgggc

SEQ ID NO: 4682 - DNA, 120 bp, Artificial Sequence
  ENSG00000005513_5 (sequence is synthesized)
gcggagctgggaccccaccctggcggcggtgccgtgtacaaggctgaagcagggcttggagatgggcaccaccatggcgaccacacagggcagacccacgggccgcccaccccgcccacc

SEQ ID NO: 4683 - DNA, 120 bp, Artificial Sequence
  ENSG00000005513_6 (sequence is synthesized)
acccccaagacggagctgcagcaggcgggcgccaagccggagctgaagctggagggacgccggccggtggacagcgggcgccagaacatcgacttcagcaacgtggacatctcggagctc

SEQ ID NO: 4684 - DNA, 120 bp, Artificial Sequence
  ENSG00000005513_7 (sequence is synthesized)
agcagcgaggtcatgggcaccatggacgccttcgacgtccacgagttcgaccagtacctgcccctgggcggccccgccccacccgagccgggccaggcctatgggggcgcctacttccac

SEQ ID NO: 4685 - DNA, 120 bp, Artificial Sequence
  ENSG00000005513_8 (sequence is synthesized)
gccggggcgtcccccgtgtgggcccacaagagtgccccgtcggcctccgcgtcgcccaccgagacgggtcccccacggccgcacatcaagacggagcagccgagccccggccactacggc

SEQ ID NO: 4686 - DNA, 120 bp, Artificial Sequence
  ENSG00000005513_9 (sequence is synthesized)
gaccagccccgaggctcgcccgactacggttcctgcagcggccagtccagcgccaccccggccgcccccgccggccccttcgccggctcacagggcgactatggcgacctgcaggcctcc

SEQ ID NO: 4687 - DNA, 120 bp, Artificial Sequence
  ENSG00000005513_10 (sequence is synthesized)
agctactatggtgcctaccctggctacgcacccggcctctaccagtacccctgcttccactcgccgcgccggccctacgcctcacccctgctcaacggcctggccctgccgcccgcccac

SEQ ID NO: 4688 - DNA, 120 bp, Artificial Sequence
  ENSG00000005513_11 (sequence is synthesized)
agggggcagccttgtcccggcccagtgtgtgtgaccagggcgggaggggccccagtggctgagctccaagtgcctgctgaagtctgcagggaaacacgcttgctgcccgtggccctcggc

SEQ ID NO: 4689 - DNA, 120 bp, Artificial Sequence
  ENSG00000005513_12 (sequence is synthesized)
ctccagatggccacacctctgccgacgacggaccagctccctctcccttctatctttctttttgaggtggtgggattattccacaaagaagggctgccgtttggtccctcttccgtgagg

SEQ ID NO: 4690 - DNA, 120 bp, Artificial Sequence
  ENSG00000005513_13 (sequence is synthesized)
actggcggcaccagcaccttcgctttgcatctcggtagaggagaaacggcagcacagcccaaggaccaaaggagggggtggcaggggccttgcagggcgctgtgaggtccaggccggtct

SEQ ID NO: 4691 - DNA, 120 bp, Artificial Sequence
  ENSG00000005513_14 (sequence is synthesized)
tggcgccgagagcccctgcactcaaggccacattccctcgacaacggctgcacgggctgtccgggatccggggtgtctgtccgcagactgggatgagtctactcgagcatctccgggacc

SEQ ID NO: 4692 - DNA, 120 bp, Artificial Sequence
  ENSG00000005513_15 (sequence is synthesized)
tgcctgtcagatctgaggtgtctccttgctggcagagtgcgctcacgcgagggctggctgtgatgaacacatctctcttttatttttatgtttttgataatttttatttttgaagcttaa

SEQ ID NO: 4693 - DNA, 120 bp, Artificial Sequence
  ENSG00000005513_16 (sequence is synthesized)
atgtgtttcttctgaaagctgttaaagatgtatttatgttctgtgttattttatctttaattaatgaggtaattcgggcaaagagtagaatttaagacaaaacggaagctgggaagcttc

SEQ ID NO: 4694 - DNA, 120 bp, Artificial Sequence
  ENSG00000005513_17 (sequence is synthesized)
ccttgagggcaggcaggaggtggagttgcagctgttggccggcatcacgttgctcgttgctcggcttatgggaggccgccctggagggcccggaggtcccaaggtccctgggaggactgg

SEQ ID NO: 4695 - DNA, 120 bp, Artificial Sequence
  ENSG00000005513_18 (sequence is synthesized)
gcccctcatgcctcgagcttggcaaccgaaaacccgagggaggagaagggacctgccttgtgacatctctgatcaggttggggtgccccagcacccagtaccagtttggggtttgggaag

SEQ ID NO: 4696 - DNA, 120 bp, Artificial Sequence
  ENSG00000005513_19 (sequence is synthesized)
caggactccgtccctgtccccgactgtgccacgtggtaggacacataggacacaggaattcctgggtccttgcccatgactgtgccatgtggtaggacacaggacacaggaattcctgga

SEQ ID NO: 4697 - DNA, 120 bp, Artificial Sequence
  ENSG00000005513_20 (sequence is synthesized)
aagtggtggcttcagaagtgatcttggctcgcaggcaccagtgccacctaccaagctgtgaaactaaaccttctccactaaacgtcgttagggcctcagttctagacgagtcatacctga

SEQ ID NO: 4698 - DNA, 120 bp, Artificial Sequence
  ENSG00000005513_21 (sequence is synthesized)
ttcacctgcactgcttcccctgtgtgctgagcatagagcatacaatagcgcctacttcacggaaacttgtgcctttaaactttgtaaacttaaacacagccgagaagttgcttctttgta

SEQ ID NO: 4699 - DNA, 120 bp, Artificial Sequence
  ENSG00000005513_22 (sequence is synthesized)
ctttttctacttttcctacttttttgtagaaaaaaaagataatgcctctgcttctatttctctgggggtgggggtgggggccgggagccgtcgcagacccgtttcatgcagcgtctccct

SEQ ID NO: 4700 - DNA, 120 bp, Artificial Sequence
  ENSG00000005513_23 (sequence is synthesized)
tggcaccgcgttcggaggacgcaccctcactcccctgctgccttcactcctttctgaccaagcaacgctaacttttgtacagatcgatttgataaaattaaacaaagtgctttttatgga

SEQ ID NO: 4701 - DNA, 120 bp, Artificial Sequence
  ENSG00000005513_24 (sequence is synthesized)
cgctgggcaagctgtggcggtgagtgccggcgccccgggggcggggttcgggaccttggccgcccctggtctcggactgcgagcgggggcctggagggcgcagagctcgcggaggtggtg

SEQ ID NO: 4702 - DNA, 120 bp, Artificial Sequence
  ENSG00000005513_25 (sequence is synthesized)
gccacacgcaggctccgggctctgcaccccgggcgggtgtcagggcgggtcccagtggaaaaacatcctctggccagccggggtccggcgccagctatgggagtcgggatccgcggaggg

SEQ ID NO: 4703 - DNA, 120 bp, Artificial Sequence
  ENSG00000005513_26 (sequence is synthesized)
cagcgcctggggtgtgcaccctcgtggcgggtgcgctctggagccagttctcctggcggggaacaccctgcggagggccatggctggcaccccgacgtgccctccagccgttgcgagtgg

SEQ ID NO: 4704 - DNA, 120 bp, Artificial Sequence
  ENSG00000005513_27 (sequence is synthesized)
ccccagccccgggaggcacgcccggcacgacagcaagttgcatgcggctctctggaggtgctccctccttagaaagggctcagctcctctagctcctggaccacccatggggagggagtg

SEQ ID NO: 4705 - DNA, 120 bp, Artificial Sequence
  ENSG00000005513_28 (sequence is synthesized)
cggcaggcggatgggtgggcagcaggtttgcctgcgagtaccctccccgcagtttctccctctcctggacaccctcggtccgaagcagggagggcaggagtggagatgacggggtgcgcc

SEQ ID NO: 4706 - DNA, 120 bp, Artificial Sequence
  ENSG00000005513_29 (sequence is synthesized)
gtgtgcacgccttggcgtggtggggccggtcagttttccagaaattaggactgcagagtgaagaacttgttgctcaggacaggccgcccccaccgagtgtcctctggttgggtttcaaat

SEQ ID NO: 4707 - DNA, 120 bp, Artificial Sequence
  ENSG00000005513_30 (sequence is synthesized)
ggttctcttggtttggggctctggttcccgtatcctgctcctcacctggaagaagggagcttggagcttgcgtatttgcacctcctgccttctgtctggatctagggcgcagccacgggg

SEQ ID NO: 4708 - DNA, 120 bp, Artificial Sequence
  ENSG00000005513_31 (sequence is synthesized)
cgctgtggacggcaggcccctgctcccccaagtcctgccgcacaggcggttggaggtgagcctcgggaagagtcccaaggagtgtgtcctgtggctcagtgaggacgggcgcctgggccc

SEQ ID NO: 4709 - DNA, 120 bp, Artificial Sequence
  ENSG00000005513_32 (sequence is synthesized)
tgccagggcttctgggtgtctgggaatggagggacagcagcccagctgcccgccgaaggccggcaccgttcccgggaagcctcgcttttgtccaccgccggctgggtcctgcccgcctcc

SEQ ID NO: 4710 - DNA, 120 bp, Artificial Sequence
  ENSG00000005513_33 (sequence is synthesized)
cccgcctcccttagaaagccccagagggagggaacagcaggcccggaatagggggaaatagaaggaggaagatgggaggcgtggggcttgttcttctttggctgtcgtaagcataccaac

SEQ ID NO: 4711 - DNA, 120 bp, Artificial Sequence
  ENSG00000005513_34 (sequence is synthesized)
cttcccaaacaggcgccggccggttctcccagaggagtgtactgcctggtgccacgggaggctccggagcgcacggcaggcgggtttccctggtcagagcctcctggccccggcctctgc

SEQ ID NO: 4712 - DNA, 120 bp, Artificial Sequence
  ENSG00000005700_0 (sequence is synthesized)
atccccgttcccgattcctgtagtagcggctgtattgcagccgcctgccgaactgacccgggtctggggactggcccctctggcgccgttcggtttctcttattgccttcactgaggatg

SEQ ID NO: 4713 - DNA, 120 bp, Artificial Sequence
  ENSG00000005700_1 (sequence is synthesized)
agtccctttgtggctctatgtggaccctgcggaatccaccggcgcagtttcatctagcgactggtcacccttgcaattatggatatttaaaagggtcagacagtgtggagggggagttcc

SEQ ID NO: 4714 - DNA, 120 bp, Artificial Sequence
  ENSG00000005700_2 (sequence is synthesized)
cctcctcactcccccttggtgcttgactccaggaataatttataaactgtggaatttttttaaatgaagaacttgtatttgatatgaactttatagagctatttataatttttttgattt

SEQ ID NO: 4715 - DNA, 120 bp, Artificial Sequence
  ENSG00000005700_3 (sequence is synthesized)
aagtgccaaaaaattgtataaagatatatagttttatactattgtcaggaggatttaaattatcctaaaaaggtaatttattctctgtaacttcctcaatagcacctttgtgtcctggct

SEQ ID NO: 4716 - DNA, 120 bp, Artificial Sequence
  ENSG00000005700_4 (sequence is synthesized)
ttttcattttttaaaattagttttcacgattctgaagtaagtggtataaaaacagttaggatgagttcacccatgcctgactgcacatcaaagtgtcgatccctgaagcatgctttggat

SEQ ID NO: 4717 - DNA, 120 bp, Artificial Sequence
  ENSG00000005700_5 (sequence is synthesized)
gtcctttctgtggtaacaaaggggagcgaaaaccagattaaggcctttctctccagtcattgttacaatgctgcaactatcaaggatgtttttggcaggaatgccctccaccttgtttcc

SEQ ID NO: 4718 - DNA, 120 bp, Artificial Sequence
  ENSG00000005700_6 (sequence is synthesized)
tcctgtggaaagaaaggagtgttagattggcttattcagaaaggagtggatctgttggtgaaagacaaagagtctggatggacagcattgcacagaagcattttttatggacatattgat

SEQ ID NO: 4719 - DNA, 120 bp, Artificial Sequence
  ENSG00000005700_7 (sequence is synthesized)
tgtgtttggtctctattgaagcatggtgttagtctgtatattcaagataaagaaggcttgtcagctttggatcttgtaatgaaggatagaccaactcatgtagtattcaagaatactgat

SEQ ID NO: 4720 - DNA, 120 bp, Artificial Sequence
  ENSG00000005700_8 (sequence is synthesized)
cctacagatgtttatacttggggcgataatacaaattttaccctgggtcatggaagccagaatagcaaacatcatccagagttggtggatctgttctccaggagtgggatttatatcaag

SEQ ID NO: 4721 - DNA, 120 bp, Artificial Sequence
  ENSG00000005700_9 (sequence is synthesized)
caggtggtgctttgtaaatttcactccgtgtttctgtctcagaaagggcaggtttatacctgtggtcatggtcctggagggcgattaggacatggagatgaacagacatgcttggtccct

SEQ ID NO: 4722 - DNA, 120 bp, Artificial Sequence
  ENSG00000005700_10 (sequence is synthesized)
cggcttgtggaaggactgaatggtcataattgttcccaagtggcagctgctaaggatcatactgttgtattaactgaagatggatgtgtttatacatttggtctaaacatttttcatcaa

SEQ ID NO: 4723 - DNA, 120 bp, Artificial Sequence
  ENSG00000005700_11 (sequence is synthesized)
ttaggaattattccaccgccttccagttgtaatgtacccagacagatacaggcaaaatatctgaaaggaaggacaatcattggcgttgcagcaggcaggtttcatacagtcctatggact

SEQ ID NO: 4724 - DNA, 120 bp, Artificial Sequence
  ENSG00000005700_12 (sequence is synthesized)
agagaagctgtttacactatgggactaaatggtggacaactgggttgtttgctagatcccaatggagaaaagtgtgtaactgctcctcgtcaggtctctgcccttcaccataaagacatt

SEQ ID NO: 4725 - DNA, 120 bp, Artificial Sequence
  ENSG00000005700_13 (sequence is synthesized)
gctctgtctttggttgctgcaagtgatggagctacagtctgtgttaccacaaggggagatatttacttacttgcagactatcagtgcaagaagatggcttctaaacagttgaacttgaaa

SEQ ID NO: 4726 - DNA, 120 bp, Artificial Sequence
  ENSG00000005700_14 (sequence is synthesized)
aaagttcttgtgtctgggggtcatatggaatacaaggttgatcctgaacatttgaaagaaaatgggggtcaaaaaatttgcattcttgcaatggatggagctggaagggtgttttgctgg

SEQ ID NO: 4727 - DNA, 120 bp, Artificial Sequence
  ENSG00000005700_15 (sequence is synthesized)
agatcagtcaacagttctctgaagcagtgtcgatgggcctatccacgtcaggtcttcatttctgatattgctttaaatagaaatgaaattctatttgttacgcaagatggagaaggattt

SEQ ID NO: 4728 - DNA, 120 bp, Artificial Sequence
  ENSG00000005700_16 (sequence is synthesized)
agagggagatggtttgaagagaaaagaaagagttctgaaaagaaagagattttatcaaaccttcacaattcctcatcagatgtgtcttatgtctctgatataaatagtgtgtatgaaaga

SEQ ID NO: 4729 - DNA, 120 bp, Artificial Sequence
  ENSG00000005700_17 (sequence is synthesized)
attcgacttgagaaacttacctttgcacatagagctgttagtgtcagcacagatccaagtggatgcaactttgcaatcctgcagtcagatcctaaaacaagcctttatgaaattccagct

SEQ ID NO: 4730 - DNA, 120 bp, Artificial Sequence
  ENSG00000005700_18 (sequence is synthesized)
gtgtcctcatcatccttttttgaagagtttggcaaactgttgagggaagcagatgaaatggacagcattcatgatgtgacatttcaagttggcaatagactcttccctgcacataaatat

SEQ ID NO: 4731 - DNA, 120 bp, Artificial Sequence
  ENSG00000005700_19 (sequence is synthesized)
attttggcagtgcattctgatttttttcagaaattgtttctttcagatggtaatacttcagaatttacagatatttaccagaaagatgaagattctgcagggtgccatctctttgtggta

SEQ ID NO: 4732 - DNA, 120 bp, Artificial Sequence
  ENSG00000005700_20 (sequence is synthesized)
gagaaggttcatcctgacatgtttgaataccttttacaatttatatacacagatacttgtgactttttaactcatggcttcaaaccaagaatacacttaaacaaaaacccagaagaatat

SEQ ID NO: 4733 - DNA, 120 bp, Artificial Sequence
  ENSG00000005700_21 (sequence is synthesized)
cagggaactctgaattctcatttgaataaagtgaatttccatgaagatgataaccagaagtctgcatttgaagtttacaaaagtaatcaagctcaaacagttagtgagaggcagaagagc

SEQ ID NO: 4734 - DNA, 120 bp, Artificial Sequence
  ENSG00000005700_22 (sequence is synthesized)
aaacctaaatcttgtaaaaaaggaaaaaatattagggaagatgatcctgtaagaatgttgcaaactgttgcaaagaaattcgacttcagtaatttgagtagtaggttagatggagtcaga

SEQ ID NO: 4735 - DNA, 120 bp, Artificial Sequence
  ENSG00000005700_23 (sequence is synthesized)
tttgaaaatgaaaaaattaatgttattgccaagaacactggtaataaactgaagctaagtcagaaaaaatgttcatttctgtgtgacgtgaccatgaaatcagtggatggaaaggaattt

SEQ ID NO: 4736 - DNA, 120 bp, Artificial Sequence
  ENSG00000005700_24 (sequence is synthesized)
ccttgtcataaatgtgttctttgtgctagacttgaatattttcatagtatgctgagtagctcatggattgaggcttccagttgtgcagctctggaaatgccaatacattctgatatatta

SEQ ID NO: 4737 - DNA, 120 bp, Artificial Sequence
  ENSG00000005700_25 (sequence is synthesized)
tgataaaagaatctcaaaatgtagattttatttgtagtgttcttgtggtggctgatcaacttctcataacccggttgaaagagatttgtgaagtagcattaactgaaaaacttaccctga

SEQ ID NO: 4738 - DNA, 120 bp, Artificial Sequence
  ENSG00000005700_26 (sequence is synthesized)
agaatgctgctatgctactggaatttgcagcaatgtatagtgcaaaacagttgaaactgtcttgtttacagtttataggattgaatatggcagctttacttgaagcaaggtctcttgatg

SEQ ID NO: 4739 - DNA, 120 bp, Artificial Sequence
  ENSG00000005700_27 (sequence is synthesized)
ttttaagcgatggtgttttgaaggatctttctgagttttaccggaaaatgattccagcaatggatagaagagtcattacaccatatcaagatggaccagatattagctatttggaagtag

SEQ ID NO: 4740 - DNA, 120 bp, Artificial Sequence
  ENSG00000005700_28 (sequence is synthesized)
aagatggagatatcttcttgaaagaagaaataaatatggaacaaaatcattcggaaactatgttcaagaaagcaaaaacaaaagctaaaaagaagccacgtaaacgttcagatagttctg

SEQ ID NO: 4741 - DNA, 120 bp, Artificial Sequence
  ENSG00000005700_29 (sequence is synthesized)
gaggttataacctttcagatattattcagagtccatcatctacaggattattaaagtctggtaagaccaattctgtggaatctcttccagaactgttgacatcagactctgaaggaagct

SEQ ID NO: 4742 - DNA, 120 bp, Artificial Sequence
  ENSG00000005700_30 (sequence is synthesized)
atgcaggagtgggtagtcctagagatttacagtcccctgatttcacaacaggatttcattcagataagattgaggcgaaagtcaaaccgtatgttaatggtacatctcctgtgtattcta

SEQ ID NO: 4743 - DNA, 120 bp, Artificial Sequence
  ENSG00000005700_31 (sequence is synthesized)
gggaagatttaaaaccatgggaaaagtcaccaatacttaaaatatctgctccacagcctattcccagtaacagaattgatactaccagctctgccagttgggttgctggttctttcagtc

SEQ ID NO: 4744 - DNA, 120 bp, Artificial Sequence
  ENSG00000005700_32 (sequence is synthesized)
ctgtcagccctcctgttgtggatctcagaactatcatggaaatagaagaaagtagacaaaaatgtggagctacaccaaagtcacatttaggcaaaacagtttctcatggagttaaacttt

SEQ ID NO: 4745 - DNA, 120 bp, Artificial Sequence
  ENSG00000005700_33 (sequence is synthesized)
ctcagaagcaacgaaaaatgattgcattgactaccaaggaaaacaattcaggaatgaatagcatggaaacagttttattcactccttcaaaagcccccaaaccagtgaatgcatgggcat

SEQ ID NO: 4746 - DNA, 120 bp, Artificial Sequence
  ENSG00000005700_34 (sequence is synthesized)
cttctctgcattcagtttcatccaagtcattccgggatttcttactagaagaaaaaaagtctgttactagccatagttcaggcgatcatgtcaaaaaagtttcttttaaaggaattgaaa

SEQ ID NO: 4747 - DNA, 120 bp, Artificial Sequence
  ENSG00000005700_35 (sequence is synthesized)
attctcaggcaccaaaaattgtcagatgctctacccatggtaccccaggaccagaaggcaaccatatttcagatttaccacttctagacagtcccaatccctggctatcttcttcagtga

SEQ ID NO: 4748 - DNA, 120 bp, Artificial Sequence
  ENSG00000005700_36 (sequence is synthesized)
ctgctccatccatggtagccccagtcacttttgcatctattgtagaagaagaactacaacaagaagcagctcttattagaagtcgagaaaaaccgttggctctgattcagattgaggagc

SEQ ID NO: 4749 - DNA, 120 bp, Artificial Sequence
  ENSG00000005700_37 (sequence is synthesized)
atgccatacaagatttattggttttctatgaggcatttggcaaccctgaagagtttgtcattgttgaaaggacaccgcagggaccactggcagtacctatgtggaataagcatggatgct

SEQ ID NO: 4750 - DNA, 120 bp, Artificial Sequence
  ENSG00000005700_38 (sequence is synthesized)
agttcactgtggagttgagatgcattttacataattatgagtttgttcatataaagaaaagctgtggaaaagagtcttagagattttgtaatatcattctaaatagattaagaaaagata

SEQ ID NO: 4751 - DNA, 120 bp, Artificial Sequence
  ENSG00000005700_39 (sequence is synthesized)
agaattgtttcttctgaataatctaacaaaggaaaatataagtgattgaatcataagatataaggggggtaaagtattaaaaataacttttttgtttgataacttgagaatttagaagat

SEQ ID NO: 4752 - DNA, 120 bp, Artificial Sequence
  ENSG00000005700_40 (sequence is synthesized)
tttgccaagtatgtgttgttgcttgacttcttaaatatggcattgatgaatttaaagtaggagcatcagttattacttctgattcattaatggccagaattttgtgtttggtgtaatagt

SEQ ID NO: 4753 - DNA, 120 bp, Artificial Sequence
  ENSG00000005700_41 (sequence is synthesized)
tgtgtcaccattcttgttgctttttaaaaatcaggctaatcatgtggtccatgtctcttcaaagcttgacctgcacaaatgccatatttctatttggaccacatattctccattttgcat

SEQ ID NO: 4754 - DNA, 120 bp, Artificial Sequence
  ENSG00000005700_42 (sequence is synthesized)
tgagcagtagagtacagtggaaagggaataagaatactgattattctgaacagtttagtcccaagagaatagcgttttaaaaaagaaaaacaagatttggagtcattgtgggttattttt

SEQ ID NO: 4755 - DNA, 120 bp, Artificial Sequence
  ENSG00000005700_43 (sequence is synthesized)
ggtgggatggaggatcttaaaaatgcctaattgtgagagaatcaattgctgaaagtgttaaaatttctgaaaataaatgcttaattacatatacaggaattaaatagtttggaagagggt

SEQ ID NO: 4756 - DNA, 120 bp, Artificial Sequence
  ENSG00000005700_44 (sequence is synthesized)
tggattatcattacctttacaatactgtataatcagaagttctctgaacctcaattgtatatctagacataaaaattgttttctgtataggatgttgtttggtttgtttctgagtgttta

SEQ ID NO: 4757 - DNA, 120 bp, Artificial Sequence
  ENSG00000005700_45 (sequence is synthesized)
aattttgcaaaaacaaatgttaaatttgtgcttcagtacctagataaattggaaaggttaatgttctagtttctggaaggtaagcctgggagacacataagcaattcactgctataattt

SEQ ID NO: 4758 - DNA, 120 bp, Artificial Sequence
  ENSG00000005700_46 (sequence is synthesized)
agttgatgtaaaatgacggaaactgactcaatatgtcaggtttaactctgcccaaaagcagcagacatgtaagcagatgtgcaataaaaaatgatcttgatccatttcactaatgtgtgc

SEQ ID NO: 4759 - DNA, 120 bp, Artificial Sequence
  ENSG00000005700_47 (sequence is synthesized)
ttgacattttttactatattgacatttattatggaaagagttaataattattttttctgatgtgctacactagtggccagtatatggttaagttgatgctgtatttattctaagacggat

SEQ ID NO: 4760 - DNA, 120 bp, Artificial Sequence
  ENSG00000005700_48 (sequence is synthesized)
ttaaaaaggcagttttctaaatatgaacttgtgaatttttgtatgtgtgtttgagtaaattgagaaatgaattttataaatgttctattgatgttgcagtaaagaagccttttgaagtaa

SEQ ID NO: 4761 - DNA, 120 bp, Artificial Sequence
  ENSG00000005700_49 (sequence is synthesized)
ttttctgtgtcagatttttttcttcttaatctttttttccctttcctctcttcctctgttatttttttctttcaatttatgttgttattttggcagtggctcaggggcaaaaagccatta

SEQ ID NO: 4762 - DNA, 64 bp, Artificial Sequence
  ENSG00000005700_50 (sequence is synthesized)
gttgttattttggcagtggctcaggggcaaaaagccattagtagtactgaggaccaagaaagtt

SEQ ID NO: 4763 - DNA, 82 bp, Artificial Sequence
  ENSG00000005700_51 (sequence is synthesized)
caagcaattctcgtgcctcagcctccccggtagtgtgtatttttagtagagatatgttcaccatgttggccaggctggtctc

SEQ ID NO: 4764 - DNA, 71 bp, Artificial Sequence
  ENSG00000005700_52 (sequence is synthesized)
cagaaagttgttttaaattaaggaagtccaatagttacaaaaaagcactcttagatgacaaattttgtttt

SEQ ID NO: 4765 - DNA, 120 bp, Artificial Sequence
  ENSG00000005700_53 (sequence is synthesized)
tacaaaaaagcactcttagatgacaaattttgttttaaataagaaagcataagagcattatttccccaccctttatatattaagtgtgatgctgagatttgacttttccctctttgtatt

SEQ ID NO: 4766 - DNA, 120 bp, Artificial Sequence
  ENSG00000005700_54 (sequence is synthesized)
agcttgagaagtgtttttctaacaacatgggagattataaacaagtcaggcattctagtgggcttctagactgaaatgatcaatttaagttggccattttatggtcctagtgtgagatca

SEQ ID NO: 4767 - DNA, 120 bp, Artificial Sequence
  ENSG00000005700_55 (sequence is synthesized)
agacattttggtgtaattttgtcagctttctacctaaaaaatagaaatatattttgatgtatttactttttattatggttgccctttcaacatttagaaaataatcttaaatctcttttc

SEQ ID NO: 4768 - DNA, 120 bp, Artificial Sequence
  ENSG00000005700_56 (sequence is synthesized)
tagtgtactaattacttcaaattttttttttacttaaatctcttttctagtgtactaattacttcaaatttttttttctaggtataatgtatacaaagaaaaagtgatgcttgttttctt

SEQ ID NO: 4769 - DNA, 120 bp, Artificial Sequence
  ENSG00000005700_57 (sequence is synthesized)
tttaaaggtaagcttgactgcactcatttaatttgcctctggagtcaggagtttacaattcttcctctgtatctattaataagcagtttgactaatattactagaagctttaatctttaa

SEQ ID NO: 4770 - DNA, 120 bp, Artificial Sequence
  ENSG00000005700_58 (sequence is synthesized)
ttttggcatttgttttgcagatgctctacccatggtaccccaggaccagaaggcaaccatatttcagatttaccacttctagacagtcccaagtaaggttaattgataagttatgggcct

SEQ ID NO: 4771 - DNA, 82 bp, Artificial Sequence
  ENSG00000005700_59 (sequence is synthesized)
agacagtcccaagtaaggttaattgataagttatgggcctccaaagctaagttgctgcttagcattgaaaacattaaggctg

SEQ ID NO: 4772 - DNA, 89 bp, Artificial Sequence
  ENSG00000005700_60 (sequence is synthesized)
aatacaaaacttagctgggcatggtggcgcatgcctgtgatgccagctactcatgaagctaggaattgcattgagccgcgatcatgcca

SEQ ID NO: 4773 - DNA, 89 bp, Artificial Sequence
  ENSG00000005700_61 (sequence is synthesized)
tgccagctactcatgaagctaggaattgcattgagccgcgatcatgccactgtactccagccggggcgacacagtgagactctgtctca

SEQ ID NO: 4774 - DNA, 120 bp, Artificial Sequence
  ENSG00000005700_62 (sequence is synthesized)
attgggaatagtatggtattgagtagaatgtattacttgtatcctctccgtactgtagtttgagttacctttctgttcagttatgttgtttctgctccctccccatttcctggtactttc

SEQ ID NO: 4775 - DNA, 120 bp, Artificial Sequence
  ENSG00000005700_63 (sequence is synthesized)
caaaattttctctctaatactggtccaaataaaacattagttcttctgtttttctgtttctcacctcatcattctgtaatctctgcgaaagcttccaggttcgctcatcgtaggtcactg

SEQ ID NO: 4776 - DNA, 120 bp, Artificial Sequence
  ENSG00000005700_64 (sequence is synthesized)
gaaaaaattgtagcattgctaaagagtatttcagagaaaattttgcatgcaaaaatttaggaagatgagtgaaactcatcattctgtaatctctgtgaaagcttccaggttcgttcattg

SEQ ID NO: 4777 - DNA, 120 bp, Artificial Sequence
  ENSG00000005700_65 (sequence is synthesized)
taggtcactggaaagaattgtagcattgctaaaaagtatttcagagaaaattttgcatgcaaaaatttaggaagatgaatgaaactcattattattattctttcagtccctggctatctt

SEQ ID NO: 4778 - DNA, 120 bp, Artificial Sequence
  ENSG00000005700_66 (sequence is synthesized)
gtgggttgaaaacattacaaaagatcatttcatgttgtatttctgccctaagaattggacagacttactgcatctttcttattatttttctgcatttgatgttatagttaattatacatc

SEQ ID NO: 4779 - DNA, 120 bp, Artificial Sequence
  ENSG00000005700_67 (sequence is synthesized)
cttttctgggcaatttagcctccataatattatttcttaaatatgtgctaaagatagagttgagttgataatccagctcttgtagaatacagtattacatcccagaaacttgactctaaa

SEQ ID NO: 4780 - DNA, 120 bp, Artificial Sequence
  ENSG00000005700_68 (sequence is synthesized)
atgatcattgtggactattggctacaaaagccaaagagttaaggcttgtgatgcaagttctttttgaaatttgtgatatgttggagggctcatatgtagctattacttgatcattgttag

SEQ ID NO: 4781 - DNA, 120 bp, Artificial Sequence
  ENSG00000005700_69 (sequence is synthesized)
tataaactgatattttcattgttgaaacttgtgagcattttgatccaataatggtaaaataacatgaaataaatagaaaacattattattaccagtaacctttattaagcagaaattaat

SEQ ID NO: 4782 - DNA, 120 bp, Artificial Sequence
  ENSG00000005700_70 (sequence is synthesized)
gttttgtaggaggagagagaaggtgacatttgagccaactgtaaaagagtgagaagacatttgaagtggaatatattccagaataaggggaatagtaaaaataaagatgctctacccatg

SEQ ID NO: 4783 - DNA, 120 bp, Artificial Sequence
  ENSG00000005801_0 (sequence is synthesized)
cttcctgtccccgcggctctgtgtcccctgctagccgtaggtcgtgtgacccgcaggcaccgggagatccagaagtgaaacgccaggctctctggaggccaggagatgactctgttgacg

SEQ ID NO: 4784 - DNA, 120 bp, Artificial Sequence
  ENSG00000005801_1 (sequence is synthesized)
ttcagggatgtggccatagaattctccctggaggagtggaaatgcctggacctcgctcagcagaatttgtacagggatgtgatgttggagaactacagaaacttgttctccgttggtctc

SEQ ID NO: 4785 - DNA, 120 bp, Artificial Sequence
  ENSG00000005801_2 (sequence is synthesized)
actgtctgtaagccaggcctgatcacctgcctggagcaacgaaaagagccctggaatgtgaagagacaggaggcagcagacggacatccagctatgtcttctcattttacccaagacctt

SEQ ID NO: 4786 - DNA, 120 bp, Artificial Sequence
  ENSG00000005801_3 (sequence is synthesized)
ctgccagagcagggcatacaagatgcattcccaaaaagaatactgagaggatatggaaattgtggccttgataatttatatttaaggaaagactgggaaagtttagatgagtgtaagttg

SEQ ID NO: 4787 - DNA, 120 bp, Artificial Sequence
  ENSG00000005801_4 (sequence is synthesized)
caaaaagattataatggacttaaccaatgttcatcaactacccatagcaaaatctttcaatataataaatatgttaaaatctttgataacttttcaaatttacatagacgtaatataagt

SEQ ID NO: 4788 - DNA, 120 bp, Artificial Sequence
  ENSG00000005801_5 (sequence is synthesized)
aatactggagagaaacctttcaaatgtcaagaatgtggcaaatcctttcaaatgctctcattcctaactgaacatcagaaaattcacactggaaaaaaattccaaaaatgtggagaatgt

SEQ ID NO: 4789 - DNA, 120 bp, Artificial Sequence
  ENSG00000005801_6 (sequence is synthesized)
ggcaaaacctttatccagtgctcacactttactgaacctgagaacattgacactggagagaaaccttacaagtgtcaagaatgtaacaacgtcattaaaacttgctcagtccttactaaa

SEQ ID NO: 4790 - DNA, 120 bp, Artificial Sequence
  ENSG00000005801_7 (sequence is synthesized)
aatagaatttatgccggaggggaacattacagatgtgaagaatttggcaaagtatttaaccagtgctcccaccttactgaacatgagcatggtactgaggaaaaaccctgcaaatatgaa

SEQ ID NO: 4791 - DNA, 120 bp, Artificial Sequence
  ENSG00000005801_8 (sequence is synthesized)
gagtgcagcagtgtctttatctcttgctcaagcctttctaatcaacagatgattcttgctggagagaagctctccaaatgtgaaacatggtacaaaggttttaaccacagcccaaatcct

SEQ ID NO: 4792 - DNA, 120 bp, Artificial Sequence
  ENSG00000005801_9 (sequence is synthesized)
tccaaacaccagagaaatgagattggagggaaacctttcaaatgtgaggaatgtgacagcatcttcaagtggttctcagaccttactaaacataagagaattcacactggtgagaaacca

SEQ ID NO: 4793 - DNA, 120 bp, Artificial Sequence
  ENSG00000005801_10 (sequence is synthesized)
tacaaatgtgacgaatgtgggaaagcctatacacagtcctcacacctcagtgaacacaggaggattcacaccggagagaaaccctaccaatgtgaagaatgtgggaaggtcttcagaact

SEQ ID NO: 4794 - DNA, 120 bp, Artificial Sequence
  ENSG00000005801_11 (sequence is synthesized)
tgctcaagcctttctaaccataagagaactcattctgaagaaaaaccctacacgtgtgaagaatgtggcaacatctttaagcagttatcagacctcactaagcataagaaaacccatact

SEQ ID NO: 4795 - DNA, 90 bp, Artificial Sequence
  ENSG00000005801_12 (sequence is synthesized)
aaaccctacaagtgtgaagaatgtggcagagtcttcatgtggttctcagacattaccaaacataagaaaaccgaatgtggaaaaaacttt

SEQ ID NO: 4796 - DNA, 120 bp, Artificial Sequence
  ENSG00000005801_13 (sequence is synthesized)
ctggagagaaaccctacaagtgtgaaaagtgtggcaaagccttcacccagttctcacacctgactgtacatgaaagcattcatacttgagaaaaaaataaacaaatataaaaataggcaa

SEQ ID NO: 4797 - DNA, 120 bp, Artificial Sequence
  ENSG00000005801_14 (sequence is synthesized)
catacttgagaaaaaaataaacaaatataaaaataggcaaagccgttagtatctgctcgcatcccactttacatcagagttcagacttaataaagttatcataaatgtaattactattga

SEQ ID NO: 4798 - DNA, 120 bp, Artificial Sequence
  ENSG00000005801_15 (sequence is synthesized)
aagacctttcatgaaatataagtctccagagcacacaagagtatttcttctgaaaaaaatgttacaattatactagatggaagacttgcatcagttgcttaaactttcagaaaatttgta

SEQ ID NO: 4799 - DNA, 120 bp, Artificial Sequence
  ENSG00000005801_16 (sequence is synthesized)
gagaaacccaacaaatctcataaatgtggaataacatttgttcaaaaatgatagcttagaaaacactagagttcatactaaaagatattttgcaaatacactaaatgggaaaaataagca

SEQ ID NO: 4800 - DNA, 120 bp, Artificial Sequence
  ENSG00000005801_17 (sequence is synthesized)
aggacacgttcagaaatgacactgaatccctgtgttgagtctacagagacatctagacttaaaatagatcatttatatttaagtttaaaaggaggatgagactgagtttttgtagagtta

SEQ ID NO: 4801 - DNA, 120 bp, Artificial Sequence
  ENSG00000005801_18 (sequence is synthesized)
taattacattcaaaatatacttttttgcattgaaaaaatgttaaatttttgaaaagcgaatattgatgtcattctattctcaaatcagtagatgctgtgtcttcatttctagtgctgatg

SEQ ID NO: 4802 - DNA, 120 bp, Artificial Sequence
  ENSG00000005801_19 (sequence is synthesized)
tgaaaacacatggtcagttgttgctgcgtcagagatatgagaaattcttttctcttaggtgtgcatcactgatatacttgtccgtgaaaggtgaaagacactgaaatgtaagatgcgtga

SEQ ID NO: 4803 - DNA, 120 bp, Artificial Sequence
  ENSG00000005801_20 (sequence is synthesized)
gtaaaatcttggtagagaggctctttgtggttgttttatatacttgtaagtgatttatgagataggtgtttagaataatactcttctgttagggtcaccctgatcagaccgttcccttcc

SEQ ID NO: 4804 - DNA, 120 bp, Artificial Sequence
  ENSG00000005801_21 (sequence is synthesized)
cctcccacaggacttacaatacggtcccttgtgctctctgcacagctaccccagggcaaaaaacaaaccccccttcactgatccctccagtaactgtgcagacagttacaggatgcggtt

SEQ ID NO: 4805 - DNA, 120 bp, Artificial Sequence
  ENSG00000005801_22 (sequence is synthesized)
aacatgtctgttcacctcgcataacaaagctggcaaaaaacatctccaggatgcagacaagacacctgcaccctcgactaagctcccccaccccaacccagttctcctgcacccccaact

SEQ ID NO: 4806 - DNA, 120 bp, Artificial Sequence
  ENSG00000005801_23 (sequence is synthesized)
cagctcccgcaccccgacctagttctggccctataaaaacctgctatagtctgtaagcagggctgcctcctctaactgtggtggagcagccaagcagctcaataaagcttgcttgcctga

SEQ ID NO: 4807 - DNA, 72 bp, Artificial Sequence
  ENSG00000005801_24 (sequence is synthesized)
ggcctcaatgtttctgtggacaaattcactgcactgtgctcacctggggtgctgcaaactgtgaaatggttt

SEQ ID NO: 4808 - DNA, 120 bp, Artificial Sequence
  ENSG00000005801_25 (sequence is synthesized)
gtgatttgctctcagccaccctctggactttttcctcagtttcagtattgtccagggataacacaggatgcccaccatggccatgtctgctggagcatctagtgaatttcaggccctggg

SEQ ID NO: 4809 - DNA, 120 bp, Artificial Sequence
  ENSG00000005801_26 (sequence is synthesized)
ttatttctcagaggacagcctgaggtatgaagtgtggcctctccagggagcagctggatgccctgggctgagagaaatctcctggtctactcttcctctaaagaggtgtgatttgtccag

SEQ ID NO: 4810 - DNA, 120 bp, Artificial Sequence
  ENSG00000005801_27 (sequence is synthesized)
tgatgggctgccagccaccccctccacctccgtgtcctctgggacctcaaccactctctgcaactgaaggttttctgggacctctgatacatcctccactcgaacatcctctgggacctg

SEQ ID NO: 4811 - DNA, 120 bp, Artificial Sequence
  ENSG00000005801_28 (sequence is synthesized)
aaacaccttctccagctgaagttttactgagaactcagatacctcctccactcaagtttcctaatggacctcagcaatgtcctccactcgagtgtcccctggaacttcaatcatctcctc

SEQ ID NO: 4812 - DNA, 120 bp, Artificial Sequence
  ENSG00000005801_29 (sequence is synthesized)
cactctagtgtcctctgggacttcaactacctactgcacttgagtgtcctctgggacctcaaccacctccactcaagtgtcctctgggacctcaaccacctcctccagttgagtgtcctc

SEQ ID NO: 4813 - DNA, 120 bp, Artificial Sequence
  ENSG00000005801_30 (sequence is synthesized)
tgggacctcaaccacctcctccagttgagtgtcctctggaacctcaacaaccttcttattaaagtttcctctgggacctcaaccacctcctgcactcaagtgccctctgggacctcatca

SEQ ID NO: 4814 - DNA, 120 bp, Artificial Sequence
  ENSG00000005801_31 (sequence is synthesized)
catccaggaccaagtgttgaagagactatactgtctgtattgtatcttcttcgtgaacttgtgaaagattagttaagtggatatgcatgagtttaattctgggctctctgttctgtccca

SEQ ID NO: 4815 - DNA, 120 bp, Artificial Sequence
  ENSG00000005801_32 (sequence is synthesized)
ttggtctctgcggcagttttcctctctgttcgcataccatcctgttcttactactgtagtcctaaaatgtcacttgaaaacagaaaatattatgcctcttgccttgttctttttcctata

SEQ ID NO: 4816 - DNA, 120 bp, Artificial Sequence
  ENSG00000005801_33 (sequence is synthesized)
gattgctttggctatgccaagtctattgtaattccatataaattttagaattctattttcattactgtgaaaaaggccactggaatttgataagaagtttattgaatctatagtcttggt

SEQ ID NO: 4817 - DNA, 120 bp, Artificial Sequence
  ENSG00000005801_34 (sequence is synthesized)
ctttagcagaattttacaaccccctccctggattactaagctctattaaaggcatttttgtgagatgagatctctctgtgtcacccaggctggttctgaacttctggcctgaagtgagcc

SEQ ID NO: 4818 - DNA, 120 bp, Artificial Sequence
  ENSG00000005801_35 (sequence is synthesized)
tctcaccccgaggtcctgaatagttgggattataggcatgagccgtggtgcctgattctcttggaaaggcatttctgtacaagaagactgacacatttttgttgctgtcggggaatatat

SEQ ID NO: 4819 - DNA, 120 bp, Artificial Sequence
  ENSG00000005801_36 (sequence is synthesized)
aacccagggtccacctatgtcaccatttttctatgtcactgtcctgtacattttcactttctcttttgttccatttcaaatttatctctaatttcaaattctaatatgcagaacaatatg

SEQ ID NO: 4820 - DNA, 120 bp, Artificial Sequence
  ENSG00000005801_37 (sequence is synthesized)
aattctaatatgcagaacaatatgctagaattaatgtgttatgtctgaattatttagtaagcactatttgtttgtttgtttgtttgttttgagatagagttttgctcttgttacccaggc

SEQ ID NO: 4821 - DNA, 120 bp, Artificial Sequence
  ENSG00000005801_38 (sequence is synthesized)
aagcactccacattgattaaattatcctatttcttcaacctgtatataaataataatatgatttattcccagatgtttattttatatatcagtgactctcaccatattttacataattta

SEQ ID NO: 4822 - DNA, 120 bp, Artificial Sequence
  ENSG00000005801_39 (sequence is synthesized)
tctttatttagaaatataaggctattccttgcttctaaaagttggatggcagcattttaaatttgcataagaatagcatcggtatagtaaacatataataaaaattacctttagtatctc

SEQ ID NO: 4823 - DNA, 120 bp, Artificial Sequence
  ENSG00000005801_40 (sequence is synthesized)
ttagtcattaaaatgttctcagtagagtcttttcataatgattgtagtgcattttctgtgaaatgttactgctgtccactgcatgccagtgactcaaaatacctagttttcatgactaca

SEQ ID NO: 4824 - DNA, 120 bp, Artificial Sequence
  ENSG00000005801_41 (sequence is synthesized)
cagtcacagttgaatactgtagttatctaggcaaattcttttttaatggtacatcaatgtttcatagcagattttatgactaacatctcttagtgttttgtaattccatattactgtttt

SEQ ID NO: 4825 - DNA, 120 bp, Artificial Sequence
  ENSG00000005801_42 (sequence is synthesized)
tatggttgaataatattccttgtatgtatataccacattttttctgtgtgttcatcacttgaggcttcccccatttgacttttctgaatagtggtacagtaaacatgggtgtgcaaatat

SEQ ID NO: 4826 - DNA, 120 bp, Artificial Sequence
  ENSG00000005801_43 (sequence is synthesized)
ctcttctaagtcctgagttgctttgtatacttttgatatagatctagaaatgggattgctggatcatataattccatttttaatttttttaagaaaattatgctttttttttttttttta

SEQ ID NO: 4827 - DNA, 84 bp, Artificial Sequence
  ENSG00000005801_44 (sequence is synthesized)
ctcgagccttcttcccacttcagcctcctgaggacctggaactacaggggcacaccgccacacccagctaacttttgtgttttt

SEQ ID NO: 4828 - DNA, 75 bp, Artificial Sequence
  ENSG00000005801_45 (sequence is synthesized)
agccttcttcccacttcagcctcctgaggacctggaactacaggggcacaccgccacacccagctaacttttgtg

SEQ ID NO: 4829 - DNA, 120 bp, Artificial Sequence
  ENSG00000005801_46 (sequence is synthesized)
gaagtgctggggttccaggtgtgagctggtgtgaaccagtgtgcccggcctatgctatctttcatcgtggctgcatcctttctttcctaccagcaggttacgtggttttcaatgtcttca

SEQ ID NO: 4830 - DNA, 120 bp, Artificial Sequence
  ENSG00000005801_47 (sequence is synthesized)
catccttgacaggtctggattttttttttttactgtggccattctaataggtgtgaggaaatatcttaattgtgattttgttttgcatttctctatagataagtaatttgagcattcatt

SEQ ID NO: 4831 - DNA, 120 bp, Artificial Sequence
  ENSG00000005801_48 (sequence is synthesized)
caaggcttgttgggcgtttccatatcttttttggagagatttcagttagtccttcatctatttttaaatcaaattatttaatttttgttgtttagttgtaaaagttccttatatactctg

SEQ ID NO: 4832 - DNA, 120 bp, Artificial Sequence
  ENSG00000005801_49 (sequence is synthesized)
aatataaggatacactcctatcaaatgtgtgatttttacccatttcttaggtggtattttcacttcactcattgttttctttgatttgcagaaagtttgaagtttgatgtagttcagttt

SEQ ID NO: 4833 - DNA, 89 bp, Artificial Sequence
  ENSG00000005801_50 (sequence is synthesized)
ttgatttgcagaaagtttgaagtttgatgtagttcagtttttctgttcttttgttgcttatgcatttgctgtcctatattttcttctaa

SEQ ID NO: 4834 - DNA, 120 bp, Artificial Sequence
  ENSG00000005801_51 (sequence is synthesized)
cccagcctattctatttttatgtttttcatttaaaatatttttgtatatggtgcaaggaaaagataccacttcatttttccatgtagatatctggtttttaacatttgttgaaaggattc

SEQ ID NO: 4835 - DNA, 120 bp, Artificial Sequence
  ENSG00000005801_52 (sequence is synthesized)
ttttctccattgtgtggtcatggataccttgtggaaaattacttgattttatccacaagggtttatttctgggctctctgctttgtttcatcatttagttatctgtctttgtgtcagtac

SEQ ID NO: 4836 - DNA, 120 bp, Artificial Sequence
  ENSG00000005801_53 (sequence is synthesized)
cacattgtttttattttcgtagctctttatatgttttaaaatcagaaagtgtaatgcctctttgttctttttaaagaattttgactagttattgttcttaaactaattttagcattaaaa

SEQ ID NO: 4837 - DNA, 120 bp, Artificial Sequence
  ENSG00000005801_54 (sequence is synthesized)
aatcaaaaagtagctttgggaatttgatagagattacattgaatgtgtacattagtgtgggcagtattgacatctttaaaaaactaaattatctgaccattgagcaagaatgtgtatgtt

SEQ ID NO: 4838 - DNA, 120 bp, Artificial Sequence
  ENSG00000005801_55 (sequence is synthesized)
caagggttttaatttccatacatttttggcattgccagttttacttttgcttttgatttctagttttattacattttggttagaaaacatgtcatgagactttcatctttaagagttgtt

SEQ ID NO: 4839 - DNA, 120 bp, Artificial Sequence
  ENSG00000005801_56 (sequence is synthesized)
atttgttgtaacacaatgcactatgtgtatttgagaatattgtatattctgcttctttggactggagagttctatgcatgtctgttaaattgatttggtctgtaatgttgcccaagcttt

SEQ ID NO: 4840 - DNA, 120 bp, Artificial Sequence
  ENSG00000005801_57 (sequence is synthesized)
cttattgatcttctgtgtaattttctattctgtattgcaaatggggtcttagagttgataattattgtattgctgtgtacatcttgcttcacttctctccatatttgctttatatatctg

SEQ ID NO: 4841 - DNA, 120 bp, Artificial Sequence
  ENSG00000005801_58 (sequence is synthesized)
ggagccctgatgttagatataaatatagacagataaacagttacaggttcctggttaatgtacgcattttgccattacatgctattaatctttatctcctgtgacagttctgacttacag

SEQ ID NO: 4842 - DNA, 120 bp, Artificial Sequence
  ENSG00000005801_59 (sequence is synthesized)
tgtattgtgtctaatataaggataaccaccccacctgattgtggttactaattgcatggaatttttttttattttcactttcagcctattttactatttaaggctagagtcttttgtagc

SEQ ID NO: 4843 - DNA, 120 bp, Artificial Sequence
  ENSG00000005801_60 (sequence is synthesized)
tagcatattgttcttaatccattcagctattttatttctgttcaataagtaggttaatttatatttaaaataatttctgaaggaaatgaagttactatcaccatcttgattgttactgtt

SEQ ID NO: 4844 - DNA, 120 bp, Artificial Sequence
  ENSG00000005801_61 (sequence is synthesized)
ttctgtgtttcttgtagatatgttatccctcatttcctctttgactgtcttcatcgtttgttttgttgattttgtgtggacaagctttcattcttttctcattgtgttttgcagaccttg

SEQ ID NO: 4845 - DNA, 120 bp, Artificial Sequence
  ENSG00000005801_62 (sequence is synthesized)
tataggtattttcttttggatcaccttgaaaaatggagagtacataaaacaccttaaaattataaatacagattttaatctcacaacttcattgaatacaaaaactgtaacaccctccag

SEQ ID NO: 4846 - DNA, 120 bp, Artificial Sequence
  ENSG00000005801_63 (sequence is synthesized)
tgtgctgttaatgtaacaaattattatatattttgtgtctggtagcaaagatttatgcagatattttttcagatattatagcagaattttgaattttttacaccatcattatgatagtaa

SEQ ID NO: 4847 - DNA, 120 bp, Artificial Sequence
  ENSG00000005801_64 (sequence is synthesized)
agtattatatatctgcttatatacctttaacagagttttatattttcatatggttttataatgctgtctagcatcattgtcttttttaatacgatgaagtcttttgagtattttttctgt

SEQ ID NO: 4848 - DNA, 120 bp, Artificial Sequence
  ENSG00000005801_65 (sequence is synthesized)
atcagccaccatgcctacccaacctttagcatttcttgtagaactgtactagtggtggtgaacaccctcatctttttatttattttggaaagtctttattttccccctgttcttttgaag

SEQ ID NO: 4849 - DNA, 120 bp, Artificial Sequence
  ENSG00000005801_66 (sequence is synthesized)
tgaaattattctagatcaagtgttcttggttagtaacatttttatcatactgaaatttggaaagttaacaacctttttttcttcaaataatacctctactgcttttctgctatgtatttt

SEQ ID NO: 4850 - DNA, 120 bp, Artificial Sequence
  ENSG00000005801_67 (sequence is synthesized)
ttgtaagacttctttcatgaatatgttagtttagatcatagtgttcaataaatcccatactttagctattatatttgttttacagttttttctgtgttttatttttaaatctgtgctaca

SEQ ID NO: 4851 - DNA, 120 bp, Artificial Sequence
  ENSG00000005801_68 (sequence is synthesized)
ttctgttttattggtctatttgtctgcctttataccagtaccaaactgttttaattacggtcgccttgtaatgtgttttgaaatcagacagtgtgatacctccaacattgttcctctgtt

SEQ ID NO: 4852 - DNA, 120 bp, Artificial Sequence
  ENSG00000005801_69 (sequence is synthesized)
tgaaaattgttgggtgctttacagccccttgagatgtcttaggatttttaggttgttgcttttatttctgcaaaaagaggattcaaaatctgaaagagattgcctggagtttgtagattg

SEQ ID NO: 4853 - DNA, 120 bp, Artificial Sequence
  ENSG00000005801_70 (sequence is synthesized)
cattggacagcgtgaacatctttgcaatattaagtatttcaacctttgaacaagagcatgctcaaatgtgttgtttaatttccatatatttgtgattttttttgtttttctttgttattt

SEQ ID NO: 4854 - DNA, 120 bp, Artificial Sequence
  ENSG00000005801_71 (sequence is synthesized)
ccaggttcatttcattttggtcatatatagtaatgcagaagacttcaattttttgaaatttgttaagacttatttatttgtttaacaggtggcctatcctagagaatgttttctgagctc

SEQ ID NO: 4855 - DNA, 120 bp, Artificial Sequence
  ENSG00000005801_72 (sequence is synthesized)
ttgggaagagtgtgtctcctgctgtgttgtgtggagtgttctctctatatctgtgaggtggaattgttttgtagtgctttcaagtcctctctacaattattaagtcttgctttatcattt

SEQ ID NO: 4856 - DNA, 120 bp, Artificial Sequence
  ENSG00000005801_73 (sequence is synthesized)
attactgaaagtgggttgtagaagtatgccaatattatattgctgtctgtttcttgctttgatgctgtaattgtttataaagaacttgcaaaattgaagcaaaaaatagcagtataatag

SEQ ID NO: 4857 - DNA, 120 bp, Artificial Sequence
  ENSG00000005801_74 (sequence is synthesized)
gaagttacttcaatacctaaatatatatacgaatatgcacccacgcttgtcataggttcccagttcattctcccttctgttactgttttatgttcttgttttttgtgagctctgacttaa

SEQ ID NO: 4858 - DNA, 120 bp, Artificial Sequence
  ENSG00000005801_75 (sequence is synthesized)
agtatgttttaggaagtatgacattttttgacttaagatgtattttgcataatacaattgtaacctcttctgctctcatttcattaacatttgcatgaaatgtctatttccatcttgcca

SEQ ID NO: 4859 - DNA, 120 bp, Artificial Sequence
  ENSG00000005801_76 (sequence is synthesized)
ctttcagtctctttttgtcattagatctcaagtgaatctcttgtaggtcagctgtagtttgatcttagtttggttttaaattatttagcatatgccttttgattgagtagtttagttcct

SEQ ID NO: 4860 - DNA, 120 bp, Artificial Sequence
  ENSG00000005801_77 (sequence is synthesized)
aaataagcaatttactgaaatgaaaagatgtactttagccattgtattttttttacttgattcttgtagctttttctttctctctttcctttttgtgtcttgtactttgtataataagct

SEQ ID NO: 4861 - DNA, 120 bp, Artificial Sequence
  ENSG00000005801_78 (sequence is synthesized)
ttgactctttttaaattttcttttgtgtgtcttataggtattttctttgtggttaccatggaaattatataaaacatcttaaagttacaacaaggtattttacactggtaaatacttaac

SEQ ID NO: 4862 - DNA, 120 bp, Artificial Sequence
  ENSG00000005801_79 (sequence is synthesized)
tttagttgtatacaaaaattctttcttattaaatctgccctcaactttgttactgatatccctaaatcatttaatgttgtatatccattaacagttatttatgattatttttctactttc

SEQ ID NO: 4863 - DNA, 120 bp, Artificial Sequence
  ENSG00000005801_80 (sequence is synthesized)
atctttcaaattttagataataattaaaagtgatttctgcaccatcattatagtaccacagaattttatttttctgtatatgcgtatcttttccatatatttattttgatatgattatat

SEQ ID NO: 4864 - DNA, 120 bp, Artificial Sequence
  ENSG00000005801_81 (sequence is synthesized)
attattttatagcatcgcattattttcagtggaaaggactccttttaccatttcttgtttgacatgtgtagtggtaatgtagcccttggttatgttagaaagcctttattttttatgatt

SEQ ID NO: 4865 - DNA, 120 bp, Artificial Sequence
  ENSG00000005801_82 (sequence is synthesized)
ttgtaggacactggttatattattcttgcttggaagttttgtgttcagcaattagactatctcatccaattcccttcttgcttcaggttgtactttttttgagacagggatttattctgt

SEQ ID NO: 4866 - DNA, 120 bp, Artificial Sequence
  ENSG00000005801_83 (sequence is synthesized)
cactcaggctggaagtgcagtggtgtgatcgtggctcactgcggcctccacttcccaggttcaggtgattctcccactccagccttctgagtagttgggactacaagtgtgcaacagcat

SEQ ID NO: 4867 - DNA, 120 bp, Artificial Sequence
  ENSG00000005801_84 (sequence is synthesized)
ttgacagctatgtcttctcattttacccaagaccttctgccagagcagggcatacaagatgcattcccaaaaagaatactgagaggatatggaaattgtggccttgataatttatattta

SEQ ID NO: 4868 - DNA, 120 bp, Artificial Sequence
  ENSG00000005801_85 (sequence is synthesized)
actctactaagcacagtacaaggttgataattggagaatttcagcaagagtaatgtcacttttttctaataaaacaggtctcactgtctgtaagccaggcctgatcacctgcctggagca

SEQ ID NO: 4869 - DNA, 120 bp, Artificial Sequence
  ENSG00000005801_86 (sequence is synthesized)
ggtctcactgtctgtaagccaggcctgatcacctgcctggagcaacgaaaagagccctggaatgtgaagagacaggaggcagcagacggacatccaggttgtactttttttgagacaggg

SEQ ID NO: 4870 - DNA, 120 bp, Artificial Sequence
  ENSG00000005801_87 (sequence is synthesized)
gtcccctgctagccgtaggtcgtgtgacccgcaggcaccgggagatccagaagtgaaacgccaggctctctggaggccaggagatgtttcagtattgtccagggataacacaggatgccc

SEQ ID NO: 4871 - DNA, 120 bp, Artificial Sequence
  ENSG00000005801_88 (sequence is synthesized)
caagatgctgcttttattcccttcagttattatatacacagaagtgtgattgctgcgttgcagggaccaagtgttgaagagactatactgtctgtattgtatcttcttcgtgaacttgtg

SEQ ID NO: 4872 - DNA, 74 bp, Artificial Sequence
  ENSG00000005801_89 (sequence is synthesized)
gactatactgtctgtattgtatcttcttcgtgaacttgtgaaagattaagtttcactctatcacccaggctgtc

SEQ ID NO: 4873 - DNA, 120 bp, Artificial Sequence
  ENSG00000005801_90 (sequence is synthesized)
cagggtaggtttatctttttctaacttttaaataacgcccccccaccctggttttcataatgactctaccagttgagaactctgagcgttcagaattgttttttctttacatccttatca

SEQ ID NO: 4874 - DNA, 120 bp, Artificial Sequence
  ENSG00000005801_91 (sequence is synthesized)
agagctccacttcctgtccccgcggctctgtgtcccctgctagccgtaggtcgtgtgacccgcaggcaccgggagatccagaagtgaaacgccaggctctctggaggccaggagatgcca

SEQ ID NO: 4875 - DNA, 120 bp, Artificial Sequence
  ENSG00000005801_92 (sequence is synthesized)
ttaggaaaacagagaaggcagccatggtccccgcaagccagaaacttttccatttccagtaactggataaatcattgaattcagcgtcttggggtcagcatgaagaagggagtggtcaaa

SEQ ID NO: 4876 - DNA, 120 bp, Artificial Sequence
  ENSG00000005801_93 (sequence is synthesized)
ttgcagggtattttctttgtggttaccatggaaattatataaaacatcttaaagttacaacaaggttgtactttttttgagacagggatttattctgtcactcaggctggaagtgcagtg

SEQ ID NO: 4877 - DNA, 120 bp, Artificial Sequence
  ENSG00000005810_0 (sequence is synthesized)
agcttcccattgcgggtagccccggcggtggtggcggtggtagcggtggtggcggcggcagtggcggcaccgcctcctcctcacattcccggggtggcggggttagatgagcggccccag

SEQ ID NO: 4878 - DNA, 120 bp, Artificial Sequence
  ENSG00000005810_1 (sequence is synthesized)
tagcggcgagggcggcgcgggggggaggaggagaagaaggaggaggagaaggaggtcgctgtctttgtagtctccctgctgcgggagccagaggccgccgccggagccgtcgtcgttgga

SEQ ID NO: 4879 - DNA, 120 bp, Artificial Sequence
  ENSG00000005810_2 (sequence is synthesized)
tcgttggaaaagggctgtgtgtgcgcgcgcgtgtctgcccgcccggcccgcggggacgaggcggcggcggcggcggcggcggcgaggatgatgatgtgcgcagcgactgcctcccccgcc

SEQ ID NO: 4880 - DNA, 120 bp, Artificial Sequence
  ENSG00000005810_3 (sequence is synthesized)
ctcggggctcggcggggacggattctacccagccgccaccttctcttcctccccggcgccgggggcgctgttcatgccggttcccgacggctccgtggctgctgcggggctggggctggg

SEQ ID NO: 4881 - DNA, 120 bp, Artificial Sequence
  ENSG00000005810_4 (sequence is synthesized)
gctacccgccgcggactcccggggtcactaccagctgctgctgtcaggccgggccctggccgaccgctaccggaggatttataccgctgcgctcaatgacagggaccaggggggcggcag

SEQ ID NO: 4882 - DNA, 120 bp, Artificial Sequence
  ENSG00000005810_5 (sequence is synthesized)
cgctggacacccagcctccaggaataagaaaattttaaataagaagaaattgaaaagaaaacagaagagcaaatcaaaagtgaagacaagaagcaagtctgaaaacttagagaatacagt

SEQ ID NO: 4883 - DNA, 120 bp, Artificial Sequence
  ENSG00000005810_6 (sequence is synthesized)
aatcataccagatatcaaactacatagcaatccttctgctttcaatatttactgtaatgtacgccattgcgttctggaatggcagaaaaaggaaatatcattggcagccgcatctaagaa

SEQ ID NO: 4884 - DNA, 120 bp, Artificial Sequence
  ENSG00000005810_7 (sequence is synthesized)
ctctgtgcagagtggagaatcagatagtgatgaagaagaggaatccaaagagccccctatcaagcttccaaagattattgaggttggcctttgtgaagtttttgaattgatcaaagagac

SEQ ID NO: 4885 - DNA, 120 bp, Artificial Sequence
  ENSG00000005810_8 (sequence is synthesized)
acgattttctcatccatccctgtgtctcaggagtctccaagccctgctcaacgtgctgcagggccagcagccagaaggcctccagtctgagccacctgaggtcctagagtctctcttcca

SEQ ID NO: 4886 - DNA, 120 bp, Artificial Sequence
  ENSG00000005810_9 (sequence is synthesized)
gcttcttttggaaatcaccgttcgaagtactgggatgaatgacagcacaggacagtccttaacagcactttcctgtgcttgcctctttagtctggtggcttcttggggagaaacaggaag

SEQ ID NO: 4887 - DNA, 120 bp, Artificial Sequence
  ENSG00000005810_10 (sequence is synthesized)
gacacttcaggccatctctgctatcctcaccaacaatggaagccatgcttgccaaactattcaggtgccaacaattctaaattcgctacagagaagtgtacaagcagttttggtgggaaa

SEQ ID NO: 4888 - DNA, 120 bp, Artificial Sequence
  ENSG00000005810_11 (sequence is synthesized)
aattcaaattcaggactggtttagtaatggcattaagaaagcagctttaatgcacaagtggccattaaaagaaatatctgttgatgaagatgaccaatgtctacttcagaatgatggatt

SEQ ID NO: 4889 - DNA, 120 bp, Artificial Sequence
  ENSG00000005810_12 (sequence is synthesized)
ttttctttatctattatgcaaggatggattatataaaataggctctggatacagtggaacagttaggggccatatatacaattctacatcccgtattagaaacagaaaagaaaaaaagtc

SEQ ID NO: 4890 - DNA, 120 bp, Artificial Sequence
  ENSG00000005810_13 (sequence is synthesized)
ttggttagggtatgctcagggttatttattatatagagatgtgaataaccacagcatgacagccataaggataagccctgaaacactggagcaagatggtactgtgatgttaccagattg

SEQ ID NO: 4891 - DNA, 120 bp, Artificial Sequence
  ENSG00000005810_14 (sequence is synthesized)
ccacactgaaggtcaaaatattttattcactgatggagaatatattaatcagatagctgcttcaagagatgatggctttgttgtcagaatatttgccacaagcactgaacctgttctaca

SEQ ID NO: 4892 - DNA, 120 bp, Artificial Sequence
  ENSG00000005810_15 (sequence is synthesized)
gcaagaattgcaacttaaactggctagaaaatgcttacatgcctgtggtatctcactattcgatctggaaaaggacttgcatattataagtacaggatttgatgaggagtcagcaattct

SEQ ID NO: 4893 - DNA, 120 bp, Artificial Sequence
  ENSG00000005810_16 (sequence is synthesized)
tggtgcaggacgagagtttgcgctaatgaaaacagcaaatggaaagatatattacactggcaaataccagagtcttggaatcaaacaaggtggtccttcagcaggaaaatgggttgagct

SEQ ID NO: 4894 - DNA, 120 bp, Artificial Sequence
  ENSG00000005810_17 (sequence is synthesized)
accaattacaaaatctccaaagatagtacacttctcagttggacacgatggctctcacgcccttttagttgcagaagatgggagcatattctttacaggatctgctagtaaaggagaaga

SEQ ID NO: 4895 - DNA, 120 bp, Artificial Sequence
  ENSG00000005810_18 (sequence is synthesized)
tggagaatcaactaagagcagacggcaatccaaaccttataaacctaaaaagataattaagatggaaggaaagattgtggtatatacagcctgcaataatggaagtagttctgttatttc

SEQ ID NO: 4896 - DNA, 120 bp, Artificial Sequence
  ENSG00000005810_19 (sequence is synthesized)
taaagatggagaactctacatgtttggaaaagatgccatttactctgatagttcaagtttggtaactgatttgaagggccattttgtaactcaggtagctatgggcaaagctcacacttg

SEQ ID NO: 4897 - DNA, 120 bp, Artificial Sequence
  ENSG00000005810_20 (sequence is synthesized)
tgttttaatgaagaatggagaggtgtggacatttggtgtaaataataaaggacagtgtggacgagatactggtgccatgaaccaaggtgggaaagggtttggagttgaaaatatggcaac

SEQ ID NO: 4898 - DNA, 120 bp, Artificial Sequence
  ENSG00000005810_21 (sequence is synthesized)
agcaatggatgaagacctggaagaagaactagatgaaaaagatgagaagtctatgatgtgccctccaggcatgcacaaatggaagctggagcagtgcatggtttgcactgtctgtggaga

SEQ ID NO: 4899 - DNA, 120 bp, Artificial Sequence
  ENSG00000005810_22 (sequence is synthesized)
ctgtacaggttatggagccagctgtgtcagtagtggacggccagacagagtccccggagggatctgtggttgtggttccggagaatctggttgtgctgtgtgtggatgttgcaaggcctg

SEQ ID NO: 4900 - DNA, 120 bp, Artificial Sequence
  ENSG00000005810_23 (sequence is synthesized)
tgcaagagagttagatggtcaagaggcaagacaaagaggaattcttgatgcagtgaaagaaatgatacctttagatcttcttttagctgtcccagtgcccggggttaacattgaagaaca

SEQ ID NO: 4901 - DNA, 120 bp, Artificial Sequence
  ENSG00000005810_24 (sequence is synthesized)
ccttcagttacgacaagaagaaaaacggcaacgtgtaatcagaaggcacagattagaggaaggaagaggcccccttgtatttgctggtcctatttttatgaaccatcgagaacaggctct

SEQ ID NO: 4902 - DNA, 120 bp, Artificial Sequence
  ENSG00000005810_25 (sequence is synthesized)
agccagactcagatcccatccagcacagctaaagcataaacgggacaagcacaaagatggaagtggagaaagaggcgaaaaggatgcaagcaaaatcacaacataccctccaggctctgt

SEQ ID NO: 4903 - DNA, 120 bp, Artificial Sequence
  ENSG00000005810_26 (sequence is synthesized)
gcgatttgactgtgagctccgggcagtccaagtcagctgtggatttcaccattcagtggttttaatggaaaatggagatgtctatacatttggttatgggcagcatgggcagctaggaca

SEQ ID NO: 4904 - DNA, 120 bp, Artificial Sequence
  ENSG00000005810_27 (sequence is synthesized)
tggagatgtcaactccaggggatgtcccactcttgttcaagcattgccaggccctagcacacaagtcactgcaggcagcaaccatacggcagtacttttaatggatggacaggtcttcac

SEQ ID NO: 4905 - DNA, 120 bp, Artificial Sequence
  ENSG00000005810_28 (sequence is synthesized)
atttggaagtttttctaaaggacaactgggcagaccaattttggatgtgccatattggaatgcaaagccagctcccatgcctaacattggatcaaaatatggaagaaaagctacttggat

SEQ ID NO: 4906 - DNA, 120 bp, Artificial Sequence
  ENSG00000005810_29 (sequence is synthesized)
aggtgcaagtggggaccaaacttttttacgaattgatgaagcacttattaattctcatgtacttgctacatcagaaatttttgccagtaaacacataataggcttggtacctgcttctat

SEQ ID NO: 4907 - DNA, 120 bp, Artificial Sequence
  ENSG00000005810_30 (sequence is synthesized)
atcagaacctcctccatttaaatgccttctgataaataaagtggatgggagttgtaaaacttttaatgactcagaacaagaggatctgcaaggatttggtgtgtgtcttgatcctgtata

SEQ ID NO: 4908 - DNA, 120 bp, Artificial Sequence
  ENSG00000005810_31 (sequence is synthesized)
tgatgtaatttggaggtttcgaccaaatactagagagctgtggtgttacaatgcggtggttgctgatgccaggcttccctctgcagcagacatgcagtccagatgtagtatcctaagtcc

SEQ ID NO: 4909 - DNA, 120 bp, Artificial Sequence
  ENSG00000005810_32 (sequence is synthesized)
tgaacttgccttaccaacaggatcaagggccctcactacccgatctcatgcagctttgcacattttaggttgtcttgataccttggcagctatgcaggacttaaaaatgggtgttgcaag

SEQ ID NO: 4910 - DNA, 120 bp, Artificial Sequence
  ENSG00000005810_33 (sequence is synthesized)
tacagaggaagagactcaagcagtaatgaaggtttattctaaagaagattatagtgtggtaaacaggtttgaaagtcatggaggaggctggggttattctgcccattcagtagaagctat

SEQ ID NO: 4911 - DNA, 120 bp, Artificial Sequence
  ENSG00000005810_34 (sequence is synthesized)
acgtttcagtgccgacactgatattttacttggtggtcttggtctgtttggaggtagaggagaatatactgctaaaattaagctgtttgaattgggtcctgatggaggagatcatgaaac

SEQ ID NO: 4912 - DNA, 120 bp, Artificial Sequence
  ENSG00000005810_35 (sequence is synthesized)
tgatggtgaccttcttgcagagactgatgtattggcttatgactgtgctgctagagaaaaatatgcaatgatgtttgatgagcctgttctcctgcaagctgggtggtggtatgtggcatg

SEQ ID NO: 4913 - DNA, 120 bp, Artificial Sequence
  ENSG00000005810_36 (sequence is synthesized)
ggcccgagtgtcaggacccagcagtgactgtggatctcatggacaggcatctattaccacagatgatggggttgttttccagttcaagagttcaaagaaatcaaataatggtacagatgt

SEQ ID NO: 4914 - DNA, 120 bp, Artificial Sequence
  ENSG00000005810_37 (sequence is synthesized)
taatgcgggtcagatacctcagttattatacagacttccaaccagtgatggcagtgcttcaaaaggcaaacagcaaaccagtgaacctgtacacattttaaagaggtcttttgcaagaac

SEQ ID NO: 4915 - DNA, 120 bp, Artificial Sequence
  ENSG00000005810_38 (sequence is synthesized)
tgtctcagtggaatgttttgagtcattgttgagtattcttcactggagctggaccaccttagtcttaggagttgaagaacttagaggattaaaaggattccagttcacagctacactcct

SEQ ID NO: 4916 - DNA, 120 bp, Artificial Sequence
  ENSG00000005810_39 (sequence is synthesized)
agatttagagagactgcgctttgtgggtacctgttgtctgaggttattgcgtgtctatacctgtgaaatttacccagtgtcagctacaggaaaagcagttgtagaagaaactagcaaatt

SEQ ID NO: 4917 - DNA, 120 bp, Artificial Sequence
  ENSG00000005810_40 (sequence is synthesized)
agcagagtgtattggaaaaaccagaactttgttaagaaaaattttatcagaaggagttgatcactgcatggtgaaattggataatgatcctcaaggatatctcagtcaacccttgagtct

SEQ ID NO: 4918 - DNA, 120 bp, Artificial Sequence
  ENSG00000005810_41 (sequence is synthesized)
tctagaagctgtccttcaggaatgtcataatactttcactgcctgctttcattctttctacccaactcctgccttacagtgggcttgcctttgtgatctgctgaattgtttggatcagga

SEQ ID NO: 4919 - DNA, 120 bp, Artificial Sequence
  ENSG00000005810_42 (sequence is synthesized)
tatccaagaagcaaacttcaagacatcaagtagccgactccttgcagctgttatgtcagctctgtgtcacacgtctgttaagctgacttccatcttcccgattgcgtatgatggagaagt

SEQ ID NO: 4920 - DNA, 120 bp, Artificial Sequence
  ENSG00000005810_43 (sequence is synthesized)
attactacgatcaattgttaaacaagttagtacagagaacgactcaacactagttcatcgttttccccttttggtggcacatatggaaaaactcagccagagtgaagagaatatctcagg

SEQ ID NO: 4921 - DNA, 120 bp, Artificial Sequence
  ENSG00000005810_44 (sequence is synthesized)
gatgacaagcttccgtgaagttctggagaaaatgctggtcattgttgtgctaccagtcaggaacagcctgaggagagaaaatgaactcttctcctcccacctcgtctctaacacctgtgg

SEQ ID NO: 4922 - DNA, 120 bp, Artificial Sequence
  ENSG00000005810_45 (sequence is synthesized)
attactggccagcattgtcagtgaactgacagcgtcagccctgggatctgaggttgatggacttaattctcttcactctgtaaaagctagtgctaaccgatttacaaaaacaagtcaggg

SEQ ID NO: 4923 - DNA, 120 bp, Artificial Sequence
  ENSG00000005810_46 (sequence is synthesized)
cagaagttggaacactgggaacgggtcccctgatgcaatctgtttttcagtagacaaacctggaatagttgtggttggtttctctgtctatggaggaggtggaattcatgaatatgaatt

SEQ ID NO: 4924 - DNA, 120 bp, Artificial Sequence
  ENSG00000005810_47 (sequence is synthesized)
agaggtgttggttgatgatagtgaacatgcaggagattcaactcattcccacagatggacatctctggaattagtgaaaggaacgtacacaacggatgactcacccagtgatatagctga

SEQ ID NO: 4925 - DNA, 120 bp, Artificial Sequence
  ENSG00000005810_48 (sequence is synthesized)
gatcagacttgacaaagtggttcctttaaaggaaaatgttaaatatgctgtgcgcttgaggaactatggaagccgtacagccaatggagatggaggaatgaccacagttcagtgccctga

SEQ ID NO: 4926 - DNA, 120 bp, Artificial Sequence
  ENSG00000005810_49 (sequence is synthesized)
tggtgtgacattcacattcagcacgtgcagcttgagcagtaacggcacaaaccaaaccagaggacagatcccacagatactctactataggagtgaatttgatggagatttacaatccca

SEQ ID NO: 4927 - DNA, 120 bp, Artificial Sequence
  ENSG00000005810_50 (sequence is synthesized)
acttctgagtaaagccaatgaagaagataaaaactgtagcagagcattgtctgttgtaagcactgtcgttcgagcctctaaggacctcctgcacagagctcttgctgtggatgctgatga

SEQ ID NO: 4928 - DNA, 120 bp, Artificial Sequence
  ENSG00000005810_51 (sequence is synthesized)
cattccagaactgctgagttcttccagtctgttttccatgctgctcccccttattatagcctacataggaccagtagctgctgctattcccaaggtggctgtagaagtctttggccttgt

SEQ ID NO: 4929 - DNA, 120 bp, Artificial Sequence
  ENSG00000005810_52 (sequence is synthesized)
ccaacaattgcttccgtcagttgccattttgaatcagaagtatgcaccgcctgccttcaaccctaatcagtcgacagatagcaccacaggaaaccagcctgaacagggcctctctgcttg

SEQ ID NO: 4930 - DNA, 120 bp, Artificial Sequence
  ENSG00000005810_53 (sequence is synthesized)
tacaacctccagtcactatgctgtcatagagagtgagcacccgtataaacctgcctgtgtgatgcattacaaggtgacattcccagaatgtgtgaggtggatgacaatcgaatttgaccc

SEQ ID NO: 4931 - DNA, 120 bp, Artificial Sequence
  ENSG00000005810_54 (sequence is synthesized)
tcagtgtggtactgcacagtcagaagatgtccttcgtttgttgattcctgtcagaactgttcagaattcaggatatggaccaaaattgacatctgttcatgaaaatcttaattcatggat

SEQ ID NO: 4932 - DNA, 120 bp, Artificial Sequence
  ENSG00000005810_55 (sequence is synthesized)
agaattaaagaaattttcaggatcctctgggtggcctactatggttttggtgttgccaggaaatgaggcccttttttcattggagactgcatcagattatgtgaaagatgacaaagcttc

SEQ ID NO: 4933 - DNA, 120 bp, Artificial Sequence
  ENSG00000005810_56 (sequence is synthesized)
tttctatggttttaagtgttttgcaattggatatgaatttagccctggacctgatgagggagtcatccaattggaaaaagaattagccaatcttggtggggtttgtgcagcagctctgat

SEQ ID NO: 4934 - DNA, 120 bp, Artificial Sequence
  ENSG00000005810_57 (sequence is synthesized)
gaagaaggacctagcacttcctattggtaatgaattagaagaagaccttgaaattcttgaggaggctgcattgcaggtgtgcaaaacccattctggaattcttggaaagggtctagctct

SEQ ID NO: 4935 - DNA, 120 bp, Artificial Sequence
  ENSG00000005810_58 (sequence is synthesized)
ttctcattcaccaactatattagaagcacttgagggaaatttaccactccaaatccaaagcaatgaacagtcttttctggatgattttattgcctgtgtcccaggatcaagtggtggaag

SEQ ID NO: 4936 - DNA, 120 bp, Artificial Sequence
  ENSG00000005810_59 (sequence is synthesized)
gcttgcaaggtggcttcagccagattcatatgcggatcctcagaaaacatctttgatcctgaataaggatgatattcgttgtggttggcctaccaccataactgttcaaacaaaagacca

SEQ ID NO: 4937 - DNA, 120 bp, Artificial Sequence
  ENSG00000005810_60 (sequence is synthesized)
gtatggggatgtggtacatgttcccaatatgaaggtggaagtgaaagctgtccctgtttctcagaaaaaaatgtctttacaacaagatcaagcaaagaaacctcaaaggattcctggcag

SEQ ID NO: 4938 - DNA, 120 bp, Artificial Sequence
  ENSG00000005810_61 (sequence is synthesized)
tcctgcagtaacagctgcatcttctaatactgacatgacttatggagggctggcatcaccaaagctagatgtttcatatgaaccaatgatagtgaaggaagctcgatatattgccataac

SEQ ID NO: 4939 - DNA, 120 bp, Artificial Sequence
  ENSG00000005810_62 (sequence is synthesized)
atatgctgatccgtgtcaataatgatgggacttattgtgcaaattggactccaggggctattggactctacactcttcatgttaccattgatggcattgaaatcgatgctggtctggaag

SEQ ID NO: 4940 - DNA, 120 bp, Artificial Sequence
  ENSG00000005810_63 (sequence is synthesized)
taaaagtaaaagacccaccaaaagggatgataccaccaggaactcagttggtcaaaccaaagtctgaacctcagcctaataaggttcgaaaatttgtggccaaggacagtgcggggcttc

SEQ ID NO: 4941 - DNA, 120 bp, Artificial Sequence
  ENSG00000005810_64 (sequence is synthesized)
gcatccgtagccacccttcccttcagagtgagcagataggcatagtgaaagtcaatggaactatcacttttattgatgagatccataatgatgatggtgtgtggctgaggctgaatgatg

SEQ ID NO: 4942 - DNA, 120 bp, Artificial Sequence
  ENSG00000005810_65 (sequence is synthesized)
agacaataaagaagtatgtccctaacatgaatggttacactgaagcctggtgcctctcttttaatcaacatcttggcaagagtcttctggtccctgttgacgaatctaaaactaatactg

SEQ ID NO: 4943 - DNA, 120 bp, Artificial Sequence
  ENSG00000005810_66 (sequence is synthesized)
atgactttttcaaagacataaactcctgctgcccacaggaagcaacaatgcaagaacaagatatgccattcttgcgaggagggccaggcatgtacaaggtagtgaagacgggaccttcag

SEQ ID NO: 4944 - DNA, 120 bp, Artificial Sequence
  ENSG00000005810_67 (sequence is synthesized)
gtcacaacatcagaagctgccctaaccttagaggtatcccaattggaatgttagttctgggaaacaaagtcaaagcagtgggagaggtaaccaattctgaagggacatgggtgcaactgg

SEQ ID NO: 4945 - DNA, 120 bp, Artificial Sequence
  ENSG00000005810_68 (sequence is synthesized)
atcagaacagcatggtagagttctgtgagagtgatgaaggagaggcatggtccttagctagagacagaggcggaaaccagtacctccgacatgaagatgaacaagctcttctggatcaga

SEQ ID NO: 4946 - DNA, 120 bp, Artificial Sequence
  ENSG00000005810_69 (sequence is synthesized)
attctcaaactcctcctccaagccctttctcagtgcaagcttttaataaaggggcaagttgcagtgcccaaggatttgattatggactcggaaatagcaaaggtgatcgaggaaacatct

SEQ ID NO: 4947 - DNA, 120 bp, Artificial Sequence
  ENSG00000005810_70 (sequence is synthesized)
caacatcttctaaaccagcctctacatcaggaaaatcagagctgtcctctaaacacagcagatcgcttaaacctgatggacgtatgagccggactactgctgatcagaagaagccaaggg

SEQ ID NO: 4948 - DNA, 120 bp, Artificial Sequence
  ENSG00000005810_71 (sequence is synthesized)
gcacagaaagtttatctgctagtgaatccctcatcttaaaatctgatgctgcaaagttgaggtcagattcccacagtaggtcattatcccccaaccataacaccttgcagacattgaaat

SEQ ID NO: 4949 - DNA, 120 bp, Artificial Sequence
  ENSG00000005810_72 (sequence is synthesized)
ctgatgggaggatgccttctagctccagagctgaatccccaggaccaggttctcggttgtcatctcctaagccaaagactctcccagccaataggtctagcccatcgggtgctagttctc

SEQ ID NO: 4950 - DNA, 120 bp, Artificial Sequence
  ENSG00000005810_73 (sequence is synthesized)
cacgctcctcctcaccacatgataaaaatctacctcaaaaaagtactgctcctgttaagacaaagcttgatcctcctcgggaacgttctaaatcagactcttacacacttgatccagata

SEQ ID NO: 4951 - DNA, 120 bp, Artificial Sequence
  ENSG00000005810_74 (sequence is synthesized)
ccctccgcaagaagaaaatgcccctcacagaacctttgagaggacggtcaacgtcaccaaaaccaaaatcagtaccaaaggattctacagattcccctggatctgaaaatagagctccct

SEQ ID NO: 4952 - DNA, 120 bp, Artificial Sequence
  ENSG00000005810_75 (sequence is synthesized)
ctccccatgtggtacaggaaaacctccacagtgaggtggtcgaagtctgcacctcaagtactttaaaaacaaatagtctaacagacagcacctgcgatgacagcagtgaatttaagagtg

SEQ ID NO: 4953 - DNA, 120 bp, Artificial Sequence
  ENSG00000005810_76 (sequence is synthesized)
tggatgaaggttcaaataaagttcattttagcattggaaaagcaccactgaaagatgaacaggaaatgagagcatctcccaaaataagtcgaaaatgtgctaatagacacaccaggccca

SEQ ID NO: 4954 - DNA, 120 bp, Artificial Sequence
  ENSG00000005810_77 (sequence is synthesized)
aaaaagaaaaatcgagttttcttttcaaaggagatggatccaagcctttagagccagccaagcaagccatgtctccttctgtggccgaatgtgccagagctgtgtttgcttccttcctct

SEQ ID NO: 4955 - DNA, 120 bp, Artificial Sequence
  ENSG00000005810_78 (sequence is synthesized)
ggcatgaaggcatagtacatgatgcaatggcttgttcttctttcctaaagtttcatcctgaactttccaaagaacatgctcctataaggagtagtttaaatagccaacaacctacagagg

SEQ ID NO: 4956 - DNA, 120 bp, Artificial Sequence
  ENSG00000005810_79 (sequence is synthesized)
aaaaagaaaccaagttaaaaaatagacattcattagaaatatcatctgcactgaatatgtttaatattgcaccccatggaccagatatatctaagatgggtagcatcaacaaaaacaagg

SEQ ID NO: 4957 - DNA, 120 bp, Artificial Sequence
  ENSG00000005810_80 (sequence is synthesized)
tattgtctatgcttaaggaaccacctctgcatgaaaaatgtgaggatgggaaaaccgagaccacttttgaaatgtccatgcataacacaatgaagtctaagtctcctcttcccttaactt

SEQ ID NO: 4958 - DNA, 120 bp, Artificial Sequence
  ENSG00000005810_81 (sequence is synthesized)
tacaacatttagtggctttttgggaagacatctctttggctactatcaaagctgcttcccagaatatgatttttccaagtcctggttcctgtgcagttcttaaaaagaaagagtgtgaga

SEQ ID NO: 4959 - DNA, 120 bp, Artificial Sequence
  ENSG00000005810_82 (sequence is synthesized)
aagagaataagaagtccaaaaaggaaaaaaagaaaaaagaaaaggcagaagttaggcccaggggtaatttgtttggagagatggcccagctggcagtaggaggaccagagaaagatacca

SEQ ID NO: 4960 - DNA, 120 bp, Artificial Sequence
  ENSG00000005810_83 (sequence is synthesized)
tctgtgaactgtgtggggagtcacatccatacccggtgacctatcacatgagacaagctcacccaggttgtggccgatatgctggtggacaaggttacaatagcattgggcatttttgtg

SEQ ID NO: 4961 - DNA, 120 bp, Artificial Sequence
  ENSG00000005810_84 (sequence is synthesized)
gaggatgggctggtaactgtggtgatggtggcataggaggaagcacttggtatctggtatgtgatcgctgtagagaaaaatacctccgcgaaaaacaggctgctgcaagggagaaggtca

SEQ ID NO: 4962 - DNA, 120 bp, Artificial Sequence
  ENSG00000005810_85 (sequence is synthesized)
aacaatctaggagaaaaccaatgcaagtcaagacccctcgtgccttgcccaccatggaagctcaccaggtgattaaagccaatgcactcttcctgctgtccctgagcagtgcagcagaac

SEQ ID NO: 4963 - DNA, 120 bp, Artificial Sequence
  ENSG00000005810_86 (sequence is synthesized)
cgagcattctgtgttaccatcctgcaaagccattccaatctcagttgcccagtgtaaaagaaggcatttctgaggatcttcctgtgaaaatgccttgtctctacctgcagacattagcta

SEQ ID NO: 4964 - DNA, 120 bp, Artificial Sequence
  ENSG00000005810_87 (sequence is synthesized)
ggcatcatcatgaaaattttgtgggctatcaagatgacaatctattccaggatgaaatgagatatctacgttcaacatctgtacctgccccgtatatatcagtaactcctgatgcaagtc

SEQ ID NO: 4965 - DNA, 120 bp, Artificial Sequence
  ENSG00000005810_88 (sequence is synthesized)
ctaatgtatttgaagagccagagagcaatatgaagtctatgccaccaagtttagaaaccagtcccataactgatactgatcttgcaaagagaactgtcttccaaagatcatactcagttg

SEQ ID NO: 4966 - DNA, 120 bp, Artificial Sequence
  ENSG00000005810_89 (sequence is synthesized)
ttgcttccgaatatgataaacaacactccattttacctgcacgagttaaagctattcctagaagaagagttaacagtggagacactgaagttggttcttcccttttgagacatccgtctc

SEQ ID NO: 4967 - DNA, 120 bp, Artificial Sequence
  ENSG00000005810_90 (sequence is synthesized)
ctgagctttctcggctaatctcagcccacagctctctttctaaaggagaacgaaatttccagtggccagttttagcttttgttatacaacatcatgatctagaaggtcttgaaatagcaa

SEQ ID NO: 4968 - DNA, 120 bp, Artificial Sequence
  ENSG00000005810_91 (sequence is synthesized)
tgaaacaggccctaaggaaatctgcttgtcgagtttttgctatggaggctttcaactggcttctgtgtaatgtcatccaaaccacttctctccatgatattctgtggcattttgtggcat

SEQ ID NO: 4969 - DNA, 120 bp, Artificial Sequence
  ENSG00000005810_92 (sequence is synthesized)
cactgactcctgcaccagtggaaccagaggaagaagaggatgaagaaaataaaacaagcaaagaaaattcagaacaagagaaagatacaagagtatgtgaacatccactctcagacatag

SEQ ID NO: 4970 - DNA, 120 bp, Artificial Sequence
  ENSG00000005810_93 (sequence is synthesized)
tgattgccggggaagctgctcatcctttaccacacacctttcaccgcttgctgcagaccatctcagaccttatgatgtctctccccagcggcagttcattacagcaaatggccctgaggt

SEQ ID NO: 4971 - DNA, 120 bp, Artificial Sequence
  ENSG00000005810_94 (sequence is synthesized)
gctggagtctcaaattcaagcaatctgatcaccagttccttcatcagagcaacgtctttcatcacattaacaatattttgtcaaagtcagatgatggcgatagtgaagagagttttagca

SEQ ID NO: 4972 - DNA, 120 bp, Artificial Sequence
  ENSG00000005810_95 (sequence is synthesized)
tcagtatacagtctggctttgaagctatgagtcaggaattatgcatagtaatgtgcttaaaggacttaaccagcattgttgacataaaaacttcaagccgacctgccatgattggcagtt

SEQ ID NO: 4973 - DNA, 120 bp, Artificial Sequence
  ENSG00000005810_96 (sequence is synthesized)
tgacagacggctccacagaaaccttttgggaatcaggagatgaagataaaaacaaaactaagaacatcaccatcaactgtgtaaaaggaatcaatgcccgctatgtgtctgttcacgtgg

SEQ ID NO: 4974 - DNA, 120 bp, Artificial Sequence
  ENSG00000005810_97 (sequence is synthesized)
acaattcccgagatcttgggaataaagttacctcaatgaccttcttaactggcaaagcagtagaagatttgtgcagaataaagcaggttgatctggattccaggcacattggctgggtaa

SEQ ID NO: 4975 - DNA, 120 bp, Artificial Sequence
  ENSG00000005810_98 (sequence is synthesized)
caagtgaacttccaggaggggataatcacatcataaaaattgaattaaaaggcccagaaaatacactgagagttcgacaagtcaaagtcctgggctggaaagatggtgaaagcacaaaaa

SEQ ID NO: 4976 - DNA, 120 bp, Artificial Sequence
  ENSG00000005810_99 (sequence is synthesized)
tagctggccagatttcagccagtgtggcccagcagaggaactgtgaagctgagactctgcgagtattcagactgattacgtctcaagtatttggaaagctcatctctggagatgctgaac

SEQ ID NO: 4977 - DNA, 120 bp, Artificial Sequence
  ENSG00000005810_100 (sequence is synthesized)
ctacaccagaacaagaggaaaaagcactattgtcatcacctgaaggagaagaaaaagtatacaatgcaacatcagatgctgacctgaaagaacatatggttggaatcatattcagcagga

SEQ ID NO: 4978 - DNA, 120 bp, Artificial Sequence
  ENSG00000005810_101 (sequence is synthesized)
gtaagctgactaacttacaaaaacaggtgtgtgctcatattgtccaagctattcgcatggaagctaccagagtccgtgaagaatgggaacatgctatatcaagcaaagaaaatgccaatt

SEQ ID NO: 4979 - DNA, 120 bp, Artificial Sequence
  ENSG00000005810_102 (sequence is synthesized)
ctcagccaaatgatgaagatgcctcctctgatgcctactgctttgagctgctctctatggttttagcactgagtggctctaacgttggccggcaatatctggctcaacagctaaccctgc

SEQ ID NO: 4980 - DNA, 120 bp, Artificial Sequence
  ENSG00000005810_103 (sequence is synthesized)
ttcaggatctcttctcgctgcttcacacagcctctcctagagtccagagacaggtaacctctttactaagaagagttttgcctgaagtaacccctagtcgtctggccagcatcataggag

SEQ ID NO: 4981 - DNA, 120 bp, Artificial Sequence
  ENSG00000005810_104 (sequence is synthesized)
tgaaatccctccccccagcagatatcagtgatatcattcactcaacagagaaaggagactggaataagctgggtatcttggacatgtttctaggatgcattgccaaagcactcactgtac

SEQ ID NO: 4982 - DNA, 120 bp, Artificial Sequence
  ENSG00000005810_105 (sequence is synthesized)
agctaaaagccaaaggaaccaccatcactggaacagctggtaccactgtgggcaaaggagttacaacagttactcttccgatgattttcaattccagttatctccgacgaggtgaaagtc

SEQ ID NO: 4983 - DNA, 120 bp, Artificial Sequence
  ENSG00000005810_106 (sequence is synthesized)
attggtggatgaagggctcaacccctacccagatctcagagatcatcattaaacttatcaaggatatggcagcaggtcatctgtcagaagcttggtcccgagtgacaaaaaatgctattg

SEQ ID NO: 4984 - DNA, 120 bp, Artificial Sequence
  ENSG00000005810_107 (sequence is synthesized)
cagaaaccatcattgccttgaccaagatggaagaagaatttaggtctccagtgagatgtattgcaacaactagactctggcttgctctcgcatccctatgtgttcttgatcaggaccacg

SEQ ID NO: 4985 - DNA, 120 bp, Artificial Sequence
  ENSG00000005810_108 (sequence is synthesized)
tagatcgtctctcctcggggagatggatgggaaaggatggacaacaaaaacaaatgcctatgtgtgataaccatgatgatggtgaaactgcagcaatcattttatgcaatgtctgtggaa

SEQ ID NO: 4986 - DNA, 120 bp, Artificial Sequence
  ENSG00000005810_109 (sequence is synthesized)
atttatgtacagactgtgacagattccttcaccttcatcgaagaaccaaaactcatcaaagacaggtcttcaaagaagaagaagaagctataaaggttgaccttcatgaaggttgtggta

SEQ ID NO: 4987 - DNA, 120 bp, Artificial Sequence
  ENSG00000005810_110 (sequence is synthesized)
gaaccaaattgttctggttgatggcactggcagattctaaaacaatgaaggcaatggtggaattccgagaacacacaggcaaacccaccacgagtagctcagaagcatgtcgcttctgtg

SEQ ID NO: 4988 - DNA, 120 bp, Artificial Sequence
  ENSG00000005810_111 (sequence is synthesized)
gttccaggagtggaacagagttatctgctgttggcagtgtttgttctgatgcagattgccaggaatacgctaagatagcctgtagtaagacgcatccttgtggccatccatgcgggggtg

SEQ ID NO: 4989 - DNA, 120 bp, Artificial Sequence
  ENSG00000005810_112 (sequence is synthesized)
ttaaaaacgaagagcactgtctgccctgtctacacggctgtgacaaaagtgccacaagcctgaagcaagacgccgatgacatgtgcatgatatgtttcaccgaagcgctctcggcagcac

SEQ ID NO: 4990 - DNA, 120 bp, Artificial Sequence
  ENSG00000005810_113 (sequence is synthesized)
cagccattcagctggattgtagtcacatattccacttacagtgctgtcggcgagtattagaaaatcgatggcttggcccaaggataacatttggatttatatcttgtcccatttgcaaga

SEQ ID NO: 4991 - DNA, 120 bp, Artificial Sequence
  ENSG00000005810_114 (sequence is synthesized)
acaaaattaatcacatagtactaaaagacctacttgatccaataaaagaactctatgaggatgtcagaagaaaagccttaatgagattggaatatgaaggtctgcataagagtgaagcta

SEQ ID NO: 4992 - DNA, 120 bp, Artificial Sequence
  ENSG00000005810_115 (sequence is synthesized)
tcacaactcctggtgtgaggttttataatgacccagctggctatgcaatgaatagatatgcatattatgtgtgctacaaatgcagaaaggcatattttggtggtgaagctcgctgcgatg

SEQ ID NO: 4993 - DNA, 120 bp, Artificial Sequence
  ENSG00000005810_116 (sequence is synthesized)
ctgaggctggacggggagatgattatgatcccagagagctcatttgtggtgcctgttctgatgtttccagggctcagatgtgtcccaaacatggcacagactttttggaatataaatgtc

SEQ ID NO: 4994 - DNA, 120 bp, Artificial Sequence
  ENSG00000005810_117 (sequence is synthesized)
gctactgctgttcagtggctgtttttttctgttttggaacaacacatttttgtaatgcttgtcatgatgattttcaaagaatgactagcattcctaaggaagaactaccacactgtcctg

SEQ ID NO: 4995 - DNA, 120 bp, Artificial Sequence
  ENSG00000005810_118 (sequence is synthesized)
caggtcccaaaggcaagcagttagaaggaactgaatgtccactccatgttgttcatccacccactggggaagagtttgctctgggatgtggagtgtgcagaaatgcccacactttttaga

SEQ ID NO: 4996 - DNA, 120 bp, Artificial Sequence
  ENSG00000005810_119 (sequence is synthesized)
acacgcagatcctttgtctacagagagaaaaattgccttcatcccccaagaggatgcggtgaagtttaaactctgctcaggataaggacgggaccatttttacatccatgaaaatgaacc

SEQ ID NO: 4997 - DNA, 120 bp, Artificial Sequence
  ENSG00000005810_120 (sequence is synthesized)
attcacagtgcaagaaggataccaaataccatgtacataattcttgctatgaaaagtttccccattattttggtttatcttcttttgaacaaatgacatcaaacttgtgaggtgtttgca

SEQ ID NO: 4998 - DNA, 120 bp, Artificial Sequence
  ENSG00000005810_121 (sequence is synthesized)
tgtggccattaccgtcattggcctgtgaagcattggacatttatagataattgatataaaagaatcgccatgcccatggactaagaacgatgctggctttcaagcaaaaaagaaaaataa

SEQ ID NO: 4999 - DNA, 120 bp, Artificial Sequence
  ENSG00000005810_122 (sequence is synthesized)
tcattgtttattgtatactgcctttttgtaatcctgtacaattgcatcacgggtggggataaaaagaggaatattctggtttatttcctagactgttatttaaaaaaaaaaaaaacattg

SEQ ID NO: 5000 - DNA, 120 bp, Artificial Sequence
  ENSG00000005810_123 (sequence is synthesized)
tgttaggacagcatataaatgtaataagtatcacactgtatataaacatatcaatgtttgtcctgtataagaattactaaattacaaatgcaatttcatttaaacttctaggttaagttt

SEQ ID NO: 5001 - DNA, 120 bp, Artificial Sequence
  ENSG00000005810_124 (sequence is synthesized)
gagcctgaaattttaatgaagtgcaatactgagtgtgcctcattatcttgcagctgtaaacatattggaatgtacatgtcaataaaaccactgtacatttttatacagtgataaagtcta

SEQ ID NO: 5002 - DNA, 120 bp, Artificial Sequence
  ENSG00000005810_125 (sequence is synthesized)
ggcggcggcagtggcggcaccgcctcctcctcacattcccggggtggcggggttagatgagcggccccagtagcggcgccgggggcgctgttcatgccggttcccgacggctccgtggct

SEQ ID NO: 5003 - DNA, 120 bp, Artificial Sequence
  ENSG00000005810_126 (sequence is synthesized)
cactagacatatggataggtttcataacttatttgaggccttgttttctctttcataatgagtatttaattagtgcattaacattttgtaataatttctggtgtccgcccaggcactgta

SEQ ID NO: 5004 - DNA, 120 bp, Artificial Sequence
  ENSG00000005810_127 (sequence is synthesized)
gccctcatgactctctccctccatttcctgatgttactagtcaggtgtgctctcttccacgctgctgttaccctgtctctcccctgtgggtgtgtctgtgcctctcctgactgtgagcag

SEQ ID NO: 5005 - DNA, 120 bp, Artificial Sequence
  ENSG00000005810_128 (sequence is synthesized)
agtcacgacccaatctcccagctccttccatctttgatcaagctgcaaaacctccctcttccctagtacacagcccatttgtgttcggacagcccctttccttccagcagcctcagcttc

SEQ ID NO: 5006 - DNA, 120 bp, Artificial Sequence
  ENSG00000005810_129 (sequence is synthesized)
cctcaccaacaatggaagccatgcttgccaaactattcagagacttaggaatgccattagagctcatagcaggagtataagaactacgttcatggaaagcctcccagaggatatgaggtg

SEQ ID NO: 5007 - DNA, 120 bp, Artificial Sequence
  ENSG00000005810_130 (sequence is synthesized)
tacctaacttcaatattttttattaccttctcttttatacactttttatttgtgttcacccagaaatctttattaaattaaaatttgttcatggaaagctaataaaaaatgtttacaaag

SEQ ID NO: 5008 - DNA, 120 bp, Artificial Sequence
  ENSG00000005812_0 (sequence is synthesized)
agactcgctgtttgtggcccaggtgcaggaagcttacgcggtggcagccgctcgctgaggtagtctctcgcggcgccggggatccctgaacacagacagcgcgggactgagaaggaaagc

SEQ ID NO: 5009 - DNA, 120 bp, Artificial Sequence
  ENSG00000005812_1 (sequence is synthesized)
aagcttctttctgggcagccagagccgcaaaggtggagccgcgttggcgccctccgcgggaccagcgcctcggatgcgggcggagcgcggggggccgcggctgcgggagcgcgaagcggg

SEQ ID NO: 5010 - DNA, 120 bp, Artificial Sequence
  ENSG00000005812_2 (sequence is synthesized)
caggggcgcctcatgtgagagccgcgggacctgcagccgccgccgtccccggagcacggggtggtgtgtgggggaagccgcccccggcagcaggatgaaacgaggaggaagagatagtga

SEQ ID NO: 5011 - DNA, 120 bp, Artificial Sequence
  ENSG00000005812_3 (sequence is synthesized)
ccgtaattcatcagaagaaggaactgcagagaaatccaagaaactgaggactacaaatgagcattctcagacttgtgattggggtaatctccttcaggacattattctccaagtatttaa

SEQ ID NO: 5012 - DNA, 120 bp, Artificial Sequence
  ENSG00000005812_4 (sequence is synthesized)
atatttgcctcttcttgaccgggctcatgcttcacaagtttgccgcaactggaaccaggtatttcacatgcctgacttgtggagatgttttgaatttgaactgaatcagccagctacatc

SEQ ID NO: 5013 - DNA, 120 bp, Artificial Sequence
  ENSG00000005812_5 (sequence is synthesized)
ttatttgaaagctacccatccagagctgatcaaacagattattaaaagacattcaaaccatctacaatatgtcagcttcaaggtggacagcagcaaggaatcagctgaagcagcttgtga

SEQ ID NO: 5014 - DNA, 120 bp, Artificial Sequence
  ENSG00000005812_6 (sequence is synthesized)
tatactatcgcaacttgtgaattgctctttaaaaacacttggacttatttcaactgctcgaccaagctttatggatttaccaaagtctcactttatctctgcactgacagttgtgttcgt

SEQ ID NO: 5015 - DNA, 120 bp, Artificial Sequence
  ENSG00000005812_7 (sequence is synthesized)
aaactccaaatccctgtcttcgcttaagatagatgatactccagtagatgatccatctctcaaagtactagtggccaacaatagtgatacactcaagctgttgaaaatgagcagctgtcc

SEQ ID NO: 5016 - DNA, 120 bp, Artificial Sequence
  ENSG00000005812_8 (sequence is synthesized)
tcatgtctctccagcaggtatcctttgtgtggctgatcagtgtcacggcttaagagaactagccctgaactaccacttattgagtgatgagttgttacttgcattgtcttctgaaaaaca

SEQ ID NO: 5017 - DNA, 120 bp, Artificial Sequence
  ENSG00000005812_9 (sequence is synthesized)
tgttcgattagaacatttgcgcattgatgtagtcagtgagaatcctggacagacacacttccatactattcagaagagtagctgggatgctttcatcagacattcacccaaagtgaactt

SEQ ID NO: 5018 - DNA, 120 bp, Artificial Sequence
  ENSG00000005812_10 (sequence is synthesized)
agtgatgtatttttttttatatgaagaagaatttgaccccttctttcgctatgaaatacctgccacccatctgtactttgggagatcagtaagcaaagatgtgcttggccgtgtgggaat

SEQ ID NO: 5019 - DNA, 120 bp, Artificial Sequence
  ENSG00000005812_11 (sequence is synthesized)
gacatgccctagactggttgaactagtagtgtgtgcaaatggattacggccacttgatgaagagttaattcgcattgcagaacgttgcaaaaatttgtcagctattggactaggggaatg

SEQ ID NO: 5020 - DNA, 120 bp, Artificial Sequence
  ENSG00000005812_12 (sequence is synthesized)
tgaagtctcatgtagtgcctttgttgagtttgtgaagatgtgtggtggccgcctatctcaattatccattatggaagaagtactaattcctgaccaaaagtatagtttggagcagattca

SEQ ID NO: 5021 - DNA, 120 bp, Artificial Sequence
  ENSG00000005812_13 (sequence is synthesized)
ctgggaagtgtccaagcatcttggtagggtgtggtttcccgacatgatgcccacttggtaaaaactgcatgatgaatagcaccttaatttcaagcaaatgtattataattaaagttttat

SEQ ID NO: 5022 - DNA, 120 bp, Artificial Sequence
  ENSG00000005812_14 (sequence is synthesized)
tattttgtggcacagaaatttgatatcttcagtcagtatatgtaaagattgtttatcggaagacccatgaatgagttttggtcagaaaattccacttgtttccttagtgtaatagcagtc

SEQ ID NO: 5023 - DNA, 120 bp, Artificial Sequence
  ENSG00000005812_15 (sequence is synthesized)
atatctccgaattttttttaatgtggttcggatgtgaaataaccagttatacgtattaaacagtttacagtctaaaggaaacaaaacctatatgttataatatccaagaagtactaatag

SEQ ID NO: 5024 - DNA, 120 bp, Artificial Sequence
  ENSG00000005812_16 (sequence is synthesized)
gttttctgaaatgttatattctctatgcatttaaaaaaaaatgtaaacttgacattttagggtcttcagttacacatacacctgttataaggtgtttaatatagctcaggaaagtgagca

SEQ ID NO: 5025 - DNA, 120 bp, Artificial Sequence
  ENSG00000005812_17 (sequence is synthesized)
ttttgtgagaaaaatgaatatatcatatctaatggaaaagattggatgaatgttctcaaatgttacaaagctgtttaaagaaaaaggtatatataagtaatcagaacacttagaagactg

SEQ ID NO: 5026 - DNA, 120 bp, Artificial Sequence
  ENSG00000005812_18 (sequence is synthesized)
atagatgtcacacagtggtattatagaaggataatacagagccaagatcaaattaaaagacaataaatggaacagaagggaggcagtgtttagctttgtataaacttttaggtttgctct

SEQ ID NO: 5027 - DNA, 120 bp, Artificial Sequence
  ENSG00000005812_19 (sequence is synthesized)
gtaatctgctaaaccatatacattcttttgtgatatgttattatgtatgtggcacttgaggcactgtatgtaaagtaaggaatgctttactagttctccttggttttatctttgtttaaa

SEQ ID NO: 5028 - DNA, 120 bp, Artificial Sequence
  ENSG00000005812_20 (sequence is synthesized)
tgtttaaactagctttaaagtattaaacaataattgaaatgaaaagcttacctattttaaaaagccaaatttaaataaatatagaactttaaaatgtttatcagttgtttccatgaaaga

SEQ ID NO: 5029 - DNA, 120 bp, Artificial Sequence
  ENSG00000005812_21 (sequence is synthesized)
ttccagtaaattttagtgatggctcactcacttttctattttggaattacatagttatgtaagtaaaatttttaaaaatcataaagggagcaccattgtacagtctagcataaacagcaa

SEQ ID NO: 5030 - DNA, 120 bp, Artificial Sequence
  ENSG00000005812_22 (sequence is synthesized)
attttaaagaggacatatttaagttcataatcatatttttcagtaaatattgctcagtgaactggaaaactttaatagaaaaatgtctgcagttttgtgattgttaatttggttaaaccg

SEQ ID NO: 5031 - DNA, 120 bp, Artificial Sequence
  ENSG00000005812_23 (sequence is synthesized)
tttatattatttaagttaggtaacattttatattactttcatatgaataaaagtaatccatgcattgtagagtctataaaatgttgagttttaaaagatgatataaactttgatgctggg

SEQ ID NO: 5032 - DNA, 120 bp, Artificial Sequence
  ENSG00000005812_24 (sequence is synthesized)
tgggcactagtgctagtagatattactaccctcctgagggaaatcagaaatgatttaaccccggtggaatacattaattcttaaagcggctcttttcagtggtgtgacttttagattgtg

SEQ ID NO: 5033 - DNA, 120 bp, Artificial Sequence
  ENSG00000005812_25 (sequence is synthesized)
tctcagtggttgaggaagctaacagtcttagatctacttttaaaacggatggccttcttaagaataaagcaaaaggtgattttctacataatttttgctttccaaaagtgatgatatgct

SEQ ID NO: 5034 - DNA, 120 bp, Artificial Sequence
  ENSG00000005812_26 (sequence is synthesized)
ctcctacagcaacatatgagaagaaaaaaggcttatctagattcgaaaattaacagcaattatagtaatatatcccctccttctaaatagtaaaaagctctgattgtacaagaattacct

SEQ ID NO: 5035 - DNA, 120 bp, Artificial Sequence
  ENSG00000005812_27 (sequence is synthesized)
gtgctagtcaagttgttgtttttccttgaacaactttggaaaaatggatttgacagtacataatcagttctactaaccaaagcttgtatttggaaatttactttttgtacaaattgaatt

SEQ ID NO: 5036 - DNA, 120 bp, Artificial Sequence
  ENSG00000005812_28 (sequence is synthesized)
atataatgcttaaaatactttgtcactttataagcaaaatgcatagtacttaatttgtttatactgtaaagtatatgttaaatgcttttatcactttgagaataaaaagttactaatgct

SEQ ID NO: 5037 - DNA, 120 bp, Artificial Sequence
  ENSG00000005812_29 (sequence is synthesized)
ctctcggagaagtgcaacctcttccactgcgctgacagctttgtgggaagagggagaactacaggaaacaatgaagaagtcagaaggtgcctgtttacccaaacgtgtctgcagccatgt

SEQ ID NO: 5038 - DNA, 120 bp, Artificial Sequence
  ENSG00000005812_30 (sequence is synthesized)
tcctgcataccccggttagaagaaccgctgaagcactatgctatcagcttaaaatctaggtgactacaaaaccctggaaagtttggcacataaactacattaggcaagatcaaggatgac

SEQ ID NO: 5039 - DNA, 120 bp, Artificial Sequence
  ENSG00000005812_31 (sequence is synthesized)
atttgttctttgattaatcattatcactgccattcaatgtgacctgccaaacatacacaacttacatctttacagcaatcctaaatcctaagatttagtgatgttagtatgcttaaagaa

SEQ ID NO: 5040 - DNA, 120 bp, Artificial Sequence
  ENSG00000005812_32 (sequence is synthesized)
cacaagccagttactagctagttccaaaatctcagccagaaatatgtgttaacactggatttgccacatctagaagcacaatcactccagttatggtgtctaaacgaatgtctaaagtta

SEQ ID NO: 5041 - DNA, 120 bp, Artificial Sequence
  ENSG00000005812_33 (sequence is synthesized)
ggtgaatggaatgtaatcagactatactaaacttggttccaaaagttatagaagttgtaaagttagtctaaactaaagcacttaagtgaaaaagtgtaactgccatatcagaaagaagag

SEQ ID NO: 5042 - DNA, 120 bp, Artificial Sequence
  ENSG00000005812_34 (sequence is synthesized)
ctcccaccatgaaaatgtcactgaatgtattttttatttttgaaggtatttttaaaatctgggcacaccatatctatctgtaggaccctgggtccaaaggtcctacataactgatatgaa

SEQ ID NO: 5043 - DNA, 120 bp, Artificial Sequence
  ENSG00000005812_35 (sequence is synthesized)
ccataattctccatattaacaaaggctcggaaattgaaaccaagatcacctaactcgctcactttggccaatatagtacgaatttcagcttctttacaagagaagagtcctgagatgtta

SEQ ID NO: 5044 - DNA, 120 bp, Artificial Sequence
  ENSG00000005812_36 (sequence is synthesized)
atatgcagcaattctgctgatgtgcattttaactttatgcaccaaggaagaaaggctaaggaattcacaaaagtaaaatcaccccctgaaaaacagatgctggtgattggagaaaaaaga

SEQ ID NO: 5045 - DNA, 120 bp, Artificial Sequence
  ENSG00000005812_37 (sequence is synthesized)
gcagtagaattaaggtgttttataaaccagagagtgttttgtttctgataggtaaagggatttcttcatatgttattttaataaaagggaatttcataggtaaaaaccaatattcaaaat

SEQ ID NO: 5046 - DNA, 120 bp, Artificial Sequence
  ENSG00000005812_38 (sequence is synthesized)
tataaaacaaatagaactgtttgtgcacaatcactgcatcaaaaatttgcaagagactcaacagaaattctttagttggcaaatgtggtttgaaggggtaataaaatctttttatggcta

SEQ ID NO: 5047 - DNA, 120 bp, Artificial Sequence
  ENSG00000005812_39 (sequence is synthesized)
ataagtaggttctccactgtaaagaaatattcttgtatagttggtttctatgttcttgaactctgctccaaattcagccaacttgttaaaggtccttaacacaaatttggaacagtcgta

SEQ ID NO: 5048 - DNA, 120 bp, Artificial Sequence
  ENSG00000005812_40 (sequence is synthesized)
ggaatcaaaccatgtctctgcccccttttctgggctggcttttacattccatgtctcataataaattcctgtttcattgtcctgtttcacccactttgccatttggttgaacatgtttcc

SEQ ID NO: 5049 - DNA, 120 bp, Artificial Sequence
  ENSG00000005812_41 (sequence is synthesized)
tagtttaaaaaaacaaaacaaagtcacctagtgaacaaagctaatcatgttaattttttttttttttttttttaagacaggtctccctctgttgccgaggctagagtgcggtggtaacat

SEQ ID NO: 5050 - DNA, 70 bp, Artificial Sequence
  ENSG00000005812_42 (sequence is synthesized)
aacccaactaattttttaatttttcttttttttaatttgagaccagcctgggcaacacggggtcttgctg

SEQ ID NO: 5051 - DNA, 120 bp, Artificial Sequence
  ENSG00000005812_43 (sequence is synthesized)
tttaatttgagaccagcctgggcaacacggggtcttgctgtattgcccaggctggtctcaaattcccaacctcaagtgatcctcctgcttcagcattctaaagcactgggattataggtt

SEQ ID NO: 5052 - DNA, 120 bp, Artificial Sequence
  ENSG00000005812_44 (sequence is synthesized)
tgagctaccatggctggcctaatcatattaattttaagtaaaatgttctaacttgattaagactggatgcctgagtaaacaatggttttgaatttccacacctgcatttcacaacaggaa

SEQ ID NO: 5053 - DNA, 120 bp, Artificial Sequence
  ENSG00000005812_45 (sequence is synthesized)
tccaagctcagccaattttattccattcttcaaggcacaagatatttctgaattataaacattagatataataggtgtataaggagaagtcatcttacatactaattctataatcattta

SEQ ID NO: 5054 - DNA, 120 bp, Artificial Sequence
  ENSG00000005812_46 (sequence is synthesized)
agctatagtcaaagcgaaattatacaaatgcagaagctctctttctctacccaactcaccaaatcttggattcagaggcaaaagagaaaaggaaagcacaaaaagaattgcgaaagagga

SEQ ID NO: 5055 - DNA, 120 bp, Artificial Sequence
  ENSG00000005812_47 (sequence is synthesized)
aaagcagaatgggcaaagacagtgtaaggaaaatggaggtgtgggaaatgtggagcttcactgttgcaaagcatgctacacataaagtatgaatggctgcctgaggagccactgctctag

SEQ ID NO: 5056 - DNA, 120 bp, Artificial Sequence
  ENSG00000005812_48 (sequence is synthesized)
aaggctggctattactgttatgagaacaagcaccataccccatccaccttgtgtgtttggtacgtttctttcttccctgtacttggagttgctgggatgctgctgatgacctctccacct

SEQ ID NO: 5057 - DNA, 120 bp, Artificial Sequence
  ENSG00000005812_49 (sequence is synthesized)
gccacgttaagtccttccaacaaatcaactaaactggaaatgttttaggccgagttcatactccaggatggctaaccctctcttctaccatcttgtactagaccagaagaatctttccaa

SEQ ID NO: 5058 - DNA, 120 bp, Artificial Sequence
  ENSG00000005812_50 (sequence is synthesized)
atattcagaaaacactactctgcatggttacaactctcatcttgggcatttataatgcctaatagaactgggccccaaacactgcatcctgtcactgtgtgcaaacctctttggttactc

SEQ ID NO: 5059 - DNA, 120 bp, Artificial Sequence
  ENSG00000005812_51 (sequence is synthesized)
caacttgagtccataaaataaatacttcatgttctgtaaaatgaatagagtgactgcctttatcaattttatggaattaaaattgtagaacagaataaagcctgttgtattagaactggg

SEQ ID NO: 5060 - DNA, 120 bp, Artificial Sequence
  ENSG00000005812_52 (sequence is synthesized)
tggacaaaagcggtgacaatcttcccggtctaaccaggactgcaggagacggggattcccgggatgcgcgacttttgagggcaaaactgggaagtcccaataaggacttcggatcaggtt

SEQ ID NO: 5061 - DNA, 120 bp, Artificial Sequence
  ENSG00000005812_53 (sequence is synthesized)
ctgatcaggttcaaaccagagcgagttggtcgcccagtaaattgtaccaaatgttccgcggtaataactaacgacagtgcatgatataaataaatgcgatagacagtgtttttaaactac

SEQ ID NO: 5062 - DNA, 120 bp, Artificial Sequence
  ENSG00000005812_54 (sequence is synthesized)
gttgtgttttttgctagacacattttagtaaaatgcattgctatgttcaaattagaaaaaactatgatcattaaccttgaaggtggattaatatgactgcttcatctctttaaaatattt

SEQ ID NO: 5063 - DNA, 120 bp, Artificial Sequence
  ENSG00000005812_55 (sequence is synthesized)
ttaatgtagtaatagaatagcataagttctgtagggttactagcctagacactgactttcagcttattttctaatcttatttgataaatttatgaatagcacatgctagaaaatgaacag

SEQ ID NO: 5064 - DNA, 120 bp, Artificial Sequence
  ENSG00000005844_0 (sequence is synthesized)
atcattttcctctttcaccctgtctaggttgccagcaaatcccacgggcctcctgacgctgcccctggggccacaggtccctcgagtgctggaaggatgaaggattcctgcatcactgtg

SEQ ID NO: 5065 - DNA, 120 bp, Artificial Sequence
  ENSG00000005844_1 (sequence is synthesized)
atggccatggcgctgctgtctgggttctttttcttcgcgccggcctcgagctacaacctggacgtgcggggcgcgcggagcttctccccaccgcgcgccgggaggcactttggataccgc

SEQ ID NO: 5066 - DNA, 120 bp, Artificial Sequence
  ENSG00000005844_2 (sequence is synthesized)
gtcctgcaggtcggaaacggggtcatcgtgggagctccaggggaggggaacagcacaggaagcctctatcagtgccagtcgggcacaggacactgcctgccagtcaccctgagaggttcc

SEQ ID NO: 5067 - DNA, 120 bp, Artificial Sequence
  ENSG00000005844_3 (sequence is synthesized)
aactatacctccaagtacttgggaatgaccttggcaacagaccccacagatggaagcattttggcctgtgaccctgggctgtctcgaacgtgtgaccagaacacctatctgagtggcctg

SEQ ID NO: 5068 - DNA, 120 bp, Artificial Sequence
  ENSG00000005844_4 (sequence is synthesized)
tgttacctcttccgccagaatctgcagggtcccatgctgcaggggcgccctggttttcaggaatgtatcaagggcaacgtagacctggtatttctgtttgatggttcgatgagcttgcag

SEQ ID NO: 5069 - DNA, 120 bp, Artificial Sequence
  ENSG00000005844_5 (sequence is synthesized)
ccagatgaatttcagaaaattctggacttcatgaaggatgtgatgaagaaactcagcaacacttcgtaccagtttgctgctgttcagttttccacaagctacaaaacagaatttgatttc

SEQ ID NO: 5070 - DNA, 120 bp, Artificial Sequence
  ENSG00000005844_6 (sequence is synthesized)
tcagattatgttaaacggaaggaccctgatgctctgctgaagcatgtaaagcacatgttgctgttgaccaatacctttggtgccatcaattatgtcgcgacagaggtgttccgggaggag

SEQ ID NO: 5071 - DNA, 120 bp, Artificial Sequence
  ENSG00000005844_7 (sequence is synthesized)
ctgggggcccggccagatgccaccaaagtgcttatcatcatcacggatggggaggccactgacagtggcaacatcgatgcggccaaagacatcatccgctacatcatcgggattggaaag

SEQ ID NO: 5072 - DNA, 120 bp, Artificial Sequence
  ENSG00000005844_8 (sequence is synthesized)
cattttcagaccaaggagagtcaggagaccctccacaaatttgcatcaaaacccgcgagcgagtttgtgaaaattctggacacatttgagaagctgaaagatctattcactgagctgcag

SEQ ID NO: 5073 - DNA, 120 bp, Artificial Sequence
  ENSG00000005844_9 (sequence is synthesized)
aagaagatctatgtcattgagggcacaagcaaacaggacctgacttccttcaacatggagctgtcctccagcggcatcagtgctgacctcagcaggggccatgcagtcgtgggggcagta

SEQ ID NO: 5074 - DNA, 120 bp, Artificial Sequence
  ENSG00000005844_10 (sequence is synthesized)
ggagccaaggactgggctgggggctttcttgacctgaaggcagacctgcaggatgacacatttattgggaatgaaccattgacaccagaagtgagagcaggctatttgggttacaccgtg

SEQ ID NO: 5075 - DNA, 120 bp, Artificial Sequence
  ENSG00000005844_11 (sequence is synthesized)
acctggctgccctcccggcaaaagacttcgttgctggcctcgggagcccctcgataccagcacatgggccgagtgctgctgttccaagagccacagggcggaggacactggagccaggtc

SEQ ID NO: 5076 - DNA, 120 bp, Artificial Sequence
  ENSG00000005844_12 (sequence is synthesized)
cagacaatccatgggacccagattggctcttatttcggtggggagctgtgtggcgtcgacgtggaccaagatggggagacagagctgctgctgattggtgccccactgttctatggggag

SEQ ID NO: 5077 - DNA, 120 bp, Artificial Sequence
  ENSG00000005844_13 (sequence is synthesized)
cagagaggaggccgggtgtttatctaccagagaagacagttggggtttgaagaagtctcagagctgcagggggaccccggctacccactcgggcggtttggagaagccatcactgctctg

SEQ ID NO: 5078 - DNA, 120 bp, Artificial Sequence
  ENSG00000005844_14 (sequence is synthesized)
acagacatcaacggcgatgggctggtagacgtggctgtgggggcccctctggaggagcagggggctgtgtacatcttcaatgggaggcacggggggcttagtccccagccaagtcagcgg

SEQ ID NO: 5079 - DNA, 120 bp, Artificial Sequence
  ENSG00000005844_15 (sequence is synthesized)
atagaagggacccaagtgctctcaggaattcagtggtttggacgctccatccatggggtgaaggaccttgaaggggatggcttggcagatgtggctgtgggggctgagagccagatgatc

SEQ ID NO: 5080 - DNA, 120 bp, Artificial Sequence
  ENSG00000005844_16 (sequence is synthesized)
gtgctgagctcccggcccgtggtggatatggtcaccctgatgtccttctctccagctgagatcccagtgcatgaagtggagtgctcctattcaaccagtaacaagatgaaagaaggagtt

SEQ ID NO: 5081 - DNA, 120 bp, Artificial Sequence
  ENSG00000005844_17 (sequence is synthesized)
aatatcacaatctgtttccagatcaagtctctcatcccccagttccaaggccgcctggttgccaatctcacttacactctgcagctggatggccaccggaccagaagacgggggttgttc

SEQ ID NO: 5082 - DNA, 120 bp, Artificial Sequence
  ENSG00000005844_18 (sequence is synthesized)
ccaggagggagacatgaactcagaaggaatatagctgtcaccaccagcatgtcatgcactgacttctcatttcatttcccggtatgtgttcaagacctcatctcccccatcaatgtttcc

SEQ ID NO: 5083 - DNA, 120 bp, Artificial Sequence
  ENSG00000005844_19 (sequence is synthesized)
ctgaatttctctctttgggaggaggaagggacaccgagggaccaaagggcgcagggcaaggacataccgcccatcctgagaccctccctgcactcggaaacctgggagatcccttttgag

SEQ ID NO: 5084 - DNA, 120 bp, Artificial Sequence
  ENSG00000005844_20 (sequence is synthesized)
aagaactgtggggaggacaagaagtgtgaggcaaacttgagagtgtccttctctcctgcaagatccagagccctgcgtctaactgcttttgccagcctctctgtggagctgagcctgagt

SEQ ID NO: 5085 - DNA, 120 bp, Artificial Sequence
  ENSG00000005844_21 (sequence is synthesized)
tagccagatacctgtgagctgcgaggagcttcctgaagagtccaggcttctgtccagggcattatcttgcaatgtgagctctcccatcttcaaagcaggccactcggttgctctgcagat

SEQ ID NO: 5086 - DNA, 120 bp, Artificial Sequence
  ENSG00000005844_22 (sequence is synthesized)
gatgtttaatacactggtaaacagctcctggggggactcggttgaattgcacgccaatgtgacctgtaacaatgaggactcagacctcctggaggacaactcagccactaccatcatccc

SEQ ID NO: 5087 - DNA, 120 bp, Artificial Sequence
  ENSG00000005844_23 (sequence is synthesized)
catcctgtaccccatcaacatcctcatccaggaccaagaagactccacactctatgtcagtttcacccccaaaggccccaagatccaccaagtcaagcacatgtaccaggtgaggatcca

SEQ ID NO: 5088 - DNA, 120 bp, Artificial Sequence
  ENSG00000005844_24 (sequence is synthesized)
gccttccatccacgaccacaacatacccaccctggaggctgtggttggggtgccacagcctcccagcgaggggcccatcacacaccagtggagcgtgcagatggagcctcccgtgccctg

SEQ ID NO: 5089 - DNA, 120 bp, Artificial Sequence
  ENSG00000005844_25 (sequence is synthesized)
ccactatgaggatctggagaggctcccggatgcagctgagccttgtctccccggagccctgttccgctgccctgttgtcttcaggcaggagatcctcgtccaagtgatcgggactctgga

SEQ ID NO: 5090 - DNA, 120 bp, Artificial Sequence
  ENSG00000005844_26 (sequence is synthesized)
gctggtgggagagatcgaggcctcttccatgttcagcctctgcagctccctctccatctccttcaacagcagcaagcatttccacctctatggcagcaacgcctccctggcccaggttgt

SEQ ID NO: 5091 - DNA, 120 bp, Artificial Sequence
  ENSG00000005844_27 (sequence is synthesized)
catgaaggttgacgtggtgtatgagaagcagatgctctacctctacgtgctgagcggcatcggggggctgctgctgctgctgctcattttcatagtgctgtacaaggttggtttcttcaa

SEQ ID NO: 5092 - DNA, 120 bp, Artificial Sequence
  ENSG00000005844_28 (sequence is synthesized)
acggaacctgaaggagaagatggaggctggcagaggtgtcccgaatggaatccctgcagaagactctgagcagctggcatctgggcaagaggctggggatcccggctgcctgaagcccct

SEQ ID NO: 5093 - DNA, 120 bp, Artificial Sequence
  ENSG00000005844_29 (sequence is synthesized)
ccatgagaaggactctgagagtggtggtggcaaggactgagtccaggcctgtgaggtgcagagtgcccagaactggactcaggatgcccagggccactctgcctctgcctgcattctgcc

SEQ ID NO: 5094 - DNA, 120 bp, Artificial Sequence
  ENSG00000005844_30 (sequence is synthesized)
gtgtgccctcgggcgagtcactgcctctccctggccctcagtttccctatctcgaacatggaactcattcctgcctgtctcctttgcaggctcatagggaagacctgctgagggaccagc

SEQ ID NO: 5095 - DNA, 120 bp, Artificial Sequence
  ENSG00000005844_31 (sequence is synthesized)
caagagggctgcaaaagtgagggcttgtcattaccagacggttcaccagcctctcttggtttccttccttggaagagaatgtctgatctaaatgtggagaaactgtagtctcaggaccta

SEQ ID NO: 5096 - DNA, 120 bp, Artificial Sequence
  ENSG00000005844_32 (sequence is synthesized)
gggatgttctggccctcacccctgccctgggatgtccacagatgcctccaccccccagaacctgtccttgcacactcccctgcactggagtccagtctcttctgctggcagaaagcaaat

SEQ ID NO: 5097 - DNA, 120 bp, Artificial Sequence
  ENSG00000005844_33 (sequence is synthesized)
gtgacctgtgtcactacgtgactgtggcacacgccttgttcttggccaaagaccaaattccttggcatgccttccagcaccctgcaaaatgagaccctcgtggccttccccagcctcttc

SEQ ID NO: 5098 - DNA, 120 bp, Artificial Sequence
  ENSG00000005844_34 (sequence is synthesized)
tagagccgtgatgcctccctgttgaagctctggtgacaccagcctttctcccaggccaggctccttcctgtcttcctgcattcacccagacagctccctctgcctgaaccttccatctcg

SEQ ID NO: 5099 - DNA, 120 bp, Artificial Sequence
  ENSG00000005844_35 (sequence is synthesized)
ccacccctccttccttgaccagcagatcccagctcacgtcacacttggttgggtcctcacatctttcacacttccaccagcctgcactactccctcaaagcacacgtcatgtttcttcat

SEQ ID NO: 5100 - DNA, 120 bp, Artificial Sequence
  ENSG00000005844_36 (sequence is synthesized)
ccggcagcctggatgttttttccctgtttaatgattgacgtacttagcagctatctctcagtgaactgtgagggtaaaggctatacttgtcttgttcaccttgggatgatgcctcatgat

SEQ ID NO: 5101 - DNA, 120 bp, Artificial Sequence
  ENSG00000005844_37 (sequence is synthesized)
tgatatgtcagggcgtgggacatctagtaggtgcttgacataatttcactgaattaatgacagagccagtgggaagatacagaaaaagaggggctgggctgggcgcggtggttcacgcct

SEQ ID NO: 5102 - DNA, 120 bp, Artificial Sequence
  ENSG00000005844_38 (sequence is synthesized)
caaggaaaaaataaaaataaaaagcgggcacgggcccgtgacatccccacccttggaggctgtcttctcaggctctgccctgccctagctccacaccctctcccaggacccatcacgcct

SEQ ID NO: 5103 - DNA, 120 bp, Artificial Sequence
  ENSG00000005844_39 (sequence is synthesized)
gtgcagtggcccccacagaaagactgagctcaaggtgggaaccacgtctgctaacttggagccccagtgccaagcacagtgcctgcatgtatttatccaataaatgtgaaattctgtcca

SEQ ID NO: 5104 - DNA, 120 bp, Artificial Sequence
  ENSG00000005844_40 (sequence is synthesized)
aaaaaacaaacaaatctgggactcccagggtaaaagccaactccgcattaagccacttcctgggtctgcctgaccctcacatgcatgccttctaccttacccagaagcacaagcaaacag

SEQ ID NO: 5105 - DNA, 120 bp, Artificial Sequence
  ENSG00000005844_41 (sequence is synthesized)
catccgggtgggcctgggatcggccacctgctgggcacgtgcaggggcgggggtccctcggtcgcagctgacgacccttgccttcctcagcgccggcctcgagctacaacctggacgtgc

SEQ ID NO: 5106 - DNA, 120 bp, Artificial Sequence
  ENSG00000005844_42 (sequence is synthesized)
agggagtgcagttggctctggggggtgggtcggtgggtagctgacccgctcatctccttccctgggcagggccatgcagtcgtgggggcagtaggagccaaggactgggctgggggcttt

SEQ ID NO: 5107 - DNA, 120 bp, Artificial Sequence
  ENSG00000005844_43 (sequence is synthesized)
gcctgggcaacagagtaagacagtcttaaaaaaaaaaaaaaaaaagagctgccagcagagtaagactgcacaaatggcagtaggctgaggcagcagagtggggcagccctggaaaggcag

SEQ ID NO: 5108 - DNA, 120 bp, Artificial Sequence
  ENSG00000005882_0 (sequence is synthesized)
ggcggccgaaccgcgtcgctgggccgaaaggtgcgcgagcgctgcccgcgcggggaccacaaccaaagtcgcggccgccgcagccatgcgctgggtgtgggcgctgctgaagaatgcgtc

SEQ ID NO: 5109 - DNA, 120 bp, Artificial Sequence
  ENSG00000005882_1 (sequence is synthesized)
cctggcaggggcgcccaagtacatagagcacttcagcaagttctccccgtccccgctgtccatgaagcagtttctggacttcggatccagcaatgcctgtgagaaaacctccttcacctt

SEQ ID NO: 5110 - DNA, 120 bp, Artificial Sequence
  ENSG00000005882_2 (sequence is synthesized)
cctcaggcaggagctgcctgtgcgcctggccaacatcatgaaagagatcaacctgcttcccgaccgagtgctgagcacaccctccgtgcagctggtgcagagctggtatgtccagagcct

SEQ ID NO: 5111 - DNA, 120 bp, Artificial Sequence
  ENSG00000005882_3 (sequence is synthesized)
cctggacatcatggagttcctggacaaggatcccgaggaccatcgcaccctgagccagttcactgacgccctggtcaccatccggaaccggcacaacgacgtggtgcccaccatggcaca

SEQ ID NO: 5112 - DNA, 120 bp, Artificial Sequence
  ENSG00000005882_4 (sequence is synthesized)
aggcgtgcttgagtacaaggacacctacggcgatgaccccgtctccaaccagaacatccagtacttcctggaccgcttctacctcagccgcatctccatccgcatgctcatcaaccagca

SEQ ID NO: 5113 - DNA, 120 bp, Artificial Sequence
  ENSG00000005882_5 (sequence is synthesized)
caccctcatctttgatggcagcaccaacccagcccatcccaaacacatcggcagcatcgaccccaactgcaacgtctctgaggtggtcaaagatgcctacgacatggctaagctcctgtg

SEQ ID NO: 5114 - DNA, 120 bp, Artificial Sequence
  ENSG00000005882_6 (sequence is synthesized)
tgacaagtattacatggcctcacctgacctggagatccaggagatcaatgcagccaactccaaacagccgattcacatggtctacgtcccctcccacctctaccacatgctctttgagct

SEQ ID NO: 5115 - DNA, 120 bp, Artificial Sequence
  ENSG00000005882_7 (sequence is synthesized)
cttcaagaatgccatgagggcgactgtggaaagccatgagtccagcctcattctcccacccatcaaggtcatggtggccttgggtgaggaagatctgtccatcaagatgagtgaccgagg

SEQ ID NO: 5116 - DNA, 120 bp, Artificial Sequence
  ENSG00000005882_8 (sequence is synthesized)
tgggggtgttcccttgaggaagattgagcgactcttcagctacatgtactccacagcacccaccccccagcctggcaccgggggaacgccgctggctggctttggttatgggctccccat

SEQ ID NO: 5117 - DNA, 120 bp, Artificial Sequence
  ENSG00000005882_9 (sequence is synthesized)
ttcccgcctctacgccaagtacttccagggagacctgcagctcttctccatggaaggctttgggaccgatgctgtcatctatctcaaggccctgtccacggactcggtggagcgcctgcc

SEQ ID NO: 5118 - DNA, 120 bp, Artificial Sequence
  ENSG00000005882_10 (sequence is synthesized)
tgtctacaacaagtcagcctggcgccactaccagaccatccaggaggccggcgactggtgtgtgcccagcacggagcccaagaacacgtccacgtaccgcgtcagctaagggccgccgtg

SEQ ID NO: 5119 - DNA, 120 bp, Artificial Sequence
  ENSG00000005882_11 (sequence is synthesized)
catctgcacctgagaggacggactgccgcctctgggtccccccaccgtggtgcccctcaccatcctcctgggggagcagggggtgggttctccctgatgaccaggttctgtctctatgga

SEQ ID NO: 5120 - DNA, 120 bp, Artificial Sequence
  ENSG00000005882_12 (sequence is synthesized)
agtcactgcggtgataggtctgtgatggtccctaagtgccagtccatctctgtggagacccctcggtggcctccctatctctgtgggcgatgcctgagggttagggatgtctccaccctg

SEQ ID NO: 5121 - DNA, 120 bp, Artificial Sequence
  ENSG00000005882_13 (sequence is synthesized)
atggggtgtcccagagacattttcccatggcagtcctcctctctgagaccagggctgtcacttttctgccaggggtactgggtccccctcagcaccctccacagcacaggccttccaagt

SEQ ID NO: 5122 - DNA, 120 bp, Artificial Sequence
  ENSG00000005882_14 (sequence is synthesized)
gtcccgttgccttattcccccagcccacaaaggcaccctggccttggcctgctgaagtgttaggaagagggtgggtgccctccagacctggggactgagtggggaaaggagttacacccg

SEQ ID NO: 5123 - DNA, 120 bp, Artificial Sequence
  ENSG00000005882_15 (sequence is synthesized)
tgagtggggaatgaggctggtcctgcagcctctccctccgctcagggcttgaaggtcggtggcggagggggtggctctcacagggcccaactctaaagtggaagaaccttgttagaccga

SEQ ID NO: 5124 - DNA, 120 bp, Artificial Sequence
  ENSG00000005882_16 (sequence is synthesized)
gagcttgccatccagccaagctgctcgaggccctgcagtggccttggcaatgtctgtgccacctcctgagccctcccagcatgtcctcacatgctcatgcccacccgctcctccacaagc

SEQ ID NO: 5125 - DNA, 120 bp, Artificial Sequence
  ENSG00000005882_17 (sequence is synthesized)
ctagtccatcctgcctgagctccagcccccagcccccactgtgcccagacatgtgtgctcagggtggctttctccctaggaccttctgtgtatatagttagttttataaccctgaatgcc

SEQ ID NO: 5126 - DNA, 120 bp, Artificial Sequence
  ENSG00000005882_18 (sequence is synthesized)
cccacccttcccctaagcacacaggggttaaagctgtgtgtccctcccagtggctgtggcagtgacagtgacacccacacccacagtaaagaggagactgaatgagactggcctggctgc

SEQ ID NO: 5127 - DNA, 120 bp, Artificial Sequence
  ENSG00000005882_19 (sequence is synthesized)
atccctgggggaggggacccacacgtgcgcacgtacacacgcacactgcggtgccctgtgaccaccacatgacgcaccggggacgtccggcccagctcaggactgtgagtaaaacactgg

SEQ ID NO: 5128 - DNA, 120 bp, Artificial Sequence
  ENSG00000005882_20 (sequence is synthesized)
gcaaagccatctgttcagaacgccggatggcccagcacctggtgacagacctgttgtcccaccatactcagggcccagcagagtccggccaacccaacaactggagcagacagaaattct

SEQ ID NO: 5129 - DNA, 120 bp, Artificial Sequence
  ENSG00000005882_21 (sequence is synthesized)
ggtcactggcacatcataaggatttattgaaataaattgagaactgcctccccttcacatgcaggtgggcacccactatagctactgatggctttaaggatgtgggtgccttccaacctc

SEQ ID NO: 5130 - DNA, 120 bp, Artificial Sequence
  ENSG00000005882_22 (sequence is synthesized)
ccatggccctgccaccaggcccagatggtgccagtgtcctcatatctgtttccctccgaagcccctctcccagcacagatagcagaggggggataagggctgagtcccaggtacagggtg

SEQ ID NO: 5131 - DNA, 120 bp, Artificial Sequence
  ENSG00000005882_23 (sequence is synthesized)
ctggccgtaagccacagcccctgggcaggaatgagggagccagcatgcattggtgccatctgccgctctgtctgggcagatgggaggagctggaggggtttccaagcgggagcccccagg

SEQ ID NO: 5132 - DNA, 120 bp, Artificial Sequence
  ENSG00000005882_24 (sequence is synthesized)
cctcatcggtaactctgaccagtgtcctggaagcgggactagctgctgaccagcgccacacatgaacacttcctccaaggacatttcctaaaaaggacacatgctgtccccaggctgctg

SEQ ID NO: 5133 - DNA, 120 bp, Artificial Sequence
  ENSG00000005882_25 (sequence is synthesized)
gtaaactccacccccatccagggagctggccccagccctcagtgtggcccagggaagcagagcttgcaccgcctgccagttctgagcccactgattccctgacaatgcctggggcagatg

SEQ ID NO: 5134 - DNA, 120 bp, Artificial Sequence
  ENSG00000005882_26 (sequence is synthesized)
ggggagggctgatgaacctttccaatctcgtagctgccggggacccccaggttttgcctctctgcctggctggggtgagggctgaccaggtcagcagctcctaggccttggctggtggaa

SEQ ID NO: 5135 - DNA, 120 bp, Artificial Sequence
  ENSG00000005882_27 (sequence is synthesized)
gtggtgtcctctgtccctatcagttcctgtttgctcagctcccaaagaggacttaggtgccctctgaggaagcagcaggaagtgaagggagtcctggcttggagaatgggtcaaagacca

SEQ ID NO: 5136 - DNA, 120 bp, Artificial Sequence
  ENSG00000005882_28 (sequence is synthesized)
tcgaggcgccatgacgagccgattggctgggcgttggaatgcccgccagggcaagggtagggaggaggcggccgaaccgcgtcgctgggccgaaaggatccagcaatgcctgtgagaaaa

SEQ ID NO: 5137 - DNA, 120 bp, Artificial Sequence
  ENSG00000005882_29 (sequence is synthesized)
tatacaggacggattcgtataggcttgcaccctggttccgaattttgcaaatattcgcagtctgggtcactgtcatccggactgggaatccccaagacccgttaagggaggataggatcc

SEQ ID NO: 5138 - DNA, 120 bp, Artificial Sequence
  ENSG00000005882_30 (sequence is synthesized)
taatggggaagcaggaaccggccggggcctctcgacggggctgctgatgggaatggggggcatttacaaggacggtcccgaggtttcttcgtgggcctcatgaagggtcttgaagagatc

SEQ ID NO: 5139 - DNA, 120 bp, Artificial Sequence
  ENSG00000005882_31 (sequence is synthesized)
cttttcctgagccgcttggatctttgtggaagcgggtgggctgcatatatacaggacggattcgtataggcttgcaccctggttccgaattttgcaaatattcgcagtctgggtcactgt

SEQ ID NO: 5140 - DNA, 120 bp, Artificial Sequence
  ENSG00000005882_32 (sequence is synthesized)
catccggactgggaatccccaagacccgttaagggaggatagaaggagctggaccctagctgccccagtgggcaaggacacttgaagatcaaatctgttccggcctggcagcctctcccc

SEQ ID NO: 5141 - DNA, 120 bp, Artificial Sequence
  ENSG00000005882_33 (sequence is synthesized)
cccagctcaagggaggctggggatttagtctctcgctgggcagccatgtactcagaactttgtgggagggggtgcctcctttgggtaaggtggttgagcagtgacctcctgacggtttcc

SEQ ID NO: 5142 - DNA, 120 bp, Artificial Sequence
  ENSG00000005882_34 (sequence is synthesized)
attaaacaagttcctcatgctcaaataatttccaaagcaaggtggtaagagttctcttagaatgttatagtcaaagaaaagaataaatgcaatgtggagatgtgatgtggggagagacct

SEQ ID NO: 5143 - DNA, 120 bp, Artificial Sequence
  ENSG00000005882_35 (sequence is synthesized)
ctgaaaagacgtctgtttcaggtttgcaaaggtttaaaaacggcctaagccagggctggaggggtcaggggtcagggaagggaggacagaagcgggggagtggggcagctttaggactgg

SEQ ID NO: 5144 - DNA, 120 bp, Artificial Sequence
  ENSG00000005882_36 (sequence is synthesized)
gctgatgggaatggggggcatttacaaggacggtcccgaggtttcttcgtgggcctcatgaagggtcttgaagagtaaggggcagtgaagctgtgatgttactgcaggaagggagtaggg

SEQ ID NO: 5145 - DNA, 120 bp, Artificial Sequence
  ENSG00000005882_37 (sequence is synthesized)
tggtatccagacgcgaaagggttaatgggagttgtcctcatgactggaggagtaggggcccctcctcccaccagaggaaaccgggggtctgctggtgggagtgaggaggcagggtttaga

SEQ ID NO: 5146 - DNA, 120 bp, Artificial Sequence
  ENSG00000005882_38 (sequence is synthesized)
cagagctggtgagacccctggctcagtccctgcacctcccactccatcgccagtgtccctgggctcagggatggcatctccaagcttttagcagctttgagggtggggtggggacagaca

SEQ ID NO: 5147 - DNA, 120 bp, Artificial Sequence
  ENSG00000005882_39 (sequence is synthesized)
ggagacaccaaagccccaagcgcttggagttgcctagggtcacgtgggaatctgaggccagagcaggactgaggtcaagctcctagtctctgtgtctagccctcttcttaccacccacct

SEQ ID NO: 5148 - DNA, 120 bp, Artificial Sequence
  ENSG00000005882_40 (sequence is synthesized)
ggccgggctgctgaggggacctagaccactcttcagaaccccacaaagggagtctttgaatagttactccagtaactatggagttaatggctccaacatggaaaaataaaatttttcttt

SEQ ID NO: 5149 - DNA, 120 bp, Artificial Sequence
  ENSG00000005882_41 (sequence is synthesized)
ctcattgattttccatttcaaaacgttttgttttcagtgtttgcaaaatgtaaaattatgtcacatctttaaaagaatgtttaatttagtatttataaaaactctcattatgttcaaaaa

SEQ ID NO: 5150 - DNA, 120 bp, Artificial Sequence
  ENSG00000005884_0 (sequence is synthesized)
cgcgaagccgggatcgaaggcgacagcgcggccaagggggcgcggccgggacaagctgggggccggttgcccggggcagggacggcggcgacccggccgctggggaggcaggaagataga

SEQ ID NO: 5151 - DNA, 120 bp, Artificial Sequence
  ENSG00000005884_1 (sequence is synthesized)
aagatagacccacggatcttaggaagggatccgagagcgcagctgtgaaactggctggggctgggggcacgaaaccgatcagcgctacggagcgcagcggccggcgggttccagtgtcct

SEQ ID NO: 5152 - DNA, 120 bp, Artificial Sequence
  ENSG00000005884_2 (sequence is synthesized)
ttccagtgtcctccggcggcgcggggagcaggtgaacaggtcctcacgcccagctccgcgccctcacgcgctctcgccgggaccccgcttccgctggcagccatgggccccggccccagc

SEQ ID NO: 5153 - DNA, 120 bp, Artificial Sequence
  ENSG00000005884_3 (sequence is synthesized)
gccccacgcctgatgctctgtgcgctcgccttgatggtggcggccggcggctgcgtcgtctccgccttcaacctggatacccgattcctggtagtgaaggaggccgggaacccgggcagc

SEQ ID NO: 5154 - DNA, 120 bp, Artificial Sequence
  ENSG00000005884_4 (sequence is synthesized)
ctcttcggctactcggtcgccctccatcggcagacagagcggcagcagcgctacctgctcctggctggtgccccccgggagctcgctgtgcccgatggctacaccaaccggactggtgct

SEQ ID NO: 5155 - DNA, 120 bp, Artificial Sequence
  ENSG00000005884_5 (sequence is synthesized)
gtgtacctgtgcccactcactgcccacaaggatgactgtgagcggatgaacatcacagtgaaaaatgaccctggccatcacattattgaggacatgtggcttggagtgactgtggccagc

SEQ ID NO: 5156 - DNA, 120 bp, Artificial Sequence
  ENSG00000005884_6 (sequence is synthesized)
cagggccctgcaggcagagttctggtctgtgcccaccgctacacccaggtgctgtggtcagggtcagaagaccagcggcgcatggtgggcaagtgctacgtgcgaggcaatgacctagag

SEQ ID NO: 5157 - DNA, 120 bp, Artificial Sequence
  ENSG00000005884_7 (sequence is synthesized)
ctggactccagtgatgactggcagacctaccacaacgagatgtgcaatagcaacacagactacctggagacgggcatgtgccagctgggcaccagcggtggcttcacccagaacactgtg

SEQ ID NO: 5158 - DNA, 120 bp, Artificial Sequence
  ENSG00000005884_8 (sequence is synthesized)
tacttcggcgcccccggtgcctacaactggaaaggaaacagctacatgattcagcgcaaggagtgggacttatctgagtatagttacaaggacccagaggaccaaggaaacctctatatt

SEQ ID NO: 5159 - DNA, 120 bp, Artificial Sequence
  ENSG00000005884_9 (sequence is synthesized)
gggtacacgatgcaggtaggcagcttcatcctgcaccccaaaaacatcaccattgtgacaggtgccccacggcaccgacatatgggcgcggtgttcttgctgagccaggaggcaggcgga

SEQ ID NO: 5160 - DNA, 120 bp, Artificial Sequence
  ENSG00000005884_10 (sequence is synthesized)
gacctgcggaggaggcaggtgctggagggctcgcaggtgggcgcctattttggcagcgccattgccctggcagacctgaacaatgatgggtggcaggacctcctggtgggcgccccctac

SEQ ID NO: 5161 - DNA, 120 bp, Artificial Sequence
  ENSG00000005884_11 (sequence is synthesized)
tacttcgagaggaaagaggaagtagggggtgccatctatgtcttcatgaaccaggcgggaacctccttccctgctcacccctcactccttcttcatggccccagtggctctgcctttggt

SEQ ID NO: 5162 - DNA, 120 bp, Artificial Sequence
  ENSG00000005884_12 (sequence is synthesized)
ttatctgtggccagcattggtgacatcaaccaggatggatttcaggatattgctgtgggagctccgtttgaaggcttgggcaaagtgtacatctatcacagtagctctaaggggctcctt

SEQ ID NO: 5163 - DNA, 120 bp, Artificial Sequence
  ENSG00000005884_13 (sequence is synthesized)
agacagccccagcaggtaatccatggagagaagctgggactgcctgggttggccaccttcggctattccctcagtgggcagatggatgtggatgagaacttctacccagaccttctagtg

SEQ ID NO: 5164 - DNA, 120 bp, Artificial Sequence
  ENSG00000005884_14 (sequence is synthesized)
ggaagcctgtcagaccacattgtgctgctgcgggcccggcccgtcatcaacatcgtccacaagaccttggtgcccaggccagctgtgctggaccctgcactttgcacggccacctcttgt

SEQ ID NO: 5165 - DNA, 120 bp, Artificial Sequence
  ENSG00000005884_15 (sequence is synthesized)
gtgcaagtggagctgtgctttgcttacaaccagagtgccgggaaccccaactacaggcgaaacatcaccctggcctacactctggaggctgacagggaccgccggccgccccggctccgc

SEQ ID NO: 5166 - DNA, 120 bp, Artificial Sequence
  ENSG00000005884_16 (sequence is synthesized)
tttgccggcagtgagtccgctgtcttccacggcttcttctccatgcccgagatgcgctgccagaagctggagctgctcctgatggacaacctccgtgacaaactccgccccatcatcatc

SEQ ID NO: 5167 - DNA, 120 bp, Artificial Sequence
  ENSG00000005884_17 (sequence is synthesized)
tccatgaactactctttacctttgcggatgcccgatcgcccccggctggggctgcggtccctggacgcctacccgatcctcaaccaggcacaggctctggagaaccacactgaggtccag

SEQ ID NO: 5168 - DNA, 120 bp, Artificial Sequence
  ENSG00000005884_18 (sequence is synthesized)
ttccagaaggagtgcgggcctgacaacaagtgtgagagcaacttgcagatgcgggcagccttcgtgtcagagcagcagcagaagctgagcaggctccagtacagcagagacgtccggaaa

SEQ ID NO: 5169 - DNA, 120 bp, Artificial Sequence
  ENSG00000005884_19 (sequence is synthesized)
ttgctcctgagcatcaacgtgacgaacacccggacctcggagcgctccggggaggacgcccacgaggcgctgctcaccctggtggtgcctcccgccctgctgctgtcctcagtgcgcccc

SEQ ID NO: 5170 - DNA, 120 bp, Artificial Sequence
  ENSG00000005884_20 (sequence is synthesized)
tgaggtcatcggggtgaccctgcacacaagggaccttcaggtgcagctgcagctctccacgtcgagtcaccaggacaacctgtggcccatgatcctcactctgctggtggactatacact

SEQ ID NO: 5171 - DNA, 120 bp, Artificial Sequence
  ENSG00000005884_21 (sequence is synthesized)
ccagacctcgcttagcatggtaaatcaccggctacaaagcttctttggggggacagtgatgggtgagtctggcatgaaaactgtggaggatgtaggaagccccctcaagtatgaattcca

SEQ ID NO: 5172 - DNA, 120 bp, Artificial Sequence
  ENSG00000005884_22 (sequence is synthesized)
ggtgggcccaatgggggaggggctggtgggcctggggaccctggtcctaggtctggagtggccctacgaagtcagcaatggcaagtggctgctgtatcccacggagatcaccgtccatgg

SEQ ID NO: 5173 - DNA, 120 bp, Artificial Sequence
  ENSG00000005884_23 (sequence is synthesized)
caatgggtcctggccctgccgaccacctggagaccttatcaaccctctcaacctcactctttctgaccctggggacaggccatcatccccacagcgcaggcggcgacagctggatccagg

SEQ ID NO: 5174 - DNA, 120 bp, Artificial Sequence
  ENSG00000005884_24 (sequence is synthesized)
gggaggccagggccccccacctgtcactctggctgctgccaaaaaagccaagtctgagactgtgctgacctgtgccacagggcgtgcccactgtgtgtggctagagtgccccatccctga

SEQ ID NO: 5175 - DNA, 120 bp, Artificial Sequence
  ENSG00000005884_25 (sequence is synthesized)
tgcccccgttgtcaccaacgtgactgtgaaggcacgagtgtggaacagcaccttcatcgaggattacagagactttgaccgagtccgggtaaatggctgggctaccctattcctccgaac

SEQ ID NO: 5176 - DNA, 120 bp, Artificial Sequence
  ENSG00000005884_26 (sequence is synthesized)
cagcatccccaccatcaacatggagaacaagaccacgtggttctctgtggacattgactcggagctggtggaggagctgccggccgaaatcgagctgtggctggtgctggtggccgtggg

SEQ ID NO: 5177 - DNA, 120 bp, Artificial Sequence
  ENSG00000005884_27 (sequence is synthesized)
tgcagggctgctgctgctggggctgatcatcctcctgctgtggaagtgcggcttcttcaagcgagcccgcactcgcgccctgtatgaagctaagaggcagaaggcggagatgaagagcca

SEQ ID NO: 5178 - DNA, 120 bp, Artificial Sequence
  ENSG00000005884_28 (sequence is synthesized)
gccgtcagagacagagaggctgaccgacgactactgagggggcagccccccgcccccggcccacctggtgtgacttctttaagcggacccgctattatcagatcatgcccaagtaccacg

SEQ ID NO: 5179 - DNA, 120 bp, Artificial Sequence
  ENSG00000005884_29 (sequence is synthesized)
cagtgcggatccgggaggaggagcgctacccacctccagggagcaccctgcccaccaagaagcactgggtgaccagctggcagactcgggaccaatactactgacgtcctccctgatccc

SEQ ID NO: 5180 - DNA, 120 bp, Artificial Sequence
  ENSG00000005884_30 (sequence is synthesized)
accccctcctcccccagtgtcccctttcttcctatttatcataagttatgcctctgacagtccacaggggccaccacctttggctggtagcagcaggctcaggcacatacacctcgtcaa

SEQ ID NO: 5181 - DNA, 120 bp, Artificial Sequence
  ENSG00000005884_31 (sequence is synthesized)
gagcatgcacatgctgtctggccctggggatcttcccacaggagggccagcgctgtggaccttacaacgccgagtgcactgcattcctgtgccctagatgcacgtggggcccactgctcg

SEQ ID NO: 5182 - DNA, 120 bp, Artificial Sequence
  ENSG00000005884_32 (sequence is synthesized)
tggactgtgctggtgcatcacggatggtgcatgggctcgccgtgtctcagcctctgccagcgccaaaacaagccaaagagcctcccaccagagccgggaggaaaaggcccctgcaatgtg

SEQ ID NO: 5183 - DNA, 120 bp, Artificial Sequence
  ENSG00000005884_33 (sequence is synthesized)
gtgacacctccccctttcacactggatccatcttgagccacagtcactggattgactttgctgtcaaaactactgacagggagcagcccccgggccgctggctggtgggcccccaatgac

SEQ ID NO: 5184 - DNA, 120 bp, Artificial Sequence
  ENSG00000005884_34 (sequence is synthesized)
acccatgccagagaggtggggatcctgcctaaggttgtctacgggggcacttggaggacctggcgtgctcagacccaacagcaaaggaactagaaagaaggacccagaacggcttgcttt

SEQ ID NO: 5185 - DNA, 120 bp, Artificial Sequence
  ENSG00000005884_35 (sequence is synthesized)
cctgcatctctgtgaagcctctctccttggccacagactgaactcgcagggaatgcagcaggaaggaacaaagacaggcaaacggcaacgtagcctgggctcactgtgctggggcacggc

SEQ ID NO: 5186 - DNA, 120 bp, Artificial Sequence
  ENSG00000005884_36 (sequence is synthesized)
gggatcctccacagagaggaggggaccaattctggacagacagatgttgggaggatacagaggagatgccacttctcactcaccactaccagccagcctcagaaggccccagagagaccc

SEQ ID NO: 5187 - DNA, 120 bp, Artificial Sequence
  ENSG00000005884_37 (sequence is synthesized)
tgcaagaccacggagggagcgacacttgaatgtagaataggcagggggccctgccccaccccatccagccagaccccacgctgaccatgcgtcaggggcctagaggtggagttcttagct

SEQ ID NO: 5188 - DNA, 120 bp, Artificial Sequence
  ENSG00000005884_38 (sequence is synthesized)
atccttggctttcagagccagcctggctctgccccctcccccatgggctgtgtcctaaggcccatttgagaagctgaggctagttccagaaaacctctcctgacccctgcctgttggcag

SEQ ID NO: 5189 - DNA, 120 bp, Artificial Sequence
  ENSG00000005884_39 (sequence is synthesized)
gcccactccccagccccagccccttccatggtactgtagcaggggaattccctccccctccttgtgccttctttgtatataggcttctcacggcgaccaataaacagctcccagtttgta

SEQ ID NO: 5190 - DNA, 120 bp, Artificial Sequence
  ENSG00000005884_40 (sequence is synthesized)
gatgcgcatttgtgtgtggaggggaggcctggctgacagatcctttggggattacagagactttgaccgagtccgggtaaatggctgggctaccctattcctccgaaccagcatccccac

SEQ ID NO: 5191 - DNA, 120 bp, Artificial Sequence
  ENSG00000005884_41 (sequence is synthesized)
ggatgtggattgtttgggtttgatttgtgcctgcatggcgtctccatgacatatgtcttctatttggtgggtcatattggcatctccatgtccttcccatgcacatgtccttcccaccca

SEQ ID NO: 5192 - DNA, 120 bp, Artificial Sequence
  ENSG00000005884_42 (sequence is synthesized)
tgacctgtggccggaagagccatttgcagagccctgtgccctggcacagtcacacctgtcaaacaagaactatgctgcatattggaggctgacctcacactcccatttccctcctctcct

SEQ ID NO: 5193 - DNA, 120 bp, Artificial Sequence
  ENSG00000005884_43 (sequence is synthesized)
tgggaggaaagaagagggcagcaggggggtccacggcgcgtgtgtgctggggcctgcacacatgtcccttcctgtggctgtgtgtccctcgctctctgcactcctggggagggggtgagt

SEQ ID NO: 5194 - DNA, 120 bp, Artificial Sequence
  ENSG00000005884_44 (sequence is synthesized)
agtgagtgctggggtgcagcgtaaaaggggtacgctcccctgtccccttgctgaccaccctgtctacctgtagccctggcctacactctggaggctgacagggaccgccggccgccccgg

SEQ ID NO: 5195 - DNA, 86 bp, Artificial Sequence
  ENSG00000005884_45 (sequence is synthesized)
tccatctcaaaaaaaaaaaaaaaaaaacctcatatacacacacatccgtatttatctccattgtaggggaagaaaaagaatgggac

SEQ ID NO: 5196 - DNA, 68 bp, Artificial Sequence
  ENSG00000005884_46 (sequence is synthesized)
agaatcgcttgaacctgggaggcagagctggtggtgagccaagatttaaaataaaataaaataaaata

SEQ ID NO: 5197 - DNA, 120 bp, Artificial Sequence
  ENSG00000005884_47 (sequence is synthesized)
aataaaataaaataaaataaaataaaaagaatgggaatatatgctatgaattctttgtggggtttttttggtgaatatttatggagtgtttgctgtgtagcaggtgttgctctaagcagt

SEQ ID NO: 5198 - DNA, 120 bp, Artificial Sequence
  ENSG00000005884_48 (sequence is synthesized)
taagcagttttcttatatcaaacacacttaattctccccagcaacctatgagagaggtaatattcccattttacagatgaacaacagagaggttaagtaacttgccaaggccaaacagct

SEQ ID NO: 5199 - DNA, 120 bp, Artificial Sequence
  ENSG00000005884_49 (sequence is synthesized)
cgtgaatagcaaacctgggctagaacccaggtaatgtggctccagaacccctgcttttggtcgttctgctattctatgaggtagtcattatgatccccctcatcagaaagcagaaagcat

SEQ ID NO: 5200 - DNA, 120 bp, Artificial Sequence
  ENSG00000005884_50 (sequence is synthesized)
gagattcagaggggtgcaattacttgtccaaggtcacacagctcatcagggaaggagctggtacccaggcccagatgtgtgggtcacacacccagactccaggccacctcccagatctga

SEQ ID NO: 5201 - DNA, 120 bp, Artificial Sequence
  ENSG00000005884_51 (sequence is synthesized)
ggccgctcctctggagtcaagtctgtgcctgggagaagcaggaaggaccactggacctgctgtcagtggggcaggcacaggctttttccagtcccaggctgccccctactggcagcagga

SEQ ID NO: 5202 - DNA, 120 bp, Artificial Sequence
  ENSG00000005884_52 (sequence is synthesized)
caaacagcaggtgcctgggcccagctaggataggaagggtgaggatgggcctaagcaggctgacacagggctgagtcctcctctccccgctccagttctctgtggacattgactcggagc

SEQ ID NO: 5203 - DNA, 120 bp, Artificial Sequence
  ENSG00000005884_53 (sequence is synthesized)
cagaagctgagcaggtggctgtgggccgccggccgcgttaatcggccaagggtgggacggggcctcattaactggcagggtgggggcggggcctcatggcaaggcgagcccagggacagg

SEQ ID NO: 5204 - DNA, 120 bp, Artificial Sequence
  ENSG00000005884_54 (sequence is synthesized)
gctttagcgggaacaggtgggatggtcagaaacggggctttctcctccaggtgcgactagaggacggggcctggctgtcccaagatgggcttttctcacctaggagaccccaggggcggg

SEQ ID NO: 5205 - DNA, 120 bp, Artificial Sequence
  ENSG00000005884_55 (sequence is synthesized)
cctctggtctgggccttcttgggggccttagcgtctctgctgcttggagaatccggctctcaagctctagggcttctgaccttgcaccacagaggagggaggacaagccctactttgacc

SEQ ID NO: 5206 - DNA, 120 bp, Artificial Sequence
  ENSG00000005884_56 (sequence is synthesized)
cgaccctgaccttattcgccttctttcctcagcccggggcctgccaagctaatgagaccatcttttgcgagctggggaaccccttcaaacggaaccagaggatggagctgctcatcgcct

SEQ ID NO: 5207 - DNA, 120 bp, Artificial Sequence
  ENSG00000005884_57 (sequence is synthesized)
ctcaaaggccaaagcattccttccaaaactgagatctggccatgtcatgcccctgcctaaaatccctctgtggttcccctaaggaccttcccagcctgcctttgtgtgcctccccagagg

SEQ ID NO: 5208 - DNA, 120 bp, Artificial Sequence
  ENSG00000005884_58 (sequence is synthesized)
ctcctggactccagctatgctgagggccttgcaggtctctgattcaccctgctggctcttgcttcctggccctgcacatgtgtgcctttgcccaagtgctcttcctccccttcttcacct

SEQ ID NO: 5209 - DNA, 120 bp, Artificial Sequence
  ENSG00000005884_59 (sequence is synthesized)
ggagaaccctggtgattgtcctcagactcagattaggtcacctcttctgctggcctccatcactgccccctcagccctgagcctgggctactgtgctccctgcttcccactcccggggca

SEQ ID NO: 5210 - DNA, 120 bp, Artificial Sequence
  ENSG00000005884_60 (sequence is synthesized)
cttccttctagtgtcttttttccttgcctgccttaccctacactgggcacttctggagggcaggagctgggggtctcctggcaccaagaatctgtaaatgtatgttgaataaataacaag

SEQ ID NO: 5211 - DNA, 120 bp, Artificial Sequence
  ENSG00000005884_61 (sequence is synthesized)
accgcagagagaatggcctggaggagatagaaggcttgttcacacggcttctagtcgcttcttgtccagctgggaagagggtgccctagaggagagtggggctggatgggattggtagag

SEQ ID NO: 5212 - DNA, 120 bp, Artificial Sequence
  ENSG00000005884_62 (sequence is synthesized)
ctcagaataatgacgagctggagaaggggagttgggagggctgccctgtgggtggagggcccaagcgggacccactcctgccctctggagactttgggcactgaagtatgggtgaggtgc

SEQ ID NO: 5213 - DNA, 120 bp, Artificial Sequence
  ENSG00000005884_63 (sequence is synthesized)
ctcatccacttcctccgcatgcctacactgggtgctcagccttcgtgggaacaagccgagggagccgagggaactgcaaggaggagaaagggcagagagggccccaggcagctcagcgct

SEQ ID NO: 5214 - DNA, 120 bp, Artificial Sequence
  ENSG00000005884_64 (sequence is synthesized)
ggctggcgctccttcctgggaggctgactgccggaagaggcccagccctgctgaccccggctcacccagctctggtctgggggctaatcaaatgtgtcacctcctgcccacattctatag

SEQ ID NO: 5215 - DNA, 120 bp, Artificial Sequence
  ENSG00000005884_65 (sequence is synthesized)
tggcagcccctgagttctccatttctgggtcccagatagacatttccccccgcatttttttctctctctgtctcttgttgttgttgttatattccaaaaaggattttgattttattgctt

SEQ ID NO: 5216 - DNA, 120 bp, Artificial Sequence
  ENSG00000005884_66 (sequence is synthesized)
cacacacagaagagttctggttaaggcttgccttgctcctggtgctcatatgatgccaccaggatgtgatttatctcaagcacttaactctgtgttcttcgtgttgcctccattctttga

SEQ ID NO: 5217 - DNA, 120 bp, Artificial Sequence
  ENSG00000005884_67 (sequence is synthesized)
taggcattcttttcgtagtgccaagatgaatgcaacagcttcagctttatcttctttgaccttcaagttctatagtcccagtagatatctgactacaactcattagctctgactatttca

SEQ ID NO: 5218 - DNA, 120 bp, Artificial Sequence
  ENSG00000005884_68 (sequence is synthesized)
ggtactcctctctgaaacaattactgtgaccaagagaatgcaatacttatactttcttcagacatgaattatcagtatccagataggcacataaactcagtcttagaatgtgttgctttg

SEQ ID NO: 5219 - DNA, 86 bp, Artificial Sequence
  ENSG00000005884_69 (sequence is synthesized)
ggggaagcctcacaatcacgctgatggcagcaggcaaagagagaatgaggctgtctctctctctctctctctctcttttcttttct

SEQ ID NO: 5220 - DNA, 120 bp, Artificial Sequence
  ENSG00000005884_70 (sequence is synthesized)
caaagagagaatgaggctgtctctctctctctctctctctcttttcttttctttctcttctttcttctttctttcaagatagaagactcccagctgggtgtggtggttcacgcctgtaat

SEQ ID NO: 5221 - DNA, 120 bp, Artificial Sequence
  ENSG00000005889_0 (sequence is synthesized)
tggtctcgaactcctgggctcaagccgttctcccgcctcccactgcccgcctgtcactgccgtctgttccctgagctgtgctttacgctgggaaagacatagaagaactattaagaagat

SEQ ID NO: 5222 - DNA, 120 bp, Artificial Sequence
  ENSG00000005889_1 (sequence is synthesized)
aaagacatagaagaactattaagaagatagaattgttttgctgcgcagtacagcaacagtggatgttcaagattaagattagagtcaagttgtgtgattaagacaggagctgtgactgat

SEQ ID NO: 5223 - DNA, 120 bp, Artificial Sequence
  ENSG00000005889_2 (sequence is synthesized)
gagaattaaaggccatggatgaagatgggcttgaattacaacaagagccaaactcattttttgatgcaacaggagctgatggtacacacatggatggtgatcaaattgttgtggaagtac

SEQ ID NO: 5224 - DNA, 120 bp, Artificial Sequence
  ENSG00000005889_3 (sequence is synthesized)
aagaaactgtttttgtttcagatgttgtggattcagacataactgtgcataactttgttcctgatgacccagattcagttgtaatccaagatgttattgaggacgttgttatagaagatg

SEQ ID NO: 5225 - DNA, 120 bp, Artificial Sequence
  ENSG00000005889_4 (sequence is synthesized)
ttcagtgcccagatatcatggaagaagcagatgtgtctgaaacggtcatcattcctgagcaagtgctggactcagatgtaactgaagaagtttctttagcacattgcacagtcccagatg

SEQ ID NO: 5226 - DNA, 120 bp, Artificial Sequence
  ENSG00000005889_5 (sequence is synthesized)
atgttttagcttctgacattacttcagcctcaatgtctatgccagaacacgtcttgacgggtgattctatacatgtgtctgacgttggacatgttggacatgttggacatgttgaacatg

SEQ ID NO: 5227 - DNA, 120 bp, Artificial Sequence
  ENSG00000005889_6 (sequence is synthesized)
tggttcatgatagtgtagtggaagcagaaattgtcactgatcctctgactaccgacgtagtttcagaagaagtattggtagcagactgtgcctctgaagcagtcatagatgccaatggga

SEQ ID NO: 5228 - DNA, 120 bp, Artificial Sequence
  ENSG00000005889_7 (sequence is synthesized)
tccctgtggaccagcaggatgatgacaaaggcaactgtgaggactaccttatgatttccttggatgatgctggcaaaatagaacacgatggttcttctggaatgaccatggacacagagt

SEQ ID NO: 5229 - DNA, 120 bp, Artificial Sequence
  ENSG00000005889_8 (sequence is synthesized)
cggaaattgatccttgtaaagtggatggcacttgccctgaggtcatcaaggtgtacatttttaaagctgaccctggagaagatgacttaggtggaactgtagacattgtggagagtgagc

SEQ ID NO: 5230 - DNA, 120 bp, Artificial Sequence
  ENSG00000005889_9 (sequence is synthesized)
ctgagaatgatcatggagttgaactgcttgatcagaacagcagtattcgtgttcccagggaaaagatggtttatatgactgtcaatgactctcagccagaagatgaagatttaaatgttg

SEQ ID NO: 5231 - DNA, 120 bp, Artificial Sequence
  ENSG00000005889_10 (sequence is synthesized)
ctgaaatcgctgacgaagtttatatggaagtgatcgtaggagaggaggatgctgcagcagcagcggcagccgccgccgtgcacgagcagcaaatggatgacaatgaaatcaaaaccttca

SEQ ID NO: 5232 - DNA, 120 bp, Artificial Sequence
  ENSG00000005889_11 (sequence is synthesized)
tgccgattgcatgggcagcagcttatggtaataattctgatggaattgaaaaccggaatggcactgcaagtgccctcttgcacatagatgagtctgctggcctcggcagactggctaaac

SEQ ID NO: 5233 - DNA, 120 bp, Artificial Sequence
  ENSG00000005889_12 (sequence is synthesized)
aagtcgagaggttttttgaaaaggcacatgaaaaaccatcccgaacaccttgccaagaagaaataccgctgtactgactgtgattacactaccaacaagaagataagtttacacaaccac

SEQ ID NO: 5234 - DNA, 120 bp, Artificial Sequence
  ENSG00000005889_13 (sequence is synthesized)
ctggagagccacaagctgaccagcaaggcagagaaggccattgaatgcgatgagtgtgggaagcatttctctcatgcaggggctttgtttactcacaaaatggtgcataaggaaaaagga

SEQ ID NO: 5235 - DNA, 120 bp, Artificial Sequence
  ENSG00000005889_14 (sequence is synthesized)
gccaacaaaatgcacaagtgtaaattctgtgaatacgagacagctgaacaagggttattgaatcgccacctcttggcagtccacagcaagaactttcctcatatttgtgtggagtgtggt

SEQ ID NO: 5236 - DNA, 120 bp, Artificial Sequence
  ENSG00000005889_15 (sequence is synthesized)
aagggttttcgtcacccgtcagagctcaaaaagcacatgagaatccatactggggagaagccgtaccaatgccagtactgcgaatataggtctgcagactcttctaacttgaaaacgcat

SEQ ID NO: 5237 - DNA, 120 bp, Artificial Sequence
  ENSG00000005889_16 (sequence is synthesized)
gtcaaaactaagcatagtaaagagatgccattcaagtgtgacatttgtcttctgactttctcggataccaaagaggtgcagcaacatgctcttatccaccaagaaagcaaaacacaccag

SEQ ID NO: 5238 - DNA, 120 bp, Artificial Sequence
  ENSG00000005889_17 (sequence is synthesized)
tgtttgcattgcgaccacaagagttcgaactcaagtgatttgaaacgacacataatttcagttcacacgaaagactacccccataagtgtgacatgtgtgataaaggctttcacaggcct

SEQ ID NO: 5239 - DNA, 120 bp, Artificial Sequence
  ENSG00000005889_18 (sequence is synthesized)
tcagaactcaagaaacacgtggctgcccacaagggcaaaaaaatgcaccagtgtagacattgtgactttaagattgcagatccatttgttctaagtcgccatattctctcagttcacaca

SEQ ID NO: 5240 - DNA, 120 bp, Artificial Sequence
  ENSG00000005889_19 (sequence is synthesized)
aaggatcttccatttaggtgcaagagatgtagaaagggatttaggcaacagagtgagcttaaaaagcatatgaagacacacagtggcaggaaagtgtatcagtgtgagtactgtgagtat

SEQ ID NO: 5241 - DNA, 120 bp, Artificial Sequence
  ENSG00000005889_20 (sequence is synthesized)
agcactacagatgcctcaggctttaaacggcacgttatttccattcacacgaaagactatcctcaccggtgtgagtactgcaagaaaggcttccgaagaccttcagaaaagaaccagcac

SEQ ID NO: 5242 - DNA, 120 bp, Artificial Sequence
  ENSG00000005889_21 (sequence is synthesized)
ataatgcgacatcataaagaagttggcctgccctaacaatacttctacagaacgtttgtagagatattggccttgaagcagaaaattcattttaaagccaatcagtctcattcacataca

SEQ ID NO: 5243 - DNA, 120 bp, Artificial Sequence
  ENSG00000005889_22 (sequence is synthesized)
atactgtatattgatttatgctgtgtacaaatagaattattacttctagttgacttttttttaaatatacattttgctcagtagtgtgttctgaattctattcagtttgtttaataaata

SEQ ID NO: 5244 - DNA, 120 bp, Artificial Sequence
  ENSG00000005889_23 (sequence is synthesized)
gggaaaactggcaacatgctagttacttttaataaagtaatccctgattctataccgaagttttatatcttagaattttatatttatttaaatatttaccttgcttaccttgatggtact

SEQ ID NO: 5245 - DNA, 120 bp, Artificial Sequence
  ENSG00000005889_24 (sequence is synthesized)
tccccatacatttctcacaataaaattgtcagagacatctactaatataaatgggagattttacagtcaggtctaattatcataacatggaagtcatttacttgtcttgcttaatatttt

SEQ ID NO: 5246 - DNA, 120 bp, Artificial Sequence
  ENSG00000005889_25 (sequence is synthesized)
cagaccacttgacagtgaaagtttccatttgagctgttgcgtccctggctttgctgagtaaagagcagtggctgggttcgtgtttacttttcaaatatacttcttttggctttctttgga

SEQ ID NO: 5247 - DNA, 120 bp, Artificial Sequence
  ENSG00000005889_26 (sequence is synthesized)
ttatttacatcttttgtcagcgtagcaaacttttagaaaaccttattgaaaaactgtgcttgctcatgttgtattttgattattctgtctgtgcggcttcatcttggaatggttgtgtgc

SEQ ID NO: 5248 - DNA, 120 bp, Artificial Sequence
  ENSG00000005889_27 (sequence is synthesized)
tacaaatgacacttactgaggactgcattttggaatctcctagaggtaactcatggcttataggatcttttgcaactttatgtatgtaaatgtaccctgaattatatatatacacatata

SEQ ID NO: 5249 - DNA, 120 bp, Artificial Sequence
  ENSG00000005889_28 (sequence is synthesized)
atgcatgagagagcattttgtaagtcatgctcttcagagagactactcaggtgaagaattagaaggaaaataaggacactagtatttttaaagagtaaagatattttcttttaaatatct

SEQ ID NO: 5250 - DNA, 120 bp, Artificial Sequence
  ENSG00000005889_29 (sequence is synthesized)
ttggtaattgaaacatagaggttaagatgtttctaggtagaatgttttcatacaatttcacctccatgtctttatgtttttctgaaaagcaaatgagtatccagacatgactcccacagt

SEQ ID NO: 5251 - DNA, 120 bp, Artificial Sequence
  ENSG00000005889_30 (sequence is synthesized)
tctctttgagaagcctgagagggaactctgtcttacctagtgagggggatggaaaagaagtgatggctctgtggaccagagaacgggtgctaattatgacttcacactcggcaagttcag

SEQ ID NO: 5252 - DNA, 120 bp, Artificial Sequence
  ENSG00000005889_31 (sequence is synthesized)
gctgatctgttatttctcagttacagttagcaaactttaaaaacttaacactcaagttggctttgattaaaaggtaaagatgtgttttaagtggataaggaaagtctgaggccttatttg

SEQ ID NO: 5253 - DNA, 79 bp, Artificial Sequence
  ENSG00000005889_32 (sequence is synthesized)
tgtgttttaagtggataaggaaagtctgaggccttatttggaacatcactaagtcttccacaggagacggagtcttgct

SEQ ID NO: 5254 - DNA, 85 bp, Artificial Sequence
  ENSG00000005889_33 (sequence is synthesized)
atagtgctgggtttacaggcgtgagccaccgtgcccagacaccacataggtctgaatcagtgtcatacattcataaaacaaactc

SEQ ID NO: 5255 - DNA, 120 bp, Artificial Sequence
  ENSG00000005889_34 (sequence is synthesized)
ataggtctgaatcagtgtcatacattcataaaacaaactcggttaattagaacttggttatgttaagacgaatctgggagaacagaaaacagtttttggggtcccttcagttggctattg

SEQ ID NO: 5256 - DNA, 120 bp, Artificial Sequence
  ENSG00000005889_35 (sequence is synthesized)
gtccgtatgcatctagcacattgtaggagatttagaaattgtcttcccacccgatagctgccttgtcacctcattatggtgctccatcccctgtgtgcttaggtttttacctttcatctt

SEQ ID NO: 5257 - DNA, 120 bp, Artificial Sequence
  ENSG00000005889_36 (sequence is synthesized)
tctctttgccattgatgtttgtattcaagagttatatttttagggttagaaatcaaaatatttggtgtttggcaaacctctgaagtgctagactgatttagtctagttttaaaccaagtg

SEQ ID NO: 5258 - DNA, 120 bp, Artificial Sequence
  ENSG00000005889_37 (sequence is synthesized)
ctttaggcaggtgtgaactccagcccaaatgccagtcaaagtcaaggcatgggttttcctagcctatcttataggaaattcctgtaccttcttggcccccataatgtgtttttttttttt

SEQ ID NO: 5259 - DNA, 120 bp, Artificial Sequence
  ENSG00000005889_38 (sequence is synthesized)
ttttttttttaaactaacttacaattttgtgatccgtgattcattgccctgcgattcttgaaagctctgtctgtttttttgtgagaacctttaaaatctcccttaatttttattttccca

SEQ ID NO: 5260 - DNA, 120 bp, Artificial Sequence
  ENSG00000005889_39 (sequence is synthesized)
tctcccttaatttttattttcccagaaataatgtaaaaacacttaaatgaaagtggaaatgtattaattttaaatcctataaaattaatacagaaaatataaatgattgggtcatttaac

SEQ ID NO: 5261 - DNA, 120 bp, Artificial Sequence
  ENSG00000005889_40 (sequence is synthesized)
gataaagaacacaacacttcacacattttatatttctcttacatactccggaatcatacacagttctttttaaagcacaacattaaaacctttaaaaggtatttaagggtttggtcaagt

SEQ ID NO: 5262 - DNA, 120 bp, Artificial Sequence
  ENSG00000005889_41 (sequence is synthesized)
gaatatgataaaacatacttgtctgtataaagagaaaatgaaattgtagtcactgttatgtactgacattagttacaacctagttttaattcttaaaacaattttgattagcaaagctaa

SEQ ID NO: 5263 - DNA, 120 bp, Artificial Sequence
  ENSG00000005889_42 (sequence is synthesized)
aaaaaaatggatgtttcagttaaatgttttaaagaggtacagatttttacaaggacataatataagttattgttctgtagaaatatcctattaaatattgtatgtccctccctctgtaca

SEQ ID NO: 5264 - DNA, 120 bp, Artificial Sequence
  ENSG00000005889_43 (sequence is synthesized)
ctttgtaaagaaagtaaaatacataaaaagaaaatcatatagggatgtgtgacattattgtaattgtgtacttgagaataacgtgcaaaaataaaaatcagaatattttcctgttattga

SEQ ID NO: 5265 - DNA, 120 bp, Artificial Sequence
  ENSG00000005889_44 (sequence is synthesized)
atgtttagtctatttgataccagtactaagttaatgctttttctcaaggaaaaaaaatgtacagtttttgtaaacctaataaacatcaaaagcagtggattattttcatccccccatttc

SEQ ID NO: 5266 - DNA, 120 bp, Artificial Sequence
  ENSG00000005889_45 (sequence is synthesized)
ttaatttctttttcacagcagtggaatgcaaagtgcttgattgctttgaattttgtgactcggatgcaaatactggtaatatttcagttctgtgaatttgcaagtaatatttcagagaag

SEQ ID NO: 5267 - DNA, 120 bp, Artificial Sequence
  ENSG00000005889_46 (sequence is synthesized)
ttaagaggtgattggtgagtcctttgatgagcatgtccttggaattcattttttcttttatcttcataaaggatttgttttattagcatctccaattcccctgagataaattactcatgc

SEQ ID NO: 5268 - DNA, 120 bp, Artificial Sequence
  ENSG00000005889_47 (sequence is synthesized)
ataaagtggtttttgagagcacttaaagttcatttcagtattaatttacagcatatttaatcagtggggactgttaccacctccacaacagaaatcatgccctcgagttaccccactgcg

SEQ ID NO: 5269 - DNA, 120 bp, Artificial Sequence
  ENSG00000005889_48 (sequence is synthesized)
cccagtttagaggactagtagatgctaacatactagggaatggtcattgccacagttaaaaatcggcagttaagtaaatgtcaggagtcaaaagagatagagttgtgccatctttgattt

SEQ ID NO: 5270 - DNA, 120 bp, Artificial Sequence
  ENSG00000005889_49 (sequence is synthesized)
tatagacaagattctgcagttcttccaactgtatgaacaaacgtttgcctaatagttgaaacaataaattaaaattttaggtaaatgacgaagggaatgtggtgaatgtcactgtccaga

SEQ ID NO: 5271 - DNA, 120 bp, Artificial Sequence
  ENSG00000005889_50 (sequence is synthesized)
gccataaatcagacaaaaccatacatagcatgctgaaaaacttttgtaatggaacacccaacaaatgacacctaacctgtctgtgatccaacaagtccgataacatgctgctgtatttgt

SEQ ID NO: 5272 - DNA, 120 bp, Artificial Sequence
  ENSG00000005889_51 (sequence is synthesized)
attctctgggaatctcagtattaataatttcatttcccacaaattctagcattcatgtaaggaaaaacatggctaatcaatatcttaaaggggcaatctttcagagcagtggttttcaaa

SEQ ID NO: 5273 - DNA, 120 bp, Artificial Sequence
  ENSG00000005889_52 (sequence is synthesized)
gtatggccggacagcattggcagcatcttaatctcctgggactttgttaaaaatgcaaattctcagccccaccctagtcctactgaattgggaaactggcgtgggacccagcagtctttg

SEQ ID NO: 5274 - DNA, 120 bp, Artificial Sequence
  ENSG00000005889_53 (sequence is synthesized)
ttttaacatgttctccaagtgattctgatgcctgttcaaacttgggaaacacttttagagcacttgaggaacctaaaagatgactggttcagcattttgtgtggtagataagaaagaaat

SEQ ID NO: 5275 - DNA, 120 bp, Artificial Sequence
  ENSG00000005889_54 (sequence is synthesized)
tatcacaaaaaatcagaaatgaacagtgagagaaaaataggaccccagacagtttataccttccatttgctgttttaaaagtgtgagcctgccaagtcaacaagtatgcctttagcgcac

SEQ ID NO: 5276 - DNA, 120 bp, Artificial Sequence
  ENSG00000005889_55 (sequence is synthesized)
atgtaaatagcctgcacttcctaaatctcgtgtggcctcccatggttacattcttcaaaggtaaactgagttgagaggaagattcagcatttaaaagagaagggttgaaaaagattgtgt

SEQ ID NO: 5277 - DNA, 120 bp, Artificial Sequence
  ENSG00000005889_56 (sequence is synthesized)
gtgtgtgtgtgtgtgtttaattggcccagggttacttaaataaatcataaccattttgccacattctgtaactgtttagctaaggtcaaattaagtttaccctatggattttgtttcatc

SEQ ID NO: 5278 - DNA, 120 bp, Artificial Sequence
  ENSG00000005889_57 (sequence is synthesized)
ttttgtttcgtgtatatactgtttgcctttttcataaaaatcttggatttgttatatattgttcctgttatttttgacatctttgctattgtaaataaattactattttgttttaagtta

SEQ ID NO: 5279 - DNA, 88 bp, Artificial Sequence
  ENSG00000005889_58 (sequence is synthesized)
ctgatgagaattaaaggccatggatgaagatgggcttgaattacaacaagagccaaactcattttttgatgcaacgcacagtggcgcc

SEQ ID NO: 5280 - DNA, 120 bp, Artificial Sequence
  ENSG00000005889_59 (sequence is synthesized)
gagacttaaatcacacagttaatgaattcccaacttgtttgaagctggaggtgattcgactcccttcagtggttcaacactaataatagcaccaaggaacatgtcactggtgcatatagg

SEQ ID NO: 5281 - DNA, 120 bp, Artificial Sequence
  ENSG00000005889_60 (sequence is synthesized)
gacggcgggcccgtgccggggagctgggccgctttttgtcagctccgagctcggcccctcctccctccctccgcccgccccaccagccggagcccggcccagtgctccagagaaaggccg

SEQ ID NO: 5282 - DNA, 80 bp, Artificial Sequence
  ENSG00000005889_61 (sequence is synthesized)
gagcaggccccgaggaggccgcagttaggcccggggaggagcccggctgccccgagcggcggcggaggcgcgctccgtaa

SEQ ID NO: 5283 - DNA, 80 bp, Artificial Sequence
  ENSG00000005889_62 (sequence is synthesized)
cggcggcggaggcgcgctccgtaagcgggcgggggttgggggagggtcgcccggttgtgccggaggcggtcgaggggccc

SEQ ID NO: 5284 - DNA, 120 bp, Artificial Sequence
  ENSG00000005889_63 (sequence is synthesized)
caacaggtataactacttgaattgttccacttcccatctaccagatttggagttggttgtcatcaatgaattgctagaactctcacattgatcattcacaggttatcttgttatcctgtc

SEQ ID NO: 5285 - DNA, 120 bp, Artificial Sequence
  ENSG00000005889_64 (sequence is synthesized)
ggcttgaattacaacaagagccaaactcattttttgatgcaacagtttttcagaacacttcccatacattcccatttgatcatcaccacagtcctgtgagattcagaggatgatttctaa

SEQ ID NO: 5286 - DNA, 120 bp, Artificial Sequence
  ENSG00000005889_65 (sequence is synthesized)
atttctatagccatagatggagcatattggtggtatattgcaccagaacaaaaagggaagcgtgtgaagggagaaaggaaaaaaaatagaagtaaaagaaacacatgggagagatggaaa

SEQ ID NO: 5287 - DNA, 120 bp, Artificial Sequence
  ENSG00000005889_66 (sequence is synthesized)
aacacatttactgcgggcgggggtctgagggcctgcaaacaactcgagctggagcctcggccaggaccggcgcgagaggcgccggagcccggcccagtgctccagagaaaggccggcctg

SEQ ID NO: 5288 - DNA, 120 bp, Artificial Sequence
  ENSG00000005889_67 (sequence is synthesized)
cgggaccgtttcaccctcagcgcccctggccctgcgccttcccccgcgcctgtagccacccgagggcagtcggggcaggtggcattccggacacctgggcttaccagggcatacgggacc

SEQ ID NO: 5289 - DNA, 120 bp, Artificial Sequence
  ENSG00000005889_68 (sequence is synthesized)
ccaggaaatgttatttttgcttaagtcaaatcatatgtggctgctaaggtgctttcgatgcagttgtttttccaacaatctttgccgccccgagtatctgaataaaggaagaaaaataaa

SEQ ID NO: 5290 - DNA, 120 bp, Artificial Sequence
  ENSG00000005893_0 (sequence is synthesized)
ccgattcctggcttttgcaaggctgtggtcggtggtcatcagtgctcttgacccaggtccagcgagccttttccctggtgttgcagctgttgttgtaccgccgccgtcgccgccgtcgcc

SEQ ID NO: 5291 - DNA, 120 bp, Artificial Sequence
  ENSG00000005893_1 (sequence is synthesized)
gcctgctctgcggggtcatggtgtgcttccgcctcttcccggttccgggctcagggctcgttctggtctgcctagtcctgggagctgtgcggtcttatgcattggaacttaatttgacag

SEQ ID NO: 5292 - DNA, 120 bp, Artificial Sequence
  ENSG00000005893_2 (sequence is synthesized)
attcagaaaatgccacttgcctttatgcaaaatggcagatgaatttcacagtacgctatgaaactacaaataaaacttataaaactgtaaccatttcagaccatggcactgtgacatata

SEQ ID NO: 5293 - DNA, 120 bp, Artificial Sequence
  ENSG00000005893_3 (sequence is synthesized)
atggaagcatttgtggggatgatcagaatggtcccaaaatagcagtgcagttcggacctggcttttcctggattgcgaattttaccaaggcagcatctacttattcaattgacagcgtct

SEQ ID NO: 5294 - DNA, 120 bp, Artificial Sequence
  ENSG00000005893_4 (sequence is synthesized)
cattttcctacaacactggtgataacacaacatttcctgatgctgaagataaaggaattcttactgttgatgaacttttggccatcagaattccattgaatgacctttttagatgcaata

SEQ ID NO: 5295 - DNA, 120 bp, Artificial Sequence
  ENSG00000005893_5 (sequence is synthesized)
gtttatcaactttggaaaagaatgatgttgtccaacactactgggatgttcttgtacaagcttttgtccaaaatggcacagtgagcacaaatgagttcctgtgtgataaagacaaaactt

SEQ ID NO: 5296 - DNA, 120 bp, Artificial Sequence
  ENSG00000005893_6 (sequence is synthesized)
caacagtggcacccaccatacacaccactgtgccatctcctactacaacacctactccaaaggaaaaaccagaagctggaacctattcagttaataatggcaatgatacttgtctgctgg

SEQ ID NO: 5297 - DNA, 120 bp, Artificial Sequence
  ENSG00000005893_7 (sequence is synthesized)
ctaccatggggctgcagctgaacatcactcaggataaggttgcttcagttattaacatcaaccccaatacaactcactccacaggcagctgccgttctcacactgctctacttagactca

SEQ ID NO: 5298 - DNA, 120 bp, Artificial Sequence
  ENSG00000005893_8 (sequence is synthesized)
atagcagcaccattaagtatctagactttgtctttgctgtgaaaaatgaaaaccgattttatctgaaggaagtgaacatcagcatgtatttggttaatggctccgttttcagcattgcaa

SEQ ID NO: 5299 - DNA, 120 bp, Artificial Sequence
  ENSG00000005893_9 (sequence is synthesized)
ataacaatctcagctactgggatgcccccctgggaagttcttatatgtgcaacaaagagcagactgtttcagtgtctggagcatttcagataaatacctttgatctaagggttcagcctt

SEQ ID NO: 5300 - DNA, 120 bp, Artificial Sequence
  ENSG00000005893_10 (sequence is synthesized)
tcaatgtgacacaaggaaagtattctacagcccaagagtgttcgctggatgatgacaccattctaatcccaattatagttggtgctggtctttcaggcttgattatcgttatagtgattg

SEQ ID NO: 5301 - DNA, 120 bp, Artificial Sequence
  ENSG00000005893_11 (sequence is synthesized)
cttacgtaattggcagaagaaaaagttatgctggatatcagactctgtaacactaatcaatacgtgatctctgttacaaaagaaaaaagcaagtacaagttccaacatgcaatactggtc

SEQ ID NO: 5302 - DNA, 120 bp, Artificial Sequence
  ENSG00000005893_12 (sequence is synthesized)
aacttaaggtatatttagttgcagtccagctctttagaatgggtggtatgggggatttcaaacttaaacaaaaaactatcaactacaaattagttgcctgactttggtttttccaaccaa

SEQ ID NO: 5303 - DNA, 120 bp, Artificial Sequence
  ENSG00000005893_13 (sequence is synthesized)
ggaatttaaaactgttatttttacagcaaaagatgtgcaaaatcactggattataagttctattttactgtcttgaattagtatttcagtgttttcattttagacattcagactaaaaat

SEQ ID NO: 5304 - DNA, 120 bp, Artificial Sequence
  ENSG00000005893_14 (sequence is synthesized)
acaccgtttagaaaaaacaatttttgaaaaagagattttttttccctgcaggtagttgagttggaacaacatgttctaccgtggatttgtacttgctccttttgctctttttgtgtgtgt

SEQ ID NO: 5305 - DNA, 120 bp, Artificial Sequence
  ENSG00000005893_15 (sequence is synthesized)
gtgtgtgtgtgtgtgtgtgtgtgatttttgtttgcaggttaacttagctactttggcattgctgcatatttgacctttgagagatataatagtagatttgaacaggggctggtattatta

SEQ ID NO: 5306 - DNA, 120 bp, Artificial Sequence
  ENSG00000005893_16 (sequence is synthesized)
tggctgtaatgacaaaagatacaaaagctttttaaaatttagagtaggtattaatcttattgtttaatcttttttttaaaaaaactggatatttcaatcttttaaattgcaatatataag

SEQ ID NO: 5307 - DNA, 120 bp, Artificial Sequence
  ENSG00000005893_17 (sequence is synthesized)
aactgggcatttcaatccattttttaggtgctttagagataattgcttgccagtgccaattgagggcattagtactttgtgctcataaattggcctctgtatgcagtactaaaattaatg

SEQ ID NO: 5308 - DNA, 120 bp, Artificial Sequence
  ENSG00000005893_18 (sequence is synthesized)
cagatttctctttagccttccaacatttcttgttgatagtgatgtattttattattttctttttcttaagaaatgccagtgtgtcctagaacctagataacgaagtgcacttacacttat

SEQ ID NO: 5309 - DNA, 70 bp, Artificial Sequence
  ENSG00000005893_19 (sequence is synthesized)
acaaaaacttgcatctaaccaaaaagtcttggttttatcttaatccattaaaaagttgttctttgtttcc

SEQ ID NO: 5310 - DNA, 120 bp, Artificial Sequence
  ENSG00000005893_20 (sequence is synthesized)
ggttttatcttaatccattaaaaagttgttctttgtttccagcttgcattgattgctacaacatcactaatttggctttcacatttaaatggttctgtgctaatcaaaactttcgttgtt

SEQ ID NO: 5311 - DNA, 120 bp, Artificial Sequence
  ENSG00000005893_21 (sequence is synthesized)
attattcattatggtagaatcatttttaattcacgtgctttgtgttcagttttgtggtctgagagatgtaccaattgtcaaattaccgtgtaccacctaatgtttataggagaaagcaaa

SEQ ID NO: 5312 - DNA, 120 bp, Artificial Sequence
  ENSG00000005893_22 (sequence is synthesized)
atacatcagcttggtagttaacacatcaaatatttcttgctgcttctaggagaacttttttggtgtgtgttggaatggctgagcaaatattaaaattgttaatatgcagccatatatgga

SEQ ID NO: 5313 - DNA, 120 bp, Artificial Sequence
  ENSG00000005893_23 (sequence is synthesized)
aggttcctgtggggttgttttttcgtgttttttttttttttgtggtgggattatgtgcctcccattcactagaaaatgagaaaattgtctgggttccaaaatattgacattgaatggatc

SEQ ID NO: 5314 - DNA, 120 bp, Artificial Sequence
  ENSG00000005893_24 (sequence is synthesized)
aatacacacacacagacatatatatatatatgcacacatatataggcagttgcatgctagcatgggtatttttataacaatataactgagttatattggaattataaatattttccgtca

SEQ ID NO: 5315 - DNA, 120 bp, Artificial Sequence
  ENSG00000005893_25 (sequence is synthesized)
cttaaatttgttctttgtttagcctgaaaacctttatggctcaagatcagattcctgactaacccctctcttagagctacagcgagctgcattaccagcttaaaacacttcttagggatt

SEQ ID NO: 5316 - DNA, 120 bp, Artificial Sequence
  ENSG00000005893_26 (sequence is synthesized)
aaatatagatgtaatttttcaaaatcgtttttaatttaaactgtgttttagtgtaaaattgttaaccttgtaagatggataatgtgtataagaatgtaggccttaactatttcacatgag

SEQ ID NO: 5317 - DNA, 120 bp, Artificial Sequence
  ENSG00000005893_27 (sequence is synthesized)
tcaaaacaaagcagctttaaaaaaataattggaagcacaagtgcatggcactgactgaatgctgttaatatttctaaaagtttctacattcagattatatgcctgattcatagtaaaata

SEQ ID NO: 5318 - DNA, 120 bp, Artificial Sequence
  ENSG00000005893_28 (sequence is synthesized)
cctctaataaacactgttttatagaaaacctgacttcagtgaatatttttgtattttacatgggccagtttatatactgctatttacactattatttcctatagctacatgttctttgta

SEQ ID NO: 5319 - DNA, 120 bp, Artificial Sequence
  ENSG00000005893_29 (sequence is synthesized)
ccttttgtagttttatttgtattactagattcataccttgatggtaacgctctatctggttttgggtgtttttcatgttttagcatttgtataaagaaactggtccatgtaaatactttc

SEQ ID NO: 5320 - DNA, 120 bp, Artificial Sequence
  ENSG00000005893_30 (sequence is synthesized)
catgttttttcttcaaatgtttaaaccactagttgatgtatggtatctttagatatttgcctgtctgtttgctcaaaattgcttctaaaacaataaagattcttttatttcttaaggcaa

SEQ ID NO: 5321 - DNA, 120 bp, Artificial Sequence
  ENSG00000005893_31 (sequence is synthesized)
gcccatagcggtgggagctgccttggcaggagtacttattctagtgttgctggcttattttattggtctcaagcaccatcatgctggatatgagcaattttagaatctgcaacctgattg

SEQ ID NO: 5322 - DNA, 120 bp, Artificial Sequence
  ENSG00000005893_32 (sequence is synthesized)
attatataaaaatacatgcaaataacaagattttcttacctctcagttgttgaaacactttgcttcttaaaattgatatgttgaaactttaattcttttatcaatcccagcattttgaga

SEQ ID NO: 5323 - DNA, 120 bp, Artificial Sequence
  ENSG00000005893_33 (sequence is synthesized)
tcagtctttattaataaaacctgttctctttaatcagcttaaaatccaaagtgtcatatttactggtcctggagacaaacttgttcaaaagaacatcaacgtgcaatgttttaaggtcta

SEQ ID NO: 5324 - DNA, 120 bp, Artificial Sequence
  ENSG00000005893_34 (sequence is synthesized)
tcttaagaagccctggccaaattttgatcctaaccttgaagtatgccttgaacttattaacatggccattataagaataaaatatgtagttgtgtcttaatggaattaataaatgtcatt

SEQ ID NO: 5325 - DNA, 120 bp, Artificial Sequence
  ENSG00000005893_35 (sequence is synthesized)
tcactactggtgttctgtttcaatgtataaggactatagtgatttaaactcatcaatgtgcctttgcataaagttcattaaataaatattgatgtggtataaatgcccatcagatatgct

SEQ ID NO: 5326 - DNA, 120 bp, Artificial Sequence
  ENSG00000005893_36 (sequence is synthesized)
gttgtctttatctcttatatgattggaagaaggaaaagtcgtactggttatcagtctgtgtaatcagttaaatctagtgtttgtttgtttttttcaattagaagttacgtttccattggc

SEQ ID NO: 5327 - DNA, 120 bp, Artificial Sequence
  ENSG00000005893_37 (sequence is synthesized)
taaaagccaggacatgctgtgcaatagattgtttaagatatgcagactaacttcagtgagttcctagctaacttgggcatgagtacacttatttaagacaaaatatattaggaccaattt

SEQ ID NO: 5328 - DNA, 120 bp, Artificial Sequence
  ENSG00000005893_38 (sequence is synthesized)
ttttctgttttttttcttcctttgttaaagtataattaaaagaaaaattgtggcttagaattttttaagtaaataatgattttaagcccctggatccaattatgaaagcatttttgctga

SEQ ID NO: 5329 - DNA, 120 bp, Artificial Sequence
  ENSG00000005893_39 (sequence is synthesized)
tgtgtaattttatatgttacagttacttatattttactactttgatgttatttgcaaaatcaaaggtgttaaagaatttaacttgcttcaggaaataaattcaagaacatagtggattca

SEQ ID NO: 5330 - DNA, 120 bp, Artificial Sequence
  ENSG00000005893_40 (sequence is synthesized)
ttttcattggtggcagacacgaaatttggttcatgataagacttcctttccccacctcctgatcagcattatttaaatctgtatttttctgttagttaagaaagaaatggcttcatgata

SEQ ID NO: 5331 - DNA, 120 bp, Artificial Sequence
  ENSG00000005893_41 (sequence is synthesized)
ttgtatttaatagcaaaagtttggctgtcttcttcattactgttaatagctactatattttaacaaggagatttctttttttgttgttgttgttctagagtttggaatatactgattatc

SEQ ID NO: 5332 - DNA, 120 bp, Artificial Sequence
  ENSG00000005961_0 (sequence is synthesized)
acttcctggcaattctagccaccatgagtccaggggctatagccctttgctctgcccgttgctcagcaagttacttggggttccagtttgataagaaaagacttcctgtggaggaatctg

SEQ ID NO: 5333 - DNA, 120 bp, Artificial Sequence
  ENSG00000005961_1 (sequence is synthesized)
aagggaaggaggaggagctggcccattcctgcctgggaggttgtggaagaaggaagatggccagagctttgtgtccactgcaagccctctggcttctggagtgggtgctgctgctcttgg

SEQ ID NO: 5334 - DNA, 120 bp, Artificial Sequence
  ENSG00000005961_2 (sequence is synthesized)
gaccttgtgctgcccctccagcctgggccttgaacctggacccagtgcagctcaccttctatgcaggccccaatggcagccagtttggattttcactggacttccacaaggacagccatg

SEQ ID NO: 5335 - DNA, 120 bp, Artificial Sequence
  ENSG00000005961_3 (sequence is synthesized)
ggagagtggccatcgtggtgggcgccccgcggaccctgggccccagccaggaggagacgggcggcgtgttcctgtgcccctggagggccgagggcggccagtgcccctcgctgctctttg

SEQ ID NO: 5336 - DNA, 120 bp, Artificial Sequence
  ENSG00000005961_4 (sequence is synthesized)
acctccgtgatgagacccgaaatgtaggctcccaaactttacaaaccttcaaggcccgccaaggactgggggcgtcggtcgtcagctggagcgacgtcattgtggcctgcgccccctggc

SEQ ID NO: 5337 - DNA, 120 bp, Artificial Sequence
  ENSG00000005961_5 (sequence is synthesized)
agcactggaacgtcctagaaaagactgaggaggctgagaagacgcccgtaggtagctgctttttggctcagccagagagcggccgccgcgccgagtactccccctgtcgcgggaacaccc

SEQ ID NO: 5338 - DNA, 120 bp, Artificial Sequence
  ENSG00000005961_6 (sequence is synthesized)
tgagccgcatttacgtggaaaatgattttagctgggacaagcgttactgtgaagcgggcttcagctccgtggtcactcaggccggagagctggtgcttggggctcctggcggctattatt

SEQ ID NO: 5339 - DNA, 120 bp, Artificial Sequence
  ENSG00000005961_7 (sequence is synthesized)
tcttaggtctcctggcccaggctccagttgcggatattttctcgagttaccgcccaggcatccttttgtggcacgtgtcctcccagagcctctcctttgactccagcaacccagagtact

SEQ ID NO: 5340 - DNA, 120 bp, Artificial Sequence
  ENSG00000005961_8 (sequence is synthesized)
tcgacggctactgggggtactcggtggccgtgggcgagttcgacggggatctcaacactacagaatatgtcgtcggtgcccccacttggagctggaccctgggagcggtggaaattttgg

SEQ ID NO: 5341 - DNA, 120 bp, Artificial Sequence
  ENSG00000005961_9 (sequence is synthesized)
attcctactaccagaggctgcatcggctgcgcggagagcagatggcgtcgtattttgggcattcagtggctgtcactgacgtcaacggggatgggaggcatgatctgctggtgggcgctc

SEQ ID NO: 5342 - DNA, 120 bp, Artificial Sequence
  ENSG00000005961_10 (sequence is synthesized)
cactgtatatggagagccgggcagaccgaaaactggccgaagtggggcgtgtgtatttgttcctgcagccgcgaggcccccacgcgctgggtgcccccagcctcctgctgactggcacac

SEQ ID NO: 5343 - DNA, 120 bp, Artificial Sequence
  ENSG00000005961_11 (sequence is synthesized)
agctctatgggcgattcggctctgccatcgcacccctgggcgacctcgaccgggatggctacaatgacattgcagtggctgccccctacgggggtcccagtggccggggccaagtgctgg

SEQ ID NO: 5344 - DNA, 120 bp, Artificial Sequence
  ENSG00000005961_12 (sequence is synthesized)
tgttcctgggtcagagtgaggggctgaggtcacgtccctcccaggtcctggacagccccttccccacaggctctgcctttggcttctcccttcgaggtgccgtagacatcgatgacaacg

SEQ ID NO: 5345 - DNA, 120 bp, Artificial Sequence
  ENSG00000005961_13 (sequence is synthesized)
gatacccagacctgatcgtgggagcttacggggccaaccaggtggctgtgtacagagctcagccagtggtgaaggcctctgtccagctactggtgcaagattcactgaatcctgctgtga

SEQ ID NO: 5346 - DNA, 120 bp, Artificial Sequence
  ENSG00000005961_14 (sequence is synthesized)
gaccggcagaagccccgccagggccggcgggtgctgctgctgggctctcaacaggcaggcaccaccctgaacctggatctgggcggaaagcacagccccatctgccacaccaccatggcc

SEQ ID NO: 5347 - DNA, 120 bp, Artificial Sequence
  ENSG00000005961_15 (sequence is synthesized)
ttccttcgagatgaggcagacttccgggacaagctgagccccattgtgctcagcctcaatgtgtccctaccgcccacggaggctggaatggcccctgctgtcgtgctgcatggagacacc

SEQ ID NO: 5348 - DNA, 120 bp, Artificial Sequence
  ENSG00000005961_16 (sequence is synthesized)
catgtgcaggagcagacacgaatcgtcctggactgtggggaagatgacgtatgtgtgccccagcttcagctcactgccagcgtgacgggctccccgctcctagttggggcagataatgtc

SEQ ID NO: 5349 - DNA, 120 bp, Artificial Sequence
  ENSG00000005961_17 (sequence is synthesized)
ctggagctgcagatggacgcagccaacgagggcgagggggcctatgaagcagagctggccgtgcacctgccccagggcgcccactacatgcgggccctaagcaatgtcgagggctttgag

SEQ ID NO: 5350 - DNA, 120 bp, Artificial Sequence
  ENSG00000005961_18 (sequence is synthesized)
agactcatctgtaatcagaagaaggagaatgagaccagggtggtgctgtgtgagctgggcaaccccatgaagaagaacgcccagataggaatcgcgatgttggtgagcgtggggaatctg

SEQ ID NO: 5351 - DNA, 120 bp, Artificial Sequence
  ENSG00000005961_19 (sequence is synthesized)
gaagaggctggggagtctgtgtccttccagctgcagatacggagcaagaacagccagaatccaaacagcaagattgtgctgctggacgtgccggtccgggcagaggcccaagtggagctg

SEQ ID NO: 5352 - DNA, 120 bp, Artificial Sequence
  ENSG00000005961_20 (sequence is synthesized)
cgagggaactcctttccagcctccctggtggtggcagcagaagaaggtgagagggagcagaacagcttggacagctggggacccaaagtggagcacacctatgagctccacaacaatggc

SEQ ID NO: 5353 - DNA, 120 bp, Artificial Sequence
  ENSG00000005961_21 (sequence is synthesized)
cctgggactgtgaatggtcttcacctcagcatccaccttccgggacagtcccagccctccgacctgctctacatcctggatatacagccccaggggggccttcagtgcttcccacagcct

SEQ ID NO: 5354 - DNA, 120 bp, Artificial Sequence
  ENSG00000005961_22 (sequence is synthesized)
cctgtcaaccctctcaaggtggactgggggctgcccatccccagcccctcccccattcacccggcccatcacaagcgggatcgcagacagatcttcctgccagagcccgagcagccctcg

SEQ ID NO: 5355 - DNA, 120 bp, Artificial Sequence
  ENSG00000005961_23 (sequence is synthesized)
aggcttcaggatccagttctcgtaagctgcgactcggcgccctgtactgtggtgcagtgtgacctgcaggagatggcgcgcgggcagcgggccatggtcacggtgctggccttcctgtgg

SEQ ID NO: 5356 - DNA, 120 bp, Artificial Sequence
  ENSG00000005961_24 (sequence is synthesized)
ctgcccagcctctaccagaggcctctggatcagtttgtgctgcagtcgcacgcatggttcaacgtgtcctccctcccctatgcggtgcccccgctcagcctgccccgaggggaagctcag

SEQ ID NO: 5357 - DNA, 120 bp, Artificial Sequence
  ENSG00000005961_25 (sequence is synthesized)
gtgtggacacagctgctccgggccttggaggagagggccattccaatctggtgggtgctggtgggtgtgctgggtggcctgctgctgctcaccatcctggtcctggccatgtggaaggtc

SEQ ID NO: 5358 - DNA, 120 bp, Artificial Sequence
  ENSG00000005961_26 (sequence is synthesized)
ggcttcttcaagcggaaccggccacccctggaagaagatgatgaagagggggagtgatggtgcagcctacactattctagcaggagggttgggcgtgctacctgcaccgccccttctcca

SEQ ID NO: 5359 - DNA, 120 bp, Artificial Sequence
  ENSG00000005961_27 (sequence is synthesized)
acaagttgcctccaagctttgggttggagctgttccattgggtcctcttggtgtcgtttccctcccaacagagctgggctaccccccctcctgctgcctaataaagagactgagccctga

SEQ ID NO: 5360 - DNA, 120 bp, Artificial Sequence
  ENSG00000005961_28 (sequence is synthesized)
acggggagcgggaagtgggtaggttctaaggctctcattccctgagcctggctctccctatcgccagaatatgtcgtcggtgcccccacttggagctggaccctgggagcggtggaaatt

SEQ ID NO: 5361 - DNA, 120 bp, Artificial Sequence
  ENSG00000005961_29 (sequence is synthesized)
acatgccccacccctacccagttgggtcccaaattaccagagctgccctctgtctccctttcctagccctagtctcacgtatccactggaggaacaggagagcaagggtcgaggagattt

SEQ ID NO: 5362 - DNA, 120 bp, Artificial Sequence
  ENSG00000005961_30 (sequence is synthesized)
ctgggtggagggggaactgagacttcagaatatttcatgggaggtgagggcccatttcttaaagaggatgcttgtccagcggcgtgaatgatggtgctcctcatcttgcagatggcgtcg

SEQ ID NO: 5363 - DNA, 120 bp, Artificial Sequence
  ENSG00000005961_31 (sequence is synthesized)
ctgcaggctgggacaagcgttactgtgaagcgggcttcagctccgtggtcactcaggcgagtagggagcaaaagcgcagtgggggcggctcccaaacagggccccctctcaccctcagga

SEQ ID NO: 5364 - DNA, 120 bp, Artificial Sequence
  ENSG00000005961_32 (sequence is synthesized)
gaagtgccaagagacacggccaggggctcatgcctggcctggtgtcccactatggactgccagaggggctgggtgaaacctccagtgggggaggtggtgtggggaacccctgggaagatg

SEQ ID NO: 5365 - DNA, 120 bp, Artificial Sequence
  ENSG00000005961_33 (sequence is synthesized)
gcttggtccctgggagcacttcaagtgaacatggaggagcatgctggcttgtgtctggggtgagctgaaagacacttgcactttttaaaagcttcccagtacgttaaggagcataaaaca

SEQ ID NO: 5366 - DNA, 120 bp, Artificial Sequence
  ENSG00000005961_34 (sequence is synthesized)
atgccaaagcaaggttatcatagatctgagcattgtgcgctgggggatgaccctccctgcatctctgggactatgtgagcaagcccgtggaaagacagcatccgaagcttggatccaagg

SEQ ID NO: 5367 - DNA, 120 bp, Artificial Sequence
  ENSG00000005961_35 (sequence is synthesized)
cccttcctgatgggaaggccaccgcttcctgaacccccggccccttctgcgttgggtcctgggggtaagggggtgggggatgatggggtgatgggccgggacgggctggggactgacgat

SEQ ID NO: 5368 - DNA, 120 bp, Artificial Sequence
  ENSG00000005961_36 (sequence is synthesized)
gcttcccctcagagctgcgactcggcgccctgtactgtggtgcagtgtgacctgcaggagatggcgcgcgggcagcgggccatggtcacggtgctggccttcctgtggctgcccagcctc

SEQ ID NO: 5369 - DNA, 120 bp, Artificial Sequence
  ENSG00000005961_37 (sequence is synthesized)
taccaggtggggtgggccgtggtggggcggggccgggccttctgggcggggaccactttgctctgggaggggcggggtttggtgtgggagggcaggaagagagggaaggcaaggtttact

SEQ ID NO: 5370 - DNA, 120 bp, Artificial Sequence
  ENSG00000005961_38 (sequence is synthesized)
ttgggggattgcagtgggattaggtcagaggcagggcttccccgccgggggtgtgggacctggactcctgcaaccaataggcctcttgtgggtgtaaacggctttcaaccccaacctgtc

SEQ ID NO: 5371 - DNA, 120 bp, Artificial Sequence
  ENSG00000005961_39 (sequence is synthesized)
cagaggcctctggatcagtttgtgctgcagtcgcacgcatggttcaacgtgtcctccctcccctatgcggtgcccccgctcagcctgccccgaggggaagctcaggtgagtgtgggggga

SEQ ID NO: 5372 - DNA, 120 bp, Artificial Sequence
  ENSG00000005961_40 (sequence is synthesized)
tggagcagagaccagtcctgcaggacccattgtcccccagtcagtgcccagccagaaaagtctgaggggtggtacgggtgggtggcatggctggaggtcaccagcctgaggtttgagtct

SEQ ID NO: 5373 - DNA, 120 bp, Artificial Sequence
  ENSG00000005961_41 (sequence is synthesized)
agggagtcaaggagagatggtggcccacccaagtgggtaatccagggaccaggggtctatgtctccactattagaatgtcattctcggtccagtggggtggctcacacctgtaatcccag

SEQ ID NO: 5374 - DNA, 120 bp, Artificial Sequence
  ENSG00000005981_0 (sequence is synthesized)
acaacaaagcttccagagggagaggaaggatggacggcaccactgcccctgtcactaaatctggagctgccaagttagttaagagaaatttccttgaggcgctaaagtccaatgacttcg

SEQ ID NO: 5375 - DNA, 120 bp, Artificial Sequence
  ENSG00000005981_1 (sequence is synthesized)
gaaaattgaaggctattttgatccaaaggcaaatagatgtggacactgtttttgaagtcgaagatgagaatatggttttggcatcttataaacaaggttactggttgcctagctataaat

SEQ ID NO: 5376 - DNA, 120 bp, Artificial Sequence
  ENSG00000005981_2 (sequence is synthesized)
tgaagtcttcctgggccacaggcctccatctctctgtcttgtttggccatgtggaatgtcttctggtgctactggaccacaatgctacaatcaactgtagacccaatgggaaaacccctc

SEQ ID NO: 5377 - DNA, 120 bp, Artificial Sequence
  ENSG00000005981_3 (sequence is synthesized)
ttcacgtggcttgtgaaatggccaatgtggattgtgttaagatcctctgtgatcgtggggcaaagctcaattgctactccttaagtggacacacagctttgcacttttgtacaactccaa

SEQ ID NO: 5378 - DNA, 120 bp, Artificial Sequence
  ENSG00000005981_4 (sequence is synthesized)
gttccattctctgtgccaagcaattggtttggagaggggcgaatgtgaacatgaagaccaacaaccaagatgaggagacgcccttgcacacggctgcccacttcggcctttcggagctgg

SEQ ID NO: 5379 - DNA, 120 bp, Artificial Sequence
  ENSG00000005981_5 (sequence is synthesized)
tggccttctacgtggaacacggggccatagtggacagcgtgaatgcccacatggagacccccctggccatcgccgcctactgggccctccgctttaaggagcaggagtacagcacggagc

SEQ ID NO: 5380 - DNA, 120 bp, Artificial Sequence
  ENSG00000005981_6 (sequence is synthesized)
accacctggtctgccgcatgctgcttgactacaaagccgaagtcaatgcccgagatgacgactttaaatctcccctccacaaggcagcctggaactgtgaccacgtgctcatgcacatga

SEQ ID NO: 5381 - DNA, 120 bp, Artificial Sequence
  ENSG00000005981_7 (sequence is synthesized)
tgctggaagctggcgccgaagccaatctcatggatatcaacggctgtgctgccatccagtacgtgctgaaggtcacctccgtgcgccctgctgcccagcctgagatctgctaccagctcc

SEQ ID NO: 5382 - DNA, 120 bp, Artificial Sequence
  ENSG00000005981_8 (sequence is synthesized)
tgttgaaccatggggctgcccgaatataccctccacagttccataaggtgatacaggcctgccattcttgtcctaaagcaattgaagttgtagtcaatgcctatgaacacatcagatgga

SEQ ID NO: 5383 - DNA, 120 bp, Artificial Sequence
  ENSG00000005981_9 (sequence is synthesized)
acacaaagtggagaagagctatccccgatgatgacttggagaaatactgggatttttaccactctctctttactgtgtgctgtaactctccaaggactctcatgcacttatcgagatgtg

SEQ ID NO: 5384 - DNA, 120 bp, Artificial Sequence
  ENSG00000005981_10 (sequence is synthesized)
ccattagaagaacattacacaacagatgccatagagcaattcctttgctttccctcccattgtcattgaaaaagtacttgcttttagagccagagggaattatttattaagccttatgag

SEQ ID NO: 5385 - DNA, 120 bp, Artificial Sequence
  ENSG00000005981_11 (sequence is synthesized)
acagcagttcccaatcctaggtatttaagtggacttgctgggtagacacagtttgcctaaataaaatggtacttgggttgattataacacttcagggatttcaaaacactttacaaacac

SEQ ID NO: 5386 - DNA, 120 bp, Artificial Sequence
  ENSG00000005981_12 (sequence is synthesized)
tgccattaatcctagaatatcatggtatggggaaataaagaagaagtaaagttaaggaattttcaaagacaaggatgtattcagaatgtactgatagaacagtaataactaatatgtata

SEQ ID NO: 5387 - DNA, 120 bp, Artificial Sequence
  ENSG00000005981_13 (sequence is synthesized)
gtgttcttactaagtacctgaaatatttttgtaaaacttcttatatcttatctcatctgaaatgggacccaggttttcttccaaccaatataattctgtgccttatcagtaatatgttta

SEQ ID NO: 5388 - DNA, 120 bp, Artificial Sequence
  ENSG00000005981_14 (sequence is synthesized)
cattctcattcaaatggccatatagcaggctttgcaattggcctcttaaacttggtgttttcccccattaccccttagcagtaattactgtcactagttttgcaaactcctactccccaa

SEQ ID NO: 5389 - DNA, 120 bp, Artificial Sequence
  ENSG00000005981_15 (sequence is synthesized)
tggagtcaaattagaaatgagaaagaaacatcagtccagttaatagtcaagaatggacatttgaaccagacatcactgagccagagactggagatgcaaagatgagtcccatgtgactcc

SEQ ID NO: 5390 - DNA, 120 bp, Artificial Sequence
  ENSG00000005981_16 (sequence is synthesized)
tgccttccaggatctcaccatttagcagaggatccagacatacacacagctaactgcaatataaagtgatggggcaagagtacaggtgcagactcacttttaatgcttatctttcaaagt

SEQ ID NO: 5391 - DNA, 120 bp, Artificial Sequence
  ENSG00000005981_17 (sequence is synthesized)
tgtgtttctgacatgaagtgtgatttttcttttaagcatgaagttaaagagtgaaggggttatgtaaagtagagggatctcctgctcttgttagggtatttttaaggttttttctagata

SEQ ID NO: 5392 - DNA, 120 bp, Artificial Sequence
  ENSG00000005981_18 (sequence is synthesized)
gtgtgtctttttggtatggtttcttggttagtattaatactttcccagactccttgagaaaaatattgcacactcaatggctccagtgcatgtgacaaggaagcataggaaaatggggga

SEQ ID NO: 5393 - DNA, 120 bp, Artificial Sequence
  ENSG00000005981_19 (sequence is synthesized)
aagaaagtgtgtgaggggacctagttgattacttcggtctttttatgtagcagactgacatttcatagcattgtagctaagagataaggagcactttgctagtgacagtgggctacgaaa

SEQ ID NO: 5394 - DNA, 120 bp, Artificial Sequence
  ENSG00000005981_20 (sequence is synthesized)
agtaaatagagagactttttgaaaatggtaaaagtttgagaaacttgggaagattagtgtgttaatcaggcttgctagttagtggattgcagaaagaaaaatgtaggtgattaagctctg

SEQ ID NO: 5395 - DNA, 120 bp, Artificial Sequence
  ENSG00000005981_21 (sequence is synthesized)
ggccttgtggtttatgaggtcaattttgcttcacttttttttttgttcttgctataatcacttttagataagctcattgctcttagcatcattttttagaggttaaagcagaagtaaatt

SEQ ID NO: 5396 - DNA, 120 bp, Artificial Sequence
  ENSG00000005981_22 (sequence is synthesized)
gcaaacaaatctgtcagttgtgagcagatttcttttatgtgtgtggttctccatcatatttaactttggatgctggagtgttgaatagagatgatgtcagatattccaataggctatcat

SEQ ID NO: 5397 - DNA, 120 bp, Artificial Sequence
  ENSG00000005981_23 (sequence is synthesized)
ttaatgttaactggcaatcacctaactggttaatctcagttgagactgtgcttctgaactgggattgtcttactcccagggctgtgtaagaaaagtcataggtggatacaataatctctt

SEQ ID NO: 5398 - DNA, 120 bp, Artificial Sequence
  ENSG00000005981_24 (sequence is synthesized)
ttaagtatcagttttactcagatattttggtggagatattttgtactaaaacaagatctatatcatggaatagaatgctgaatttgtatgaattattcacataaagcttgatctttcaaa

SEQ ID NO: 5399 - DNA, 120 bp, Artificial Sequence
  ENSG00000005981_25 (sequence is synthesized)
tgtatgaattattcacataaagcttgatctttcaaaaaatagtttgcttgcagcaagtggtattagaacacatcctaaaacagaatgaaatgatgtcttttgcagcaacttggatggagc

SEQ ID NO: 5400 - DNA, 120 bp, Artificial Sequence
  ENSG00000005981_26 (sequence is synthesized)
ggaaagtgaaataccatatgttctcacttataagtgggagctaagcaatgaggatgcaaagacatccagagtgatataatggactatggggacttgcaaggggaagcttgagagtggggt

SEQ ID NO: 5401 - DNA, 120 bp, Artificial Sequence
  ENSG00000005981_27 (sequence is synthesized)
catattgggtacagtgtacactgctccagtgatgggtgcactaaaatctcaaaattcaccactaaagaatgtatccatgtaaccaaaaaccacctgtacccccaaaactattgaaatctt

SEQ ID NO: 5402 - DNA, 120 bp, Artificial Sequence
  ENSG00000005981_28 (sequence is synthesized)
aaactattgaaatcttaaaatagtaataattaacaaagtaaaacaagatcacaccctggaacaattggaggattgcttgctgccctgcatcttaaggcgtattctagcagcaaagcttgt

SEQ ID NO: 5403 - DNA, 120 bp, Artificial Sequence
  ENSG00000005981_29 (sequence is synthesized)
gatgcactgacttggggcaagtaaaactgatgctgaggacaaagggagaagatgttcctcgcccagggaaatgaaaacttttcttattcaccttgcttgtgcttaaacacttatgttcat

SEQ ID NO: 5404 - DNA, 120 bp, Artificial Sequence
  ENSG00000005981_30 (sequence is synthesized)
ctagtgtagaatacatggctacttgtttgtaatttttttattggtggaattaaagtaatttttccttatctttgaacttttatttagagaacttaaataaagctcttctgtctcctttca

SEQ ID NO: 5405 - DNA, 120 bp, Artificial Sequence
  ENSG00000005981_31 (sequence is synthesized)
gtgaaatgaatagtctgtcaaaattcaggtgggccagtgcttggttactgcttatgtcaatccagccattctgacatccaccacctgtaaagagagtcgctgaaacggaacaatctagca

SEQ ID NO: 5406 - DNA, 120 bp, Artificial Sequence
  ENSG00000005981_32 (sequence is synthesized)
cctttctgggtggccaacattgttgtctgcttgtacactcatggtttcaagactttgtgacccctacctaccccagatgatgtagtaagcataaagatgcaattatgcctagtacagaag

SEQ ID NO: 5407 - DNA, 120 bp, Artificial Sequence
  ENSG00000005981_33 (sequence is synthesized)
gtcagcaggttgaggaagattcaaatggcagccttgtctgaaatctccaagtaactcaagcttgcttgaggcttgagtcctgggctaactacctctgatcctctttgaccttccattaca

SEQ ID NO: 5408 - DNA, 120 bp, Artificial Sequence
  ENSG00000005981_34 (sequence is synthesized)
tacctaatcctagctgtctcctcatctcatcctagtctaggtttgcttgaaattgggtgtgagagctagaatgagaaaaagagtagcaaataatttgttttgccttgtgtgaacaccagt

SEQ ID NO: 5409 - DNA, 120 bp, Artificial Sequence
  ENSG00000005981_35 (sequence is synthesized)
gcactggtggcttcctgagggactgaggtaagtctgccagaaaggtgaatagtgttagacaggcatacatttgccatcttttaaacagaatgactgatctaaagatgactcagcctgctt

SEQ ID NO: 5410 - DNA, 120 bp, Artificial Sequence
  ENSG00000005981_36 (sequence is synthesized)
tgaaattagcttgtagccatgaaagggccacccgattttccagtttaatgaaagctaacgtttattaagtactaaaattatatttattatgtataataaataagcacactgttataagca

SEQ ID NO: 5411 - DNA, 120 bp, Artificial Sequence
  ENSG00000006007_0 (sequence is synthesized)
attgtgcggcgctggtcccctcagagggttcctgctgctgccggtgccttggaccctccccctcgcttctcgttctactgccccaggagcccggcgggtccgggactcccgtccgtgccg

SEQ ID NO: 5412 - DNA, 120 bp, Artificial Sequence
  ENSG00000006007_1 (sequence is synthesized)
gtgcgggcgccggcatgtggctgtgggaggaccagggcggcctcctgggccctttctccttcctgctgctagtgctgctgctggtgacgcggagcccggtcaatgcctgcctcctcaccg

SEQ ID NO: 5413 - DNA, 120 bp, Artificial Sequence
  ENSG00000006007_2 (sequence is synthesized)
gcagcctcttcgttctactgcgcgtcttcagctttgagccggtgccctcttgcagggccctgcaggtgctcaagccccgggaccgcatttctgccatcgcccaccgtggcggcagccacg

SEQ ID NO: 5414 - DNA, 120 bp, Artificial Sequence
  ENSG00000006007_3 (sequence is synthesized)
acgcgcccgagaacacgctggcggccattcggcaggcagctaagaatggagcaacaggcgtggagttggacattgagtttacttctgacgggattcctgtcttaatgcacgataacacag

SEQ ID NO: 5415 - DNA, 120 bp, Artificial Sequence
  ENSG00000006007_4 (sequence is synthesized)
tagataggacgactgatgggactgggcgattgtgtgatttgacatttgaacaaattaggaagctgaatcctgcagcaaaccacagactcaggaatgatttccctgatgaaaagatcccta

SEQ ID NO: 5416 - DNA, 120 bp, Artificial Sequence
  ENSG00000006007_5 (sequence is synthesized)
ccctaagggaagctgttgcagagtgcctaaaccataacctcacaatcttctttgatgtcaaaggccatgcacacaaggctactgaggctctaaagaaaatgtatatggaatttcctcaac

SEQ ID NO: 5417 - DNA, 120 bp, Artificial Sequence
  ENSG00000006007_6 (sequence is synthesized)
tgtataataatagtgtggtctgttctttcttgccagaagttatctacaagatgagacaaacagatcgggatgtaataacagcattaactcacagaccttggagcctaagccatacaggag

SEQ ID NO: 5418 - DNA, 120 bp, Artificial Sequence
  ENSG00000006007_7 (sequence is synthesized)
atgggaaaccacgctatgatactttctggaaacattttatatttgttatgatggacattttgctcgattggagcatgcataatatcttgtggtacctgtgtggaatttcagctttcctca

SEQ ID NO: 5419 - DNA, 120 bp, Artificial Sequence
  ENSG00000006007_8 (sequence is synthesized)
tgcaaaaggattttgtatccccggcctacttgaagaagtggtcagctaaaggaatccaggttgttggttggactgttaatacctttgatgaaaagagttactacgaatcccatcttggtt

SEQ ID NO: 5420 - DNA, 120 bp, Artificial Sequence
  ENSG00000006007_9 (sequence is synthesized)
ccagctatatcactgacagcatggtagaagactgcgaacctcacttctagactttcacggtgggacgaaacgggttcagaaactgccaggggcctcatacagggatatcaaaataccctt

SEQ ID NO: 5421 - DNA, 120 bp, Artificial Sequence
  ENSG00000006007_10 (sequence is synthesized)
tgtgctagcccaggccctggggaatcaggtgactcacacaaatgcaatagttggtcactgcatttttacctgaaccaaagctaaacccggtgttgccaccatgcaccatggcatgccaga

SEQ ID NO: 5422 - DNA, 120 bp, Artificial Sequence
  ENSG00000006007_11 (sequence is synthesized)
gttcaacactgttgctcttgaaaatctgggtctgaaaaaacgcacaagagcccctgccctgccctagctgaggcacacagggagacccagtgaggataagcacagattgaattgtacagt

SEQ ID NO: 5423 - DNA, 120 bp, Artificial Sequence
  ENSG00000006007_12 (sequence is synthesized)
acatgcatgataactcagagttgacattttaaaacttgccacacttatttcaaatatttgtactcagctatgttaacatgtactgtagacatcaaacttgtggccatactaataaaatta

SEQ ID NO: 5424 - DNA, 120 bp, Artificial Sequence
  ENSG00000006007_13 (sequence is synthesized)
ttaaaaggagcactaaaggaaaactgtgtgccaagcatcatatcctaaggcatacggaatttggggaagccaccatgcaatccagtgaggcttcagtgtacagcaaccaaaatggtaggg

SEQ ID NO: 5425 - DNA, 120 bp, Artificial Sequence
  ENSG00000006007_14 (sequence is synthesized)
aggtcttgaagccaatgagggatttatagcatcttgaatagagagctgcaaaccaccagggggcagagttgcatttttccaggctttttaggaagctctgcaacagatgtgatctgatca

SEQ ID NO: 5426 - DNA, 120 bp, Artificial Sequence
  ENSG00000006007_15 (sequence is synthesized)
taggcaattagaactggaagaaacttccaaaaatatctaggtttgtcctcattttacaaatgaggaaactaaactctgtggaagggaaggggttgcctcaaaagtcacagcttagctggg

SEQ ID NO: 5427 - DNA, 120 bp, Artificial Sequence
  ENSG00000006007_16 (sequence is synthesized)
ctcaaaagtcacagcttagctgggcacagtggctcatgccgataatcccagcaattcagaaagctgaggcaggaggattacttgaggccagactgggcaatatagcaagaccccatctct

SEQ ID NO: 5428 - DNA, 83 bp, Artificial Sequence
  ENSG00000006007_17 (sequence is synthesized)
atgagccatgattacaccacggcactacaaccttggtggcacagtgagaacctgactcttaaaaaaaaaaaaaaaaaaaaaaa

SEQ ID NO: 5429 - DNA, 120 bp, Artificial Sequence
  ENSG00000006007_18 (sequence is synthesized)
aaaaaaaaaaaaaaaaaagataactagaacttctagaacatcttgtttacagttagccagaaactatacaagtggtttaacatgcattatcttactcaatccatacaaaagtcttatgga

SEQ ID NO: 5430 - DNA, 120 bp, Artificial Sequence
  ENSG00000006007_19 (sequence is synthesized)
ccatacaaaagtcttatggaggtgttagcactctttctactgatgaagaactgaggtacttcataaaaccacttacccaaggtgtcttgagtctggtacaactggcattcaaatctaggt

SEQ ID NO: 5431 - DNA, 120 bp, Artificial Sequence
  ENSG00000006007_20 (sequence is synthesized)
cagtctgcccccagagccactacccttacccctcactgaatctgcctttatattgttgagcccatgaccccaaactgctctttccaatttgaacttccagggattttattgtgaacttac

SEQ ID NO: 5432 - DNA, 120 bp, Artificial Sequence
  ENSG00000006007_21 (sequence is synthesized)
atagcaacattaaaatgaagttgaattgtttttaatggcaacgccgtctgtctcctctagcttaccgcttctcacctttcaaccccatctgtggcctttgtccaggcccacagcttagcc

SEQ ID NO: 5433 - DNA, 120 bp, Artificial Sequence
  ENSG00000006007_22 (sequence is synthesized)
atggcttccctcctgcatccctgccgtgggttgctggcctcacacttgcagcagctggacagtgattttagaaggccaccagtccccatagctatgtgacaatgagaagcaaactttttt

SEQ ID NO: 5434 - DNA, 120 bp, Artificial Sequence
  ENSG00000006007_23 (sequence is synthesized)
gtgacagattgtattggcataggcatgatagatggggattggtacgttttgaatcagcatttgcaaaaaaattgtcttgaattttaaaataaacaacaaagatttgttcattgagtgcaa

SEQ ID NO: 5435 - DNA, 120 bp, Artificial Sequence
  ENSG00000006007_24 (sequence is synthesized)
aagttggaaggttttttattttacccagacagacatcctgaatgctcttatttgaaaggaaggattaacagagtagacaacctgaattggttctgacctgcaaagcttaccatacctcta

SEQ ID NO: 5436 - DNA, 120 bp, Artificial Sequence
  ENSG00000006007_25 (sequence is synthesized)
tcagaccgagtcgatcacatattttcggttttttagtgtattttgaagaaaaaaaatgaacctgtgacactatgctgagcaagggattttatttctgtgactggtttttttgaaagccaa

SEQ ID NO: 5437 - DNA, 120 bp, Artificial Sequence
  ENSG00000006007_26 (sequence is synthesized)
cacaggatcctgggcagaaccacagtgaagacatcctgtgggcaccagcctccccactaccgtcttatgttataggcactcccccacctctccccataaaatttccatttcctaacctgc

SEQ ID NO: 5438 - DNA, 120 bp, Artificial Sequence
  ENSG00000006007_27 (sequence is synthesized)
tagcgatctcggaatcatttctttggcaattctgtatctgtatatttcagctaattagagttgtaggtctagtattatttcagacatacatgattcagttcaataaatatttggtaagtg

SEQ ID NO: 5439 - DNA, 120 bp, Artificial Sequence
  ENSG00000006007_28 (sequence is synthesized)
cctatactattgcaaggttccatgttgagaagctgaagatgcagtgggtaaagaatcaaagccatgatctctgccctcgtgacgtttatagccaagtgggagagtgagagatgctaatca

SEQ ID NO: 5440 - DNA, 120 bp, Artificial Sequence
  ENSG00000006007_29 (sequence is synthesized)
aataaaaatccaatcaatataaagttaaaactaagatacaggctatgtcagagaaaactgtgcatgggctataatctaatctggtctgggttgtcagaaacagcatccccaaggaagtga

SEQ ID NO: 5441 - DNA, 120 bp, Artificial Sequence
  ENSG00000006007_30 (sequence is synthesized)
cagttaagctaagatctgaagggtgagtgggaattgggaggaatccagatcagagagaaaaatacatgtaatgtgctctggcaggaaggaacatggttctttccaggaagtgaaagaaaa

SEQ ID NO: 5442 - DNA, 120 bp, Artificial Sequence
  ENSG00000006007_31 (sequence is synthesized)
ttaatattctttcaattaatttaaaattaatcagcacagaaaagaaagggggaatgtggtgtgagatgaagccaaggagacaggtcggggccaggtcaggcacaccttcagtggctgtgc

SEQ ID NO: 5443 - DNA, 120 bp, Artificial Sequence
  ENSG00000006007_32 (sequence is synthesized)
aaggcacactcccggcccttgatcgctcccagtgtctagggatctccggacttgaggttttatatttacagaagacagcagatatgtatatagtttctgtgcgcctgacgctaaggttac

SEQ ID NO: 5444 - DNA, 120 bp, Artificial Sequence
  ENSG00000006007_33 (sequence is synthesized)
atacagccaggaacaaggtcaaaagtgtccctggtttacagagtgtacatcggaatgggggaggcaagccttaaacaagtaaacacataaatgagataactttaagagagtgaaaggtgc

SEQ ID NO: 5445 - DNA, 120 bp, Artificial Sequence
  ENSG00000006007_34 (sequence is synthesized)
aatgaagaaatcgggggaactcgaaggaaagagttacgctattttatttagatggaatagtcaagagaaatcgtctccgaagaagcaacatttgaacagaaaccggaattataaggagcc

SEQ ID NO: 5446 - DNA, 120 bp, Artificial Sequence
  ENSG00000006015_0 (sequence is synthesized)
gcagtcatgatcaccgagaccgcggcggagcctacggtccctgcagtgcctgctgctgaggaggccaccgaagctcggggacgcgaggagccggcgtggccctggaaagacgccccgatc

SEQ ID NO: 5447 - DNA, 120 bp, Artificial Sequence
  ENSG00000006015_1 (sequence is synthesized)
cggacgctggtgcagcgcatccaccagctgcaggctgagcgcgcgcagggcttccgccgactggaggaaggccaccgccagtacctgcgcagcggccctgactacgacttcgcgcgctac

SEQ ID NO: 5448 - DNA, 120 bp, Artificial Sequence
  ENSG00000006015_2 (sequence is synthesized)
gccggccacgtgcgcagcctgcaggagctggagcagacgcggctgggcacggtggccctgctgcagttgatggagacgccagagctggcggggcaggaggacgctgtacggatgcagcag

SEQ ID NO: 5449 - DNA, 120 bp, Artificial Sequence
  ENSG00000006015_3 (sequence is synthesized)
ctgaaaatgaaggtaattaaaaccatggaggcgatcagcgaggttctccaggaccttaggtttgatgcggaatctgccgagtgatggcggctccccagggatgcgccgagggagatggga

SEQ ID NO: 5450 - DNA, 120 bp, Artificial Sequence
  ENSG00000006015_4 (sequence is synthesized)
aacggggcggatggcgcccagcccagccctaactgccagctggctggggttgcgccccactgcgctgctgaccttcctgcagttccagacacctcccacaataaagagctcctcctctgt

SEQ ID NO: 5451 - DNA, 120 bp, Artificial Sequence
  ENSG00000006015_5 (sequence is synthesized)
cggcgggcgtgcctggaggaggagctgggtccttgtgtggctgcagagtcagatggggcggggatttcggggcaccgggtcctcaccttcacgaaaaaggccccacagcacgtccccact

SEQ ID NO: 5452 - DNA, 120 bp, Artificial Sequence
  ENSG00000006015_6 (sequence is synthesized)
acccgacgactcactcttcgtggcttctctctcctccccaagagcaggggtgggcctgtctcgcgttcccctgcgggagtcaggaagcgtccttcctacctaccagtcctcccctctggt

SEQ ID NO: 5453 - DNA, 120 bp, Artificial Sequence
  ENSG00000006015_7 (sequence is synthesized)
tctggggacacttcctgggggcctttcaggtggttggcgccggtgcagggcctgagagcctgggggcgcggcctcagggtccccacatgccgcagaggccaccgccagtacctgcgcagc

SEQ ID NO: 5454 - DNA, 120 bp, Artificial Sequence
  ENSG00000006015_8 (sequence is synthesized)
ccagtgcacaatggtgttctcacctggtggccctcagatgtacacttccccagagggcacagccgtgaaacttcacatcagtttcgctgtgcattgctgggacactgctgtatacctcga

SEQ ID NO: 5455 - DNA, 120 bp, Artificial Sequence
  ENSG00000006015_9 (sequence is synthesized)
tgtacacacacatttgacaaagtcacacttcataacctcctaatggtacacaccccaccaagatggccttttcttttcttttttttctgagatgcagtctcactctgtcaccaggctgga

SEQ ID NO: 5456 - DNA, 69 bp, Artificial Sequence
  ENSG00000006015_10 (sequence is synthesized)
taccgtaacctctgcctcctaagtagcttggattacagatgcccgccaccatgcctggctaattcttgt

SEQ ID NO: 5457 - DNA, 75 bp, Artificial Sequence
  ENSG00000006015_11 (sequence is synthesized)
cctaagtagcttggattacagatgccattcgccatgttggccaggcttgttttgaactcctgacctcaggtgatc

SEQ ID NO: 5458 - DNA, 120 bp, Artificial Sequence
  ENSG00000006015_12 (sequence is synthesized)
caggcgtgagccaccatgcccagcccagatggccttttctctcagcccactgtgacctatggggccaccccttctccctagcacctaagtgttccctcttgctgctagtgctgcctggag

SEQ ID NO: 5459 - DNA, 120 bp, Artificial Sequence
  ENSG00000006015_13 (sequence is synthesized)
tgctgcctggaggtttggcggcgggcaggagggcctggggctcaccacagccacagccctcttgcagcttcgcggcagcagctaattcaccccatctgggttttatttatagttcccatc

SEQ ID NO: 5460 - DNA, 89 bp, Artificial Sequence
  ENSG00000006015_14 (sequence is synthesized)
tgggattacaggcataatttttgtgtgccatatgggcaaggctggtctcgaactcctggtctcaagcgatccgccctcttctgcttccc

SEQ ID NO: 5461 - DNA, 88 bp, Artificial Sequence
  ENSG00000006015_15 (sequence is synthesized)
gtccaggctttttggcctacttttatcctgggtccccgtccctgggaccatgaggcgcaacctaacccacccctacggccaatgcctg

SEQ ID NO: 5462 - DNA, 120 bp, Artificial Sequence
  ENSG00000006015_16 (sequence is synthesized)
catgaggcgcaacctaacccacccctacggccaatgcctggctaagacgtcactgttgttcccaggccacgcccacatcgcgctcagcactgcctctggcctgcctgctgtctcctttct

SEQ ID NO: 5463 - DNA, 120 bp, Artificial Sequence
  ENSG00000006015_17 (sequence is synthesized)
gagagagcctctaaactgaatttcggactcttcctacacaaagcactgcccctcgtggttctacccgggcactgcctttctgggtgcctctgttttttcctgaacatccttggagggcag

SEQ ID NO: 5464 - DNA, 120 bp, Artificial Sequence
  ENSG00000006015_18 (sequence is synthesized)
tttttttcccaagttttgtccttattcccagagcactcccgctttctcccagctccgcctaaatgctattccaagatgcccagatcccgccccaacaatgctccacccactctggttgtt

SEQ ID NO: 5465 - DNA, 120 bp, Artificial Sequence
  ENSG00000006015_19 (sequence is synthesized)
ccgcgtctagggtcccaccctcaacctcccgtagatacaggcgaggggggtcccaggccacgcctcctccgtattattcctccatcacagctttagttctttgcctatttctctcttgcg

SEQ ID NO: 5466 - DNA, 120 bp, Artificial Sequence
  ENSG00000006015_20 (sequence is synthesized)
tgcgatccgcctgctcggccctgcaaccgtgtgtgactggaattcctaggccacgccccccatgagcgacccgtctcagcgtctctttggcctttttctttctggtgttttttttttttt

SEQ ID NO: 5467 - DNA, 120 bp, Artificial Sequence
  ENSG00000006016_0 (sequence is synthesized)
gccggggccccgccgcccaatccgcgcggcggccgccgccgttgctgcccctgctgctgctgctctgcgtcctcggggcgccgcgagccggatcaggagcccacacagctgtgatcagtc

SEQ ID NO: 5468 - DNA, 120 bp, Artificial Sequence
  ENSG00000006016_1 (sequence is synthesized)
gagccggatcaggagcccacacagctgtgatcagtccccaggatcccacgcttctcatcggctcctccctgctggccacctgctcagtgcacggagacccaccaggagccaccgccgagg

SEQ ID NO: 5469 - DNA, 120 bp, Artificial Sequence
  ENSG00000006016_2 (sequence is synthesized)
gcctctactggaccctcaacgggcgccgcctgccccctgagctctcccgtgtactcaacgcctccaccttggctctggccctggccaacctcaatgggtccaggcagcggtcgggggaca

SEQ ID NO: 5470 - DNA, 120 bp, Artificial Sequence
  ENSG00000006016_3 (sequence is synthesized)
acctcgtgtgccacgcccgtgacggcagcatcctggctggctcctgcctctatgttggcctgcccccagagaaacccgtcaacatcagctgctggtccaagaacatgaaggacttgacct

SEQ ID NO: 5471 - DNA, 120 bp, Artificial Sequence
  ENSG00000006016_4 (sequence is synthesized)
gccgctggacgccaggggcccacggggagaccttcctccacaccaactactccctcaagtacaagcttaggtggtatggccaggacaacacatgtgaggagtaccacacagtggggcccc

SEQ ID NO: 5472 - DNA, 120 bp, Artificial Sequence
  ENSG00000006016_5 (sequence is synthesized)
actcctgccacatccccaaggacctggctctctttacgccctatgagatctgggtggaggccaccaaccgcctgggctctgcccgctccgatgtactcacgctggatatcctggatgtgg

SEQ ID NO: 5473 - DNA, 120 bp, Artificial Sequence
  ENSG00000006016_6 (sequence is synthesized)
gagcgtgcgctgggtgtcgccacccgccctcaaggatttcctctttcaagccaaataccagatccgctaccgagtggaggacagtgtggactggaaggtggtggacgatgtgagcaacca

SEQ ID NO: 5474 - DNA, 120 bp, Artificial Sequence
  ENSG00000006016_7 (sequence is synthesized)
gacctcctgccgcctggccggcctgaaacccggcaccgtgtacttcgtgcaagtgcgctgcaacccctttggcatctatggctccaagaaagccgggatctggagtgagtggagccaccc

SEQ ID NO: 5475 - DNA, 120 bp, Artificial Sequence
  ENSG00000006016_8 (sequence is synthesized)
cctccactccccgcagtgagcgcccgggcccgggcggcggggcgtgcgaaccgcggggcggagagccgagctcggggccggtgcggcgcgagctcaagcagttcctgggctggctcaaga

SEQ ID NO: 5476 - DNA, 120 bp, Artificial Sequence
  ENSG00000006016_9 (sequence is synthesized)
gctcaagaagcacgcgtactgctccaacctcagcttccgcctctacgaccagtggcgagcctggatgcagaagtcgcacaagacccgcaaccaggacgaggggatcctgccctcgggcag

SEQ ID NO: 5477 - DNA, 120 bp, Artificial Sequence
  ENSG00000006016_10 (sequence is synthesized)
acggggcacggcgagaggtcctgccagataagctgtaggggctcaggccaccctccctgccacgtggagacgcagaggccgaacccaaactggggccacctctgtaccctcacttcaggg

SEQ ID NO: 5478 - DNA, 120 bp, Artificial Sequence
  ENSG00000006016_11 (sequence is synthesized)
cacctgagccaccctcagcaggagctggggtggcccctgagctccaacggccataacagctctgactcccacgtgaggccacctttgggtgcaccccagtgggtgtgtgtgtgtgtgtga

SEQ ID NO: 5479 - DNA, 80 bp, Artificial Sequence
  ENSG00000006016_12 (sequence is synthesized)
gggttggttgagttcattactccccattacctagggcccctccaaaagagtccttttaaataaatgagctatttaggtgc

SEQ ID NO: 5480 - DNA, 120 bp, Artificial Sequence
  ENSG00000006016_13 (sequence is synthesized)
actcaccgcgtggcgcaccccacccgcgggccgctgagtggatttttccgtggcggggtgtgaataggtcccggggaaagagcttcttaccgctctcctcctgggaatccctcttactgc

SEQ ID NO: 5481 - DNA, 120 bp, Artificial Sequence
  ENSG00000006016_14 (sequence is synthesized)
ggtgcgggacccagttcccgcgcaggcctgggtcccggctcccacaggggactacatctccccgtctgcccacgcaggagctccctcccgaggcccccggggcgcccagagcaacctcaa

SEQ ID NO: 5482 - DNA, 120 bp, Artificial Sequence
  ENSG00000006016_15 (sequence is synthesized)
gcggaaggactcgtcagtatctcctgatggaataagtaccctttggcatcatcttgctagatccatcttccctgaaggcggtcccaccctcttccacggcagccaggtcctgatctgcac

SEQ ID NO: 5483 - DNA, 120 bp, Artificial Sequence
  ENSG00000006016_16 (sequence is synthesized)
aggctgctcctgctgccagcctggatgggaagccatcccctacaacacacatgccttcctgtcgcagcctctctcctctctaactccaagctggagcacccaacactcttagcttccttc

SEQ ID NO: 5484 - DNA, 120 bp, Artificial Sequence
  ENSG00000006016_17 (sequence is synthesized)
gaccccaaaccacgaacatcacttagtatctaccaaccacctgccaagcattgttcacatataaaagttgacttaaaaagacaaagaatcgaccgggcgcaggggctcatgcctgtaatc

SEQ ID NO: 5485 - DNA, 73 bp, Artificial Sequence
  ENSG00000006016_18 (sequence is synthesized)
ccagcactttggaaggccgaggcagacggatcatttgaggtcaagagttcaagatgagaactgggcgtggtgg

SEQ ID NO: 5486 - DNA, 89 bp, Artificial Sequence
  ENSG00000006016_19 (sequence is synthesized)
cgggaggtggagattgcagtgagccgagaccgcaccactgaactccagcttatacaaatagtctaaagaaaagtctaaaaagcagacac

SEQ ID NO: 5487 - DNA, 120 bp, Artificial Sequence
  ENSG00000006016_20 (sequence is synthesized)
acaaatagtctaaagaaaagtctaaaaagcagacactaccaccagctcctccttacagacgtagtaatggagccaggtatgaagactcagctcgagaaatttagtatttccaaagcgact

SEQ ID NO: 5488 - DNA, 120 bp, Artificial Sequence
  ENSG00000006025_0 (sequence is synthesized)
cttcctggttcctgcagcagctgctgccactgctcagcgcggtgaggagggagccggtgactcggagacggtgactcagaggcagagcggcgcaagggccaaggagtactggcgtccatg

SEQ ID NO: 5489 - DNA, 120 bp, Artificial Sequence
  ENSG00000006025_1 (sequence is synthesized)
gaccctggggaccccgtcaggagcaggtgacatccttccccttccaccctgctccctgctctacatccccagcagggagtggcctctcccttctccatggacttccaagagagggacccg

SEQ ID NO: 5490 - DNA, 120 bp, Artificial Sequence
  ENSG00000006025_2 (sequence is synthesized)
cccttcctgcctgagagcgctcagtcctcaaagcccagcagtgctcagcaggcctctgagctgtgggaggtggtggaggagcctcgggtcaggctggggacagagggtgtcatgcctgag

SEQ ID NO: 5491 - DNA, 120 bp, Artificial Sequence
  ENSG00000006025_3 (sequence is synthesized)
aggcaggaaggtcacctgctcaagaagaggaagtggcctctgaagggctggcacaagagatactttgtgctcgaggacgggatccttcattatgcaacaacccggcaagacatcaccaag

SEQ ID NO: 5492 - DNA, 120 bp, Artificial Sequence
  ENSG00000006025_4 (sequence is synthesized)
gggaagctccatggctccatcgatgtccggctgtcggtcatgtccatcaacaaaaaggcccagcgcattgaccttgacactgaagacaacatctaccacctcaagatcaaatcccaggac

SEQ ID NO: 5493 - DNA, 120 bp, Artificial Sequence
  ENSG00000006025_5 (sequence is synthesized)
ctattccagagctgggtggcgcagctgcgtgcccaccgcctagcccaccgcctggacatgccccgtggctcactgcccagtactgctcaccggaaggttcctggtgcccagcttccaaca

SEQ ID NO: 5494 - DNA, 120 bp, Artificial Sequence
  ENSG00000006025_6 (sequence is synthesized)
gcagctactgcctcagccctacctgggcttggaccgcgggagaaagtgtcttcctggctgagggacagtgatgggctggaccgctgctctcatgagctctctgagtgtcaggggaagctc

SEQ ID NO: 5495 - DNA, 120 bp, Artificial Sequence
  ENSG00000006025_7 (sequence is synthesized)
caggaactacacaggctcctccagagcctggagtccctgcaccgaatcccctcagcccctgttatccccacacaccaggcctcagtgacaaccgaaagacccaagaaggggaaacggaca

SEQ ID NO: 5496 - DNA, 120 bp, Artificial Sequence
  ENSG00000006025_8 (sequence is synthesized)
agccgcatgtggtgcacccagagctttgccaaggatgacaccattggacgggttggtcgtctccatggctctgttcccaacctgtctcgctacctggagtctcgggactcctcgggcacc

SEQ ID NO: 5497 - DNA, 120 bp, Artificial Sequence
  ENSG00000006025_9 (sequence is synthesized)
cgtgggctgccacccacagactatgcccacctgcagcgcagcttctgggccctggcccagaaggtgcacagctccctcagcagcgtcctggccgccctcaccatggaacgggaccaactg

SEQ ID NO: 5498 - DNA, 120 bp, Artificial Sequence
  ENSG00000006025_10 (sequence is synthesized)
agggacatgcaccagggctcagagttgtcaagaatgggggtctctgaggcctccactggccagaggcgcctccactcactgtccacctcctccgacaccacggcggactctttcagctcc

SEQ ID NO: 5499 - DNA, 120 bp, Artificial Sequence
  ENSG00000006025_11 (sequence is synthesized)
ctcaaccctgaggagcaagaagctctgtacatgaaggggcgcgagctcaccccccagctatcgcagaccagcatcctgtcccttgctgattcccacacggagttcttcgatgcctgcgag

SEQ ID NO: 5500 - DNA, 120 bp, Artificial Sequence
  ENSG00000006025_12 (sequence is synthesized)
gttctcctctccgccagctcttctgagaatgagggctcagaggaggaggagtcctgtaccagtgaaatcaccaccagcctgtctgaggagatgctggacctcaggggagctgagcgctgt

SEQ ID NO: 5501 - DNA, 120 bp, Artificial Sequence
  ENSG00000006025_13 (sequence is synthesized)
cagaaaggggggtgtgttccagggagacccatggggccaccccgccgtcgctgcctgccggcggccagcgggcctggggctgacgtgagcctgtggaacattctgcgcaacaacatcggc

SEQ ID NO: 5502 - DNA, 120 bp, Artificial Sequence
  ENSG00000006025_14 (sequence is synthesized)
aaagacctgtccaaggtgtcaatgcctgtgcagctcaacgagccgctcaacactctgcagcggctctgcgaggagctggagtacagcagcctcctggaccaggccagccgcatcgccgac

SEQ ID NO: 5503 - DNA, 120 bp, Artificial Sequence
  ENSG00000006025_15 (sequence is synthesized)
gagccggctgcaagcccttcaaccctgtcctgggggagacctacgagtgtgagcggcctgaccgaggcttccgcttcatcagtgagcaggtctcccaccacccccctatctcggcctgcc

SEQ ID NO: 5504 - DNA, 120 bp, Artificial Sequence
  ENSG00000006025_16 (sequence is synthesized)
atgcagagtctgagaacttcgccttctggcaagatatgaagtggaagaacaagttctggggcaaatccctggagattgtgcctgtgggaacagtcaacgtcagcctgcccaggtttgggg

SEQ ID NO: 5505 - DNA, 120 bp, Artificial Sequence
  ENSG00000006025_17 (sequence is synthesized)
accactttgagtggaacaaggtgacatcctgcattcacaatgtcctgagtggtcagcgctggatcgagcactatggggaggtgctcatccgaaacacacaggacagctcctgccactgca

SEQ ID NO: 5506 - DNA, 120 bp, Artificial Sequence
  ENSG00000006025_18 (sequence is synthesized)
agatcaccttctgcaaggccaagtactggagttccaatgtccacgaggtgcagggcgctgtgctcagtcggagtggccgtgtcctccaccgactctttgggaagtggcacgaggggctgt

SEQ ID NO: 5507 - DNA, 120 bp, Artificial Sequence
  ENSG00000006025_19 (sequence is synthesized)
accggggacccacgccaggtggccagtgcatctggaaacccaactcaatgccccccgaccatgagcgaaacttcggcttcacccagtttgccttggagctgaatgagctgacagcagagc

SEQ ID NO: 5508 - DNA, 120 bp, Artificial Sequence
  ENSG00000006025_20 (sequence is synthesized)
tgaaacggtcgctgccttccaccgacacgagactccggccagaccagaggtacctggaggaggggaacatacaggccgctgaggcccagaagagaaggatcgagcagctgcagcgagaca

SEQ ID NO: 5509 - DNA, 120 bp, Artificial Sequence
  ENSG00000006025_21 (sequence is synthesized)
ggcgcaaagtcatggaggaaaacaacatcgtacaccaggctcgcttcttcaggcggcagacggatagcagcgggaaagagtggtgggtgaccaacaatacctactggaggctgcgggccg

SEQ ID NO: 5510 - DNA, 120 bp, Artificial Sequence
  ENSG00000006025_22 (sequence is synthesized)
agccaggctatgggaacatggatggggccgtgctctggtagccctggccccgggggcaggaggctctggttcctcactcctcctgcctccaccccctaccatggacacatgggtgaggcc

SEQ ID NO: 5511 - DNA, 120 bp, Artificial Sequence
  ENSG00000006025_23 (sequence is synthesized)
gggctccccgcctcactgcccttgagaccaaaggggcagccctggccctccctcccctctgctggccagagggtctgcatctcagcccacccccaaccccaccgtttggggtgagaagca

SEQ ID NO: 5512 - DNA, 120 bp, Artificial Sequence
  ENSG00000006025_24 (sequence is synthesized)
gaatctgtgcttccccagtctccttgccccagacaaccagcatgtaagacccttcccgcttcaccattccgattcctgtcccctttggggtacttgggggagactctggctcccaggatc

SEQ ID NO: 5513 - DNA, 120 bp, Artificial Sequence
  ENSG00000006025_25 (sequence is synthesized)
tgttccctatttcagtgccttcctaggacacaggggactccttgacgctccccaggctttctgtgcccaggcctctgtccccagcggtgaggttgcagtgagtgaaggagaggaggtgat

SEQ ID NO: 5514 - DNA, 120 bp, Artificial Sequence
  ENSG00000006025_26 (sequence is synthesized)
ctgttctccctccccttctgcccatctccagcatcttcttccccttccctggccctgcagggccttctccagctccctttggttagtccctggccatccctcctgtcctggatcccttct

SEQ ID NO: 5515 - DNA, 120 bp, Artificial Sequence
  ENSG00000006025_27 (sequence is synthesized)
ccctaactgcaaaatgcctgcagcttccagctccttcgtccctgatcctcaagcggttccctcccgtctcagctcagcggatcccccagagtggaggaggcctctccatgaggaggggag

SEQ ID NO: 5516 - DNA, 120 bp, Artificial Sequence
  ENSG00000006025_28 (sequence is synthesized)
cagcccaaggcacctgtcctctgacccaccggcagcgagtgcgcaggtgtgagtgtaagttcatgtaggagagtgtatgcgtgtgcgcctgtgccctgcttgcaggcaagcagggctccc

SEQ ID NO: 5517 - DNA, 120 bp, Artificial Sequence
  ENSG00000006025_29 (sequence is synthesized)
tcatgtagccccgccttccccctgctgggggtccaccacatcgctgctctttctcacagtctgcctctgatgagggcgaattgctatgacattccaagctccaataaagactgtcccaga

SEQ ID NO: 5518 - DNA, 120 bp, Artificial Sequence
  ENSG00000006025_30 (sequence is synthesized)
atcctctgtgctgggtaatctgcgccctcctccatggcgcaggaggccgtctacctctcccaggctgtgatggtttctgccccttttccccaccctgtgagtaaaattgcccccaccttg

SEQ ID NO: 5519 - DNA, 120 bp, Artificial Sequence
  ENSG00000006025_31 (sequence is synthesized)
ggtccgatagcagatctgggtcagggtggggggttggcagaggcagtctctgcagagatgcggcaaggtggggaggacctcatcctcctggcaccgtgtccctcaccctctccctgcagg

SEQ ID NO: 5520 - DNA, 120 bp, Artificial Sequence
  ENSG00000006025_32 (sequence is synthesized)
ggccgattctcctgtgccttctctcccagcgaaagccaaggcccagggcagtgggcaaagttggtttttagtcccaaagacagcccaaaaatcctggctccattgtctttcccataaggt

SEQ ID NO: 5521 - DNA, 120 bp, Artificial Sequence
  ENSG00000006025_33 (sequence is synthesized)
aagcggcagccccatctcgatcattgtgtaacaacgtgcagggtacttttacttttaattcggggtcctctgatgcagtgattctcaccctcagcataacaaaactgaggctcaaaggat

SEQ ID NO: 5522 - DNA, 120 bp, Artificial Sequence
  ENSG00000006025_34 (sequence is synthesized)
ctaatgggtgggctcaggctcctgcaattatagacgggctgaactgagactcgggctctgagcacagacgctggggctacgttccacgggttcaaatctggctctcctgcctgccggctt

SEQ ID NO: 5523 - DNA, 120 bp, Artificial Sequence
  ENSG00000006025_35 (sequence is synthesized)
tgtgatcctgagcctcagcattccaatctgcaaagtgggggtgataattgcacctacctcacagggtaggtgtcaggattgaatgggttagtgcacacagagggcttggagtggggctca

SEQ ID NO: 5524 - DNA, 120 bp, Artificial Sequence
  ENSG00000006025_36 (sequence is synthesized)
gggtcagtgccaggaagtgtaaacagttataatggagcctgcgtcccctcactcccaggccagggctcattttactatgcctttgtcccgctctcactcctctctgcctcttctgctcag

SEQ ID NO: 5525 - DNA, 120 bp, Artificial Sequence
  ENSG00000006025_37 (sequence is synthesized)
aaggtgtctgactcagcaaaagtgcccggttatgcctccctctcaagggaactgtcaggcaagcgggtgccctgcttgatccccccggcttggccccggagcctgacatccatctggctg

SEQ ID NO: 5526 - DNA, 120 bp, Artificial Sequence
  ENSG00000006025_38 (sequence is synthesized)
ctctccgccagctcttctgagaatgaggtgagggaggagagaagctggcagtgaggcggggtaggggggaccttgggaacagaagggtggggtccacagagaccatagattcctcagccc

SEQ ID NO: 5527 - DNA, 120 bp, Artificial Sequence
  ENSG00000006025_39 (sequence is synthesized)
cttctcaccacctcagctgctatctctgggactatgtccagatcagctgagtttgtgtggcccagctcagaaatctctgctagggactcttctcctagaggagtgtgacatttgtatccc

SEQ ID NO: 5528 - DNA, 120 bp, Artificial Sequence
  ENSG00000006025_40 (sequence is synthesized)
cattgggttctcctgaaactactgccatagttgcaaccccggtcatcttcctatgaccctgtctcagcttcagcactcccttgattccctcttccaaaaccctgaccctcagtaatcccc

SEQ ID NO: 5529 - DNA, 120 bp, Artificial Sequence
  ENSG00000006025_41 (sequence is synthesized)
aacttcccttccctctgtgtcccatcaagtccctgagctttttcccgccagccacagggcccggccctccccttcccaaggtggctgggcacactccgtgatgccaggcatcccggggca

SEQ ID NO: 5530 - DNA, 120 bp, Artificial Sequence
  ENSG00000006025_42 (sequence is synthesized)
ggctggggagttttctgcaagatcatggcagagaagtctctgagctacggtggcagggtggaggggtcctgaaggcagaggcagctggattgaggaggtctcgcttgtccagtctctgaa

SEQ ID NO: 5531 - DNA, 120 bp, Artificial Sequence
  ENSG00000006025_43 (sequence is synthesized)
cccctctgtctcttcttggagcctcttctgtcactcccttgcttcacctctgagcactcccagggaagcctctaaagaaagcactgaatgtttcttggagccccagagtatgtgcccaag

SEQ ID NO: 5532 - DNA, 120 bp, Artificial Sequence
  ENSG00000006025_44 (sequence is synthesized)
gcggggctgggcatatgtcttgtggttttccctgggcacctgcccgtctgctgtgtgctagttcactctcagggcagtgtccatatcaggtgaaaatgggtggggtcgggacagaggggc

SEQ ID NO: 5533 - DNA, 120 bp, Artificial Sequence
  ENSG00000006025_45 (sequence is synthesized)
agacttgggagaggcttggcaggtgagcagagggtatgttggggagcccttatctcagagggtgtgggaggggctggaggtggggaaggtgatagcagagtttgcgttaagggggtcttt

SEQ ID NO: 5534 - DNA, 120 bp, Artificial Sequence
  ENSG00000006025_46 (sequence is synthesized)
tctggccccagtatgccctgggcaggcatggggtatctggaatcgaccagagcagggtctgaatcccaggtccaccacttgctgaatgtgtgatctcgggcaagttacatccctgggcca

SEQ ID NO: 5535 - DNA, 120 bp, Artificial Sequence
  ENSG00000006025_47 (sequence is synthesized)
tagcttcctcacctctaatgggagagcaccatcccccaggtgcagagctgtcatggtaagggaggtcatacgtacaaggctctctggacagggcagaataagtgcccaagaaatgggggc

SEQ ID NO: 5536 - DNA, 120 bp, Artificial Sequence
  ENSG00000006025_48 (sequence is synthesized)
tttaccaccctcatcctggtcccattctcaggctgggaacaaggaactgaaggcctgggtacccaggatctctctgggagggtgttgccttccacaaccctgcagacccctgagggtggg

SEQ ID NO: 5537 - DNA, 120 bp, Artificial Sequence
  ENSG00000006025_49 (sequence is synthesized)
caggcaaagggagggtccagacatggggggcggggtgggaatggggggcagctgctgggcagtccaatggtgtttgcatgatgagaaggaaaagaaaagctaatttgtgtggttgccttc

SEQ ID NO: 5538 - DNA, 120 bp, Artificial Sequence
  ENSG00000006025_50 (sequence is synthesized)
tccctcatgcccttcctctcggcctcccgggtcctgtcactcctgggcaacatcacagagatactttgtgctcgaggacgggatccttcattatgcaacaacccggcaagacgtgagccc

SEQ ID NO: 5539 - DNA, 80 bp, Artificial Sequence
  ENSG00000006042_0 (sequence is synthesized)
ccgtctgccgcccggacgggccaccgcgggggcgcgaggaaggggtgttgggtcgccagggcccgcctcccagctgcccc

SEQ ID NO: 5540 - DNA, 80 bp, Artificial Sequence
  ENSG00000006042_1 (sequence is synthesized)
gggggcgcgaggctggattcctagggccgcggcgcttcccggcatgctccgctgcaggcccgcgcccgcgcccggacttt

SEQ ID NO: 5541 - DNA, 120 bp, Artificial Sequence
  ENSG00000006042_2 (sequence is synthesized)
ggcatgctccgctgcaggcccgcgcccgcgcccggactttgccatcggcggggcagtcgcgggatgcgcccgggagccacagcctgagctttagcccatgaggaggatgtgaccgggact

SEQ ID NO: 5542 - DNA, 120 bp, Artificial Sequence
  ENSG00000006042_3 (sequence is synthesized)
gagtcaggagccctctggaagcatggagactgtggtgattgttgccataggtgtgctggccaccatctttctggcttcgtttgcagccttggtgctggtttgcaggcagcgctactgccg

SEQ ID NO: 5543 - DNA, 120 bp, Artificial Sequence
  ENSG00000006042_4 (sequence is synthesized)
gccgcgagacctgctgcagcgctatgattctaagcccattgtggacctcattggtgccatggagacccagtctgagccctctgagttagaactggacgatgtcgttatcaccaaccccca

SEQ ID NO: 5544 - DNA, 120 bp, Artificial Sequence
  ENSG00000006042_5 (sequence is synthesized)
cattgaggccattctggagaatgaagactggatcgaagatgcctcgggtctcatgtcccactgcattgccatcttgaagatttgtcacactctgacagagaagcttgttgccatgacaat

SEQ ID NO: 5545 - DNA, 120 bp, Artificial Sequence
  ENSG00000006042_6 (sequence is synthesized)
gggctctggggccaagatgaagacttcagccagtgtcagcgacatcattgtggtggccaagcggatcagccccagggtggatgatgttgtgaagtcgatgtaccctccgttggaccccaa

SEQ ID NO: 5546 - DNA, 120 bp, Artificial Sequence
  ENSG00000006042_7 (sequence is synthesized)
cctggacgcacggacgactgccctgctcctgtctgtcagtcacctggtgctggtgacaaggaatgcctgccatctgacgggaggcctggactggattgaccagtctctgtcggctgctga

SEQ ID NO: 5547 - DNA, 120 bp, Artificial Sequence
  ENSG00000006042_8 (sequence is synthesized)
ggagcatttggaagtccttcgagaagcagccctagcttctgagccagataaaggcctcccaggccctgaaggcttcctgcaggagcagtctgcaatttagtgcctacaggccagcagcta

SEQ ID NO: 5548 - DNA, 120 bp, Artificial Sequence
  ENSG00000006042_9 (sequence is synthesized)
gccatgaaggcccctgccgccatccctggatggctcagcttagccttctactttttcctatagagttagttgttctccacggctggagagttcagctgtgtgtgcatagtaaagcaggag

SEQ ID NO: 5549 - DNA, 120 bp, Artificial Sequence
  ENSG00000006042_10 (sequence is synthesized)
atccccgtcagtttatgcctcttttgcagttgcaaactgtggctggtgagtggcagtctaatactacagttaggggagatgccattcactctctgcaagaggagtattgaaaactggtgg

SEQ ID NO: 5550 - DNA, 120 bp, Artificial Sequence
  ENSG00000006042_11 (sequence is synthesized)
actgtcagctttatttagctcacctagtgttttcaagaaaattgagccaccgtctaagaaatcaagaggtttcacattaaaattagaatttctggcctctctcgatcggtcagaatgtgt

SEQ ID NO: 5551 - DNA, 120 bp, Artificial Sequence
  ENSG00000006042_12 (sequence is synthesized)
ggcaattctgatctgcattttcagaagaggacaatcaattgaaactaagtaggggtttcttcttttggcaagacttgtactctctcacctggcctgtttcatttatttgtattatctgcc

SEQ ID NO: 5552 - DNA, 120 bp, Artificial Sequence
  ENSG00000006042_13 (sequence is synthesized)
tggtccctgaggcgtctgggtctctcctctcccttgcaggtttgggtttgaagctgaggaactacaaagttgatgatttcttttttatctttatgcctgcaattttacctagctaccact

SEQ ID NO: 5553 - DNA, 120 bp, Artificial Sequence
  ENSG00000006042_14 (sequence is synthesized)
ttattgagtcaaattcatatgcatggtgtattgtgggacatacttagatggaaggagagagcctaagaatcctgaggatgatttctgtgtatgcctcaaaatgagatatttaggctgggc

SEQ ID NO: 5554 - DNA, 84 bp, Artificial Sequence
  ENSG00000006042_15 (sequence is synthesized)
aaaaattagctgggcatggtgacacgtgcggctgcttggtgaaggttgcagtgagccctgattgtgccactgcattccagcctg

SEQ ID NO: 5555 - DNA, 120 bp, Artificial Sequence
  ENSG00000006042_16 (sequence is synthesized)
ggcgacagagtgagaccatgtctccaaaacatacatatatataaaatatatttaaagacctcttggagttcaggcagaagtgaagatagcactatgaagtagtttccacattaacaatag

SEQ ID NO: 5556 - DNA, 120 bp, Artificial Sequence
  ENSG00000006042_17 (sequence is synthesized)
gttccccctttcttctgatattaatatctgttcattttgcaaacattgaaagattatgaaagctatgacccagaatcacaattatataatttggatacatacccaaatggcataatttct

SEQ ID NO: 5557 - DNA, 120 bp, Artificial Sequence
  ENSG00000006042_18 (sequence is synthesized)
gtcataagcctgtaggaaaagcttgaattcttcacttctcagattctcagagccagcttgctcttgggagaggggcctggtataggggctgcccaggttcgtagcctatgctgtcaagca

SEQ ID NO: 5558 - DNA, 120 bp, Artificial Sequence
  ENSG00000006042_19 (sequence is synthesized)
tgtttggagttgcacatctgttcccatgtcattttctctgtctaactgaagtcagaaaattcctcagctggattctggggaaccaggaacccatattcccaaatccaagattgggacctg

SEQ ID NO: 5559 - DNA, 120 bp, Artificial Sequence
  ENSG00000006042_20 (sequence is synthesized)
gtttgtctttccatttgggcacatttcattctttccaggaaaacaggccacttccaacctgcacaatgtacaccaaaccacagaaccacagctgggatatggagtcaggagagggaagct

SEQ ID NO: 5560 - DNA, 120 bp, Artificial Sequence
  ENSG00000006042_21 (sequence is synthesized)
ggagctcaactctcatggactaaaggatggattctggatgggctccaggggacaccttattggattggtggcttccatcaactcttaaaaacgttaagtggtgaactttcccgtcctgtc

SEQ ID NO: 5561 - DNA, 120 bp, Artificial Sequence
  ENSG00000006042_22 (sequence is synthesized)
aagctgtgaatggggaatgtatacaaagtcactttgacttttctatttgaggcctccacagtaaacatccagagtcatcctatttttgtctttttacctccctttcagaacctgttttcg

SEQ ID NO: 5562 - DNA, 120 bp, Artificial Sequence
  ENSG00000006042_23 (sequence is synthesized)
taattagactggaaagcaattcatgctaagtttgcaatggctgccacagttgtaagtgtcccctgcattttaacctgcactagagccctaagccacagagaagcagttctgaattggtat

SEQ ID NO: 5563 - DNA, 120 bp, Artificial Sequence
  ENSG00000006042_24 (sequence is synthesized)
ctcaaataccatccacctggtgtgggtctgcagggtggagagctttcccagcacccctgaagcaatgcccaatgtcgattaccttctctgagtcctggcaagtcctggcacattggcttt

SEQ ID NO: 5564 - DNA, 120 bp, Artificial Sequence
  ENSG00000006042_25 (sequence is synthesized)
ctggatcccttagatgctgccctttctgttgtgaggagaggttgccgaagatattggaggtgtctgctggactgtaggatttctgatcccactgctgtgtagtttttttttctagtgctg

SEQ ID NO: 5565 - DNA, 120 bp, Artificial Sequence
  ENSG00000006042_26 (sequence is synthesized)
gacaagtaagaagcctctggataaatttggtgttggtggctgatggttgaagtggaagcagtctttggggtaggaggcaatgccactcctctaggcccttcgggagttggctgaagttac

SEQ ID NO: 5566 - DNA, 120 bp, Artificial Sequence
  ENSG00000006042_27 (sequence is synthesized)
ttcctcccttggaaggggctggttagtgagtgccagggatctcaggactgtctctgtgccaggtgtggtttcccaggcaacagacacattcctaagtgcctagttctctagcgtctgtat

SEQ ID NO: 5567 - DNA, 120 bp, Artificial Sequence
  ENSG00000006042_28 (sequence is synthesized)
acatggtagtagagccttccttccatgtctctcttccctctggcctggaataggagcattagactcaaattctgatgaaaaagaaattacttggagatagagattcaatgtgaagagaac

SEQ ID NO: 5568 - DNA, 120 bp, Artificial Sequence
  ENSG00000006042_29 (sequence is synthesized)
aagatatttgaagtcagaattaggtttgaatttgggctcagtgacttacagtgtgagcttggtcaagttcttaacattctggtccttagcattctcatctgtatggtcaaggctattgtc

SEQ ID NO: 5569 - DNA, 120 bp, Artificial Sequence
  ENSG00000006042_30 (sequence is synthesized)
attgggttggtatgtcaacaagcaaaacggtatgtgtgagctgcccaattgtgggcctggttctgattagccaatgttaacacccttctctccacagcttcccattctctgatgccgctg

SEQ ID NO: 5570 - DNA, 120 bp, Artificial Sequence
  ENSG00000006042_31 (sequence is synthesized)
acccagatggcgtcacctcagttaccatggcttggtccaagcagtgacttctgttcatgggctctggaattgagtggccaaaaatctggaatccctacagtagggagagtagccttgtcc

SEQ ID NO: 5571 - DNA, 120 bp, Artificial Sequence
  ENSG00000006042_32 (sequence is synthesized)
ctgccccactacaagtctgttcatatgaagacatacaaagccgtcgcctctaatcagtgttcaaagggtcgattgtgcaactcacattcctccagagaaattcccccagcttgtgagatc

SEQ ID NO: 5572 - DNA, 120 bp, Artificial Sequence
  ENSG00000006042_33 (sequence is synthesized)
tccaagagggaacacgtattcctggcatccaacttcccctggtgctccccctgacctgcctcattccaggagttccctctccagagaccctgtgtgcccacacgagcagacttttagaaa

SEQ ID NO: 5573 - DNA, 120 bp, Artificial Sequence
  ENSG00000006042_34 (sequence is synthesized)
atggcctacagttcaaaggccctgcattgctttatggccttggaaatgtggggaaagtgtcagatgaagaatttctatcctcctcacctcctccctgtctccaataaatgcataccaaga

SEQ ID NO: 5574 - DNA, 120 bp, Artificial Sequence
  ENSG00000006042_35 (sequence is synthesized)
cctcttccccaatttgccacttccagcaggtaagacccacctgtcccactctctttcgtggcttcttgaccagatctgctctgacttcatgttctctcaagctttagcccatgaggagga

SEQ ID NO: 5575 - DNA, 87 bp, Artificial Sequence
  ENSG00000006042_36 (sequence is synthesized)
tattttaaggccgggctcggtgtcgaggccctcaggtctctgcaggtgtcgtggaggaacctagcacctgccatcctcttccccaat

SEQ ID NO: 5576 - DNA, 120 bp, Artificial Sequence
  ENSG00000006042_37 (sequence is synthesized)
atcagccccaggtaaggagaccaaagcagaaagatcagtaaccctcctggagtctcacaattaatatgaatcagagcaggatcttcaactcctcaacttgtgtttttaactggcacatct

SEQ ID NO: 5577 - DNA, 120 bp, Artificial Sequence
  ENSG00000006042_38 (sequence is synthesized)
tcctgcctgggtgcagcaggtgggaaatccatcatggaaaggaaagaacagacatgagagtcattccattctcttccagttcaaatctttttttgtgaaaaaaatggtagttgtgaccca

SEQ ID NO: 5578 - DNA, 120 bp, Artificial Sequence
  ENSG00000006042_39 (sequence is synthesized)
agcctgggtgacagagctagactccatcttaaaaaaacaaacaaacacaaacaaacaaacaaaaaattttagtccaactggggagcaaattcttctgagaaaggaaaaggcaaatttggg

SEQ ID NO: 5579 - DNA, 80 bp, Artificial Sequence
  ENSG00000006047_0 (sequence is synthesized)
gccattggcctcggctccgggcccgctgccggcgtgtgggcgaggctcggggcgcgaggaccgagcagggcggtgggttc

SEQ ID NO: 5580 - DNA, 120 bp, Artificial Sequence
  ENSG00000006047_1 (sequence is synthesized)
cggtactggacccggcgggatgagcgaggtggaggcggcagcgggggctacagcggtccccgcggcgacggtgcccgcgacggcggcaggggtggtagcggtggtggtaccggtgcccgc

SEQ ID NO: 5581 - DNA, 80 bp, Artificial Sequence
  ENSG00000006047_2 (sequence is synthesized)
ggagccgcctcgggccccgctgctgggaccccctcggcgccgggctcccgcacccctggcaatccggcgacggcggtctc

SEQ ID NO: 5582 - DNA, 120 bp, Artificial Sequence
  ENSG00000006047_3 (sequence is synthesized)
gggaacccccgcccccccggcccggagtcaggcggacaagccggtgctggcaatccaagtcctgggcactgtcaaatggttcaacgtccggaatggttacggattcatcaacaggaatga

SEQ ID NO: 5583 - DNA, 120 bp, Artificial Sequence
  ENSG00000006047_4 (sequence is synthesized)
caccaaggaagatgtctttgttcaccagacagctattaaaagaaacaaccccaggaagtttctgcgcagcgttggagatggggagactgtggaatttgatgtcgtggaaggagagaaggg

SEQ ID NO: 5584 - DNA, 120 bp, Artificial Sequence
  ENSG00000006047_5 (sequence is synthesized)
cgcagaagccactaatgtaactgggcctgggggagtacccgtgaagggcagccgttatgcccccaaccgacgtaagtcccgccgattcatcccccggcctccctcagttgccccaccacc

SEQ ID NO: 5585 - DNA, 120 bp, Artificial Sequence
  ENSG00000006047_6 (sequence is synthesized)
ccacccttcttctaccgacggcggtttgtgcgaggcccccggcctcccaaccagcagcagcctatagagggcactgacagggtagaacccaaagagacagccccattggaggggcaccaa

SEQ ID NO: 5586 - DNA, 120 bp, Artificial Sequence
  ENSG00000006047_7 (sequence is synthesized)
cagcagggagatgagcgagtccccccgcccagattccggcccaggtaccgaaggcctttccgccccaggccacgccagcagcctaccacagaaggtggggatggtgagaccaagcccagc

SEQ ID NO: 5587 - DNA, 120 bp, Artificial Sequence
  ENSG00000006047_8 (sequence is synthesized)
caaggtcccgctgatggttcccggcctgagccccagcgcccacgaaaccgcccctacttccagcggagacggcagcaggcccctggcccccagcaggcccctggcccccggcagcccgca

SEQ ID NO: 5588 - DNA, 120 bp, Artificial Sequence
  ENSG00000006047_9 (sequence is synthesized)
gcccctgagacctcagcccctgtcaacagtggggaccccaccaccaccatcctggagtgattccaactcaactcagaggacacccagagctgccatctggtatctgccagtttttccaaa

SEQ ID NO: 5589 - DNA, 120 bp, Artificial Sequence
  ENSG00000006047_10 (sequence is synthesized)
tgacctgtaccctacccagtaccctgctccccctttcccataattcatgacatcaaaacaccagcttttcaccttttccttgagactcaggaggaccaaagcagcagccttttgcttttt

SEQ ID NO: 5590 - DNA, 120 bp, Artificial Sequence
  ENSG00000006047_11 (sequence is synthesized)
cttttttcttccctccccttatcaagggttgaaggaagggagccatccttactgttcagagacagcaactccctcccgtaactcaggctgagaaggaaccagccagctcttacctcctcc

SEQ ID NO: 5591 - DNA, 120 bp, Artificial Sequence
  ENSG00000006047_12 (sequence is synthesized)
tggttgcttttcttgcccccaccccaagtttatttttgttttcccccggccccctacctctgaagccattttatgatctgtcatgtgccacctgagcctccagtaaaaacaaaaacaggc

SEQ ID NO: 5592 - DNA, 120 bp, Artificial Sequence
  ENSG00000006047_13 (sequence is synthesized)
cccagctggcctgtgggactggacacccgcccaacctcatcgacccctgcggaggcacatggttgcaatgtccagctgatgctggttgaaagcctttaaccgcagcacaaatgtgtgctt

SEQ ID NO: 5593 - DNA, 120 bp, Artificial Sequence
  ENSG00000006047_14 (sequence is synthesized)
cgtgacaagaggaagcctcctccgcatcttcaagggtagcggaggattaatgattcaggaacttggcaaacctggctctgaccctgccagcttctcatctcaccttctggaattgcttca

SEQ ID NO: 5594 - DNA, 120 bp, Artificial Sequence
  ENSG00000006047_15 (sequence is synthesized)
ttacttttactctgacatgcctttggggcagaatgtattatagggttctctgtgcctcagggcccccggctggaatcctcaactgatttcctgttatggcagcactcacaactcaactcc

SEQ ID NO: 5595 - DNA, 120 bp, Artificial Sequence
  ENSG00000006047_16 (sequence is synthesized)
aactaggcaaacctctgagcctggcaagcaggtgcactggggacccttgcattgggagggctagaaaaaccctcagttatgacctgggggcggcactttgcagaccagcaatccaagtcc

SEQ ID NO: 5596 - DNA, 120 bp, Artificial Sequence
  ENSG00000006047_17 (sequence is synthesized)
tgggcactgtcaaatggttcaacgtccggaatggttacggattcatcaacaggaatgacaccaaggaagatgtctttgttcaccaggtaagagctaggttagctttctgaggggaagaac

SEQ ID NO: 5597 - DNA, 120 bp, Artificial Sequence
  ENSG00000006047_18 (sequence is synthesized)
cggccgtctttgaaggcctttgctgtaatccttagcagtgcgctccgccatgtttctctggctcttcttcacaacggcccatccgccttgggtgcctgtgtcaaccaccattagccgcac

SEQ ID NO: 5598 - DNA, 120 bp, Artificial Sequence
  ENSG00000006047_19 (sequence is synthesized)
ttgtgctgggttactaaacgtccgtcagaattgagcatgttacccctgggcatggcacgcttactacccaccgggacctgttaacactccaggaagcactgaggcagttttcagagggag

SEQ ID NO: 5599 - DNA, 120 bp, Artificial Sequence
  ENSG00000006047_20 (sequence is synthesized)
aaggtccttgggtgcagtggttctcaaagcgtggcccctgcaccagcggcagcagcatcacctgacatccgaattctcaggtcccaccccagacctggtgaatcaatcagagctggggct

SEQ ID NO: 5600 - DNA, 120 bp, Artificial Sequence
  ENSG00000006047_21 (sequence is synthesized)
ggggctccacaatcggtttaacgagctctccaggtgattctgatgcacgctacagcttgagaaccactgcttggtggaaagagctctcactgggactgaggtaagaagcacagtgcattc

SEQ ID NO: 5601 - DNA, 120 bp, Artificial Sequence
  ENSG00000006047_22 (sequence is synthesized)
tacccactttgcgactgaaggctgtccctgccttttgctttggagttcatatttcttgcctccctttctgaaatccctgaggggtaaagcggggcgggaggggaggtgcggggagtgcat

SEQ ID NO: 5602 - DNA, 120 bp, Artificial Sequence
  ENSG00000006047_23 (sequence is synthesized)
cctggggatggtggtaactgcacaatctgctgaggccctgagttcaggacttttcccctgctaaactttgaccacctccttgctccaccctccagctctagaccccaagtcaaatgttga

SEQ ID NO: 5603 - DNA, 120 bp, Artificial Sequence
  ENSG00000006047_24 (sequence is synthesized)
gctgccggcgtgtgggcgaggctcggggcgcgaggaccgagcagggcgcaatccaagtcctgggcactgtcaaatggttcaacgtccggaatggttacggattcatcaacaggaatgaca

SEQ ID NO: 5604 - DNA, 120 bp, Artificial Sequence
  ENSG00000006047_25 (sequence is synthesized)
agctgccatctgggttgaaggaagggagccatccttactgttcagagacagcaactccctcccgtaactcaggctgagaaggaaccagccagctcttacctcctcctggttgcttttctt

SEQ ID NO: 5605 - DNA, 120 bp, Artificial Sequence
  ENSG00000006047_26 (sequence is synthesized)
gtgaggggcaggcgcgcacagggcggctctgaggggtcggcgggctgggggaggggcagtgtggagcccggcaggatccggaaaaccaaaggcggcctggcccgcaggcccagagcgcta

SEQ ID NO: 5606 - DNA, 120 bp, Artificial Sequence
  ENSG00000006047_27 (sequence is synthesized)
actgggctgggagctgcgcaccaaagtggattcccctggtgggaaatcctgccgtaccttcctgggagagagggcggggccggcaggttcagctaaggtcttggggtggagaataaagcc

SEQ ID NO: 5607 - DNA, 120 bp, Artificial Sequence
  ENSG00000006047_28 (sequence is synthesized)
ccagggtccggccacgcccccgggcgggacacagtgcctagttgactgggttagaactaggcaaacctctgagcctggcaagcaggtgcactggggacccttgcattgggagggctagaa

SEQ ID NO: 5608 - DNA, 120 bp, Artificial Sequence
  ENSG00000006047_29 (sequence is synthesized)
aaaccctcagttatgacctgggggcggcactttgcagaccaggtgagtacccagttctaggtgaaggggctggatttgtaggatgtggggaacgtgacttagagttggaaggctttttga

SEQ ID NO: 5609 - DNA, 120 bp, Artificial Sequence
  ENSG00000006047_30 (sequence is synthesized)
aagcctgagtccctgtgtgggtgatttcatttggtggactagggtaggaataccttgaagctactagtgaaacctggttggcttgaaggtaacctgaataggtaataaggcagtaggcta

SEQ ID NO: 5610 - DNA, 120 bp, Artificial Sequence
  ENSG00000006047_31 (sequence is synthesized)
gatttttttttgttttggagtgtctcaaaactgagttcaactccatctcttccccccatctcactgtccccactgcatctctgcctggcagcaatccaagtcctgggcactgtcaaatgg

SEQ ID NO: 5611 - DNA, 120 bp, Artificial Sequence
  ENSG00000006047_32 (sequence is synthesized)
aggctgacagtgggggtcaggaggaaggagccagaggctgctgctttccttcagtaggcagccccacccctcagcaccgggagaggctgtggcagtggattctgagcagagccaggtctc

SEQ ID NO: 5612 - DNA, 120 bp, Artificial Sequence
  ENSG00000006047_33 (sequence is synthesized)
ccccagtgggcccttccccagcccaggcatcctgcccggcctggctctcctgggaggccctagttccctcttagcaggctgacctttgtgcagatccaagtgctttaaagctaaaacgtt

SEQ ID NO: 5613 - DNA, 120 bp, Artificial Sequence
  ENSG00000006047_34 (sequence is synthesized)
tgttctggggaagggtccctgtctaattctggaaatggcagactgggtcgggggcagagtgcctccaggaaaacttttcctttctcccctccccccacccactggggttcttatgataga

SEQ ID NO: 5614 - DNA, 120 bp, Artificial Sequence
  ENSG00000006047_35 (sequence is synthesized)
gaatgggtgaatgttttcttctctctcacccttggtcccacgcgtgttgagagtggtcctgactctgggattcacctccaggctgaggatgagaataaagtttggcagctgtttagagca

SEQ ID NO: 5615 - DNA, 120 bp, Artificial Sequence
  ENSG00000006047_36 (sequence is synthesized)
agttcctgacacattgttcccttctcaaacttgttctgcccctctggccccatctgcactttctgcctccttgactatagaaggaagaagactggaattttccaaccctgatgggggttg

SEQ ID NO: 5616 - DNA, 120 bp, Artificial Sequence
  ENSG00000006047_37 (sequence is synthesized)
gtgcctttgcctccccagcctgccctttccttgtgaagtccaggtttggcactgaggttttaggtgtatctctctttacaccagcttctgggggccctgctggctctccctcccattccc

SEQ ID NO: 5617 - DNA, 120 bp, Artificial Sequence
  ENSG00000006047_38 (sequence is synthesized)
caggccatgtccacccctaactggaatgctggagaggatgggcccactgagcttagactgggcatctagggggacctcagtgaggagctgagggctttgttgaagtcccttccttaacga

SEQ ID NO: 5618 - DNA, 120 bp, Artificial Sequence
  ENSG00000006059_0 (sequence is synthesized)
accgctctacaacctggagattttggactctgtcttcagctggacactccctccctgcaccatgtcttacagttgtggcctgcccagcctgagctgccgcaccagctgctcctcccggcc

SEQ ID NO: 5619 - DNA, 120 bp, Artificial Sequence
  ENSG00000006059_1 (sequence is synthesized)
ctgtgtgccccccagctgccacggctgcaccctgcccggggcctgcaacatccccgccaatgtgagcaactgcaactggttctgtgagggctccttcaatggcagtgagaaggagaccat

SEQ ID NO: 5620 - DNA, 120 bp, Artificial Sequence
  ENSG00000006059_2 (sequence is synthesized)
gcagttcctgaacgaccgcctggccagctacctggagaaggtgcgtcagctggagcgggacaacgcggagctggagaacctcatccgggagcggtcacagcagcaggagcccttggtgtg

SEQ ID NO: 5621 - DNA, 120 bp, Artificial Sequence
  ENSG00000006059_3 (sequence is synthesized)
tgccagctaccagtcctacttcaagaccattgaggagctccagcagaagatcctgtgcagcaagtctgagaatgccaggcttgtggtgcagatcgacaatgccaagctggcctcagatga

SEQ ID NO: 5622 - DNA, 120 bp, Artificial Sequence
  ENSG00000006059_4 (sequence is synthesized)
cttcaggaccaaatatgagaccgagctgtccctgcggcagctggtggagtcggacatcaatggcctgcgcaggatcctggatgagctgaccctgtgcaggtctgacctggaggcccaggt

SEQ ID NO: 5623 - DNA, 120 bp, Artificial Sequence
  ENSG00000006059_5 (sequence is synthesized)
gctgctcccactgtggacctgaaccaggtcctgaatgagaccaggagtcagtatgaggccctggtggaaaccaaccgcagggaagtggagcaatggttcgccacgcagaccgaggagctg

SEQ ID NO: 5624 - DNA, 120 bp, Artificial Sequence
  ENSG00000006059_6 (sequence is synthesized)
aacaagcaggtggtatccagctcggagcagctgcagtcctaccaggcggagatcatcgagctgagacgcacggtcaatgccctggagatcgagctgcaggcccagcacaacctgcgagac

SEQ ID NO: 5625 - DNA, 120 bp, Artificial Sequence
  ENSG00000006059_7 (sequence is synthesized)
tctctggaaaacacgctgacagagagcgaggcccgctacagctcccagctgtcccaggtgcagagactgatcaccaacgtggagtcccagctggcggagatccgcagtgacctggagcgg

SEQ ID NO: 5626 - DNA, 120 bp, Artificial Sequence
  ENSG00000006059_8 (sequence is synthesized)
cagaaccaggagtatcaggtgctgctggacgtgcgggcgcggctggagtgtgagatcaacacgtaccggagcctgctggagagcgaggactgcaagctcccctccaacccctgcgccaca

SEQ ID NO: 5627 - DNA, 120 bp, Artificial Sequence
  ENSG00000006059_9 (sequence is synthesized)
accaatgcatgtgacaagtccactgggccctgtatctctaatccctgtggcctacgtgctcggtgtgggccttgcaacacatttgggtactagaggccccacaaccaggaggagaagaaa

SEQ ID NO: 5628 - DNA, 120 bp, Artificial Sequence
  ENSG00000006062_0 (sequence is synthesized)
gggagatcgcgggcgagcggagcgcaacactcgcttggttggggagatcggcgcttggccggatgagcacaagcctgggagatggcagtgatggaaatggcctgcccaggtgcccctggc

SEQ ID NO: 5629 - DNA, 120 bp, Artificial Sequence
  ENSG00000006062_1 (sequence is synthesized)
tcagcagtggggcagcagaaggaactccccaaagccaaggagaagacgccgccactggggaagaaacagagctccgtctacaagcttgaggccgtggagaagagccctgtgttctgcgga

SEQ ID NO: 5630 - DNA, 120 bp, Artificial Sequence
  ENSG00000006062_2 (sequence is synthesized)
aagtgggagatcctgaatgacgtgattaccaagggcacagccaaggaaggctccgaggcagggccagctgccatctctatcatcgcccaggctgagtgtgagaatagccaagagttcagc

SEQ ID NO: 5631 - DNA, 120 bp, Artificial Sequence
  ENSG00000006062_3 (sequence is synthesized)
cccaccttttcagaacgcattttcatcgctgggtccaaacagtacagccagtccgagagtcttgatcagatccccaacaatgtggcccatgctacagagggcaaaatggcccgtgtgtgt

SEQ ID NO: 5632 - DNA, 120 bp, Artificial Sequence
  ENSG00000006062_4 (sequence is synthesized)
tggaagggaaagcgtcgcagcaaagcccggaagaaacggaagaagaagagctcaaagtccctggctcatgcaggagtggccttggccaaacccctccccaggacccctgagcaggagagc

SEQ ID NO: 5633 - DNA, 120 bp, Artificial Sequence
  ENSG00000006062_5 (sequence is synthesized)
tgcaccatcccagtgcaggaggatgagtctccactcggcgccccatatgttagaaacaccccgcagttcaccaagcctctgaaggaaccaggccttgggcaactctgttttaagcagctt

SEQ ID NO: 5634 - DNA, 120 bp, Artificial Sequence
  ENSG00000006062_6 (sequence is synthesized)
ggcgagggcctacggccggctctgcctcgatcagaactccacaaactgatcagccccttgcaatgtctgaaccacgtgtggaaactgcaccacccccaggacggaggccccctgcccctg

SEQ ID NO: 5635 - DNA, 120 bp, Artificial Sequence
  ENSG00000006062_7 (sequence is synthesized)
cccacgcaccccttcccctatagcagactgcctcatcccttcccattccaccctctccagccctggaaacctcaccctctggagtccttcctgggcaaactggcctgtgtagacagccag

SEQ ID NO: 5636 - DNA, 120 bp, Artificial Sequence
  ENSG00000006062_8 (sequence is synthesized)
aaacccttgcctgacccacacctgagcaaactggcctgtgtagacagtccaaagcccctgcctggcccacacctggagcccagctgcctgtctcgtggtgcccatgagaagttttctgtg

SEQ ID NO: 5637 - DNA, 120 bp, Artificial Sequence
  ENSG00000006062_9 (sequence is synthesized)
gaggaatacctagtgcatgctctgcaaggcagcgtgagctcaggccaggcccacagcctgaccagcctggccaagacctgggcagcaaggggctccagatcccgggagcccagccccaaa

SEQ ID NO: 5638 - DNA, 120 bp, Artificial Sequence
  ENSG00000006062_10 (sequence is synthesized)
actgaggacaacgagggtgtcctgctcactgagaaactcaagccagtggattatgagtaccgagaagaagtccactgggccacgcaccagctccgcctgggcagaggctccttcggagag

SEQ ID NO: 5639 - DNA, 120 bp, Artificial Sequence
  ENSG00000006062_11 (sequence is synthesized)
gtgcacaggatggaggacaagcagactggcttccagtgcgctgtcaaaaaggtgcggctggaagtatttcgggcagaggagctgatggcatgtgcaggattgacctcacccagaattgtc

SEQ ID NO: 5640 - DNA, 120 bp, Artificial Sequence
  ENSG00000006062_12 (sequence is synthesized)
cctttgtatggagctgtgagagaagggccttgggtcaacatcttcatggagctgctggaaggtggctccctgggccagctggtcaaggagcagggctgtctcccagaggaccgggccctg

SEQ ID NO: 5641 - DNA, 120 bp, Artificial Sequence
  ENSG00000006062_13 (sequence is synthesized)
tactacctgggccaggccctggagggtctggaatacctccactcacgaaggattctgcatggggacgtcaaagctgacaacgtgctcctgtccagcgatgggagccacgcagccctctgt

SEQ ID NO: 5642 - DNA, 120 bp, Artificial Sequence
  ENSG00000006062_14 (sequence is synthesized)
gactttggccatgctgtgtgtcttcaacctgatggcctgggaaagtccttgctcacaggggactacatccctggcacagagacccacatggctccggaggtggtgctgggcaggagctgc

SEQ ID NO: 5643 - DNA, 120 bp, Artificial Sequence
  ENSG00000006062_15 (sequence is synthesized)
gacgccaaggtggatgtctggagcagctgctgtatgatgctgcacatgctcaacggctgccacccctggactcagttcttccgagggccgctctgcctcaagattgccagcgagcctccg

SEQ ID NO: 5644 - DNA, 120 bp, Artificial Sequence
  ENSG00000006062_16 (sequence is synthesized)
cctgtgagggagatcccaccctcctgcgcccctctcacagcccaggccatccaagaggggctgaggaaagagcccatccaccgcgtgtctgcagcggagctgggagggaaggtgaaccgg

SEQ ID NO: 5645 - DNA, 120 bp, Artificial Sequence
  ENSG00000006062_17 (sequence is synthesized)
gcactacagcaagtgggaggtctgaagagcccttggaggggagaatataaagaaccaagacatccaccgccaaatcaagccaattaccaccagaccctccatgcccagccgagagagctt

SEQ ID NO: 5646 - DNA, 120 bp, Artificial Sequence
  ENSG00000006062_18 (sequence is synthesized)
gccaagggccccagggccccggccagctgaggagacaacaggcagagcccctaagctccagcctcctctcccaccagagcccccagagccaaacaagtctcctcccttgactttgagcaa

SEQ ID NO: 5647 - DNA, 120 bp, Artificial Sequence
  ENSG00000006062_19 (sequence is synthesized)
ggaggagtctgggatgtgggaacccttacctctgtcctccctggagccagcccctgccagaaaccccagctcaccagagcggaaagcaaccgtcccggagcaggaactgcagcagctgga

SEQ ID NO: 5648 - DNA, 120 bp, Artificial Sequence
  ENSG00000006062_20 (sequence is synthesized)
aatagaattattcctcaacagcctgtcccagccattttctctggaggagcaggagcaaattctctcgtgcctcagcatcgacagcctctccctgtcggatgacagtgagaagaacccatc

SEQ ID NO: 5649 - DNA, 120 bp, Artificial Sequence
  ENSG00000006062_21 (sequence is synthesized)
aaaggcctctcaaagctcgcgggacaccctgagctcaggcgtacactcctggagcagccaggccgaggctcgaagctccagctggaacatggtgctggcccgggggcggcccaccgacac

SEQ ID NO: 5650 - DNA, 120 bp, Artificial Sequence
  ENSG00000006062_22 (sequence is synthesized)
cccaagctatttcaatggtgtgaaagtccaaatacagtctcttaatggtgaacacctgcacatccgggagttccaccgggtcaaagtgggagacatcgccactggcatcagcagccagat

SEQ ID NO: 5651 - DNA, 120 bp, Artificial Sequence
  ENSG00000006062_23 (sequence is synthesized)
cccagctgcagccttcagcttggtcaccaaagacgggcagcctgttcgctacgacatggaggtgccagactcgggcatcgacctgcagtgcacactggcccctgatggcagcttcgcctg

SEQ ID NO: 5652 - DNA, 120 bp, Artificial Sequence
  ENSG00000006062_24 (sequence is synthesized)
gagctggagggtcaagcatggccagctggagaacaggccctaaccctgccctccaccgccggctccacactgccggaagcagccttcctgctcggtgcacgatgctgccctgaaacacag

SEQ ID NO: 5653 - DNA, 120 bp, Artificial Sequence
  ENSG00000006062_25 (sequence is synthesized)
gctcagccgttcccagggatctgccagcccccggctcagcagtgggaccagggcctcgcagcagcaaggtgggggcaagcagaatgcctcccaggatttcacacctgagccctgccccac

SEQ ID NO: 5654 - DNA, 120 bp, Artificial Sequence
  ENSG00000006062_26 (sequence is synthesized)
cctgctgagaaaacactccgccacgtgaagagacagaggaggatggcaggagttacctcgggaaacaaacaggatcttctctgccctgctccagtcgagttggcctgacccgcttggatc

SEQ ID NO: 5655 - DNA, 120 bp, Artificial Sequence
  ENSG00000006062_27 (sequence is synthesized)
agtgaccatttgctggcagacaggggagagcagcttccagcctgggtcagaaggggtgggcgagcccctcggcccctcaccctccaggctgctgtgagagtgtcaagtgtgtaagggccc

SEQ ID NO: 5656 - DNA, 120 bp, Artificial Sequence
  ENSG00000006062_28 (sequence is synthesized)
aaactcaggttcagtgcagaaccaggtcagcaggtatgcccgcccgtaggttaagggggccctctaaaccccttgcctggcctcacctggccagctcaccccttttgggtgtaggggaaa

SEQ ID NO: 5657 - DNA, 120 bp, Artificial Sequence
  ENSG00000006062_29 (sequence is synthesized)
agaatgcctgaccctgggaaggctccctggtagaatacaccacacttttcaggttgttgcaacacaggtcctgagttgacctctggttcagccaaggaccaaagaaggtgtgtaagtgaa

SEQ ID NO: 5658 - DNA, 120 bp, Artificial Sequence
  ENSG00000006062_30 (sequence is synthesized)
gtggttctcagtccccagacatgtgcccctttgctgctggctaccactcttccccagagcagcaggccccgagccccttcaggcccagcactgccccagactcgctggcactcagttccc

SEQ ID NO: 5659 - DNA, 120 bp, Artificial Sequence
  ENSG00000006062_31 (sequence is synthesized)
tcatctgtaaaggtgaagggtgatgcaggatatgcctgacaggaacagtctgtggatggacatgatcagtgctaaggaaagcagcagagagagacgctccggcgccccagccccactatc

SEQ ID NO: 5660 - DNA, 120 bp, Artificial Sequence
  ENSG00000006062_32 (sequence is synthesized)
agtgtccagcgtgctggttccccagagcacagctcagcatcacactgacactcaccctgccctgcccctggccagagggtactgccgacggcactttgcactctgatgacctcaaagcac

SEQ ID NO: 5661 - DNA, 120 bp, Artificial Sequence
  ENSG00000006062_33 (sequence is synthesized)
tttcatggctgccctctggcagggcagggcagggcagtgacactgtaggagcatagcaagccaggagatggggtgaagggacacagtcttgagctgtccacatgcatgtgactcctcaaa

SEQ ID NO: 5662 - DNA, 120 bp, Artificial Sequence
  ENSG00000006062_34 (sequence is synthesized)
cctcttccagatttctctaagaatagcacccccttccccattgccccagcttagcctcttctcccaggggagctactcaggactcacgtagcattaaatcagctgtgaatcgtcaggggg

SEQ ID NO: 5663 - DNA, 120 bp, Artificial Sequence
  ENSG00000006062_35 (sequence is synthesized)
tgtctgctagcctcaacctcctggggcaggggacgccgagactccgtgggagaagctcattcccacatcttgccaagacagcctttgtccagctgtccacattgagtcagactgctcccg

SEQ ID NO: 5664 - DNA, 120 bp, Artificial Sequence
  ENSG00000006062_36 (sequence is synthesized)
gggagagagccccggcccccagcacataaagaactgcagccttggtactgcagagtctgggttgtagagaactctttgtaagcaataaagtttggggtgatgacaaatgtttccaggcca

SEQ ID NO: 5665 - DNA, 120 bp, Artificial Sequence
  ENSG00000006062_37 (sequence is synthesized)
accgggggactgtgccgtgtggaacgtgtagctgttgagaggtggactctgttaccattgaggatgtttggaggatgagtatgtgtggcagaggcacacataaacaggcagagacccttt

SEQ ID NO: 5666 - DNA, 120 bp, Artificial Sequence
  ENSG00000006062_38 (sequence is synthesized)
gcccctgcctttctcccccaacccaaggctgacctgtgttctcccaggtctgggattctaagtgacctgctctgtgtttggtctctctcaggatgagcacaagcctgggagatggcagtg

SEQ ID NO: 5667 - DNA, 120 bp, Artificial Sequence
  ENSG00000006062_39 (sequence is synthesized)
gcaaggggaggcctggtcatccatgtgggatcctaattcaaatacttgccacccaaatctgggggtacaaggggagatccagctgcggaggctcaccaagttcatggcaggtgagaactc

SEQ ID NO: 5668 - DNA, 120 bp, Artificial Sequence
  ENSG00000006062_40 (sequence is synthesized)
tcttctgtccataccctgggccccatccacctgcctcctaacgggccgggcctggaggctgtgggcgtcttgctgcctggctctggcctgttttactggctccatttgtccctttcctgg

SEQ ID NO: 5669 - DNA, 120 bp, Artificial Sequence
  ENSG00000006062_41 (sequence is synthesized)
gaaaagtgccctcactgtagcccagacccctccattccttgtggtagaccccagcacagcgggaacaggggccggcgggagttgcgcaaagagcaataacagccgggtatcaggaaatga

SEQ ID NO: 5670 - DNA, 120 bp, Artificial Sequence
  ENSG00000006062_42 (sequence is synthesized)
ctccaaccccttagccaagcactgtagtttctggtagacggtggccacagagaaccgaaggtcaagctcccacccactggtgacccctggtatggggtcggcgcaggcgagcagagtggc

SEQ ID NO: 5671 - DNA, 120 bp, Artificial Sequence
  ENSG00000006062_43 (sequence is synthesized)
agcgttcccgagtaaaccctgctcctgtccctttgccctcagagatcctgcctacctctagcctgaattgataccctcctcccttcctccacgattaatgaaactaatcagaagcagcag

SEQ ID NO: 5672 - DNA, 120 bp, Artificial Sequence
  ENSG00000006062_44 (sequence is synthesized)
ctgccacgtagggtcagccagaaaattacatcactggagggcaggccaaaccgagccagggtgggctgggacccggcatgactcacctgttcctcttcctccccggggcggcctggcagc

SEQ ID NO: 5673 - DNA, 120 bp, Artificial Sequence
  ENSG00000006062_45 (sequence is synthesized)
gccggcggcgggagatcgcgggcgagcggagcgcaacactcgcttggttggggagatcggcgcttggccgctgacttgatggccgaagagtcatttctaaagtgaagctagtttttagaa

SEQ ID NO: 5674 - DNA, 120 bp, Artificial Sequence
  ENSG00000006062_46 (sequence is synthesized)
aaaatagatcaccggatgtcaagcctcatgtggagctcggttcagatgaaaatgaaaccagcaggcctggcgtggcagctctgcacttgacttcaggctggaggatgagcacaagcctgg

SEQ ID NO: 5675 - DNA, 120 bp, Artificial Sequence
  ENSG00000006071_0 (sequence is synthesized)
cgcggagccagcggagccagctgagcccgagcccagcccgcgcccgcgccgccatgcccctggccttctgcggcagcgagaaccactcggccgcctaccgggtggaccagggggtcctca

SEQ ID NO: 5676 - DNA, 120 bp, Artificial Sequence
  ENSG00000006071_1 (sequence is synthesized)
gaccagggggtcctcaacaacggctgctttgtggacgcgctcaacgtggtgccgcacgtcttcctactcttcatcaccttccccatcctcttcattggatggggaagtcagagctccaag

SEQ ID NO: 5677 - DNA, 120 bp, Artificial Sequence
  ENSG00000006071_2 (sequence is synthesized)
gtgcacatccaccacagcacatggcttcatttccctgggcacaacctgcggtggatcctgaccttcatgctgctcttcgtcctggtgtgtgagattgcagagggcatcctgtctgatggg

SEQ ID NO: 5678 - DNA, 120 bp, Artificial Sequence
  ENSG00000006071_3 (sequence is synthesized)
gtgaccgaatcccaccatctgcacctgtacatgccagccgggatggcgttcatggctgctgtcacctccgtggtctactatcacaacatcgagacttccaacttccccaagctgctaatt

SEQ ID NO: 5679 - DNA, 120 bp, Artificial Sequence
  ENSG00000006071_4 (sequence is synthesized)
gccctgctggtgtattggaccctggccttcatcaccaagaccatcaagtttgtcaagttcttggaccacgccatcggcttctcgcagctacgcttctgcctcacagggctgctggtgatc

SEQ ID NO: 5680 - DNA, 120 bp, Artificial Sequence
  ENSG00000006071_5 (sequence is synthesized)
ctctatgggatgctgctcctcgtggaggtcaatgtcatcagggtgaggagatacatcttcttcaagacaccgagggaggtgaagcctcccgaggacctgcaagacctgggggtacgcttc

SEQ ID NO: 5681 - DNA, 120 bp, Artificial Sequence
  ENSG00000006071_6 (sequence is synthesized)
ctgcagcccttcgtgaatctgctgtccaaaggcacctactggtggatgaacgccttcatcaagactgcccacaagaagcccatcgacttgcgagccatcgggaagctgcccatcgccatg

SEQ ID NO: 5682 - DNA, 120 bp, Artificial Sequence
  ENSG00000006071_7 (sequence is synthesized)
agggccctcaccaactaccaacggctctgcgaggcctttgacgcccaggtgcggaaggacattcagggcactcaaggtgcccgggccatctggcaggcactcagccatgccttcgggagg

SEQ ID NO: 5683 - DNA, 120 bp, Artificial Sequence
  ENSG00000006071_8 (sequence is synthesized)
cgcctggtcctcagcagcactttccgcatcttggccgacctgctgggcttcgccgggccactgtgcatctttgggatcgtggaccaccttgggaaggagaacgacgtcttccagcccaag

SEQ ID NO: 5684 - DNA, 120 bp, Artificial Sequence
  ENSG00000006071_9 (sequence is synthesized)
acacaatttctcggggtttactttgtctcatcccaagagttccttgccaatgcctacgtcttagctgtgcttctgttccttgccctcctactgcaaaggacatttctgcaagcatcctac

SEQ ID NO: 5685 - DNA, 120 bp, Artificial Sequence
  ENSG00000006071_10 (sequence is synthesized)
tatgtggccattgaaactggaattaacttgagaggagcaatacagaccaagatttacaataaaattatgcacctgtccacctccaacctgtccatgggagaaatgactgctggacagatc

SEQ ID NO: 5686 - DNA, 120 bp, Artificial Sequence
  ENSG00000006071_11 (sequence is synthesized)
tgtaatctggttgccatcgacaccaatcagctcatgtggtttttcttcttgtgcccaaacctctgggctatgccagtacagatcattgtgggtgtgattctcctctactacatactcgga

SEQ ID NO: 5687 - DNA, 120 bp, Artificial Sequence
  ENSG00000006071_12 (sequence is synthesized)
gtcagtgccttaattggagcagctgtcatcattctactggctcctgtccagtacttcgtggccaccaagctgtctcaggcccagcggagcacactggagtattccaatgagcggctgaag

SEQ ID NO: 5688 - DNA, 120 bp, Artificial Sequence
  ENSG00000006071_13 (sequence is synthesized)
cagaccaacgagatgctccgcggcatcaagctgctgaagctgtacgcctgggagaacatcttccgcacgcgggtggagacgacccgcaggaaggagatgaccagcctcagggcctttgcc

SEQ ID NO: 5689 - DNA, 120 bp, Artificial Sequence
  ENSG00000006071_14 (sequence is synthesized)
atctatacctccatctccattttcatgaacacggccatccccattgcagctgtcctcataactttcgtgggccacgtcagcttcttcaaagaggccgacttctcgccctccgtggccttt

SEQ ID NO: 5690 - DNA, 120 bp, Artificial Sequence
  ENSG00000006071_15 (sequence is synthesized)
gcctccctctccctcttccatatcttggtcacaccgctgttcctgctgtccagtgtggtccgatctaccgtcaaagctctagtgagcgtgcaaaagctaagcgagttcctgtccagtgca

SEQ ID NO: 5691 - DNA, 120 bp, Artificial Sequence
  ENSG00000006071_16 (sequence is synthesized)
gagatccgtgaggagcagtgtgccccccatgagcccacacctcagggcccagccagcaagtaccaggcggtgcccctcagggttgtgaaccgcaagcgtccagcccgggaggattgtcgg

SEQ ID NO: 5692 - DNA, 120 bp, Artificial Sequence
  ENSG00000006071_17 (sequence is synthesized)
ggcctcaccggcccactgcagagcctggtccccagtgcagatggcgatgctgacaactgctgtgtccagatcatgggaggctacttcacgtggaccccagatggaatccccacactgtcc

SEQ ID NO: 5693 - DNA, 120 bp, Artificial Sequence
  ENSG00000006071_18 (sequence is synthesized)
aacatcaccattcgtatcccccgaggccagctgactatgatcgtggggcaggtgggctgcggcaagtcctcgctccttctagccgcactgggggagatgcagaaggtctcaggggctgtc

SEQ ID NO: 5694 - DNA, 120 bp, Artificial Sequence
  ENSG00000006071_19 (sequence is synthesized)
ttctggagcagccttcctgacagcgagataggagaggaccccagcccagagcgggagacagcgaccgacttggatatcaggaagagaggccccgtggcctatgcttcgcagaaaccatgg

SEQ ID NO: 5695 - DNA, 120 bp, Artificial Sequence
  ENSG00000006071_20 (sequence is synthesized)
tgctaaatgccactgtggaggagaacatcatctttgagagtcccttcaacaaacaacggtacaagatggtcattgaagcctgctctctgcagccagacatcgacatcctgccccatggag

SEQ ID NO: 5696 - DNA, 120 bp, Artificial Sequence
  ENSG00000006071_21 (sequence is synthesized)
accagacccagattggggaacggggcatcaacctgtctggtggtcaacgccagcgaatcagtgtggcccgagccctctaccagcacgccaacgttgtcttcttggatgaccccttctcag

SEQ ID NO: 5697 - DNA, 120 bp, Artificial Sequence
  ENSG00000006071_22 (sequence is synthesized)
ctctggatatccatctgagtgaccacttaatgcaggccggcatccttgagctgctccgggacgacaagaggacagtggtcttagtgacccacaagctacagtacctgccccatgcagact

SEQ ID NO: 5698 - DNA, 120 bp, Artificial Sequence
  ENSG00000006071_23 (sequence is synthesized)
ggatcattgccatgaaggatggcaccatccagagggagggtaccctcaaggacttccagaggtctgaatgccagctctttgagcactggaagaccctcatgaaccgacaggaccaagagc

SEQ ID NO: 5699 - DNA, 120 bp, Artificial Sequence
  ENSG00000006071_24 (sequence is synthesized)
tggagaaggagactgtcacagagagaaaagccacagagccaccccagggcctatctcgtgccatgtcctcgagggatggccttctgcaggatgaggaagaggaggaagaggaggcagctg

SEQ ID NO: 5700 - DNA, 120 bp, Artificial Sequence
  ENSG00000006071_25 (sequence is synthesized)
agagcgaggaggatgacaacctgtcgtccatgctgcaccagcgtgctgagatcccatggcgagcctgcgccaagtacctgtcctccgccggcatcctgctcctgtcgttgctggtcttct

SEQ ID NO: 5701 - DNA, 120 bp, Artificial Sequence
  ENSG00000006071_26 (sequence is synthesized)
cacagctgctcaagcacatggtcctggtggccatcgactactggctggccaagtggaccgacagcgccctgaccctgacccctgcagccaggaactgctccctcagccaggagtgcaccc

SEQ ID NO: 5702 - DNA, 120 bp, Artificial Sequence
  ENSG00000006071_27 (sequence is synthesized)
tcgaccagactgtctatgccatggtgttcacggtgctctgcagcctgggcattgtgctgtgcctcgtcacgtctgtcactgtggagtggacagggctgaaggtggccaagagactgcacc

SEQ ID NO: 5703 - DNA, 120 bp, Artificial Sequence
  ENSG00000006071_28 (sequence is synthesized)
gcagcctgctaaaccggatcatcctagcccccatgaggttttttgagaccacgccccttgggagcatcctgaacagattttcatctgactgtaacaccatcgaccagcacatcccatcca

SEQ ID NO: 5704 - DNA, 120 bp, Artificial Sequence
  ENSG00000006071_29 (sequence is synthesized)
cgctggagtgcctgagccgctccaccctgctctgtgtctcagccctggccgtcatctcctatgtcacacctgtgttcctcgtggccctcttgcccctggccatcgtgtgctacttcatcc

SEQ ID NO: 5705 - DNA, 120 bp, Artificial Sequence
  ENSG00000006071_30 (sequence is synthesized)
agaagtacttccgggtggcgtccagggacctgcagcagctggatgacaccacccagcttccacttctctcacactttgccgaaaccgtagaaggactcaccaccatccgggccttcaggt

SEQ ID NO: 5706 - DNA, 120 bp, Artificial Sequence
  ENSG00000006071_31 (sequence is synthesized)
atgaggcccggttccagcagaagcttctcgaatacacagactccaacaacattgcttccctcttcctcacagctgccaacagatggctggaagtccgaatggagtacatcggtgcatgtg

SEQ ID NO: 5707 - DNA, 120 bp, Artificial Sequence
  ENSG00000006071_32 (sequence is synthesized)
tggtgctcatcgcagcggtgacctccatctccaactccctgcacagggagctctctgctggcctggtgggcctgggccttacctacgccctaatggtctccaactacctcaactggatgg

SEQ ID NO: 5708 - DNA, 120 bp, Artificial Sequence
  ENSG00000006071_33 (sequence is synthesized)
tgaggaacctggcagacatggagctccagctgggggctgtgaagcgcatccatgggctcctgaaaaccgaggcagagagctacgaggggctcctggcaccatcgctgatcccaaagaact

SEQ ID NO: 5709 - DNA, 120 bp, Artificial Sequence
  ENSG00000006071_34 (sequence is synthesized)
ggccagaccaagggaagatccagatccagaacctgagcgtgcgctacgacagctccctgaagccggtgctgaagcacgtcaatgccctcatcgcccctggacagaagatcgggatctgcg

SEQ ID NO: 5710 - DNA, 120 bp, Artificial Sequence
  ENSG00000006071_35 (sequence is synthesized)
gccgcaccggcagtgggaagtcctccttctctcttgccttcttccgcatggtggacacgttcgaagggcacatcatcattgatggcattgacatcgccaaactgccgctgcacaccctgc

SEQ ID NO: 5711 - DNA, 120 bp, Artificial Sequence
  ENSG00000006071_36 (sequence is synthesized)
gctcacgcctctccatcatcctgcaggaccccgtcctcttcagcggcaccatccgatttaacctggaccctgagaggaagtgctcagatagcacactgtgggaggccctggaaatcgccc

SEQ ID NO: 5712 - DNA, 120 bp, Artificial Sequence
  ENSG00000006071_37 (sequence is synthesized)
agctgaagctggtggtgaaggcactgccaggaggcctcgatgccatcatcacagaaggcggggagaatttcagccagggacagaggcagctgttctgcctggcccgggccttcgtgagga

SEQ ID NO: 5713 - DNA, 120 bp, Artificial Sequence
  ENSG00000006071_38 (sequence is synthesized)
agaccagcatcttcatcatggacgaggccacggcttccattgacatggccacggaaaacatcctccaaaaggtggtgatgacagccttcgcagaccgcactgtggtcaccatcgcgcatc

SEQ ID NO: 5714 - DNA, 120 bp, Artificial Sequence
  ENSG00000006071_39 (sequence is synthesized)
gagtgcacaccatcctgagtgcagacctggtgatcgtcctgaagcggggtgccatccttgagttcgataagccagagaagctgctcagccggaaggacagcgtcttcgcctccttcgtcc

SEQ ID NO: 5715 - DNA, 120 bp, Artificial Sequence
  ENSG00000006071_40 (sequence is synthesized)
gtgcagacaagtgacctgccagagcccaagtgccatcccacattcggaccctgcccatacccctgcctgggttttctaactgtaaatcacttgtaaataaatagatttgattatttccta

SEQ ID NO: 5716 - DNA, 120 bp, Artificial Sequence
  ENSG00000006071_41 (sequence is synthesized)
ccctggcacgtggtcagacatgacaggaggcccagcagtcaccgccttcccctgcaccctcactgggacccatgcagggcacatcatcattgatggcattgacatcgccaaactgccgct

SEQ ID NO: 5717 - DNA, 120 bp, Artificial Sequence
  ENSG00000006071_42 (sequence is synthesized)
catcctgacccgccccctcctgccctgcccagcatcgagtgcacaccatcctgagtgcagacctggtgatcgtcctgaagcggggtgccatccttgagttcgataagccagagaagctgc

SEQ ID NO: 5718 - DNA, 120 bp, Artificial Sequence
  ENSG00000006071_43 (sequence is synthesized)
gtcctcatatgctgagcgtttccagtgtgggagggacccacaccctgggccaccctggcctcacttgtgcctctgtccacagactttcgtgggccacgtcagcttcttcaaagaggccga

SEQ ID NO: 5719 - DNA, 120 bp, Artificial Sequence
  ENSG00000006071_44 (sequence is synthesized)
cctaatggtgagcggcagtgggctagggcagaggaggggtcagacaccagcactcccggagcaccttcgtcactggagacatgagacactcccaggccttaccccaatttcatttgcatc

SEQ ID NO: 5720 - DNA, 120 bp, Artificial Sequence
  ENSG00000006071_45 (sequence is synthesized)
tgatgccagagggacagtgcgggcaggaaggctgaccagcaggccccagggcccaggccccagacaggtggaggttggggagccacatgactgaccctccctgtgcctccagggagggct

SEQ ID NO: 5721 - DNA, 120 bp, Artificial Sequence
  ENSG00000006071_46 (sequence is synthesized)
gctctgagcaggcagtggatggcagcaaaaggaatctggggccctggcccctctccagccttaagaagagccattctggtggctgaggacagaactaagcgaccatggagtgtgcgccac

SEQ ID NO: 5722 - DNA, 120 bp, Artificial Sequence
  ENSG00000006071_47 (sequence is synthesized)
atgaccctctgcaagtgctcgggccaactctgaccaggctgaccagctgcatcccctgcctctacccacgccaggtacaagatggtcattgaagcctgctctctgcagccagacatcgac

SEQ ID NO: 5723 - DNA, 120 bp, Artificial Sequence
  ENSG00000006071_48 (sequence is synthesized)
gggagaggggtggggaagagtccaaggaggagtgtgtctgggttgggggccacaagggagcctggggatggggtggcactttcggatactagctgtggcccatgcctggtggctgagccc

SEQ ID NO: 5724 - DNA, 120 bp, Artificial Sequence
  ENSG00000006071_49 (sequence is synthesized)
ctccagggccgaggcctctcactattcagacatcgcagtctcctgccctgggcctgtgggggcccatctttcctctccttctattgccttcccccagtgctgccctcaggccttgtcttc

SEQ ID NO: 5725 - DNA, 120 bp, Artificial Sequence
  ENSG00000006071_50 (sequence is synthesized)
tcactcatccaccaaggagaccgacactctggactcccccagctcacacgggctttgtcagggcctccctctctgcgaatggtcaggggctttccctagggcactgccccgagcttcagg

SEQ ID NO: 5726 - DNA, 120 bp, Artificial Sequence
  ENSG00000006071_51 (sequence is synthesized)
gcagggacctgggggcagacagcgaggccacccttgtattgagggtgagcccctgcctatggccctggcccagctctcctctcgtttcccactctgtctctttgtctctgtctcactttg

SEQ ID NO: 5727 - DNA, 120 bp, Artificial Sequence
  ENSG00000006071_52 (sequence is synthesized)
ctgtggctgtccatgtcattctctgaccttgggatgtacctctgtccctgcctctctcatccttctatgtcactatctgtctccgtattgtaatttctgttggtacccaagtgccaggaa

SEQ ID NO: 5728 - DNA, 120 bp, Artificial Sequence
  ENSG00000006071_53 (sequence is synthesized)
gcaacgggatcagaggtggctccattgtagggcggggcacacagacacatccatgcataccactctcagctgcccctgtgtcctcctgccacacccatgcccatagagacacaccactgc

SEQ ID NO: 5729 - DNA, 120 bp, Artificial Sequence
  ENSG00000006071_54 (sequence is synthesized)
cccccagctctccttcagccaagtacccggcacacccagacccacaccaaggcccaggcaaatggacatccatgcctgcacttgcgtgccggtccctgtgtaagccctctctggacccac

SEQ ID NO: 5730 - DNA, 120 bp, Artificial Sequence
  ENSG00000006071_55 (sequence is synthesized)
tgcaggaaacaagcccaaacctgtggtgtccaaagagaaactagtcagaaaaccaggccaaaaagataccctgtgacctcccacacctgcacacacacccagagctagcatagaggctat

SEQ ID NO: 5731 - DNA, 120 bp, Artificial Sequence
  ENSG00000006071_56 (sequence is synthesized)
ggaaacctgggcaccaaggcttgtcccactctaggggactggggaaacagggattttgccagcacctcctggcagggcaaccatcaggtcaaagggacctgacccatgaccccttcctca

SEQ ID NO: 5732 - DNA, 120 bp, Artificial Sequence
  ENSG00000006071_57 (sequence is synthesized)
ccagctggccccactggactgcgctgcctccaagccatcctgggcatctccatgtgtagctgtcacgctcctcccactaaacgcctccctgtgcttcctctgcagttttcatgaacacgg

SEQ ID NO: 5733 - DNA, 120 bp, Artificial Sequence
  ENSG00000006071_58 (sequence is synthesized)
atggatatcagaaggcatccactgtgtctatctttcccaggccaagtatcccctaccctttccacagcccctgagccctcacagcctcagccagtgaaacagcttcccccaagcgctggg

SEQ ID NO: 5734 - DNA, 120 bp, Artificial Sequence
  ENSG00000006071_59 (sequence is synthesized)
tcctgctctgattggcccacagctcttggaggctcccacttccaggctctagagcctcatggggactctgccactgtcccagaggcattgccctcttgggaatgaaagcctgaaggtaga

SEQ ID NO: 5735 - DNA, 120 bp, Artificial Sequence
  ENSG00000006071_60 (sequence is synthesized)
aggctgaggctttggctgggaaatgccctgtctggagtgagaagatgtccttgggcctctgaagtagctctgcctccttgaaagcaagagcctgtcatgcctctatggagggctggcttg

SEQ ID NO: 5736 - DNA, 120 bp, Artificial Sequence
  ENSG00000006071_61 (sequence is synthesized)
tccttacccatggccagagaaccagtcagtaacaaatgtcctctgtgtcttcagccttgaggaaggtgacacccctgtctcatgggaccctggcaggtactgggaagctggaaggaagga

SEQ ID NO: 5737 - DNA, 120 bp, Artificial Sequence
  ENSG00000006071_62 (sequence is synthesized)
gtagctgttggaatgaagtagctgatagagagggtagcttgcagggggagactctagcatgggttcaaagatggaatggggcataactcagcaaaattatgctctaaggagtatctgacc

SEQ ID NO: 5738 - DNA, 120 bp, Artificial Sequence
  ENSG00000006071_63 (sequence is synthesized)
aggcagtagctggttaaacagggattagctcccatttccacagtcggctgtgctgactcagtttcttgaccagggtgttgtggggtctgaagatcacccctcctcccaccacccactctc

SEQ ID NO: 5739 - DNA, 120 bp, Artificial Sequence
  ENSG00000006071_64 (sequence is synthesized)
cagccctatgattctgtgtagaaaccacagatttaagaacgctgcacctgcctgaaaactgttgcactgatcccaaagcgttcatattttcaaacactctggatcccactgtttccagga

SEQ ID NO: 5740 - DNA, 120 bp, Artificial Sequence
  ENSG00000006071_65 (sequence is synthesized)
atggaacaccagagtagcagaggccttttcagtgaggcagctcaggctctggctgaaggtgggcgcaggacactacctgaagcttcaccccaagagatgagggccagctccactcttccc

SEQ ID NO: 5741 - DNA, 120 bp, Artificial Sequence
  ENSG00000006071_66 (sequence is synthesized)
agtcaccgcctgtgggggagggaggctggacagggcatgaaggcagagcctggtggtctgcccctcccatctaggggtggcgcacagaaagggagactccaggccacagctcacttacac

SEQ ID NO: 5742 - DNA, 120 bp, Artificial Sequence
  ENSG00000006071_67 (sequence is synthesized)
cccagaataaccttgccttgagggtgggatggcttgtctgccccaggcctgttggacatttagcaaaagagaagaaaggggaatacaaacaatcctgagcttcccagaaagctttcacac

SEQ ID NO: 5743 - DNA, 120 bp, Artificial Sequence
  ENSG00000006071_68 (sequence is synthesized)
ctccaggatgggagagaatgaactagaagagtgaagcttccagtgcttcctcaggtccacagggaaatctggacaggggagagggtaggaatagccgcctcccccgtgagtaatgacacc

SEQ ID NO: 5744 - DNA, 120 bp, Artificial Sequence
  ENSG00000006071_69 (sequence is synthesized)
aaatactagctattgattctttaccaatcctagtcctaactaaccttaaccctgaccaatccaacaccaaccatccttcagtctaataacccagactaactaacttcaacattaacccta

SEQ ID NO: 5745 - DNA, 120 bp, Artificial Sequence
  ENSG00000006071_70 (sequence is synthesized)
aaactaaccaatctcacctccaatccagaccccagcctattccagctgactggtcaaccctagcaaaccctggtaacaccaattacctgcccccatgcccactggtctgcccccttcagt

SEQ ID NO: 5746 - DNA, 120 bp, Artificial Sequence
  ENSG00000006071_71 (sequence is synthesized)
gtgggctttgtgggactatacttcaggcctgagatcctgctcagagctctctatcaggctgcgccctctcccctcccctctgcccctggcaggggtgaggggtgtctctgtgcttcccga

SEQ ID NO: 5747 - DNA, 120 bp, Artificial Sequence
  ENSG00000006071_72 (sequence is synthesized)
ggggcagggctggggaggctgtcaggcatcttggcaggaaccaatccgttgtcttggtagcaactgctgagggccacaaagcataagagaccagcactggatggctttatgcatgctggg

SEQ ID NO: 5748 - DNA, 120 bp, Artificial Sequence
  ENSG00000006071_73 (sequence is synthesized)
catttcagggagaccctgtacaggccaggggtttggtatcacctagacccacagacactccccatcctggcccgggccccccatggtacactcaaggctggcaccaagaagtctcaggaa

SEQ ID NO: 5749 - DNA, 120 bp, Artificial Sequence
  ENSG00000006071_74 (sequence is synthesized)
acctcagggcccagccagcaagtaccaggcggtggaagaggggctcccttccctacacagctcccagcccagtgggtcctcacctccaaaccacccccagcccctcagggttgtgaaccg

SEQ ID NO: 5750 - DNA, 120 bp, Artificial Sequence
  ENSG00000006071_75 (sequence is synthesized)
ggctggcggtggatggtgggttcagtagaaccagcctggctctgacatcaggcagaagctgtgtgagcaaaagcctgcttccttacctgtgaaatgaggcctctattagtcagccaggct

SEQ ID NO: 5751 - DNA, 120 bp, Artificial Sequence
  ENSG00000006071_76 (sequence is synthesized)
gccacaacaacatatcacagactgggtggctttaaaacagacttttttctcacagttctggaggctgaagtctgggatcaaggtgttggcaggtttggtttctcctgaggcctctctcct

SEQ ID NO: 5752 - DNA, 120 bp, Artificial Sequence
  ENSG00000006071_77 (sequence is synthesized)
tggcttgcagagggctgccttctggctgtgtgctcacatgacctttactctgtgcacatgcatccctgctttctctctgtgtcttaaaaggacaccagtcatattggattagggccccac

SEQ ID NO: 5753 - DNA, 120 bp, Artificial Sequence
  ENSG00000006071_78 (sequence is synthesized)
ggcccagccagcaagtaccaggcggtggtgagtgcccggcctccccttgctactcccagcatggtcctctaaggcccaaaacttgggcctgctgtgtcggacttctgccttttttcccag

SEQ ID NO: 5754 - DNA, 120 bp, Artificial Sequence
  ENSG00000006071_79 (sequence is synthesized)
ccttagtcttcccatctataaaatggggatatacaacctgtcacaagcttgtgggggtgactcaaggagacagtgtgtgtaaaagtgccctccttgtgcaagaagcagggagaaactggc

SEQ ID NO: 5755 - DNA, 120 bp, Artificial Sequence
  ENSG00000006071_80 (sequence is synthesized)
tcagcctcaaggcttgctcgagtgatggccaaaccacagctgtttggtcccggaacacacccccattgctgggccttgctgtagctggtcctggttggtcagagggacattggcctgtat

SEQ ID NO: 5756 - DNA, 120 bp, Artificial Sequence
  ENSG00000006071_81 (sequence is synthesized)
ggccagtctcccactcccctgctctggaagtgatccaggggctggaatcagtgtcttttggctttcatggaggaggggaagccagagactattcactgggaactggctgcctttctgttc

SEQ ID NO: 5757 - DNA, 120 bp, Artificial Sequence
  ENSG00000006071_82 (sequence is synthesized)
tatacctccatctccattttcatgaacacggccatccccattgcagctgtcctcatagggtgaggggtgtctctgtgcttcccgagcagcgtgcaaaagctaagcgagttcctgtccagt

SEQ ID NO: 5758 - DNA, 120 bp, Artificial Sequence
  ENSG00000006071_83 (sequence is synthesized)
cctctgggctatgccagtacaggcccaacccaagctggctgaagaacaccctgatggcctccatttgagcacaactaatgaaggactggatgccagagataagtccaggagggtgatgct

SEQ ID NO: 5759 - DNA, 120 bp, Artificial Sequence
  ENSG00000006071_84 (sequence is synthesized)
gccctcaccaactaccaacggctctgcgaggcctttgacgcccaggtggtcagtgggggcacagccacaccatctattcactgccttctggtttagggtcacagagagggacctcaaagg

SEQ ID NO: 5760 - DNA, 120 bp, Artificial Sequence
  ENSG00000006071_85 (sequence is synthesized)
gcattaggtcaaaatcctggtgggacaagaggggaaactgaggctggtgaggggaagaagcttgccttaagtcacacagtgaaccagggacaggtgcagggctgaggattcataggacag

SEQ ID NO: 5761 - DNA, 120 bp, Artificial Sequence
  ENSG00000006071_86 (sequence is synthesized)
gcacagttggaatggcccttaccgtttaggtcgtctagtccaaagtccttatccagatggggaaactgaggctctgagaagggaagtgaccccactggactctcacatccctgtgctctt

SEQ ID NO: 5762 - DNA, 120 bp, Artificial Sequence
  ENSG00000006071_87 (sequence is synthesized)
tcctctgcagcttactgactataaaggttggagtgttcacttgatttggagcaggggtgttagtggcctgatccttatggtaactctatgagttgagccagacaggaatctccccatatc

SEQ ID NO: 5763 - DNA, 120 bp, Artificial Sequence
  ENSG00000006071_88 (sequence is synthesized)
acctgcccagagctggccacagctggcaggcggcagaggcagtctcctggctcccagtccagtgctccttcacttcctctgccctcgcaccagggcagttgctgaggcagacacggtggc

SEQ ID NO: 5764 - DNA, 120 bp, Artificial Sequence
  ENSG00000006071_89 (sequence is synthesized)
aggtggtaatgagtgagtgtggcacatggccacctcctcattccagtgctgtgctcatcacatagtccctgaccagctgtgtgaccttgagcaatcatctggccttagtttccccatcta

SEQ ID NO: 5765 - DNA, 120 bp, Artificial Sequence
  ENSG00000006071_90 (sequence is synthesized)
gaccatgttggtgttgatagggccctcccaactgtgcacttgctgattccatgatctcttcctggagttcacctatttgcagaggatgtgaccactgggtttccccagacaacaggagct

SEQ ID NO: 5766 - DNA, 120 bp, Artificial Sequence
  ENSG00000006071_91 (sequence is synthesized)
aggggcatcctgggaggctaggcccagccgtgaattagccctcaggcactctgacctggccatggtctctctgggcagcggaaggacattcagggcactcaaggtgcccgggccatctgg

SEQ ID NO: 5767 - DNA, 120 bp, Artificial Sequence
  ENSG00000006071_92 (sequence is synthesized)
ctgaggggaagggaggggggcagcaggacacacaaccagaatctgctggtccatggccagtaactaggagcacaccgtcttccactccatgcttgcctgtacctttcacacacttggcta

SEQ ID NO: 5768 - DNA, 120 bp, Artificial Sequence
  ENSG00000006071_93 (sequence is synthesized)
taccacaggctgtacctctgggtccctcctgtcccatactctgcaagcactgaccatctctcttaatgaccagagaaggcagtatcattaagactttaaaaatggagccaactttataaa

SEQ ID NO: 5769 - DNA, 66 bp, Artificial Sequence
  ENSG00000006071_94 (sequence is synthesized)
agtatcattaagactttaaaaatggagccaactttataaactatagaaaaatcaagccaggtacat

SEQ ID NO: 5770 - DNA, 120 bp, Artificial Sequence
  ENSG00000006071_95 (sequence is synthesized)
gtcctcttcagcggcaccatccggcccaggcagcctctggaaggggatcccccacccatgggtctaagatgctgtcccccacccactgccaccacctcggtgcttctcccagccagacct

SEQ ID NO: 5771 - DNA, 120 bp, Artificial Sequence
  ENSG00000006071_96 (sequence is synthesized)
ccaactcagtctgctctcgctcactgccctctttgccgcctggggatgcaggcaggaccctgctccctccctactggggctttctgtgccacttccagatttaacctggaccctgagagg

SEQ ID NO: 5772 - DNA, 120 bp, Artificial Sequence
  ENSG00000006116_0 (sequence is synthesized)
actttttgcccgcctaagcgagccatagagccgtctccagagctgccggtgcctttaagaagactcggtctttcgggtcttctttttccccaatgggctccagtggtgcccgcagcaaaa

SEQ ID NO: 5773 - DNA, 120 bp, Artificial Sequence
  ENSG00000006116_1 (sequence is synthesized)
ggcaaacttgcctggctcatggggtgaaagggaggattgaagaatgccgcgttgggtgggtgctgagggagcgccagagtgcgctacgggcttcgctccccttcccctttccttaaccct

SEQ ID NO: 5774 - DNA, 120 bp, Artificial Sequence
  ENSG00000006116_2 (sequence is synthesized)
tcctagagcggaggaaccgggtcgtgctgcagcgcccaggagccagggcgctgactgtcctcggctccagaaactttgcgcggagagtgggcttgactgggcagagccgagccggctggc

SEQ ID NO: 5775 - DNA, 120 bp, Artificial Sequence
  ENSG00000006116_3 (sequence is synthesized)
tgacccgggaaggaacgggggaagggcggggtgagggaagaaagaccctttagcaccccgggtttctagcccgggcggcggtgtgcagctgcatgagggagctgtcccttcggcaccacg

SEQ ID NO: 5776 - DNA, 120 bp, Artificial Sequence
  ENSG00000006116_4 (sequence is synthesized)
gaccttaaagcctaggcgttaagacgacggaggcggggcaacaggcggggagctgtcccttcagcaccacggaccttggcgcccccagggaaaccagccggcccccgccccaggactctg

SEQ ID NO: 5777 - DNA, 120 bp, Artificial Sequence
  ENSG00000006116_5 (sequence is synthesized)
tcttttctccagtttgagcgggggtgtcgggagcaggcggagagctttcctgcgaggctgtggaagcagtgaacactcttctcagcggctcgcctcccagcagtgctattttttgccatc

SEQ ID NO: 5778 - DNA, 120 bp, Artificial Sequence
  ENSG00000006116_6 (sequence is synthesized)
gcacgcacacacacacacacacacactcacacagagacctctctgggtttctttgccttgagtctcccggggctgtgagaagccaggcgcatctcaaaccgagctggcagctccaggctc

SEQ ID NO: 5779 - DNA, 120 bp, Artificial Sequence
  ENSG00000006116_7 (sequence is synthesized)
agccaggcgcatctcaaaccgagctggcagctccaggctccggagccatgccctgcacggaccctcgtctttaccacgctcctgaggaatgaaaggaacccagggaccctcagaaggcag

SEQ ID NO: 5780 - DNA, 120 bp, Artificial Sequence
  ENSG00000006116_8 (sequence is synthesized)
cagtgatgcggaccaaccccccggagcctgcacccttccgagggccataggcgacccagggaactggagagagctccagaaaggaaatcccagctttcccaaagtccctgtggatgctga

SEQ ID NO: 5781 - DNA, 120 bp, Artificial Sequence
  ENSG00000006116_9 (sequence is synthesized)
caaaaggagacctgaatttttggaagagcctgtactaggttacccggctgcagagtgattttcccctccggcactgactctccccctccaacccccagccgtccagagtaccatgaagaa

SEQ ID NO: 5782 - DNA, 120 bp, Artificial Sequence
  ENSG00000006116_10 (sequence is synthesized)
ttatgaggatgtgtgacagaggtatccagatgttgatcaccactgtaggagcctttgccgcttttagtttaatgaccattgcagtgggcacggactactggttatattccagaggtgtgt

SEQ ID NO: 5783 - DNA, 120 bp, Artificial Sequence
  ENSG00000006116_11 (sequence is synthesized)
gcaggactaaatctacaagtgataatgaaaccagcaggaagaatgaagaagtaatgacccattcggggctgtggaggacctgctgcctagaaggggctttccgaggcgtgtgcaagaaaa

SEQ ID NO: 5784 - DNA, 120 bp, Artificial Sequence
  ENSG00000006116_12 (sequence is synthesized)
cctcagtgtcacgctgctgttcttcggcgggctctgcgtggcagccagtgagttccaccgcagcagacacaacgtcattctcagcgcgggcatcttttttgtctctgcagggttaagcaa

SEQ ID NO: 5785 - DNA, 120 bp, Artificial Sequence
  ENSG00000006116_13 (sequence is synthesized)
catcattggcatcatagtttatatatcagccaacgccggagaccccgggcagcgtgactccaaaaaaagttactcctatggttggtccttttatttcggagccttctctttcatcatcgc

SEQ ID NO: 5786 - DNA, 120 bp, Artificial Sequence
  ENSG00000006116_14 (sequence is synthesized)
agaaattgtaggagtggttgccgtgcacatctatattgaaaaacatcagcagttacgagccaaatcccactcggagttcctgaagaaatctacttttgcccgcctcccaccctacaggta

SEQ ID NO: 5787 - DNA, 120 bp, Artificial Sequence
  ENSG00000006116_15 (sequence is synthesized)
tcgattccggaggcggtcaagttctcgctccaccgagcccagatcccgagacctgtcccccatcagcaaaggcttccacaccatcccttccactgacatctcgatgttcaccctctcccg

SEQ ID NO: 5788 - DNA, 120 bp, Artificial Sequence
  ENSG00000006116_16 (sequence is synthesized)
ggacccctcaaagatcaccatggggaccctcctcaactccgaccgggaccacgcttttctacagttccacaattccacacccaaagagttcaaagagtcactgcataataatccggccaa

SEQ ID NO: 5789 - DNA, 120 bp, Artificial Sequence
  ENSG00000006116_17 (sequence is synthesized)
caggcgcaccacgcccgtctgaactgacctctgacctctgccccacgcccagcacagccttgggggaagtgtacagagatgtctctgaggttgcatggcatggtccttgtgatggtatta

SEQ ID NO: 5790 - DNA, 120 bp, Artificial Sequence
  ENSG00000006116_18 (sequence is synthesized)
ctttttacaaagaatgaaaccaaatggactcagccctctcccacattttcccctcaccctccaagtcctaacccctccatcctctctaacttttcaagccaatcccttaatgtcattcct

SEQ ID NO: 5791 - DNA, 120 bp, Artificial Sequence
  ENSG00000006116_19 (sequence is synthesized)
ctctctgtgtatctgtgccagatgttttcctttcttccttctttactggaaggacctccacattcttccctccttggaagaggactttactaaaagtcacaggtggtggccaggggggat

SEQ ID NO: 5792 - DNA, 120 bp, Artificial Sequence
  ENSG00000006116_20 (sequence is synthesized)
ttccgaatctccatcaggcgcgctcatagttgtccccattgtctacccacacaaatcctcaggaaaccaaccaccgcccaggtggccctgagggaggcattcacctttatgtgttagaaa

SEQ ID NO: 5793 - DNA, 120 bp, Artificial Sequence
  ENSG00000006116_21 (sequence is synthesized)
aacatgaccagaaatcaaagatgtcagagccccgaagcagctaatgtaataagcactcatgttattaaaggttttgccttgtcgtaaccaaccgagccgggggtgttttgtttcttgtgg

SEQ ID NO: 5794 - DNA, 120 bp, Artificial Sequence
  ENSG00000006116_22 (sequence is synthesized)
gtgtttcctacacaaactcactcccctgcctccaaactggctcatgtccatcttggaagctgaactttgctcatccacacttgagccactaggaaggatctccctgcacctttggaagct

SEQ ID NO: 5795 - DNA, 120 bp, Artificial Sequence
  ENSG00000006116_23 (sequence is synthesized)
agtaaggcattcccacaaatgtccaaatcaatgcatccttctacttgaattcctggaggctacctgggggtgggtgagtgaatgctggttttcaagatctaactttggcatgcaatagct

SEQ ID NO: 5796 - DNA, 120 bp, Artificial Sequence
  ENSG00000006116_24 (sequence is synthesized)
ctagaaccttgggcaagtcacctaagcctcaagcctcagtctcctcatctgtaaaatggaacatgataatagcactctcctccacagagttatgaggtttaaataaaactgtgtgtaaaa

SEQ ID NO: 5797 - DNA, 120 bp, Artificial Sequence
  ENSG00000006118_0 (sequence is synthesized)
gcggccgggacccagcgggccaggtggggacggcgcggagcgggtgcgggagatgccgtgcgggactggggccacctgagccgcccgcctcgtccccgccttctgtgggaaggatgtgcg

SEQ ID NO: 5798 - DNA, 120 bp, Artificial Sequence
  ENSG00000006118_1 (sequence is synthesized)
ccgcccgcctcgtccccgccttctgtgggaaggatgtgcgcgcggatggccggtcgcacaacagcggcccctcgggggccctacggcccctggctctgcctcctggtggccctcgccctg

SEQ ID NO: 5799 - DNA, 120 bp, Artificial Sequence
  ENSG00000006118_2 (sequence is synthesized)
gacgtcgtgagagtggactgtggccaggctcccctggaccctgtctacctgccggcagccctggagctcctagacgcccctgaacacttccgtgtgcagcaggtgggccactacccacct

SEQ ID NO: 5800 - DNA, 120 bp, Artificial Sequence
  ENSG00000006118_3 (sequence is synthesized)
gccaactcctctctgagctcccgatctgagacctttctgctcctacagccctggcccagggcccagccacttctccgggcctcctacccaccttttgccactcagcaggtggtcccccct

SEQ ID NO: 5801 - DNA, 120 bp, Artificial Sequence
  ENSG00000006118_4 (sequence is synthesized)
cgagtcactgagccccaccaacggccagtcccatgggacgtgcgggccgtttcagtggaagcggctgtgactccagcagagccctacgcccgggttctcttccacctcaaagggcaggat

SEQ ID NO: 5802 - DNA, 120 bp, Artificial Sequence
  ENSG00000006118_5 (sequence is synthesized)
tggccaccagggtctggcagcctgccctgtgcccggctccatgccacacaccctgccggcactgctcaccaagcctgccgcttccagccatccctgggcgcctgcgtggtggagctggag

SEQ ID NO: 5803 - DNA, 120 bp, Artificial Sequence
  ENSG00000006118_6 (sequence is synthesized)
cttccctcgcactggttctcacaggcctccaccacacgggccgagctggcctacacgcttgagcctgcagctgagggccctgggggctgtggctccggcgaggagaacgaccctggggag

SEQ ID NO: 5804 - DNA, 120 bp, Artificial Sequence
  ENSG00000006118_7 (sequence is synthesized)
caggccctcccagtggggggtgtggagctgcgcccagcagaccccccgcagtaccaggaggtacctctggacgaggctgtgactctgcgggtgcctgacatgccagtgcggcccggccag

SEQ ID NO: 5805 - DNA, 120 bp, Artificial Sequence
  ENSG00000006118_8 (sequence is synthesized)
ctctttagtgctaccctcctgcttcggcacaacttcacagccagcctcctgaccctgcggatcaaggtgaagaaggggctgcatgtgacagccgcccgcccagcccagcccacactctgg

SEQ ID NO: 5806 - DNA, 120 bp, Artificial Sequence
  ENSG00000006118_9 (sequence is synthesized)
actgccaagctggaccgcttcaagggctccaggcaccacaccaccctcatcacctgccaccgtgctgggctcacagagccagattccagcagtccccttgaactgtctgagttcctatgg

SEQ ID NO: 5807 - DNA, 120 bp, Artificial Sequence
  ENSG00000006118_10 (sequence is synthesized)
gtggactttgtggtggagaatagcactggtgggggcgtagcggtcactcgccccgtcacgtggcagctggagtacccaggccaggcccctgaagcagagaaggacaaaatggtgtgggaa

SEQ ID NO: 5808 - DNA, 120 bp, Artificial Sequence
  ENSG00000006118_11 (sequence is synthesized)
atcctggtgtctgagcgggacatcagagcccttatcccactggccaaggctgaggagctggtgaatacagcaccactgactggagtgccccagcatgtccccgtgcgccttgtcactgtg

SEQ ID NO: 5809 - DNA, 120 bp, Artificial Sequence
  ENSG00000006118_12 (sequence is synthesized)
gacggcgggggggccttggtggaggtgacagagcatgtcggctgcgagtctgccaacacacaggtcctgcaggtgtctgaggcctgtgatgccgtgttcgtggctggcaaggagagccgg

SEQ ID NO: 5810 - DNA, 120 bp, Artificial Sequence
  ENSG00000006118_13 (sequence is synthesized)
ggcgcccggggggtgcgagtggacttctggtggcgccggctccgcgcctcgctgcggctgaccgtgtgggcccccctgctaccgctgcgtatcgagctcaccgacaccaccctcgagcag

SEQ ID NO: 5811 - DNA, 120 bp, Artificial Sequence
  ENSG00000006118_14 (sequence is synthesized)
gtccgcggctggagggtacctggccctgctgaagggcctgcggaacccgctgcagaggcgtcggatgaggccgagcggcgcgcccgtggctgccacctgcagtaccagcgggccggtgtg

SEQ ID NO: 5812 - DNA, 120 bp, Artificial Sequence
  ENSG00000006118_15 (sequence is synthesized)
cgcttcctcgcccccttcgcggcccacccgctggacggcggccgccgcctcacgcacctgcttggccccgactggctgctagacgtgtcccacctcgtggcgccacacgcccgcgtgctg

SEQ ID NO: 5813 - DNA, 120 bp, Artificial Sequence
  ENSG00000006118_16 (sequence is synthesized)
gactcgcgtgtagcctctctggagggtggccgtgtcgtggtgggccgggagcccggtgtcacctccattgaggtgcgttccccactgtctgactccatcctgggggagcaggcgctggct

SEQ ID NO: 5814 - DNA, 120 bp, Artificial Sequence
  ENSG00000006118_17 (sequence is synthesized)
gtgacggacgacaaggtctcagtgctggagctgagggtgcagccagtgatgggcatctcgctgaccttgagccggggcactgcccaccccggggaggtcacagctacgtgctgggcacag

SEQ ID NO: 5815 - DNA, 120 bp, Artificial Sequence
  ENSG00000006118_18 (sequence is synthesized)
tcagcccttcccgccccaaagcaggaggtggccctctccctatggctgtccttctctgatcacactgtggccccagctgagctctacgaccgccgtgacctgggactgtccgtctcagcc

SEQ ID NO: 5816 - DNA, 120 bp, Artificial Sequence
  ENSG00000006118_19 (sequence is synthesized)
gaggagcctggtgccatcctgccagctgaggagcagggtgcccagctcggggtggtggtgagtggggcaggcgccgaggggctgccgctgcatgtggctctgcacccgcccgagccctgc

SEQ ID NO: 5817 - DNA, 120 bp, Artificial Sequence
  ENSG00000006118_20 (sequence is synthesized)
cgccggggccgccaccgtgtgcctctggcctctggcaccgcctggctggggctgccccctgcctccactccagcccctgctctcccatccagccctgcttggagcccaccagccacagaa

SEQ ID NO: 5818 - DNA, 120 bp, Artificial Sequence
  ENSG00000006118_21 (sequence is synthesized)
gccaccatgggtggtaaacggcaggtggcaggcagtgtcgggggcaacacaggtgtgaggggcaagtttgagcgggcagaggaggaggccaggaaggaggagaccgaagccagggaggag

SEQ ID NO: 5819 - DNA, 120 bp, Artificial Sequence
  ENSG00000006118_22 (sequence is synthesized)
gaggaggaagaggaggaggagatggtccctgcccctcagcatgtcactgagctagagctgggcatgtacgccctgctgggagtcttctgcgtggccatcttcatcttcttggtcaatggt

SEQ ID NO: 5820 - DNA, 120 bp, Artificial Sequence
  ENSG00000006118_23 (sequence is synthesized)
gtggtcttcgtcctgcgctatcagcgcaaagaacctcccgacagtgccactgaccccacctccccccagccccacaactgggtctggctgggcactgaccaggaggaactgagccgccag

SEQ ID NO: 5821 - DNA, 120 bp, Artificial Sequence
  ENSG00000006118_24 (sequence is synthesized)
ctggaccggcagtcccctggcccgcccaagggggaggggagctgcccctgtgagagtgggggaggaggggaggcccctaccctggcccctggccctcctgggggcaccaccagctcctca

SEQ ID NO: 5822 - DNA, 120 bp, Artificial Sequence
  ENSG00000006118_25 (sequence is synthesized)
agcaccctggcccgaaaggaggctggggggcggcggaagcgagtagagtttgtgacatttgcgccagcccctccagcccagtcacctgaggagcctgtaggggcccctgctgtgcagtcc

SEQ ID NO: 5823 - DNA, 120 bp, Artificial Sequence
  ENSG00000006118_26 (sequence is synthesized)
atccttgtggcaggcgaggaggacatccgctgggtgtgtgaggacatggggctgaaggaccctgaggagcttcgcaactacatggagaggatccggggcagctcctgaccctccacagcc

SEQ ID NO: 5824 - DNA, 120 bp, Artificial Sequence
  ENSG00000006118_27 (sequence is synthesized)
acctggtcagccaccagctggggcaacgagggtggaggtcccactgagcctctcgcctgcccccgccactcgtctggtgcttgttgatccaagtcccctgcctggtcccccacaaggact

SEQ ID NO: 5825 - DNA, 120 bp, Artificial Sequence
  ENSG00000006118_28 (sequence is synthesized)
cccatccaggccccctctgccctgccccttgtcatggaccatggtcgtgaggaagggctcatgccccttatttatgggaaccatttcattctaacagaataaaccgagaaggaaaccaga

SEQ ID NO: 5826 - DNA, 120 bp, Artificial Sequence
  ENSG00000006118_29 (sequence is synthesized)
tgacctcatctgtgaaatggtggtgagaggggaagggacatttacagcccttttctccctcccttgcccacaactactgtgccccagcatggcacccgggtcagcccctgccagctctgg

SEQ ID NO: 5827 - DNA, 120 bp, Artificial Sequence
  ENSG00000006118_30 (sequence is synthesized)
ggcaggccttggcgagtcacactgggacggagagggcgcaggggacacagccatgggcccaagtcggggtcagaaaaactgccctgttgcttgcagttccttctgcccacctccaccctg

SEQ ID NO: 5828 - DNA, 120 bp, Artificial Sequence
  ENSG00000006118_31 (sequence is synthesized)
ggccgcccagccaatgatcgctttctgtgaaattgctgacttccgcatccctctcctccttccctgcctcacttctcccgtagcaccctccacttcctaatctacgtcagtactggttaa

SEQ ID NO: 5829 - DNA, 120 bp, Artificial Sequence
  ENSG00000006118_32 (sequence is synthesized)
tgttgcctgtccatcctttccacgctcctcccccgagaatgtcagccccttgaagctgcggtctgtctatgctggtcgtaccctcagagcctaagatgacacagagctcaggaaatgaac

SEQ ID NO: 5830 - DNA, 120 bp, Artificial Sequence
  ENSG00000006118_33 (sequence is synthesized)
accctcggagggggctccccaaaacccagggagaggtggcccacgcctctggaatctagcttccaggcccttcagagagtgagcgcccccagggtccccgtaagagagcgtctcccctgc

SEQ ID NO: 5831 - DNA, 120 bp, Artificial Sequence
  ENSG00000006118_34 (sequence is synthesized)
ggtccacttgggagcaagagcggtgatcgaggcacagcgccagtcgggagtgggctggggcggctcgcctgcaggtggaagggcctgaccccaagaggggcggatgtctgcgtttgagaa

SEQ ID NO: 5832 - DNA, 120 bp, Artificial Sequence
  ENSG00000006118_35 (sequence is synthesized)
acaggagctgctggtgattaggagccgccggggacgagctgcgggtctccagcagctgggccctgggcaggctggggccgctcagcgctgacggccagtcccggcctccccgccctgcag

SEQ ID NO: 5833 - DNA, 120 bp, Artificial Sequence
  ENSG00000006118_36 (sequence is synthesized)
atcctggtgtctgagcgggacatcagagcccttatcccactggccaaggtaaggagacctccatctctgcctgggaaggctggaggccaagtcccaggagccccatgagctgaggggcct

SEQ ID NO: 5834 - DNA, 120 bp, Artificial Sequence
  ENSG00000006118_37 (sequence is synthesized)
ctccttcctcatgtgggtccccaagagaacagcttcttcttgagacgagaaacctcatgggaggaaccacagcttcaacttcttttgttccagccacctctctcccgagtcaagtaaccc

SEQ ID NO: 5835 - DNA, 120 bp, Artificial Sequence
  ENSG00000006118_38 (sequence is synthesized)
taacagccccccgaccttagacactttcacgctcattattgcactggcaagtgcgctggcctgagagagtcgagagcacatactctgggatcagaaagttttagtttgaaacacatcttt

SEQ ID NO: 5836 - DNA, 120 bp, Artificial Sequence
  ENSG00000006118_39 (sequence is synthesized)
gttgtcaaccagctttgtgatcatgggctggtctcttaacctctctgagcctcgttacctaaactttaaaatgagaacatatcttcgggttgttgtaagaattaaaagcactttaagaca

SEQ ID NO: 5837 - DNA, 120 bp, Artificial Sequence
  ENSG00000006118_40 (sequence is synthesized)
ctgaaacaatggcagttattgctgttataatatgatgtaataattatacaatggtaaaaattattattattattattaccggtgattgtgaagtgaaataaaagggagggtggtagagca

SEQ ID NO: 5838 - DNA, 120 bp, Artificial Sequence
  ENSG00000006118_41 (sequence is synthesized)
acttcctctatcttgaagttctaagaggggaagcatggagtctgcatgtatgcaaatcccagccacctgaagggggaaggtgcctttccccacttgtggtcctttgctcaaatgtgtgtg

SEQ ID NO: 5839 - DNA, 120 bp, Artificial Sequence
  ENSG00000006118_42 (sequence is synthesized)
gttcctgctggagggccttggtgggagatctgctttgtcccacctctgcctacctggctgtagctggttgccaggtggctccaagagcaatgtcaaaggccagcatgaataaggagccaa

SEQ ID NO: 5840 - DNA, 120 bp, Artificial Sequence
  ENSG00000006118_43 (sequence is synthesized)
agttttgggttcacacccctgctctgccaggaggaagactggtatgcaatggccagttcccctgactgagccccagggaacctcaaggaatggcccctacagtaaaatcttaaacaaaga

SEQ ID NO: 5841 - DNA, 120 bp, Artificial Sequence
  ENSG00000006118_44 (sequence is synthesized)
acaggggcttaaccaacaatcctgctgcaacatgcattccagtgacacacagagctgaactcagtgggagcccgtcctacggcctgaggtcagggctgctctcttctggcccatgccttt

SEQ ID NO: 5842 - DNA, 120 bp, Artificial Sequence
  ENSG00000006118_45 (sequence is synthesized)
tttttttttttaatctatttattttgaaacagagtctcactctgtccccaggctggagtgcaatggtacagtccggctcactgcagtctcagctacccaggctcaagggatcctcccacc

SEQ ID NO: 5843 - DNA, 120 bp, Artificial Sequence
  ENSG00000006118_46 (sequence is synthesized)
aagcgatccacccacctcggcctctcagagtgctgggactacaggcatgagccacccacccggcccagcctcacacctgtctttagtggcttagcccgcccacctgccctctgcccttcc

SEQ ID NO: 5844 - DNA, 120 bp, Artificial Sequence
  ENSG00000006118_47 (sequence is synthesized)
ctgctccccatcccgagggacgccatgggagtcctaatagagagaggaggaaaaccttgtcaaatccattatgcagcagcaataatgcctgctccctccagacagcactccacagtttac

SEQ ID NO: 5845 - DNA, 120 bp, Artificial Sequence
  ENSG00000006118_48 (sequence is synthesized)
ccaagtttcatcaatttaaattcaggtctccaggctcccaggaaatcctctctagggagcgcttcctagtttgggggaattccaggatgagcaagacagggtcccttgtttataggaaga

SEQ ID NO: 5846 - DNA, 120 bp, Artificial Sequence
  ENSG00000006118_49 (sequence is synthesized)
ttactaattcagaggaggcacccagggttgcaaaagacaggagactggtgggaaggctcctggtccccaccccacccccagggcaagcaagtgccttcacagacctcttcagcaccttcc

SEQ ID NO: 5847 - DNA, 120 bp, Artificial Sequence
  ENSG00000006118_50 (sequence is synthesized)
gggctcatggtagaggggaatgggaggaagggaccctggtacctcgaccccttagggttttcagagtgaggactgactctgtgaggtagtgagctctctgcagctggaggtgatcaagca

SEQ ID NO: 5848 - DNA, 120 bp, Artificial Sequence
  ENSG00000006118_51 (sequence is synthesized)
gtggctggagtatggcagtgggaggttggttagatggctctaactgaggaccctcccaataactcagaccctagggctgagtggcagacaggtgattgacacgcgtcccctctctccctg

SEQ ID NO: 5849 - DNA, 120 bp, Artificial Sequence
  ENSG00000006118_52 (sequence is synthesized)
tgttttgtctatctgcctgtgtctctgttttctctctggtctctcctccatgtggcctatctctgtgggagtggtttctctgtgcatgcgtgcgtgccctcgcatgtctctgcctgtgtc

SEQ ID NO: 5850 - DNA, 120 bp, Artificial Sequence
  ENSG00000006118_53 (sequence is synthesized)
agggctccctgaccttggcgtctccagggatggccgcatccttgccttccagaacctttgagaggattcctgtcactgcgggaaagggcagcaacttccctgtgcttcggggtgggggtc

SEQ ID NO: 5851 - DNA, 120 bp, Artificial Sequence
  ENSG00000006118_54 (sequence is synthesized)
ctgggctgtggctgcaaggcaaaggatgccacagaagacagagggacagtgaaacattctctgccctccccaccgagagagccgagcgctgggtgatgggagtccgtgggagtcaggcta

SEQ ID NO: 5852 - DNA, 120 bp, Artificial Sequence
  ENSG00000006118_55 (sequence is synthesized)
agagcatcttgtaattatggaggcaatggagtaggaggcgaacctgaagccagtggctgcccccagagagcagtggtcacttgttacgcttggggcagggggcagggagagcctgtcagt

SEQ ID NO: 5853 - DNA, 120 bp, Artificial Sequence
  ENSG00000006118_56 (sequence is synthesized)
catatgctccttggtggggagggccaggaaggaggttgaaaccaattcccccacccccacccacagtccagctgtggggctgagagggagctagctgtggggttgctttcagccacctgc

SEQ ID NO: 5854 - DNA, 120 bp, Artificial Sequence
  ENSG00000006125_0 (sequence is synthesized)
agacctagaaaagaatcgtgacgggcaggaaaccattacaccaccacctgggctgtgctctccggctcccgccgccacccccgccctcgccttcgcctccgcctccggtgcacattaaag

SEQ ID NO: 5855 - DNA, 120 bp, Artificial Sequence
  ENSG00000006125_1 (sequence is synthesized)
atccaaagtcatgactgactccaagtatttcacaaccaataaaaaaggagaaatatttgaactaaaagctgaactcaacaatgaaaagaaagaaaagagaaaggaggctgtgaagaaagt

SEQ ID NO: 5856 - DNA, 120 bp, Artificial Sequence
  ENSG00000006125_2 (sequence is synthesized)
gattgctgctatgaccgtggggaaggatgttagttctctctttccagacgtagtgaactgtatgcagactgacaatctggaactaaagaagcttgtgtatctctacttgatgaactacgc

SEQ ID NO: 5857 - DNA, 120 bp, Artificial Sequence
  ENSG00000006125_3 (sequence is synthesized)
caagagtcagccagacatggccatcatggctgtaaacagctttgtgaaggactgtgaagatcctaatcctttgattcgagccttggcagtcagaaccatggggtgcatccgggtagacaa

SEQ ID NO: 5858 - DNA, 120 bp, Artificial Sequence
  ENSG00000006125_4 (sequence is synthesized)
aattacagaatatctctgtgagccgctccgcaagtgcttgaaggatgaggatccctatgttcggaaaacagcagcagtctgcgtggcaaaactccatgatatcaatgcccaaatggtgga

SEQ ID NO: 5859 - DNA, 120 bp, Artificial Sequence
  ENSG00000006125_5 (sequence is synthesized)
agatcagggatttctggattctctacgggatctcatagcagattcaaatccaatggtggtggctaatgccgtagcggcattatctgaaatcagtgagtctcacccaaacagcaacttact

SEQ ID NO: 5860 - DNA, 120 bp, Artificial Sequence
  ENSG00000006125_6 (sequence is synthesized)
tgatctgaacccacagaacattaataagctgctgacagccctgaatgaatgcactgaatggggccagattttcatcctggactgcctgtctaattacaaccctaaagatgatcgggaggc

SEQ ID NO: 5861 - DNA, 120 bp, Artificial Sequence
  ENSG00000006125_7 (sequence is synthesized)
tcagagcatctgtgagcgggtaactccccggctatcccatgccaactcagcagtggtgctttcagcggtaaaagtcctaatgaagtttctagaattgttacctaaggattctgactacta

SEQ ID NO: 5862 - DNA, 120 bp, Artificial Sequence
  ENSG00000006125_8 (sequence is synthesized)
caatatgctgctgaagaagttagcccctccacttgtcactttgctgtctggggagccagaagtgcagtatgtcgccctgaggaacatcaacttaattgtccagaaaaggcctgaaatctt

SEQ ID NO: 5863 - DNA, 120 bp, Artificial Sequence
  ENSG00000006125_9 (sequence is synthesized)
gaagcaggaaatcaaagtcttctttgtgaagtacaatgatcccatctatgttaaactagagaagttggacatcatgattcgtttggcatctcaagccaacattgctcaggttctggcaga

SEQ ID NO: 5864 - DNA, 120 bp, Artificial Sequence
  ENSG00000006125_10 (sequence is synthesized)
actgaaagaatatgctacagaggtggatgttgactttgttcgaaaagctgtgcgggccattggacggtgtgccatcaaggtggagcaatctgcagagcgctgtgtaagcacattgcttga

SEQ ID NO: 5865 - DNA, 120 bp, Artificial Sequence
  ENSG00000006125_11 (sequence is synthesized)
tctaatccagaccaaagtgaattatgtggtccaagaagcaattgttgtcatcagggacatcttccgcaaataccccaacaagtatgaaagtatcatcgccactctgtgtgagaacttaga

SEQ ID NO: 5866 - DNA, 120 bp, Artificial Sequence
  ENSG00000006125_12 (sequence is synthesized)
ctcgctggatgagccagatgctcgagcagctatgatttggattgtgggagaatatgctgaaagaattgacaatgcagatgagttactagaaagcttcctggagggttttcacgatgaaag

SEQ ID NO: 5867 - DNA, 120 bp, Artificial Sequence
  ENSG00000006125_13 (sequence is synthesized)
cacccaggtgcagctcactctgcttactgccatagtgaagctgtttctcaagaaaccatcagaaacacaggagctagtccagcaggtcttgagtttggcaacacaggattctgataatcc

SEQ ID NO: 5868 - DNA, 120 bp, Artificial Sequence
  ENSG00000006125_14 (sequence is synthesized)
tgaccttcgagaccggggctatatttattggcgccttctctcaactgaccctgttacagctaaagaagtagtcttgtctgagaagccactgatctctgaggagacggaccttattgagcc

SEQ ID NO: 5869 - DNA, 120 bp, Artificial Sequence
  ENSG00000006125_15 (sequence is synthesized)
aactctgctggatgagctaatctgccacattggttctttggcctctgtgtatcataagcctcccaatgcttttgtggaaggaagtcatggaattcatcgtaaacacttgccaattcatca

SEQ ID NO: 5870 - DNA, 120 bp, Artificial Sequence
  ENSG00000006125_16 (sequence is synthesized)
tgggagcactgatgcaggtgacagccctgttggcactaccactgcaacgaacctggaacagcctcaggttatcccctctcaaggtgatcttctaggggatcttttaaaccttgacctcgg

SEQ ID NO: 5871 - DNA, 120 bp, Artificial Sequence
  ENSG00000006125_17 (sequence is synthesized)
tcccccagtcaatgtgccacaggtgtcctccatgcagatgggagcagtggatctcctaggaggaggactagatagtctgcttggcagtgaccttggcgggggcattggaggaagtccggc

SEQ ID NO: 5872 - DNA, 120 bp, Artificial Sequence
  ENSG00000006125_18 (sequence is synthesized)
agtgggacaatccttcatcccatcatcggtgcctgcaacctttgctccttcacctacacctgctgtggtcagcagtggactgaatgacctgtttgaactctccacagggataggcatggc

SEQ ID NO: 5873 - DNA, 120 bp, Artificial Sequence
  ENSG00000006125_19 (sequence is synthesized)
acctggtggatatgtggctcctaaggctgtctggctacctgcagtaaaggctaaaggcttggagatttccggaacatttactcaccgccaagggcacatctatatggaaatgaacttcac

SEQ ID NO: 5874 - DNA, 120 bp, Artificial Sequence
  ENSG00000006125_20 (sequence is synthesized)
caataaagctctgcagcacatgacagattttgcaatccagtttaacaaaaatagctttggtgtcatccccagcactcctctggccatccatacaccactgatgccaaaccagagcattga

SEQ ID NO: 5875 - DNA, 120 bp, Artificial Sequence
  ENSG00000006125_21 (sequence is synthesized)
tgtctccctgcctctcaataccttgggcccagtcatgaagatggaacctctgaataacctccaggtggctgtgaaaaacaatatcgatgtcttctacttcagctgcctcatcccactcaa

SEQ ID NO: 5876 - DNA, 120 bp, Artificial Sequence
  ENSG00000006125_22 (sequence is synthesized)
tgtgctttttgtagaagatggcaaaatggagcgccaggtcttccttgcaacatggaaggatattcccaatgaaaatgaacttcagtttcagattaaggaatgtcatttaaatgctgacac

SEQ ID NO: 5877 - DNA, 120 bp, Artificial Sequence
  ENSG00000006125_23 (sequence is synthesized)
gcaggacatgctgtaccaatccctgaagctcactaatggcatttggattttggccgaactacgtatccagccaggaaaccccaattacacgctgtcactgaagtgtagagctcctgaagt

SEQ ID NO: 5878 - DNA, 120 bp, Artificial Sequence
  ENSG00000006125_24 (sequence is synthesized)
ctctcaatacatctatcaggtctacgacagcattttgaaaaactaacaagactggtccagtacccttcaaccatgctgtgatcggtgcaagtcaagaactcttaactggaagaaattgta

SEQ ID NO: 5879 - DNA, 120 bp, Artificial Sequence
  ENSG00000006125_25 (sequence is synthesized)
ttgctgcgtagaatctgaacacactgaggccacctagcaaggtagtaactagtctaacctgtgctaacattagggcacaacctgttggatagttttagcttcctgtgaacatttgtaacc

SEQ ID NO: 5880 - DNA, 120 bp, Artificial Sequence
  ENSG00000006125_26 (sequence is synthesized)
actgcttcagtcacctcccacctcttgccacctgctgctgctatctgtccttacttgtgggcttctccatgctgtgccaatggctggctttttctacaccctcttttgagtgtagtttgg

SEQ ID NO: 5881 - DNA, 120 bp, Artificial Sequence
  ENSG00000006125_27 (sequence is synthesized)
tattttgtaattgagagctcatttcaaaagcagaaaaagacaacaaatattaaagcaaggaaaagtgtaactgaaacactgcactttactgttttatacttttgtacatatgagaaatca

SEQ ID NO: 5882 - DNA, 120 bp, Artificial Sequence
  ENSG00000006125_28 (sequence is synthesized)
agggattagtgcaaccagtagaaagcattgaaatgactgtcattaaccacacagtcctggaggcagagatgcagttacctaccctagcttttgatgggttctcttacctgtagtagcctt

SEQ ID NO: 5883 - DNA, 120 bp, Artificial Sequence
  ENSG00000006125_29 (sequence is synthesized)
atccctggtcatttggattttcagtttgcttttttctttttttcccctccaaactccttttccttggccaagccttcatgcttccccctttccatattataatctcatttgattgctctg

SEQ ID NO: 5884 - DNA, 120 bp, Artificial Sequence
  ENSG00000006125_30 (sequence is synthesized)
cagttgggaacggtgatcttcttgaatgatgtttcagtgtgcaaaaactatagagcctgtcagcaccaaagctgacagaagttataccttactcctttcctttcccctgaacaaacctgc

SEQ ID NO: 5885 - DNA, 120 bp, Artificial Sequence
  ENSG00000006125_31 (sequence is synthesized)
taatcccactaattcaggaatttgagtagagatggggaacaagaacccagatgctgtcccctcaccccctctcctgtatttctcaggtccagttcaaatctaaaattctacttttagagt

SEQ ID NO: 5886 - DNA, 120 bp, Artificial Sequence
  ENSG00000006125_32 (sequence is synthesized)
tgaaacagagtaataacttatctaaccctcttttcctacaaaggagaaagataaaaggcacaaaggttaccgccaaggcccgtcagctgtgtagtggcaaagccgagaccgagtctccta

SEQ ID NO: 5887 - DNA, 120 bp, Artificial Sequence
  ENSG00000006125_33 (sequence is synthesized)
agtccccgtcagtgtggttttcaccacaggactgtctcttgtcgttttcccctaatgccttctcctgccttttctgtgcctagtttttggctcttcacatattccatattgattttgacg

SEQ ID NO: 5888 - DNA, 120 bp, Artificial Sequence
  ENSG00000006125_34 (sequence is synthesized)
ctctgtatattggcatcaggtggcagctgaatatcttttgaattactcgaaggtaaagccagatgccagaatgaaggtgtagccagtgtttcccatatgcccctggagccccacttattg

SEQ ID NO: 5889 - DNA, 120 bp, Artificial Sequence
  ENSG00000006125_35 (sequence is synthesized)
aggccagcagaataggtgcagagatgaagtgagcttagagatgttgcaaatgctctttatcccttcagctctctgatctgctctttcttcatgatacttagtctgcagggcatattaaga

SEQ ID NO: 5890 - DNA, 120 bp, Artificial Sequence
  ENSG00000006125_36 (sequence is synthesized)
tcatcccagaggttcaggcagttcctgtcatctctgaaaagactgggggatatgaaatcttccccctaccccacttaatgcgttggatatgatttttcaaagaatgcttcatgcccaaaa

SEQ ID NO: 5891 - DNA, 120 bp, Artificial Sequence
  ENSG00000006125_37 (sequence is synthesized)
taccagcctgtttagcagtgttacactgtttgatctgcgggcacttgttgcattgcctggcacccaatattcagggtccatgactaagactggtcttctcagatgccctgcttaaatcag

SEQ ID NO: 5892 - DNA, 120 bp, Artificial Sequence
  ENSG00000006125_38 (sequence is synthesized)
gggcacttcaggctccacaggcgtcatgttggactgagacctaactcactggactcagaggaggaatcgtggaaaacaagagcaaaactaccccacacccctatttcatgtctgaaataa

SEQ ID NO: 5893 - DNA, 120 bp, Artificial Sequence
  ENSG00000006125_39 (sequence is synthesized)
ccctgtttcataccagttgcaaagcttgtggggagcggtcccacaaagcactttcttaaaccttgagaatctccaagagaaaaatatttggggaaggagggaggaaatatgtcccttgca

SEQ ID NO: 5894 - DNA, 120 bp, Artificial Sequence
  ENSG00000006125_40 (sequence is synthesized)
caccacccctgaagcacatggcagtaggaaacagcataggattgtatgtgggaggtggataggtcggtgatgtgtggagcggaaaagcaggttggtaaagttcccttcttgggacttatt

SEQ ID NO: 5895 - DNA, 120 bp, Artificial Sequence
  ENSG00000006125_41 (sequence is synthesized)
cctggagtcagtggatacaagtagtgcagaaggttcacactgcaaatagtgttctcatctcaaagcaaactatcattccagaaggaaaagtgtgtcagggcaagcagacaacacaatttc

SEQ ID NO: 5896 - DNA, 120 bp, Artificial Sequence
  ENSG00000006125_42 (sequence is synthesized)
ctatcagaatatgtccctcaacccccgaaacaaggcttctctcagcctccccaccagtgatggataacagctcctattctcagctgacctgactgagccaacccatgaactcttcactcc

SEQ ID NO: 5897 - DNA, 120 bp, Artificial Sequence
  ENSG00000006125_43 (sequence is synthesized)
ttggggaagccacctcccatcacacccctgagcagagttagggaggaattctacttcccataaaaggacctctcctgagaggcaaaacctgttgcctccaccacggcttccctcttggct

SEQ ID NO: 5898 - DNA, 120 bp, Artificial Sequence
  ENSG00000006125_44 (sequence is synthesized)
cattccaagcttggccaaattggggaagtgggatggaggttgccctgcatcccccctcctctgcctgagtgtgtctttgtaatgtcagctggcatcatacaaagagcaggagaagcaaac

SEQ ID NO: 5899 - DNA, 120 bp, Artificial Sequence
  ENSG00000006125_45 (sequence is synthesized)
acccagaactcttttgctggtcagagattccctgagtgtctgtcctcacccaagcctgctctgtgtctgtgttgtgaagcttgagactctggaaagaaatggggagggggggcaggggaa

SEQ ID NO: 5900 - DNA, 120 bp, Artificial Sequence
  ENSG00000006125_46 (sequence is synthesized)
atgttgccctaagaatgcttctcattcctctgttcttattgggtcctgtttttcgggagggtgggggttgggggaagcttgaccttgtgtcttcgtcaataaactcacatttacacaaaa

SEQ ID NO: 5901 - DNA, 120 bp, Artificial Sequence
  ENSG00000006125_47 (sequence is synthesized)
gaccggcggaggcgaggaaatcctaagagcgtgaccgttgatgatgcagggaaccgtcgggtgtgaccattgagagggaaaaggttggagaaagggtctctaccatgatgcctgtggtgc

SEQ ID NO: 5902 - DNA, 120 bp, Artificial Sequence
  ENSG00000006125_48 (sequence is synthesized)
gatagagcctggaggccgtggggggaaccgtctttcttccccgctcggcgtcgttcactgagaggctgagacgtgtccagcaagccaaagggaaaagggattccctcaaaggtttgctca

SEQ ID NO: 5903 - DNA, 120 bp, Artificial Sequence
  ENSG00000006125_49 (sequence is synthesized)
acctgggctgtgctctccggctcccgccgccacccccgccctcgccttcgcctccgcctccggtgagttcagggcggttgcctttagggtgtgtccctaattgacggggtcggggacgga

SEQ ID NO: 5904 - DNA, 120 bp, Artificial Sequence
  ENSG00000006125_50 (sequence is synthesized)
ttttacgtgcagcactatcctctagccccactgcccgtatataggcctgggctatatcaccattgtccgcccttgagcctggaaggaaaatgagctgaggggttttgttttttcagaaag

SEQ ID NO: 5905 - DNA, 120 bp, Artificial Sequence
  ENSG00000006125_51 (sequence is synthesized)
gaacaggatatttcatcatctctatgtttacgtttttcagagaatttctgtgcgaggaaacaaatccattgtcagctttttaaaatatatccctttggagtagccacttaacatcctctg

SEQ ID NO: 5906 - DNA, 120 bp, Artificial Sequence
  ENSG00000006125_52 (sequence is synthesized)
aggcccagatgggctagcttgccgggaccaaaggaaatctttgggtctggaaggcgacaagagatcacaggctttctaggtctaccgcgcaccccgatgacgtcacgcggcgacgttctc

SEQ ID NO: 5907 - DNA, 120 bp, Artificial Sequence
  ENSG00000006125_53 (sequence is synthesized)
ggtagatcctaatggctgtgggatggtacgaactccctaaacctctgcctggcactagagtgaatcctgctgagctgtttctcattttgtatttaaaacagttaaatgacttcttcacct

SEQ ID NO: 5908 - DNA, 120 bp, Artificial Sequence
  ENSG00000006125_54 (sequence is synthesized)
aaactcttaaatagggcagctaagatttgtacttaggaaaggaatagcatggaagattggagctcatgtagaatgtatctggaagcttaaattaatgaggactgtgaagatcctaatcct

SEQ ID NO: 5909 - DNA, 120 bp, Artificial Sequence
  ENSG00000006125_55 (sequence is synthesized)
ccgtggggaaggatgttaggtgctgctcttctgaggtgaatttttgttatttttcttttgtttgttagcacataaagcacatttggtttttaaattgctgtcctgtgaccatctatctaa

SEQ ID NO: 5910 - DNA, 120 bp, Artificial Sequence
  ENSG00000006125_56 (sequence is synthesized)
agattcagtgcgactgatttattttaagttttcattgaagagtgagagaaactcggcttacggaccaggaaaactgagagtgctgcctggtggtggctaatgccgtagcggcattatctg

SEQ ID NO: 5911 - DNA, 120 bp, Artificial Sequence
  ENSG00000006125_57 (sequence is synthesized)
ctgccccagaaattgtttacagtgcagttttcttcagcttattctgagattgaaagatatcccagaaatcaagatgagaagaaattaaagcccttatttttgctttggatccgtatgtgg

SEQ ID NO: 5912 - DNA, 120 bp, Artificial Sequence
  ENSG00000006125_58 (sequence is synthesized)
ttaaatatatattcactcagagaatcaaggttcctttttcgagaacatcacaaggaagacctaaatttgcctgtgtggaagaagatgagtttctaaggcggcagtggacttttaaaatgc

SEQ ID NO: 5913 - DNA, 120 bp, Artificial Sequence
  ENSG00000006125_59 (sequence is synthesized)
ttttattgttcttatgcaaattacctaaagagaagattaatcctcaaagccattttttgaatgcatccttgccttacagagtgcttctcaaaataaattatataccttgaatctcctaaa

SEQ ID NO: 5914 - DNA, 120 bp, Artificial Sequence
  ENSG00000006128_0 (sequence is synthesized)
agagcgcgctcggacctccttcccggcggcagctaccgagagtgcggagcgaccagcgtgcgctcggaggaaccagagaaactcagcaccccgcgggactgtccgtcgcaaaatccaaca

SEQ ID NO: 5915 - DNA, 120 bp, Artificial Sequence
  ENSG00000006128_1 (sequence is synthesized)
tgaaaatcctcgtggccttggcagtcttttttcttgtctccactcagctgtttgcagaagaaataggagccaatgatgatctgaattactggtccgactggtacgacagcgaccagatca

SEQ ID NO: 5916 - DNA, 120 bp, Artificial Sequence
  ENSG00000006128_2 (sequence is synthesized)
aggaggaactgccggagccctttgagcatcttctgcagagaatcgcccggagacccaagcctcagcagttctttggattaatgggcaaacgggatgctgattcctcaattgaaaaacaag

SEQ ID NO: 5917 - DNA, 120 bp, Artificial Sequence
  ENSG00000006128_3 (sequence is synthesized)
tggccctgttaaaggctctttatggacatggccagatctctcacaaaagacataaaacagattcctttgttggactaatgggcaaaagagctttaaattctgtggcttatgaaaggagtg

SEQ ID NO: 5918 - DNA, 120 bp, Artificial Sequence
  ENSG00000006128_4 (sequence is synthesized)
tatgaggaataattatttatttaataacaattgtttggggttgaaaattcaaaaagtgtttatttttcatattgtgccaatatgtattgtaaacatgtgttttaattccaatatgatgac

SEQ ID NO: 5919 - DNA, 120 bp, Artificial Sequence
  ENSG00000006128_5 (sequence is synthesized)
tcccttaaaatagaaataagtggttatttctcaacaaagcacagtgttaaatgaaattgtaaaacctgtcaatgatacagtccctaaagaaaaaaaatcattgctttgaagcagttgtgt

SEQ ID NO: 5920 - DNA, 120 bp, Artificial Sequence
  ENSG00000006128_6 (sequence is synthesized)
cagctactgcggaaaaggaaggaaactcctgacagtcttgtgcttttcctatttgttttcatggtgaaaatgtactgagattttggtattacactgtatttgtatctctgaagcatgttt

SEQ ID NO: 5921 - DNA, 120 bp, Artificial Sequence
  ENSG00000006128_7 (sequence is synthesized)
catgttttgtgactatatagagatgtttttaaaagtttcaatgtgattctaatgtcttcatttcattgtatgatgtgttgtgatagctaacattttaaataaaagaaaaaatatcttgaa

SEQ ID NO: 5922 - DNA, 120 bp, Artificial Sequence
  ENSG00000006128_8 (sequence is synthesized)
agcggttgcgtgcgagaggatggaaaggggcactatttcccgggttccccacgggattttgtgcccacgattcaagtttcttcccgagggctgcaccgtccggcccaggaactccctgca

SEQ ID NO: 5923 - DNA, 120 bp, Artificial Sequence
  ENSG00000006128_9 (sequence is synthesized)
gtagggatgccctcccggatgagcccgagatcctcacaaggcgggaaatctcgtaagatttcatcccccaggacctgggatttcgggggctccggtccagctgcactgccctagcgtctg

SEQ ID NO: 5924 - DNA, 120 bp, Artificial Sequence
  ENSG00000006128_10 (sequence is synthesized)
attggcccacaccgcactaaggcacgcacgggcccgcggggggagggaaagatctggttcgcatgcctcactgtattcgagtgaagcgctcccttgactaaagatccaaactgacaaagg

SEQ ID NO: 5925 - DNA, 120 bp, Artificial Sequence
  ENSG00000006128_11 (sequence is synthesized)
gaaggcacgggcctccaggggtagtactgcggatgatccaagtgcatgtggaagaggattttatagcattccctgaggtgagagtacatttgtcttgggatagaaatatcgtttccttga

SEQ ID NO: 5926 - DNA, 120 bp, Artificial Sequence
  ENSG00000006194_0 (sequence is synthesized)
aacttgcgcgctgagatttccggcgtgggagcagaggtctgagtcttgcgtgggtcctctatatagggtgagaagcgtggcgctcggttcctgcctcggggaagtcctggcgcagatggg

SEQ ID NO: 5927 - DNA, 120 bp, Artificial Sequence
  ENSG00000006194_1 (sequence is synthesized)
tgggaccgactgaggcctaggcgccggagccggccgcgcctgggctggagcggggctcctcggcctggactgggagcccccggccccgggctcctgctggcgccgtccaaccttacatgg

SEQ ID NO: 5928 - DNA, 120 bp, Artificial Sequence
  ENSG00000006194_2 (sequence is synthesized)
ctggcgccgtccaaccttacatgggttcagggcgccttcgtaggcgggcacggctggtttcgggctaaggcgctctggagacctgacgatggcgtcgggcccgggctcccaggaacggga

SEQ ID NO: 5929 - DNA, 120 bp, Artificial Sequence
  ENSG00000006194_3 (sequence is synthesized)
agggctcctgatagtgaagctggaggaggactgcgcctggagccaggagctgcccccacctgacccaggaccgagccccgaggcctcccacttgcgcttcagacggttccgcttccaaga

SEQ ID NO: 5930 - DNA, 120 bp, Artificial Sequence
  ENSG00000006194_4 (sequence is synthesized)
ggcagctggtccccgggaagccctcagccggctccaagagctttgccatgggtggcttcggcctgagatgcgcacgaaggagcagatcttggagctgctggtgttagagcagttcctgac

SEQ ID NO: 5931 - DNA, 120 bp, Artificial Sequence
  ENSG00000006194_5 (sequence is synthesized)
catcctgccccaggagatccagagcagggtgcaggagctgcatccggagagcggcgaagaagcggtgacccttgtggaggatatgcagagagagcttgggagactgagacaacaggtcac

SEQ ID NO: 5932 - DNA, 120 bp, Artificial Sequence
  ENSG00000006194_6 (sequence is synthesized)
aaaccatgggcggggaacagaagtgcttttggaggagcctttgcctctggaaacagcacgagagtcaccgagcttcaagctggagccaatggagactgagcgaagccctggccccaggct

SEQ ID NO: 5933 - DNA, 120 bp, Artificial Sequence
  ENSG00000006194_7 (sequence is synthesized)
gcaggagctgctaggccccagcccccaaagggacccccaggctgtaaaggagagggcattatctgctccctggctttctctttttcctcctgaagggaacatggaagacaaggagatgac

SEQ ID NO: 5934 - DNA, 120 bp, Artificial Sequence
  ENSG00000006194_8 (sequence is synthesized)
tgggccccagttgcctgagagcttagaggacgtggcaatgtacatctcccaggaggagtgggggcatcaggatcctagtaagagggccctctccagggacacggtgcaggagagttatga

SEQ ID NO: 5935 - DNA, 120 bp, Artificial Sequence
  ENSG00000006194_9 (sequence is synthesized)
gaatgtggactcactggagtctcacattcccagtcaggaggtcccaggcacccaggtgggacaaggaggaaagctatgggatcccagtgtccagagctgcaaggagggcctgagccccag

SEQ ID NO: 5936 - DNA, 120 bp, Artificial Sequence
  ENSG00000006194_10 (sequence is synthesized)
aggcccagctccaggagaagagaaatttgagaacctggaaggtgttccgtctgtatgctctgagaacatccaccctcaggtgctgcttcctgaccaggcccgaggggaggtgccctggag

SEQ ID NO: 5937 - DNA, 120 bp, Artificial Sequence
  ENSG00000006194_11 (sequence is synthesized)
tcctgagctgggaagacctcatgaccggtcgcaaggggattgggcgcctcccccagagggtggaatggagcaggccttggcaggagcctcaagtggcagagaactggggcgaccgaagga

SEQ ID NO: 5938 - DNA, 120 bp, Artificial Sequence
  ENSG00000006194_12 (sequence is synthesized)
actgcagccaaagaaactccatttatgtcccttgtgtggcaaaaatttctctaacaactcaaacctaattaggcaccagagaatacatgcagctgaaagactgtgtatgggtgtggactg

SEQ ID NO: 5939 - DNA, 120 bp, Artificial Sequence
  ENSG00000006194_13 (sequence is synthesized)
cagagcacacctgggagaggaggcccacaagtgccttgaatgtgggaaatgcttcagtcagaacacccatctgactcgccaccaacgcacccacacgggtgagaagccctatcagtgcaa

SEQ ID NO: 5940 - DNA, 120 bp, Artificial Sequence
  ENSG00000006194_14 (sequence is synthesized)
catttgcggaaaatgtttctcctgcaactccaacctccacaggcaccagagaacgcacactggggagaagccctacaagtgccctgagtgtggggagatctttgctcacagttccaacct

SEQ ID NO: 5941 - DNA, 120 bp, Artificial Sequence
  ENSG00000006194_15 (sequence is synthesized)
ccttcggcaccagagaattcacactggagagcgaccttataagtgtcccgagtgtgggaaaagtttctctcggagttcacacctcgtcattcacgaaagaactcatgagagagagagact

SEQ ID NO: 5942 - DNA, 120 bp, Artificial Sequence
  ENSG00000006194_16 (sequence is synthesized)
ttaccccttctctgagtgtggggaagctgtgagtgacagcaccccctttcttacaaaccatggagcccataaggcagagaagaagctctttgaatgtttgacttgtgggaaaagcttccg

SEQ ID NO: 5943 - DNA, 120 bp, Artificial Sequence
  ENSG00000006194_17 (sequence is synthesized)
gcagggcatgcacctcaccagacatcagagaacacacacaggagagaaaccgtataaatgtaccctttgtggggaaaacttctctcatagatccaatttaatcaggcaccagagaatcca

SEQ ID NO: 5944 - DNA, 120 bp, Artificial Sequence
  ENSG00000006194_18 (sequence is synthesized)
cacaggagaaaaaccctatacctgtcatgagtgcggagacagcttctctcacagctccaatcggattcgccacctgagaacgcatacgggagagagaccctataaatgttctgaatgtgg

SEQ ID NO: 5945 - DNA, 120 bp, Artificial Sequence
  ENSG00000006194_19 (sequence is synthesized)
agaaagcttctctcggagttcccgtcttatgagtcatcagagaactcacacaggttagtaacagtggggtttctctttgccccaggtgaggtggcatattcagaggagcctgttggcaag

SEQ ID NO: 5946 - DNA, 120 bp, Artificial Sequence
  ENSG00000006194_20 (sequence is synthesized)
agctggtattccctgcccagccgaccaaatgacctctgcattcttcaggtaatgggggctcattgtgagggaggtgcagaggcagcagaggattggcataaaactgaaaaggagttctgt

SEQ ID NO: 5947 - DNA, 120 bp, Artificial Sequence
  ENSG00000006194_21 (sequence is synthesized)
ctgcatgagaaaggatggcaagtctctgaggtgacctcagggtggaattctctgttaagtccaccctgccccagggtgctcctaccctcttggtctttttaaagccaaggtgcgatttgg

SEQ ID NO: 5948 - DNA, 120 bp, Artificial Sequence
  ENSG00000006194_22 (sequence is synthesized)
gcacctgactgtccagtttaccttaacaagtttgggaatccatgtgatgtttttgatacttcttcctcatttgggacattcagtaggagcatttgggcttccggggcccctgagaccaaa

SEQ ID NO: 5949 - DNA, 120 bp, Artificial Sequence
  ENSG00000006194_23 (sequence is synthesized)
gaagaggggccaagtaccctgggaaatcagctgaaggtcaacaaaagactggttgtgagttgcagctgtcccgaaggccccagttgggaagccatgggcagtccagatcaagccaccacg

SEQ ID NO: 5950 - DNA, 120 bp, Artificial Sequence
  ENSG00000006194_24 (sequence is synthesized)
tgccctacgatggcctaacaggagtgcccattggcagattacacatgtaaatatgacctcagacaaaaaggaaccagaggcccaagggcaataataaggtggaatttgcaggtcagccca

SEQ ID NO: 5951 - DNA, 120 bp, Artificial Sequence
  ENSG00000006194_25 (sequence is synthesized)
ggaattggcagaggaagtaggtgtctgataaccctttgtggagaatgagattccccccacctgtgtgagaaaaataaacagctctggagtcttgttcctgactccagaggaacgagagca

SEQ ID NO: 5952 - DNA, 120 bp, Artificial Sequence
  ENSG00000006194_26 (sequence is synthesized)
ttccaggaaagagagattccctggaaaattgaaaatgtgaatcctagggggaaattggggattgtgtctttccctgttgaaaatgtttggatgggaataaatatcttcaggaaacataaa

SEQ ID NO: 5953 - DNA, 120 bp, Artificial Sequence
  ENSG00000006194_27 (sequence is synthesized)
ccagggatgatgactgcgccatttctgaccagggtcctgcccgttattcattcacctcctggacacagactctgagttttgccaagaagcctccacaggagacttccctttgtctaaagt

SEQ ID NO: 5954 - DNA, 120 bp, Artificial Sequence
  ENSG00000006194_28 (sequence is synthesized)
cccctgtacgagagtcatgtatctgccaagtggtacagttggcacaggcagcccgggactggagtcccagctgccagagcctaaggcgagtctgagccatgtgcacttcctagggcagag

SEQ ID NO: 5955 - DNA, 120 bp, Artificial Sequence
  ENSG00000006194_29 (sequence is synthesized)
caaacccaatgcggtgacaacctgccagcatcacacacatgcagtattccaggatgctggggggctctaaatggttgattccttgcaattttcagatgcttattcttatgagctcgccag

SEQ ID NO: 5956 - DNA, 120 bp, Artificial Sequence
  ENSG00000006194_30 (sequence is synthesized)
tgtttcctgtgttccgttagtgtttctaggctcgtccccaaagacaaaaatttcaggggtagtaggatcaacattccagcctatcatctctcacagcccataaaaattcagaaagtgggg

SEQ ID NO: 5957 - DNA, 120 bp, Artificial Sequence
  ENSG00000006194_31 (sequence is synthesized)
agggtcttgtggaaatttggaaacaatgtatagctccaaagtaggccatatcataaattaagatttacctatgtcttgtactgtactcagagttttaaaattatgcctacggaatatgac

SEQ ID NO: 5958 - DNA, 120 bp, Artificial Sequence
  ENSG00000006194_32 (sequence is synthesized)
agactgacatatagttggatttaggtggaggatatgcttgtatttattgtacaattccctcaacttttctgtatgtatgagaattcttttaataaaaagttggggaagtcttaacataaa

SEQ ID NO: 5959 - DNA, 120 bp, Artificial Sequence
  ENSG00000006194_33 (sequence is synthesized)
cgtcttatgagtcatcagagaactcacacagtgtgaagtggaatctctgaaactcaggtgtggcatcaacaaagtcaagaagatacaacagcctcagtcaggaatgacaggaatacctgc

SEQ ID NO: 5960 - DNA, 120 bp, Artificial Sequence
  ENSG00000006194_34 (sequence is synthesized)
ccataaaaactgatgcttcagaagaagggagcgtgaaagactcaaaggcaatgacagagtaatcttgtgtgtagcagagatgcaatgtggcttctccccttccaaaaagacctgatttta

SEQ ID NO: 5961 - DNA, 120 bp, Artificial Sequence
  ENSG00000006194_35 (sequence is synthesized)
cctcactgccagaaaagagaatggtgctcaaattgctttgtacatagtgttcactgggcagcagttcatctacctggataagggctccgagctacagggaccctgacattgggatgtatg

SEQ ID NO: 5962 - DNA, 120 bp, Artificial Sequence
  ENSG00000006194_36 (sequence is synthesized)
gagagttggaattcaggaacagttgtaccgaatcttgaagtgaagaagaaagtagtttgttgtacatatgaatgaaatccaacttttattgcattcaatatagtattgtcaagcaccgtg

SEQ ID NO: 5963 - DNA, 120 bp, Artificial Sequence
  ENSG00000006194_37 (sequence is synthesized)
aaactcaggtgtggcatcaacaaagtcaagaaggtagtccaaactctctcttacagcagataatttaaattcagcagtctgcttctcagcttctcctcctttttgaacaacttcctttgt

SEQ ID NO: 5964 - DNA, 120 bp, Artificial Sequence
  ENSG00000006194_38 (sequence is synthesized)
tattccacctttggtttttaggagacaacccttttcttcatctccatttaaccacaccctatcatcatccaacttagtttccaactccccacatttttcaagaatttctctataatcccc

SEQ ID NO: 5965 - DNA, 120 bp, Artificial Sequence
  ENSG00000006194_39 (sequence is synthesized)
atgttctaagccttgaaaatcatattcaggttcctttttgtaaagaagattttcccatgcatttgctatggttatttgttttacttcttcccaactttttgcccagttaaaaattgcact

SEQ ID NO: 5966 - DNA, 120 bp, Artificial Sequence
  ENSG00000006194_40 (sequence is synthesized)
ttttatattgtagattttaattttggaaactcctttatctcctttctcttgctcatcatcactttcttcaaatattacaagactctcttcaagttgcttccatctatacagccgtttgca

SEQ ID NO: 5967 - DNA, 120 bp, Artificial Sequence
  ENSG00000006194_41 (sequence is synthesized)
gctcaagatcacaccttgattcattggttgaatcaaggttgaagtgttatgggggaagaacatacattttattcgaccatcctcactggttagggattcagaggaaggatgagccgggca

SEQ ID NO: 5968 - DNA, 120 bp, Artificial Sequence
  ENSG00000006194_42 (sequence is synthesized)
actgtccagaagtaacaatgccctgacgtcctcgtcatgaaatcttagaacattaagttgaaaatgtcggacctcaggaacaaagttttgaaaaaaccattctgaaaacaattctctggt

SEQ ID NO: 5969 - DNA, 120 bp, Artificial Sequence
  ENSG00000006194_43 (sequence is synthesized)
gaaccaaacatctttactgggtttatatatcacaggcaatgtacttgtgtcctctttcacacttttgggcagttttgattttccaataatgattgactttaatttatgagttccgtctgc

SEQ ID NO: 5970 - DNA, 120 bp, Artificial Sequence
  ENSG00000006194_44 (sequence is synthesized)
atccccactgtatagctgagctagacacagtttctcctctttgattatcatggacagtttttgtcgaaatggctcaacattttcagaaactgaacttaggacttgttccccacatccttt

SEQ ID NO: 5971 - DNA, 120 bp, Artificial Sequence
  ENSG00000006194_45 (sequence is synthesized)
tcggttcccaattgcatgccgatttcgaaatctaaaaagccaaccagtgctagctttgaaatctgttcgcccaaaacaccgtgcaaatctctctgcagcagcctgaagctccacgcctct

SEQ ID NO: 5972 - DNA, 120 bp, Artificial Sequence
  ENSG00000006194_46 (sequence is synthesized)
taccggaacaccggctgagcgtttctgttggtaccacatgtagaccgcatcatctacatcaccatatttggctcccgttgtcctctttctcttctcagcccctactaatggcatgtcctg

SEQ ID NO: 5973 - DNA, 120 bp, Artificial Sequence
  ENSG00000006194_47 (sequence is synthesized)
cttcagtacaaagtccagaattaacttcttattttttttaatgtcataaaatgttgacttactgattccaaattcatccattacacttttaagtgatcgtccagcttcaattctacttag

SEQ ID NO: 5974 - DNA, 120 bp, Artificial Sequence
  ENSG00000006194_48 (sequence is synthesized)
aaccttcattttctcctccaaattcagtgttgtatatttccctctcttattcatactgaatttaactctgaaccaccaacaggagaaaacaaagggaaaagccttaatgaattggcaaaa

SEQ ID NO: 5975 - DNA, 120 bp, Artificial Sequence
  ENSG00000006194_49 (sequence is synthesized)
aaaaaacccacattttttaaacaaaacttagctgaaagccccagaaggcatgggcattgtattggaggataatggactgaaggggctaaccatgactgaagagctagtctagaggtggag

SEQ ID NO: 5976 - DNA, 120 bp, Artificial Sequence
  ENSG00000006194_50 (sequence is synthesized)
gtcttatgcactcagaaagctgccagttgcaaagtcctgtctggctcttgctcctgcaagccatgagtgatcatttttcagaatgccccctacctctcctctcttttgacagatacaaca

SEQ ID NO: 5977 - DNA, 120 bp, Artificial Sequence
  ENSG00000006210_0 (sequence is synthesized)
aaggggacagcactgagctctgccgcctggctctagccgcctgcctggcccccgccgggactcttgcccaccctcagccatggctccgatatctctgtcgtggctgctccgcttggccac

SEQ ID NO: 5978 - DNA, 120 bp, Artificial Sequence
  ENSG00000006210_1 (sequence is synthesized)
cttctgccatctgactgtcctgctggctggacagcaccacggtgtgacgaaatgcaacatcacgtgcagcaagatgacatcaaagatacctgtagctttgctcatccactatcaacagaa

SEQ ID NO: 5979 - DNA, 120 bp, Artificial Sequence
  ENSG00000006210_2 (sequence is synthesized)
ccaggcatcatgcggcaaacgcgcaatcatcttggagacgagacagcacaggctgttctgtgccgacccgaaggagcaatgggtcaaggacgcgatgcagcatctggaccgccaggctgc

SEQ ID NO: 5980 - DNA, 120 bp, Artificial Sequence
  ENSG00000006210_3 (sequence is synthesized)
tgccctaactcgaaatggcggcaccttcgagaagcagatcggcgaggtgaagcccaggaccacccctgccgccgggggaatggacgagtctgtggtcctggagcccgaagccacaggcga

SEQ ID NO: 5981 - DNA, 120 bp, Artificial Sequence
  ENSG00000006210_4 (sequence is synthesized)
aagcagtagcctggagccgactccttcttcccaggaagcacagagggccctggggacctccccagagctgccgacgggcgtgactggttcctcagggaccaggctccccccgacgccaaa

SEQ ID NO: 5982 - DNA, 120 bp, Artificial Sequence
  ENSG00000006210_5 (sequence is synthesized)
ggctcaggatggagggcctgtgggcacggagcttttccgagtgcctcccgtctccactgccgccacgtggcagagttctgctccccaccaacctgggcccagcctctgggctgaggcaaa

SEQ ID NO: 5983 - DNA, 120 bp, Artificial Sequence
  ENSG00000006210_6 (sequence is synthesized)
gacctctgaggccccgtccacccaggacccctccacccaggcctccactgcgtcctccccagccccagaggagaatgctccgtctgaaggccagcgtgtgtggggtcagggacagagccc

SEQ ID NO: 5984 - DNA, 120 bp, Artificial Sequence
  ENSG00000006210_7 (sequence is synthesized)
caggccagagaactctctggagcgggaggagatgggtcccgtgccagcgcacacggatgccttccaggactgggggcctggcagcatggcccacgtctctgtggtccctgtctcctcaga

SEQ ID NO: 5985 - DNA, 120 bp, Artificial Sequence
  ENSG00000006210_8 (sequence is synthesized)
agggacccccagcagggagccagtggcttcaggcagctggacccctaaggctgaggaacccatccatgccaccatggacccccagaggctgggcgtccttatcactcctgtccctgacgc

SEQ ID NO: 5986 - DNA, 120 bp, Artificial Sequence
  ENSG00000006210_9 (sequence is synthesized)
ccaggctgccacccggaggcaggcggtggggctgctggccttccttggcctcctcttctgcctgggggtggccatgttcacctaccagagcctccagggctgccctcgaaagatggcagg

SEQ ID NO: 5987 - DNA, 120 bp, Artificial Sequence
  ENSG00000006210_10 (sequence is synthesized)
agagatggcggagggccttcgctacatcccccggagctgtggtagtaattcatatgtcctggtgcccgtgtgaactcctctggcctgtgtctagttgtttgattcagacagctgcctggg

SEQ ID NO: 5988 - DNA, 120 bp, Artificial Sequence
  ENSG00000006210_11 (sequence is synthesized)
atccctcatcctcatacccacccccacccaagggcctggcctgagctgggatgattggaggggggaggtgggatcctccaggtgcacaagctccaagctcccaggcattccccaggaggc

SEQ ID NO: 5989 - DNA, 120 bp, Artificial Sequence
  ENSG00000006210_12 (sequence is synthesized)
cagccttgaccattctccacctgccagggacagagggggtggcctcccaactcaccccagccccaaaactctcctctgctgctggctggttagaggttccctttgacgccatcccagccc

SEQ ID NO: 5990 - DNA, 120 bp, Artificial Sequence
  ENSG00000006210_13 (sequence is synthesized)
ctgccctgtgagtactacagtcctcccatctcacacatgagcatcaggccaggccctctgcccactccctgcaacctgattgtgtctcttggtcctgctgcagttgccagtcaccccggc

SEQ ID NO: 5991 - DNA, 120 bp, Artificial Sequence
  ENSG00000006210_14 (sequence is synthesized)
cacctgcggtgctatctcccccagccccatcctctgtacagagcccacgcccccactggtgacatgtcttttcttgcatgaggctagtgtggtgtttcctggcactgcttccagtgaggc

SEQ ID NO: 5992 - DNA, 120 bp, Artificial Sequence
  ENSG00000006210_15 (sequence is synthesized)
tctgcccttggttaggcattgtgggaaggggagataagggtatctggtgactttcctctttggtctacactgtgctgagtctgaaggctgggttctgatcctagttccaccatcaagcca

SEQ ID NO: 5993 - DNA, 120 bp, Artificial Sequence
  ENSG00000006210_16 (sequence is synthesized)
ccaacatactcccatctgtgaaaggaaagagggaggtaaggaatacctgtccccctgacaacactcattgacctgaggcccttctctccagcccctggatgcagcctcacagtccttacc

SEQ ID NO: 5994 - DNA, 120 bp, Artificial Sequence
  ENSG00000006210_17 (sequence is synthesized)
agcagagcaccttagacagtccctgccaatggactaacttgtctttggaccctgaggcccagagggcctgcaagggagtgagttgatagcacagaccctgccctgtgggcccccaaatgg

SEQ ID NO: 5995 - DNA, 120 bp, Artificial Sequence
  ENSG00000006210_18 (sequence is synthesized)
aaatgggcagagcagagaccatccctgaaggccccgcccaggcttagtcactgagacagcccgggctctgcctcccatcacccgctaagagggagggagggctccagacacatgtccaag

SEQ ID NO: 5996 - DNA, 120 bp, Artificial Sequence
  ENSG00000006210_19 (sequence is synthesized)
aagcccaggaaaggctccaggagcagccacattcctgatgcttcttcagagactcctgcaggcagccaggccacaagacccttgtggtcccaccccacacacgccagattctttcctgag

SEQ ID NO: 5997 - DNA, 120 bp, Artificial Sequence
  ENSG00000006210_20 (sequence is synthesized)
gctgggctcccttcccacctctctcactccttgaaaacactgttctctgccctccaagaccttctccttcacctttgtccccaccgcagacaggaccagggatttccatgatgttttcca

SEQ ID NO: 5998 - DNA, 120 bp, Artificial Sequence
  ENSG00000006210_21 (sequence is synthesized)
tgagtcccctgtttgtttctgaaagggacgctacccgggaagggggctgggacatgggaaaggggaagttgtaggcataaagtcaggggttcccttttttggctgctgaaggctcgagca

SEQ ID NO: 5999 - DNA, 120 bp, Artificial Sequence
  ENSG00000006210_22 (sequence is synthesized)
tgcctggatggggctgcaccggctggcctggcccctcagggtccctggtggcagctcacctctcccttggattgtccccgacccttgccgtctacctgaggggcctcttatgggctgggt

SEQ ID NO: 6000 - DNA, 120 bp, Artificial Sequence
  ENSG00000006210_23 (sequence is synthesized)
tctacccaggtgctaggaacactccttcacagatgggtgcttggaggaaggaaacccagctctggtccatagagagcaagacgctgtgctgccctgcccacctggcctctgcactcccct

SEQ ID NO: 6001 - DNA, 120 bp, Artificial Sequence
  ENSG00000006210_24 (sequence is synthesized)
gctgggtgtggcgcagcatattcaggaagctcagggcctggctcaggtggggtcactctggcagctcagagagggtgggagtgggcccaatgcactttgttctggctcttccaggctggg

SEQ ID NO: 6002 - DNA, 120 bp, Artificial Sequence
  ENSG00000006210_25 (sequence is synthesized)
agagccttccaggggtgggacaccctgtgatggggccctgcctcctttgtgaggaagccgctggggccagttggtcccccttccatggactttgttagtttctccaagcaggacatggac

SEQ ID NO: 6003 - DNA, 120 bp, Artificial Sequence
  ENSG00000006210_26 (sequence is synthesized)
aaggatgatctaggaagactttggaaagagtaggaagactttggaaagacttttccaaccctcatcaccaacgtctgtgccattttgtattttactaataaaatttaaaagtcttgtgaa

SEQ ID NO: 6004 - DNA, 120 bp, Artificial Sequence
  ENSG00000006210_27 (sequence is synthesized)
acaggctccccaggtcagttaaacaatcttcctggcagaaccaagaactgagccgggccaggaccattcagggaccgtggcagagggtggggactttggagacaggatgactctgtggct

SEQ ID NO: 6005 - DNA, 120 bp, Artificial Sequence
  ENSG00000006210_28 (sequence is synthesized)
ctttaaagccctggaggtgggcaatggcttttcccatcttggatttggggagcacagaatggaccttctttcctatccattgggcagcctcccttgcctcctcctgtctctggtcactca

SEQ ID NO: 6006 - DNA, 120 bp, Artificial Sequence
  ENSG00000006210_29 (sequence is synthesized)
ggggcaccgtattttctggggcttcccaaagaagacacctgcaggccattttaggggactgccacctggctccactcaatagggcctggggaggctgcaggtgagtcagtctgaggttcc

SEQ ID NO: 6007 - DNA, 120 bp, Artificial Sequence
  ENSG00000006210_30 (sequence is synthesized)
attgcagaaggagggtggccagcccacacagtgacttttatatcctggttactcagagagaaaggacagccctgtgacctggggagcccctcctgcacacagcccccaaccccctgaagc

SEQ ID NO: 6008 - DNA, 120 bp, Artificial Sequence
  ENSG00000006210_31 (sequence is synthesized)
tactagtgcttctccttgatgactcaacccagacctgccggccctaaaccaccttcccacaaagcagggtgggccaaagctaagggggagcgatggagagaggaagcagcagactctaca

SEQ ID NO: 6009 - DNA, 120 bp, Artificial Sequence
  ENSG00000006210_32 (sequence is synthesized)
aagtctctctgtgtgtgcaagcgtgcatgtgcctgtatttgggaaagtggtgtatgtttgcatggccacatatatgtaaatatttatgcatgagcagttcgtgttctggtggagcccagg

SEQ ID NO: 6010 - DNA, 120 bp, Artificial Sequence
  ENSG00000006210_33 (sequence is synthesized)
gatgccctgggggtttcccaggctctgaagggctagataagatcagcttgctctcttgactgccctggtctccagatgtttgcaaaaccctctggggtcttgcttttgctgcatataacc

SEQ ID NO: 6011 - DNA, 120 bp, Artificial Sequence
  ENSG00000006210_34 (sequence is synthesized)
ttgactcagatctgaaactcaagctcttccttgttttttatactcatcctccttgagctcaagctaagcagaagaaaatttgctggagattatagaggaagagaaaaggtggaaattcaa

SEQ ID NO: 6012 - DNA, 120 bp, Artificial Sequence
  ENSG00000006210_35 (sequence is synthesized)
tgtaaacaacttcaaatgtttatatcaaatagttgggtttatttgtcctgtcccggggtttctctctggttccacgtgacactcagctactgcctgccccttccgccccactctgccccc

SEQ ID NO: 6013 - DNA, 120 bp, Artificial Sequence
  ENSG00000006210_36 (sequence is synthesized)
accttattcataccgtccatctccaaccctcctccttactcttcttgctccaggaatttcaaatgcctcttccctcctaggcaggatgactcagtacctttcagcaactgctctcgggct

SEQ ID NO: 6014 - DNA, 120 bp, Artificial Sequence
  ENSG00000006210_37 (sequence is synthesized)
cattctggctctcagcagcagaacaaaggatcatctattcagcagaccccaccttccttagaaagcagttgtacttatatattttttaaaaagtttattgctgggcatagtggcttacat

SEQ ID NO: 6015 - DNA, 120 bp, Artificial Sequence
  ENSG00000006210_38 (sequence is synthesized)
attttttaaaaagtttattgctgggcatagtggcttacatctgtaatcccagctattccggaggttgaagtgggagaatcacttgcggtcggggttcaagaccagcctgggcaacatagc

SEQ ID NO: 6016 - DNA, 68 bp, Artificial Sequence
  ENSG00000006210_39 (sequence is synthesized)
aagaccctgtctcttaaaaaaattagccaggtctcttttttttttttcttttttttttgagacggagt

SEQ ID NO: 6017 - DNA, 76 bp, Artificial Sequence
  ENSG00000006210_40 (sequence is synthesized)
aaggtgcacaccatcatgccaggctaatttgtgtatttgtagtagagacaaggtttcaccatattgatcaggctgg

SEQ ID NO: 6018 - DNA, 66 bp, Artificial Sequence
  ENSG00000006210_41 (sequence is synthesized)
caccatcatgccaggctaatttgtgtatttgtagtagagacatctgtctcggcctcccaaagtgct

SEQ ID NO: 6019 - DNA, 76 bp, Artificial Sequence
  ENSG00000006210_42 (sequence is synthesized)
tcttaaaaaaaaatggcagcgggaagaaataaggcagaggtgaggggataggcaaggccacaggcccggtggggac

SEQ ID NO: 6020 - DNA, 120 bp, Artificial Sequence
  ENSG00000006210_43 (sequence is synthesized)
gaggtgaggggataggcaaggccacaggcccggtggggactagagcaggagaacctgctccatcacttgctggctgtgtgaccttagcaggtccctgtcactctcagattcatcccccct

SEQ ID NO: 6021 - DNA, 74 bp, Artificial Sequence
  ENSG00000006210_44 (sequence is synthesized)
accttagcaggtccctgtcactctcagattcatcccccctgctgcacaatggaccacttaattttaaaaattaa

SEQ ID NO: 6022 - DNA, 72 bp, Artificial Sequence
  ENSG00000006210_45 (sequence is synthesized)
ttaaactcttaatatgtgccaggcaaaaagaactctataaataagaattcacgtttcttattcttacaacaa

SEQ ID NO: 6023 - DNA, 120 bp, Artificial Sequence
  ENSG00000006210_46 (sequence is synthesized)
ctctataaataagaattcacgtttcttattcttacaacaagactatgaggtagatgctatttttgttcctattttacaggtggggaaactgaggcatagagaagtttggcaggggaggga

SEQ ID NO: 6024 - DNA, 120 bp, Artificial Sequence
  ENSG00000006210_47 (sequence is synthesized)
ggctgagtcaaaggccttgaaggccagggtgtacaggggatcagttttggcttgggtggtgtggccgggacaatctggcacggggttgggaagccagatgcccacagacatccctgctga

SEQ ID NO: 6025 - DNA, 120 bp, Artificial Sequence
  ENSG00000006210_48 (sequence is synthesized)
gccgcctgcctggcccccgccgggactcttgcccaccctcagccatggctccgatatctctgtcgtggctgctccgcttggccaccttctgccatctgactgtcctgctggctgcttgga

SEQ ID NO: 6026 - DNA, 120 bp, Artificial Sequence
  ENSG00000006282_0 (sequence is synthesized)
cccacggccccgagcagccatgctgggcgcgcgggcctggttgggccgcgtccttctgctgccccgcgccggtgcaggcctcgccgcgagccgcaggtgtcctggagtctggcccaggac

SEQ ID NO: 6027 - DNA, 120 bp, Artificial Sequence
  ENSG00000006282_1 (sequence is synthesized)
gagtctggcccaggacctggccccacaggagtcccagcaggggtagctcctcccgggacaaggaccgaagtgcgacggtcagtagttcagtgcccatgcctgctggagggaaaggaagcc

SEQ ID NO: 6028 - DNA, 120 bp, Artificial Sequence
  ENSG00000006282_2 (sequence is synthesized)
atccttcatctacaccccagagggtccccaaccgcctgatccacgagaagtcaccatacctcctacaacatgcctacaatcctgtggactggtacccctggggacaggaagccttcgaca

SEQ ID NO: 6029 - DNA, 120 bp, Artificial Sequence
  ENSG00000006282_3 (sequence is synthesized)
aggccaggaaggaaaacaagccgattttcctctcagtcgggtactccacctgccactggtgccacatgatggaagaggagtccttccagaatgaggagattggccgcctgctcagtgagg

SEQ ID NO: 6030 - DNA, 120 bp, Artificial Sequence
  ENSG00000006282_4 (sequence is synthesized)
actttgtgagtgtgaaggtagaccgtgaggagcggcctgacgtggacaaggtgtacatgacgttcgtgcaggccaccagcagcggcgggggctggcccatgaatgtgtggctgactccca

SEQ ID NO: 6031 - DNA, 120 bp, Artificial Sequence
  ENSG00000006282_5 (sequence is synthesized)
acctccagccctttgtcgggggcacctatttccctcctgaggatggcttgacccgagtcggcttccgcacagtgttgctgagaatacgagaacagtggaaacagaacaagaacaccctgc

SEQ ID NO: 6032 - DNA, 120 bp, Artificial Sequence
  ENSG00000006282_6 (sequence is synthesized)
tagaaaatagccagcgtgtcaccactgccctgctggcccgatcagagatcagcgtgggtgaccgccagctgccgccctctgccgccaccgtgaacaatcgctgcttccagcagctggatg

SEQ ID NO: 6033 - DNA, 120 bp, Artificial Sequence
  ENSG00000006282_7 (sequence is synthesized)
agggctatgatgaggaatacggtggcttcgctgaggcccccaagtttcccacgccggtgatcctgagcttcctgttctcctactggctcagccatcgactgactcaggatggctctcggg

SEQ ID NO: 6034 - DNA, 120 bp, Artificial Sequence
  ENSG00000006282_8 (sequence is synthesized)
cccagcagatggccttgcataccctgaaaatgatggctaacgggggcatccgggaccatgtggggcagggctttcaccgctactccacagaccgccagtggcacgtccctcactttgaga

SEQ ID NO: 6035 - DNA, 120 bp, Artificial Sequence
  ENSG00000006282_9 (sequence is synthesized)
agatgctctatgaccaggcacagctcgctgtggcctattcgcaggccttccagctctctggtgatgaattctactctgacgtggccaaaggcatcctgcagtacgtggctcggagcctga

SEQ ID NO: 6036 - DNA, 120 bp, Artificial Sequence
  ENSG00000006282_10 (sequence is synthesized)
tcctcccggagcctgtgttgggtgccaccgagccgctgacctcaggccagctcctcatgaagcactacggcctcacagaggctggtaacatcagccccagtcaggaccccaagggggagc

SEQ ID NO: 6037 - DNA, 120 bp, Artificial Sequence
  ENSG00000006282_11 (sequence is synthesized)
tgcagggccagaatgtgctgaccgtccggtactcgctggagctgactgctgcccgctttggcttggatgtggaggccgtgcggaccttgctcaattcagggctggagaagctcttccagg

SEQ ID NO: 6038 - DNA, 120 bp, Artificial Sequence
  ENSG00000006282_12 (sequence is synthesized)
cccggaagcatcggcccaagccgcacctggacagcaagatgctggctgcctggaatggcttgatggtgtcaggctatgctgtgactggggctgtcctgggccaagacaggctgatcaact

SEQ ID NO: 6039 - DNA, 120 bp, Artificial Sequence
  ENSG00000006282_13 (sequence is synthesized)
atgccaccaatggtgccaagttcctgaagcggcacatgtttgatgtggccagtggccgcctgatgcggacctgctacaccggccctggggggactgtggagcacagcaacccaccctgct

SEQ ID NO: 6040 - DNA, 120 bp, Artificial Sequence
  ENSG00000006282_14 (sequence is synthesized)
ggggcttcctggaggactacgccttcgtggtgcggggcctgctggacctgtatgaggcctcacaggagagtgcgtggctcgagtgggctctgcggctgcaggacacacaggacaagctct

SEQ ID NO: 6041 - DNA, 120 bp, Artificial Sequence
  ENSG00000006282_15 (sequence is synthesized)
tttgggactcccagggtggcggctacttctgcagtgaggctgagctgggggctggcctgcccctgcgtctgaaggacgaccaggatggagcagagcccagcgccaattccgtgtcagccc

SEQ ID NO: 6042 - DNA, 120 bp, Artificial Sequence
  ENSG00000006282_16 (sequence is synthesized)
acaacctgctccggctgcatggcttcacgggccacaaggactggatggacaagtgtgtgtgcctattgaccgccttttccgagcgcatgcgtcgtgtcccggtggcgttgcccgagatgg

SEQ ID NO: 6043 - DNA, 120 bp, Artificial Sequence
  ENSG00000006282_17 (sequence is synthesized)
tccgcgccctctcagcccagcagcagaccctcaagcagatcgtgatctgtggagaccgtcaggccaaggacaccaaggccctggtgcagtgcgtccactctgtctacattcctaacaagg

SEQ ID NO: 6044 - DNA, 120 bp, Artificial Sequence
  ENSG00000006282_18 (sequence is synthesized)
tgctgattctggctgatggggacccctcgagcttcctgtcccgccagctgcctttcctgagtaccctccgacggttggaagaccaggccactgcatatgtgtgtgagaatcaagcctgct

SEQ ID NO: 6045 - DNA, 120 bp, Artificial Sequence
  ENSG00000006282_19 (sequence is synthesized)
cagtgcccatcactgatccctgcgaattacgaaaactactacatccatgactgccccaacccccttggggtggggcagaaggtgaagcatcccaactgactagagactcaggccctgcag

SEQ ID NO: 6046 - DNA, 120 bp, Artificial Sequence
  ENSG00000006282_20 (sequence is synthesized)
ggccctatagaacctgtggccatccctgagcaccctgccaccaggtgacctcggccatactcactgccccccttgggcacccactcaccctagaataaacttaacagtgtcccgtggtaa

SEQ ID NO: 6047 - DNA, 120 bp, Artificial Sequence
  ENSG00000006282_21 (sequence is synthesized)
gaggttgggggagactaacctggcaaggagcccccaatgagccacctctcctcaccccccaaaaaacataagggggagcacaaaggccacagtctcccccatggttcagaaaggggtagc

SEQ ID NO: 6048 - DNA, 120 bp, Artificial Sequence
  ENSG00000006282_22 (sequence is synthesized)
gcactgggtgttccctggaggggcagcagggggctgtggggtggggcagaagctgggactggcctccagctttgtatccgcacagggctttcaccgctactccacagaccgccagtggca

SEQ ID NO: 6049 - DNA, 120 bp, Artificial Sequence
  ENSG00000006282_23 (sequence is synthesized)
cggcccaagccgcacctggacagcaagatgctggctgcctggaatggtggggcagcacacctgagaccgagcctgtctgtaggatcccccttcacaaagcccctgtctttccggcagcgg

SEQ ID NO: 6050 - DNA, 120 bp, Artificial Sequence
  ENSG00000006282_24 (sequence is synthesized)
ctaaatgctcactctcccttgattagcgttattattctcagttgacaaaagaggcttaaggagcttgagtaacccgcccaaggtcacgcgcaagggctgggaaccccgccatgtctggct

SEQ ID NO: 6051 - DNA, 120 bp, Artificial Sequence
  ENSG00000006282_25 (sequence is synthesized)
gtctctgattccctaggtgtcctggagtctggcccaggacctggccccacaggagtcccagcaggtgggcgctgagtgagggagtccccatgtctggtttcctctgtttgtccctcacct

SEQ ID NO: 6052 - DNA, 120 bp, Artificial Sequence
  ENSG00000006282_26 (sequence is synthesized)
ggtcgagtcccagaccctactgatcttggcctgtccagccaccaacagtaggctgccttccagtggggccacacccaggcctgccagagagatgcctccaagcagctgctccaggaaggg

SEQ ID NO: 6053 - DNA, 120 bp, Artificial Sequence
  ENSG00000006282_27 (sequence is synthesized)
gttggggcctccactgccctgtgggccggggccagccaactctcccctccccacagtccggaggcttctatagcgcagaagatgcagactcgcccccagagcggggccagcggcccaaag

SEQ ID NO: 6054 - DNA, 120 bp, Artificial Sequence
  ENSG00000006282_28 (sequence is synthesized)
tacaatcctgtggactggtgagcacctctcctggggccctgcctggaatcgctggggtcctgggcccctcccagaccccctgggctactgagtgatgccccaccctgctgggtctaggta

SEQ ID NO: 6055 - DNA, 120 bp, Artificial Sequence
  ENSG00000006282_29 (sequence is synthesized)
tacttctcccctccatgtggactccagtcctggctctgccaggtgcttgctgtgagtttgtagcttccctgggcccatttactcatctgggaagtgggctgatggcacctgcccaagagg

SEQ ID NO: 6056 - DNA, 120 bp, Artificial Sequence
  ENSG00000006282_30 (sequence is synthesized)
gttcatctggagggttaagtgaacaaatgcgtgaaagggcctcctctgggaaaggccctctctcctggggctctccccagcccctcccgtaatgcctgtcccccagcaacccaccctgct

SEQ ID NO: 6057 - DNA, 120 bp, Artificial Sequence
  ENSG00000006282_31 (sequence is synthesized)
agcaaatattgactgactgctgtggacaaagtgctgggctcaccttggagggatccaacctccaggagctcgagcgcagcagggtagacaagccaggggcacgtgatgcggctgtggcag

SEQ ID NO: 6058 - DNA, 120 bp, Artificial Sequence
  ENSG00000006282_32 (sequence is synthesized)
aagccaagtgcaggagctcccaggctcctttgttttactgagtcaccttaaatgtaactctgccctctcccttgcttcgccaaggctagcgagaaactcagtcttagccacacaggagga

SEQ ID NO: 6059 - DNA, 120 bp, Artificial Sequence
  ENSG00000006282_33 (sequence is synthesized)
atcggaccccttctgggggtttatgtggagtctgggaaaccaagggtggggtgaggcctggtactcaatccaggaggggcccctatgaccaccctcgcctgtttttcttctcaatgctcc

SEQ ID NO: 6060 - DNA, 120 bp, Artificial Sequence
  ENSG00000006282_34 (sequence is synthesized)
ctgatcactggaccactggacactgatgtgtcctcagtgcttggggtctggctctgcaggcagcctgcagccagcctccatccccctttcagggacaaatggccttccaccagagtcgtt

SEQ ID NO: 6061 - DNA, 120 bp, Artificial Sequence
  ENSG00000006282_35 (sequence is synthesized)
gctcagcccggactcactgacaagccacgggacctttgcacaaactgtacctctgcctccttccccagcactccccctgagcaccctccaagttcctttctctcgttctccatggcttca

SEQ ID NO: 6062 - DNA, 120 bp, Artificial Sequence
  ENSG00000006282_36 (sequence is synthesized)
caaatgtgatttcctcagggaagccttcatcctttgccccttccaccagatcagggcgacgctcggagaccagccacactgtcccaagtcccggcgaagacccgcccgcggctccgtagg

SEQ ID NO: 6063 - DNA, 120 bp, Artificial Sequence
  ENSG00000006282_37 (sequence is synthesized)
gcgggtcttccaggagactagaggccaggacgtcttccatgtagccagggccacttggccagcctccctctgacccgttgctggccccctgacctctccccatggccctgttcagtcggg

SEQ ID NO: 6064 - DNA, 120 bp, Artificial Sequence
  ENSG00000006282_38 (sequence is synthesized)
ctgaatcccctgttccctcccatgtacccactacccaggcttccctcccccgcctgcctcagagaatgttgccaccttccacctgggcctccccagtgacctctctgttcacagtctcct

SEQ ID NO: 6065 - DNA, 120 bp, Artificial Sequence
  ENSG00000006283_0 (sequence is synthesized)
ggctcctcgccgccgctttcgctcgctcgctccgcgtctcggccggaggaggaggctgtggcgccggcgacagctacggcagcggcagccaccgcggcggctgcggcggcggcatctccg

SEQ ID NO: 6066 - DNA, 120 bp, Artificial Sequence
  ENSG00000006283_1 (sequence is synthesized)
cctccactcccgcccgggactgccccccactgtctccccgcccctcccggacagtgagcccgcggcggggcgggggaaggagccgcccccaccccctccaagcccacccctaaagagatc

SEQ ID NO: 6067 - DNA, 120 bp, Artificial Sequence
  ENSG00000006283_2 (sequence is synthesized)
aagagatccctcctcccctcccccgccgcctggcgcggagccgggacgatgctgaccccttagatccggctccagctgcgccgcgggaagagggggcgcccctccccggacccccgccct

SEQ ID NO: 6068 - DNA, 120 bp, Artificial Sequence
  ENSG00000006283_3 (sequence is synthesized)
ccgccgctgccccccttttcgttcgccctctcggggcggcttcgccgaaggtagcgccgaatccggcaaccggagcctgggcgcgaagcgaagaagccggaacaaagtgagggggagccg

SEQ ID NO: 6069 - DNA, 80 bp, Artificial Sequence
  ENSG00000006283_4 (sequence is synthesized)
ggcggggtttccctgcgccccggcgccccgcgggcagcatgcccctgcgggcagggggagctgggctgaactggccctcc

SEQ ID NO: 6070 - DNA, 120 bp, Artificial Sequence
  ENSG00000006283_5 (sequence is synthesized)
aactggccctcccgggggctcagcttgcgccctagagcccaccagatgtgcccccgccggggcccccgggttgcgtgaggacacctcctctgaggggcgccgcttgcccctctccggatc

SEQ ID NO: 6071 - DNA, 120 bp, Artificial Sequence
  ENSG00000006283_6 (sequence is synthesized)
gcccggggccccggctggccagaggatggacgaggaggaggatggagcgggcgccgaggagtcgggacagccccggagcttcatgcggctcaacgacctgtcgggggccgggggccggcc

SEQ ID NO: 6072 - DNA, 120 bp, Artificial Sequence
  ENSG00000006283_7 (sequence is synthesized)
ggggccggggtcagcagaaaaggacccgggcagcgcggactccgaggcggaggggctgccgtacccggcgctggccccggtggttttcttctacttgagccaggacagccgcccgcggag

SEQ ID NO: 6073 - DNA, 120 bp, Artificial Sequence
  ENSG00000006283_8 (sequence is synthesized)
ctggtgtctccgcacggtctgtaacccctggtttgagcgcatcagcatgttggtcatccttctcaactgcgtgaccctgggcatgttccggccatgcgaggacatcgcctgtgactccca

SEQ ID NO: 6074 - DNA, 120 bp, Artificial Sequence
  ENSG00000006283_9 (sequence is synthesized)
gcgctgccggatcctgcaggcctttgatgacttcatctttgccttctttgccgtggagatggtggtgaagatggtggccttgggcatctttgggaaaaagtgttacctgggagacacttg

SEQ ID NO: 6075 - DNA, 120 bp, Artificial Sequence
  ENSG00000006283_10 (sequence is synthesized)
gaaccggcttgactttttcatcgtcatcgcagggatgctggagtactcgctggacctgcagaacgtcagcttctcagctgtcaggacagtccgtgtgctgcgaccgctcagggccattaa

SEQ ID NO: 6076 - DNA, 120 bp, Artificial Sequence
  ENSG00000006283_11 (sequence is synthesized)
ccgggtgcccagcatgcgcatccttgtcacgttgctgctggatacgctgcccatgctgggcaacgtcctgctgctctgcttcttcgtcttcttcatcttcggcatcgtcggcgtccagct

SEQ ID NO: 6077 - DNA, 120 bp, Artificial Sequence
  ENSG00000006283_12 (sequence is synthesized)
gtgggcagggctgcttcggaaccgatgcttcctacctgagaatttcagcctccccctgagcgtggacctggagcgctattaccagacagagaacgaggatgagagccccttcatctgctc

SEQ ID NO: 6078 - DNA, 120 bp, Artificial Sequence
  ENSG00000006283_13 (sequence is synthesized)
ccagccacgcgagaacggcatgcggtcctgcagaagcgtgcccacgctgcgcggggacgggggcggtggcccaccttgcggtctggactatgaggcctacaacagctccagcaacaccac

SEQ ID NO: 6079 - DNA, 120 bp, Artificial Sequence
  ENSG00000006283_14 (sequence is synthesized)
ctgtgtcaactggaaccagtactacaccaactgctcagcgggggagcacaaccccttcaagggcgccatcaactttgacaacattggctatgcctggatcgccatcttccaggtcatcac

SEQ ID NO: 6080 - DNA, 120 bp, Artificial Sequence
  ENSG00000006283_15 (sequence is synthesized)
gctggagggctgggtcgacatcatgtactttgtgatggatgctcattccttctacaatttcatctacttcatcctcctcatcatcgtgggctccttcttcatgatcaacctgtgcctggt

SEQ ID NO: 6081 - DNA, 120 bp, Artificial Sequence
  ENSG00000006283_16 (sequence is synthesized)
ggtgattgccacgcagttctcagagaccaagcagcgggaaagccagctgatgcgggagcagcgtgtgcggttcctgtccaacgccagcaccctggctagcttctctgagcccggcagctg

SEQ ID NO: 6082 - DNA, 120 bp, Artificial Sequence
  ENSG00000006283_17 (sequence is synthesized)
ctatgaggagctgctcaagtacctggtgtacatccttcgtaaggcagcccgcaggctggctcaggtctctcgggcagcaggtgtgcgggttgggctgctcagcagcccagcacccctcgg

SEQ ID NO: 6083 - DNA, 120 bp, Artificial Sequence
  ENSG00000006283_18 (sequence is synthesized)
gggccaggagacccagcccagcagcagctgctctcgctcccaccgccgcctatccgtccaccacctggtgcaccaccaccaccaccatcaccaccactaccacctgggcaatgggacgct

SEQ ID NO: 6084 - DNA, 120 bp, Artificial Sequence
  ENSG00000006283_19 (sequence is synthesized)
cagggccccccgggccagcccggagatccaggacagggatgccaatgggtcccgccggctcatgctgccaccaccctcgacgcctgccctctccggggccccccctggtggcgcagagtc

SEQ ID NO: 6085 - DNA, 120 bp, Artificial Sequence
  ENSG00000006283_20 (sequence is synthesized)
tgtgcacagcttctaccatgccgactgccacttagagccagtccgctgccaggcgccccctcccaggtccccatctgaggcatccggcaggactgtgggcagcgggaaggtgtatcccac

SEQ ID NO: 6086 - DNA, 120 bp, Artificial Sequence
  ENSG00000006283_21 (sequence is synthesized)
cgtgcacaccagccctccaccggagacgctgaaggagaaggcactagtagaggtggctgccagctctgggcccccaaccctcaccagcctcaacatcccacccgggccctacagctccat

SEQ ID NO: 6087 - DNA, 120 bp, Artificial Sequence
  ENSG00000006283_22 (sequence is synthesized)
gcacaagctgctggagacacagagtacaggtgcctgccaaagctcttgcaagatctccagcccttgcttgaaagcagacagtggagcctgtggtccagacagctgcccctactgtgcccg

SEQ ID NO: 6088 - DNA, 120 bp, Artificial Sequence
  ENSG00000006283_23 (sequence is synthesized)
ggccggggcaggggaggtggagctcgccgaccgtgaaatgcctgactcagacagcgaggcagtttatgagttcacacaggatgcccagcacagcgacctccgggacccccacagccggcg

SEQ ID NO: 6089 - DNA, 120 bp, Artificial Sequence
  ENSG00000006283_24 (sequence is synthesized)
gcaacggagcctgggcccagatgcagagcccagctctgtgctggccttctggaggctaatctgtgacaccttccgaaagattgtggacagcaagtactttggccggggaatcatgatcgc

SEQ ID NO: 6090 - DNA, 120 bp, Artificial Sequence
  ENSG00000006283_25 (sequence is synthesized)
catcctggtcaacacactcagcatgggcatcgaataccacgagcagcccgaggagcttaccaacgccctagaaatcagcaacatcgtcttcaccagcctctttgccctggagatgctgct

SEQ ID NO: 6091 - DNA, 120 bp, Artificial Sequence
  ENSG00000006283_26 (sequence is synthesized)
gaagctgcttgtgtatggtccctttggctacatcaagaatccctacaacatcttcgatggtgtcattgtggtcatcagcgtgtgggagatcgtgggccagcaggggggcggcctgtcggt

SEQ ID NO: 6092 - DNA, 120 bp, Artificial Sequence
  ENSG00000006283_27 (sequence is synthesized)
gctgcggaccttccgcctgatgcgtgtgctgaagctggtgcgcttcctgccggcgctgcagcggcagctggtggtgctcatgaagaccatggacaacgtggccaccttctgcatgctgct

SEQ ID NO: 6093 - DNA, 120 bp, Artificial Sequence
  ENSG00000006283_28 (sequence is synthesized)
tatgctcttcatcttcatcttcagcatcctgggcatgcatctcttcggctgcaagtttgcctctgagcgggatggggacaccctgccagaccggaagaattttgactccttgctctgggc

SEQ ID NO: 6094 - DNA, 120 bp, Artificial Sequence
  ENSG00000006283_29 (sequence is synthesized)
catcgtcactgtctttcagatcctgacccaggaggactggaacaaagtcctctacaatggtatggcctccacgtcgtcctgggcggccctttatttcattgccctcatgaccttcggcaa

SEQ ID NO: 6095 - DNA, 120 bp, Artificial Sequence
  ENSG00000006283_30 (sequence is synthesized)
ctacgtgctcttcaatttgctggtcgccattctggtggagggcttccaggcggaggaaatcagcaaacgggaagatgcgagtggacagttaagctgtattcagctgcctgtcgactccca

SEQ ID NO: 6096 - DNA, 120 bp, Artificial Sequence
  ENSG00000006283_31 (sequence is synthesized)
ggggggagatgccaacaagtccgaatcagagcccgatttcttctcacccagcctggatggtgatggggacaggaagaagtgcttggccttggtgtccctgggagagcacccggagctgcg

SEQ ID NO: 6097 - DNA, 120 bp, Artificial Sequence
  ENSG00000006283_32 (sequence is synthesized)
gaagagcctgctgccgcctctcatcatccacacggccgccacacccatgtcgctgcccaagagcaccagcacgggcctgggcgaggcgctgggccctgcgtcgcgccgcaccagcagcag

SEQ ID NO: 6098 - DNA, 120 bp, Artificial Sequence
  ENSG00000006283_33 (sequence is synthesized)
cgggtcggcagagcctggggcggcccacgagatgaagtcaccgcccagcgcccgcagctctccgcacagcccctggagcgctgcaagcagctggaccagcaggcgctccagccggaacag

SEQ ID NO: 6099 - DNA, 120 bp, Artificial Sequence
  ENSG00000006283_34 (sequence is synthesized)
cctcggccgtgcacccagcctgaagcggagaagcccaagtggagagcggcggtccctgttgtcgggagaaggccaggagagccaggatgaagaggagagctcagaagaggagcgggccag

SEQ ID NO: 6100 - DNA, 120 bp, Artificial Sequence
  ENSG00000006283_35 (sequence is synthesized)
gtgccagggctgcatcgcactgccagtggccgagggtctgcttctgagcaccaggactgcaatggcaagtcggcttcagggcgcctggcccgggccctgcggcctgatgaccccccactg

SEQ ID NO: 6101 - DNA, 120 bp, Artificial Sequence
  ENSG00000006283_36 (sequence is synthesized)
gatggggatgacgccgatgacgagggcaacctgagcaaaggggaacgggtccgcgcgtggatccgagcccgactccctgcctgctgcctcgagcgagactcctggtcagcctacatcttc

SEQ ID NO: 6102 - DNA, 120 bp, Artificial Sequence
  ENSG00000006283_37 (sequence is synthesized)
cctcctcagtccaggttccgcctcctgtgtcaccggatcatcacccacaagatgttcgaccacgtggtccttgtcatcatcttccttaactgcatcaccatcgccatggagcgccccaaa

SEQ ID NO: 6103 - DNA, 120 bp, Artificial Sequence
  ENSG00000006283_38 (sequence is synthesized)
attgacccccacagcgctgaacgcatcttcctgaccctctccaattacatcttcaccgcagtctttctggctgaaatgacagtgaaggtggtggcactgggctggtgcttcggggagcag

SEQ ID NO: 6104 - DNA, 120 bp, Artificial Sequence
  ENSG00000006283_39 (sequence is synthesized)
gcgtacctgcggagcagttggaacgtgctggacgggctgttggtgctcatctccgtcatcgacattctggtgtccatggtctctgacagcggcaccaagatcctgggcatgctgagggtg

SEQ ID NO: 6105 - DNA, 120 bp, Artificial Sequence
  ENSG00000006283_40 (sequence is synthesized)
ctgcggctgctgcggaccctgcgcccgctcagggtgatcagccgggcgcaggggctgaagctggtggtggagacgctgatgtcctcactgaaacccatcggcaacattgtagtcatctgc

SEQ ID NO: 6106 - DNA, 120 bp, Artificial Sequence
  ENSG00000006283_41 (sequence is synthesized)
tgtgccttcttcatcattttcggcatcttgggggtgcagctcttcaaagggaagtttttcgtgtgccagggcgaggataccaggaacatcaccaataaatcggactgtgccgaggccagt

SEQ ID NO: 6107 - DNA, 120 bp, Artificial Sequence
  ENSG00000006283_42 (sequence is synthesized)
taccggtgggtccggcacaagtacaactttgacaaccttggccaggccctgatgtccctgttcgttttggcctccaaggatggttgggtggacatcatgtacgatgggctggatgctgtg

SEQ ID NO: 6108 - DNA, 120 bp, Artificial Sequence
  ENSG00000006283_43 (sequence is synthesized)
ggcgtggaccagcagcccatcatgaaccacaacccctggatgctgctgtacttcatctcgttcctgctcattgtggccttctttgtcctgaacatgtttgtgggtgtggtggtggagaac

SEQ ID NO: 6109 - DNA, 120 bp, Artificial Sequence
  ENSG00000006283_44 (sequence is synthesized)
ttccacaagtgtcggcagcaccaggaggaagaggaggcccggcggcgggaggagaagcgcctacgaagactggagaaaaagagaaggaatctaatgctggacgatgtaattgcttccggc

SEQ ID NO: 6110 - DNA, 120 bp, Artificial Sequence
  ENSG00000006283_45 (sequence is synthesized)
agctcagccagcgctgcgtcagaagcccagtgcaaaccttactactccgactactcccgcttccggctcctcgtccaccacttgtgcaccagccactacctggacctcttcatcacaggt

SEQ ID NO: 6111 - DNA, 120 bp, Artificial Sequence
  ENSG00000006283_46 (sequence is synthesized)
gtcatcgggctgaacgtggtcaccatggccatggagcactaccagcagccccagattctggatgaggctctgaagatctgcaactacatcttcactgtcatctttgtcttggagtcagtt

SEQ ID NO: 6112 - DNA, 120 bp, Artificial Sequence
  ENSG00000006283_47 (sequence is synthesized)
ttcaaacttgtggcctttggtttccgtcggttcttccaggacaggtggaaccagctggacctggccattgtgctgctgtccatcatgggcatcacgctggaggaaatcgaggtcaacgcc

SEQ ID NO: 6113 - DNA, 120 bp, Artificial Sequence
  ENSG00000006283_48 (sequence is synthesized)
tcgctgcccatcaaccccaccatcatccgcatcatgagggtgctgcgcattgcccgagtgctgaagctgctgaagatggctgtgggcatgcgggcgctgctggacacggtgatgcaggcc

SEQ ID NO: 6114 - DNA, 120 bp, Artificial Sequence
  ENSG00000006283_49 (sequence is synthesized)
ctgccccaggtggggaacctgggacttctcttcatgttgttgtttttcatctttgcagctctgggcgtggagctctttggagacctggagtgtgacgagacacacccctgtgagggcctg

SEQ ID NO: 6115 - DNA, 120 bp, Artificial Sequence
  ENSG00000006283_50 (sequence is synthesized)
ggccgtcatgccacctttcggaactttggcatggccttcctaaccctcttccgagtctccacaggtgacaattggaatggcattatgaaggacaccctccgggactgtgaccaggagtcc

SEQ ID NO: 6116 - DNA, 120 bp, Artificial Sequence
  ENSG00000006283_51 (sequence is synthesized)
acctgctacaacacggtcatctcgcctatctactttgtgtccttcgtgctgacggcccagttcgtgctagtcaacgtggtgatcgccgtgctgatgaagcacctggaggagagcaacaag

SEQ ID NO: 6117 - DNA, 120 bp, Artificial Sequence
  ENSG00000006283_52 (sequence is synthesized)
gaggccaaggaggaggccgagctagaggctgagctggagctggagatgaagaccctcagcccccagccccactcgccactgggcagccccttcctctggcctggggtcgagggccccgac

SEQ ID NO: 6118 - DNA, 120 bp, Artificial Sequence
  ENSG00000006283_53 (sequence is synthesized)
agccccgacagccccaagcctggggctctgcacccagcggcccacgcgagatcagcctcccacttttccctggagcaccccacggacaggcagctgtttgacaccatatccctgctgatc

SEQ ID NO: 6119 - DNA, 120 bp, Artificial Sequence
  ENSG00000006283_54 (sequence is synthesized)
cagggctccctggagtgggagctgaagctgatggacgagctggcaggcccagggggccagccctctgccttcccttctgcccccagcctgggaggctccgacccacagatccctctagct

SEQ ID NO: 6120 - DNA, 120 bp, Artificial Sequence
  ENSG00000006283_55 (sequence is synthesized)
gagatggaggctctgtctctgacgtcagagattgtgtctgaaccgtcctgctctctagctctgacggatgactctttgcctgatgacatgcacacactcttacttagtgccctggagagc

SEQ ID NO: 6121 - DNA, 120 bp, Artificial Sequence
  ENSG00000006283_56 (sequence is synthesized)
aatatgcagccccaccccacggagctgccaggaccagacttactgactgtgcggaagtctggggtcagccgaacgcactctctgcccaatgacagctacatgtgtcggcatgggagcact

SEQ ID NO: 6122 - DNA, 120 bp, Artificial Sequence
  ENSG00000006283_57 (sequence is synthesized)
gccgaggggcccctgggacacaggggctgggggctccccaaagctcagtcaggctccgtcttgtccgttcactcccagccagcagataccagctacatcctgcagcttcccaaagatgca

SEQ ID NO: 6123 - DNA, 120 bp, Artificial Sequence
  ENSG00000006283_58 (sequence is synthesized)
cctcatctgctccagccccacagcgccccaacctggggcaccatccccaaactgcccccaccaggacgctcccctttggctcagaggccactcaggcgccaggcagcaataaggactgac

SEQ ID NO: 6124 - DNA, 120 bp, Artificial Sequence
  ENSG00000006283_59 (sequence is synthesized)
tccttggacgttcagggtctgggcagccgggaagacctgctggcagaggtgagtgggccctccccgcccctggcccgggcctactctttctggggccagtcaagtacccaggcacagcag

SEQ ID NO: 6125 - DNA, 120 bp, Artificial Sequence
  ENSG00000006283_60 (sequence is synthesized)
cactcccgcagccacagcaagatctccaagcacatgaccccgccagccccttgcccaggcccagaacccaactggggcaagggccctccagagaccagaagcagcttagagttggacacg

SEQ ID NO: 6126 - DNA, 120 bp, Artificial Sequence
  ENSG00000006283_61 (sequence is synthesized)
gagctgagctggatttcaggagacctcctgccccctggcggccaggaggagcccccatccccacgggacctgaagaagtgctacagcgtggaggcccagagctgccagcgccggcctacg

SEQ ID NO: 6127 - DNA, 120 bp, Artificial Sequence
  ENSG00000006283_62 (sequence is synthesized)
tcctggctggatgagcagaggagacactctatcgccgtcagctgcctggacagcggctcccaaccccacctgggcacagacccctctaaccttgggggccagcctcttggggggcctggg

SEQ ID NO: 6128 - DNA, 120 bp, Artificial Sequence
  ENSG00000006283_63 (sequence is synthesized)
agccggcccaagaaaaaactcagcccgcctagtatcaccatagacccccccgagagccaaggtcctcggaccccgcccagccctggtatctgcctccggaggagggctccgtccagcgac

SEQ ID NO: 6129 - DNA, 120 bp, Artificial Sequence
  ENSG00000006283_64 (sequence is synthesized)
tccaaggatcccttggcctctggcccccctgacagcatggctgcctcgccctccccaaagaaagatgtgctgagtctctccggtttatcctctgacccagcagacctggacccctgagtc

SEQ ID NO: 6130 - DNA, 120 bp, Artificial Sequence
  ENSG00000006283_65 (sequence is synthesized)
ctgccccactttcccactcacctttctccactgggtgccaagtcctagctcctcctcctgggctatattcctgacaaaagttccatatagacaccaaggaggcggaggcgctcctccctg

SEQ ID NO: 6131 - DNA, 120 bp, Artificial Sequence
  ENSG00000006283_66 (sequence is synthesized)
cctcagtggctctgggtacctgcaagcagaacttccaaagagagttaaaagcagcagccccggcaactctggctccaggcagaaggagaggcccggtgcagctgaggttcccgacaccag

SEQ ID NO: 6132 - DNA, 120 bp, Artificial Sequence
  ENSG00000006283_67 (sequence is synthesized)
aagctgttgggagaaagcaatacgtttgtgcagaatctctatgtatattctattttattaaattaattgaatctagtatatgcgggatgtacgacattttgtgactgaagagacttgttt

SEQ ID NO: 6133 - DNA, 120 bp, Artificial Sequence
  ENSG00000006283_68 (sequence is synthesized)
ccttctacttttatgtgtctcagaatatttttgaggcgaaggcgtctgtctcttggctattttaacctaaaataacagtctagttatattccctcttcttgcaaagcacaagctgggacc

SEQ ID NO: 6134 - DNA, 120 bp, Artificial Sequence
  ENSG00000006283_69 (sequence is synthesized)
gcgagcacattgcagccccaacggtggcccatcttcagcggagagcgagaaccattttggaaactgtaatgtaacttattttttcctttaacctcgtcatcattttctgtagggaaaaaa

SEQ ID NO: 6135 - DNA, 120 bp, Artificial Sequence
  ENSG00000006283_70 (sequence is synthesized)
ctcgtcatcattttctgtagggaaaaaaaaaagaaaaagaaaaaatgagattttacaagtgaaatggaacctttttatatatacatacatacatatctatctatctatctatatatatat

SEQ ID NO: 6136 - DNA, 120 bp, Artificial Sequence
  ENSG00000006283_71 (sequence is synthesized)
gagaacttccacaagtgtcggcagcaccaggaggaagaggaggcccggcggcgggaggagaagcgcctacgaagactggagaaaaagagaaggagtaaggagaagcagatggctgatcta

SEQ ID NO: 6137 - DNA, 120 bp, Artificial Sequence
  ENSG00000006283_72 (sequence is synthesized)
gcacaagtacaactttgacaaccttggccaggtgagccccaggctcagaggtggggctgtggtgaaggaggctggagggggcacagggccatgcttagtgatacctgctgactccggtgg

SEQ ID NO: 6138 - DNA, 120 bp, Artificial Sequence
  ENSG00000006283_73 (sequence is synthesized)
aggtgggctccacgaagagatcagcccttcacaccctctgctgtctaaccaccagcatgtcgcaaagcccagtccatcccacagtgccccaaaaagtgggcccatggggtctctagccgt

SEQ ID NO: 6139 - DNA, 120 bp, Artificial Sequence
  ENSG00000006283_74 (sequence is synthesized)
ccttaaagatgaagaaacagaggctcagagagggtaaggggcttgcccagggccacagagctacatggtggagcaggaagcacacgtggcagtgggggcaggcagccctggatgtgaatc

SEQ ID NO: 6140 - DNA, 120 bp, Artificial Sequence
  ENSG00000006283_75 (sequence is synthesized)
ctgtgcaaatcctgaccccaccattgtcagctcaatgacctggagcagctgacttaccagggcctcagtttcattaactggtgaatggagtcataatagaatctcctcggaggtcacaat

SEQ ID NO: 6141 - DNA, 120 bp, Artificial Sequence
  ENSG00000006283_76 (sequence is synthesized)
tcctcatcatctttttagctctcaggacaagtcctgtagagagggcatccatcatatagtaggagggacaccagatgcagagtcaggaggaaatccaaggtcaaggcgggacttaactgc

SEQ ID NO: 6142 - DNA, 120 bp, Artificial Sequence
  ENSG00000006283_77 (sequence is synthesized)
tattgggaccttgggcaagtcattctccatgaggcctccagcactgctctgggcctctgtttcttcatgggtaaaatgaatggttctcaacctgagatgataccacctctcccagagggc

SEQ ID NO: 6143 - DNA, 120 bp, Artificial Sequence
  ENSG00000006283_78 (sequence is synthesized)
atttggaaatgggaaagggtgattctggttttgattttttttaatagctttattgagacataactcacatatcattcaattcatccctttgaatgaatccagtggttttttaagcatgtt

SEQ ID NO: 6144 - DNA, 120 bp, Artificial Sequence
  ENSG00000006283_79 (sequence is synthesized)
tacagagttctgtttttttgtaaggacaaggggagtgcaattggcaatttgttactgggggaggggagagaagctaaacatcctgaaatgcttgcaaataaagaattattctacccaaaa

SEQ ID NO: 6145 - DNA, 120 bp, Artificial Sequence
  ENSG00000006283_80 (sequence is synthesized)
actcagcatgggctgattccaggacagaaagagcaaggcagggtggcaaaatgccatgaaagaagcatcatattttacagcagaggctgttgctggtagcctgtgggccaaatctgggca

SEQ ID NO: 6146 - DNA, 120 bp, Artificial Sequence
  ENSG00000006283_81 (sequence is synthesized)
tgttttattggtctacaacatgtttaacatgttttgaattagtgatgaatatttttaaactggtgaatttgggctgtgtgcagtggctcacacctgtaatgccagtgcattgggaggcct

SEQ ID NO: 6147 - DNA, 120 bp, Artificial Sequence
  ENSG00000006283_82 (sequence is synthesized)
gccaggagttggagaccagcctgggcatcatagcaagacccccagctctacaaaaaataaaaacaattagccgggtgtggtggtatcatctggagtcccagctgaggtgggaggatctct

SEQ ID NO: 6148 - DNA, 120 bp, Artificial Sequence
  ENSG00000006327_0 (sequence is synthesized)
cgtgggtccctgccggccggcggcgggcgcagacagcggcgggcgcaggacgtgcactatggctcggggctcgctgcgccggttgctgcggctcctcgtgctggggctctggctggcgtt

SEQ ID NO: 6149 - DNA, 120 bp, Artificial Sequence
  ENSG00000006327_1 (sequence is synthesized)
tcctcgtgctggggctctggctggcgttgctgcgctccgtggccggggagcaagcgccaggcaccgccccctgctcccgcggcagctcctggagcgcggacctggacaagtgcatggact

SEQ ID NO: 6150 - DNA, 120 bp, Artificial Sequence
  ENSG00000006327_2 (sequence is synthesized)
gcgcgtcttgcagggcgcgaccgcacagcgacttctgcctgggctgcgctgcagcacctcctgcccccttccggctgctttggcccatccttgggggcgctctgagcctgaccttcgtgc

SEQ ID NO: 6151 - DNA, 120 bp, Artificial Sequence
  ENSG00000006327_3 (sequence is synthesized)
tggggctgctttctggctttttggtctggagacgatgccgcaggagagagaagttcaccacccccatagaggagaccggcggagagggctgcccagctgtggcgctgatccagtgacaat

SEQ ID NO: 6152 - DNA, 120 bp, Artificial Sequence
  ENSG00000006327_4 (sequence is synthesized)
acgcggcgggagccaagctcctccaaccacaaggggggtggggggcggtgaatcacctctgaggcctgggcccagggttcaggggaaccttccaaggtgtctggttgccctgcctctggc

SEQ ID NO: 6153 - DNA, 120 bp, Artificial Sequence
  ENSG00000006327_5 (sequence is synthesized)
tccagaacagaaagggagcctcacgctggctcacacaaaacagctgacactgactaaggaactgcagcatttgcacaggggaggggggtgccctccttcctagaggccctgggggccagg

SEQ ID NO: 6154 - DNA, 120 bp, Artificial Sequence
  ENSG00000006327_6 (sequence is synthesized)
ctgacttggggggcagacttgacactaggccccactcactcagatgtcctgaaattccaccacgggggtcaccctggggggttagggacctatttttaacactagggggctggcccacta

SEQ ID NO: 6155 - DNA, 120 bp, Artificial Sequence
  ENSG00000006327_7 (sequence is synthesized)
ggagggctggccctaagatacagacccccccaactccccaaagcggggaggagatatttattttggggagagtttggaggggagggagaatttattaataaaagaatctttaactttaaa

SEQ ID NO: 6156 - DNA, 120 bp, Artificial Sequence
  ENSG00000006327_8 (sequence is synthesized)
cgtgcactatggctcggggctcgctgcgccggttgctgcggctcctcgtgctggggctctggctggcgttgctgcgctccgtggccggggagcaagcgccaggtacgcgggactccgggg

SEQ ID NO: 6157 - DNA, 120 bp, Artificial Sequence
  ENSG00000006327_9 (sequence is synthesized)
tcggggaaccccgggccggggctcgggagccggactgggtgtctggagaacagcgccgaactgggggaacaggcggatgtggggatctggggtcaggtggccttcaaacagctcgctccc

SEQ ID NO: 6158 - DNA, 120 bp, Artificial Sequence
  ENSG00000006327_10 (sequence is synthesized)
ggctgtgggaagttccatcactctccaagcttcattcacaatccgggcctcagtttctcccaccgtccaattggggttggggggggtcttcagttccacaagtccgaagtacttcgaatg

SEQ ID NO: 6159 - DNA, 120 bp, Artificial Sequence
  ENSG00000006327_11 (sequence is synthesized)
gagagagaaagtgagtgagggcgggatgtttagtctaggaaggggcacgcccccagcctggtccgtacagggtctaactagccccagtgatcgacgagttggggaggccgtcgagaggca

SEQ ID NO: 6160 - DNA, 120 bp, Artificial Sequence
  ENSG00000006327_12 (sequence is synthesized)
ctagggtctgtgccctctataccatgtggggtgcccccttccatccggtgacttcagtgcccagctatgcggggggagggactggggtcgggcccggtgcccaggagtgagtcacccgcc

SEQ ID NO: 6161 - DNA, 120 bp, Artificial Sequence
  ENSG00000006327_13 (sequence is synthesized)
ggcggcaggggggttgtggggacctgaccccccccacccccagcgtcccgcgctacgccctccctcccggagctgccgtgtcccggtcgggccgtgcggtcacctgtgaggaatgcgcgg

SEQ ID NO: 6162 - DNA, 120 bp, Artificial Sequence
  ENSG00000006327_14 (sequence is synthesized)
ggggaactcacctaaccttcccgagccttcgtttcctactctgcaaaatggagataacaagtctgcattttattatgtaactacgtcctaaggcaccgccccctgctcccgcggcagctc

SEQ ID NO: 6163 - DNA, 120 bp, Artificial Sequence
  ENSG00000006327_15 (sequence is synthesized)
ggttgctgcggctcctcgtgctggggctctggctggcgttgctgcgctccgtggccggggagcaagcgccagaccccagaatagccgagtcccgcccccagcctctgacccgaggccccc

SEQ ID NO: 6164 - DNA, 120 bp, Artificial Sequence
  ENSG00000006377_0 (sequence is synthesized)
attcgactcgtggcgtctgcatcaagtctgaaagcagacgcgcaactttcgcagaatccaccttaaaatctctgccttaaactgcaccagcccccaaaaaatccaaggggggaaagcagg

SEQ ID NO: 6165 - DNA, 120 bp, Artificial Sequence
  ENSG00000006377_1 (sequence is synthesized)
cggggggagagcagattcccccctccccctctcctctcccatccctcctccttcctcctccctttgagttaacaaggccccgctcactatatctctttatattaaatatatatatatatt

SEQ ID NO: 6166 - DNA, 81 bp, Artificial Sequence
  ENSG00000006377_2 (sequence is synthesized)
ggatccaaagagctaaggtggctgcagaggggagagcggcgcgagccaagtgggggagggtggaggaaacccgggagaagg

SEQ ID NO: 6167 - DNA, 120 bp, Artificial Sequence
  ENSG00000006377_3 (sequence is synthesized)
cgagccaagtgggggagggtggaggaaacccgggagaaggctttctccagcccccaaagtttttgatgatgaccatgactacgatggctgacggcttggaaggccaggactcgtccaaat

SEQ ID NO: 6168 - DNA, 120 bp, Artificial Sequence
  ENSG00000006377_4 (sequence is synthesized)
caggactcgtccaaatccgccttcatggagttcgggcagcagcagcagcagcagcagcaacagcagcagcagcagcagcagcaacagcaacagccgccgccgccgccgccgccgccgccg

SEQ ID NO: 6169 - DNA, 120 bp, Artificial Sequence
  ENSG00000006377_5 (sequence is synthesized)
agagctccccggccatggcaggcgcgcactaccctctgcactgcctgcactcggcggcggcggcggcagcggccggctcgcaccaccaccaccaccaccagcaccaccaccacggctcgc

SEQ ID NO: 6170 - DNA, 120 bp, Artificial Sequence
  ENSG00000006377_6 (sequence is synthesized)
cctacgcgtcgggcggagggaactcctacaaccaccgctcgctcgccgcctacccctacatgagccactcgcagcacagcccttacctccagtcctaccacaacagcagcgcagccgccc

SEQ ID NO: 6171 - DNA, 120 bp, Artificial Sequence
  ENSG00000006377_7 (sequence is synthesized)
agacgcgaggggacgacacagatcaacaaaaaactacagtgattgaaaacggggaaatcaggttcaatggaaaagggaaaaagattcggaagcctcggaccatttattccagcctgcagc

SEQ ID NO: 6172 - DNA, 120 bp, Artificial Sequence
  ENSG00000006377_8 (sequence is synthesized)
tccaggctttaaaccatcgctttcagcagacacagtatctggcccttccagagagagccgaactggcagcttccttaggactgacacaaacacaggtgaagatatggtttcagaacaaac

SEQ ID NO: 6173 - DNA, 120 bp, Artificial Sequence
  ENSG00000006377_9 (sequence is synthesized)
ctgaagcagggcagtaatcctcatgagagcgaccccctccagggctcggcggccctgtcgccacgctcgccagcgctgcctccagtctgggacgtttctgcctcggccaagggtgtcagt

SEQ ID NO: 6174 - DNA, 120 bp, Artificial Sequence
  ENSG00000006377_10 (sequence is synthesized)
atgccccccaacagctacatgcctggctattctcactggtactcctctccacaccaggacacgatgcagagaccacagatgatgtgagttgcccaagggaacaccctagggaaacgtctg

SEQ ID NO: 6175 - DNA, 120 bp, Artificial Sequence
  ENSG00000006377_11 (sequence is synthesized)
aacaaggaaaagaggatccgggacctgcttgtatctgcgaaaaggagccaaaggagcaggcttaggagagctcataagtgtggcaagaagccgactaggctcattctctctccctctctc

SEQ ID NO: 6176 - DNA, 120 bp, Artificial Sequence
  ENSG00000006377_12 (sequence is synthesized)
tctctctccctctcctttctttttacttcttcctttcctccattccttctttctttccttttcctttctacctttcttttctttttgcctttcaccttttttctcatttaccttctctct

SEQ ID NO: 6177 - DNA, 120 bp, Artificial Sequence
  ENSG00000006377_13 (sequence is synthesized)
tgagcaacgtcagtaattgatcttgcatctcagagagagagaaagagcatgtgtgagagagaaactggtttctatgccagcactcctgaaaccccttactgtaaggatattttctcttac

SEQ ID NO: 6178 - DNA, 120 bp, Artificial Sequence
  ENSG00000006377_14 (sequence is synthesized)
cccttgggatccaggctctgagtctcttctctttgggagtatccatcaaaatgactttttttaaaaacagattttcccccaaccagaagaatctgcacaaacttggcagcgtttttactt

SEQ ID NO: 6179 - DNA, 120 bp, Artificial Sequence
  ENSG00000006377_15 (sequence is synthesized)
gtttaatgagtttaagacattacatggtgaaagagaagcattttggactcctgcatttttatttaccattcccagactgacgagaaaaagaaaattcctcacataacagcccttctctaa

SEQ ID NO: 6180 - DNA, 120 bp, Artificial Sequence
  ENSG00000006377_16 (sequence is synthesized)
agaaaaaggaaaaagtggctgtaagattagaacattgctacaaagggaatgctgcatgttttatcaaaatgcaatgaccaggaatgatggttgattaaaaaaaaacaaaacaaaaaccac

SEQ ID NO: 6181 - DNA, 120 bp, Artificial Sequence
  ENSG00000006377_17 (sequence is synthesized)
tctttccccaccccacccccccaaaccctgaactggaatcaggaaagacggaggaaacaatcaaaatcaccattctattgctttgacacctttactaggtgaattggtggcattcacaaa

SEQ ID NO: 6182 - DNA, 120 bp, Artificial Sequence
  ENSG00000006377_18 (sequence is synthesized)
gctaatagggacgtttatatcaagaaacatttctgtatatattgttgaattttagttgtacatatactttgtatgtttttgtcttctttcatatatggagtaaaagccacaaaacgctga

SEQ ID NO: 6183 - DNA, 120 bp, Artificial Sequence
  ENSG00000006377_19 (sequence is synthesized)
cacattgttcgggccagggactgggtcaaggagattacgcagacgctgggagcacacgggcagagtggaccaagagaggtcggggcatcatagggatttttcgaggtaacccttattggg

SEQ ID NO: 6184 - DNA, 80 bp, Artificial Sequence
  ENSG00000006377_20 (sequence is synthesized)
gcccgctcgcctggcgcctgcctgccggcctctcccagccgggccccttcccgccgccgcggaccctcagcttccgacgc

SEQ ID NO: 6185 - DNA, 120 bp, Artificial Sequence
  ENSG00000006377_21 (sequence is synthesized)
ccgcggaccctcagcttccgacgcgcagttcgggctgagtcccgggcccggcgcaggcttcgttcgacgagttagtccacactgcgctctccagcctcctgggtctgtgcgcccttttcc

SEQ ID NO: 6186 - DNA, 120 bp, Artificial Sequence
  ENSG00000006377_22 (sequence is synthesized)
ttgctccttccctccaggctgtaacccacgtttgacccggctggggacatttctgggccggaactggggagcgtgttttgcttcccagcccacgctgggcaggcagtggcctactttgcg

SEQ ID NO: 6187 - DNA, 120 bp, Artificial Sequence
  ENSG00000006377_23 (sequence is synthesized)
tggggcgccccgtgctcctcagtgactcggagggaagctggcctggctttcgctctggttaaactagtaacagtcaggctctttccagtgggctttaaagtgtccctcaccttcatccct

SEQ ID NO: 6188 - DNA, 120 bp, Artificial Sequence
  ENSG00000006377_24 (sequence is synthesized)
gaccgggccccctatctagcttttcgctacagtgttggctgctcctttgttcgtggaggggaagcaaagaacctcgggctgatggttctcagcacccgagggggacaaagttgccgtgag

SEQ ID NO: 6189 - DNA, 120 bp, Artificial Sequence
  ENSG00000006377_25 (sequence is synthesized)
aggcgcagcctgctcgtgggctggtctgagctgttggttgtgttttgtttgaggatttggtcctcctcaggagagtcatttcaaaacatgccgaggatgcttgatgcactgagcttggag

SEQ ID NO: 6190 - DNA, 120 bp, Artificial Sequence
  ENSG00000006377_26 (sequence is synthesized)
gcttcaggtactgttaagccgggcacaggggccccgctccgcccggacagctgccgccttgctgcgctgcgcaccccagagagcctccggcaccgcctccgctgcggcaaagcgggctgt

SEQ ID NO: 6191 - DNA, 120 bp, Artificial Sequence
  ENSG00000006377_27 (sequence is synthesized)
ttgtctgagggcctctggcgctcccttggcccagacgctgcacattgttcgggccagggactgggtcaaggagattacgcagacgctgggagcacacgggcagagtggaccaagagaggt

SEQ ID NO: 6192 - DNA, 80 bp, Artificial Sequence
  ENSG00000006432_0 (sequence is synthesized)
cggcacggcgcggagaggagagcggcggccggctggcagcggcgggcaccggctgcgcgagcaggtaccggcggcagagg

SEQ ID NO: 6193 - DNA, 120 bp, Artificial Sequence
  ENSG00000006432_1 (sequence is synthesized)
gggcaggcggggactcggcccgctgcgcccctaggctgcgcgaagagctcgcgctcggcgctcttctcgtaccgcggtaacagcgccggcgagccggctctcccagccctgccagcccgg

SEQ ID NO: 6194 - DNA, 120 bp, Artificial Sequence
  ENSG00000006432_2 (sequence is synthesized)
gccctacctgcggccgccgtcgttgggggggggtcctcccagctctgcggaggcgcatgaacaataggcggcggcggctcctgcgggcggcggcggccccgcaccctatggatcggccgc

SEQ ID NO: 6195 - DNA, 120 bp, Artificial Sequence
  ENSG00000006432_3 (sequence is synthesized)
tccatggagccctccagagcgcttctcggctgcctagcgagcgccgccgctgccgccccgccgggggaggatggagcaggggccggggccgaggaggaggaggaggaggaggaggaggcg

SEQ ID NO: 6196 - DNA, 120 bp, Artificial Sequence
  ENSG00000006432_4 (sequence is synthesized)
gcggcggcggtgggccccggggagctgggctgcgacgcgccgctgccctactggacggccgtgttcgagtacgaggcggcgggcgaggacgagctgaccctgcggctgggcgacgtggtg

SEQ ID NO: 6197 - DNA, 120 bp, Artificial Sequence
  ENSG00000006432_5 (sequence is synthesized)
gaggtgctgtccaaggactcgcaggtgtccggcgacgagggctggtggaccgggcagctgaaccagcgggtgggcatcttccccagcaactacgtgaccccgcgcagcgccttctccagc

SEQ ID NO: 6198 - DNA, 120 bp, Artificial Sequence
  ENSG00000006432_6 (sequence is synthesized)
cgctgccagcccggcggcgaggaccccagttgctacccgcccattcagttgttagaaattgattttgcggagctcaccttggaagagattattggcatcgggggctttgggaaggtctat

SEQ ID NO: 6199 - DNA, 120 bp, Artificial Sequence
  ENSG00000006432_7 (sequence is synthesized)
cgtgctttctggataggggatgaggttgctgtgaaagcagctcgccacgaccctgatgaggacatcagccagaccatagagaatgttcgccaagaggccaagctcttcgccatgctgaag

SEQ ID NO: 6200 - DNA, 120 bp, Artificial Sequence
  ENSG00000006432_8 (sequence is synthesized)
caccccaacatcattgccctaagaggggtatgtctgaaggagcccaacctctgcttggtcatggagtttgctcgtggaggacctttgaatagagtgttatctgggaaaaggattccccca

SEQ ID NO: 6201 - DNA, 120 bp, Artificial Sequence
  ENSG00000006432_9 (sequence is synthesized)
gacatcctggtgaattgggctgtgcagattgccagagggatgaactacttacatgatgaggcaattgttcccatcatccaccgcgaccttaagtccagcaacatattgatcctccagaag

SEQ ID NO: 6202 - DNA, 120 bp, Artificial Sequence
  ENSG00000006432_10 (sequence is synthesized)
gtggagaatggagacctgagcaacaagattctgaagatcactgattttggcctggctcgggaatggcaccgaaccaccaagatgagtgcggcagggacgtatgcttggatggcacccgaa

SEQ ID NO: 6203 - DNA, 120 bp, Artificial Sequence
  ENSG00000006432_11 (sequence is synthesized)
gtcatccgggcctccatgttttccaaaggcagtgatgtgtggagctatggggtgctactttgggagttgctgactggtgaggtgccctttcgaggcattgatggcttagcagtcgcttat

SEQ ID NO: 6204 - DNA, 120 bp, Artificial Sequence
  ENSG00000006432_12 (sequence is synthesized)
ggagtggccatgaacaaactcgcccttcctattccttctacgtgcccagaaccttttgccaaactcatggaagactgctggaatcctgatccccactcacgaccatctttcacgaatatc

SEQ ID NO: 6205 - DNA, 120 bp, Artificial Sequence
  ENSG00000006432_13 (sequence is synthesized)
ctggaccagctaaccaccatagaggagtctggtttctttgaaatgcccaaggactccttccactgcctgcaggacaactggaaacacgagattcaggagatgtttgaccaactcagggcc

SEQ ID NO: 6206 - DNA, 120 bp, Artificial Sequence
  ENSG00000006432_14 (sequence is synthesized)
aaagaaaaggaacttcgcacctgggaggaggagctgacgcgggctgcactgcagcagaagaaccaggaggaactgctgcggcgtcgggagcaggagctggccgagcgggagattgacatc

SEQ ID NO: 6207 - DNA, 120 bp, Artificial Sequence
  ENSG00000006432_15 (sequence is synthesized)
ctggaacgggagctcaacatcatcatccaccagctgtgccaggagaagccccgggtgaagaaacgcaagggcaagttcaggaagagccggctgaagctcaaggatggcaaccgcatcagc

SEQ ID NO: 6208 - DNA, 120 bp, Artificial Sequence
  ENSG00000006432_16 (sequence is synthesized)
ctcccttctgatttccagcacaagttcacggtgcaggcctcccctaccatggataaaaggaagagtcttatcaacagccgctccagtcctcctgcaagccccaccatcattcctcgcctt

SEQ ID NO: 6209 - DNA, 120 bp, Artificial Sequence
  ENSG00000006432_17 (sequence is synthesized)
cgagccatccagttgacaccaggtgaaagcagcaaaacctggggcaggagctcagtcgtcccaaaggaggaaggggaggaggaggagaagagggccccaaagaagaagggacggacgtgg

SEQ ID NO: 6210 - DNA, 120 bp, Artificial Sequence
  ENSG00000006432_18 (sequence is synthesized)
acgcttggtcagaaggagcttgcctcgggagatgaaggatcccctcagagacgtgagaaagctaatggtttaagtaccccatcagaatctccacatttccacttgggcctcaagtccctg

SEQ ID NO: 6211 - DNA, 120 bp, Artificial Sequence
  ENSG00000006432_19 (sequence is synthesized)
gtagatggatataagcagtggtcgtccagtgcccccaacctggtgaagggcccaaggagtagcccggccctgccagggttcaccagccttatggagatggccttgctggcagccagttgg

SEQ ID NO: 6212 - DNA, 120 bp, Artificial Sequence
  ENSG00000006432_20 (sequence is synthesized)
gtggtgcccatcgacattgaagaggatgaggacagtgaaggcccagggagtggagagagtcgcctacagcattcacccagccagtcctacctctgtatcccattccctcgtggagaggat

SEQ ID NO: 6213 - DNA, 120 bp, Artificial Sequence
  ENSG00000006432_21 (sequence is synthesized)
ggcgatggcccctccagtgatggaatccatgaggagcccaccccagtcaactcggccacgagtacccctcagctgacgccaaccaacagcctcaagcggggcggtgcccaccaccgccgc

SEQ ID NO: 6214 - DNA, 120 bp, Artificial Sequence
  ENSG00000006432_22 (sequence is synthesized)
tgcgaggtggctctgctcggctgtggggctgttctggcagccacaggcctagggtttgacttgctggaagctggcaagtgccagctgcttcccctggaggagcctgagccaccagcccgg

SEQ ID NO: 6215 - DNA, 120 bp, Artificial Sequence
  ENSG00000006432_23 (sequence is synthesized)
gaggagaagaaaagacgggagggtctttttcagaggtccagccgtcctcgtcggagcaccagccccccatcccgaaagcttttcaagaaggaggagcccatgctgttgctaggagacccc

SEQ ID NO: 6216 - DNA, 120 bp, Artificial Sequence
  ENSG00000006432_24 (sequence is synthesized)
tctgcctccctgacgctgctctccctctcctccatctccgagtgcaactccacacgctccctgctgcgctccgacagcgatgaaattgtcgtgtatgagatgccagtcagcccagtcgag

SEQ ID NO: 6217 - DNA, 120 bp, Artificial Sequence
  ENSG00000006432_25 (sequence is synthesized)
gcccctcccctgagtccatgtacccacaaccccctggtcaatgtccgagtagagcgcttcaaacgagatcctaaccaatctctgactcccacccatgtcaccctcaccaccccctcgcag

SEQ ID NO: 6218 - DNA, 120 bp, Artificial Sequence
  ENSG00000006432_26 (sequence is synthesized)
cccagcagtcaccggcggactccttctgatggggcccttaagccagagactctcctagccagcaggagcccctccagcaatgggttgagccccagtcctggagcaggaatgttgaaaacc

SEQ ID NO: 6219 - DNA, 120 bp, Artificial Sequence
  ENSG00000006432_27 (sequence is synthesized)
cccagtcccagccgagacccaggtgaattcccccgtctccctgaccccaatgtggtcttccccccaaccccaaggcgctggaacactcagcaggactctaccttggagagacccaagact

SEQ ID NO: 6220 - DNA, 120 bp, Artificial Sequence
  ENSG00000006432_28 (sequence is synthesized)
ctggagtttctgcctcggccgcgtccttctgccaaccggcaacggctggacccttggtggtttgtgtcccccagccatgcccgcagcacctccccagccaacagctccagcacagagacg

SEQ ID NO: 6221 - DNA, 120 bp, Artificial Sequence
  ENSG00000006432_29 (sequence is synthesized)
cccagcaacctggactcctgctttgctagcagtagcagcactgtagaggagcggcctggacttccagccctgctcccgttccaggcagggccgctgcccccgactgagcggacgctcctg

SEQ ID NO: 6222 - DNA, 120 bp, Artificial Sequence
  ENSG00000006432_30 (sequence is synthesized)
gacctggatgcagaggggcagagtcaggacagcaccgtgccgctgtgcagagcggaactgaacacacacaggcctgccccttatgagatccagcaggagttctggtcttagcacgaaaag

SEQ ID NO: 6223 - DNA, 120 bp, Artificial Sequence
  ENSG00000006432_31 (sequence is synthesized)
gattggggcgggcaagggggacagccagcggagatgaggggagctggcgggcacagccctttctcagggttggaccccctgagatccagccctacttcttgcactgataatgcactttga

SEQ ID NO: 6224 - DNA, 120 bp, Artificial Sequence
  ENSG00000006432_32 (sequence is synthesized)
agatggaagggatggaaacagggccacttcagagggtctcctgccctgcagggcctttctacccgtgtccactggaggggctgtggccatcagctctggctgtgtaggggaggaaggggt

SEQ ID NO: 6225 - DNA, 120 bp, Artificial Sequence
  ENSG00000006432_33 (sequence is synthesized)
gcatgcatgtcccccaccctccacagtcttccttgcctttagagtgaccctgcagagtcactcagccaaatctgtctgctgctccctctcctcagccagttgggtgtgcgcagagctgtc

SEQ ID NO: 6226 - DNA, 120 bp, Artificial Sequence
  ENSG00000006432_34 (sequence is synthesized)
atagggtccctttgtcagccccgagttcagcttcccaaacaccagtgttggatattctgtgattgattttggtcctcctccgctgtcccccaacacccaggaatgggaatctggcttggt

SEQ ID NO: 6227 - DNA, 120 bp, Artificial Sequence
  ENSG00000006432_35 (sequence is synthesized)
tcgagataggagcttttctgtgtcctaagccctttcatgctagcaggaagactgaaagcaaggtggcccagtgtggggtcatagggcttgatagacctggcactgcctatctgcacttcc

SEQ ID NO: 6228 - DNA, 120 bp, Artificial Sequence
  ENSG00000006432_36 (sequence is synthesized)
aggtgccccacctatttatctgagcccacaggtggaaaggggaactgcctcagtgagaacggggggacggggatgttaggaaaaatacagtaaagttgcaatgaagaggttcatgaagta

SEQ ID NO: 6229 - DNA, 120 bp, Artificial Sequence
  ENSG00000006432_37 (sequence is synthesized)
aaaccagcaagtattgagggtacccatctagctacttggggtcaggacctcgtcagaccaggttcggatacaatcatctgctcatcccaggaatagtttcttgggggactcactcactgg

SEQ ID NO: 6230 - DNA, 120 bp, Artificial Sequence
  ENSG00000006432_38 (sequence is synthesized)
tgccagttctaagtcagagacaaaattccactgtctgttccttttgctgtctgaactttatgtgttactcccttcctttggtcttcactctaatccctggagtttgtgggcttttggtta

SEQ ID NO: 6231 - DNA, 120 bp, Artificial Sequence
  ENSG00000006432_39 (sequence is synthesized)
tgtttggttagtagatatcaccgcaatgccctagaacagctatgaagcagaataccatatggccacctggacattgggacttgggaattcactctcaactgggccatccatgttgtgatg

SEQ ID NO: 6232 - DNA, 120 bp, Artificial Sequence
  ENSG00000006432_40 (sequence is synthesized)
cccttgaagtaaaatggagccagcaggagtaccttctgtaaatgcatgtggcaaagtgctatttatagggtgcccagggagccgctgatgtacaataaccttgaggtcccccatactgaa

SEQ ID NO: 6233 - DNA, 120 bp, Artificial Sequence
  ENSG00000006432_41 (sequence is synthesized)
aactgaccaaggcctgtgcacaggtagcccctcatgctgggctctggaccatgagctgagtaggaaggatagcagaggccaaccctgaccttcctggaagttgtttccttaacttgaatg

SEQ ID NO: 6234 - DNA, 120 bp, Artificial Sequence
  ENSG00000006432_42 (sequence is synthesized)
ttgagcttcctctaaagctttctcgtgtatgtcttctccatgccactactctgaggcctcctgtgttatgtgtgaacagttgtctttatgtgggaatgacgacttgattgggagtagagt

SEQ ID NO: 6235 - DNA, 120 bp, Artificial Sequence
  ENSG00000006432_43 (sequence is synthesized)
ctcaaggtcattcccctcttccctcaagactctctgaatgctgctccactgtcttttgtcttggaggtcactcagcaggttccttgcatttgctgcctggatgtgcagctggcaacagtg

SEQ ID NO: 6236 - DNA, 120 bp, Artificial Sequence
  ENSG00000006432_44 (sequence is synthesized)
atgaattggtcactgctctttctctataactgggatagatgtcctgccttggggtcactaaaggggtgaccttgttccttgctttatgagcccattagcactttggttcaaggggcccac

SEQ ID NO: 6237 - DNA, 120 bp, Artificial Sequence
  ENSG00000006432_45 (sequence is synthesized)
caagtcttggacgggaaggcgctactggttttattgcccaaggttttgttattgcttctcttctgtgtccttctctttgttcagtgaagccaatatgtaagatactgtttttgtccccat

SEQ ID NO: 6238 - DNA, 120 bp, Artificial Sequence
  ENSG00000006432_46 (sequence is synthesized)
tcccctactcctgagctaggaggaaaaaatgtgaatcttaccagcagttccagccaaccaagtgattcttcttcattcttgatggggagaagtacatacaaagtttgttctgacagggcg

SEQ ID NO: 6239 - DNA, 120 bp, Artificial Sequence
  ENSG00000006432_47 (sequence is synthesized)
aaaaaaaaaaaaaaaaaaaaaaaagtctgttctgtggcctccttcccccgggccctccataacctcaggctaaaccatgagcacatctgtatatccttggctccactaaatggccctctt

SEQ ID NO: 6240 - DNA, 120 bp, Artificial Sequence
  ENSG00000006432_48 (sequence is synthesized)
atccttggctccactaaatggccctcttgtggccctccaaaccatgctgcctatacacagtgctctgtggtatgaagcagagatttttcctttgctcatttttaacttttgccattgtgg

SEQ ID NO: 6241 - DNA, 120 bp, Artificial Sequence
  ENSG00000006432_49 (sequence is synthesized)
taggttgcagccatctttctagatgtagtgtaactgatgtagtgtaactgaatgatggtcacctgccattgagtgagaggttgagtgccatccttacttgtccactgtggggaaagataa

SEQ ID NO: 6242 - DNA, 120 bp, Artificial Sequence
  ENSG00000006432_50 (sequence is synthesized)
agcaagcctgggtctttgctaaggaaataattgtacctgaaagaagcaaaagcagggctatccaaaggtgctactgtgagcatccatgaagaaggaacagttaccatctctcagctccta

SEQ ID NO: 6243 - DNA, 120 bp, Artificial Sequence
  ENSG00000006432_51 (sequence is synthesized)
cacacctggtctctgatgggcccctgactgctgcactctctcagtggggcaaggttggagatgggctaaggatctgtatagtagtagcaggtctcagtggctttctattcgctcaggttc

SEQ ID NO: 6244 - DNA, 120 bp, Artificial Sequence
  ENSG00000006432_52 (sequence is synthesized)
ccttgttctgtggtcctggtcgggagcaggccctggagctgtggatgaagccacttgagtggcagtagccggcccccctttcctctgccttccctttgcacaaagacacgttccttctgc

SEQ ID NO: 6245 - DNA, 120 bp, Artificial Sequence
  ENSG00000006432_53 (sequence is synthesized)
tcttggcaggtgctaacttcatggaagatggtaataggaacagatactgctctctgcccctgcttcttggattcttcagctcctaccgctgattcggattatccccttttgaccctcttg

SEQ ID NO: 6246 - DNA, 120 bp, Artificial Sequence
  ENSG00000006432_54 (sequence is synthesized)
gggatccagactgctgccaggaggctgagtagatacctcagttatctgtatgttatttctgagaggctttggcggatcctcttcacttggcatcctgtggcatccctagggtctggtggt

SEQ ID NO: 6247 - DNA, 120 bp, Artificial Sequence
  ENSG00000006432_55 (sequence is synthesized)
agcagtaatagcaacaatgatatcttacatctggacaactcagaatagtgctaacttttcctcctgacctttgcaaaatgacatcattttccttgtacatttgatacccttgctagtaga

SEQ ID NO: 6248 - DNA, 120 bp, Artificial Sequence
  ENSG00000006432_56 (sequence is synthesized)
gaaggggaaatgcttaaagatgaaaattcaagtgaagagaaatgaaaaagtggcttggactaattgctgagtgaggccactgggctcagaactgaacaggttggctgcattccccattct

SEQ ID NO: 6249 - DNA, 120 bp, Artificial Sequence
  ENSG00000006432_57 (sequence is synthesized)
gcttttgctgtgtggccataggcttgtctctttagcccctctcagatttccttcctttaaaagcaatcatcacatgctttcctctcaagggagttgggtgtatgtatcagagaaggtcag

SEQ ID NO: 6250 - DNA, 120 bp, Artificial Sequence
  ENSG00000006432_58 (sequence is synthesized)
tgaaacaccatagctccttgccagctcctagaggaagcttctttcatctatacaggatgaatcgctgaagttgagagtgtggctctcatcacctttgccttgagggaacttgccttttct

SEQ ID NO: 6251 - DNA, 120 bp, Artificial Sequence
  ENSG00000006432_59 (sequence is synthesized)
ttcgtcctttggcttctggaagaggagtgatttggaggtggttgagcatgactaatgggggccctggtcgggcccatgcccttctgccgcatttatatagcatctggtgttgacaagcat

SEQ ID NO: 6252 - DNA, 120 bp, Artificial Sequence
  ENSG00000006432_60 (sequence is synthesized)
tctttcctaattcccccacttaacttgtctgatgctgtctgccaatgtcatcctcaccacttgtgtcttacagagaaggaaatgggagagggaggttgtgtcttacagagaaggaaatga

SEQ ID NO: 6253 - DNA, 120 bp, Artificial Sequence
  ENSG00000006432_61 (sequence is synthesized)
gagagggaggttggtagcaacatcagagtgacagttggctgtctctcatttcttggggtcatcagtctgatttgtttagagcctgggatcatcccagttcctggaagaatctttggaaaa

SEQ ID NO: 6254 - DNA, 120 bp, Artificial Sequence
  ENSG00000006432_62 (sequence is synthesized)
gggtccccttgttcttgggacatgtgtcatggtcactaagccccctttccctcaggctactgttgctcagggacacaatgagataccccaaggacatctagacctgacttttcatgaact

SEQ ID NO: 6255 - DNA, 120 bp, Artificial Sequence
  ENSG00000006432_63 (sequence is synthesized)
ctcttgcctctgtggtccccacattggagacctccctccctcctccttcccttgtgtgaaggagacacctcccgagcaatcctaactcatccagctcacttttaacaaagcaaagagcag

SEQ ID NO: 6256 - DNA, 120 bp, Artificial Sequence
  ENSG00000006432_64 (sequence is synthesized)
agggcactgaagactggatggctgtgaatggtacaccttggggttgaaaccgtgttggcaggaacctggtgataaaagctgcctacttcctgggtgtgtgaatttgcacatatcttttcc

SEQ ID NO: 6257 - DNA, 120 bp, Artificial Sequence
  ENSG00000006432_65 (sequence is synthesized)
cctcactggacttcagaagcctactgtgaactggggacgatgctatctactttccctcctgaagcccttctaactttcaaatgtatggtcctggggccatgagtcctgcacagaaactgc

SEQ ID NO: 6258 - DNA, 120 bp, Artificial Sequence
  ENSG00000006432_66 (sequence is synthesized)
agccttgccagattgcttcccttggtgcagaaaagtgtgtgtgtgtgtgtgtgtgaaatatacgtacggttttacgtcaaaaacagtcgaatatcagctatttcatatggttcaccctaa

SEQ ID NO: 6259 - DNA, 120 bp, Artificial Sequence
  ENSG00000006432_67 (sequence is synthesized)
tgtacctgcctctctctttggctttaggtctgagaatgacttgtctttgtcaaggtatactattgttagaaacgcattaccaaatgcatctcttctgtcggatcagcgtattcctagatt

SEQ ID NO: 6260 - DNA, 120 bp, Artificial Sequence
  ENSG00000006432_68 (sequence is synthesized)
aggaattcaaattaatgaaaattcacatatgaaaggaaaatccattgctatttctggagaggacctcagtcctgggcttttccctggcattgctacctgggtgggtgctcaccactcagg

SEQ ID NO: 6261 - DNA, 120 bp, Artificial Sequence
  ENSG00000006432_69 (sequence is synthesized)
tgctggtgttggaaggcaggaggaggaagctgaaatcctgccgattaaggctaattaacagggtttaggtgcctaattatcatgactcagcccgggacttatggttagccgtgcaggcca

SEQ ID NO: 6262 - DNA, 120 bp, Artificial Sequence
  ENSG00000006432_70 (sequence is synthesized)
ggtgagtctcttatggacttcctctcagactgctctttctcattttgtcctgatgagatattgacagtcatgtccacccgcttcctcatccatttcccgtcttgggccctggaagtacgg

SEQ ID NO: 6263 - DNA, 120 bp, Artificial Sequence
  ENSG00000006432_71 (sequence is synthesized)
gggcctctgtaggctgcctagggagccctggctttgctcttcgtgttgggctcactccatgatcaggagccggtgggactggtccttcctgattcttactgtctgtggttccccatcccc

SEQ ID NO: 6264 - DNA, 120 bp, Artificial Sequence
  ENSG00000006432_72 (sequence is synthesized)
tacggggagcctgctttgggccttgagctggatagagagaagagctttggggcccagctggttataggagctgagcttttccacacctctctttgttaacccttggaaacagacctgcct

SEQ ID NO: 6265 - DNA, 120 bp, Artificial Sequence
  ENSG00000006432_73 (sequence is synthesized)
ttcacctgacccatcttcctacctgtctggtctgacctgccctctttgaaagcactcatcacctagttttactaggctgattggcagatgtggacatgacaggtgtctatcgagataggt

SEQ ID NO: 6266 - DNA, 120 bp, Artificial Sequence
  ENSG00000006432_74 (sequence is synthesized)
gtctaactagttaggtgtctcaggattggacagcagaataccattccaggggtgcacagacaggcctctcctaccggaacatgagggatagacgtctgggcattctgaacccagaggtca

SEQ ID NO: 6267 - DNA, 120 bp, Artificial Sequence
  ENSG00000006432_75 (sequence is synthesized)
gagtagtcacaagcggagccctggggagcgagggccccagggccgtggtgttccttgccctgcgctcactgaagtccaaggccaggtttcagaaatagtgtgctgcctgttcctgagatc

SEQ ID NO: 6268 - DNA, 120 bp, Artificial Sequence
  ENSG00000006432_76 (sequence is synthesized)
cttcacacctggacaccaacccagacaaagcctgacttaaaattttgatactgtattcatcgtggaatttttcaataactctgatttttaaaaaatactgcattgcaatatgatttacct

SEQ ID NO: 6269 - DNA, 120 bp, Artificial Sequence
  ENSG00000006432_77 (sequence is synthesized)
tgattactgaggctcttttttttttggcacccctttaaattttaacccaaggtgagggcctcactccactctatacccagccctgcctgcccctcacctggacctgtgagaggggcttag

SEQ ID NO: 6270 - DNA, 120 bp, Artificial Sequence
  ENSG00000006432_78 (sequence is synthesized)
gtaccactgtgaaatacgttttaaatttttacttgcccttcccctcaggtcctgagtgaggcagtggctctctggcggtgctcgcatttaaataggagtgtgtaggcttacagcaatgaa

SEQ ID NO: 6271 - DNA, 120 bp, Artificial Sequence
  ENSG00000006432_79 (sequence is synthesized)
acatctaggagcttttaactttggatctatacctgggtgtgacatttccttggtgttctctggctgcctttctggctctgcagccctgagggcacttgtgtgtgtgtgtgttctctggag

SEQ ID NO: 6272 - DNA, 120 bp, Artificial Sequence
  ENSG00000006432_80 (sequence is synthesized)
aagggaagtgattatggcagagaggctcctttagattctcctcttaaacctctttggaacatgtttgaattccagaagtgaatgaacttcattcattctctcgtccagatttcagaaggg

SEQ ID NO: 6273 - DNA, 120 bp, Artificial Sequence
  ENSG00000006432_81 (sequence is synthesized)
actaaagtgaacggaggctttttcactccctggcatgctaagagccacattccctagctctgtgcctgcacagtgagtcttcagaatttggcccatcacaccctctgctagtatcgtttc

SEQ ID NO: 6274 - DNA, 120 bp, Artificial Sequence
  ENSG00000006432_82 (sequence is synthesized)
caccaccctcctcatcctctgtcatctttatttcattctcatcgtttatctctacctccagttcagatgccatgctggctgtggctcttttcttcatcaccatcagagtgaggcaaagat

SEQ ID NO: 6275 - DNA, 120 bp, Artificial Sequence
  ENSG00000006432_83 (sequence is synthesized)
gtatcctggcctagttataaagacgaataatacatgataagaaatcattaatttttttccacgtggggggcggtgctgtcctagtgattcatatatatataatttttgactccttacaat

SEQ ID NO: 6276 - DNA, 120 bp, Artificial Sequence
  ENSG00000006432_84 (sequence is synthesized)
aattctgggatgtgggtattacccccatttaagaatgtggaaaccaaggctctgatggctctgtaatttgcccagggtcacacagctaggaagcaagttgctgatctgcttggttccaaa

SEQ ID NO: 6277 - DNA, 120 bp, Artificial Sequence
  ENSG00000006432_85 (sequence is synthesized)
gtcacctctctttttcctctgagcacatttctaagccactacttagaagctcttgagataaagttggcctagctcaggtccaccgaggttttgagattgccctttgcccaaggaggagtt

SEQ ID NO: 6278 - DNA, 120 bp, Artificial Sequence
  ENSG00000006432_86 (sequence is synthesized)
gtgtccttggctcacctgtcatctgcctgtgactggacttgaaccctcgcacgtctcagctgacatccttgatgctgctggctgccttcctcgccctgtttcctctccatgactccaggg

SEQ ID NO: 6279 - DNA, 120 bp, Artificial Sequence
  ENSG00000006432_87 (sequence is synthesized)
gtttgaagcacacaggagctggacatgtcaattctgtagctcttctcccaataccactgaaggccgtgagcctctctcctgtttccagcctgcaggtgccctgttgctgctcttcattcc

SEQ ID NO: 6280 - DNA, 120 bp, Artificial Sequence
  ENSG00000006432_88 (sequence is synthesized)
agcttctcctcacttttctctcagtctcttgagcttggaagccttattgtagcttgtgtctcctccctgggcacttgaggtcaggcttttgcctttttgtcacattgagccacatgcctt

SEQ ID NO: 6281 - DNA, 120 bp, Artificial Sequence
  ENSG00000006432_89 (sequence is synthesized)
tgatacacagttgtagcaaagaagggaggtgatgaacttgctcactttcttttctgatttccctccctactcatcctgcactccccaccgaaacccagatatcttatagtctaaggcttg

SEQ ID NO: 6282 - DNA, 120 bp, Artificial Sequence
  ENSG00000006432_90 (sequence is synthesized)
tagaggattaaggaaaggaattggagatgggttttacttagttcacagaaaagctttctttgggatttttcctcccccttagggcttttaagtctaggtgaagtgaaagttcacacatgt

SEQ ID NO: 6283 - DNA, 120 bp, Artificial Sequence
  ENSG00000006432_91 (sequence is synthesized)
gtttgtttggttgctctgtaattagctactagtttttatccctagaccttctctgctccagtgtcttgttcatgtgtcctgaccccgtgtccttgaattcccactttgctttgggattta

SEQ ID NO: 6284 - DNA, 120 bp, Artificial Sequence
  ENSG00000006432_92 (sequence is synthesized)
agttattgtatgttgtcaacaatatttaaagatgaaaaagtcctgaaggaaacttaccaggttctttcctttggcttttttttttttttctttcgaggtactgtaaattgttaactaggg

SEQ ID NO: 6285 - DNA, 120 bp, Artificial Sequence
  ENSG00000006432_93 (sequence is synthesized)
atgccaagcaggcttggttcaatggctaaacctcttattgtattacagtgtaatgctgatctcagcctggtctcaatgccagagcacacagagacttgaataaaactgttataacgatta

SEQ ID NO: 6286 - DNA, 120 bp, Artificial Sequence
  ENSG00000006432_94 (sequence is synthesized)
ctggaaaggcttcttcaagatgacatccacaccctgctgcaagcagtcatatctccagggactgtagaagtgaaattagtaacaaaagcctgctatccggcacttcagcatattatcatt

SEQ ID NO: 6287 - DNA, 120 bp, Artificial Sequence
  ENSG00000006432_95 (sequence is synthesized)
taatgcaaaatcagaaagtacagcaacttttatgtcaggacctctgaataccttaagagacgtgaagaacatcttaggagaaagaactctaaaagtcatctagtcaaaccccataatttt

SEQ ID NO: 6288 - DNA, 120 bp, Artificial Sequence
  ENSG00000006432_96 (sequence is synthesized)
cttttgggaggaattttgagcaggaaatgagggagcttctttctataaggacagtggatggaattaaaaaggggtatttgaggaagcgttgctgtggatcatatgaaacctttggatgct

SEQ ID NO: 6289 - DNA, 120 bp, Artificial Sequence
  ENSG00000006432_97 (sequence is synthesized)
caagaaaaataagagtcagactaatttgaatttactttaggatgccgtcttccttcccaccttaccgttgtttggacacagtactgtcctgggcttctaacataacactcaccatgaaat

SEQ ID NO: 6290 - DNA, 120 bp, Artificial Sequence
  ENSG00000006432_98 (sequence is synthesized)
catccagtgtgagactgtttcccaaattagctggggccagaacacacaggggcacctgtcccctgctctgtccagccaccgactggtccaggcttgctccatccataacttctgccacct

SEQ ID NO: 6291 - DNA, 120 bp, Artificial Sequence
  ENSG00000006451_0 (sequence is synthesized)
gtggcggctgctgcagagccgccaggaggagggtggatctccccagagcaaagcgtcggagtcctcctcctccttctcctcctcctcctcctcctcctccagccgcccaggctcccccgc

SEQ ID NO: 6292 - DNA, 120 bp, Artificial Sequence
  ENSG00000006451_1 (sequence is synthesized)
cacccgtcagactcctccttcgaccgctcccggcgcggggccttccaggcgacaaggaccgagtaccctccggccggagccacgcagccgcggcttccggagccctcggggcggcggact

SEQ ID NO: 6293 - DNA, 120 bp, Artificial Sequence
  ENSG00000006451_2 (sequence is synthesized)
ggctcgcggtgcagattcttcttaatcctttggtgaaaactgagacacaaaatggctgcaaataagcccaagggtcagaattctttggctttacacaaagtcatcatggtgggcagtggt

SEQ ID NO: 6294 - DNA, 120 bp, Artificial Sequence
  ENSG00000006451_3 (sequence is synthesized)
ggcgtgggcaagtcagctctgactctacagttcatgtacgatgagtttgtggaggactatgagcctaccaaagcagacagctatcggaagaaggtagtgctagatggggaggaagtccag

SEQ ID NO: 6295 - DNA, 120 bp, Artificial Sequence
  ENSG00000006451_4 (sequence is synthesized)
atcgatatcttagatacagctgggcaggaggactacgctgcaattagagacaactacttccgaagtggggaggggttcctctgtgttttctctattacagaaatggaatcctttgcagct

SEQ ID NO: 6296 - DNA, 120 bp, Artificial Sequence
  ENSG00000006451_5 (sequence is synthesized)
acagctgacttcagggagcagattttaagagtaaaagaagatgagaatgttccatttctactggttggtaacaaatcagatttagaagataaaagacaggtttctgtagaagaggcaaaa

SEQ ID NO: 6297 - DNA, 120 bp, Artificial Sequence
  ENSG00000006451_6 (sequence is synthesized)
aacagagctgagcagtggaatgttaactacgtggaaacatctgctaaaacacgagctaatgttgacaaggtattttttgatttaatgagagaaattcgagcgagaaagatggaagacagc

SEQ ID NO: 6298 - DNA, 120 bp, Artificial Sequence
  ENSG00000006451_7 (sequence is synthesized)
aaagaaaagaatggaaaaaagaagaggaaaagtttagccaagagaatcagagaaagatgctgcattttataatcaaagcccaaactcctttcttatcttgaccatactaataaatataat

SEQ ID NO: 6299 - DNA, 120 bp, Artificial Sequence
  ENSG00000006451_8 (sequence is synthesized)
ttataagcattgccattgaaggcttaattgactgaaattactttaacattttggaaattgttgtatatcactaaaagcatgaattggaactgcaatgaaagtcaaatttactttaaaaag

SEQ ID NO: 6300 - DNA, 120 bp, Artificial Sequence
  ENSG00000006451_9 (sequence is synthesized)
aaattaatatggcttcaccaagaagcaaagttcaacttatttcataattgcctacatttatcatggtcctgaatgtagcgtgtaagcttgtgtttcttgggcagtctttcttgaaattga

SEQ ID NO: 6301 - DNA, 120 bp, Artificial Sequence
  ENSG00000006451_10 (sequence is synthesized)
agaggtgaaatgggggtggggagtgggaggaaaggtgacttcctctggtgtttattataaagcttaaattttatatcattttaaaatgtcttggtcttctactgccttgaaaaatgacaa

SEQ ID NO: 6302 - DNA, 120 bp, Artificial Sequence
  ENSG00000006451_11 (sequence is synthesized)
tttttttaaccattattatgcaaaatttagaagaaaagttattggcatggttgttgcatatagttaaactgagagtaattcatctgtgaatctgctttaattacctggtgagtaacttag

SEQ ID NO: 6303 - DNA, 120 bp, Artificial Sequence
  ENSG00000006451_12 (sequence is synthesized)
aaaagtggtgtaaacttgtacatggaattttttgaatatgccttaatttagaaactgaaaaatatctggttatatcattctgggtgtgttcttactgacaccaggggtccgctgccccat

SEQ ID NO: 6304 - DNA, 120 bp, Artificial Sequence
  ENSG00000006451_13 (sequence is synthesized)
gtgtcctggtgagaaaatatatgcctggcacagcttttgtatagaaaattcttgagaagtaactgtccgctagaagtctgtccaaatttaaaatgtgtgccatattctggttcttgaaaa

SEQ ID NO: 6305 - DNA, 120 bp, Artificial Sequence
  ENSG00000006451_14 (sequence is synthesized)
taagattccagagctctttgatcgcttttaataaactgcaagttcattttaaatgaagggccagcatatatacttgcaagataattttcagctgcaaggattcagcaccagttatgtttg

SEQ ID NO: 6306 - DNA, 120 bp, Artificial Sequence
  ENSG00000006451_15 (sequence is synthesized)
aatgaaccctccttttctctgagattctggtccctggaaatccctttctgctagtggtgagcatgtaagtgttaagtttttaatctgggagcagggcataggaagaaaatgtcagtagtg

SEQ ID NO: 6307 - DNA, 120 bp, Artificial Sequence
  ENSG00000006451_16 (sequence is synthesized)
ctaatgcattttgcactagaacgcttcgggaaaatattcatgcttgccatctgttcatttctaaatttatattcataaagttacagtttgatacaggaattattaggagtaattcttttc

SEQ ID NO: 6308 - DNA, 120 bp, Artificial Sequence
  ENSG00000006451_17 (sequence is synthesized)
tgtttctgtttataatgaagaacactgtagctacattttcagaagttaacatcaagccatcaaacctgggtatagtgcagaaaacgtggcacacactgaccacacattaggctgtgtcac

SEQ ID NO: 6309 - DNA, 120 bp, Artificial Sequence
  ENSG00000006451_18 (sequence is synthesized)
cattgtgtggtgtacctgctggaagaattctagcatgctacttggggacataatttcagtgggaaatatgccactgaccgattttttttttttcctctttgcagtggggctaggacagtt

SEQ ID NO: 6310 - DNA, 120 bp, Artificial Sequence
  ENSG00000006451_19 (sequence is synthesized)
gattcaacaaagtatttttttcttttttctcagtcctaatttgaacaggtcaaagatgtgttcaggcattccaggtaacaggtgtgtatgtaaagttaaaaataggctttttaggaactc

SEQ ID NO: 6311 - DNA, 120 bp, Artificial Sequence
  ENSG00000006451_20 (sequence is synthesized)
actctttagatatttacatccagcttctcatgttaaatatttgtccttaaagggtttgagatgtacatctttcatttcgtatttctcataggctatgccatgtgcggaattcaagttacc

SEQ ID NO: 6312 - DNA, 120 bp, Artificial Sequence
  ENSG00000006451_21 (sequence is synthesized)
aatgtaacactggccagcgggcccagcaatctccatgtgtacttattacagtcttatttaaccaggggtcctaaccactaacattgtgactttgctttgagacctttcctctcctgggta

SEQ ID NO: 6313 - DNA, 120 bp, Artificial Sequence
  ENSG00000006451_22 (sequence is synthesized)
ctgaggtgctatgaagccaactgacaaagatgcatcacgtgtcttaggctgatgccactacccgatttgtttatttgcaatttgagccatttaaagaccaataaacttccttttttaaaa

SEQ ID NO: 6314 - DNA, 120 bp, Artificial Sequence
  ENSG00000006451_23 (sequence is synthesized)
gctacataaaagtcatttgcagcaactattcaatttccagaattaggttatacttgtgtttgtggttgttttcctgaggaaataatctaataatcagaaaagctaatatttatttgtgtt

SEQ ID NO: 6315 - DNA, 120 bp, Artificial Sequence
  ENSG00000006451_24 (sequence is synthesized)
ggtgtgtccgggcggcggcgggccgaggccctgacgcgggttcgggctgccgagattgcacatcccacgttctgcccggggacgagctgcgagatgagcccggctggaatccggggcacc

SEQ ID NO: 6316 - DNA, 120 bp, Artificial Sequence
  ENSG00000006451_25 (sequence is synthesized)
gcgttcgccgctgtggggcgagtgagcccccgagagtgagcggctgcggagaggtcccctgcgcccggcagccggtctcagttggcctcgtccgaaggtcaccccgcacctttcgtccac

SEQ ID NO: 6317 - DNA, 120 bp, Artificial Sequence
  ENSG00000006451_26 (sequence is synthesized)
ggcgcccaagttcccgcccgggcggtgcccgcgacctggggcaacccgctgccgccgcagtccccgcgcctcactccacccctctcccctccttccctttctttccactccttgcctgtg

SEQ ID NO: 6318 - DNA, 120 bp, Artificial Sequence
  ENSG00000006451_27 (sequence is synthesized)
gtttgtttgtgtttttttttttttttgccagttaaaggaatggtttttcagacttaaagtcattagactctccgcactgaactgaatacctggccttgggcgcttgcacagctttagccc

SEQ ID NO: 6319 - DNA, 120 bp, Artificial Sequence
  ENSG00000006453_0 (sequence is synthesized)
ctctggcggcgtccggccgcttctcctctgctcctcgaagaaggccagggcggcgctgccgcaagttttgacattttcgcagcggagacgcgcgcgggcactctcgggccgacggctgcg

SEQ ID NO: 6320 - DNA, 80 bp, Artificial Sequence
  ENSG00000006453_1 (sequence is synthesized)
gcggcggccgaccctccagagccccttagtcgcgccccggccctcccgctgcccggagtccggcggccacgaggcccagc

SEQ ID NO: 6321 - DNA, 120 bp, Artificial Sequence
  ENSG00000006453_2 (sequence is synthesized)
gtcccgggggcccgaggaggtgaaccggctcacggagagcacctaccggaatgttatggaacagttcaatcctgggctgcgaaatttaataaacctggggaaaaattatgagaaagctgt

SEQ ID NO: 6322 - DNA, 120 bp, Artificial Sequence
  ENSG00000006453_3 (sequence is synthesized)
aaacgctatgatcctggcaggaaaagcctactacgatggagtggccaagatcggtgagattgccactgggtcccccgtgtcaactgaactgggacatgtcctcatagagatttcaagtac

SEQ ID NO: 6323 - DNA, 120 bp, Artificial Sequence
  ENSG00000006453_4 (sequence is synthesized)
ccacaagaaactcaacgagagtcttgatgaaaattttaaaaaattccacaaagagattatccatgagctggagaagaagatagaacttgacgtgaaatatatgaacgcaactctaaaaag

SEQ ID NO: 6324 - DNA, 120 bp, Artificial Sequence
  ENSG00000006453_5 (sequence is synthesized)
ataccaaacagaacacaagaataaattagagtctttggagaaatcccaagctgagttgaagaagatcagaaggaaaagccaaggaagccgaaacgcactcaaatatgaacacaaagaaat

SEQ ID NO: 6325 - DNA, 120 bp, Artificial Sequence
  ENSG00000006453_6 (sequence is synthesized)
tgagtatgtggagaccgttacttctcgtcagagtgaaatccagaaattcattgcagatggttgcaaagaggctctgcttgaagagaagaggcgcttctgctttctggttgataagcactg

SEQ ID NO: 6326 - DNA, 120 bp, Artificial Sequence
  ENSG00000006453_7 (sequence is synthesized)
tggctttgcaaaccacatacattattatcacttacagtctgcagaactactgaattccaagctgcctcggtggcaggagacctgtgttgatgccatcaaagtgccagagaaaatcatgaa

SEQ ID NO: 6327 - DNA, 120 bp, Artificial Sequence
  ENSG00000006453_8 (sequence is synthesized)
tatgatcgaagaaataaagaccccagcctctacccccgtgtctggaactcctcaggcttcacccatgatcgagagaagcaatgtggttaggaaagattacgacaccctttctaaatgctc

SEQ ID NO: 6328 - DNA, 120 bp, Artificial Sequence
  ENSG00000006453_9 (sequence is synthesized)
accaaagatgccccccgctccttcaggcagagcatataccagtcccttgatcgatatgtttaataacccagccacggctgccccgaattcacaaagggtaaataattcaacaggtacttc

SEQ ID NO: 6329 - DNA, 120 bp, Artificial Sequence
  ENSG00000006453_10 (sequence is synthesized)
cgaagatcccagtttacagcgatcagtttcggttgcaacgggactgaacatgatgaagaagcagaaagtgaagaccatcttcccgcacactgcgggctccaacaagaccttactcagctt

SEQ ID NO: 6330 - DNA, 120 bp, Artificial Sequence
  ENSG00000006453_11 (sequence is synthesized)
tgcacagggagatgtcatcacgctgctcatccccgaggagaaggatggctggctctatggagaacacgacgtgtccaaggcgaggggttggttcccgtcgtcgtacacgaagttgctgga

SEQ ID NO: 6331 - DNA, 120 bp, Artificial Sequence
  ENSG00000006453_12 (sequence is synthesized)
agaaaatgagacagaagcagtgaccgtgcccacgccaagccccacaccagtgagaagcatcagcaccgtgaacttgtctgagaatagcagtgttgtcatccccccacccgactacttgga

SEQ ID NO: 6332 - DNA, 120 bp, Artificial Sequence
  ENSG00000006453_13 (sequence is synthesized)
atgcttgtccatgggggcagctgccgacaggagagcagattcggccaggacgacatccacctttaaggccccagcgtccaagcccgagaccgcggctcctaacgatgccaacgggactgc

SEQ ID NO: 6333 - DNA, 120 bp, Artificial Sequence
  ENSG00000006453_14 (sequence is synthesized)
aaagccgccttttctcagcggagaaaacccctttgccactgtgaaactccgcccgactgtgacgaatgatcgctcggcacccatcattcgatgagaggacagccaaggactctcccgggc

SEQ ID NO: 6334 - DNA, 120 bp, Artificial Sequence
  ENSG00000006453_15 (sequence is synthesized)
acgtgctgacggtcgggaagcttcagtggagaggcctaactctaatgtcgcctgcttaagcaaatcatgcttctctgtttcacgtagttgggttgacaagtttctgcctttaagataaat

SEQ ID NO: 6335 - DNA, 120 bp, Artificial Sequence
  ENSG00000006453_16 (sequence is synthesized)
gagtaatagtctaatgaccagctcagccatttaaaatattttcttcctattctgttcaagaaacagtaaacttggtttcaatctttactgtattttttaaatgaattttttccttaataa

SEQ ID NO: 6336 - DNA, 120 bp, Artificial Sequence
  ENSG00000006453_17 (sequence is synthesized)
cagccagaataagggatagtctatgctttcaggactggctttctgcacctgatatgaatgagaccagttttattttataaagcatgtgctcttaatagcattatgtctaaagaagatatc

SEQ ID NO: 6337 - DNA, 120 bp, Artificial Sequence
  ENSG00000006453_18 (sequence is synthesized)
acgtaagtttgcatcttagcatgcaaatcataattttaagcaatataaattatgaaaatactatataaatgtaatttaacttaaaatgtttaagtgtagagcttccagagatggagaaac

SEQ ID NO: 6338 - DNA, 120 bp, Artificial Sequence
  ENSG00000006453_19 (sequence is synthesized)
ccccaccctccctccaaccacgccagagctgtagagtgctaagacgctttgcctgcccttatcacagccacacgtagcactcgacgaaatctcctccgagagctccttttcttggtagtt

SEQ ID NO: 6339 - DNA, 120 bp, Artificial Sequence
  ENSG00000006453_20 (sequence is synthesized)
aggagtcgccaacggattcgctgcacacggcccatccaggacacaggcctgggcgtcggagtcacggctccttgtgttctcactcagctagttggccaaagctgcatccattaccagtac

SEQ ID NO: 6340 - DNA, 120 bp, Artificial Sequence
  ENSG00000006453_21 (sequence is synthesized)
actcaaactgctcggggtcctggtttctccgtgtttgaatcaggtacagactctcaaaggatacgtgtaaagccaggatgacctctggtgcctggagaagggcgggtttttcagcctagc

SEQ ID NO: 6341 - DNA, 120 bp, Artificial Sequence
  ENSG00000006453_22 (sequence is synthesized)
agccatgatgccctcggaacctggccctatggtatggatgtgaggactacgcactggctgccctgagcccggggctggaaatcatctttggctgccaaggatctggacctattttggagt

SEQ ID NO: 6342 - DNA, 120 bp, Artificial Sequence
  ENSG00000006453_23 (sequence is synthesized)
tctttggctgccaaggatctggacctattttggagtggagagtcatggttaaaattcccagcccggcccaggtacgggaatcccagcattttgtgaggccgaggcagggggatcacctga

SEQ ID NO: 6343 - DNA, 79 bp, Artificial Sequence
  ENSG00000006453_24 (sequence is synthesized)
atcatgctgctgcactccagcccggccgctcaccgtgtgtgttgctgggtgctggggctgtgacttatcccctctcctt

SEQ ID NO: 6344 - DNA, 120 bp, Artificial Sequence
  ENSG00000006453_25 (sequence is synthesized)
tgttgctgggtgctggggctgtgacttatcccctctcctttagccttgccataagtgtagtatcctatgaggctgagattgggaaaggttacatgcaggtaagccagtggacgtggccga

SEQ ID NO: 6345 - DNA, 120 bp, Artificial Sequence
  ENSG00000006453_26 (sequence is synthesized)
tgcttcaggctccttccagccaggtccagcagtgttaccatctgcttctcctgggaggacaaaccaggcacccccaccatgaaggggctgcaggcaccatgaactatgttaacaacccca

SEQ ID NO: 6346 - DNA, 120 bp, Artificial Sequence
  ENSG00000006453_27 (sequence is synthesized)
gtctgtactacagaaagggctgcagccacatgagaattcagtccacacaagccccatggccgtgttccccacttcagccacagggctcagggagccccatctggcgctaaggggaactgc

SEQ ID NO: 6347 - DNA, 120 bp, Artificial Sequence
  ENSG00000006453_28 (sequence is synthesized)
tggggtgtgggtgacacctggcctttggcgttctgccttggggaggtttctggttttgttacggggtggaagaataggacctgggggtctcggatgcaacctgcagaccccgtggctcac

SEQ ID NO: 6348 - DNA, 120 bp, Artificial Sequence
  ENSG00000006453_29 (sequence is synthesized)
ccaaccccaggttctgcctcccagaccagaacgggcatggcctggtccttggcaccgaggtgcctgctctgtaaatatcaagggattacaactttaataataaagcagaacttgaaaaca

SEQ ID NO: 6349 - DNA, 120 bp, Artificial Sequence
  ENSG00000006453_30 (sequence is synthesized)
agatgtattaaataaaaccaatatggaaaaaaaaaggggtaatccaaatcaaattaatgttatacatacaacatatattgctttttagctaggcatggtggtgcacacttctagtcacag

SEQ ID NO: 6350 - DNA, 120 bp, Artificial Sequence
  ENSG00000006453_31 (sequence is synthesized)
ctttttagctaggcatggtggtgcacacttctagtcacagctactcggatgctgaggcagggggattgcttgagcccatgagttcgaggctgctgtgagctatgatcgcaccactgcact

SEQ ID NO: 6351 - DNA, 120 bp, Artificial Sequence
  ENSG00000006453_32 (sequence is synthesized)
gcgtttctggagcagtggacctgtctgccctgagctctcaccaggttgttcagggaggttgccgtccacatgtctactgctgatagggtcttttctccctctttgccggtaggaggggtt

SEQ ID NO: 6352 - DNA, 120 bp, Artificial Sequence
  ENSG00000006453_33 (sequence is synthesized)
ggttcttcctccttccccgtgtgtctccccctcctctcctggcccttctccgcctcccctgtcccttctcctccccgtcccttctcctcttccctgaccctcagagctctggagaccacc

SEQ ID NO: 6353 - DNA, 120 bp, Artificial Sequence
  ENSG00000006453_34 (sequence is synthesized)
ccccatcccctgaccagctacacattttacaactagtgcacttaagttggggaggggtctgttgtgcgtcggtggggcccacgtcctcctcccaacttcttggaatcagtgacccgtgct

SEQ ID NO: 6354 - DNA, 120 bp, Artificial Sequence
  ENSG00000006453_35 (sequence is synthesized)
aagctcgagtttcctctaagaaaagaaagcgcccaagaatgtgggggtgaaactcccctgtaattaggatcgccagaatgttatggaacagttcaatcctgggctgcgaaatttaataaa

SEQ ID NO: 6355 - DNA, 120 bp, Artificial Sequence
  ENSG00000006453_36 (sequence is synthesized)
atccactctgaaactggcatcaggagcaagctgagccttctctggactttcagcacctgctgctgaaggttccccggggctggtcagagacgaggatctcatggggctgtcccttggctg

SEQ ID NO: 6356 - DNA, 120 bp, Artificial Sequence
  ENSG00000006453_37 (sequence is synthesized)
gagggcctccaccccggcaccactctcaacacaggtcttacctcctgagagccacacctgccacagcccaaaccttcctgcagccagaagggaccagggggtgtttggaagaaaacttgt

SEQ ID NO: 6357 - DNA, 120 bp, Artificial Sequence
  ENSG00000006459_0 (sequence is synthesized)
agtcggcgagcggagtagcgagcgagcgtgtgtgtgttttttaaagatggccggagcggcggcggcggtggccgcgggagcagcagctggagccgccgcggcagccgtgtcggtggcggc

SEQ ID NO: 6358 - DNA, 120 bp, Artificial Sequence
  ENSG00000006459_1 (sequence is synthesized)
tcccggccgggcctcggcgcctccgccgcccccgcccgtgtactgtgtgtgccggcagccgtacgacgtgaaccgcttcatgatcgagtgcgatatctgcaaggactggttccacggcag

SEQ ID NO: 6359 - DNA, 120 bp, Artificial Sequence
  ENSG00000006459_2 (sequence is synthesized)
ctgtgttggagtagaagaacatcatgctgttgacattgacctgtatcactgtcccaactgtgcagttttacatggttcctccttgatgaaaaaaaggaggaactggcacagacatgacta

SEQ ID NO: 6360 - DNA, 120 bp, Artificial Sequence
  ENSG00000006459_3 (sequence is synthesized)
cacagaaattgatgatggttccaaaccagtgcaagctggaactagaactttcattaaggaattacgctctcgagtcttcccaagtgccgatgaaataattataaagatgcatggcagcca

SEQ ID NO: 6361 - DNA, 120 bp, Artificial Sequence
  ENSG00000006459_4 (sequence is synthesized)
gctgacacaaagatatctggagaaacatggatttgatgtccctattatggtcccaaaattagatgatctaggactcaggctcccttcacctacattttctgtgatggatgtggaacgtta

SEQ ID NO: 6362 - DNA, 120 bp, Artificial Sequence
  ENSG00000006459_5 (sequence is synthesized)
tgtaggtggtgacaaagtgatagatgtcattgatgtggcgaggcaggcagacagcaaaatgacacttcacaattatgttaaatacttcatgaatcctaacagaccaaaagtgttaaatgt

SEQ ID NO: 6363 - DNA, 120 bp, Artificial Sequence
  ENSG00000006459_6 (sequence is synthesized)
gatcagccttgaattttcagatacaaagatgtctgaattggtggaggtccctgatatagccaaaaaactttcctgggtggaaaattattggccagatgattcagtctttcccaagccatt

SEQ ID NO: 6364 - DNA, 120 bp, Artificial Sequence
  ENSG00000006459_7 (sequence is synthesized)
tgttcagaaatattgcttaatgggagttcaagacagctatacagatttccacattgacttcggtggaacttcagtctggtaccatgtcctctggggtgagaagattttttatttaataaa

SEQ ID NO: 6365 - DNA, 120 bp, Artificial Sequence
  ENSG00000006459_8 (sequence is synthesized)
gccaacagatgaaaatttggcacgttatgaatcttggagttcatctgtgacccagagtgaggtgttctttggagataaggtggataaatgctacaaatgtgtggtaaagcagggacatac

SEQ ID NO: 6366 - DNA, 120 bp, Artificial Sequence
  ENSG00000006459_9 (sequence is synthesized)
cttatttgttcctacagggtggatccatgctgtgctcacttctcaggactgtatggcttttggggggaacttcctgcacaaccttaacattggcatgcagctcaggtgttatgagatgga

SEQ ID NO: 6367 - DNA, 120 bp, Artificial Sequence
  ENSG00000006459_10 (sequence is synthesized)
gaaaaggctaaaaacaccagatcttttcaaattccctttctttgaagccatatgttggtttgtagccaaaaacttgctggaaaccctgaaagaactgagagaagatggtttccagcctca

SEQ ID NO: 6368 - DNA, 120 bp, Artificial Sequence
  ENSG00000006459_11 (sequence is synthesized)
aacttacctagtacagggagtgaaagcactgcatactgctttaaaattatggatgaaaaaagaacttgtatctgaacatgcctttgaaattccagacaatgttagacctggacaccttat

SEQ ID NO: 6369 - DNA, 120 bp, Artificial Sequence
  ENSG00000006459_12 (sequence is synthesized)
taaagaactttctaaagtaattcgagcaatagaggaggaaaacggcaaaccagttaaatctcagggaattcctattgtgtgtccagtttcacgatcctcaaatgaagcaacttccccata

SEQ ID NO: 6370 - DNA, 120 bp, Artificial Sequence
  ENSG00000006459_13 (sequence is synthesized)
ccattcccgaagaaagatgaggaaacttcgagatcataatgtccgaactccttctaacctagacatcctagagctccacacaagggaggtcctcaaaagattagagatgtgtccatggga

SEQ ID NO: 6371 - DNA, 120 bp, Artificial Sequence
  ENSG00000006459_14 (sequence is synthesized)
agaggacatcttgagctctaaactgaatggaaaattcaacaaacatctccaaccatcctccacagtacctgaatggagagcgaaagataatgatctacgattactgctgacaaatggaag

SEQ ID NO: 6372 - DNA, 120 bp, Artificial Sequence
  ENSG00000006459_15 (sequence is synthesized)
aataattaaagatgaaaggcagccctttgcagatcaaagtctttatacagcagatagtgaaaatgaagaggataaaagaaggacaaaaaaggcaaaaatgaagatagaagagagttcagg

SEQ ID NO: 6373 - DNA, 120 bp, Artificial Sequence
  ENSG00000006459_16 (sequence is synthesized)
agtagagggagtggaacatgaagaatctcaaaaaccactgaatgggttttttacacgtgtgaaatcagaactcaggagtagatcatcaggatattctgatatttctgagtcagaagactc

SEQ ID NO: 6374 - DNA, 120 bp, Artificial Sequence
  ENSG00000006459_17 (sequence is synthesized)
cggacccgagtgcactgcactgaaaagtatctttaccactgaagagtctgaaagttcaggtgatgaaaagaaacaagaaataacatccaactttaaggaggaatctaatgtgatgaggaa

SEQ ID NO: 6375 - DNA, 120 bp, Artificial Sequence
  ENSG00000006459_18 (sequence is synthesized)
cttccttcaaaagagccagaagccatctagaagtgaaattccaattaaaagggaatgtcctacctcgacgagcacagaggaagaagctattcagggcatgctgtctatggcagggttgca

SEQ ID NO: 6376 - DNA, 120 bp, Artificial Sequence
  ENSG00000006459_19 (sequence is synthesized)
ctattccacgtgtttacaaaggcaaatacaaagcacagactgcagtggtgaaagaaactctctccaggatcccagcagctgccatggcagtaaccatgaggttaggcagttgtatcgcta

SEQ ID NO: 6377 - DNA, 120 bp, Artificial Sequence
  ENSG00000006459_20 (sequence is synthesized)
tgataaaccagtggaatgtggataccatgtcaagactgaagatccagacttgaggacttcctcctggattaaacagtttgatacttccagatttcatcctcaggatctaagtagaagcca

SEQ ID NO: 6378 - DNA, 120 bp, Artificial Sequence
  ENSG00000006459_21 (sequence is synthesized)
gaaatgcatcagaaaggaaggttcatcagaaattagtcagagggtacaaagtaggaattatgtggacagcagcggctcaagccttcagaatggaaagtatatgcagaattcaaacctgac

SEQ ID NO: 6379 - DNA, 120 bp, Artificial Sequence
  ENSG00000006459_22 (sequence is synthesized)
ttcgggggcgtgccagataagtaatggcagtctaagcccagaaaggccagttggtgaaacttccttctcggtgccccttcaccccaccaagagaccggcatcaaatccaccacctatcag

SEQ ID NO: 6380 - DNA, 120 bp, Artificial Sequence
  ENSG00000006459_23 (sequence is synthesized)
caaccaggcaacaaaaggtaaacgtccaaaaaaaggaatggcaacagccaaacaacgtcttgggaagatccttaagttgaacagaaatggccatgcacgtttctttgtgtgacagagctg

SEQ ID NO: 6381 - DNA, 120 bp, Artificial Sequence
  ENSG00000006459_24 (sequence is synthesized)
ctgttgcagccattcttccctttggagaccagtctaggggtgcaggagcctggagcttccgctgtccccctgcctggagcagtttgtgtgtatagtaagaacactgcccgaagaacagaa

SEQ ID NO: 6382 - DNA, 120 bp, Artificial Sequence
  ENSG00000006459_25 (sequence is synthesized)
tgaacctgatgctgcattttcactgtgccacacccactcagcaataaccattttggacctggtgggggagaggaagaaggagggtagaaccttaaaaagagaccttgaactggaaagggt

SEQ ID NO: 6383 - DNA, 120 bp, Artificial Sequence
  ENSG00000006459_26 (sequence is synthesized)
ctcttgtcagggcttgaattttattttgttgttggtagtgtcttgatgtattttcagtggtagggtaaagaattatcaataatttatttaacagatttttttttaaagttaacagctttt

SEQ ID NO: 6384 - DNA, 120 bp, Artificial Sequence
  ENSG00000006459_27 (sequence is synthesized)
aaattctttttttaaagctatttatttggaagatttctggagaaatatctcactaatttagatgtaagaatgtgaaggtttttaaattatttttgatagtgtgtgtgttacatgtgggga

SEQ ID NO: 6385 - DNA, 120 bp, Artificial Sequence
  ENSG00000006459_28 (sequence is synthesized)
agggccacagtaacagtaactagtctggactcttaaatttgatattcaggttaaagtcttaaacagggatttgatgcattaattattttaaattaagatgtatatgaaaatcattttatt

SEQ ID NO: 6386 - DNA, 120 bp, Artificial Sequence
  ENSG00000006459_29 (sequence is synthesized)
ttatatatttcatgtgttttttataagctattagcttcgcttttgctaacatccaaggtgcatactgttatccaggttgattaccttatatcccaccttccctctgcactccccatcatt

SEQ ID NO: 6387 - DNA, 120 bp, Artificial Sequence
  ENSG00000006459_30 (sequence is synthesized)
ttgtgatgacccagtaagactcttctctttgcagggaaacactttcgtagccaatgtgtaagaactccatgaaagatccctcatttctcatttcgtttgacattgtgattttcttctcaa

SEQ ID NO: 6388 - DNA, 120 bp, Artificial Sequence
  ENSG00000006459_31 (sequence is synthesized)
cattaaaaaaaataggcttttgcattttcatttctgctgatgatatctgggtcccaaagagagcagctttaatatatttttcctacttgtgggaaaagtattataagtttggttaaattg

SEQ ID NO: 6389 - DNA, 120 bp, Artificial Sequence
  ENSG00000006459_32 (sequence is synthesized)
tcatgtttatagtttttccaagtacatttgtaactacagcaggccttcttcgtactgctgctgttggacaacaggactggcacctgctgcagaggttataccttatgatacttttatgct

SEQ ID NO: 6390 - DNA, 120 bp, Artificial Sequence
  ENSG00000006459_33 (sequence is synthesized)
ccatacctgatttgttgggaaatgttatttaggatattcaaatctgcatcataagccgtaatataataggattaatactacattaagttgtatagaagcaagcatgttggaatagatctt

SEQ ID NO: 6391 - DNA, 120 bp, Artificial Sequence
  ENSG00000006459_34 (sequence is synthesized)
ttgtgtgtatttactttttttatttcttaattttctaaagaattacttaagatatggatttggagtaaaatgggtgcttttggcagtttcttccatctatcctaacctgaccagtacata

SEQ ID NO: 6392 - DNA, 120 bp, Artificial Sequence
  ENSG00000006459_35 (sequence is synthesized)
ttgaggttaagtatctggttaaactttaaggtattcatttatctcctttatgtatgatttttactaaatgccagttttcatttgcttatagtagcttctattttcccttttttccatcca

SEQ ID NO: 6393 - DNA, 120 bp, Artificial Sequence
  ENSG00000006459_36 (sequence is synthesized)
tggcataaaaataagtgatttctgggggtggggcagaaatgttcccaagtctgacaatagagcattttacaaattcctacaaagaaaatataggcaaatagataaaatttatttttatgg

SEQ ID NO: 6394 - DNA, 120 bp, Artificial Sequence
  ENSG00000006459_37 (sequence is synthesized)
agaagaaatatggccatattatggatttgtcttttttttactcagcaagatagcaggacttacccttctctattaagtatcacttgaattgctaagaagaaaaaagtctgtaccatcatc

SEQ ID NO: 6395 - DNA, 120 bp, Artificial Sequence
  ENSG00000006459_38 (sequence is synthesized)
cctttctggttcagagtgactggaccaaagtctgaatcttatctgggtatcaggaaaaagaatttttatggaaatccttagtgtctataaacaacccgtgtaaaccctgtctacactatg

SEQ ID NO: 6396 - DNA, 120 bp, Artificial Sequence
  ENSG00000006459_39 (sequence is synthesized)
ccaaaaccagtggaaagatgggtagagtcatcttatctcaggatgtcaaaaatctgggtttgactgattcccctaccttcccacacagtatattcttgtgatttttgcttttctgtagat

SEQ ID NO: 6397 - DNA, 120 bp, Artificial Sequence
  ENSG00000006459_40 (sequence is synthesized)
cctgagtcggtgttacaatagtcatgtttttattttgggttaagaaatacgaggtgtaagagctataatttccttttcgtgttatatcatgatctgggttttcttttttcctttacgttt

SEQ ID NO: 6398 - DNA, 120 bp, Artificial Sequence
  ENSG00000006459_41 (sequence is synthesized)
tctatttttttctttagtcacaaaaattaaaattaaactttatttttatgaattaaaatgaaatttaatttatttttatgaattaaaattgtggccagtatccactgtgtccttaggctg

SEQ ID NO: 6399 - DNA, 120 bp, Artificial Sequence
  ENSG00000006459_42 (sequence is synthesized)
tccactgtgtccttaggctgagaagtactaatttggagtagcccgtgtgtggaattctaaagtgaaggtactgtggattcatttttagtagttttagccccttaataagtggctaagtta

SEQ ID NO: 6400 - DNA, 120 bp, Artificial Sequence
  ENSG00000006459_43 (sequence is synthesized)
gaaaactttcagcgaggtaatagaaccacttgaatagaatccatgtgtctttttctgaattggtgaaaattcggccactgatccagtgactcctggtcaaacgtcttataacattactgg

SEQ ID NO: 6401 - DNA, 120 bp, Artificial Sequence
  ENSG00000006459_44 (sequence is synthesized)
ccataatgcatccctttatctcatggaaatggctgaactttgtggtagctgctgcgagtacctgggcttaacagtaatagagaacctcatttataccatacagacacagcaacttaggaa

SEQ ID NO: 6402 - DNA, 120 bp, Artificial Sequence
  ENSG00000006459_45 (sequence is synthesized)
gacagcactgatagcatttagctagttgtaaccaaatacaaatatgtaaaattgagaattatgattaacatatgcaactttagtaataggaatagatgataattttcctgtattgtttca

SEQ ID NO: 6403 - DNA, 120 bp, Artificial Sequence
  ENSG00000006459_46 (sequence is synthesized)
aataagtgactgttcagctgggatccattggattataatttacaatgtcacataatattatgcttttcaatattgatgagtgatgtaaacaatataaagttggcagtttgtagtagttca

SEQ ID NO: 6404 - DNA, 120 bp, Artificial Sequence
  ENSG00000006459_47 (sequence is synthesized)
gtatcctagaaatacattgaacttcataagtatcagttcatttttaagcatacagaattgaagattctgactgaaatcataaactcagaggaaacaagcccatctttatcactaattact

SEQ ID NO: 6405 - DNA, 120 bp, Artificial Sequence
  ENSG00000006459_48 (sequence is synthesized)
tagcttgaatacttttctatttttaaataatcctaattattgccttttcaattatagtctactgtatttatttatatgggatcaacaggtatttatcaaacatctactgtgtgcccagca

SEQ ID NO: 6406 - DNA, 120 bp, Artificial Sequence
  ENSG00000006459_49 (sequence is synthesized)
ctacctagtactgttggggaacatcaatttgcagttgtggtctctgcccttgaaggtatcttctccaggaaattagcagtattattttcacttctaagcaaacatgagcaaaagaggacc

SEQ ID NO: 6407 - DNA, 120 bp, Artificial Sequence
  ENSG00000006459_50 (sequence is synthesized)
tgttcattaaaaaacatgctgacttttttagtttcaactgagatatgccactgtagaagtgaaagtaatttcacaattaaagaaatgcttcaacttggtaattaatatggtcatacaggg

SEQ ID NO: 6408 - DNA, 120 bp, Artificial Sequence
  ENSG00000006459_51 (sequence is synthesized)
acttggtgtagcatgcaaggaagcagaagacctgggcttttgtcgaagttctgccatttaggtatcagctgtgtaaccttgaataagtcacttaactctttctcttagttttctcatttg

SEQ ID NO: 6409 - DNA, 120 bp, Artificial Sequence
  ENSG00000006459_52 (sequence is synthesized)
taaatttggattaaagtgtttattatgataatcaattaagaaaatctcttaacacttcatacatacagagaacttatcattaagttaaaactggcaattaatgcacctttatatatattt

SEQ ID NO: 6410 - DNA, 120 bp, Artificial Sequence
  ENSG00000006459_53 (sequence is synthesized)
ttaaatgaaaactaatactattcatgatgtttattttatatcaaatatatgcccagggcatgctactttaaaaatccgaggaatctccaacaaggtgctggattaaaatcagatttcgtg

SEQ ID NO: 6411 - DNA, 120 bp, Artificial Sequence
  ENSG00000006459_54 (sequence is synthesized)
cttgaagtggaagaaaaatgaagttgtttatggataagagagtgagaatgtgtatcctcaagtacgttaagatgatttaactgaaagatggctttaggtttttcttgaagaattaggaaa

SEQ ID NO: 6412 - DNA, 120 bp, Artificial Sequence
  ENSG00000006459_55 (sequence is synthesized)
gtaccatccccacagattcagcatactcttcaggtactagataaaggtgaaggaagtcatggaattaaaatgacttagcaactccccagggaacttgtggggagaatgaggtggttagaa

SEQ ID NO: 6413 - DNA, 120 bp, Artificial Sequence
  ENSG00000006459_56 (sequence is synthesized)
aggtgagaatgcacaaagacagctctgggttgggtaccaacagtttgcttggtagaaagaaaccagtgtaggaaaggagacgccaccagacatcttcaacagacaagattctttctgcct

SEQ ID NO: 6414 - DNA, 120 bp, Artificial Sequence
  ENSG00000006459_57 (sequence is synthesized)
ttttcaaaagatgctctctgcagcagtaagactatagatagagttgattggaatatcatgtgacccagtatgctactgctaggcataattatcaaaaattcatttttctcattaaatatt

SEQ ID NO: 6415 - DNA, 120 bp, Artificial Sequence
  ENSG00000006459_58 (sequence is synthesized)
gttaattgctcgccacataaagagaagctagagctcaccagtcttggtggtgtcctagaccttcctctaaagcagtcttgggaagctggatcatcagatctttagcctagacagagtgtc

SEQ ID NO: 6416 - DNA, 120 bp, Artificial Sequence
  ENSG00000006459_59 (sequence is synthesized)
gctggtaaataaaggagacacaggtaacccagagtggacagtgatttgcgtggggagacacagtggatctggggcctctgatactttgcttcctaaaacagcccccagttttcggcttgc

SEQ ID NO: 6417 - DNA, 120 bp, Artificial Sequence
  ENSG00000006459_60 (sequence is synthesized)
cctatgagatgatgttcatgtgcttccttgaaaccaggtggaaagaaaggggaagaattaattttctcattctgttgctgttgaacgtaatgtaatcttaatactgtagccttcctagaa

SEQ ID NO: 6418 - DNA, 120 bp, Artificial Sequence
  ENSG00000006459_61 (sequence is synthesized)
gcccttccctctttttcatgctgtaaagtcaaatatttgatatccttaacataaattttaaaaattaaggtcattaggaagcaaatgtctatttccaaagcaatgagcttgttgtgactg

SEQ ID NO: 6419 - DNA, 120 bp, Artificial Sequence
  ENSG00000006459_62 (sequence is synthesized)
tgattttattcttctatagtatttttttcctcattttaactgagaggagaaaataatactcttttgcaatatccttaggttctccccttccccctggtgccccttctagtgtcttaagac

SEQ ID NO: 6420 - DNA, 120 bp, Artificial Sequence
  ENSG00000006459_63 (sequence is synthesized)
tttgtcttaacaagtataacattacattttgttgttaaaacctttcgaaactgtattcagtgattcttccaagtttatctgctctgcactatttcactaataaaccctggctaccacgta

SEQ ID NO: 6421 - DNA, 120 bp, Artificial Sequence
  ENSG00000006459_64 (sequence is synthesized)
gcccttgatctccaagtagtttacctatgcaagacctgtgacactctgaattcacttctctttctttcagaaagtagtcataaatggagcttaattataaaggtaaaacttgtctccaac

SEQ ID NO: 6422 - DNA, 120 bp, Artificial Sequence
  ENSG00000006459_65 (sequence is synthesized)
cagtttcattttggccatttctttttcaaaatgtcagctgttttcctccaagatttttcaccaaaacaatgatcataagtgctggaatatataatactttgcaggcataaaataacccag

SEQ ID NO: 6423 - DNA, 120 bp, Artificial Sequence
  ENSG00000006459_66 (sequence is synthesized)
acatactctcatatttctttggtgtattttggttggtaaaacttaccagcattaaatgtaaaatataatgaggagttaattccttacctagaactatttcttccttttaagattcataag

SEQ ID NO: 6424 - DNA, 120 bp, Artificial Sequence
  ENSG00000006459_67 (sequence is synthesized)
taaccttttatttttacagagctacgtataacttccacattacagtcagggacctgaggtgtaacttactaagtgaaccccaaggttattttatcttgcaaaagaaacctaaaccaaact

SEQ ID NO: 6425 - DNA, 120 bp, Artificial Sequence
  ENSG00000006459_68 (sequence is synthesized)
aagggccttacagtttatggttagactgaatcaaaagctataacctcaatttttccaaaaacagcttctgactgcaaaagcaagtcatacagttgttaggtatgaaatagcactgatcag

SEQ ID NO: 6426 - DNA, 120 bp, Artificial Sequence
  ENSG00000006459_69 (sequence is synthesized)
gaaatgcatcttcgcagatggtatttccttcagaaaagacttttctacttttaatataaattaagccataacagtttcatgctgtggaaagagggtgaaaaggttcattttaagagatta

SEQ ID NO: 6427 - DNA, 120 bp, Artificial Sequence
  ENSG00000006459_70 (sequence is synthesized)
tataatatgaactttcacatttactgtgaaatgtctaactttgccagtgcttcagcaagtttttttggggggtgatggggaggggtagtattggttttagaggtttcaaatctgtgaact

SEQ ID NO: 6428 - DNA, 120 bp, Artificial Sequence
  ENSG00000006459_71 (sequence is synthesized)
ttggagaggggacagttgttggctctggtatttactagttttgtagtaacgttttgctagcctgactgacttttcttactggtttttatgcccacggtccgaggggactgttcttcttgt

SEQ ID NO: 6429 - DNA, 120 bp, Artificial Sequence
  ENSG00000006459_72 (sequence is synthesized)
tgggggtgtctgcggaatagcgtctcgtcttgtttgtataggcagtcaatgtgtgtgacatgtgtgtcctttcagtccggaagcccactgtgtgacaatggcgtggggtgtggctgggag

SEQ ID NO: 6430 - DNA, 120 bp, Artificial Sequence
  ENSG00000006459_73 (sequence is synthesized)
gtggggtgctgaagcttgaagagcatttctttgctgattcataacagtatttcccatcttttgcctgcaggcagggaaagtgtacagtatttattttgtttctgttttactttaaatttg

SEQ ID NO: 6431 - DNA, 120 bp, Artificial Sequence
  ENSG00000006459_74 (sequence is synthesized)
taagtctttaagtagcttacattgattattataggggaggacaagtgacttgtttaaagttgtatttagtattctttccaatttctgtattttaaaatattgaaattaaaattgtattac

SEQ ID NO: 6432 - DNA, 120 bp, Artificial Sequence
  ENSG00000006459_75 (sequence is synthesized)
ttctgttttgatttttttagcacttagtgtattttttgctcattttgtttgaaagtataaatgttgaaaattgtataaaatgcgtccttgaaagaaaaagaatctgaattctatatccaa

SEQ ID NO: 6433 - DNA, 120 bp, Artificial Sequence
  ENSG00000006468_0 (sequence is synthesized)
agtatccccaggcgccttaacaataagcagcgggttacagaggaaatcgagtctctccgtggcgcttccaggctgaggacccagcgcctaccggccgagcaccccctagggcagaggggc

SEQ ID NO: 6434 - DNA, 120 bp, Artificial Sequence
  ENSG00000006468_1 (sequence is synthesized)
gagggagacccgcgggaaggggcagcaagccgcctgattgacagcccgaaatctgatcttgtgaaagagacgcggagccaatgggaggcagcgatccatcagtttggattggaggcccct

SEQ ID NO: 6435 - DNA, 120 bp, Artificial Sequence
  ENSG00000006468_2 (sequence is synthesized)
ggaggagaagtagaggaaaaaccaccgaattgagctctgtcagaggcgctttcggcttccaagggggaagtgctgggctataattaatgtttttattaaatttggagggaagtttttgca

SEQ ID NO: 6436 - DNA, 120 bp, Artificial Sequence
  ENSG00000006468_3 (sequence is synthesized)
gcctttcgcctagcgtggccttcaggttgatagaagtccagatcctgaggaaatctccagctaaatgctcaaaatataaaatactgagctgagatttgcgaagagcagcagcatggatgg

SEQ ID NO: 6437 - DNA, 120 bp, Artificial Sequence
  ENSG00000006468_4 (sequence is synthesized)
attttatgaccagcaagtgccttacatggtcaccaatagtcagcgtgggagaaattgtaacgagaaaccaacaaatgtcaggaaaagaaaattcattaacagagatctggctcatgattc

SEQ ID NO: 6438 - DNA, 120 bp, Artificial Sequence
  ENSG00000006468_5 (sequence is synthesized)
agaagaactctttcaagatctaagtcaattacaggaaacatggcttgcagaagctcaggtacctgacaatgatgagcagtttgtaccagactatcaggctgaaagtttggcttttcatgg

SEQ ID NO: 6439 - DNA, 120 bp, Artificial Sequence
  ENSG00000006468_6 (sequence is synthesized)
cctgccactgaaaatcaagaaagaaccccacagtccatgttcagaaatcagctctgcctgcagtcaagaacagccctttaaattcagctatggagaaaagtgcctgtacaatgtcagtgc

SEQ ID NO: 6440 - DNA, 120 bp, Artificial Sequence
  ENSG00000006468_7 (sequence is synthesized)
ctatgatcagaagccacaagtgggaatgaggccctccaacccccccacaccatccagcacgccagtgtccccactgcatcatgcatctccaaactcaactcatacaccgaaacctgaccg

SEQ ID NO: 6441 - DNA, 120 bp, Artificial Sequence
  ENSG00000006468_8 (sequence is synthesized)
ggccttcccagctcacctccctccatcgcagtccataccagatagcagctaccccatggaccacagatttcgccgccagctttctgaaccctgtaactcctttcctcctttgccgacgat

SEQ ID NO: 6442 - DNA, 120 bp, Artificial Sequence
  ENSG00000006468_9 (sequence is synthesized)
gccaagggaaggacgtcctatgtaccaacgccagatgtctgagccaaacatccccttcccaccacaaggctttaagcaggagtaccacgacccagtgtatgaacacaacaccatggttgg

SEQ ID NO: 6443 - DNA, 120 bp, Artificial Sequence
  ENSG00000006468_10 (sequence is synthesized)
cagtgcggccagccaaagctttccccctcctctgatgattaaacaggaacccagagattttgcatatgactcagaagtgcctagctgccactccatttatatgaggcaagaaggcttcct

SEQ ID NO: 6444 - DNA, 120 bp, Artificial Sequence
  ENSG00000006468_11 (sequence is synthesized)
ggctcatcccagcagaacagaaggctgtatgtttgaaaagggccccaggcagttttatgatgacacctgtgttgtcccagaaaaattcgatggagacatcaaacaagagccaggaatgta

SEQ ID NO: 6445 - DNA, 120 bp, Artificial Sequence
  ENSG00000006468_12 (sequence is synthesized)
tcgggaaggacccacataccaacggcgaggatcacttcagctctggcagtttttggtagctcttctggatgacccttcaaattctcattttattgcctggactggtcgaggcatggaatt

SEQ ID NO: 6446 - DNA, 120 bp, Artificial Sequence
  ENSG00000006468_13 (sequence is synthesized)
taaactgattgagcctgaagaggtggcccgacgttggggcattcagaaaaacaggccagctatgaactatgataaacttagccgttcactccgctattactatgagaaaggaattatgca

SEQ ID NO: 6447 - DNA, 120 bp, Artificial Sequence
  ENSG00000006468_14 (sequence is synthesized)
tttgtgtgtgatccagaagcccttttctccatggcctttccagataatcagcgtccactgctgaagacagacatggaacgtcacatcaacgaggaggacacagtgcctctttctcacttt

SEQ ID NO: 6448 - DNA, 120 bp, Artificial Sequence
  ENSG00000006468_15 (sequence is synthesized)
gatgagagcatggcctacatgccggaagggggctgctgcaacccccacccctacaacgaaggctacgtgtattaacacaagtgacagtcaagcagggcgtttttgcgcttttcctttttt

SEQ ID NO: 6449 - DNA, 120 bp, Artificial Sequence
  ENSG00000006468_16 (sequence is synthesized)
ctgcaagatacagagaattgctgaatctttgttttatttctgttgtttgtattttatttttaaataataatacacaaaaaggggcttttcctgttgcattattctatggtctgccatgga

SEQ ID NO: 6450 - DNA, 120 bp, Artificial Sequence
  ENSG00000006468_17 (sequence is synthesized)
ctgtgcactttatttgagggtgggtgggagtaatctaaacatttattctgtgtaacaggaagctaatgggtgaatgggcagagggatttggggattactttttacttaggcttgggatgg

SEQ ID NO: 6451 - DNA, 120 bp, Artificial Sequence
  ENSG00000006468_18 (sequence is synthesized)
ggtcctacaagttttgagtatgatgaaactatatcatgtctgtttgatttcataacaacataagataatgtttattttatcggggtatctatggtacagttaatttcacgttgtgtaaat

SEQ ID NO: 6452 - DNA, 120 bp, Artificial Sequence
  ENSG00000006468_19 (sequence is synthesized)
ggagactatttgccttgggcattttcccctgtcatttatgagtctctgcaggtgtacaaaaaaaccccaatctactgtaaatggcagtttaattgttagaaatgactgtttttgcaccac

SEQ ID NO: 6453 - DNA, 120 bp, Artificial Sequence
  ENSG00000006468_20 (sequence is synthesized)
tgcaccacttgtaaaaaggtatttagcgattgcatttgctgtttgttgttttattttgctttatatatgacttgcagaggataaccataaaatgggtaattctctctgaagttgaataat

SEQ ID NO: 6454 - DNA, 120 bp, Artificial Sequence
  ENSG00000006468_21 (sequence is synthesized)
caccatgactgtaaatgaggggcacaattttggactctggcgccaaactgagtcataggccagtagcattacgtgtatctggtgccaccttgctgtttagatacaaatcataccgtcttt

SEQ ID NO: 6455 - DNA, 120 bp, Artificial Sequence
  ENSG00000006468_22 (sequence is synthesized)
taaatattttgaagcccatttcagttaaataatgacatgtcatggtcctttggaatcttcatttaaatgttaaatctggaatcaaaatgaagcaaaaaatatctgtctccttttcacttt

SEQ ID NO: 6456 - DNA, 120 bp, Artificial Sequence
  ENSG00000006468_23 (sequence is synthesized)
cttcagtacataaatacattatttaatcaataagaattaactgtactaaatcatgtattatgctgttctagttacagcaaacactctttaagaaaaatatccaatacactaaataggtac

SEQ ID NO: 6457 - DNA, 120 bp, Artificial Sequence
  ENSG00000006468_24 (sequence is synthesized)
tatagtaatttttagacatggtacccattgatatgcatttaaaccttttactgctgtgttatgttgataacatatataaatattagataatgctaatgcttctgctgctgtcttttctgt

SEQ ID NO: 6458 - DNA, 120 bp, Artificial Sequence
  ENSG00000006468_25 (sequence is synthesized)
aatattctctttcatgctgaatttactatgaccatttataagcagtgcagttaactacagatagcatttcaggacaaaatagatgactcaaaccatttattgcttaaaaaatagcttacg

SEQ ID NO: 6459 - DNA, 120 bp, Artificial Sequence
  ENSG00000006468_26 (sequence is synthesized)
ccatgctatgctataagcagcttttatgcacattgacaaatgaagagtaagcttcagcttgctaaaggaaactgtggaaccttttgtaacttttggtgatatggaaaattatttacaaac

SEQ ID NO: 6460 - DNA, 120 bp, Artificial Sequence
  ENSG00000006468_27 (sequence is synthesized)
cgtcaaagaatatgaggaagttgctgtatgacatagtgctggcactgatattatccatcatctctttttggacacttctgtaaatgtgattggattgtttgaaagaagatttaaagtttc

SEQ ID NO: 6461 - DNA, 120 bp, Artificial Sequence
  ENSG00000006468_28 (sequence is synthesized)
gcaagtctcgttgatcgccattgctagttttgcacacgtttgcgaatcagagctgcccggggtacaccgaccgcgcagggaaacatcgagagtgtaaataaatacatcgcctcttgttcg

SEQ ID NO: 6462 - DNA, 120 bp, Artificial Sequence
  ENSG00000006468_29 (sequence is synthesized)
ggagaaaatattgaaagcagggtatgttgtttcattcaccttgaaaaaaccatgagtaaatggggatatagaatctctgaatagctcgctaaaagattcaagcaagggacatgaattttg

SEQ ID NO: 6463 - DNA, 120 bp, Artificial Sequence
  ENSG00000006468_30 (sequence is synthesized)
ttccatctatcaataatatccagaagaacaacttttttaaagagtctatagcaaaaagcaaaaaaaaaaaaaaattctaaacacaaagtcaaaataaacctattgtaaaagcatttcgtg

SEQ ID NO: 6464 - DNA, 120 bp, Artificial Sequence
  ENSG00000006468_31 (sequence is synthesized)
atgagcatgaaaaagattgtttaaagatgatccccccagctacccattttccaaaactacacagatcacagctcatttctctaagtggagcagttatcaagaaacccaaacaccaaaatt

SEQ ID NO: 6465 - DNA, 120 bp, Artificial Sequence
  ENSG00000006468_32 (sequence is synthesized)
gctactcttcacatttaatcctacaaaaagtactccaatttcaaaatatgtatgtaacctgcgatttcaatgattgttgttcatatacatcatgtattattttggcccattttgggccta

SEQ ID NO: 6466 - DNA, 120 bp, Artificial Sequence
  ENSG00000006468_33 (sequence is synthesized)
aaaaagaaaactatgccttaaaaatcagaaccttttctccccactatgcttatgtggccatctacagcacttagaataaaaacagatgttaaaatattcagtgaaagttttattggaaaa

SEQ ID NO: 6467 - DNA, 120 bp, Artificial Sequence
  ENSG00000006468_34 (sequence is synthesized)
aggaattgagatatataattgagatttggtgaaattgaaggagaaaatttaagtgagtctttaaaatatattctgaatgaaaactgtattgaggattcatttttgttccttttttttctt

SEQ ID NO: 6468 - DNA, 120 bp, Artificial Sequence
  ENSG00000006468_35 (sequence is synthesized)
tttctcttttctcctttttcttctttttaatagtctagttttagtcagtcagtgaggaagaattgggccatgctaacgttatcacaagagaacaatggcagaaatggtattagttatata

SEQ ID NO: 6469 - DNA, 120 bp, Artificial Sequence
  ENSG00000006468_36 (sequence is synthesized)
atatttaaggacaaactatatgttttgctgttttaacgtagtgactcactgaactaaatacataattgaccaacattaagtgtatttccaatacagaagggttgaaaatattacattata

SEQ ID NO: 6470 - DNA, 120 bp, Artificial Sequence
  ENSG00000006468_37 (sequence is synthesized)
aactcttttgaaaaatgtatctaaaattttttaagttctgttttgattccactttttggttgagtttttatgtttttgttttcaggtagattaataaatctggcagctgatttctgcaag

SEQ ID NO: 6471 - DNA, 120 bp, Artificial Sequence
  ENSG00000006468_38 (sequence is synthesized)
attcttgtgttttgaatttctcattgaattggctactcaaacatagaaatcatttgttaatgatgtaatgtcttctctcagcttttatcttcactgctgtttgctgtctcttgatgatga

SEQ ID NO: 6472 - DNA, 120 bp, Artificial Sequence
  ENSG00000006468_39 (sequence is synthesized)
catgttaatacccaatagattaattgcaacaaacacttatactcaaataactaagtaaaaataatttttcttgttatgtccatgaaaagtgcttcagaataaaaatccacaagactgaca

SEQ ID NO: 6473 - DNA, 120 bp, Artificial Sequence
  ENSG00000006468_40 (sequence is synthesized)
gtgcagaacatttttctcaaatcatgggcggatcttggaggtctagtttcccgtagatgctgtaaccaattaccacaacttcagtaatttacacaaatttatcttatagttctggaggca

SEQ ID NO: 6474 - DNA, 120 bp, Artificial Sequence
  ENSG00000006468_41 (sequence is synthesized)
gaagttcaaaagaagccttaagagactaaaaccaagatgtccttaggtctggttccttctggaggctccaggggagattcttccagctttcacttctagagtctgctgacattccttggc

SEQ ID NO: 6475 - DNA, 120 bp, Artificial Sequence
  ENSG00000006468_42 (sequence is synthesized)
tcctggctacatcacttcaatctctgcttccatggtcacatactcttctactatagtcaaatttccttcctgcctcttataaggatgcttgtgattacatttaggggatgctcagataat

SEQ ID NO: 6476 - DNA, 120 bp, Artificial Sequence
  ENSG00000006468_43 (sequence is synthesized)
ccaggacaatctctccatctcaagatccttaacttaatgacgtgtgccaagtccctttggctagataattattcataggtcccagggattaggacatggatgtaaggggtgagggcaggg

SEQ ID NO: 6477 - DNA, 120 bp, Artificial Sequence
  ENSG00000006468_44 (sequence is synthesized)
ctgttattcagaacaccgcacggaggaggaagactgtgtagcaaagactctaattgatttactcaggaacagtggagttctgctgagggatctaggatttgaaagtactagagtttgctt

SEQ ID NO: 6478 - DNA, 120 bp, Artificial Sequence
  ENSG00000006468_45 (sequence is synthesized)
ttatttaccactgagatattttccccttattctgcataaataattttgaaaactttctatattaaatttcaactattccactaaaatgtctggtaatcacatcaagcctttagattattc

SEQ ID NO: 6479 - DNA, 120 bp, Artificial Sequence
  ENSG00000006468_46 (sequence is synthesized)
aaatccttccccagcccccaggaaaacactaagtcatgaaacagaaaaacagaaggtatgataataatagtaataacagttaaatcagtggtctaatccagattttattttttaatacat

SEQ ID NO: 6480 - DNA, 120 bp, Artificial Sequence
  ENSG00000006468_47 (sequence is synthesized)
ttcttttggtgttaatatgggttactatgtgatcttatcatttgctagtgattattacttattaggtaagaacaatgtgtaaaatatgtctattactcaaaagaacaattgcaaaatgag

SEQ ID NO: 6481 - DNA, 120 bp, Artificial Sequence
  ENSG00000006468_48 (sequence is synthesized)
tcaacttatctttatataaccaggaaagaaatatattgccagaagctacagaattttgccagatgatagggatttctaaaatgagccactttgtctatcatgcagccttttcagagcttg

SEQ ID NO: 6482 - DNA, 120 bp, Artificial Sequence
  ENSG00000006468_49 (sequence is synthesized)
taatgagaaaacattacagaggagaaggtcatttggatgtttgttacttggaatcctagaaaacaaaaactaaaatttaaaaataagaagtgagtaagctattttccatttgcgatttgg

SEQ ID NO: 6483 - DNA, 120 bp, Artificial Sequence
  ENSG00000006468_50 (sequence is synthesized)
tatggagaagagaggaaatagaattattaaaaaaatacaaattgggtaaaagtgatggtggaaaaaatataaagaaggcaaatgtacatattaagcaattctactaagaattggaaaaat

SEQ ID NO: 6484 - DNA, 120 bp, Artificial Sequence
  ENSG00000006468_51 (sequence is synthesized)
caagtttcaaaaagatggtaatagttgggcatgatactagaaaatttcacccagtttattcagagctcaactagtacttttaggacttctttttttatatacatgagactcactttgaca

SEQ ID NO: 6485 - DNA, 120 bp, Artificial Sequence
  ENSG00000006468_52 (sequence is synthesized)
tacttaaaaaaaaaacagtttatggaaagtacagtttaagaggagaatttgattagactaagtggatatctttatagaaatattaatgatttcagaattttcagttacaagtgtatatac

SEQ ID NO: 6486 - DNA, 120 bp, Artificial Sequence
  ENSG00000006468_53 (sequence is synthesized)
cgtggctattgtttatggattcatatgtaaggtagggtcttttttgcatatagactccagtattagttactttcattctaaaattatatttatgcttctatggggaagaaaatttttaat

SEQ ID NO: 6487 - DNA, 120 bp, Artificial Sequence
  ENSG00000006468_54 (sequence is synthesized)
tcacttggttgtattaaaattatacttacggtttgagaaaacatgctatgaaaatcatgattatagcaaattaaatatgctcaaaatttaaatctaaaataaaagcccagaaactgaaaa

SEQ ID NO: 6488 - DNA, 120 bp, Artificial Sequence
  ENSG00000006468_55 (sequence is synthesized)
gactctgcttctagaagcccagtcttcaaaatgagcttacctttcagtgatttggataaggcatagttttgtttttaagacccctttttctgattaaagtgcccaacatgagtggaagag

SEQ ID NO: 6489 - DNA, 120 bp, Artificial Sequence
  ENSG00000006468_56 (sequence is synthesized)
gatatacgagcaaccccaagcactccctcctcctccccacagccacagtggactggaagtaccttttcccagtgcacacgctgaggacccagcgcctaccggccgagcaccccctagggc

SEQ ID NO: 6490 - DNA, 120 bp, Artificial Sequence
  ENSG00000006468_57 (sequence is synthesized)
aaaatgaagcctgacttacaacagaatgagaaatctactcaatgaaatattagaaatgacaggaacctggagataattcacccaatatctctgtgtttgttggataataatagctaatac

SEQ ID NO: 6491 - DNA, 120 bp, Artificial Sequence
  ENSG00000006468_58 (sequence is synthesized)
ttgtgtaatgctcacgatgtgctagttcctcttctaaacactttataaatatcttaatgcagccaatcttcataacatccttatttagtagaaactattatctctttcttttggtgagaa

SEQ ID NO: 6492 - DNA, 120 bp, Artificial Sequence
  ENSG00000006468_59 (sequence is synthesized)
aaattaccaggagaaattgcttccagctcacaatcacatctgcttttggcaagaactaatgcaccaagacttcaagttctaagcctctgttcagattttaattgcaattgatcaggttta

SEQ ID NO: 6493 - DNA, 120 bp, Artificial Sequence
  ENSG00000006468_60 (sequence is synthesized)
tattattgtacctccagagacctcctagagccagaacccggctggcttgctgtttcctttagagcagcgcatatcattatttggtgttctggtggaggacttttctgatggcagaaatta

SEQ ID NO: 6494 - DNA, 120 bp, Artificial Sequence
  ENSG00000006468_61 (sequence is synthesized)
gtttctctgggttcatcaggacgggatgcttcaagatttaagtgcaagtgtcttctttccaccttgttcacaacacagaacgttagctcaggtacctgacaatgatgagcagtttgtacc

SEQ ID NO: 6495 - DNA, 120 bp, Artificial Sequence
  ENSG00000006468_62 (sequence is synthesized)
cttgaatgcagttgatcaagttgctgttagcatgtaaaataagtttctttgttttgctgatagtctagttctccaaagagctttttcaatctttatcaatctttaaagttaaatagcttt

SEQ ID NO: 6496 - DNA, 120 bp, Artificial Sequence
  ENSG00000006468_63 (sequence is synthesized)
gttttaatctagcattgaaccagcctaaaaacaactttaagtgtaaatgcttcaggttgttttgatgctgagataccatgaatatatgattgataaatagtaatgtgctaagatcggcac

SEQ ID NO: 6497 - DNA, 120 bp, Artificial Sequence
  ENSG00000006468_64 (sequence is synthesized)
tgggaagcaactctccctgcctgcttaacataagctttcactgtcaaataagtgagaaaatgaatattagagttgatactatggacttctatttttctattcagagaagatccattagac

SEQ ID NO: 6498 - DNA, 120 bp, Artificial Sequence
  ENSG00000006468_65 (sequence is synthesized)
ttatgtatgcatgtctgtgtgtgtgtgtgtgcgcgcgcgtgtgcgtgtgtgtgatctgaggtttacattcttttaaaggattttatctttccctttgtagagtcagcgtgggagaaattg

SEQ ID NO: 6499 - DNA, 120 bp, Artificial Sequence
  ENSG00000006468_66 (sequence is synthesized)
tgtccattggacatcctcacctgatccctgctagtgtccctgtgcagattagaaaaaggcaacacctctggacttgctcccttagcccttggctgtgcattgcacaaaacaccatctaca

SEQ ID NO: 6500 - DNA, 120 bp, Artificial Sequence
  ENSG00000006468_67 (sequence is synthesized)
agaggcgctttcggcttccaagggggaagtgctgggctataattaatgtttttattaaatttggagggaagtttttgcagcctttcgcctagcgtggccttcaggtgggtctttccaaca

SEQ ID NO: 6501 - DNA, 120 bp, Artificial Sequence
  ENSG00000006468_68 (sequence is synthesized)
cgttattggctgcgggaagaacctcgccgggacctaacccgaagctccgccccctcgcggttaccctggatacccgtcaggctcgggctgcagagaaggaggatcagggcaagtggcttc

SEQ ID NO: 6502 - DNA, 120 bp, Artificial Sequence
  ENSG00000006468_69 (sequence is synthesized)
agagatgcagccctcactgcttaacgtcctagttattgtccttgaaacccgagccatctcaccgctcgcccccaaccctgggctctggctgtttaaaagctggagaggaagtgaaagcgt

SEQ ID NO: 6503 - DNA, 120 bp, Artificial Sequence
  ENSG00000006468_70 (sequence is synthesized)
accccctgcttggttgcaccctcagatagtacccatgagcttcactgttcagcctcggggcccaggcgcttcctggaatctctccttggccggggttaaaatgcagttcccgctcaaaat

SEQ ID NO: 6504 - DNA, 120 bp, Artificial Sequence
  ENSG00000006468_71 (sequence is synthesized)
gctcttggttttggtattacaagcctttctatgtataaatgcctagacattgtagacaaatgtgtagtgatattgtatacagaataataggctttctggaaggtcctactttgctgcaca

SEQ ID NO: 6505 - DNA, 120 bp, Artificial Sequence
  ENSG00000006468_72 (sequence is synthesized)
tggttaaaaaagattgttttagtattaatagcacatctgtcttcagaagtttttattgcacattgtctacaattatataattttggaatgcttttgtttatagcaataaagaatctttag

SEQ ID NO: 6506 - DNA, 120 bp, Artificial Sequence
  ENSG00000006468_73 (sequence is synthesized)
ctgaagaggttagtttaatagattttaattaggacactcagacatgttataacataaagaaactgacacatttgattaatataccaaaaatgtattcttaatcatttcaagactttaggg

SEQ ID NO: 6507 - DNA, 120 bp, Artificial Sequence
  ENSG00000006468_74 (sequence is synthesized)
aaactttctgaattaaaaagcatgcaaagataaaacatgtctacctttaaaatcaccaatgtattgcgtgttccttccggttgtatacaatcctacaaaattgatgttggagaaaattaa

SEQ ID NO: 6508 - DNA, 120 bp, Artificial Sequence
  ENSG00000006530_0 (sequence is synthesized)
ggtgagtgcagcggcgcccaggcggggagcgcagtgcgggtcgctgggactgagcgcgcgagcgggcaaatctctagaagatgacggtgttctttaaaacgcttcgaaatcactggaaga

SEQ ID NO: 6509 - DNA, 120 bp, Artificial Sequence
  ENSG00000006530_1 (sequence is synthesized)
aaactacagctgggctctgcctgctgacctggggaggccattggctctatggaaaacactgtgataacctcctaaggagagcagcctgtcaagaagctcaggtgtttggcaatcaactca

SEQ ID NO: 6510 - DNA, 120 bp, Artificial Sequence
  ENSG00000006530_2 (sequence is synthesized)
ttcctcccaatgcacaagtgaagaaggccactgtttttctcaatcctgcagcttgcaaaggaaaagccaggactctatttgaaaaaaatgctgccccgattttacatttatctggcatgg

SEQ ID NO: 6511 - DNA, 120 bp, Artificial Sequence
  ENSG00000006530_3 (sequence is synthesized)
atgtgactattgttaagacagattatgagggacaagccaagaaactcctggaactgatggaaaacacggatgtgatcattgttgcaggaggagatgggacactgcaggaggttgttactg

SEQ ID NO: 6512 - DNA, 120 bp, Artificial Sequence
  ENSG00000006530_4 (sequence is synthesized)
gtgttcttcgacgaacagatgaggctaccttcagtaagattcccattggatttatcccactgggagagaccagtagtttgagtcataccctctttgccgaaagtggaaacaaagtccaac

SEQ ID NO: 6513 - DNA, 120 bp, Artificial Sequence
  ENSG00000006530_5 (sequence is synthesized)
atattactgatgccacacttgccattgtgaaaggagagacagttccacttgatgtcttgcagatcaagggtgaaaaggaacagcctgtatttgcaatgaccggccttcgatggggatctt

SEQ ID NO: 6514 - DNA, 120 bp, Artificial Sequence
  ENSG00000006530_6 (sequence is synthesized)
tcagagatgctggcgtcaaagttagcaagtactggtatcttgggcctctaaaaatcaaagcagcccactttttcagcactcttaaggagtggcctcagactcatcaagcctctatctcat

SEQ ID NO: 6515 - DNA, 120 bp, Artificial Sequence
  ENSG00000006530_7 (sequence is synthesized)
acacgggacctacagagagacctcccaatgaaccagaggagacccctgtacaaaggccttctttgtacaggagaatattacgaaggcttgcgtcctactgggcacaaccacaggatgccc

SEQ ID NO: 6516 - DNA, 120 bp, Artificial Sequence
  ENSG00000006530_8 (sequence is synthesized)
tttcccaagaggtgagcccggaggtctggaaagatgtgcagctgtccaccattgaactgtccatcacaacacggaataatcagcttgacccgacaagcaaagaagattttctgaatatct

SEQ ID NO: 6517 - DNA, 120 bp, Artificial Sequence
  ENSG00000006530_9 (sequence is synthesized)
tccaagccagccagtgcactttgcttatcccggagggagcagggggctcttttagcattgacagtgaggagtatgaagcgatgcctgtggaggtgaaactgctccccaggaagctgcagt

SEQ ID NO: 6518 - DNA, 120 bp, Artificial Sequence
  ENSG00000006530_10 (sequence is synthesized)
tcttctgtgatcctaggaagagagaacagatgctcacaagccccacccagtgagcagcagaagacaagcactctgagaccacactttaggccaccggtgggaccaaaagggaacaggtgc

SEQ ID NO: 6519 - DNA, 120 bp, Artificial Sequence
  ENSG00000006530_11 (sequence is synthesized)
ctcagccatcccaacagtgtcgtcagagggtccccagggcattttcatggcaagtacccctctgcccccactccagcagtgcttcccaaagtgtgctctgtcacctgctttgcaatcggc

SEQ ID NO: 6520 - DNA, 120 bp, Artificial Sequence
  ENSG00000006530_12 (sequence is synthesized)
ttccattagcgcatgttttattttggtgtgacggttggccctcctaaacacggactttcctcaggctggttcaagacggaaaaggactttcttctgttttcttccaaagtgcaaccacag

SEQ ID NO: 6521 - DNA, 120 bp, Artificial Sequence
  ENSG00000006530_13 (sequence is synthesized)
tggagagcccacggtgggcttagcctgcctaggcccttccatttctcttctttgaccgtgctaggaattccaggaaagtgcattcctgccctggtgaccttttcctatgtctaggctcct

SEQ ID NO: 6522 - DNA, 120 bp, Artificial Sequence
  ENSG00000006530_14 (sequence is synthesized)
ccacaggtgctgctattttgtgagctccggctcctgtttagcttttatttcagttctaacctcagtccagaaacatatgtgaggttgtttccctcttcagccacggctacaataccggaa

SEQ ID NO: 6523 - DNA, 120 bp, Artificial Sequence
  ENSG00000006530_15 (sequence is synthesized)
aatgctagtttttatttatttttttaagtagtgcttcctaaatggtttgcatgagagccacctggggtacatgttgaaaacttatttggggtctaccccaaacctaataacccaaatttg

SEQ ID NO: 6524 - DNA, 120 bp, Artificial Sequence
  ENSG00000006530_16 (sequence is synthesized)
gggatggggcccaggaatatgcatttttaaaaagtcatctgcccttcccaggtgattctgtaagttgtccctcaactgtacttggagaaatcgtgttttaaagcagtagtccacaaagta

SEQ ID NO: 6525 - DNA, 120 bp, Artificial Sequence
  ENSG00000006530_17 (sequence is synthesized)
ttctgctcatgtgcccccaaaagtattttgaaaaatcatgtataccctcacccatctaagttgatatctaaaattttatctaagttggtatctaaaatttttcatgggaagttaaatagt

SEQ ID NO: 6526 - DNA, 120 bp, Artificial Sequence
  ENSG00000006530_18 (sequence is synthesized)
aaatatcacaacaatttgacacccttcattcatttataaaaataaatgagctagttctttagtagttaaacatttcaaattggcttttctccttctgtatttccataccacttttcagcc

SEQ ID NO: 6527 - DNA, 120 bp, Artificial Sequence
  ENSG00000006530_19 (sequence is synthesized)
aagaatcctatcataatgtaatctattatgcccgacatcttttaatcattcaccccattacttcttgtcaacaaaaaatataaatggaaattttttttttagctcttgctttaagtgttt

SEQ ID NO: 6528 - DNA, 120 bp, Artificial Sequence
  ENSG00000006530_20 (sequence is synthesized)
gtttgttatctcagtccagaaccaatattatcgtaattaattattggtatataatgaaaacggtattaattcttggatgattaaaagtttttttattagaatgttctttatcctaattag

SEQ ID NO: 6529 - DNA, 120 bp, Artificial Sequence
  ENSG00000006530_21 (sequence is synthesized)
ttcatttatccaagaatacatgaatgtgatttacagctgagatggggttcaacctcagctgtattccttgtttctgtatagatgtaagcacataaattcgatggaatagaattacgttaa

SEQ ID NO: 6530 - DNA, 120 bp, Artificial Sequence
  ENSG00000006530_22 (sequence is synthesized)
caatgtttttacagttctttggattcctttggcattttgacaaagatcacagtgctctatcatcaagaattattaatgatgatctatcaactaacaaacaacttgattagattctccttt

SEQ ID NO: 6531 - DNA, 120 bp, Artificial Sequence
  ENSG00000006530_23 (sequence is synthesized)
agtctgttgaaagcagagaactgaaatccacctgatttaccatggctttgccagccagtcattagcaccatttacttttactatcgctgacattttcctttgttcagtggccctgaggtt

SEQ ID NO: 6532 - DNA, 120 bp, Artificial Sequence
  ENSG00000006530_24 (sequence is synthesized)
cttacactctagggggcagtgcaccacaggaagatagatcaatgagggaggattgcgagggggaaggggaggaagcagagctggcaggccttagctacaggctctctctcaggcagatcc

SEQ ID NO: 6533 - DNA, 120 bp, Artificial Sequence
  ENSG00000006530_25 (sequence is synthesized)
cttttaagatacatacaccatgcccacacatcccatggagagagaccaatgctttagtagattacagaacagctatgaaaagtccatgaatgaagatcacaaaaaggaaggctttcttat

SEQ ID NO: 6534 - DNA, 120 bp, Artificial Sequence
  ENSG00000006530_26 (sequence is synthesized)
ttcatactgtattcttcagggtggtaaaatttctgcttttggcaaaaacataacagacggttccaaacatcagcataaagatcactcatcccataccacccacaggtagggaggaaggat

SEQ ID NO: 6535 - DNA, 120 bp, Artificial Sequence
  ENSG00000006530_27 (sequence is synthesized)
gctgtagtatatgaaaacaaaagttttcacctgagctgagagcatttagcatatcgtggttctgtaacaatatcaaggaccagtgcagaatctggctttcttttctgataggctaccagt

SEQ ID NO: 6536 - DNA, 120 bp, Artificial Sequence
  ENSG00000006530_28 (sequence is synthesized)
gtgtgtttatgtgtgctcattttgtggttctaatcataatggtacatataattagggaaggatatggaagccactttagaatcttattcatttttaaatataaatatgccttgtttcaaa

SEQ ID NO: 6537 - DNA, 120 bp, Artificial Sequence
  ENSG00000006530_29 (sequence is synthesized)
aacttttatttttctgttcttttttattgcttttctttcttttactttttttttccattgtatattttaaaacgggtacaaattgtgctttcttgaattttagaaaagaaaatactgcta

SEQ ID NO: 6538 - DNA, 120 bp, Artificial Sequence
  ENSG00000006530_30 (sequence is synthesized)
cccatgtcatagaacacgtatattaacacatggggacttttctggtttggtaattgatggtatccaataactttgacaatggttatttaaaattttgttatggaatctttttttcaaaga

SEQ ID NO: 6539 - DNA, 120 bp, Artificial Sequence
  ENSG00000006530_31 (sequence is synthesized)
actttttcataaaagaaattgtggcatattcatatagtgggaatcatctaacagttaaaatgaatgaactaaatgtataaatatctacatggctaaatctcaaaagttttgaataaaaaa

SEQ ID NO: 6540 - DNA, 120 bp, Artificial Sequence
  ENSG00000006530_32 (sequence is synthesized)
tgttatatacttgctttttctaagggggaaagaaatcacagactatcaggcagctagtgagattgtgtggaattggaagaactaggtttagtactcttctagcaataagattcatttgta

SEQ ID NO: 6541 - DNA, 120 bp, Artificial Sequence
  ENSG00000006530_33 (sequence is synthesized)
cattccatgattaacacctacaaagatgtcttatttgcttggaagtagtcccctcgggagcgactgctgtactgctaggacgtaaatccttaggccatctctgtccacaggatgttcaga

SEQ ID NO: 6542 - DNA, 120 bp, Artificial Sequence
  ENSG00000006530_34 (sequence is synthesized)
aatggccaagaatactgtgggcttgggagatcagaaatgttctttccaaaagagatgatccttgagctagacctgggaggaagcaggcaggagaagactacccattcttctcagctgagg

SEQ ID NO: 6543 - DNA, 120 bp, Artificial Sequence
  ENSG00000006530_35 (sequence is synthesized)
aaacagcccatgggacaggggcctggagacaggagtgacctagttatggctttgttatgacacaggacagcctttaactgaactggctggcctggaaatgtcatgtgggaattgtgggaa

SEQ ID NO: 6544 - DNA, 120 bp, Artificial Sequence
  ENSG00000006530_36 (sequence is synthesized)
ttaaggtgtgaagaattgttgagacttgggtatataatgatttgatcatggcagttcattgattatacaaatgaaccacactaaaacgtggagaggctgtatgtgggggtggggagtggg

SEQ ID NO: 6545 - DNA, 120 bp, Artificial Sequence
  ENSG00000006530_37 (sequence is synthesized)
acagttccacttgatgtcttgcagatcaagacattcatcctgcatcccatggatcaaggaataatttcaactttcaagttttattatttaataaataaattgtggaccaaaggtcatcaa

SEQ ID NO: 6546 - DNA, 120 bp, Artificial Sequence
  ENSG00000006530_38 (sequence is synthesized)
atccgagccggttcccgcccccggcccgaactggcccgcgcgcgctcgcagccccgcggcggaacccgagggcggcggcagcggtttcccttgaacgagccggggaatctggagggagca

SEQ ID NO: 6547 - DNA, 120 bp, Artificial Sequence
  ENSG00000006530_39 (sequence is synthesized)
aaacttcaaataattaagaggaggacctagatcagagttcagcctttcagttcattgggaagtctcccaacttggttgtgggactcttataataagtctccaggtcaggtagggaggtga

SEQ ID NO: 6548 - DNA, 120 bp, Artificial Sequence
  ENSG00000006530_40 (sequence is synthesized)
atacttgatgtccttttgtcagttatgaagataatatccctgacctaaaccgtttttgtgcttgtacattgtaagattctttagtgaagacatatttgtgctgctcatttgtttgcttta

SEQ ID NO: 6549 - DNA, 120 bp, Artificial Sequence
  ENSG00000006530_41 (sequence is synthesized)
agtatatgcaatgacaaataacaagtcccttgtgaagactgaactagtagcctggcttcattatcttgatattaaaaatagctaaaacaagtaaatatagccacatccttttgggaatac

SEQ ID NO: 6550 - DNA, 120 bp, Artificial Sequence
  ENSG00000006530_42 (sequence is synthesized)
cacccctatagactgtttgtttctggattggtcccaagaacacagaactggactggtagaagctctgggaatttgtttgtgtctgcagttgtctttgtagatttgtctaacccctgaatc

SEQ ID NO: 6551 - DNA, 120 bp, Artificial Sequence
  ENSG00000006530_43 (sequence is synthesized)
atccctgatctgaataacccccaaggatatcagttcagagcaagtgttacctctaaaagtcaaatcttcttaaaattgttgattcatatttttaaagctcatctccaagttcaactgatc

SEQ ID NO: 6552 - DNA, 120 bp, Artificial Sequence
  ENSG00000006530_44 (sequence is synthesized)
ctttcaaatataagacagcatttttgcccccccactgcaaaaatgtgcattataccttgcagatgaaattctgagactgagttgcctttttgttttatatcatttgagcttatgatgtca

SEQ ID NO: 6553 - DNA, 120 bp, Artificial Sequence
  ENSG00000006530_45 (sequence is synthesized)
gaaataccaaaatagaaacatgaaaatcaaaagtggcaaatgtgtgaagcatttagtaataaaaataggtggcagacctcatgtttgtttctgaaatgttttaatggatgacagtgagaa

SEQ ID NO: 6554 - DNA, 120 bp, Artificial Sequence
  ENSG00000006530_46 (sequence is synthesized)
tagatactataaattaattcctctctttagcgattgttacaatagatactataaattaattcctctctttagcagttgttacagtatatactataattcctctttttagcgattgttatc

SEQ ID NO: 6555 - DNA, 120 bp, Artificial Sequence
  ENSG00000006530_47 (sequence is synthesized)
tagctgttctaaacctgtgttttacgaatttgattacttctttgtttaaatgtattatctttcatatggctctaagttgttttggaaatcaattcaaataaactttaatattaaattaaa

SEQ ID NO: 6556 - DNA, 120 bp, Artificial Sequence
  ENSG00000006530_48 (sequence is synthesized)
cggaggtgagtggggaaggggtcggtagtcacagcatttgattcgttcgtcatcggcctgcccctctgtggtgtcccatccttcctctctgttagctgacctagacttaggcacatattg

SEQ ID NO: 6557 - DNA, 120 bp, Artificial Sequence
  ENSG00000006530_49 (sequence is synthesized)
tgtgccaagcattttgccaggctctgggtcatattagcggggagctgaaaaggatggcagaatctccttgggagtcatggatttagagttggacttctgaagactcccatcgttttcgaa

SEQ ID NO: 6558 - DNA, 120 bp, Artificial Sequence
  ENSG00000006530_50 (sequence is synthesized)
ccaaggttcttccctaaagtgagttttaggtctccttttatttttccatatgtaaataatgcagaaggttactacattaagacacatagagaattgtctagctggcaaatgttaatagtg

SEQ ID NO: 6559 - DNA, 120 bp, Artificial Sequence
  ENSG00000006530_51 (sequence is synthesized)
gcttttactttaacattttttataaaggatctggaagcagttttcagttcaacactgaatttttctgtattatgaaatgccatgcttagaataacctatgtaagtgaaaaaaattggaaa

SEQ ID NO: 6560 - DNA, 120 bp, Artificial Sequence
  ENSG00000006530_52 (sequence is synthesized)
tagaatctggaattgggaggttattcaattgtcaatacggaaaaaaaggaggctcttcatatagcctttgaagacatgtggccatatattactgtattcagacaagactataggtaaaca

SEQ ID NO: 6561 - DNA, 120 bp, Artificial Sequence
  ENSG00000006530_53 (sequence is synthesized)
gaaggtatccccatagtgactggcgtcacagtttcgatataaatattgaattaaatgcatgagttatggaagggtttcatagactgtaatgatattaatgttgatacaccttgggtatat

SEQ ID NO: 6562 - DNA, 120 bp, Artificial Sequence
  ENSG00000006530_54 (sequence is synthesized)
atagaaagactatgtatatgagttccttaagacatggcaggacccttgccttttaatacatatttgaaaattataaccatgttgttcaaatcccaaaatactctgggaggagataggggc

SEQ ID NO: 6563 - DNA, 120 bp, Artificial Sequence
  ENSG00000006530_55 (sequence is synthesized)
caaaaaaagaaaataaatcctttttcatggatggtagaattaggatgtttccagaaccagcactgtgcccatcgtagtaggcactgaatttttttttgtaaaagaacattaggatagctc

SEQ ID NO: 6564 - DNA, 120 bp, Artificial Sequence
  ENSG00000006530_56 (sequence is synthesized)
ctcaagagaggatgttgttttccataatgaacttcttctggtgctgctgtgagacctccaactccagtaggccactgatgtgtttgagctgttctgaatattctcttctccccagggagc

SEQ ID NO: 6565 - DNA, 120 bp, Artificial Sequence
  ENSG00000006530_57 (sequence is synthesized)
attaaatcactacaagtagagtcccctatctatatatagcttcaaactatgaaccatcaaagctgaggatgacaacaggctgcattagccaaattttaagagtaatgacgttagtgttct

SEQ ID NO: 6566 - DNA, 120 bp, Artificial Sequence
  ENSG00000006530_58 (sequence is synthesized)
atgaaataatcatctctgccgatctcaggactggctttcagccttgagtaagagaatgtgtgtcaagcctttttatattttgaagcacttcacagtatccattactatttatgtcagttc

SEQ ID NO: 6567 - DNA, 120 bp, Artificial Sequence
  ENSG00000006530_59 (sequence is synthesized)
accatgtcctcctattcccagggccttcatgaaaaactggaaaaggtattgagtaccttggacatttcccaggcctttttcccttttccaatacagaatacccttccaagttctgtgatt

SEQ ID NO: 6568 - DNA, 120 bp, Artificial Sequence
  ENSG00000006530_60 (sequence is synthesized)
tgttaagtcctacctctgccagaattttattggtaaagaacactataaatcctccttcagggcatctgaggagctggtgtgttcccatgccaactggtaatctgctcagctccgcttttc

SEQ ID NO: 6569 - DNA, 120 bp, Artificial Sequence
  ENSG00000006530_61 (sequence is synthesized)
tgtgctttgtctcagagctccctctcgtgcccatttagggatcacacatttctgctgcagcggcctggtctccatggctacttcattatctacacaggcacataagtttgttgttcttgc

SEQ ID NO: 6570 - DNA, 120 bp, Artificial Sequence
  ENSG00000006530_62 (sequence is synthesized)
ctttggcataaattcttcagagactgaatagctgattctgcagcctttgattttcttgctgtatctataagaagggaaaatcctgttccttctacagaatgtccagaaatcacacaatct

SEQ ID NO: 6571 - DNA, 120 bp, Artificial Sequence
  ENSG00000006530_63 (sequence is synthesized)
tcattgacagtctggccagtgagaccagcaatattcaaatctcctttatgatactggtatccagaaatagagaccccaattctattgctaaggttaggcgaagccactatgttctgcatt

SEQ ID NO: 6572 - DNA, 120 bp, Artificial Sequence
  ENSG00000006530_64 (sequence is synthesized)
gttagcaccagtggcagccagtgtccttctgttctctacaggaagtgaaatcaagtaatgtctgtttcctctggatatctgaagagaacatagtgaagctgcgttagaaaactctgatac

SEQ ID NO: 6573 - DNA, 120 bp, Artificial Sequence
  ENSG00000006530_65 (sequence is synthesized)
caaatagttgtcaagaagacccaaataaatggagagatagctgagagatcagttgcctgatggttaacgtaagctttgtgacacattggaggaagtcaataaataaatatttgttgcatg

SEQ ID NO: 6574 - DNA, 120 bp, Artificial Sequence
  ENSG00000006530_66 (sequence is synthesized)
aatcaagtaatgtctgtttcctctggatatctgaagagaacatagtgaagctgcgttagaaaactctgataccgttttgtagagttactgttgttaataaatgataaatggactgattta

SEQ ID NO: 6575 - DNA, 120 bp, Artificial Sequence
  ENSG00000006530_67 (sequence is synthesized)
gtggtgagtgcagcggcgcccaggcggggagcgcagtgcgggtcgctgggactgagcgcgcgagcgggtgataacctcctaaggagagcagcctgtcaagaagctcaggtgtttggcaat

SEQ ID NO: 6576 - DNA, 120 bp, Artificial Sequence
  ENSG00000006530_68 (sequence is synthesized)
accccatctatacaaaaaaactttgtaaaaaaattagacaggcatggtggtgtgggcctatagtcccagttgccatagatagtgattcctctgaaggatctgggcaaagtaaattgaaaa

SEQ ID NO: 6577 - DNA, 60 bp, Artificial Sequence
  ENSG00000006530_69 (sequence is synthesized)
agtgattcctctgaaggatctgggcaaagtaaattgaaaaccttctggaaaacaatgtta

SEQ ID NO: 6578 - DNA, 120 bp, Artificial Sequence
  ENSG00000006530_70 (sequence is synthesized)
tataaaatttgaatggatgaagagttgtttcttatggatgagcaaagaaagtgatttcttgacatggaatgtaatcctggtgaggatgccgtgaaccatgttgaaatgacaaaaaaagga

SEQ ID NO: 6579 - DNA, 120 bp, Artificial Sequence
  ENSG00000006530_71 (sequence is synthesized)
tttaaaatattacataaacttagttgacaaagcattggcagggattgagaagactgactccaactttgagagaatttctgctataggtcacatgctatcgaactgcatacatgctgcaga

SEQ ID NO: 6580 - DNA, 120 bp, Artificial Sequence
  ENSG00000006530_72 (sequence is synthesized)
aactgcatacatgctgcagataaattcatgaaaggatgagtcaacagacattgcaaacttcattgctgtcttattttaagaaatggtcacatccaccccaaccttcagcaaccaccaccc

SEQ ID NO: 6581 - DNA, 120 bp, Artificial Sequence
  ENSG00000006530_73 (sequence is synthesized)
gcatggaggcaagacactctacagcaaagattatgactcactaaaggcctagataattgttagcattttttaatttagcatttaatgttagcattttttttaagttaaggtgcatacttt

SEQ ID NO: 6582 - DNA, 120 bp, Artificial Sequence
  ENSG00000006530_74 (sequence is synthesized)
ttttgacataatgctgttgcacactcaatagactatagtataatataacttttatatgcactggaaaaccaaaaagtttttttgactcattttattgtgatactcactttactgcagtgg

SEQ ID NO: 6583 - DNA, 87 bp, Artificial Sequence
  ENSG00000006530_75 (sequence is synthesized)
tttgactcattttattgtgatactcactttactgcagtggtcaggaaccgaacctgcaacatttgtgaggatctcactctgtcaccg

SEQ ID NO: 6584 - DNA, 120 bp, Artificial Sequence
  ENSG00000006530_76 (sequence is synthesized)
tgggctcaagggatcttcctgcttccacctcctaagtagctgggactataggcccataccaccatgcctaattttttacaaagtttttttgtatagatggagtctcactttgttgcccag

SEQ ID NO: 6585 - DNA, 120 bp, Artificial Sequence
  ENSG00000006530_77 (sequence is synthesized)
gaatccctgcgtgcttctgggaaagtctgaaactctccagcatcctttctttttttcttttaaaagctttcactatttaattgcactatttttgtcatcatagctctgtcctgacacata

SEQ ID NO: 6586 - DNA, 120 bp, Artificial Sequence
  ENSG00000006530_78 (sequence is synthesized)
tcctgacacataatttataatttatcatgtagctatttcattatgtagtactggtttaaaactacataagagctttaagaaataagataactgtgtgtttagcattaataaataatacat

SEQ ID NO: 6587 - DNA, 120 bp, Artificial Sequence
  ENSG00000006534_0 (sequence is synthesized)
cttaacagcagggccaccaggcagagcgggacagccaggaggaagggcagcttggcagagcctcaggatggacccccttggggacacgctgcggcgactgcgggaggccttccacgcggg

SEQ ID NO: 6588 - DNA, 120 bp, Artificial Sequence
  ENSG00000006534_1 (sequence is synthesized)
gcgcacgcggccagctgagttccgggctgcgcagctccaaggcctgggccgcttcctgcaagaaaacaagcagcttctgcacgacgcactggcccaggacctgcacaagtcagccttcga

SEQ ID NO: 6589 - DNA, 120 bp, Artificial Sequence
  ENSG00000006534_2 (sequence is synthesized)
gtcggaggtgtctgaggttgccatcagccagggcgaggtcaccctggccctcaggaacctccgggcctggatgaaggacgagcgtgtgcccaagaacctggccacgcagctggactccgc

SEQ ID NO: 6590 - DNA, 120 bp, Artificial Sequence
  ENSG00000006534_3 (sequence is synthesized)
cttcatccggaaggagccctttggcctggtcctcatcattgcgccctggaactatccgctgaacctgacgctggtgcccctcgtgggagccctcgctgcagggaactgtgtggtgctgaa

SEQ ID NO: 6591 - DNA, 120 bp, Artificial Sequence
  ENSG00000006534_4 (sequence is synthesized)
gccatcggagattagcaagaacgtcgagaagatcctggccgaggtgctgccccaatacgtggaccagagctgctttgctgtggtgctgggcgggccccaggagacggggcagctgctaga

SEQ ID NO: 6592 - DNA, 120 bp, Artificial Sequence
  ENSG00000006534_5 (sequence is synthesized)
gcacaggttcgactacatcttcttcacagggagccctcgtgtgggcaagattgttatgactgctgccgccaagcacctgacacctgtcaccctggagctggggggcaagaacccttgcta

SEQ ID NO: 6593 - DNA, 120 bp, Artificial Sequence
  ENSG00000006534_6 (sequence is synthesized)
cgtggacgacaactgcgacccccagaccgtggccaaccgcgtggcctggttccgctacttcaacgccggccagacctgcgtggcccccgactacgtcctatgcagccctgagatgcagga

SEQ ID NO: 6594 - DNA, 120 bp, Artificial Sequence
  ENSG00000006534_7 (sequence is synthesized)
gaggctgctgcctgccctgcagagcaccatcacccgtttctatggcgacgacccccagagctccccaaacctgggccgcatcatcaaccagaaacagttccagcggctgcgggcattgct

SEQ ID NO: 6595 - DNA, 120 bp, Artificial Sequence
  ENSG00000006534_8 (sequence is synthesized)
gggctgcggccgtgtggccattgggggccagagcgatgagagcgatcgctacatcgcccccacggtgctggtggatgtgcaggagatggagcctgtgatgcaggaggagatcttcgggcc

SEQ ID NO: 6596 - DNA, 120 bp, Artificial Sequence
  ENSG00000006534_9 (sequence is synthesized)
catcctgcccatcgtgaacgtgcagagcttggacgaggccatcgagttcatcaaccggcgggagaagcccctggccctgtacgccttctccaacagcagccaggtggtcaagcgggtgct

SEQ ID NO: 6597 - DNA, 120 bp, Artificial Sequence
  ENSG00000006534_10 (sequence is synthesized)
gacccagaccagcagcgggggcttctgtgggaacgacggcttcatgcacatgaccctggccagcctgccttttggaggagtgggtgccagtgggatgggccggtaccatggcaagttctc

SEQ ID NO: 6598 - DNA, 120 bp, Artificial Sequence
  ENSG00000006534_11 (sequence is synthesized)
ggagaagctcaacgccctccgctacccgccgcaatcgccgcgccgcctgaggatgctgctggtggccatggaggcccaaggctgcagctgcacactgctctgagcccttccccaggccca

SEQ ID NO: 6599 - DNA, 120 bp, Artificial Sequence
  ENSG00000006534_12 (sequence is synthesized)
ggctgtagaccaccatgacagctgtcgcctgcggctggtggagacggggcctgggctcccgggcccgaggaggaaaaggattgccaaggctccagggcacccctcaaagcagcgcctgcc

SEQ ID NO: 6600 - DNA, 120 bp, Artificial Sequence
  ENSG00000006534_13 (sequence is synthesized)
tcctccctcctgggtcttccctctccctgcctcagcctcctccctcagccgctcccaaccatgagagccgaggtgggaggcatgggaaacagtgcagtgactcaccccctgcccccgcac

SEQ ID NO: 6601 - DNA, 120 bp, Artificial Sequence
  ENSG00000006534_14 (sequence is synthesized)
caaccacccatattcaggagaagaggacagacacggcacctctgagtcacccctctcctgtggagcgggcgtccgaggggccctggcatctgactcaggccacaccatggaatcactgca

SEQ ID NO: 6602 - DNA, 120 bp, Artificial Sequence
  ENSG00000006534_15 (sequence is synthesized)
tgcatccaaggccattcctgccctctctgagtctcagtttttccatttgttcagtggagagaattaaccattgatacctcctggctgggtgaggcggctcacacctgtaatcccagcact

SEQ ID NO: 6603 - DNA, 86 bp, Artificial Sequence
  ENSG00000006534_16 (sequence is synthesized)
tgcgtcactgaactccggcctgggtgacagaaggaggctctgccttaaaaaaaaaaaaaaaaaaaacctcctgggactgttgcaag

SEQ ID NO: 6604 - DNA, 120 bp, Artificial Sequence
  ENSG00000006534_17 (sequence is synthesized)
aaaaaaaaaaaaaaaaaaaacctcctgggactgttgcaaggatgaaatgaaggattgagggattgagggattgctgagctggagctccaggtgtcctatctttctcagtggggtggcacg

SEQ ID NO: 6605 - DNA, 120 bp, Artificial Sequence
  ENSG00000006534_18 (sequence is synthesized)
gagcggggccgcctccctcttctctccaggcaggtggggctgtggttatgcgatagggtctcccttccctccagcccatgccagaggagcttgtaactctttatcctcatggtgcccact

SEQ ID NO: 6606 - DNA, 120 bp, Artificial Sequence
  ENSG00000006534_19 (sequence is synthesized)
acgagtcatactcttccccatgctgctcatcctcctgggccccatccactcagccaaagcagaatgcagggtttcctgcctgacaacccttctcacctcccaagtcccacttttgaacaa

SEQ ID NO: 6607 - DNA, 120 bp, Artificial Sequence
  ENSG00000006534_20 (sequence is synthesized)
gctgatgattctgaaactggcccaatttcctaacaagccggatgcttgagaaacctacatttggacaatgagaggctgctcctgcggcctgcgggccacctcctcttccttggctcctgc

SEQ ID NO: 6608 - DNA, 120 bp, Artificial Sequence
  ENSG00000006534_21 (sequence is synthesized)
tttctttttagactatatcaacctacaactttagtcgggaagagggacaggggtggacctgagtttcgtctcctgtctctctggctgatgtcacctgaataaagccttcttccctggcaa

SEQ ID NO: 6609 - DNA, 120 bp, Artificial Sequence
  ENSG00000006534_22 (sequence is synthesized)
ggggctccatcccacacagaggacaggggctctgcagtccttcacccccaccctaactatctaatcacgggccaccggtgtgggcatggtccagaagacctcaccgccctcccaggatgg

SEQ ID NO: 6610 - DNA, 120 bp, Artificial Sequence
  ENSG00000006534_23 (sequence is synthesized)
cctgctcaccctcgggggctgtggtggagcagctgtccccaagcccacacccagtcctgcagccgcctccaggtccatggcagaggggagtggtgcgagggtcttcatgatggaccccct

SEQ ID NO: 6611 - DNA, 120 bp, Artificial Sequence
  ENSG00000006534_24 (sequence is synthesized)
ttgggggtatgagagggtgcactggggcaggggggcatggagggcagctgggacagcaggggatgaagacacctgcgccctccatgaagcggggctaaaagcagctcctcccctaggcca

SEQ ID NO: 6612 - DNA, 120 bp, Artificial Sequence
  ENSG00000006534_25 (sequence is synthesized)
gagccacccttgcacattcatccagtcacttatttctgtattcatgcagcaactatttgctgagcacctactatgtgccaggtactgttctaggctctggggatatagcagagaataaaa

SEQ ID NO: 6613 - DNA, 120 bp, Artificial Sequence
  ENSG00000006534_26 (sequence is synthesized)
ctggggatatagcagagaataaaacacagttcccatgcctacgaagatgaccttctatcggagacaataaaacagcaaataaataattgcacagcaaggccgggcatggtggctcacacc

SEQ ID NO: 6614 - DNA, 120 bp, Artificial Sequence
  ENSG00000006534_27 (sequence is synthesized)
taataataaagataataattacacagcatattgggttgaaatatgtgccctggagacacacccagggtgaaggggagagagggggccaggatcagggtgctgttgtatatgtgggggtca

SEQ ID NO: 6615 - DNA, 120 bp, Artificial Sequence
  ENSG00000006534_28 (sequence is synthesized)
gggaaggtttctctgagaagggggctttagagcagagacgtgaagatggaggggaggctccccatggatgctggggagatggcagcgggcacagcacgtgcaaaggccctgaggcaggag

SEQ ID NO: 6616 - DNA, 120 bp, Artificial Sequence
  ENSG00000006534_29 (sequence is synthesized)
gtgctgggtgtttctgcttgaggagcagcaaggaggccagcatagctgtcgggggtgggagaggaagaaacagcaaagatgaggtctggggtatgggccacactatgtagggcctcggag

SEQ ID NO: 6617 - DNA, 120 bp, Artificial Sequence
  ENSG00000006534_30 (sequence is synthesized)
gccgtgaggccttggccttctctctgggtacagcaggcatcatggcctctgtctagaccctgaaggcttggggcctcagcccctcccaatcccagtggcagccaaggcagaaccccaaga

SEQ ID NO: 6618 - DNA, 120 bp, Artificial Sequence
  ENSG00000006534_31 (sequence is synthesized)
aacacacttcccccaacccctcacccatcagggcccatgcacctgcctgcccctgcctcaggacacctgcccctgcctcaggacaccacctgcccctgcctcagcacatctgccccaggg

SEQ ID NO: 6619 - DNA, 120 bp, Artificial Sequence
  ENSG00000006534_32 (sequence is synthesized)
gctgcccccggctcctattctctggacaaaatatctcctccctttgccttgaaggctgtagtgttcagaccttcccccagcccattgggctccctggggactgactcccccgccaccact

SEQ ID NO: 6620 - DNA, 120 bp, Artificial Sequence
  ENSG00000006534_33 (sequence is synthesized)
gagcttctgccaccggccgcctgccggccttcatgagacttgacctgacgtctgtctggtcccttttctcccttcggctctgattccacctcctgccttcccatcccagctgcaggagcg

SEQ ID NO: 6621 - DNA, 120 bp, Artificial Sequence
  ENSG00000006534_34 (sequence is synthesized)
gggccctacaaaggcagcagtagcccagaacattcaacctggtccctccctctggacctggtcacccccctgtccccaccctcagcaggcagcatctgcccagcgtcacgtgcaccctct

SEQ ID NO: 6622 - DNA, 120 bp, Artificial Sequence
  ENSG00000006534_35 (sequence is synthesized)
cagttaaccctttggtgaatctggttgggcaaccacacccagtggcccccagaagaggctcagagagagtgtgttcttgcccaagggcatgcagccaggaagagcagagccagagtttga

SEQ ID NO: 6623 - DNA, 120 bp, Artificial Sequence
  ENSG00000006534_36 (sequence is synthesized)
acctggctcaaaatagcccagtctcccaaagtcaggtcccaggtgacctaggaggtgtggcgggcaggccaccaggctcatggggccagagcacaggctgtgggaaagtccgtgtggaag

SEQ ID NO: 6624 - DNA, 120 bp, Artificial Sequence
  ENSG00000006534_37 (sequence is synthesized)
gcaccttcccccagcctcagtggctaggaggtgccagtgggcgtggcgtcttcctccctcttggggctcagctgtagccctggccttgcccctggttcgctgagtgacctcaggcagggc

SEQ ID NO: 6625 - DNA, 120 bp, Artificial Sequence
  ENSG00000006534_38 (sequence is synthesized)
atctccttctctgggcttcgctggtcctctggcccatccagcaccccactggcccgtccccctctgccctgacccgggagagcctgcaccccataacctcaggcgctgcctcagccaggg

SEQ ID NO: 6626 - DNA, 120 bp, Artificial Sequence
  ENSG00000006534_39 (sequence is synthesized)
agccagcctggccccagtgtccctgacctgttctccagcggcctgcagcctgctgcctggctggtctctcctcccttggggcgcagagggcagggagcactggctagccgagagcaggac

SEQ ID NO: 6627 - DNA, 120 bp, Artificial Sequence
  ENSG00000006534_40 (sequence is synthesized)
aatgtccctattgattcgggtctcctcactcctgcttagaagcctgacagtggccctggcccctgggctgtgggaactgacagcatttacctaggggtggctgtgcctgtgtctcctgtg

SEQ ID NO: 6628 - DNA, 120 bp, Artificial Sequence
  ENSG00000006534_41 (sequence is synthesized)
gaccaatctccaccctgctctttgggagactgaggtgggaggattgtttgaggccaggagttcaagacctacctaggcaacacagcaaggcactctgcaaaaaatcaaaacaaacttttt

SEQ ID NO: 6629 - DNA, 120 bp, Artificial Sequence
  ENSG00000006534_42 (sequence is synthesized)
ttgaaattaaaaaaaaacaaaaccctaagtcagatcccatccctgctcttctcaggagtccttgcctggctgcctggccccctcaccttgcccactctgcttcttgctaaacaggagcag

SEQ ID NO: 6630 - DNA, 120 bp, Artificial Sequence
  ENSG00000006534_43 (sequence is synthesized)
agcaagcgcacagccacctcggggcctttgcagccgccagggcctctgcccaaagtatgccgcctcccagtacccacgacttgcttgttccttgacttcaggtcactgctccaatgtgac

SEQ ID NO: 6631 - DNA, 120 bp, Artificial Sequence
  ENSG00000006534_44 (sequence is synthesized)
gcctggagacctgcactgaccgctttgtaaaaacagcacacacacacatgctcatgtggatgtatacatgtgcacacctgtgcacgcccacagccacacgctccagcagtctccaccccc

SEQ ID NO: 6632 - DNA, 120 bp, Artificial Sequence
  ENSG00000006534_45 (sequence is synthesized)
accctgctccatgatttccctagcacagccacgtcctaatggagccgtcagcgttctcactttcacatggaacgactgccccctgcaaggtcggcctcagggccggtccctctgtttggc

SEQ ID NO: 6633 - DNA, 120 bp, Artificial Sequence
  ENSG00000006534_46 (sequence is synthesized)
acagagacagcacctcacacaggaagcacgcactgaacatggagtgagtgagtgaacgaatgaatgaaaatgaatgaatgagttgtggaagcaggccctgcctggaggaggctgtgccct

SEQ ID NO: 6634 - DNA, 120 bp, Artificial Sequence
  ENSG00000006534_47 (sequence is synthesized)
acctgagatgcacacgtggctagtgagtggaaccttcactaccgggtcaggacggtatctgccagggtttccctgggaagctactattgtttgtttctttattatttggaagcaagtctc

SEQ ID NO: 6635 - DNA, 120 bp, Artificial Sequence
  ENSG00000006534_48 (sequence is synthesized)
taagcctaccccaccctcaccaggtggaggtaattaagctgtatgctgctctatcatattgttagttattatctagttattttatacattcttttcttattccatttgtggtttggtgga

SEQ ID NO: 6636 - DNA, 120 bp, Artificial Sequence
  ENSG00000006534_49 (sequence is synthesized)
attttgttgtattgccatttgatacctttctcttcctcctttgtatgattgttttatagggcctgtgagttttgtacttttgtgtgtattatggcaaataccaacttgtttttatgttaa

SEQ ID NO: 6637 - DNA, 120 bp, Artificial Sequence
  ENSG00000006555_0 (sequence is synthesized)
acaagggtgaggccaggggagcagagggagcagtcatggcggagctggaggctgtggccgacgatctagacgccctcatcgacgacctggactacctcccgggccactttcacctggaga

SEQ ID NO: 6638 - DNA, 120 bp, Artificial Sequence
  ENSG00000006555_1 (sequence is synthesized)
tgcagttgaacttcgagccgcgctcgccggccccacagcgcgcccgggacctgaagctgcagcgggagggtctgcggcaggagctccagctggcggccgccccgcagcgccccgctgtgc

SEQ ID NO: 6639 - DNA, 120 bp, Artificial Sequence
  ENSG00000006555_2 (sequence is synthesized)
gtcacctcctgggcgctttcgcattctacctggaggagctggacgaggcccgcgagtgcttcctcgaggtggcccacgagcacccgggcaacctcaatgcctgggccaatctggcacacg

SEQ ID NO: 6640 - DNA, 120 bp, Artificial Sequence
  ENSG00000006555_3 (sequence is synthesized)
tgtacgggcggctgggccaggaagaagaggaggaggcgtgcgccgcacggctggccgacctcatgggcctggcagaggagcccgaggccgccggggacccccagctccgcgccgctcgct

SEQ ID NO: 6641 - DNA, 120 bp, Artificial Sequence
  ENSG00000006555_4 (sequence is synthesized)
gcctggccgagcagggctacgcgcatggcttcgacgtcggctgcgccagcccagaggagcgtgcgcgggggctggcggcaggcatcgcgctctacgacaaggcgctaggctacgggcagc

SEQ ID NO: 6642 - DNA, 120 bp, Artificial Sequence
  ENSG00000006555_5 (sequence is synthesized)
agatcccgatggaggagaaaaggggctggtatttcaccatggcaacactctacatcaggctagatggcatcttcctggagctgggcagtgaggagcagaagagactgcctgccttcaacc

SEQ ID NO: 6643 - DNA, 120 bp, Artificial Sequence
  ENSG00000006555_6 (sequence is synthesized)
gcacgctggccctactccggcaagtgctgaagtccgaggacccccgccaccgagccctggcctggtgctacctcgggatgctgctggagcggaaggacaccttctccaccacccccatgg

SEQ ID NO: 6644 - DNA, 120 bp, Artificial Sequence
  ENSG00000006555_7 (sequence is synthesized)
gcgtccatgactgcgggtactcagggaccgaccctctagactgcttcggcaaggccattgagattgccaagaaccaacctcccatcctgaatcgcctggcaaaaatcttctacttcctgg

SEQ ID NO: 6645 - DNA, 90 bp, Artificial Sequence
  ENSG00000006555_8 (sequence is synthesized)
gaattccaggtgtgagccactacacccagccctgtaaggtttttgagtgaaagaatgcaggagcctccactcactgcaggaatcccttct

SEQ ID NO: 6646 - DNA, 120 bp, Artificial Sequence
  ENSG00000006555_9 (sequence is synthesized)
aagaatgcaggagcctccactcactgcaggaatcccttctacaattcctggtcagtgagcccccagcctcttctggattggcacgggtggaatcagactgaccagagttgaaatctggct

SEQ ID NO: 6647 - DNA, 120 bp, Artificial Sequence
  ENSG00000006555_10 (sequence is synthesized)
tctccgccttgtggaacttgcagcaagccacttacccccacaaacttcagttcccaaatctgtaagatataaataacaacactttccttaaaatgttgtcaacagacacagtgaggtagc

SEQ ID NO: 6648 - DNA, 120 bp, Artificial Sequence
  ENSG00000006555_11 (sequence is synthesized)
atctaaagcacagtgccttggacatagggggtgcttttctgaaagccagtagaggtcatttaatatagtggatcagagctctggctctgaacacagacagccttggttcaaatcccacaa

SEQ ID NO: 6649 - DNA, 120 bp, Artificial Sequence
  ENSG00000006555_12 (sequence is synthesized)
caccacgtgctacgggacctttggcaaaatactcttgcccagattctgagcctcaatttctttatctgtagactggagttgttatgagaattacattagattttgtatgtaaaactcagc

SEQ ID NO: 6650 - DNA, 120 bp, Artificial Sequence
  ENSG00000006555_13 (sequence is synthesized)
atcaagcacacagtaagatttcataagagactgactgctactaatttaatattaggcatatttttgaattatctcactgtctcttgatgcagtccactgcatagtcattcagctctgcaa

SEQ ID NO: 6651 - DNA, 120 bp, Artificial Sequence
  ENSG00000006555_14 (sequence is synthesized)
gttacacacttaggtgagttctgcctcctgctagcttcccgcactggtcccagacctgcctcctagagcccacacagagcccatgtgcttgaggaagccgactcggagctcccagtttac

SEQ ID NO: 6652 - DNA, 120 bp, Artificial Sequence
  ENSG00000006555_15 (sequence is synthesized)
ttcactgcaagccgaagagtcctcccatcccctcatcttctccactactatccacatgacctagtggcaaatctactcccagtcttggtctcagtggcttaattactttgccagcaggta

SEQ ID NO: 6653 - DNA, 120 bp, Artificial Sequence
  ENSG00000006555_16 (sequence is synthesized)
cgaggcaggagtgaaattccttcactgtcgtggatgtggttattattctagataataatgacattaaccataatagtaaataataaaatatctctataaaattctgcatttcatcaagca

SEQ ID NO: 6654 - DNA, 120 bp, Artificial Sequence
  ENSG00000006555_17 (sequence is synthesized)
acctgcgggaggcgccctgagaccgagaggccgcagcgcccggggcctctgccggctgcccctcgcctcccgcacggagctcgctcggggaacgcccccatccactgccctccacagcct

SEQ ID NO: 6655 - DNA, 120 bp, Artificial Sequence
  ENSG00000006555_18 (sequence is synthesized)
gcatgacctcaagcgggccaagatgggtctcgggggcatgcctgacaggaaccacctggcctgtgccaaggctgaccttgaggaagtggtcagggtgtgcccaggcttcaaggcgtacct

SEQ ID NO: 6656 - DNA, 120 bp, Artificial Sequence
  ENSG00000006555_19 (sequence is synthesized)
ggacatcggccaggtctactactatatgggcgtggacgcggtgcaggagctgctggcggtggacgaggcggcgctgaaccaggcgctggtgttcctggccaaggcgggcgagtcggagct

SEQ ID NO: 6657 - DNA, 120 bp, Artificial Sequence
  ENSG00000006555_20 (sequence is synthesized)
gggtgccacgctgcccgagctgcagctgctgcgcggcaagtgcctgcgcatcaagggcgaggacgccaacgcggccgcctgcttcaagcgcgcagtggagctggacgacgcgggctccag

SEQ ID NO: 6658 - DNA, 120 bp, Artificial Sequence
  ENSG00000006555_21 (sequence is synthesized)
ccacaccgacggcttcggctgcctgctcgaggcgctgctggcgcagtggagccaggcacagctgagcgacggggagctgggccgcgaggtggacgcctggctgcgccgcgcccaggacaa

SEQ ID NO: 6659 - DNA, 120 bp, Artificial Sequence
  ENSG00000006555_22 (sequence is synthesized)
gtgtggcgcgggcacacggacgaggtgttggggctggcccgggccctggtggcccagggacggccggcgctggtgcggctgctcttcgagaccatggagcgcgagggcgagggcgccagc

SEQ ID NO: 6660 - DNA, 120 bp, Artificial Sequence
  ENSG00000006555_23 (sequence is synthesized)
cgcgggaccgccgggctgtctcattctagggctcaggtgcccaggccggaggctccctgggaccccgcccaggccccgcccagctgatgggaccaggtccggatggactccctgccttag

SEQ ID NO: 6661 - DNA, 120 bp, Artificial Sequence
  ENSG00000006555_24 (sequence is synthesized)
gctgacctgggagcggagccagttcgattcttggtcgggaattgtgaatggggatgttgcgacacccgcgcggtttgaaacgcccacccagactggaaggcctgattcccgagagcagaa

SEQ ID NO: 6662 - DNA, 120 bp, Artificial Sequence
  ENSG00000006555_25 (sequence is synthesized)
gaggctgggagcagaggtgagaaaacactgggaagctgccaattaagggacagaattttctagacatacaggtaaaataagatggttgtgaggcttctgagagaaacagaagacagctac

SEQ ID NO: 6663 - DNA, 120 bp, Artificial Sequence
  ENSG00000006555_26 (sequence is synthesized)
ctcagtgtggcagttttctagtccgggcgctcaatccctcaggcctgagtgcctgtctttggactccggtaggccacactctatccttatgagaaagccccgtttactttagttgactgg

SEQ ID NO: 6664 - DNA, 120 bp, Artificial Sequence
  ENSG00000006555_27 (sequence is synthesized)
agtgtggtctcagctcctgcagccagaaaagccctgactaaagcagagggcagggtggcacggcgagtgagttacgggacagggccctagcctaagcctcgtgctcagggctcattcctg

SEQ ID NO: 6665 - DNA, 120 bp, Artificial Sequence
  ENSG00000006555_28 (sequence is synthesized)
cctctctgctacttttctagtaggcctccttcttggtccgcttggcccaaaaggcctcccaaatgctctgaaatagagctcatcaatagaaccttcacttgatttccctcttcttggggg

SEQ ID NO: 6666 - DNA, 85 bp, Artificial Sequence
  ENSG00000006555_29 (sequence is synthesized)
catcaatagaaccttcacttgatttccctcttcttgggggaaactaagggcgccacccattaggaggtgccacctgccccccccc

SEQ ID NO: 6667 - DNA, 120 bp, Artificial Sequence
  ENSG00000006555_30 (sequence is synthesized)
actgcacccggccctgcccccagtcttgaccattctactaattttaaagaacatcttggaattttacactcttggaatcatagtcgtagaatcctttttttgagacagagtctcactctg

SEQ ID NO: 6668 - DNA, 120 bp, Artificial Sequence
  ENSG00000006555_31 (sequence is synthesized)
tctcagctcactgaaacctcagcctcccaagttcaagtgattctcgtacctcagcctcctgagtagctggaattccaggctgtactcactgctttgctcatatcctcgctcattaccagg

SEQ ID NO: 6669 - DNA, 120 bp, Artificial Sequence
  ENSG00000006555_32 (sequence is synthesized)
gacaggccagcacccctgcattgcatctcacatatccactgatggatggagaacagactgaaattcagtgccttagagaccacacactccaaccccctcattgtgcagatgggaaaactg

SEQ ID NO: 6670 - DNA, 120 bp, Artificial Sequence
  ENSG00000006555_33 (sequence is synthesized)
agagccatagaagggaagtggcttgcccaaagccacacttactgttttccccacactgtaccacaaactttcaccattcttcaggtttggaaaaatactaataaactgatcaacactaaa

SEQ ID NO: 6671 - DNA, 120 bp, Artificial Sequence
  ENSG00000006555_34 (sequence is synthesized)
gtggcctggcacccagccagcagggtaagggcagaggtggctgggcccttcctactggaaagggctccccaaaccgccaccccccaccaccacaggcctgggcagggctggcagcacaca

SEQ ID NO: 6672 - DNA, 120 bp, Artificial Sequence
  ENSG00000006555_35 (sequence is synthesized)
ccctactccggcaagtgctgaagtccgaggacccccgccaccgaggtggggacccgggggatgggtgggacagcagcctctgccccctgccaacagcccgctggcattgcatccacctct

SEQ ID NO: 6673 - DNA, 120 bp, Artificial Sequence
  ENSG00000006555_36 (sequence is synthesized)
ggcattacctccccttcttggctcctgtttcttcctccttcgctctgtcccctacactcatctgtgcacctcaaggagcccacataccttgcccaagtgaacatgccaactacaagtcac

SEQ ID NO: 6674 - DNA, 120 bp, Artificial Sequence
  ENSG00000006555_37 (sequence is synthesized)
tgtgactgcaggcttgcccgtctgcagctcatgacctggagggtgagaggtagtttcccctatttccacctatttatggtcagaagattgaagcctctgttggagaggagtcgagtcatt

SEQ ID NO: 6675 - DNA, 120 bp, Artificial Sequence
  ENSG00000006555_38 (sequence is synthesized)
tttttgcagggccagacagcaagagcagggactagaaccaccagagctggtgagagctgaagtcagaagagacctacgtacctgaaattaggtcccccgatgacacattgagcacagaat

SEQ ID NO: 6676 - DNA, 120 bp, Artificial Sequence
  ENSG00000006555_39 (sequence is synthesized)
aagcactaaaatgggttcactaacccctcacatggcccctctctccacctttgcttctctctgtccctgtgttgccctcagtgatcccactctactatcccttgctttgtcttcatgggt

SEQ ID NO: 6677 - DNA, 120 bp, Artificial Sequence
  ENSG00000006555_40 (sequence is synthesized)
gacacctaggatggggatggccccttccctctctccaccctgctgcttcctagagaccctctcccacccttcacccccagccctggcctggtgctacctcgggatgctgctggagcggaa

SEQ ID NO: 6678 - DNA, 120 bp, Artificial Sequence
  ENSG00000006555_41 (sequence is synthesized)
cccaggaagtacacttactccagaccttgctctccatcctctcttcattcaaaacaaaagagaccctccccatacccagtctggccccagcccatttctccagccttgaaatagaccctt

SEQ ID NO: 6679 - DNA, 120 bp, Artificial Sequence
  ENSG00000006555_42 (sequence is synthesized)
agactttttcccttgagaccttcattcacagtattccctctgccaggagttccctacctctccacccccagtggcatagtagaaagatgggtttagctggtgtctccttgccagccctgc

SEQ ID NO: 6680 - DNA, 120 bp, Artificial Sequence
  ENSG00000006555_43 (sequence is synthesized)
ccataggctgtgtgaccctaaggcaagtcacttacaacaggaagcagtcaatgacaatagtgagggtaagtgttattacccaggtagaaaccctgtactttgtaaggttgggggatgggg

SEQ ID NO: 6681 - DNA, 120 bp, Artificial Sequence
  ENSG00000006555_44 (sequence is synthesized)
gttgcctctggcccttcctctcacctgccctaggaagatgggagagcatacactgggaaggaggggtctgactgggctctggaaggctttactggatgtgaccggtgatgtggtcgtggg

SEQ ID NO: 6682 - DNA, 120 bp, Artificial Sequence
  ENSG00000006555_45 (sequence is synthesized)
ccaggctctcaggagttgagtgccaataggttgtgccccaaggtgttggggcttcgtgatgtgacaacttactggcaggtggataagggtggatatgggtaaagggcaccatgttgatac

SEQ ID NO: 6683 - DNA, 120 bp, Artificial Sequence
  ENSG00000006555_46 (sequence is synthesized)
ggctgtatccaaagatggggttcctgtggttcagcactgtttagccagctctggctaatgaccaagcaagtggtttgtttttgcactcctcccttacctaggccattgagattgccaaga

SEQ ID NO: 6684 - DNA, 120 bp, Artificial Sequence
  ENSG00000006555_47 (sequence is synthesized)
tgactgcgggtactcagggaccgaccctctagactgcttcggcaaggtacttgcccccagccacacccaccctctaaactgagaaggagcctggcaccccagcctctccacctagaaccc

SEQ ID NO: 6685 - DNA, 120 bp, Artificial Sequence
  ENSG00000006576_0 (sequence is synthesized)
tccggcgcaaaatcctgcgggagagggggtggggcaaccctctggaggcagcgcgcccgcgggcagcctcgttgtggctccttgggctctgttggcggcggcgctagcttcggagtctcc

SEQ ID NO: 6686 - DNA, 120 bp, Artificial Sequence
  ENSG00000006576_1 (sequence is synthesized)
cgcgcgcacctcagccgcctcctagcggcgcggcgctcgctcctacgcctaaaatgaccaatgtgtgatttcagtggaataaatggcgtccaaagtcacagatgctatagtctggtatca

SEQ ID NO: 6687 - DNA, 120 bp, Artificial Sequence
  ENSG00000006576_2 (sequence is synthesized)
aaagaagattggagcatatgatcaacaaatatgggaaaaatctgttgaacagagagaaatcaagtttattaaactggggctaaggaataaaccaaagaaaacagcacatgtgaaaccaga

SEQ ID NO: 6688 - DNA, 120 bp, Artificial Sequence
  ENSG00000006576_3 (sequence is synthesized)
cctcatagatgttgatcttgtaagagggtctgcatttgcaaaggcaaagcctgaaagtccttggacttctctgaccagaaagggaattgttcgagttgtatttttcccctttttcttccg

SEQ ID NO: 6689 - DNA, 120 bp, Artificial Sequence
  ENSG00000006576_4 (sequence is synthesized)
gtggtggttacaagtaacatcaaaggtcatctttttctggcttcttgtcctttatcttcttcaagttgctgcaatagtattattctgctccacttctagcccacacagcatacctctgac

SEQ ID NO: 6690 - DNA, 120 bp, Artificial Sequence
  ENSG00000006576_5 (sequence is synthesized)
agaggtgattgggccgatatggctgatgctgctcctgggaactgtgcattgccagattgtttccacaagaacacccaaacctcctctaagtacagggggtaaaagaagaaggaaattaag

SEQ ID NO: 6691 - DNA, 120 bp, Artificial Sequence
  ENSG00000006576_6 (sequence is synthesized)
aaaagcagcccatttggaagtacatagggaaggagatggttctagtaccacagataacacacaagagggagcagttcagaaccacggtacaagcacctctcacagcgttggcactgtctt

SEQ ID NO: 6692 - DNA, 120 bp, Artificial Sequence
  ENSG00000006576_7 (sequence is synthesized)
cagagatctctggcatgctgctttctttttatcaggatcaaagaaagcaaagaattcaattgataaatcaactgaaactgacaatggctatgtatcccttgatgggaagaagactgttaa

SEQ ID NO: 6693 - DNA, 120 bp, Artificial Sequence
  ENSG00000006576_8 (sequence is synthesized)
aagcggtgaagatggaatacaaaaccatgaacctcagtgtgaaactattcgaccagaagagacagcctggaacacaggaacactgaggaatggtcctagcaaagatacccaaaggacaat

SEQ ID NO: 6694 - DNA, 120 bp, Artificial Sequence
  ENSG00000006576_9 (sequence is synthesized)
aacaaatgtctctgatgaagtctccagtgaggaaggtcctgaaacaggatactcattacgtcgtcatgtggacaggacttctgaaggtgttcttcggaatagaaagtcacaccattataa

SEQ ID NO: 6695 - DNA, 120 bp, Artificial Sequence
  ENSG00000006576_10 (sequence is synthesized)
gaaacattaccctaatgaggacgcccctaaatcgggtactagttgcagctctcgctgttcaagttccagacaggattctgagagtgcaaggccagaatctgaaacagaagatgtgttatg

SEQ ID NO: 6696 - DNA, 120 bp, Artificial Sequence
  ENSG00000006576_11 (sequence is synthesized)
ggaagacttgttacattgtgcagaatgccattcatcttgtaccagtgagacagatgtggaaaatcatcagattaatccatgtgtgaaaaaagaatatagagatgacccttttcatcagag

SEQ ID NO: 6697 - DNA, 120 bp, Artificial Sequence
  ENSG00000006576_12 (sequence is synthesized)
tcatttgccctggctccatagttcccacccaggattagaaaaaataagtgctatagtatgggaaggtaatgattgtaagaaagcagacatgtctgtacttgaaatcagtggaatgataat

SEQ ID NO: 6698 - DNA, 120 bp, Artificial Sequence
  ENSG00000006576_13 (sequence is synthesized)
gaacagagtgaacagccatataccaggaataggataccagatttttggaaatgcagtctctctcatactgggtttaactccatttgttttccgactttctcaagctacagacttggaaca

SEQ ID NO: 6699 - DNA, 120 bp, Artificial Sequence
  ENSG00000006576_14 (sequence is synthesized)
ttctaatgaagatgtcatagttctttctatggttataataagttttgtggttcgcgtgtctcttgtgtggattttcttttttttgctctgtgtagcagaaagaacttataaacagcgatt

SEQ ID NO: 6700 - DNA, 120 bp, Artificial Sequence
  ENSG00000006576_15 (sequence is synthesized)
actttttgcaaaactctttggacatttaacatctgcaaggagggctcgaaaatctgaggttcctcatttccggttgaagaaagtacagaatataaaaatgtggctatctctccgttccta

SEQ ID NO: 6701 - DNA, 120 bp, Artificial Sequence
  ENSG00000006576_16 (sequence is synthesized)
tcttaagcgtcgaggtcctcagcgatcagttgatgtaatagtttcatctgctttcttattgactatctcagttgtatttatctgttgtgcccagctacttcatgtacacgagatcttcct

SEQ ID NO: 6702 - DNA, 120 bp, Artificial Sequence
  ENSG00000006576_17 (sequence is synthesized)
tgattgtcactacaattgggaattggtaatctggtgcatctcgttaacactttttctcctaagatttgttacccttggatcagaaacaagtaaaaaatatagtaatacctcaatattact

SEQ ID NO: 6703 - DNA, 120 bp, Artificial Sequence
  ENSG00000006576_18 (sequence is synthesized)
tactgaacagataaacctctacttgaaaatggagaaaaaacctaacaaaaaggaggaactgacactagtgaataatgttttaaaactggctactaaactgctaaaggagttggacagtcc

SEQ ID NO: 6704 - DNA, 120 bp, Artificial Sequence
  ENSG00000006576_19 (sequence is synthesized)
ttttagattatatgggcttacaatgaatccgctgctttataacatcacccaggttgttatcctgtcagctgtttctggtgttatcagtgacttgcttggatttaatttaaagctatggaa

SEQ ID NO: 6705 - DNA, 120 bp, Artificial Sequence
  ENSG00000006576_20 (sequence is synthesized)
gattaagtcatgacaattcaaagaaaagaagatgtagcctcttttccagaataagagtactgactaagctgcctgaaagcttgtcactgattctttgcttcaggagtctcagctagggag

SEQ ID NO: 6706 - DNA, 120 bp, Artificial Sequence
  ENSG00000006576_21 (sequence is synthesized)
ttgaagtgtttacatcagactgtcttgtgcaattcttatatttattttactggttcacttttttttacatttattttagtctttatatttttatttttaagcattgatgtacttagttgt

SEQ ID NO: 6707 - DNA, 120 bp, Artificial Sequence
  ENSG00000006576_22 (sequence is synthesized)
tgaaagggtgatgaaactgatatccagatacttgagatcctggtaattggtcataaataattggcaaaataacaaattgtgaaaatagaagccattgctcagcaccgtttctccatcaat

SEQ ID NO: 6708 - DNA, 120 bp, Artificial Sequence
  ENSG00000006576_23 (sequence is synthesized)
gccgtgaacttgccttacttgaggaaaaattctttaactttggaatattgcattgaactcagctatacacataaaacattttctttggtaaatcaagatccagtcagggtttctcttgaa

SEQ ID NO: 6709 - DNA, 120 bp, Artificial Sequence
  ENSG00000006576_24 (sequence is synthesized)
ttattttggaacaatgccaggatccaaactgattaagttacagtttaagcacccttcagtattaatatatacggtattatataacaggtcaacaagtgctctttgatgataaaacttgta

SEQ ID NO: 6710 - DNA, 120 bp, Artificial Sequence
  ENSG00000006576_25 (sequence is synthesized)
atagagcaataattgtaaatggttaccatactgtaagatattttgataaaaattaactagtaatacttgtatttatttgaaacactgggctgtttgcacagctccaactgtgcatgctca

SEQ ID NO: 6711 - DNA, 120 bp, Artificial Sequence
  ENSG00000006576_26 (sequence is synthesized)
aaatgtgcactttttaaaattgttacttttaatgcgtatctttatatgggatctgttatagtatactagggcatgatatggtatccttttgagtgaggtatatactcatctcacaagtga

SEQ ID NO: 6712 - DNA, 120 bp, Artificial Sequence
  ENSG00000006576_27 (sequence is synthesized)
agtgcctactgatattactaaagtacattatgtttactcaagtaaataattttctccccatggtacactctagtgtaggctattcataccacactgaaatgaacaactgaagaataaggc

SEQ ID NO: 6713 - DNA, 120 bp, Artificial Sequence
  ENSG00000006576_28 (sequence is synthesized)
taagaaccaataaaatatttctctaattgctagttgtaaaactgtatccaaattttcagaaaagacagcttcagcttgcaaattctatcctctaaacttatctggtgcattctccccacc

SEQ ID NO: 6714 - DNA, 120 bp, Artificial Sequence
  ENSG00000006576_29 (sequence is synthesized)
atcatgttggtgtgttaggtaaatcgggcaaatatgatagtgtcttacattgggccttgattttaagttgttatatttgtacaatcgagtattttagaaattacatgaaacatgaaacag

SEQ ID NO: 6715 - DNA, 120 bp, Artificial Sequence
  ENSG00000006576_30 (sequence is synthesized)
tttttgcaattttttttaaactgggcatctggtttctaaaaatttatttgaaacaatctagaattttcttggtgcaaagtgtatcatgtggaatatcctcatatttttaccatattttaa

SEQ ID NO: 6716 - DNA, 120 bp, Artificial Sequence
  ENSG00000006576_31 (sequence is synthesized)
gaactttaagacgattaattgtaaataatttatttgattggtgcagttctaatccctaaatcataatcttaaaatcaggaatgtgtggagaacagagccatgtcatatcactttgctctt

SEQ ID NO: 6717 - DNA, 120 bp, Artificial Sequence
  ENSG00000006576_32 (sequence is synthesized)
accattccttttgatcagcctcaattcagcctcattgtgtagtatgttttttctttctatgaaaaacaacagaaagcatttcattttatttgcctatgttcaaatatgtttaataatgac

SEQ ID NO: 6718 - DNA, 120 bp, Artificial Sequence
  ENSG00000006576_33 (sequence is synthesized)
caaagtgcattctgagttttttcaaggaatgtaatactggagctttaagaacatacttagtttctcatgtgaaaacttaggctttgtctgatgtttttccttcctctattgtctaatgtt

SEQ ID NO: 6719 - DNA, 120 bp, Artificial Sequence
  ENSG00000006576_34 (sequence is synthesized)
gaggttgtttttaggaattatgttttataaactttttcaatataaggtacatgcctatacagaacttaacattttgcacagaatatatcaaatatattttgagaaaaaaagtacggcatg

SEQ ID NO: 6720 - DNA, 120 bp, Artificial Sequence
  ENSG00000006576_35 (sequence is synthesized)
agttctgttaggaataaaagatgaaactattgtatctcacaaaaaatcttatttcagaatggaaatatttttgagaaaagtagctgagtatactggtttaagaaaatgcttgttttagat

SEQ ID NO: 6721 - DNA, 120 bp, Artificial Sequence
  ENSG00000006576_36 (sequence is synthesized)
tgaggttaacttagagttgggagttgatttattaagtacagtatacctctcaacagtttataaataatatgttgaattatgtcagtgtgggcagcagtagaatactaaaaggaaaatgtc

SEQ ID NO: 6722 - DNA, 120 bp, Artificial Sequence
  ENSG00000006576_37 (sequence is synthesized)
atgttaagcaatttcagaacattaactgaactattttcaaagcagaaaaattgacattgctgcctttaagaataccatgaatgtaagaaattgaaagaaattgtaaaatatcacataata

SEQ ID NO: 6723 - DNA, 120 bp, Artificial Sequence
  ENSG00000006576_38 (sequence is synthesized)
tagaaatggcagttcaaagagaattgtggcagatgttgtgtgtgaactgttgtttctttgccacatgtgttgtatttgaaagttttacagtaagtttaaaataaaacattctgtgactga

SEQ ID NO: 6724 - DNA, 120 bp, Artificial Sequence
  ENSG00000006576_39 (sequence is synthesized)
ctggatttataaaatagcagttttaggtttacgtattgcacatgtattgatagatagccacacatttgagctcattttatgcattatctttgaagactcatacattgtttgttgtttgct

SEQ ID NO: 6725 - DNA, 120 bp, Artificial Sequence
  ENSG00000006576_40 (sequence is synthesized)
tttaaagaagaacattctggagagagaatctgcaaactcctgtgttcactttttccacaatttgaaaggctttatacatttgatcatagcaaagttattttaagtaacttccttcatatt

SEQ ID NO: 6726 - DNA, 120 bp, Artificial Sequence
  ENSG00000006576_41 (sequence is synthesized)
gctgtcaccagttattaagtccccatacttcaaaattcagttcttttttctttgtttctatttttccttattaatctttattttctctaaacccttttcaactatatcatatctcttgag

SEQ ID NO: 6727 - DNA, 120 bp, Artificial Sequence
  ENSG00000006576_42 (sequence is synthesized)
cttcaaattgtttaaataaagaatttcattcaattgtattttcagtttctaatctaagggtagaacatttggctttaaggcaaataaattacactgtttatcacttttttataaacatta

SEQ ID NO: 6728 - DNA, 120 bp, Artificial Sequence
  ENSG00000006576_43 (sequence is synthesized)
aagtaaccagagtgctatgtctgcatgctgttcagtctccttttggaaggtgggaaataaagtcatttgtatgtttttctctcttgcacagcctaaaatgaccaatgtgtgatttcagtg

SEQ ID NO: 6729 - DNA, 120 bp, Artificial Sequence
  ENSG00000006576_44 (sequence is synthesized)
tgatggttttgggttaaacttgtaaaacaaacacatgttacgctgtgctggaatatgattgccttcagagtattaagattagaagagttactattctttgcacactcttctttgtggttg

SEQ ID NO: 6730 - DNA, 120 bp, Artificial Sequence
  ENSG00000006576_45 (sequence is synthesized)
tgtctctggttaatctttctggtgattgtggttttgtttcttttcccagtggttgccatacagacactaatgccagtgtgtctgctctattgcctcttcacccatgtcatttgatgtagt

SEQ ID NO: 6731 - DNA, 120 bp, Artificial Sequence
  ENSG00000006576_46 (sequence is synthesized)
gtttcttgttcctaagccagataaccaagcttgtaaaattttgtcttactgtatgtactgttagaagtcagttggtgctggaagggagacggagggctgtttgacccctctcccagaata

SEQ ID NO: 6732 - DNA, 120 bp, Artificial Sequence
  ENSG00000006576_47 (sequence is synthesized)
aattatttagcagtagcagtatttttctcactccatgatcttggcttttgttggtttgcaactgtattttaaacgattgagtttcttgaagcgcagaacattattctacctattaacttt

SEQ ID NO: 6733 - DNA, 120 bp, Artificial Sequence
  ENSG00000006576_48 (sequence is synthesized)
taaattaaaaggttgtttaaaatcttgatttccagctaagtaaggctgatagtaagcattgatttacatcttttttaatgatataagaaattacataaatataaaatatggctataaaat

SEQ ID NO: 6734 - DNA, 120 bp, Artificial Sequence
  ENSG00000006576_49 (sequence is synthesized)
tcttcgtctataaagtgaagaatgtagactaggtgatattttaaaagctgcattcagttctcaaaaatttttactcttaaaccagctttaaagggcgtttctaaaaaaaagcaaaataaa

SEQ ID NO: 6735 - DNA, 120 bp, Artificial Sequence
  ENSG00000006576_50 (sequence is synthesized)
aagtacagggggtaaaagaagaaggtactgttttttaaaaagtaatctttttgtacatttatgtaatttgaatctacgattgttcttgactcctcttaccttcatagactaaaatcttat

SEQ ID NO: 6736 - DNA, 120 bp, Artificial Sequence
  ENSG00000006576_51 (sequence is synthesized)
cttgtaaggttgctgtttcaaaaaaacactgagcttcagaatcaattaccagatgatttagtttccatatttgcttcaaggccattttaagaccacatgcctgtgtttttgtttcttttt

SEQ ID NO: 6737 - DNA, 120 bp, Artificial Sequence
  ENSG00000006576_52 (sequence is synthesized)
tttttttttccttgaagctcatttatagtcacctaatatcaatgtagacaatatatgttagctagattgttaataattcctactacttataaaaatcttgtatttctaatagaagatgct

SEQ ID NO: 6738 - DNA, 120 bp, Artificial Sequence
  ENSG00000006576_53 (sequence is synthesized)
ataaaaatcttgtatttctaatagaagatgctttggcaaaaacaaaaacctagaaaaaatttcagctaaactgtatttactaaatgctatttggttttgttttgtttttttttttgtatt

SEQ ID NO: 6739 - DNA, 90 bp, Artificial Sequence
  ENSG00000006576_54 (sequence is synthesized)
ctggactcctcctgagtagctgggaatacaggtgtatgccaccccacctgactagtttttttattttttattttttgtagagatggggtc

SEQ ID NO: 6740 - DNA, 120 bp, Artificial Sequence
  ENSG00000006576_55 (sequence is synthesized)
accacacctggccactaaattctgtttgaatctgtttaatattacccttgattcagtaaatatagcatatctcactggccaatcagcacactggagtttgttttaaggttcttttggagc

SEQ ID NO: 6741 - DNA, 120 bp, Artificial Sequence
  ENSG00000006576_56 (sequence is synthesized)
aggtcctcttttgaatatcattgctaagagattgtgacatttgtagttttttggtgctgagatttaagcccatctcatttttaaaagataatacattagataaatagcaatgtccataaa

SEQ ID NO: 6742 - DNA, 120 bp, Artificial Sequence
  ENSG00000006576_57 (sequence is synthesized)
ttagattataattctctccaatctaaattttcttctttcttcatctgcagataagtggcattcaaatagggaagaaatgcttttgtaaatatccatccaatgcaatcctttcaatcttct

SEQ ID NO: 6743 - DNA, 120 bp, Artificial Sequence
  ENSG00000006576_58 (sequence is synthesized)
gtccactgacctgccactataagcaaggaccaataccttaacatttctagaaattggtcttgaatatgcatcatgatatttggattaaattttatctagtaaatctaaattttattatgt

SEQ ID NO: 6744 - DNA, 80 bp, Artificial Sequence
  ENSG00000006576_59 (sequence is synthesized)
caggtgggtataatgtagacttccgaataagaatattttatcgttttcataatattaaaagtattcctgaagtactttat

SEQ ID NO: 6745 - DNA, 120 bp, Artificial Sequence
  ENSG00000006576_60 (sequence is synthesized)
ctatggtaattttgtgtttacttaacataaaatttagttagatttggggggagtgaaaataaattttttataactttccaacattttagattttgttatgattcttagaacatgaaagaa

SEQ ID NO: 6746 - DNA, 120 bp, Artificial Sequence
  ENSG00000006576_61 (sequence is synthesized)
taatacacaggtttttcatcaccaaaatgatattatatcattaatgtttgtttgcttctttgtttttgaatacagcaaactggctgtggcctgaaatattaaagctcattgtgaaaagat

SEQ ID NO: 6747 - DNA, 120 bp, Artificial Sequence
  ENSG00000006576_62 (sequence is synthesized)
caggcaggagctaccacgcccggctctccatatatcttctaaaccttaacttgagaggaaaacaaaaaggggaagtgataccagagttacggaggaaaagctactgtctcaggaactgag

SEQ ID NO: 6748 - DNA, 120 bp, Artificial Sequence
  ENSG00000006576_63 (sequence is synthesized)
accatgggagggacatgatcacttttagaaagatacagtcagaagaaagaaggaaaaagagaggaagaaagtggctcctcctcctttttctaatgccttgtcgtcagaatttcacagtac

SEQ ID NO: 6749 - DNA, 120 bp, Artificial Sequence
  ENSG00000006576_64 (sequence is synthesized)
tccttggccctggattcaggcatggctggattgagaggctcggataatatcttcacttctttttgctgtagactttggtcttgctggtcacattcttaggttggctctttctaggtggtg

SEQ ID NO: 6750 - DNA, 120 bp, Artificial Sequence
  ENSG00000006576_65 (sequence is synthesized)
taagataattactggaatattatattagtaaccttctgacctcatttcttcaccctgaaaaaaaagttacatgtgtgtatttgtttctgtctgtaatttaaacagtgatttgtcaccaaa

SEQ ID NO: 6751 - DNA, 120 bp, Artificial Sequence
  ENSG00000006576_66 (sequence is synthesized)
acattaccctaatgaggtatatactttgtccttaagtgtatacatacgtatctattttatatgttactaatttataacttctttcaacaattaaaaattgttgaaataaatatttcacat

SEQ ID NO: 6752 - DNA, 120 bp, Artificial Sequence
  ENSG00000006606_0 (sequence is synthesized)
cagggccgtctcagtctcataaaaggggatcaggcaggaggagtttgggagaaacctgagaagggcctgatttgcagcatcatgatgggcctctccttggcctctgctgtgctcctggcc

SEQ ID NO: 6753 - DNA, 120 bp, Artificial Sequence
  ENSG00000006606_1 (sequence is synthesized)
tccctcctgagtctccaccttggaactgccacacgtgggagtgacatatccaagacctgctgcttccaatacagccacaagccccttccctggacctgggtgcgaagctatgaattcacc

SEQ ID NO: 6754 - DNA, 120 bp, Artificial Sequence
  ENSG00000006606_2 (sequence is synthesized)
gcaagaaagtctgtacccatccaaggaaaaaatgggtgcaaaaatacatttctttactgaaaactccgaaacaattgtgactcagctgaattttcatccgaggacgcttggaccccgctc

SEQ ID NO: 6755 - DNA, 120 bp, Artificial Sequence
  ENSG00000006606_3 (sequence is synthesized)
ttggctctgcagccctctggggagcctgcggaatcttttctgaaggctacatggacccgctggggaggagagggtgtttcctcccagagttactttaataaaggttgttcatagagttga

SEQ ID NO: 6756 - DNA, 120 bp, Artificial Sequence
  ENSG00000006606_4 (sequence is synthesized)
agaacctcagaaatgtgagttatttgggaatggctgtttgtaaatgtccttacgtaagccaagaggaggtcttgacttggggtcccaggggtaccgcagatcccagggactggagcagca

SEQ ID NO: 6757 - DNA, 120 bp, Artificial Sequence
  ENSG00000006607_0 (sequence is synthesized)
agttgggagcaggcgacgccgacgcgagtctggcggctgctgcttgcgactgcggaggccgggcgaggccggtgaggacgcggcgggcgagcgagaggccgaggtgttttcttcactcat

SEQ ID NO: 6758 - DNA, 120 bp, Artificial Sequence
  ENSG00000006607_1 (sequence is synthesized)
ggtgaagaatgggggagatagaaggaacatacagagtcctgcagactgcagggatgcgcttgggtgcccagacccctgtgggagttagcacccttgagcctgggcagactctcttgccca

SEQ ID NO: 6759 - DNA, 120 bp, Artificial Sequence
  ENSG00000006607_2 (sequence is synthesized)
gaatgcaagagaagcacctgcacctcagagtaaagctgctggacaacaccatggaaatatttgacattgagcctaaatgcgatggccaggtattactgacacaagtgtggaagcgtttaa

SEQ ID NO: 6760 - DNA, 120 bp, Artificial Sequence
  ENSG00000006607_3 (sequence is synthesized)
acctggtagaatgtgactacttcgggatggagtttcaaaatactcagtcctactggatttggcttgaacctatgaaacccatcattaggcaaatacgaaggccaaagaatgtggtgcttc

SEQ ID NO: 6761 - DNA, 120 bp, Artificial Sequence
  ENSG00000006607_4 (sequence is synthesized)
gcctagctgtaaaattttttccacctgatcctggtcagctacaagaagaatatacaagatacttgtttgccttgcaacttaagagagacctgctggaagagcgtttgacctgtgctgaca

SEQ ID NO: 6762 - DNA, 120 bp, Artificial Sequence
  ENSG00000006607_5 (sequence is synthesized)
ccacagcggcccttctcacgtcccatctcctgcagtcggaaataggagattacgatgaaacgctggaccgagagcacctcaaagtgaacgagtatttgcctggccagcagcactgccttg

SEQ ID NO: 6763 - DNA, 120 bp, Artificial Sequence
  ENSG00000006607_6 (sequence is synthesized)
agaagatactagaattccatcagaagcacgtgggccagacacctgctgagtcggatttccaggtgctcgaaattgctcgaaagttggaaatgtacggcatcagatttcacatggcttctg

SEQ ID NO: 6764 - DNA, 120 bp, Artificial Sequence
  ENSG00000006607_7 (sequence is synthesized)
acagggaaggaaccaagattcaactggcagtttcccacatgggtgtactcgtgttccagggcaccaccaaaatcaacactttcaactggtccaaggtccgtaaactaagcttcaagagga

SEQ ID NO: 6765 - DNA, 120 bp, Artificial Sequence
  ENSG00000006607_8 (sequence is synthesized)
aaagatttcttatcaaacttcatccagaggttcatggaccttaccaggacacattagaatttttgttgggtagtagagatgaatgtaagaacttctggaagatttgtgtggagtatcaca

SEQ ID NO: 6766 - DNA, 120 bp, Artificial Sequence
  ENSG00000006607_9 (sequence is synthesized)
ccttttttagacttttggaccaacctaagccaaaagcaaaagccgtcttcttcagccggggctcctccttcagatacagtggaagaactcagaaacaactagtagattatttcaaagaca

SEQ ID NO: 6767 - DNA, 120 bp, Artificial Sequence
  ENSG00000006607_10 (sequence is synthesized)
gtggaatgaagagaattccatatgaaagaaggcacagcaagacccacacgtccgttcgagctctgactgcagacctaccaaaacagagcatctcattccccgagggattgaggactcctg

SEQ ID NO: 6768 - DNA, 120 bp, Artificial Sequence
  ENSG00000006607_11 (sequence is synthesized)
cctccccatcttcagcgaatgccttttactcgctctctccctccactctggtcccctctggcctgccagagtttaaggacagcagcagctccctcacagatccccaggtttcctacgtca

SEQ ID NO: 6769 - DNA, 120 bp, Artificial Sequence
  ENSG00000006607_12 (sequence is synthesized)
agagtccagctgcagagaggcgcagtggagcagtggctggaggccccgacacaccatcggcccagcccctcgggccccccgcactccagcctggtccaggcctttccacgaagagtcctc

SEQ ID NO: 6770 - DNA, 120 bp, Artificial Sequence
  ENSG00000006607_13 (sequence is synthesized)
agccttctccctccagccggaagagccccctgagtctgagccctgcatttcaggtgcctttgggcccagctgaacagggctcatccccactcctgagccctgtcctcagtgatgctggcg

SEQ ID NO: 6771 - DNA, 120 bp, Artificial Sequence
  ENSG00000006607_14 (sequence is synthesized)
gagccgggatggactgcgaggagcccagacacaagcgcgtgcctgcagacgaggcctacttcatagtcaaagagattctcgctacagaacgaacatacctcaaggatttagaagttatta

SEQ ID NO: 6772 - DNA, 120 bp, Artificial Sequence
  ENSG00000006607_15 (sequence is synthesized)
ccgtgtggttccgcagcgcagtggtgaaggaggacgccatgcctgcgactctgatgacgctgctcttctccaacatcgatcccatctatgagttccacagaggcttcctgcgcgaggtgg

SEQ ID NO: 6773 - DNA, 120 bp, Artificial Sequence
  ENSG00000006607_16 (sequence is synthesized)
cagtcatcaacgaatcggggacatcctgctcaggaacatgcgccagttaaaggagtttaccagctacttccaaagacatgacgaggtcctaacagaactggaaaaggctaccaaacgctg

SEQ ID NO: 6774 - DNA, 120 bp, Artificial Sequence
  ENSG00000006607_17 (sequence is synthesized)
taagaagttggaggcagtgtacaaggagtttgagctgcagaaggtctgctacttgcctctcaacacgttcctgctgaagcccatccagcggctgctgcactaccgcctgctgctgcgccg

SEQ ID NO: 6775 - DNA, 120 bp, Artificial Sequence
  ENSG00000006607_18 (sequence is synthesized)
cctatgcggacattacagccccgggcaccatgactacgctgactgccatgacgccctgaaagccatcacagaggtgaccaccacactacagcacattctcatccggctggagaacctgca

SEQ ID NO: 6776 - DNA, 120 bp, Artificial Sequence
  ENSG00000006607_19 (sequence is synthesized)
gaagctaacggagctgcagcgggacctggtgggcatagagaacctcattgctcctggcagggagttcatccgtgagggctgccttcacaagctcaccaagaagggcctgcagcagaggat

SEQ ID NO: 6777 - DNA, 120 bp, Artificial Sequence
  ENSG00000006607_20 (sequence is synthesized)
gttttttctgttctcagatatgttgctgtacacaagcaaaggagttgcagggaccagccacttccggatccggggcctccttcccctccaaggcatgctggtggaagaaagtgataacga

SEQ ID NO: 6778 - DNA, 120 bp, Artificial Sequence
  ENSG00000006607_21 (sequence is synthesized)
gtggtctgttccacactgtttcaccatctacgcggctcagaaaacaatcgtggtggcagccagcactcggctggagaaagagaagtggatgctggacctgaactccgcgatccaagcagc

SEQ ID NO: 6779 - DNA, 120 bp, Artificial Sequence
  ENSG00000006607_22 (sequence is synthesized)
caagagtggcggtgacacggcccctgcactgccaggccgcactgtgtgcactcgtccccccagatcccccaacgaggtatctctggagcaggagtcagaagatgatgctcggggtgtccg

SEQ ID NO: 6780 - DNA, 120 bp, Artificial Sequence
  ENSG00000006607_23 (sequence is synthesized)
cagctccctggaggggcatggccagcaccgggccaacaccacaatgcacgtgtgctggtaccggaacaccagcgtgtccagggcagaccacagtgcagctgtcgagaaccagctttcagg

SEQ ID NO: 6781 - DNA, 120 bp, Artificial Sequence
  ENSG00000006607_24 (sequence is synthesized)
atatctgctaagaaagttcaaaaacagtcatggctggcagaagctctgggtcgtctttaccaacttctgtttgttcttctacaaaactcatcaggatgactacccactggccagcctccc

SEQ ID NO: 6782 - DNA, 120 bp, Artificial Sequence
  ENSG00000006607_25 (sequence is synthesized)
gctgctgggctacagcgtgagcatccccagggaggccgatggcatacacaaagactatgttttcaagctccagttcaaatcccacgtctacttcttccgggctgagagcaagtacacatt

SEQ ID NO: 6783 - DNA, 120 bp, Artificial Sequence
  ENSG00000006607_26 (sequence is synthesized)
tgaaaggtggatggaggtgatccagggggccagcagctcagccgggagggccccaagcatcgtgcaggatggcccccaaccctcctcagggctggaggggatggtcagggggaaggagga

SEQ ID NO: 6784 - DNA, 120 bp, Artificial Sequence
  ENSG00000006607_27 (sequence is synthesized)
atgacgctcaacctgcccaggtttggacacaactacaaagaacagcaggacacagaggtgacctctgtcctgaggcttctcaacagatgggaagtggctgtggtctcactggatccccac

SEQ ID NO: 6785 - DNA, 120 bp, Artificial Sequence
  ENSG00000006607_28 (sequence is synthesized)
tggcaccagcagtgtgggtgggcctcatgtaacatctgggaggggcttcatccccccacccaggacctagtgcatgccagcagctatctggggccctgggaaaaatgtgcgagtcttgag

SEQ ID NO: 6786 - DNA, 120 bp, Artificial Sequence
  ENSG00000006607_29 (sequence is synthesized)
cgcggagccgctcaagccacagctcccaggcccctggctcaaagacgcagacaaggcctgagcagtgctctcggcatcggaccaaagcctgggcacaccctgcctctctccccagagcag

SEQ ID NO: 6787 - DNA, 120 bp, Artificial Sequence
  ENSG00000006607_30 (sequence is synthesized)
ggtccctgccgaggactggcctagagcaagcactggaaaagaggccctgccatacaccctgcgtacccactgccaggaccctctcagacaagcgtggcacagccatgctgaccttccatc

SEQ ID NO: 6788 - DNA, 120 bp, Artificial Sequence
  ENSG00000006607_31 (sequence is synthesized)
tggtgaaccaagtggcagccccaggggcctgccctgcaggtcacagctaaacaagtctggcagaagccacgcttgttccccatgtacctctagagaagcagaaaccaaagtccccctgtg

SEQ ID NO: 6789 - DNA, 120 bp, Artificial Sequence
  ENSG00000006607_32 (sequence is synthesized)
ccctgggagggtggggccgtctaatttattactgcccagcattccttccaacgggaagtagatgggcgactgctttgttcacacacatttgattaaaaataaacaaacagcatctcccca

SEQ ID NO: 6790 - DNA, 120 bp, Artificial Sequence
  ENSG00000006607_33 (sequence is synthesized)
ctattctgaggggatgctgatctgaggggaccctgttttgtggggatcctgttctgtggaaaccctgttctgagtgggatgctgttctaaggggaccctgttctacaggggatttgattc

SEQ ID NO: 6791 - DNA, 120 bp, Artificial Sequence
  ENSG00000006607_34 (sequence is synthesized)
cattgagaactagtcttctcttttatacttgggaaacggagggacagagatgtttttgaaagacgtacccgatactagaggctccagccagagcagctgggaagaaagaaaaggagggag

SEQ ID NO: 6792 - DNA, 120 bp, Artificial Sequence
  ENSG00000006607_35 (sequence is synthesized)
gagaaaagaaaggaagagagggaggccgtccacactggaaaggagcctaaatgcgatggccaggtattactgacacaagtgtggaagcgtttaaacctggtagaatgtgactacttcggg

SEQ ID NO: 6793 - DNA, 120 bp, Artificial Sequence
  ENSG00000006607_36 (sequence is synthesized)
gctcatttgctgtcttgctgtggagacatgtctatgttacattcagagaacatttggaattgatctctgtcttattttgaactctcttctagatacttgtttgccttgcaacttaagaga

SEQ ID NO: 6794 - DNA, 120 bp, Artificial Sequence
  ENSG00000006607_37 (sequence is synthesized)
gcacgaatgcctcagctcttgctgtgcactgcctgacacgcgttgatgctgtgctttgtggagcctgtttacgtttggtagaaatggcaccatctagtacttaaaaaggatcatcaccac

SEQ ID NO: 6795 - DNA, 120 bp, Artificial Sequence
  ENSG00000006607_38 (sequence is synthesized)
agctgctggacaacaccatggaaatatttgacattgaggtttgaaaaataacaggtcagcctcttcccagatttcttgacatccttggaaaccatgcatttatgccattgcagagaagct

SEQ ID NO: 6796 - DNA, 120 bp, Artificial Sequence
  ENSG00000006607_39 (sequence is synthesized)
caagaatggcccagatccctgtggtcacctggctggtttgcagagcctttctttgtggcctgcattgtacctcacacactgcctgctacttctggtcatgttgaattgcccaccttttaa

SEQ ID NO: 6797 - DNA, 120 bp, Artificial Sequence
  ENSG00000006607_40 (sequence is synthesized)
ctcatcaggtggatggaggtgatccagggggccagcagctcagccgggagggccccaagcatcgtgcaggatggcccccaaccctcctcagggctggaggggatggtcagggggaaggag

SEQ ID NO: 6798 - DNA, 120 bp, Artificial Sequence
  ENSG00000006607_41 (sequence is synthesized)
aatgaatgaataaaagtcccctttctgccaaaaatctccagcaagctgcacagatctgatgtccacatgatgagcagccagagtccaagttggtctgactattaagacacttgtttgtga

SEQ ID NO: 6799 - DNA, 120 bp, Artificial Sequence
  ENSG00000006607_42 (sequence is synthesized)
gtgtagtggtgtgaacacagttctctgcagcctcaacctcctgggttcaagctgtcttcccacctcagtctcaagataattattttcgttcatctacttattaaattttttaaactaagg

SEQ ID NO: 6800 - DNA, 120 bp, Artificial Sequence
  ENSG00000006607_43 (sequence is synthesized)
gaataccaaactggaagtgaaaaacagaatggtcgtatgggcacttgaagttccgtttctactgaatgcttatcactttcacaccatcataaagttgaaaaatcagggcctatcagggtc

SEQ ID NO: 6801 - DNA, 120 bp, Artificial Sequence
  ENSG00000006607_44 (sequence is synthesized)
agctctggctgtcttttccttgagggtttctatccttagtatgggctcaggaagttcttccccatgccaatattatattggcaccttttaatggtttcagttttctcatttaattaatct

SEQ ID NO: 6802 - DNA, 61 bp, Artificial Sequence
  ENSG00000006607_45 (sequence is synthesized)
atctccctagaagtcccaggctggagtgcccaggcacgatctcggctcactgcaaactccg

SEQ ID NO: 6803 - DNA, 85 bp, Artificial Sequence
  ENSG00000006607_46 (sequence is synthesized)
aatttgttttgatagatattagattgagatgtaacatttctccccattatttgttgaatccttcattttctcactgatctcagac

SEQ ID NO: 6804 - DNA, 120 bp, Artificial Sequence
  ENSG00000006607_47 (sequence is synthesized)
attatttgttgaatccttcattttctcactgatctcagactttatcaaatggaagcctgtgtctttgcactcgagttctttctgggcattctgctccattcctgtctgtccagcatcagt

SEQ ID NO: 6805 - DNA, 120 bp, Artificial Sequence
  ENSG00000006607_48 (sequence is synthesized)
ccactctctctcattagtggtgtcatatgagatagtcactgtttggtgaacacattccatcccttattctgcctccttttaaaaaagattctttgctattctcaagcatttaattcttcc

SEQ ID NO: 6806 - DNA, 120 bp, Artificial Sequence
  ENSG00000006607_49 (sequence is synthesized)
aagtaatcttctaagtcattggacaaattccttacaaaaacaccatggagatttcagttgaaattgcattaaatttttgtgttaacttacgggaagactaacatctggacaatgttttgc

SEQ ID NO: 6807 - DNA, 120 bp, Artificial Sequence
  ENSG00000006607_50 (sequence is synthesized)
ctgcccttgcttatgttgattcagatttttgatgtccagtgagaggcttggttggtgtatcaggctctgcacagggaagctgtccattctgtggagttgttggtaactggctggtcctgg

SEQ ID NO: 6808 - DNA, 120 bp, Artificial Sequence
  ENSG00000006607_51 (sequence is synthesized)
ggacagagaactggccctcgttcctgactgttaagggaaggatgatggctcttggcttgaaaagatcatctttatcatgttaacacagtttccttctgtttctaagaggtattatcagaa

SEQ ID NO: 6809 - DNA, 120 bp, Artificial Sequence
  ENSG00000006607_52 (sequence is synthesized)
ataacaccttggattttggcaaaggcattttcagcatgtagagaatggatttccctttttctctttgacttctgataggatgaatgttatcaatcagctttctaatgccgaacgatcctt

SEQ ID NO: 6810 - DNA, 120 bp, Artificial Sequence
  ENSG00000006607_53 (sequence is synthesized)
gcattccccaaacaaccttacttgatcgtgggacaattccttgttacatgcttttagattagatttggtaatattttattttgcaattatttcatctaactacttaaaattaaaattaat

SEQ ID NO: 6811 - DNA, 120 bp, Artificial Sequence
  ENSG00000006607_54 (sequence is synthesized)
ccacagtgggttttctttgaatctagctctgttaggttttggtctttggttcataaatgaattgtccaactcccttttggataatcaaaatgctcaacattttttcctttgcttgatttt

SEQ ID NO: 6812 - DNA, 120 bp, Artificial Sequence
  ENSG00000006607_55 (sequence is synthesized)
tgggtgccctctggcccatggctcaccccctggggtgcagctgccatggcgcagggataccagtgtcctccttggcctcttgtagagtctgtgtgcacttggacagcactgggcttccaa

SEQ ID NO: 6813 - DNA, 120 bp, Artificial Sequence
  ENSG00000006607_56 (sequence is synthesized)
gccccacctagcattgccagcagtcaccttgtgtcctgctcaggcttaggctgtcagttccttcttggccacaagacttggaccgtttctcccacccacaggtggaagaaagtgataacg

SEQ ID NO: 6814 - DNA, 120 bp, Artificial Sequence
  ENSG00000006607_57 (sequence is synthesized)
agcatctggaaatattgttattgagggtggtgcttgttattttatgctccacctatgagtgcctgagtagaaaataatcttttgtaacactttcttttgacgtgattaagactcacagaa

SEQ ID NO: 6815 - DNA, 120 bp, Artificial Sequence
  ENSG00000006607_58 (sequence is synthesized)
gttgcagtaatagtacagaggattcccgtgtctccgataatttgtcttttaccttgttttagtacctaaataatgtgataattccttcatgtggtttttttttttttcattttagtgttt

SEQ ID NO: 6816 - DNA, 120 bp, Artificial Sequence
  ENSG00000006607_59 (sequence is synthesized)
tctacccaatcctgcgagactctggccactcctcacacctagagttcccaagggactataggttttgctgttctgtgttgagatagccccacttgaagaactgcattcagcctaggtgcc

SEQ ID NO: 6817 - DNA, 120 bp, Artificial Sequence
  ENSG00000006607_60 (sequence is synthesized)
cttttcctgcctcgacggaagctgagtcaggttgttaatgagaaagttctacttatcccaaaggcagttgcactaatttaaaattgaaatatacacaaatctgtttgatccagattatca

SEQ ID NO: 6818 - DNA, 120 bp, Artificial Sequence
  ENSG00000006607_61 (sequence is synthesized)
agcatatttttaggagcctgtggggagaggtacagatgtaataataccctttattcaccctcttccagaaaagagagtgcaaggagcaagttaaaaatggaagatccctttttgcctggt

SEQ ID NO: 6819 - DNA, 120 bp, Artificial Sequence
  ENSG00000006607_62 (sequence is synthesized)
tactatctgttttagagaatggccagacacataatagcagcttccatccagggcaggccctgccctgcggcctcttccacctcagagcttcaccaccttcctccagctggaaccaaggca

SEQ ID NO: 6820 - DNA, 120 bp, Artificial Sequence
  ENSG00000006607_63 (sequence is synthesized)
tcctgctcaggaacatgcgccagttaaaggtgttccagctccacgaagggcatgtagcaggggtcacaaaaatggagtagacttttggataggcaggggcagcactgggggaagtgagat

SEQ ID NO: 6821 - DNA, 120 bp, Artificial Sequence
  ENSG00000006607_64 (sequence is synthesized)
ttctcttcaataggagcaacggtacaggtgttcacatgtggacaacagtgcaggtcgtgcattgactgttcaggggtctcactcttgcttaacgtgcctggaacagttctccctccctct

SEQ ID NO: 6822 - DNA, 120 bp, Artificial Sequence
  ENSG00000006607_65 (sequence is synthesized)
caggctgctcatgagttcaccacgtgaccgcccaaggtgtggagctctgcataacaccatgaagctgagccacagtgacgacgacgactcaagctccccctcctccatccctcgcctgtc

SEQ ID NO: 6823 - DNA, 120 bp, Artificial Sequence
  ENSG00000006607_66 (sequence is synthesized)
ctactatgtggggggaaaaaagggctctcctgacagttgtttttttgttgttgttgtttgtttgtttgtttgttttccaataatttcagttgaagtatcaggaactacctgggattctgt

SEQ ID NO: 6824 - DNA, 120 bp, Artificial Sequence
  ENSG00000006607_67 (sequence is synthesized)
cctcagggataattctttctgttgaaagtctccaagagtgtggtgatctaattattgatcaaagttcataatatggtttctgccctcctgaaacatatggcctacaaattatctattttt

SEQ ID NO: 6825 - DNA, 120 bp, Artificial Sequence
  ENSG00000006607_68 (sequence is synthesized)
tattctgcagagcccaaaagaagcccctagaaacacaaggttggtatccaggcccccctagagtccggggaggatccacactgtctgtggattgctctctgaaattgggtagatgaacca

SEQ ID NO: 6826 - DNA, 120 bp, Artificial Sequence
  ENSG00000006607_69 (sequence is synthesized)
tcaaccctcattttcattttatgtcatgtttagaattgtgtgtgatagaggctgtacatacacattttacaggaagcgcctggcactgtgtgaggctggcggttgaatggtcaggagagt

SEQ ID NO: 6827 - DNA, 120 bp, Artificial Sequence
  ENSG00000006607_70 (sequence is synthesized)
ttttgtcatgtcgtgagcagctgtggttctgtctgtgctggggggcagagtttcagtgccttagacctagacacagggagggccggtagggagctcagcgctgcttgtaaaaatgacaat

SEQ ID NO: 6828 - DNA, 120 bp, Artificial Sequence
  ENSG00000006607_71 (sequence is synthesized)
ggtggggatgactttaccacaggctcatttccttccggtggggagcaccggtgtgaccggcagtgtcgtgggggggcccctgctttcacattgacaaatgcccagctgcaggtatctgag

SEQ ID NO: 6829 - DNA, 120 bp, Artificial Sequence
  ENSG00000006607_72 (sequence is synthesized)
gagttcatagacgatgacccagcagacatctccttctttgctggaggctctgaggcgttttcttttccttatggctctgtagtcccacaggaatctcaggcctctgcccagcctctggtg

SEQ ID NO: 6830 - DNA, 120 bp, Artificial Sequence
  ENSG00000006607_73 (sequence is synthesized)
gcccctcctttgtgtgagcttccagggtctgctcggtccagcccagacaggtactccatggaggcagtagatatgaacacagaagacggttttgcatttgaggaggaaagtgacttcaat

SEQ ID NO: 6831 - DNA, 120 bp, Artificial Sequence
  ENSG00000006607_74 (sequence is synthesized)
gggaacgcacacccctcagacacctcggagctatttgaggtgaaggcgcaggccagccggatgcagcgcctgctgggtccttctgagaccagctcactgagaaacagccagtctgaaaac

SEQ ID NO: 6832 - DNA, 120 bp, Artificial Sequence
  ENSG00000006607_75 (sequence is synthesized)
agctccctcaataacatgccactacgtggtgggctgtctgtgcacacatgcagctcagccagtcaatctgaggccagctccatggtcaacttcccagcctactcagtccgctctgagtcc

SEQ ID NO: 6833 - DNA, 120 bp, Artificial Sequence
  ENSG00000006607_76 (sequence is synthesized)
agctcggccttccagttctctgacatcatcgaccagttagagcagctcagctacccacccacgacggccgaggactccagcagcacagagtcagactcatgggactctgaaaccgaggcc

SEQ ID NO: 6834 - DNA, 120 bp, Artificial Sequence
  ENSG00000006607_77 (sequence is synthesized)
cccctagacataagccttttcttcagcaacccttttgcacacacaagtggagaaagagtcccttttgatttacagaacaatttaaagaatttgactccaggagagcaaatagataaaaac

SEQ ID NO: 6835 - DNA, 120 bp, Artificial Sequence
  ENSG00000006607_78 (sequence is synthesized)
ccatcttgaccactctgggttcctttacaaggcaacccactcacccacgctgtgtggtttagagctcagaattgtttggtttaaacacagaaagtgactttcatttcatggatagatatt

SEQ ID NO: 6836 - DNA, 120 bp, Artificial Sequence
  ENSG00000006607_79 (sequence is synthesized)
caatttttttttaatttcctgatttattatacttttttgaatgtcaaaaaatttgacctttcacttggaatgacgtaaaagctatgcctccggtcttagacctgagtactccagccagtc

SEQ ID NO: 6837 - DNA, 120 bp, Artificial Sequence
  ENSG00000006607_80 (sequence is synthesized)
ctcctagaggaccgataaattagtctttgtagtttatgttttttgccatatgctttgattcaagtaagaactggtgctatacattctgaatgttacacaattctgttcatgttgatcttc

SEQ ID NO: 6838 - DNA, 120 bp, Artificial Sequence
  ENSG00000006607_81 (sequence is synthesized)
aatagaatatgtgtattacactattgatgctgcttttcaagatgagccctgttgcctataattaactaggacacaggttttgtctcacttgtccagccactgcgctacacaaaaccttga

SEQ ID NO: 6839 - DNA, 120 bp, Artificial Sequence
  ENSG00000006607_82 (sequence is synthesized)
gtatgcctctacagccctaaccctgggaaagatggccataggccatggcctcctgtgtgctgtggtcaaactcgtgggactctgagaccctaaggcccccgtagacattagccttttctt

SEQ ID NO: 6840 - DNA, 120 bp, Artificial Sequence
  ENSG00000006607_83 (sequence is synthesized)
cagcaacccttttgcacagacaagtggagaaagagtcccactgggactctggggggacagtcatccattgcactggggttgggggtgaggggatgcctggaactgtcccagtgccaaagg

SEQ ID NO: 6841 - DNA, 120 bp, Artificial Sequence
  ENSG00000006607_84 (sequence is synthesized)
caccatgtcatttttttttttaaaggtgtcaaagggccactgcctcattattgacttgagacccagaaatagtgctgtgtgtagatagtggtcttggagaggcgttggtttaaaatgcac

SEQ ID NO: 6842 - DNA, 120 bp, Artificial Sequence
  ENSG00000006607_85 (sequence is synthesized)
ttatgtaagtttgagctgttttcttttcttcagcttaattgggaactagaagatacgtggttgcaaaaaaagcagaaccagacacaccatgggcatcattctgtcccaggacaatgggaa

SEQ ID NO: 6843 - DNA, 120 bp, Artificial Sequence
  ENSG00000006607_86 (sequence is synthesized)
gggtcccaggggcaggtgtgccaaggtggccctgcccacccatccagcgtacccgtaaacacataccaggtgccatgggccctgctgggtaccacatggagagcttctcagtctaaacca

SEQ ID NO: 6844 - DNA, 120 bp, Artificial Sequence
  ENSG00000006607_87 (sequence is synthesized)
ccataaaagtcaaggctgatgtttgtggcacagagtgggtaggtccatccagggacgtcatggggaaaccactgccatgcagctcagcacccacaagtgccggtctcaggccagccctag

SEQ ID NO: 6845 - DNA, 120 bp, Artificial Sequence
  ENSG00000006607_88 (sequence is synthesized)
atgacactgttcaatttgtcaagtccacagatagggttggggtttttgttgtttttcttttctgatcttacctagtagtgcaataccacatttaaagtttaattctcttcccagaatgtc

SEQ ID NO: 6846 - DNA, 120 bp, Artificial Sequence
  ENSG00000006607_89 (sequence is synthesized)
ttgtggaaactttacatttcattcctgttcacattgtaagatctctgatgttttgcctggatggatttactgtgattgcacagggaccacgtggctcaggtgtctgagccattgagggca

SEQ ID NO: 6847 - DNA, 120 bp, Artificial Sequence
  ENSG00000006607_90 (sequence is synthesized)
tcttgcaagggctggttttccttttctcatcagtgttggctggatgccagcaggggttttgtggctaaccacatcaggcagtttcccatttttgtagctttgttatacctaaaccgcagt

SEQ ID NO: 6848 - DNA, 120 bp, Artificial Sequence
  ENSG00000006607_91 (sequence is synthesized)
taatttagacctgccttcttgatgctttaggggccattgggcacagctttctacattggctaacaaatacctgtgaaaatgttaacagacagaagcgcagcagtgaacctgaggtcagga

SEQ ID NO: 6849 - DNA, 120 bp, Artificial Sequence
  ENSG00000006607_92 (sequence is synthesized)
caggactgtttgggaggttcttcttttcttactgtcactccaaaaataaaccttggatttgtgtgctggggagaaatgagtatagataacatttaaaacgttttcctaaaccttagtatt

SEQ ID NO: 6850 - DNA, 120 bp, Artificial Sequence
  ENSG00000006607_93 (sequence is synthesized)
catatggtagctgatggttcctctccccttcattactgttgcctgacgacggtccttgctgatgctgtgaactaacaaagttgtctttttgtttttaagggaacccaccctggcgtctgg

SEQ ID NO: 6851 - DNA, 120 bp, Artificial Sequence
  ENSG00000006607_94 (sequence is synthesized)
acagcaggttaggtttgggtggttttgagctagcactgctgtggggcaggggtggccgctccctggtgaagctaatgctgtggaagctggaatgttccttcctaaggagtgggatcatgc

SEQ ID NO: 6852 - DNA, 120 bp, Artificial Sequence
  ENSG00000006607_95 (sequence is synthesized)
ccctaccccagcagaggtatctcatcactcgctcatgtgcgagattctaaataaattttgttcttgggcatcttctactaggcctcctataaaatagatcttgctgtttttggtttgtgt

SEQ ID NO: 6853 - DNA, 120 bp, Artificial Sequence
  ENSG00000006607_96 (sequence is synthesized)
taatggaacctcactttctagagataattctttagttttttatttaggaagttttcaaaatatacaaagcaggaatgtaaggaacccgcatcacctcaaattcagtgttacccacacttg

SEQ ID NO: 6854 - DNA, 120 bp, Artificial Sequence
  ENSG00000006607_97 (sequence is synthesized)
accatgcttgccccagctgtgccttttttctttccttgggtattttgttgctaaagtattttattattactgttttagagacagggcctcactcctgtcacccaggctggagtatggtgg

SEQ ID NO: 6855 - DNA, 83 bp, Artificial Sequence
  ENSG00000006607_98 (sequence is synthesized)
agccatccccccatcactgcgcccagctaatttttaaaaaatttttgtggagacaggttctcttcatgttgcccaggatggtc

SEQ ID NO: 6856 - DNA, 120 bp, Artificial Sequence
  ENSG00000006607_99 (sequence is synthesized)
tttgtggagacaggttctcttcatgttgcccaggatggtcttgaattcctgggctccagcagtcctcctgtctcagcctcccaaagtgccagaattgcaggcatgagcctgggtgctaga

SEQ ID NO: 6857 - DNA, 120 bp, Artificial Sequence
  ENSG00000006607_100 (sequence is synthesized)
ctgtctcaaaaaaaaaaaaaaaaaaaatcaatcaaggctttcttccgagttactgctcacagccctcttacccctttctcttgtgagtgggttgtaatgtccacccagaggggatttaga

SEQ ID NO: 6858 - DNA, 120 bp, Artificial Sequence
  ENSG00000006607_101 (sequence is synthesized)
gatttagacacggaagggaaggcaagcgtgggcaccatggctttagaaccataaggaagacatttccctctacagattctgtctttccacttgtaacagttaatgaggcactgacgttgc

SEQ ID NO: 6859 - DNA, 120 bp, Artificial Sequence
  ENSG00000006607_102 (sequence is synthesized)
tcttttccaccttaacaagacagtttacagtggttaaatagcaaaactccaggagcaattcagcctgaggccatagtgccctgcagcagcattgggctctgcttttgtttctgctttgtg

SEQ ID NO: 6860 - DNA, 120 bp, Artificial Sequence
  ENSG00000006607_103 (sequence is synthesized)
ctttgtggctcttcttcaagccagtgttgggtagtgcacagcctgagaggtgtggcctgataaaccctgaaattgaaagaagtatgcagatttgactcagcactcctggaagtgtctgga

SEQ ID NO: 6861 - DNA, 120 bp, Artificial Sequence
  ENSG00000006607_104 (sequence is synthesized)
tacagctcactgagagtgtggaggtgaaagtgcctgcaaaatattaacagttctctctcaatctattgatctcctcagttacatccagaaccttaaagccgcacagttgtcatcctccgc

SEQ ID NO: 6862 - DNA, 120 bp, Artificial Sequence
  ENSG00000006607_105 (sequence is synthesized)
ccgcagtctcaggcagggcgcatcaggggctgcactggtagctcccaggaggacttacccatgggtcaccgtcatagccaggtgtgtctactcagaggggacgcaatcctgcagcagtcc

SEQ ID NO: 6863 - DNA, 120 bp, Artificial Sequence
  ENSG00000006607_106 (sequence is synthesized)
ccgtcaatgagaggccaccagcagacagtgcctgttggacccatgaagtccaccactaattatatactctgctttaggtagaatatttttattagctgtcaaactgtttttgtatttaag

SEQ ID NO: 6864 - DNA, 120 bp, Artificial Sequence
  ENSG00000006607_107 (sequence is synthesized)
tttccaaaagtccaggtactttatgtaggccaatgtataaatatttcaagtctaacagtagcacagttatatgttaatacaactgactacacgaaaaatatgtaatagcatatgctatgt

SEQ ID NO: 6865 - DNA, 120 bp, Artificial Sequence
  ENSG00000006607_108 (sequence is synthesized)
aatttttcaaatcactaggtattgatatgtgccttttttatattaccaagagattctctaaatatggaattagattaggattctctgctccacttaacacacatttttaaattagtactg

SEQ ID NO: 6866 - DNA, 120 bp, Artificial Sequence
  ENSG00000006607_109 (sequence is synthesized)
atgattgagggatggacaatagcacaccaaaaaaaaaagagtttagtatgaaaaatttaaacctgttggttaagtcattcccattaatgtcattttgctgagggtgacttggtccttttg

SEQ ID NO: 6867 - DNA, 120 bp, Artificial Sequence
  ENSG00000006607_110 (sequence is synthesized)
aattgctttggtgtacgggtatgttctgatttttcatgcaagctcctctgccattccaccgctctgaggagtaattgtagcacttcacatgtgctgtggttgtgatcacatggtgacata

SEQ ID NO: 6868 - DNA, 120 bp, Artificial Sequence
  ENSG00000006607_111 (sequence is synthesized)
catagcatgtgtgttcccagctgttgtgtgtttatgtgacatttgatgccaatacatatgtcttcaaggtatgcttgttccctcccagctcgtggaatatcaaaaaaattcattgctgga

SEQ ID NO: 6869 - DNA, 120 bp, Artificial Sequence
  ENSG00000006607_112 (sequence is synthesized)
aaaattatttcatagacaaaaatgttaatgttctcttggggacttagagttgaaaatatttgtatagatttggttctcaagtccacagaatcgtatctgctgtggtctccctttggtgct

SEQ ID NO: 6870 - DNA, 120 bp, Artificial Sequence
  ENSG00000006607_113 (sequence is synthesized)
catctgggagccatgtgtatggaagattctgtcacaggcggctgggatgtgggcagatgctgttagcctccctctccacgtggtggtccatgcctgacgtgtcccctagttcaaggaagc

SEQ ID NO: 6871 - DNA, 120 bp, Artificial Sequence
  ENSG00000006607_114 (sequence is synthesized)
gccatctttagcatgaaaacaattgcgttcccctaggaaatgaagaaaaaatgagctgaaatttccttatacatttgaatttgttcattttttaaagagacatttttgttgtctgctttg

SEQ ID NO: 6872 - DNA, 120 bp, Artificial Sequence
  ENSG00000006607_115 (sequence is synthesized)
tttgtggtacttataaaatttgttttccattgaaattgccatttataaatttgcagatatgtactaatttagatttttttaagtgttcaataaaataaggatatatttactgtgaatttt

SEQ ID NO: 6873 - DNA, 120 bp, Artificial Sequence
  ENSG00000006611_0 (sequence is synthesized)
agctccgagggcggctggcccggtcgcggtcgcggctctttccagctcctggcagccgggcacccgaaggaacgggtcgtgcaacgacgcagctggacctggcccagccatggaccgaaa

SEQ ID NO: 6874 - DNA, 120 bp, Artificial Sequence
  ENSG00000006611_1 (sequence is synthesized)
agtggcccgagaattccggcataaggtggattttctgattgaaaatgatgcagagaaggactatctctatgatgtgctgcgaatgtaccaccagaccatggacgtggccgtgctcgtggg

SEQ ID NO: 6875 - DNA, 120 bp, Artificial Sequence
  ENSG00000006611_2 (sequence is synthesized)
agacctgaagctggtcatcaatgaacccagccgtctgcctctgtttgatgccattcggccgctgatcccactgaagcaccaggtggaatatgatcagctgaccccccggcgctccaggaa

SEQ ID NO: 6876 - DNA, 120 bp, Artificial Sequence
  ENSG00000006611_3 (sequence is synthesized)
gctgaaggaggtgcgtctggaccgtctgcaccccgaaggcctcggcctgagtgtgcgtggtggcctggagtttggctgtgggctcttcatctcccacctcatcaaaggcggtcaggcaga

SEQ ID NO: 6877 - DNA, 120 bp, Artificial Sequence
  ENSG00000006611_4 (sequence is synthesized)
cagcgtcgggctccaggtaggggacgagatcgtccggatcaatggatattccatctcctcctgtacccatgaggaggtcatcaacctcattcgaaccaagaaaactgtgtccatcaaagt

SEQ ID NO: 6878 - DNA, 120 bp, Artificial Sequence
  ENSG00000006611_5 (sequence is synthesized)
gagacacatcggcctgatccccgtgaaaagctctcctgatgagcccctcacttggcagtatgtggatcagtttgtgtcggaatctgggggcgtgcgaggcagcctgggctcccctggaaa

SEQ ID NO: 6879 - DNA, 120 bp, Artificial Sequence
  ENSG00000006611_6 (sequence is synthesized)
tcgggaaaacaaggagaagaaggtcttcatcagcctggtaggctcccgaggccttggctgcagcatttccagcggccccatccagaagcctggcatctttatcagccatgtgaaacctgg

SEQ ID NO: 6880 - DNA, 120 bp, Artificial Sequence
  ENSG00000006611_7 (sequence is synthesized)
ctccctgtctgctgaggtgggattggagataggggaccagattgtcgaagtcaatggcgtcgacttctctaacctggatcacaaggaggctgtaaatgtgctgaagagtagccgcagcct

SEQ ID NO: 6881 - DNA, 120 bp, Artificial Sequence
  ENSG00000006611_8 (sequence is synthesized)
gaccatctccattgtagctgcagctggccgggagctgttcatgacagaccgggagcggctggcagaggcgcggcagcgtgagctgcagcggcaggagcttctcatgcagaagcggctggc

SEQ ID NO: 6882 - DNA, 120 bp, Artificial Sequence
  ENSG00000006611_9 (sequence is synthesized)
cagaggaaaatgagagataccggaaggagatggaacagattgtagaggaggaagagaagtttaagaagcaatgggaagaagactggggctcaaaggaacagctactcttgcctaaaacca

SEQ ID NO: 6883 - DNA, 120 bp, Artificial Sequence
  ENSG00000006611_10 (sequence is synthesized)
tcactgctgaggtacacccagtaccccttcgcaagccaaagtatgatcagggagtggaacctgagctcgagcccgcagatgacctggatggaggcacggaggagcagggagagcaggatt

SEQ ID NO: 6884 - DNA, 120 bp, Artificial Sequence
  ENSG00000006611_11 (sequence is synthesized)
tccggaaatatgaggaaggctttgacccctactctatgttcaccccagagcagatcatggggaaggatgtccggctcctacgcatcaagaaggagggatccttagacctggccctggaag

SEQ ID NO: 6885 - DNA, 120 bp, Artificial Sequence
  ENSG00000006611_12 (sequence is synthesized)
gcggtgtggactcccccattgggaaggtggtcgtttctgctgtgtatgagcggggagctgctgagcggcatggtggcattgtgaaaggggacgagatcatggcaatcaacggcaagattg

SEQ ID NO: 6886 - DNA, 120 bp, Artificial Sequence
  ENSG00000006611_13 (sequence is synthesized)
tgacagactacaccctggctgaggctgaggctgccctgcagaaggcctggaatcagggcggggactggatcgaccttgtggttgccgtctgccccccaaaggagtatgacgatgagctga

SEQ ID NO: 6887 - DNA, 120 bp, Artificial Sequence
  ENSG00000006611_14 (sequence is synthesized)
ccttcttctgaagtccaaaaggggaaaccaaattcaccgttaggaaacagtgagctccggccccacctcgtgaacacaaagcctcggatcagccttgagagaggccacactacacacacc

SEQ ID NO: 6888 - DNA, 120 bp, Artificial Sequence
  ENSG00000006611_15 (sequence is synthesized)
agatggcatccttgggacctgaatctatcacccaggaatctcaaactccctttggccctgaaccagggccagataaggaacagctcgggccactcttctgaaggccaacgtggaggaaag

SEQ ID NO: 6889 - DNA, 120 bp, Artificial Sequence
  ENSG00000006611_16 (sequence is synthesized)
ggagcagccagccatttgggagaagatctcaaggatccagactctcattcctttcctctggcccagtgaatttggtctctcccagctctgggggactccttccttgaaccctaataagac

SEQ ID NO: 6890 - DNA, 120 bp, Artificial Sequence
  ENSG00000006611_17 (sequence is synthesized)
cccactggagtctctctctctccatccctctcctctgccctctgctctaattgctgccaggattgtcactccaaaccttactctgagctcattaataaaatagatttattttccagctta

SEQ ID NO: 6891 - DNA, 120 bp, Artificial Sequence
  ENSG00000006611_18 (sequence is synthesized)
gcagcttttggatggttttatcgttacgatggcaaattcccaaccatccggaagagccgtgagagactctttgtctcccagcagctggaacgccaagtctccaggaaatgcaagtgggta

SEQ ID NO: 6892 - DNA, 120 bp, Artificial Sequence
  ENSG00000006611_19 (sequence is synthesized)
tccatggccatgatatctgtgcataaattccccttatttaaaaatataaagattcagctcatgtctataatgccagcactgtgggaggccaagacaggcgaatcacgtgaggttgggagt

SEQ ID NO: 6893 - DNA, 120 bp, Artificial Sequence
  ENSG00000006611_20 (sequence is synthesized)
ctgatcctaggccatggggcccagaaatggggatggagtgccggggcagatgcaccatccaactgagtgtgccccagagtcacacggcttctccccacaggactggatcgaccttgtggt

SEQ ID NO: 6894 - DNA, 120 bp, Artificial Sequence
  ENSG00000006611_21 (sequence is synthesized)
ggcccccacacttggccagaaccagggctattaagaggttttgaaggctggtccaaagaaccagggttggtggattagagttgctcatgtcctgttgtgccctgtcatggcctgagccgt

SEQ ID NO: 6895 - DNA, 120 bp, Artificial Sequence
  ENSG00000006611_22 (sequence is synthesized)
gcttagaccaaacggtcttctctgccttctcccttccttggctctgggctctatctgtgggatataccgtggaacccagctgtaggatgtgtttctcaccctgtgatagggatgtgcccg

SEQ ID NO: 6896 - DNA, 120 bp, Artificial Sequence
  ENSG00000006611_23 (sequence is synthesized)
tggacagagctggcaggtggctgtgaaactggtgtttggtgtggcctgaagccacagatggcagcatctggggcagacccaagcctggacttgacttttctgttacaactttcccaaaac

SEQ ID NO: 6897 - DNA, 120 bp, Artificial Sequence
  ENSG00000006611_24 (sequence is synthesized)
attagggcctcatgctcccaagacacttggccgggtagaccatggcttctggggtggcctgcatggccctatgttttctgttacttgccttttgcaaaggactcttgcccctgttcctcc

SEQ ID NO: 6898 - DNA, 120 bp, Artificial Sequence
  ENSG00000006611_25 (sequence is synthesized)
aaagggtggcagggccttgtgctgccagagtgggtactcccccttgtggggccttgctctggctgggctgagtgtgcacccacaaagcctgtatccacctgggctgtttccacttccctg

SEQ ID NO: 6899 - DNA, 120 bp, Artificial Sequence
  ENSG00000006611_26 (sequence is synthesized)
gtggtctgcataggtctgatgcattggggtcagaggggcagcctggcctgtggctcctcttctctcctcacaactccagccctgaaaagctgctggggaggcccttggggatgacctctc

SEQ ID NO: 6900 - DNA, 120 bp, Artificial Sequence
  ENSG00000006611_27 (sequence is synthesized)
gtgatttggaaaagctcatccttccacaaggggttttctctttgatgttctggccctgacttctgaaaccagtgttctggggagaggcatttgagagtgacccagggcctgggaaccggg

SEQ ID NO: 6901 - DNA, 120 bp, Artificial Sequence
  ENSG00000006611_28 (sequence is synthesized)
agctaaggtcaggacaagacagagtgaaggtcccctggcactgatgttacagaagaattcggtggtaaggggcttctggagagtggcatgtgctatctaagcgagtggcccaaatccttc

SEQ ID NO: 6902 - DNA, 120 bp, Artificial Sequence
  ENSG00000006611_29 (sequence is synthesized)
ttttggatggttttatcgttacgatggcaaattcccaaccatccggaagaaaggaaaagataagaagaaagccaagtatggcagcctgcaggacttgagaaagaataagaaagaactgga

SEQ ID NO: 6903 - DNA, 120 bp, Artificial Sequence
  ENSG00000006611_30 (sequence is synthesized)
gtttgagcaaaagctttacaaagagaaagaggaaatgctggagaaggaaaagcagctaaagatcaaccggctggcccaggaggtgtctgagacagagcgggaagaccttgaagaatcgga

SEQ ID NO: 6904 - DNA, 120 bp, Artificial Sequence
  ENSG00000006611_31 (sequence is synthesized)
aagattcaatattgggtggagaggctctgtcaaacgcgcctcgagcagatttcctctgctgataatgagatttcagagatgaccacagggcccccgcctcccccgccttctgtgtctccc

SEQ ID NO: 6905 - DNA, 120 bp, Artificial Sequence
  ENSG00000006611_32 (sequence is synthesized)
ctggccccacccttgagacgcttcgcaggcggactgcacctgcacaccactgacctggacgacatccctttggacatgttctactatccccccaagactccctctgccttgcctgtgatg

SEQ ID NO: 6906 - DNA, 120 bp, Artificial Sequence
  ENSG00000006611_33 (sequence is synthesized)
ccccaccctccaccctccaacccaccccacaaggtcccggcgccccctgtccttcccttatctggccatgtgagcgcctcatcctctccatgggtgcagcgcactccaccccccattccc

SEQ ID NO: 6907 - DNA, 120 bp, Artificial Sequence
  ENSG00000006611_34 (sequence is synthesized)
atccctcccccgccatccgttcccacccaagacctcactcccacccgcccactgccctcggcgctggaagaagcactgagcaaccatcccttccgcactggggacacaggcaatccagtg

SEQ ID NO: 6908 - DNA, 120 bp, Artificial Sequence
  ENSG00000006611_35 (sequence is synthesized)
gaggactgggaggcaaagaaccacagtgggaagcccactaactcccctgtccctgaacagagcttcccacccaccccaaagacattttgcccaagcccacagcctccacgaggccctggc

SEQ ID NO: 6909 - DNA, 120 bp, Artificial Sequence
  ENSG00000006611_36 (sequence is synthesized)
gtgtccaccatctccaaacctgtcatggtccaccaggagcccaatttcatctacaggccagctgtgaaatctgaagttctgccacaggagatgttgaagaggatggtggtttatcagaca

SEQ ID NO: 6910 - DNA, 120 bp, Artificial Sequence
  ENSG00000006625_0 (sequence is synthesized)
cccctaaccctgaggctgccgcgcggcggtcactgcgccggggtagtgggccccagtgttgcgctctctggccgttccttacactctgcttcaggctccagtgcaggggcgtagtgggat

SEQ ID NO: 6911 - DNA, 120 bp, Artificial Sequence
  ENSG00000006625_1 (sequence is synthesized)
atggccaactcgggctgcaaggacgtcacgggtccagatgaggagagttttctgtactttgcctacggcagcaacctgctgacagagaggatccacctccgaaacccctcggcggcgttc

SEQ ID NO: 6912 - DNA, 120 bp, Artificial Sequence
  ENSG00000006625_2 (sequence is synthesized)
ttctgtgtggcccgcctgcaggattttaagcttgactttggcaattcccaaggcaaaacaagtcaaacttggcatggagggatagccaccatttttcagagtcctggcgatgaagtgtgg

SEQ ID NO: 6913 - DNA, 120 bp, Artificial Sequence
  ENSG00000006625_3 (sequence is synthesized)
ggagtagtatggaaaatgaacaaaagcaatttaaattctctggatgagcaagaaggggttaaaagtggaatgtatgttgtaatagaagttaaagttgcaactcaagaaggaaaagaaata

SEQ ID NO: 6914 - DNA, 120 bp, Artificial Sequence
  ENSG00000006625_4 (sequence is synthesized)
gcaaaagaaaatggtttgccgctggagtatcaagagaagttaaaagcaatagaaccaaatgactatacaggaaaggtctcagaagaaattgaagacatcatcaaaaagggggaaacacaa

SEQ ID NO: 6915 - DNA, 120 bp, Artificial Sequence
  ENSG00000006625_5 (sequence is synthesized)
actctttagaacataacagaatatatctaagggtattctatgtgctaatataaaatatttttaacacttgagaacagggatctgggggatctccacgtttgatccattttcagcagtgct

SEQ ID NO: 6916 - DNA, 120 bp, Artificial Sequence
  ENSG00000006625_6 (sequence is synthesized)
ctgaaggagtatcttacttgggtgattccttgtttttagactataaaaagaaactgggataggagttagacaatttaaaaggggtgtatgagggcctgaaatatgtgacaaatgaatgtg

SEQ ID NO: 6917 - DNA, 120 bp, Artificial Sequence
  ENSG00000006625_7 (sequence is synthesized)
agtaccccttctgtgaacactgaaagctattctcttgaattgatcttaagtgtctccttgctctggtaaaagatagatttgtagctcacttgatgatggtgctggtgaattgctctgctc

SEQ ID NO: 6918 - DNA, 120 bp, Artificial Sequence
  ENSG00000006625_8 (sequence is synthesized)
tgtctgagatttttaaaaatcagcttaatgagagtaatctgcagacaattgataataacattttgaaaattggaaagatggtatactgtttttagaggaataaacgtatttgtggtttaa

SEQ ID NO: 6919 - DNA, 120 bp, Artificial Sequence
  ENSG00000006625_9 (sequence is synthesized)
gaagttatctgatgacaaattacgaaagtgctcccccatccccacagtataaaaaggtggagaaagaaacgtcacactgcctttcagaatcagggaaatcacccttgcaagcacaagaca

SEQ ID NO: 6920 - DNA, 120 bp, Artificial Sequence
  ENSG00000006625_10 (sequence is synthesized)
agaatgtgggatagagaccccaaaattcctgttcagaacctaagcttagctctctgttggcaggcccaatcaggtcatggcacctgtaataggtaatctggttcctaggcctcgtttgga

SEQ ID NO: 6921 - DNA, 120 bp, Artificial Sequence
  ENSG00000006625_11 (sequence is synthesized)
attttttagtatgaaacctagagaaattagcctggtatagattatgaaagtaccgctaaacacagttgccatttattcccccatgtccaattcagagcaagggtaacctctggcgttgta

SEQ ID NO: 6922 - DNA, 120 bp, Artificial Sequence
  ENSG00000006625_12 (sequence is synthesized)
gcgttgtaaccgaaactgctctctgtaaactttaaattttttttgaagaatggtattttttttcttaaaaggtcatataaattttatatagatatgtttgtcttaatattaaaatattta

SEQ ID NO: 6923 - DNA, 120 bp, Artificial Sequence
  ENSG00000006634_0 (sequence is synthesized)
aaatcttcaaccgccgcagcccactcgtttgtgctttgcgccttcctcctccgcgccttggagccggatccggccccggaaacccgacctgcagacgcggtacctctactgcgtagaggc

SEQ ID NO: 6924 - DNA, 120 bp, Artificial Sequence
  ENSG00000006634_1 (sequence is synthesized)
cgtagctggcggaaggagagaggcggccgtcctgtcaacaggccgggggaagccgtgctttcgcggctgcccggtgcgacactttctccggacccagcatgtaggtgccgggcgactgcc

SEQ ID NO: 6925 - DNA, 120 bp, Artificial Sequence
  ENSG00000006634_2 (sequence is synthesized)
atgaactccggagccatgaggatccacagtaaaggacatttccagggtggaatccaagtcaaaaatgaaaaaaacagaccatctctgaaatctctgaaaactgataacaggccagaaaaa

SEQ ID NO: 6926 - DNA, 120 bp, Artificial Sequence
  ENSG00000006634_3 (sequence is synthesized)
tccaaatgtaagccactttggggaaaagtattttaccttgacttaccttctgtcaccatatctgaaaaacttcaaaaggacattaaggatctgggagggcgagttgaagaatttctcagc

SEQ ID NO: 6927 - DNA, 120 bp, Artificial Sequence
  ENSG00000006634_4 (sequence is synthesized)
aaagatatcagttatcttatttcaaataagaaggaagctaaatttgcacaaaccttgggtcgaatttctcctgtaccaagtccagaatctgcatatactgcagaaaccacttcacctcat

SEQ ID NO: 6928 - DNA, 120 bp, Artificial Sequence
  ENSG00000006634_5 (sequence is synthesized)
cccagccatgatggaagttcatttaagtcaccagacacagtgtgtttaagcagaggaaaattattagttgaaaaagctatcaaggaccatgattttattccttcaaatagtatattatca

SEQ ID NO: 6929 - DNA, 120 bp, Artificial Sequence
  ENSG00000006634_6 (sequence is synthesized)
aatgccttgtcatggggagtaaaaattcttcatattgatgacattagatactacattgaacaaaagaaaaaagagttgtatttactcaagaaatcaagtacttcagtaagagatgggggc

SEQ ID NO: 6930 - DNA, 120 bp, Artificial Sequence
  ENSG00000006634_7 (sequence is synthesized)
aaaagagttggtagtggtgcacaaaaaacaagaacaggaagactcaaaaagccttttgtaaaggtggaagatatgagccaactttataggccattttatcttcagctgaccaatatgcct

SEQ ID NO: 6931 - DNA, 120 bp, Artificial Sequence
  ENSG00000006634_8 (sequence is synthesized)
tttataaattattctattcagaagccctgcagtccatttgatgtagacaagccatctagtatgcaaaagcaaactcaggttaaactaagaatccaaacagatggcgataagtatggtgga

SEQ ID NO: 6932 - DNA, 120 bp, Artificial Sequence
  ENSG00000006634_9 (sequence is synthesized)
acctcaattcaactccagttgaaagagaagaagaaaaaaggatattgtgaatgttgcttgcagaaatatgaagatctagaaactcaccttctaagtgagcaacacagaaactttgcacag

SEQ ID NO: 6933 - DNA, 120 bp, Artificial Sequence
  ENSG00000006634_10 (sequence is synthesized)
agtaaccagtatcaagttgttgatgatattgtatctaagttagtttttgactttgtggaatatgaaaaggacacacctaaaaagaaaagaataaaatacagtgttggatccctttctcct

SEQ ID NO: 6934 - DNA, 120 bp, Artificial Sequence
  ENSG00000006634_11 (sequence is synthesized)
gtttctgcaagtgtcctgaaaaagactgaacaaaaggaaaaagtggaattgcaacatatttctcagaaagattgccaggaagatgatacaacagtgaaggagcagaatttcctgtataaa

SEQ ID NO: 6935 - DNA, 120 bp, Artificial Sequence
  ENSG00000006634_12 (sequence is synthesized)
gagacccaggaaactgaaaaaaagctcctgtttatttcagagcccatcccccacccttcaaatgaattgagagggcttaatgagaaaatgagtaataaatgttccatgttaagtacagct

SEQ ID NO: 6936 - DNA, 120 bp, Artificial Sequence
  ENSG00000006634_13 (sequence is synthesized)
gaagatgacataagacagaattttacacagctacctctacataaaaacaaacaggaatgcattcttgacatttccgaacacacattaagtgaaaatgacttagaagaactaagggtagat

SEQ ID NO: 6937 - DNA, 120 bp, Artificial Sequence
  ENSG00000006634_14 (sequence is synthesized)
cactataaatgtaacatacaggcatctgtacatgtttctgatttcagtacagataatagtggatctcaaccaaaacagaagtcagatactgtgctttttccagcaaaggatctcaaggaa

SEQ ID NO: 6938 - DNA, 120 bp, Artificial Sequence
  ENSG00000006634_15 (sequence is synthesized)
cacaagagcacctaactgttcaggcaaaggctccattccatactcctcctgaggaacccaatgaatgtgacttcaagaatatggatagtttaccttctggtaaaatacatcgaaaagtga

SEQ ID NO: 6939 - DNA, 120 bp, Artificial Sequence
  ENSG00000006634_16 (sequence is synthesized)
aaataatattaggacgaaatagaaaagaaaatctggaaccaaatgctgaatttgataaaagaactgaatttattacacaagaagaaaacagaatttgtagttcaccggtacagtctttac

SEQ ID NO: 6940 - DNA, 120 bp, Artificial Sequence
  ENSG00000006634_17 (sequence is synthesized)
tagacttgtttcagactagtgaagagaaatcagaatttttgggtttcacaagctacacagaaaagagtggtatatgcaatgttttagatatttgggaagaggaaaattcagataatctgt

SEQ ID NO: 6941 - DNA, 120 bp, Artificial Sequence
  ENSG00000006634_18 (sequence is synthesized)
taacagcgtttttctcgtccccttcaacttctacatttactggcttttagaatttaaaaaatgcatacttttcagaagtgataaggatcatattcttgaaatttttataaatatgtatgg

SEQ ID NO: 6942 - DNA, 120 bp, Artificial Sequence
  ENSG00000006634_19 (sequence is synthesized)
aaattcttaggatttttttaccagctttgtttacagacccaaatgtaaatattaaaaataaatatttgcaattttctacagaattgaatacctgttaaagaaaaattacagaataaactt

SEQ ID NO: 6943 - DNA, 120 bp, Artificial Sequence
  ENSG00000006634_20 (sequence is synthesized)
gtgactggtcttgttttacattatatatatgttcgtaattgtttcctgagaattacaatgaataataatttgctttgtcactgaaaaccaccagtgaagtgcaatttggggaatatcaaa

SEQ ID NO: 6944 - DNA, 120 bp, Artificial Sequence
  ENSG00000006634_21 (sequence is synthesized)
cttagcattatacatttggatattctagttgtattgtaaattttaaaagattatcaggataacatgaccttgccttgaaaaacctaaatttcatacagaaaggaaaaatacatttctatg

SEQ ID NO: 6945 - DNA, 120 bp, Artificial Sequence
  ENSG00000006634_22 (sequence is synthesized)
cttgaattctggaaatcatcagaaatattgacacttgagggtcactggtggaccatgctagtattttggtgctgagtaattagattatgtataggggtaactggaagccatgaaggaagg

SEQ ID NO: 6946 - DNA, 120 bp, Artificial Sequence
  ENSG00000006634_23 (sequence is synthesized)
acttaaccaggctaccaagtggaatataatttatctgctatttttaattacttaccttgtaaataactttaataatattcaaaagttgactctcctgtggctcatgccacaggatcccag

SEQ ID NO: 6947 - DNA, 88 bp, Artificial Sequence
  ENSG00000006634_24 (sequence is synthesized)
gcatgcgcctgtagtcccagctactccctccagaggctgagaattgcttgaacctgggaagtgcttccagactgggtgacagagtgag

SEQ ID NO: 6948 - DNA, 120 bp, Artificial Sequence
  ENSG00000006634_25 (sequence is synthesized)
tcaaaaaaaaaaaagttgactctaccccctaatttggtaggagatgaaggagaaaaggatggcattgaattatagatacagttttgggatatatacaaggattgccttgatctggcactt

SEQ ID NO: 6949 - DNA, 120 bp, Artificial Sequence
  ENSG00000006634_26 (sequence is synthesized)
actgatacaagcatttggagaagagaaaattcaaatataagaaatttcaatttgaatctgtggatataaggcatttgcctttgagtatgttcttgtaggagtaagactaccaccagtgac

SEQ ID NO: 6950 - DNA, 120 bp, Artificial Sequence
  ENSG00000006634_27 (sequence is synthesized)
attcaattggttctattgcatagtacatgaatctattgtcactaaaaattaggttactaatcttaatttttttgaaatatatgattctcagtacaggactaattcatatgcttttcctgc

SEQ ID NO: 6951 - DNA, 120 bp, Artificial Sequence
  ENSG00000006634_28 (sequence is synthesized)
atacattattttgatcatttggataacatcaatgaacactggctttttaacacctttgtttttcataccagtacctgaagtaggctcaataaaagagtctttacagtgcatacacgcaaa

SEQ ID NO: 6952 - DNA, 120 bp, Artificial Sequence
  ENSG00000006634_29 (sequence is synthesized)
cttctattagcaccaagcttaacatttttatcagctgtttatcgttaacaaaaaaccatttgttttaaccttttgtggactgacagacctttcaggtttctctgattagcagtctagtgt

SEQ ID NO: 6953 - DNA, 120 bp, Artificial Sequence
  ENSG00000006634_30 (sequence is synthesized)
aaagttcttagagtgtaagactcccctgtcctagtggaactgctcattgactgcttactgtaatgttggaatgtcctccagataacagcaatttcttgattatgaatcttggggagctac

SEQ ID NO: 6954 - DNA, 120 bp, Artificial Sequence
  ENSG00000006634_31 (sequence is synthesized)
tgaataagggcataaaaataatatgacttttaaaaaaacatttcattaactaccttttcattattggttttctttttatgaagtcaaaatcaattatagctagaatgcaaggtacttgct

SEQ ID NO: 6955 - DNA, 120 bp, Artificial Sequence
  ENSG00000006634_32 (sequence is synthesized)
gagtgtattgtaaaacatttaaaaacaatagttttttttaacaaagaataatccttctttgatatagcacttttctgcatgatttttttatcttgaagatactgagcaattgcagttgct

SEQ ID NO: 6956 - DNA, 120 bp, Artificial Sequence
  ENSG00000006634_33 (sequence is synthesized)
agagccgcgccaactctctgaggctgcgccaagacctgaagcggcggaccgagagcccgggtctgagactgagagagcaacggaatggaggcggggtagaggcggaaacacaacctgcag

SEQ ID NO: 6957 - DNA, 120 bp, Artificial Sequence
  ENSG00000006634_34 (sequence is synthesized)
cacaacctgcagggccagagcgaggcgcgagaaggacggcggcgtgagggggcggggcgcgcagcgcgagaaggcaggcacgaggggcgagcgcgaggcggggcacggcgcgtggcgtga

SEQ ID NO: 6958 - DNA, 120 bp, Artificial Sequence
  ENSG00000006638_0 (sequence is synthesized)
gcccccacccgtcccagctcggcttagcccccgcggacccctccaggccgcgaccccagggcgtcctgtgccgccacgccctccatctgtgtgggtcctctgctgggcccgcccctggtc

SEQ ID NO: 6959 - DNA, 120 bp, Artificial Sequence
  ENSG00000006638_1 (sequence is synthesized)
ggtcacagccagactgactcagtttccctgggaggtcccgctcgagcccgtccttcccctccctctgcccgcccccagccctcgccccaccctcggcgcccgcacatctgcctgctcagc

SEQ ID NO: 6960 - DNA, 120 bp, Artificial Sequence
  ENSG00000006638_2 (sequence is synthesized)
tccagacggcgcccggacccccgggcgcgggatccagccaggtgggagccccgcagatgaggtctctgaaggtgtgcctgaaccagtgccagcctgccctgtctgcagcatcggcctgat

SEQ ID NO: 6961 - DNA, 120 bp, Artificial Sequence
  ENSG00000006638_3 (sequence is synthesized)
ggggtggtgactgatccctcagggctccggagccatgtggcccaacggcagttccctggggccctgtttccggcccacaaacattaccctggaggagagacggctgatcgcctcgccctg

SEQ ID NO: 6962 - DNA, 120 bp, Artificial Sequence
  ENSG00000006638_4 (sequence is synthesized)
gttcgccgcctccttctgcgtggtgggcctggcctccaacctgctggccctgagcgtgctggcgggcgcgcggcaggggggttcgcacacgcgctcctccttcctcaccttcctctgcgg

SEQ ID NO: 6963 - DNA, 120 bp, Artificial Sequence
  ENSG00000006638_5 (sequence is synthesized)
cctcgtcctcaccgacttcctggggctgctggtgaccggtaccatcgtggtgtcccagcacgccgcgctcttcgagtggcacgccgtggaccctggctgccgtctctgtcgcttcatggg

SEQ ID NO: 6964 - DNA, 120 bp, Artificial Sequence
  ENSG00000006638_6 (sequence is synthesized)
cgtcgtcatgatcttcttcggcctgtccccgctgctgctgggggccgccatggcctcagagcgctacctgggtatcacccggcccttctcgcgcccggcggtcgcctcgcagcgccgcgc

SEQ ID NO: 6965 - DNA, 120 bp, Artificial Sequence
  ENSG00000006638_7 (sequence is synthesized)
ctgggccaccgtggggctggtgtgggcggccgcgctggcgctgggcctgctgcccctgctgggcgtgggtcgctacaccgtgcaatacccggggtcctggtgcttcctgacgctgggcgc

SEQ ID NO: 6966 - DNA, 120 bp, Artificial Sequence
  ENSG00000006638_8 (sequence is synthesized)
cgagtccggggacgtggccttcgggctgctcttctccatgctgggcggcctctcggtcgggctgtccttcctgctgaacacggtcagcgtggccaccctgtgccacgtctaccacgggca

SEQ ID NO: 6967 - DNA, 120 bp, Artificial Sequence
  ENSG00000006638_9 (sequence is synthesized)
ggaggcggcccagcagcgtccccgggactccgaggtggagatgatggctcagctcctggggatcatggtggtggccagcgtgtgttggctgccccttctggtcttcatcgcccagacagt

SEQ ID NO: 6968 - DNA, 120 bp, Artificial Sequence
  ENSG00000006638_10 (sequence is synthesized)
tggaaccagatcctggacccctgggtgtatatcctgttccgccgcgccgtgctccggcgtctccagcctcgcctcagcacccggcccaggtcgctgtccctccagccccagctcacgcag

SEQ ID NO: 6969 - DNA, 120 bp, Artificial Sequence
  ENSG00000006638_11 (sequence is synthesized)
cgctccgggctgcagtaggaagtggacagagcgcccctcccgcgcctttccgcggagcccttggcccctcggacagcccatctgcctgttctgaggattcaggggctgggggtgctggat

SEQ ID NO: 6970 - DNA, 120 bp, Artificial Sequence
  ENSG00000006638_12 (sequence is synthesized)
ggacagtgggcatcagcagcagggttttgggttgaccccaatccaacccggggacccccaactcctccctgatccttttaccaagcactctcccttcctcggcccctttttcccatccag

SEQ ID NO: 6971 - DNA, 120 bp, Artificial Sequence
  ENSG00000006638_13 (sequence is synthesized)
cctttttcccatccagagctcccaccccttctctgcgtccctcccaaccccaggaagggcatgcagacattggaagagggtcttgcattgctatttttttttttagacggagtcttgctc

SEQ ID NO: 6972 - DNA, 120 bp, Artificial Sequence
  ENSG00000006638_14 (sequence is synthesized)
attacaggcgtaagccactgcgcccggccttgcatgctctttgaccctgaatttgacctacttgctggggtacagttgcttccttttgaacctccaacagggaaggctctgtccagaaag

SEQ ID NO: 6973 - DNA, 120 bp, Artificial Sequence
  ENSG00000006638_15 (sequence is synthesized)
acagggaaggctctgtccagaaaggattgaatgtgaacgggggcacccccttttcttgccaaaatatatctctgcctttggttttattttcctttgggtccagaagttttcaatctctgg

SEQ ID NO: 6974 - DNA, 120 bp, Artificial Sequence
  ENSG00000006638_16 (sequence is synthesized)
agtttgtgcattgggcctcacccggagcagacgagggcagggctgggaaggatggggagggacatagaggattcggttcctcccccaccttgtttcttgagtgtttcctaatcacttgat

SEQ ID NO: 6975 - DNA, 120 bp, Artificial Sequence
  ENSG00000006638_17 (sequence is synthesized)
gggtggtaccacctagaattcttccagcagcctgtaatgggagggctacaggttagccctggaacctgcaatcaaaccacctttgaatctgtgtgtcattaaaagtagatataaatgggc

SEQ ID NO: 6976 - DNA, 120 bp, Artificial Sequence
  ENSG00000006638_18 (sequence is synthesized)
atgagggtgcgccctgggagttcctcagctgctgttgctgcttcattcagcctacaggacctactgctcaggaaatgatttgattgattgattgatttaatttatttagagatggagtct

SEQ ID NO: 6977 - DNA, 120 bp, Artificial Sequence
  ENSG00000006652_0 (sequence is synthesized)
gttaaaaccagactgcactccttctggctcctggttcattcaaggtctacatagttaaaggttgttccagagggatgtgtgtaattcctcccagtatttgatgttcctttattacttatt

SEQ ID NO: 6978 - DNA, 120 bp, Artificial Sequence
  ENSG00000006652_1 (sequence is synthesized)
ttcacttgagccaacagcctgaactggtcaggctttgggctgatgccagctgctttatctggtagcactgttacataaaattaacatttattggtgatcactaggtgccaacattatgcg

SEQ ID NO: 6979 - DNA, 120 bp, Artificial Sequence
  ENSG00000006652_2 (sequence is synthesized)
aagaactttacgtggacatcccatttaattctcagaagccgatcacaagctcttcacggggatttctgctgccgccaccgcccactcttacccccgccgcttctcgactctgttgttagc

SEQ ID NO: 6980 - DNA, 120 bp, Artificial Sequence
  ENSG00000006652_3 (sequence is synthesized)
cgaagactcgcctctcagccgcccgccgcacagacgcacgagtaaaaagtgcagctccatcggctgatcctcgctaagctccgactctgggcggcaccgggcgtcccacgatgccgaaga

SEQ ID NO: 6981 - DNA, 120 bp, Artificial Sequence
  ENSG00000006652_4 (sequence is synthesized)
acaagaagcggaacactccccaccgcggtagcagtgctggcggcggcgggtcaggagcagccgcagcgacggcggcgacagcaggtggccagcatcgaaatgttcagccttttagtgatg

SEQ ID NO: 6982 - DNA, 120 bp, Artificial Sequence
  ENSG00000006652_5 (sequence is synthesized)
aagatgcatcaattgaaacaatgagccattgcagtggttatagcgatccttccagttttgctgaagatggaccagaagtccttgatgaggaaggaactcaagaagacctagagtacaagt

SEQ ID NO: 6983 - DNA, 120 bp, Artificial Sequence
  ENSG00000006652_6 (sequence is synthesized)
tgaagggattaattgacctaaccctggataagagtgcgaagacaaggcaagcagctcttgaaggtattaaaaatgcactggcttcaaaaatgctgtatgaatttattctggaaaggagaa

SEQ ID NO: 6984 - DNA, 120 bp, Artificial Sequence
  ENSG00000006652_7 (sequence is synthesized)
aaaaggtaagagtgatgagcaacgtgcagctgcagcgttagcatctgttctttgtattcagctgggccctggaattgaaagtgaagagattttgaaaactcttggaccaatcctaaagaa

SEQ ID NO: 6985 - DNA, 120 bp, Artificial Sequence
  ENSG00000006652_8 (sequence is synthesized)
aatcatttgtgatgggtcagctagtatgcaggctaggcaaacttgtgcaacttgctttggtgtttgctgttttattgccacagatgacattactgaactatactcaactctggaatgttt

SEQ ID NO: 6986 - DNA, 120 bp, Artificial Sequence
  ENSG00000006652_9 (sequence is synthesized)
ggaaaatatcttcactaaatcctatctcaaagagaaagacactactgttatttgcagcactcctaatacagtgcttcatatcagctctcttcttgcatggacactactgctgaccatatg

SEQ ID NO: 6987 - DNA, 120 bp, Artificial Sequence
  ENSG00000006652_10 (sequence is synthesized)
cccaatcaatgaagtgaagaaaaagcttgagatgcatttccataagcttccaagcctcctctcttgtgatgatgtaaacatgagaatagctgctggtgaatctttggcacttctctttga

SEQ ID NO: 6988 - DNA, 120 bp, Artificial Sequence
  ENSG00000006652_11 (sequence is synthesized)
attggccagaggaatagagagtgactttttttatgaagacatggagtccttgacgcagatgcttagggccttggcaacagatggaaataaacaccgggccaaagtggacaagagaaagca

SEQ ID NO: 6989 - DNA, 120 bp, Artificial Sequence
  ENSG00000006652_12 (sequence is synthesized)
gcggtcagttttcagagatgtcctgagggcagtggaggaacgggattttccaacagaaaccattaaatttggtcctgaacgcatgtatattgattgctgggtaaaaaaacacacctatga

SEQ ID NO: 6990 - DNA, 120 bp, Artificial Sequence
  ENSG00000006652_13 (sequence is synthesized)
cacctttaaggaggttcttggatcagggatgcagtaccacttgcagtcaaatgaattccttcgaaatgtatttgaacttggacccccagtgatgcttgatgctgcaacgcttaaaacgat

SEQ ID NO: 6991 - DNA, 120 bp, Artificial Sequence
  ENSG00000006652_14 (sequence is synthesized)
gaagatttctcgtttcgaaaggcatttatataactctgcagccttcaaagctcgaaccaaagctagaagcaaatgtcgagataagagagcagatgttggagaattcttctagattttcag

SEQ ID NO: 6992 - DNA, 120 bp, Artificial Sequence
  ENSG00000006652_15 (sequence is synthesized)
attgcttataatttaatgtacaatactattgaaactggtgagttctgattattaaatattctctgtaaatcagtaaacatgtataaagtatttgtaatgtttggtcataatttatttatg

SEQ ID NO: 6993 - DNA, 120 bp, Artificial Sequence
  ENSG00000006652_16 (sequence is synthesized)
cagcaaaagactgatttcatgatggggaaaacaattagccaaagtttaatttcttacactgtggttgtcaagaatactgatttactataatgatatatacatgcaagatatttaacttaa

SEQ ID NO: 6994 - DNA, 120 bp, Artificial Sequence
  ENSG00000006652_17 (sequence is synthesized)
tatcttagacaagagttctgggtacaattttgggatctagttcccctggaaaagctgctgtatttttaatttttaatggaatgtagcttttaaaatcctgtcactggcatcaacaaaagg

SEQ ID NO: 6995 - DNA, 120 bp, Artificial Sequence
  ENSG00000006652_18 (sequence is synthesized)
aattataccatgagaccttatagctgtacttaaaagccattcagttcagctattgggagttcatgatgaattagcatatgccagaaaggttgctaaccttaacatctgagagcagtaaca

SEQ ID NO: 6996 - DNA, 120 bp, Artificial Sequence
  ENSG00000006652_19 (sequence is synthesized)
ctgattttatctgctgtatgagactttgtgcattttactttgaaataaagatttttttccacactgaaagtgcttctcttctaatagaagaaatattatttatggctttgaggtacagag

SEQ ID NO: 6997 - DNA, 120 bp, Artificial Sequence
  ENSG00000006652_20 (sequence is synthesized)
tccaaaatgactaggccaggtgggcagggagacaaagctttatgtgtatatttacaaacattaaagtagatgaaaagaatgtagcaatacataattgggattaaggtttctgactttcaa

SEQ ID NO: 6998 - DNA, 120 bp, Artificial Sequence
  ENSG00000006652_21 (sequence is synthesized)
actttcaagaatatttctgcttggcaacatgcagtgtggctcatgcctataatcagcactctggggaggctgaggcgggaggatggcatgagcccagtttgagaccagcctgggcaacat

SEQ ID NO: 6999 - DNA, 120 bp, Artificial Sequence
  ENSG00000006652_22 (sequence is synthesized)
agcgagaccctgtctctaccagaaatttaaaaaatgagtgtggtggtgtgtgcttctactctttatctacttgggtgctgaggcaagagggtaacttgagcccaggaggtcaaagctgca

SEQ ID NO: 7000 - DNA, 120 bp, Artificial Sequence
  ENSG00000006652_23 (sequence is synthesized)
tgattgtgccactccagcctgggtgacgagtgagaccttgtctcaaaagcaaaacaaaaaagaatattgctgcttgtttgcccatgaggtatatttctttcattttatgaaaagcatttt

SEQ ID NO: 7001 - DNA, 120 bp, Artificial Sequence
  ENSG00000006652_24 (sequence is synthesized)
gacaacacgttaacatttaataaactttagattaaaatatatagtgcaagcaacatgccatttcaaatccgtagacttgtttctttgatactcttgctgtaggtcgccgtgaggggtagg

SEQ ID NO: 7002 - DNA, 120 bp, Artificial Sequence
  ENSG00000006652_25 (sequence is synthesized)
gaagcatatatactgtagggagaagtatcaaaatcatttaaggtcttttttccaaactagtgttcccctcccacatcccaacaactcttggaagtctggtgctccctctaggtgaaaatc

SEQ ID NO: 7003 - DNA, 120 bp, Artificial Sequence
  ENSG00000006652_26 (sequence is synthesized)
atttgctggcttatggagtcactgttgctgagtcccatcccccagttacagtgcagtggaaaacaggtttagaatctagaacttgtttgtatgttgtcacttggttatgttccaagtagg

SEQ ID NO: 7004 - DNA, 120 bp, Artificial Sequence
  ENSG00000006652_27 (sequence is synthesized)
ttagaaccatggaaaagagattgcaaatggtagtttcttctagatattcaaatgcatatatgtatgtacatgtaattataaataaataatgaatttttattaaagtgttgtatgaacata

SEQ ID NO: 7005 - DNA, 120 bp, Artificial Sequence
  ENSG00000006652_28 (sequence is synthesized)
tttgaatgctctccatgttgatgaaattcattctttatcaagatgtaaaatatgtaatttattgtggcctctggttgctctatgtgaattgaggatactttttttttttttgttaaggga

SEQ ID NO: 7006 - DNA, 120 bp, Artificial Sequence
  ENSG00000006652_29 (sequence is synthesized)
gtctggctctgtcgcccaggctggagtgcggtgtggtgtgatcatagctcactgcaacctcttaactcctgggctcaagcagctctccctcctcagcctcctgtagctaggactacaggc

SEQ ID NO: 7007 - DNA, 120 bp, Artificial Sequence
  ENSG00000006652_30 (sequence is synthesized)
ctacaggcatgtgacaccattcctggctattttttacattttttgtggagacaaggtctatgttggccaggctggtcacgagtccctcgtccccagggatcttcctgcctaagcctccca

SEQ ID NO: 7008 - DNA, 120 bp, Artificial Sequence
  ENSG00000006652_31 (sequence is synthesized)
caatgctgggacggtgcctggtctgaggatatttcttaccactgtgtttcagcttttcctcatctgaatcaaacatttgaattctttctagaaggtggccagcatcgaaatgttcagcct

SEQ ID NO: 7009 - DNA, 120 bp, Artificial Sequence
  ENSG00000006652_32 (sequence is synthesized)
ctttgaaatcccagtaatgtcttatatatggtgggaacacaagaaatatttgttggatgcatttacttggaagggaaatgttaattgttttgctgtagtacatcatcttgtagtcagcat

SEQ ID NO: 7010 - DNA, 120 bp, Artificial Sequence
  ENSG00000006652_33 (sequence is synthesized)
ttctgggttcgatttttgcatgaaaacatgtgtttatgtgtgcctagtccctaaataccatgaagatttacattgccttatgcaactggatattttccaaatgtagactgttctttgtta

SEQ ID NO: 7011 - DNA, 120 bp, Artificial Sequence
  ENSG00000006652_34 (sequence is synthesized)
agaccttaaagtccagtgttagtaggcttactagatttaggaaccaccaaatttaaaaagacttgtgactcggcatggtggttcacatctgtaattgtggcactttgggagaccgaggtg

SEQ ID NO: 7012 - DNA, 120 bp, Artificial Sequence
  ENSG00000006652_35 (sequence is synthesized)
ggaggattgctggaagccaggagttggagaccacctgggcaacaaagcgatacttggtttctattataacaaacaaaacaaaacgagatttggtgtctgccaacttattcagccaagtaa

SEQ ID NO: 7013 - DNA, 120 bp, Artificial Sequence
  ENSG00000006652_36 (sequence is synthesized)
agctgtaaatgggtcaggagaccagagtggacagagtaggccctggaatgcttgctcggaggcctgccatgaaggatttctgcttgcttccccaccctaccccgggggcaggatgactca

SEQ ID NO: 7014 - DNA, 120 bp, Artificial Sequence
  ENSG00000006652_37 (sequence is synthesized)
gcacttcctattgttgtgaaggccaaccccaggaggccctaccaaggctgactgctgttaaaaccagactgcactccttctggctcctggttcattcaaggtctacatagttaaaggtgc

SEQ ID NO: 7015 - DNA, 120 bp, Artificial Sequence
  ENSG00000006652_38 (sequence is synthesized)
tagccaggggctgtcttcaatttcacagactatgtcatgaaactgtcatgttaaacatttatttttctagctgaatgtcatctttaagggatattatttcactggagaatttgctgagag

SEQ ID NO: 7016 - DNA, 120 bp, Artificial Sequence
  ENSG00000006652_39 (sequence is synthesized)
gggtccttgggcctgagagtgtgtcgggacaggggctgaccgggagctgggcgggaaaggaaccattgtcagagttcctttctcggcggcgatctcgcccgatctctccccgaccacggg

SEQ ID NO: 7017 - DNA, 120 bp, Artificial Sequence
  ENSG00000006652_40 (sequence is synthesized)
catagccacgttaactgtgacaaggaagcccataatctgcttaaggtcacagcaaatttcaatacattttgcagctgtcccccaaaagggattaaaacttgttcttaccttaaataattt

SEQ ID NO: 7018 - DNA, 120 bp, Artificial Sequence
  ENSG00000006652_41 (sequence is synthesized)
aatcacctgaattatgtgctttattgcttatttgaaatatggcagtaaattagaaagtagatgctttaattgtagctttatgcctttgggataagaataattggaagtctgtgaatgttt

SEQ ID NO: 7019 - DNA, 120 bp, Artificial Sequence
  ENSG00000006652_42 (sequence is synthesized)
agttccaaggcgggggcgcgccgaggcaggggtggggtcaccaggagaaaagcaagtgggcagaaaagcccgttgggaagagacggctgggaggaggccccggccccagccttactacgt

SEQ ID NO: 7020 - DNA, 120 bp, Artificial Sequence
  ENSG00000006652_43 (sequence is synthesized)
aggatatttatatatggaagcataccatggcaggagtgctggaaaggtggtgtcagctaacagttgcttcagccagataaggacggtaacttcagtccaataaaaacctcatcagttacc

SEQ ID NO: 7021 - DNA, 120 bp, Artificial Sequence
  ENSG00000006652_44 (sequence is synthesized)
attgtaatgtgttttaaaggctttttgatagagggtaggcttctttagctcatatgtctaagctttctatctttgaattacagttgaagtttaatgatctagtaagcacctgtaaagcat

SEQ ID NO: 7022 - DNA, 120 bp, Artificial Sequence
  ENSG00000006652_45 (sequence is synthesized)
acagaaaggaaacaaggggatagttcaccctttcagaatgctttactgacatagactcataaaaatgattcaataatttaaattatagattatggagctgcaattgtttcagaaattatg

SEQ ID NO: 7023 - DNA, 120 bp, Artificial Sequence
  ENSG00000006652_46 (sequence is synthesized)
taattcttttgcatgcttttgattttatggatcaataaaagaagactgaagaggaacagaatcactttgttaaagtcatgctgtgaatttagtagcagagcttgagctgaaacgcacttc

SEQ ID NO: 7024 - DNA, 120 bp, Artificial Sequence
  ENSG00000006652_47 (sequence is synthesized)
ctttgatcttagttcaatattctttctctcctcacctcttttatgtataatgtttgggacctaatatattatgctgctgagaacattttcacgttgaattataaaagcaggaagatgtag

SEQ ID NO: 7025 - DNA, 120 bp, Artificial Sequence
  ENSG00000006652_48 (sequence is synthesized)
cactggaacactggcccactcttaaaattttctaatagtcaaggagtgcaccatcttgttatggctcaaaatgagacttgttagaactttgtttttgtattacgtaaaccaaaaaaaaat

SEQ ID NO: 7026 - DNA, 120 bp, Artificial Sequence
  ENSG00000006652_49 (sequence is synthesized)
agcttgaaactaagaaggattagggtagattgtcatcaaccttttttgtatcagaagaggtgatggtcattctcttgttataccagaaaagcttgaaagtgtgtgtcagacatctagctc

SEQ ID NO: 7027 - DNA, 120 bp, Artificial Sequence
  ENSG00000006652_50 (sequence is synthesized)
ataaaacattgattgtacctgtaaattacatcattttcaggatatcccttggaatacttgaattctagaactttgtaatagaaattctggaattcaaattgttacagtgatagaactttt

SEQ ID NO: 7028 - DNA, 120 bp, Artificial Sequence
  ENSG00000006652_51 (sequence is synthesized)
aaaattgaatgaactaataagctttatatccttatttttctcattttacctgagagtaaaaattttgttgtaagtgaaacctttgatcaaattcactcttccattgaatagaataaagaa

SEQ ID NO: 7029 - DNA, 120 bp, Artificial Sequence
  ENSG00000006652_52 (sequence is synthesized)
aggcctaggaaaactgaggtgggtctaagctgatatatcttgttattggtatagttgatagcagacccaactttttaaagataacacaatggcgctattaaaggtgttttacattcaaac

SEQ ID NO: 7030 - DNA, 120 bp, Artificial Sequence
  ENSG00000006652_53 (sequence is synthesized)
tatatgctataatggttgttggactagatgacctttaaaaattccattttagtttgcgtattttttacatttttaatttatcaggtaataatttaagctcagtatttgccccacacttgt

SEQ ID NO: 7031 - DNA, 120 bp, Artificial Sequence
  ENSG00000006652_54 (sequence is synthesized)
gctcagtatttgccccacacttgtggtgtatacagttctcaagagttaatttatatgtacctttatataaatgtattttttgtaccactgcattccagcttgggcgacagagtgagaccc

SEQ ID NO: 7032 - DNA, 120 bp, Artificial Sequence
  ENSG00000006659_0 (sequence is synthesized)
acagaagactggacacaattccgaagagctgcccagaaggagagaacaatgtcatcactacccagtggcagacacctttcaccccagctacacaagagggggcagatgtgtgaggatcac

SEQ ID NO: 7033 - DNA, 120 bp, Artificial Sequence
  ENSG00000006659_1 (sequence is synthesized)
accccagctacacaagagggggcagatgtgtgaggatcactgcagtccaggagttcgatgtttcagtgagctgtgattgcaccactgcatatcagcctgggtgacagagcaagaccctat

SEQ ID NO: 7034 - DNA, 120 bp, Artificial Sequence
  ENSG00000006659_2 (sequence is synthesized)
gtagaaatcaatcattccctccagttatgtccctgacccacaggcttcatttgtgcaagtactggggctgtgctgtcagtaatgtgtgccgcttctgggaaggacgtccattgcccttga

SEQ ID NO: 7035 - DNA, 120 bp, Artificial Sequence
  ENSG00000006659_3 (sequence is synthesized)
ataatcacagggacaccgatcctcacttttgtcaaggacccacagctggaggtgaatttctacactgggatggatgaggactcagatattgctttccaattccgactgcactttggtcat

SEQ ID NO: 7036 - DNA, 120 bp, Artificial Sequence
  ENSG00000006659_4 (sequence is synthesized)
cctgcaatcatgaacagttgtgtgtttggcatatggagatatgaggagaaatgctactatttaccctttgaagatggcaaaccatttgagctgtgcatctatgtgcgtcacaaggaatac

SEQ ID NO: 7037 - DNA, 120 bp, Artificial Sequence
  ENSG00000006659_5 (sequence is synthesized)
aaggtaatggtaaatggccaacgcatttacaactttgcccatcgattcccgccagcatctgtgaagatgctgcaagtcttcagagatatctccctgaccagagtgcttatcagcgattga

SEQ ID NO: 7038 - DNA, 120 bp, Artificial Sequence
  ENSG00000006659_6 (sequence is synthesized)
agactcctcattgttgaggaatccctctttctacctgaccatgggattcccagagcctactaacagaataatccctcctcaccccttcccctacacttgatcattaaaacagcaccaaac

SEQ ID NO: 7039 - DNA, 120 bp, Artificial Sequence
  ENSG00000006695_0 (sequence is synthesized)
actactcccacaggggggcggggaaggaagatggcggcgcccagcgtcccgtgaggagagaggacacagggatcccggggagcggccccagactcgtaaattatggccgcatctccgcac

SEQ ID NO: 7040 - DNA, 120 bp, Artificial Sequence
  ENSG00000006695_1 (sequence is synthesized)
actctctcctcacgcctcctgacaggttgcgtaggaggctctgtctggtatcttgaaagaagaactatacaggactcccctcacaagttcttacatcttctcaggaatgtcaataagcag

SEQ ID NO: 7041 - DNA, 120 bp, Artificial Sequence
  ENSG00000006695_2 (sequence is synthesized)
tggattacatttcagcactttagcttcctcaaacgcatgtatgtcacacagctgaacagaagccacaaccagcaagtaagacccaagccagaaccagtagcatctcctttccttgaaaaa

SEQ ID NO: 7042 - DNA, 120 bp, Artificial Sequence
  ENSG00000006695_3 (sequence is synthesized)
acatcttcaggtcaagccaaagcagaaatatatgagatgagacctctctcaccgcccagcctatctttgtccagaaagccaaatgaaaaggaattgatagaactagagccagactcagta

SEQ ID NO: 7043 - DNA, 120 bp, Artificial Sequence
  ENSG00000006695_4 (sequence is synthesized)
attgaagactcaatagatgtagggaaagagacaaaagaggaaaagcggtggaaagagatgaagctgcaagtgtatgatttgccaggaattttggctcgactatccaaaatcaaactcaca

SEQ ID NO: 7044 - DNA, 120 bp, Artificial Sequence
  ENSG00000006695_5 (sequence is synthesized)
gctctggttgtaagtaccactgcagctggatttgcattggctccgggcccttttgactggccctgtttcctgcttacttctgttgggacaggccttgcatcctgtgctgccaactccatc

SEQ ID NO: 7045 - DNA, 120 bp, Artificial Sequence
  ENSG00000006695_6 (sequence is synthesized)
aatcagttttttgaggtgccatttgactcaaacatgaataggacaaagaacagaccgctggttcgtggacagatcagcccattgctagctgtgtcctttgccacttgttgtgctgttccg

SEQ ID NO: 7046 - DNA, 120 bp, Artificial Sequence
  ENSG00000006695_7 (sequence is synthesized)
ggagttgccattctgaccttgggggtgaatccactcacaggagccctggggctcttcaacattttcctgtatacctgctgctacacaccactgaaaaggatcagcattgccaacacatgg

SEQ ID NO: 7047 - DNA, 120 bp, Artificial Sequence
  ENSG00000006695_8 (sequence is synthesized)
gtcggagctgtggttggggccatcccgcctgtcatgggctggacagcggccacgggcagcctcgatgctggcgcatttctcctgggaggaatcctctactcctggcagtttcctcatttc

SEQ ID NO: 7048 - DNA, 120 bp, Artificial Sequence
  ENSG00000006695_9 (sequence is synthesized)
aacgccctgagctggggcctccgtgaagactactcccggggcggctactgcatgatgtcggtcacccacccgggcctgtgccggcgcgtggcgctgcgccactgcctggccctgctcgtg

SEQ ID NO: 7049 - DNA, 120 bp, Artificial Sequence
  ENSG00000006695_10 (sequence is synthesized)
ctgtccgcagcagcccctgtgctggacatcaccacatggaccttccccatcatggcccttcccatcaatgcgtacatctcctacctcggcttccgcttctacgtggacgcagaccgcagg

SEQ ID NO: 7050 - DNA, 120 bp, Artificial Sequence
  ENSG00000006695_11 (sequence is synthesized)
agctcgcggagactgttcttctgcagcctgtggcacctgccgctgctgctgctgctcatgctcacctgcaagcggccgagcggaggcggggacgcagggccccctcccagctgagagcac

SEQ ID NO: 7051 - DNA, 120 bp, Artificial Sequence
  ENSG00000006695_12 (sequence is synthesized)
tttccctccgctgccaggcgagcatgttgtggtaattctggaacacaagaagagaaattgctgggtttagaacaagattataaacgaattcggtgctcagtgatcacttgacagtttttt

SEQ ID NO: 7052 - DNA, 120 bp, Artificial Sequence
  ENSG00000006695_13 (sequence is synthesized)
ttttttttaaatattacccaaaatgctccccaaataagaaatgcatcagctcagtcagtgaatacaaaaaaggaattatttttccctttgagggtctttatacatctctcctccaacccc

SEQ ID NO: 7053 - DNA, 120 bp, Artificial Sequence
  ENSG00000006695_14 (sequence is synthesized)
accctctattctgtttcttcctcctcacatgggggtacacatacacagcttcctcttttggttccatccttaccaccacaccacacgcacactccacatgcccagcagagtggcacttgg

SEQ ID NO: 7054 - DNA, 120 bp, Artificial Sequence
  ENSG00000006695_15 (sequence is synthesized)
tggccagaaagtgtgagcctcatgatctgctgtctgtagttctgtgagctcaggtccctcaaaggcctcggagcacccccttcctggtgactgagccagggcctgcatttttggttttcc

SEQ ID NO: 7055 - DNA, 120 bp, Artificial Sequence
  ENSG00000006695_16 (sequence is synthesized)
ccaccccacacattctcaaccatagtccttctaacaataccaatagctaggacccggctgctgtgcactgggactggggattccacatgtttgccttgggagtctcaagctggactgcca

SEQ ID NO: 7056 - DNA, 120 bp, Artificial Sequence
  ENSG00000006695_17 (sequence is synthesized)
gcccctgtcctcccttcacccccattgcgtatgagcatttcagaactccaaggagtcacaggcatctttatagttcacgttaacatatagacactgttggaagcagttccttctaaaagg

SEQ ID NO: 7057 - DNA, 120 bp, Artificial Sequence
  ENSG00000006695_18 (sequence is synthesized)
gtagccctggacttaataccagccggatacctctggcccccaccccattactgtacctctggagtcactactgtgggtcgccactcctctgctacacagcacggctttttcaaggctgta

SEQ ID NO: 7058 - DNA, 120 bp, Artificial Sequence
  ENSG00000006695_19 (sequence is synthesized)
ttgagaagggaagttaggaagaagggtgtgctgggctaaccagcccacagagctcacattcctgtcccttgggtgaaaaatacatgtccatcctgatatctcctgaattcagaaattagc

SEQ ID NO: 7059 - DNA, 120 bp, Artificial Sequence
  ENSG00000006695_20 (sequence is synthesized)
ctccacatgtgcaatggctttaagagccagaagcagggttctgggaattttgcaagttatcctgtggccaggtgtggtctcggttaccaaatacggttacctgcagctttttagtccttt

SEQ ID NO: 7060 - DNA, 120 bp, Artificial Sequence
  ENSG00000006695_21 (sequence is synthesized)
gtgctcccacgggtctgcagagtcccatctgcccaaaggtcttgaagcttgacaggatgttttcattactcagtctcccagggcactgctggtccgtagggattcattggtcggggtggg

SEQ ID NO: 7061 - DNA, 120 bp, Artificial Sequence
  ENSG00000006695_22 (sequence is synthesized)
agagttaaacaacatttaaacagagttctctcaaaaatgtctaaagggattgtaggtagataacatccaatcactgtttgcacttatctgaaatcttccctcttggctgcccccaggtat

SEQ ID NO: 7062 - DNA, 120 bp, Artificial Sequence
  ENSG00000006695_23 (sequence is synthesized)
ttactgtggagaacattgcataggaatgtctggaaaaagcctctacaacttgttacagccttcacatttgtacaattcattgattctcttttccttccacaataaaatggtatacaagaa

SEQ ID NO: 7063 - DNA, 120 bp, Artificial Sequence
  ENSG00000006695_24 (sequence is synthesized)
cagtggaaagagaaaccacagataagggagaactgctgtacatatctgccagcctggagaaatgagagcaatatacctgcttcttgtttgttggaaacccaaatgtaattgacctgctgg

SEQ ID NO: 7064 - DNA, 120 bp, Artificial Sequence
  ENSG00000006695_25 (sequence is synthesized)
acacattacactttttggcatcttttggccactatttcctaattgtaagatgtgaagatacgctctggatcaaagaggctctcatgttcgcttaataattcagagtccatcactcagtgg

SEQ ID NO: 7065 - DNA, 120 bp, Artificial Sequence
  ENSG00000006695_26 (sequence is synthesized)
ctggactctgccatgcacatcacagagcatctgagaggcaaggtatccaccagcgtgggacaactctatgcttgcattctgatcatgcctcactcctcacacttcagcttgtgtgatgcc

SEQ ID NO: 7066 - DNA, 120 bp, Artificial Sequence
  ENSG00000006695_27 (sequence is synthesized)
atgcctcactcctcacacttcagcttgtgtgatgccaccagtttgagccctctgaaaatcccatctgaccactgctaacctcctctaccaccaccaggctggaatgcaatggtgcgatct

SEQ ID NO: 7067 - DNA, 120 bp, Artificial Sequence
  ENSG00000006695_28 (sequence is synthesized)
ccataaatgaccatgtgatgggtgctccatcaatgatgaaaggaatgaatgagtaccttttatggcatggtgggaggtggaggtggcgggagcacttgaaggtggaggagattggtacat

SEQ ID NO: 7068 - DNA, 120 bp, Artificial Sequence
  ENSG00000006695_29 (sequence is synthesized)
gcctgccccttgtgactgaatctggaacaggtgcacgtttctgcctgcttcgtgaagcaaactgccaaagtcgaaccaagctgtactcatgcttcttcctgttttgggaatgatctccaa

SEQ ID NO: 7069 - DNA, 120 bp, Artificial Sequence
  ENSG00000006695_30 (sequence is synthesized)
cttttctttgtttgccaaaaaataatcatccttccaggaccaaatcaaaagtcaactcttcaaagccttcctgtctgtcttgtcacaggccagtcaccctgcagggccctcatctctttt

SEQ ID NO: 7070 - DNA, 120 bp, Artificial Sequence
  ENSG00000006695_31 (sequence is synthesized)
cttgagagagtccaaagactgtgggactaggcctgctggtctgctggtgttctcccatctctgcctctgagcaccctgctggaaaggctaccctgagatgttggtggactggatctctga

SEQ ID NO: 7071 - DNA, 120 bp, Artificial Sequence
  ENSG00000006695_32 (sequence is synthesized)
tctagaaaaaactgctcagaggcaaaagctacaagaggcacgttctggcatgaatgatactggctcttccggcccccagattgcagatccacagagaagactatgggtgaaagatgaccc

SEQ ID NO: 7072 - DNA, 120 bp, Artificial Sequence
  ENSG00000006695_33 (sequence is synthesized)
caggtgtagaacttcatcttaggaagagatcacccaaccagagacttcgtacacatcatttggttgattttagttaacgagagcatggaagatgttggaataattgctaacaatcctggc

SEQ ID NO: 7073 - DNA, 120 bp, Artificial Sequence
  ENSG00000006695_34 (sequence is synthesized)
cggggaaattaggaagcccatcctctaattaaaatttaatgtagaggaactgaccatcatgaatgaatggactcaattccttgagaagaagacagataatttcaaactatttcctagaac

SEQ ID NO: 7074 - DNA, 120 bp, Artificial Sequence
  ENSG00000006695_35 (sequence is synthesized)
aagtaaaggcactcagttgtacagagtgaggaggtttccctaggcaagattggtggcagcctcaggatgtatggggccggaggctgttatattctcactgggcgagagaaatggataggg

SEQ ID NO: 7075 - DNA, 120 bp, Artificial Sequence
  ENSG00000006695_36 (sequence is synthesized)
aatgataatgatgaatgagttttctttcaaagtactcactaagggaggctctccattttctttttcctcactaaagtgcctcaaaatgcttaaagaattccactttggaattacttccga

SEQ ID NO: 7076 - DNA, 120 bp, Artificial Sequence
  ENSG00000006695_37 (sequence is synthesized)
actagtttatattttctatcccatgactctacaattgcacctcatttttaaccaaaaaatcatttcctgcttcatcaaccaccttattcatcagacgtggccctggatgattttcggttg

SEQ ID NO: 7077 - DNA, 120 bp, Artificial Sequence
  ENSG00000006695_38 (sequence is synthesized)
tttccaaaaatgaaattcaacctcaaagcttaaagatttacgctatcgcagctcctgaagaaatgtgccatcaactctaaagatgaagaggagttccagatatattttggtattgaaaaa

SEQ ID NO: 7078 - DNA, 120 bp, Artificial Sequence
  ENSG00000006695_39 (sequence is synthesized)
aatttacgtctcattattttgccatctcatacattttcatatcttcttctcttatattgctttgaagatgaaactcagatctgtataaagtatttcaagcatattaaccaaagagttgtg

SEQ ID NO: 7079 - DNA, 120 bp, Artificial Sequence
  ENSG00000006695_40 (sequence is synthesized)
cttaatccagccacctgtaactaaatttctgtctctatagtgtctcggaaaaaagaaagaaagtggaaaggcaggttgagaaaaaatagaagtgcatataattaaatcatgaaagagtga

SEQ ID NO: 7080 - DNA, 120 bp, Artificial Sequence
  ENSG00000006695_41 (sequence is synthesized)
gagccacagcgcccggccaatttcacaaatagattttttttcttactgtaaatcttagcaagctcagcatatgaatttttttttttccttaaattgaaagcttttaccctttcacttaaa

SEQ ID NO: 7081 - DNA, 120 bp, Artificial Sequence
  ENSG00000006695_42 (sequence is synthesized)
ttccttaaattgaaagcttttaccctttcacttaaaggcagcactttatggcttctcttgggcatatccaaactgctaccatcactactcgtgttagtccattttcacgctgctgataaa

SEQ ID NO: 7082 - DNA, 67 bp, Artificial Sequence
  ENSG00000006695_43 (sequence is synthesized)
cgtggcaaagagaaagcttgtacagggagactcccgttttgaaaaccatcagatcttgtgagactca

SEQ ID NO: 7083 - DNA, 120 bp, Artificial Sequence
  ENSG00000006695_44 (sequence is synthesized)
agactcccgttttgaaaaccatcagatcttgtgagactcattcactattacaagaacagtgcaggaaagatgcacccctgtgcttcaatcacctcccagcaggttcctcccacgacatgt

SEQ ID NO: 7084 - DNA, 120 bp, Artificial Sequence
  ENSG00000006695_45 (sequence is synthesized)
gttggggacacagccaaaccatatcactactcttgtgctttggggccattatgaagtaaaacaagcattatttgaagacaaggactgcaataccaccacagtagatctgataactgttgg

SEQ ID NO: 7085 - DNA, 120 bp, Artificial Sequence
  ENSG00000006695_46 (sequence is synthesized)
ctgcaataccaccacagtagatctgataactgttggctactaagtgacaaaggggcaggtgaagtatacagcgtggatgcgatggacaaaggggaggatctacctcccagctgggatgga

SEQ ID NO: 7086 - DNA, 120 bp, Artificial Sequence
  ENSG00000006695_47 (sequence is synthesized)
gcaggacgatgcaagatttcatcacactactcagaaaggcatgcagtttaaagctcgtaaattatttcaggaattttccatttaatattttcaggctgtggctgaccgtgagtaacaaac

SEQ ID NO: 7087 - DNA, 120 bp, Artificial Sequence
  ENSG00000006695_48 (sequence is synthesized)
ccaggaaagcgaaactgcagaacagtggatgggagaaagggtgaattactgtatattcatgagggatattagtccatagtttcttttttcccttttaacaaatttttgggttttgtatat

SEQ ID NO: 7088 - DNA, 120 bp, Artificial Sequence
  ENSG00000006695_49 (sequence is synthesized)
agtttgtctggttttggtatcagggtaatactagcttcataaaatgaattggaaagcgtttcttctgttttccgaaaaagattatatggaattagcattcattctttaaacacttggtag

SEQ ID NO: 7089 - DNA, 120 bp, Artificial Sequence
  ENSG00000006695_50 (sequence is synthesized)
ttatttgaaactctatctttagtgaaacaaaaagctaattttatttaccacctgaaaagaataatttggaactgcaggtcctgtcttagtatttttcctctcttcaatttaactgggatt

SEQ ID NO: 7090 - DNA, 120 bp, Artificial Sequence
  ENSG00000006695_51 (sequence is synthesized)
tgaaattaaattttctgaattctatttacacagaattgtaaatagtattgcattgtaagtattgtattaaaaatagtcaccctttcctttgcaattaaagttgaatgtttatcctgctta

SEQ ID NO: 7091 - DNA, 120 bp, Artificial Sequence
  ENSG00000006704_0 (sequence is synthesized)
taaatggcagccaatggagggtggtgttgcgcggggctgggattagggccggggcgaatggctggcaatcttactgggattacagaacaaagagcctccccgcgctcccgctctccgctc

SEQ ID NO: 7092 - DNA, 80 bp, Artificial Sequence
  ENSG00000006704_1 (sequence is synthesized)
gaacaaagagcctccccgcgctcccgctctccgctcctctccccgcgccgccccgccctccgccgcagcccgcgccgggg

SEQ ID NO: 7093 - DNA, 120 bp, Artificial Sequence
  ENSG00000006704_2 (sequence is synthesized)
cctcgccgcgccgccgtcctcgcctccctctgcctctccttcccccattctcccggattaattaaggaggcagcggcaggaggctgagtcctggccgcgggccggggccggggcgccgct

SEQ ID NO: 7094 - DNA, 120 bp, Artificial Sequence
  ENSG00000006704_3 (sequence is synthesized)
ggcaggagcgcttggggatcctccaaggcgaccatggccttgctgggtaagcgctgtgacgtccccaccaacggctgcggacccgaccgctggaactccgcgttcacccgcaaagacgag

SEQ ID NO: 7095 - DNA, 120 bp, Artificial Sequence
  ENSG00000006704_4 (sequence is synthesized)
atcatcaccagcctcgtgtctgccttagactccatgtgctcagcgctgtccaaactgaacgccgaggtggcctgtgtcgccgtgcacgatgagagcgcctttgtggtgggcacagagaag

SEQ ID NO: 7096 - DNA, 120 bp, Artificial Sequence
  ENSG00000006704_5 (sequence is synthesized)
gggagaatgttcctgaatgcccggaaggagctacagtcagacttcctcaggttctgccgagggcccccgtggaaggatccggaggcagagcaccccaagaaggtgcagcggggcgagggt

SEQ ID NO: 7097 - DNA, 120 bp, Artificial Sequence
  ENSG00000006704_6 (sequence is synthesized)
ggaggccgtagcctccctcggtcctccctggaacatggctcagatgtgtaccttctgcggaagatggtagaggaggtgtttgatgttctttatagcgaggccctgggaagggccagtgtg

SEQ ID NO: 7098 - DNA, 120 bp, Artificial Sequence
  ENSG00000006704_7 (sequence is synthesized)
gtgccactgccctatgagaggctgctcagggagccagggctgctggccgtgcaggggctgcccgaaggcctggccttccgaaggccagccgagtatgaccccaaggccctcatggccatc

SEQ ID NO: 7099 - DNA, 120 bp, Artificial Sequence
  ENSG00000006704_8 (sequence is synthesized)
ctggaacacagccaccgcatccgcttcaagctcaagaggccacttgaggatggcgggcgggactcgaaggccctggtggagctgaacggtgtctccctgattcccaaggggtcacgggac

SEQ ID NO: 7100 - DNA, 120 bp, Artificial Sequence
  ENSG00000006704_9 (sequence is synthesized)
tgtggcctgcatggccaggcccccaaggtgccaccccaggacctgcccccaaccgccacctcctcctccatggccagcttcctgtacagcacggcgctccccaaccacgccatccgagag

SEQ ID NO: 7101 - DNA, 120 bp, Artificial Sequence
  ENSG00000006704_10 (sequence is synthesized)
ctcaagcaggaagcaccttcctgcccccttgcccccagcgacctgggcctgagtcggcccatgccagagcccaaggccaccggtgcccaagacttctccgactgttgtggacagaagccc

SEQ ID NO: 7102 - DNA, 120 bp, Artificial Sequence
  ENSG00000006704_11 (sequence is synthesized)
actgggcctggtgggcctctcatccagaacgtccatgcctccaagcgcattctcttctccatcgtccatgacaagtcagagaagtgggacgccttcataaaggaaaccgaggacatcaac

SEQ ID NO: 7103 - DNA, 120 bp, Artificial Sequence
  ENSG00000006704_12 (sequence is synthesized)
acgctccgggagtgtgtgcagatcctgtttaacagcagatatgcggaagccctgggcctggaccacatggtccccgtgccctaccggaagattgcctgtgacccggaggctgtggagatc

SEQ ID NO: 7104 - DNA, 120 bp, Artificial Sequence
  ENSG00000006704_13 (sequence is synthesized)
gtgggcatcccggacaagatccccttcaagcgcccctgcacttatggagtccccaagctgaagcggatcctggaggagcgccatagtatccacttcatcattaagaggatgtttgatgag

SEQ ID NO: 7105 - DNA, 120 bp, Artificial Sequence
  ENSG00000006704_14 (sequence is synthesized)
cctctgcagaggtctctagggccaccgtccttgaccttgctgggaatgctcggtcagacaagggcagcatgtctgaagactgtgggccaggaacctccggggagctgggcgggctgaggc

SEQ ID NO: 7106 - DNA, 120 bp, Artificial Sequence
  ENSG00000006704_15 (sequence is synthesized)
cgatcaaaattgagccagaggatctggacatcattcaggtcaccgtcccagacccctcgccaacctctgaggaaatgacagactcgatgcctgggcacctgccatcggaggattctggtt

SEQ ID NO: 7107 - DNA, 120 bp, Artificial Sequence
  ENSG00000006704_16 (sequence is synthesized)
atgggatggagatgctgacagacaaaggtctgagtgaggacgcgcggcccgaggagaggcccgtggaggacagccacggtgacgtgatccggcccctgcggaagcaggtggagctgctct

SEQ ID NO: 7108 - DNA, 120 bp, Artificial Sequence
  ENSG00000006704_17 (sequence is synthesized)
tcaacacacgatacgccaaggccattggcatctcggagcccgtcaaggtgccgtactccaagtttctgatgcacccggaggagctgtttgtggtgggactgcctgaaggcatctccctcc

SEQ ID NO: 7109 - DNA, 120 bp, Artificial Sequence
  ENSG00000006704_18 (sequence is synthesized)
gcaggcccaactgcttcgggatcgccaagctccggaagattctggaggccagcaacagcatccagtttgtcatcaagaggcccgagctgctcactgagggagtcaaagagcccatcatgg

SEQ ID NO: 7110 - DNA, 120 bp, Artificial Sequence
  ENSG00000006704_19 (sequence is synthesized)
atagtcaaggaactgcctcctcacttggcttctctccccctgccctgcccccagagagggattccggggaccctctggtggacgagagcctgaagagacagggctttcaagaaaattatg

SEQ ID NO: 7111 - DNA, 120 bp, Artificial Sequence
  ENSG00000006704_20 (sequence is synthesized)
acgcgaggctctcacggatcgacatcgccaacacactaagggagcaggtccaggaccttttcaataagaaatacggggaagccttgggcatcaagtacccggtccaggtcccctacaagc

SEQ ID NO: 7112 - DNA, 120 bp, Artificial Sequence
  ENSG00000006704_21 (sequence is synthesized)
ggatcaagagtaaccccggctccgtgatcatcgaggggctgcccccaggaatcccgttccgaaagccctgtaccttcggctcccagaacctggagaggattcttgctgtggctgacaaga

SEQ ID NO: 7113 - DNA, 120 bp, Artificial Sequence
  ENSG00000006704_22 (sequence is synthesized)
tcaagttcacagtcaccaggcctttccaaggactcatcccaaagcctgatgaagatgacgccaacagactcggggagaaggtgatcctgcgggagcaggtgaaggaactcttcaacgaga

SEQ ID NO: 7114 - DNA, 120 bp, Artificial Sequence
  ENSG00000006704_23 (sequence is synthesized)
aatacggtgaggccctgggcctgaaccggccggtgctggtcccttataaactaatccgggacagcccagacgccgtggaggtcacgggtctgcctgatgacatccccttccggaacccca

SEQ ID NO: 7115 - DNA, 120 bp, Artificial Sequence
  ENSG00000006704_24 (sequence is synthesized)
acacgtacgacatccaccggctggagaagatcctgaaggcccgagagcatgtccgcatggtcatcattaaccagctccaaccctttgcagaaatctgcaatgatgccaaggtgccagcca

SEQ ID NO: 7116 - DNA, 120 bp, Artificial Sequence
  ENSG00000006704_25 (sequence is synthesized)
aagacagcagcattcccaagcgcaagagaaagcgggtctcggaaggaaattccgtctcctcttcctcctcgtcttcctcttcctcgtcctctaacccggattcagtggcatcggccaacc

SEQ ID NO: 7117 - DNA, 120 bp, Artificial Sequence
  ENSG00000006704_26 (sequence is synthesized)
agatctcactcgtgcaatggccaatgtacatggtggactatgccggcctgaacgtgcagctcccgggacctcttaattactagacctcagtactgaatcaggacctcactcagaaagact

SEQ ID NO: 7118 - DNA, 120 bp, Artificial Sequence
  ENSG00000006704_27 (sequence is synthesized)
aaaggaaatgtaatttatgtacaaaatgtatattcggatatgtatcgatgccttttagtttttccaatgatttttacactatattcctgccaccaaggcctttttaaataagtaaaaaaa

SEQ ID NO: 7119 - DNA, 120 bp, Artificial Sequence
  ENSG00000006704_28 (sequence is synthesized)
aacatttagcagcaaactcaacatacattttggccaaacgcccaccggccagttgtttaaatcaatatttatccacagccaaaaagcagaggagagccagaactgaggccagagccgagc

SEQ ID NO: 7120 - DNA, 120 bp, Artificial Sequence
  ENSG00000006704_29 (sequence is synthesized)
tctgatgcatctctcatttctcgggatgtttctgtccctgtggttggacacctctggccttgtgaagtgtgatgcactgtcacatctcctgttctgtgtcattggccaatgatcatatat

SEQ ID NO: 7121 - DNA, 120 bp, Artificial Sequence
  ENSG00000006704_30 (sequence is synthesized)
catgacctgctggaaggcctgtctgtggctgggaccacacgccttgggccttatgcacactgggcactggtcgggatcctggggtgcaacagtggcaggcagacctggtttctgccctca

SEQ ID NO: 7122 - DNA, 120 bp, Artificial Sequence
  ENSG00000006704_31 (sequence is synthesized)
aagagcttacagatggcaggggcacccatggcggcagaagacaccccaggcctggtgccctttgtggtgccagccccatggtcctcctgcctgggccttccctaccccattgggtgcaga

SEQ ID NO: 7123 - DNA, 120 bp, Artificial Sequence
  ENSG00000006704_32 (sequence is synthesized)
aactccctgtctgcaggtaggagacagagggtaggttttcaggctcccttgggaactgcagccctgctctctgccatcaacacccagcaggggccacacagagagcaccgggactgagcc

SEQ ID NO: 7124 - DNA, 120 bp, Artificial Sequence
  ENSG00000006704_33 (sequence is synthesized)
catagaggggaaccgagaggcccctgcctctagtctctgccttctttgcttggattggtgcagggacagctgccttgagggcaggccctggcactggggcagcctgtgggtgccccctgg

SEQ ID NO: 7125 - DNA, 120 bp, Artificial Sequence
  ENSG00000006704_34 (sequence is synthesized)
gtcaagaaggagaggggcagggtagaaccaggagccaaaggaggctgatctttgcatctcatgggtgcccagctggacactgtcatacccaggaagcctgtgccatgccatggggaccca

SEQ ID NO: 7126 - DNA, 120 bp, Artificial Sequence
  ENSG00000006704_35 (sequence is synthesized)
caactgggggccctggacttgagggggaggatgcagctctgtcccccaggaaccccattgcaacaggacacagtcctgccctggggagcccctgacctgagacaaagcagcctcggccct

SEQ ID NO: 7127 - DNA, 120 bp, Artificial Sequence
  ENSG00000006704_36 (sequence is synthesized)
gctgtatctttccatacccctgatgccaagtctcctggctaggagggaaactgaggctggaaggcctcggcgggggtggcattggcctcgggagcatgtggcttgatgcagaaatgtgac

SEQ ID NO: 7128 - DNA, 120 bp, Artificial Sequence
  ENSG00000006704_37 (sequence is synthesized)
ggcagagctcagaggcatgcggaagggaggggaggacatcaccggctcctgacccagctgggcttcaggttgggggtacaggaggtgggcaagcaggttggacaattaaaagcttcgatg

SEQ ID NO: 7129 - DNA, 69 bp, Artificial Sequence
  ENSG00000006704_38 (sequence is synthesized)
ggaggtgggcaagcaggttggacaattaaaagcttcgatgaggctgggtgagtggcttatgcctgtatt

SEQ ID NO: 7130 - DNA, 60 bp, Artificial Sequence
  ENSG00000006704_39 (sequence is synthesized)
aaaaatacaaaaattagccagacgtgtggaggggaggttgcagtgagccaagattgcacc

SEQ ID NO: 7131 - DNA, 120 bp, Artificial Sequence
  ENSG00000006704_40 (sequence is synthesized)
cctgggcaacagagtgagactctgtctcgaaataaaattaaatttaaaatttaaaaaagcttcaaggacaaccagcagatgatggcaggaccaggaagggtgcttcaggcagcgggaact

SEQ ID NO: 7132 - DNA, 120 bp, Artificial Sequence
  ENSG00000006704_41 (sequence is synthesized)
gcagcgggaactgaacctgcacagactagggaagcatgaacatcggtacatctgggagtggcacagcttagagggcctggagcatggagtgtgagggggaactggagtgagggacaggag

SEQ ID NO: 7133 - DNA, 120 bp, Artificial Sequence
  ENSG00000006704_42 (sequence is synthesized)
ggggacggggaggcactgggctttgagtggggaccttccggcctcgggggttatagatgcatccacctgtctcacccaagaggtagcccatccttctcgtggggtactcacaggcactca

SEQ ID NO: 7134 - DNA, 120 bp, Artificial Sequence
  ENSG00000006704_43 (sequence is synthesized)
ggcaggaattcacatcctcgctgggcagatgggccggctgaggtccacctgcccacacccttcagccgcaccagagctggagacatgaaaagacatggctggcgggtgcagtggctcacg

SEQ ID NO: 7135 - DNA, 86 bp, Artificial Sequence
  ENSG00000006704_44 (sequence is synthesized)
gcagctacttgggaggctggggcaggaggatcatttgagcccaaggggattgaggctgcagtgagccaagatcgtcccattgcact

SEQ ID NO: 7136 - DNA, 120 bp, Artificial Sequence
  ENSG00000006704_45 (sequence is synthesized)
ttgagcccaaggggattgaggctgcagtgagccaagatcgtcccattgcactccagcctgggcaagagaacgagactccatctcaaaaataaataaataggctgggtgtggtggctcacg

SEQ ID NO: 7137 - DNA, 120 bp, Artificial Sequence
  ENSG00000006704_46 (sequence is synthesized)
actccatctcaaaaaaataaaaaatataaataaatagcctctgagaaagctcttccaaaagcagaactaagcattttgggtttgttccgcatcacctggagtcctaatccagtccctttg

SEQ ID NO: 7138 - DNA, 120 bp, Artificial Sequence
  ENSG00000006704_47 (sequence is synthesized)
tccggcccctgcggaagcaggtggagctgctcttcaacacacgatacggcccgagctgctcactgagggagtcaaagagcccatcatggatagtcaagagagggattccggggaccctct

SEQ ID NO: 7139 - DNA, 120 bp, Artificial Sequence
  ENSG00000006704_48 (sequence is synthesized)
tccgcagctcagcacagggcagcgacatcccagctcgaaggccgggtggtgagacgggtgctcactgtggcctcgcgtgctctgtgtcccacaggagggcccccgtggaaggatccggag

SEQ ID NO: 7140 - DNA, 120 bp, Artificial Sequence
  ENSG00000006712_0 (sequence is synthesized)
agcgtcttggcggcagttggtggaaccggagcttcgagtccgtccccggtgctgcctgcgcgttcacctgagtctcgctggagctcttctcgcccgcccacctcatctcaacccactttc

SEQ ID NO: 7141 - DNA, 120 bp, Artificial Sequence
  ENSG00000006712_1 (sequence is synthesized)
cgcggggagcggcgccaagctgggccttcctcggatcaggcgtcccctgaagtcggcacgcccctctgcgtcccccttcggtcccgctaggaccccgtccgggctgccgtcgcctcgtcg

SEQ ID NO: 7142 - DNA, 120 bp, Artificial Sequence
  ENSG00000006712_2 (sequence is synthesized)
ctatggcgcccaccatccagacccaggcccagcgggaggatggccacaggcccaattcccaccggactctgcctgagaggtctggagtggtctgccgagtcaagtactgcaatagcctcc

SEQ ID NO: 7143 - DNA, 120 bp, Artificial Sequence
  ENSG00000006712_3 (sequence is synthesized)
ctgatatccccttcgaccccaagttcatcacctaccccttcgaccagaacaggttcgtccagtacaaagccacttccttggagaaacagcacaaacatgacctcctgactgagccagacc

SEQ ID NO: 7144 - DNA, 120 bp, Artificial Sequence
  ENSG00000006712_4 (sequence is synthesized)
tgggggtcaccatcgatctcatcaatcctgacacctaccgcatcgaccccaatgttcttctagatccagctgatgagaaacttttggaagaggagattcaggcccccaccagctccaaga

SEQ ID NO: 7145 - DNA, 120 bp, Artificial Sequence
  ENSG00000006712_5 (sequence is synthesized)
gatcccagcagcacgcgaaggtggtgccatggatgcgaaagacagagtacatctccactgagttcaaccgttatggcatctccaatgagaagcctgaggtcaagattggggtttctgtga

SEQ ID NO: 7146 - DNA, 120 bp, Artificial Sequence
  ENSG00000006712_6 (sequence is synthesized)
agcagcagtttaccgaggaagaaatatacaaagacagggatagccagatcacagccattgagaagacttttgaggatgcccagaaatcaatctcacagcattacagcaaaccccgagtca

SEQ ID NO: 7147 - DNA, 120 bp, Artificial Sequence
  ENSG00000006712_7 (sequence is synthesized)
caccggtggaggtcatgcctgtcttcccagactttaagatgtggatcaatccatgtgctcaggtgatctttgactcagacccagcccccaaggacacgagtggtgcagctgcgttggaga

SEQ ID NO: 7148 - DNA, 120 bp, Artificial Sequence
  ENSG00000006712_8 (sequence is synthesized)
tgatgtctcaggccatgattaggggcatgatggatgaggaagggaaccagtttgtggcctatttcctgcctgtagaagagacgttgaagaaacgaaagcgggaccaggaggaggagatgg

SEQ ID NO: 7149 - DNA, 120 bp, Artificial Sequence
  ENSG00000006712_9 (sequence is synthesized)
ggagtacaactggaacgtgaagaacaaagctagcaagggctatgaggaaaactacttcttcatcttccgagagggtgacggggtttactacaatgagttggaaaccagggtccgccttag

SEQ ID NO: 7150 - DNA, 120 bp, Artificial Sequence
  ENSG00000006712_10 (sequence is synthesized)
taagcgccgggccaaggctggggttcagtcaggcaccaacgccctgcttgtggtcaaacatcgggacatgaatgagaaggaactggaagctcaggaggcacggaaggcccagctagaaaa

SEQ ID NO: 7151 - DNA, 120 bp, Artificial Sequence
  ENSG00000006712_11 (sequence is synthesized)
ccacgaaccggaggaggaagaggaagaggagatggagacagaagagaaagaagctgggggctcagatgaggagcaggagaagggcagcagcagtgagaaggagggcagtgaagatgagca

SEQ ID NO: 7152 - DNA, 120 bp, Artificial Sequence
  ENSG00000006712_12 (sequence is synthesized)
ctcgggcagcgagagtgaacgggaggaaggtgacagggacgaggccagtgacaagagtggcagtggtgaggacgagagcagcgaggatgaggcccgggctgcccgtgacaaagaggagat

SEQ ID NO: 7153 - DNA, 120 bp, Artificial Sequence
  ENSG00000006712_13 (sequence is synthesized)
ctttggcagtgatgctgattctgaggacgatgccgactctgatgatgaggacagaggacaggcccaaggtggcagtgacaatgattcagacagcggcagcaatgggggtggccagcggag

SEQ ID NO: 7154 - DNA, 120 bp, Artificial Sequence
  ENSG00000006712_14 (sequence is synthesized)
ccggagccacagccgcagcgccagtcccttccccagtggcagcgagcactcggcccaggaggatggcagtgaagctgcagcttctgattccagtgaagctgatagtgacagtgactgagt

SEQ ID NO: 7155 - DNA, 120 bp, Artificial Sequence
  ENSG00000006712_15 (sequence is synthesized)
cccagggcattcagggctggttcagacaccattattgtgagcagcaaagcacttttctagtggtctgtttgtgagcctttcacttgtttgttccccacccccaaacctttgctgttaata

SEQ ID NO: 7156 - DNA, 120 bp, Artificial Sequence
  ENSG00000006712_16 (sequence is synthesized)
aagtcaacttctctttacttcccctcccagcccctatgatgtcattcagcccagcacatacctcccgcaacccccaggtgctcaaggatcttggcttgaggcttagaaacacaggccaga

SEQ ID NO: 7157 - DNA, 89 bp, Artificial Sequence
  ENSG00000006712_17 (sequence is synthesized)
ctcaaggatcttggcttgaggcttagaaacacaggccagaggcagggccaatggtttcccacaaaatgtagcacaacgaaggtcagaca

SEQ ID NO: 7158 - DNA, 120 bp, Artificial Sequence
  ENSG00000006712_18 (sequence is synthesized)
tcgttggctgctgtctgctcagggcctagcacagtacctaccctagcacatagtagtagctgctcaattgttaatggagcaagcagtgtccaagtcccttcccactggggagccagcttt

SEQ ID NO: 7159 - DNA, 120 bp, Artificial Sequence
  ENSG00000006712_19 (sequence is synthesized)
caggtaaatctggacaggccagactctgggagccctgggagggtggaaaagtgggtttcatctctctccactcccttccagatgaggagcaggagaagggcagcagcagtgagaaggagg

SEQ ID NO: 7160 - DNA, 120 bp, Artificial Sequence
  ENSG00000006712_20 (sequence is synthesized)
ttcccagactttaaggtcaggcccaaggtgggaggtagaaagggacagcctatttgtgcctgttcccatctaaccccagtgcctccatctccctagatgtggatcaatccatgtgctcag

SEQ ID NO: 7161 - DNA, 120 bp, Artificial Sequence
  ENSG00000006712_21 (sequence is synthesized)
ccacttttgagccactaatgttcctaggtctggagtggtctgccgagtcaagtactgcaatagcctccctgatatccccttcgaccccaagttcatcacctaccccttcgaccagaacag

SEQ ID NO: 7162 - DNA, 120 bp, Artificial Sequence
  ENSG00000006712_22 (sequence is synthesized)
agacagggagggtctgctctaggtcagcaaaggctcaggcctgggcctccctcatggtcctcctgccccccgctctcctctagttcttctagatccagctgatgagaaacttttggaaga

SEQ ID NO: 7163 - DNA, 120 bp, Artificial Sequence
  ENSG00000006715_0 (sequence is synthesized)
gactctcccgtggcgccatggcggaagcagaggagcaggaaactgggtcccttgaagaatctacagatgagtctgaggaagaagagagcgaagaggaacccaagctgaagtatgaaaggc

SEQ ID NO: 7164 - DNA, 120 bp, Artificial Sequence
  ENSG00000006715_1 (sequence is synthesized)
tttccaatggggtaactgaaatacttcagaaggatgcagctagctgcatgacagtccatgacaagtttttggcattgggcacacattatggcaaggtttatttacttgatgtccagggga

SEQ ID NO: 7165 - DNA, 120 bp, Artificial Sequence
  ENSG00000006715_2 (sequence is synthesized)
acatcactcagaagtttgatgtaagtcctgtgaagataaatcagattagcttggatgaaagtggagagcacatgggtgtgtgttcagaggatggcaaggtgcaggtatttggactgtatt

SEQ ID NO: 7166 - DNA, 120 bp, Artificial Sequence
  ENSG00000006715_3 (sequence is synthesized)
ctggagaagaatttcacgagacttttgactgtcccattaaaattattgctgtgcacccacatttcgtgagatccagttgcaagcagtttgtgaccggagggaagaagctgctactgtttg

SEQ ID NO: 7167 - DNA, 120 bp, Artificial Sequence
  ENSG00000006715_4 (sequence is synthesized)
aacggtcttggatgaacagatggaagtctgctgttctgcatgaaggggaagggaacataaggagtgtgaagtggagaggccatctgattgcttgggccaataatatgggtgtgaagattt

SEQ ID NO: 7168 - DNA, 120 bp, Artificial Sequence
  ENSG00000006715_5 (sequence is synthesized)
ttgacatcatctcaaagcaaagaatcaccaatgtgccccgggatgatataagtcttcgcccagacatgtatccctgcagcctctgctggaaggacaatgtgacactgattattggctggg

SEQ ID NO: 7169 - DNA, 120 bp, Artificial Sequence
  ENSG00000006715_6 (sequence is synthesized)
ggacttctgtcaaggtgtgctcagtgaaggaacggcatgccagtgaaatgagggatttgccaagtcgatatgttgaaatagtgtctcagtttgaaactgaattctacatcagtggacttg

SEQ ID NO: 7170 - DNA, 120 bp, Artificial Sequence
  ENSG00000006715_7 (sequence is synthesized)
cacctctctgtgatcagcttgttgtactttcgtatgtaaaggagatttcagaaaaaacggaaagagaatactgtgccaggcctagactggacatcatccagccactttctgagacttgtg

SEQ ID NO: 7171 - DNA, 120 bp, Artificial Sequence
  ENSG00000006715_8 (sequence is synthesized)
aagagatctcttctgatgctttgacagtcagaggctttcaggagaatgaatgtagagattatcatttagaatactctgaaggggaatcacttttttacatcgtgagtccgagagatgttg

SEQ ID NO: 7172 - DNA, 120 bp, Artificial Sequence
  ENSG00000006715_9 (sequence is synthesized)
tagtggccaaggaacgagaccaagatgatcacattgactggctccttgaaaagaagaaatatgaagaagcattgatggcagctgaaattagccaaaaaaatattaaaagacataagattc

SEQ ID NO: 7173 - DNA, 120 bp, Artificial Sequence
  ENSG00000006715_10 (sequence is synthesized)
tggatattggcttggcatatataaatcacctggtggagagaggagactatgacatagcagcacgcaaatgccagaaaattcttgggaaaaatgcagcactctgggaatatgaagtttata

SEQ ID NO: 7174 - DNA, 120 bp, Artificial Sequence
  ENSG00000006715_11 (sequence is synthesized)
aatttaaagaaattggacagcttaaggctattagtccttatttgccaagaggtgatccagttctgaaaccactcatctatgaaatgatcttacatgaatttttggagagtgattatgagg

SEQ ID NO: 7175 - DNA, 120 bp, Artificial Sequence
  ENSG00000006715_12 (sequence is synthesized)
gttttgccacattgatccgagaatggcctggagatctgtataataattcagtcatagttcaagcagttcgggatcatttgaagaaagatagtcagaacaagactttacttaaaaccctgg

SEQ ID NO: 7176 - DNA, 120 bp, Artificial Sequence
  ENSG00000006715_13 (sequence is synthesized)
cagaattgtacacctatgacaagaactatggcaatgctctggaaatatacttaacattaagacataaagacgtttttcagttgatccacaagcataatcttttcagttctatcaaggata

SEQ ID NO: 7177 - DNA, 120 bp, Artificial Sequence
  ENSG00000006715_14 (sequence is synthesized)
aaattgttttattaatggattttgattcagagaaagctgttgacatgcttttggacaatgaagataaaatttcaattaaaaaggtagtggaagaattggaagacagaccagagctacagc

SEQ ID NO: 7178 - DNA, 120 bp, Artificial Sequence
  ENSG00000006715_15 (sequence is synthesized)
atgtgtatttgcataagcttttcaagagagaccaccataaggggcagcgttaccatgaaaaacagatcagtctttatgctgaatatgatcgaccaaacttacttccctttctccgagaca

SEQ ID NO: 7179 - DNA, 120 bp, Artificial Sequence
  ENSG00000006715_16 (sequence is synthesized)
gtacccattgcccacttgaaaaggctcttgagatctgtcaacagagaaactttgtagaagagacagtttatcttctgagccgaatgggtaatagccgaagtgccctgaagatgattatgg

SEQ ID NO: 7180 - DNA, 120 bp, Artificial Sequence
  ENSG00000006715_17 (sequence is synthesized)
aggaattacatgatgttgataaagcaatcgaatttgccaaggagcaagatgatggagagctgtgggaagatttgattttatattccattgacaaaccaccatttattactggcttgttaa

SEQ ID NO: 7181 - DNA, 120 bp, Artificial Sequence
  ENSG00000006715_18 (sequence is synthesized)
acaacattggcacacatgttgacccaattctactgattcaccgtattaaggaaggaatggagatccccaatttgagagattccttggttaaaattctgcaagactacaatttgcaaattc

SEQ ID NO: 7182 - DNA, 120 bp, Artificial Sequence
  ENSG00000006715_19 (sequence is synthesized)
tgcttcgtgaaggctgcaagaagattctcgtagctgactctttgtccttactgaagaaaatgcaccgaactcaaatgaaaggtgttcttgttgatgaggagaacatctgtgagtcgtgcc

SEQ ID NO: 7183 - DNA, 120 bp, Artificial Sequence
  ENSG00000006715_20 (sequence is synthesized)
tttcccctattcttccatcagatgcagctaagcccttcagcgtggtggtcttccattgccggcacatgttccacaaggagtgcctgcccatgcccagcatgaactctgctgcacagttct

SEQ ID NO: 7184 - DNA, 120 bp, Artificial Sequence
  ENSG00000006715_21 (sequence is synthesized)
gcaacatctgcagtgctaagaaccgtggaccaggaagtgcaattttggagatgaaaaaatagctcatttctccttgtcagtctccttgtcaccactctttttgagactgtttttgcaaca

SEQ ID NO: 7185 - DNA, 120 bp, Artificial Sequence
  ENSG00000006715_22 (sequence is synthesized)
acaaaagcatttgttgacactcgtgctgttaagagatttgtttatgtttatattatactcaaaaacaatttcttcatctattcctgtactaatggtttctctttgcagttcacagagaat

SEQ ID NO: 7186 - DNA, 120 bp, Artificial Sequence
  ENSG00000006715_23 (sequence is synthesized)
ttggggctctcttcatgccttgaaattttggggtccatagtgaatattttgttatttatttgtttggctcattctttatatagtaatggaaacataagtctaggagttagaaatgaattt

SEQ ID NO: 7187 - DNA, 120 bp, Artificial Sequence
  ENSG00000006715_24 (sequence is synthesized)
ctgctacctgcaacttggacgttgtttccacgtgctctgctggctacgattcttgcattctgggtttggcttttttctgtgtcatcaactatggttatcctctaaataggcatttaatga

SEQ ID NO: 7188 - DNA, 120 bp, Artificial Sequence
  ENSG00000006715_25 (sequence is synthesized)
aacattgtacaaattgtcactcatttgatgacacctgggaataacattagcaggctgatgtcctgcaccattatgtttactaatcacatgttctgtgtgctgtgacgactgtcaaagagt

SEQ ID NO: 7189 - DNA, 120 bp, Artificial Sequence
  ENSG00000006715_26 (sequence is synthesized)
atctggccatggcggacactcagcatttgttgattgaataaatgttagctcttctcattgtgaaggactcacttttactgggataaacaaatgcagttaagaattctggcacccttgtaa

SEQ ID NO: 7190 - DNA, 120 bp, Artificial Sequence
  ENSG00000006715_27 (sequence is synthesized)
ggaagaaaagagagttcaacaccttcgagtctgagcgcttgtggctagagtttgccaggagggaggaaaccagtgaccctgaaaactgagggtgcctcaggagcagtgggaccacctgat

SEQ ID NO: 7191 - DNA, 120 bp, Artificial Sequence
  ENSG00000006715_28 (sequence is synthesized)
gctgaaggacggactaatgatgtttcctcttgccttctctggtgcctccattgccctcatggaacagagcatatcatagagggagaaaagtcaaacttgtaattgtgtcttacagttact

SEQ ID NO: 7192 - DNA, 120 bp, Artificial Sequence
  ENSG00000006715_29 (sequence is synthesized)
ggcttcatcttccttgggatatatggtcatcctctaatgagtgtaaaagtgcgcaaaacacatccttattgttcctgatctcttagtcccataaatgggaacaaatacagctttctgctt

SEQ ID NO: 7193 - DNA, 120 bp, Artificial Sequence
  ENSG00000006715_30 (sequence is synthesized)
ctttctttttggggaaaggacagggtgctagtgagtactgacagcatgccagctaccgaagtcacccagccattcccatgagcagcagttcatttaattgtcacagcgtcgccaggaaga

SEQ ID NO: 7194 - DNA, 120 bp, Artificial Sequence
  ENSG00000006715_31 (sequence is synthesized)
agatctgataaacctaggtttacagataaagaaagcaaaatgtagagatgttgttgaggtcacagaggtgactgcctaacttcagagcagggcttctgatccctttaagaaattacaggg

SEQ ID NO: 7195 - DNA, 120 bp, Artificial Sequence
  ENSG00000006715_32 (sequence is synthesized)
ttaagaaattacagggccagccgggcatggtggctcacgcccgtaatcccagggctttgggaggccttggcaggtggatcacctgagatcgcacgttcgagaccagcctgaccaacatgg

SEQ ID NO: 7196 - DNA, 120 bp, Artificial Sequence
  ENSG00000006715_33 (sequence is synthesized)
gcaaaactccgtctcaaaaaagaaaagaaaagaaaagaaatcatagggccaagttcaaaggaaatgcacagaacatatcttcacattagagttaagaattctctagcaaacaacagattt

SEQ ID NO: 7197 - DNA, 120 bp, Artificial Sequence
  ENSG00000006715_34 (sequence is synthesized)
taagaattctctagcaaacaacagatttttttgttgttgttagtcacaaatacttagaactggaaggctctttgttattattgaatgtacccctcagccttctcagcatttccttatccc

SEQ ID NO: 7198 - DNA, 120 bp, Artificial Sequence
  ENSG00000006715_35 (sequence is synthesized)
aagactagtgtgctttctgctacactgctagttttcagttttgttcttacccaattgttttttcttttcaacattaccaatttacagattcagtttattacatttacattaatcctcact

SEQ ID NO: 7199 - DNA, 120 bp, Artificial Sequence
  ENSG00000006715_36 (sequence is synthesized)
tatgatttgagcaagctcatttccagaaaagtttactttaagatcatcaataggatttgctaatttcagtgaagtcattttgcttcaggggtaaattatcctagttaccaagtcctattt

SEQ ID NO: 7200 - DNA, 120 bp, Artificial Sequence
  ENSG00000006715_37 (sequence is synthesized)
ggacataaagaaaatcctacttatagaaaaggagaaaataattaaacagtcttcatttttaagtaactgatttaaaaggaaaataataaaatatgttcgtttatcatttcagaaattgct

SEQ ID NO: 7201 - DNA, 120 bp, Artificial Sequence
  ENSG00000006715_38 (sequence is synthesized)
gtaacacactggaaaattcctgaacaatatagattttatcgttaataaaaaacactagctttcgttccttagaatgtcttttcttttgaataaacagtattgggtgatttattaaaggat

SEQ ID NO: 7202 - DNA, 120 bp, Artificial Sequence
  ENSG00000006715_39 (sequence is synthesized)
attcaatcctttttacttttcatcaacctataagggcttaaatatggcaaaataatccaagtgttagtcaattatttttcatgtgtgactagcccaatttaaaatataggtaaaaaggaa

SEQ ID NO: 7203 - DNA, 120 bp, Artificial Sequence
  ENSG00000006715_40 (sequence is synthesized)
atgtgtgactagcccaatttaaaatataggtaaaaaggaaacccattcccctcgttttggggaagaacatagttgcaaagtacacacttcataagctattcttttttttttttttttttt

SEQ ID NO: 7204 - DNA, 78 bp, Artificial Sequence
  ENSG00000006715_41 (sequence is synthesized)
ccgcctcccaggttcaagtgattctcccgtctcagcttccggagtaggtgggagggtagagatgaggtttcaccatgt

SEQ ID NO: 7205 - DNA, 120 bp, Artificial Sequence
  ENSG00000006715_42 (sequence is synthesized)
caagctggtctcgaactcctgagctcaggaatccgcccacctcggccttccgaagtgttaggattacaggcgtaagtcaccatgcccagccaagaaagctattcttgaagtgtaaaacag

SEQ ID NO: 7206 - DNA, 120 bp, Artificial Sequence
  ENSG00000006715_43 (sequence is synthesized)
catgcccagccaagaaagctattcttgaagtgtaaaacagccaggtgcaaaattattttggagtactttagtttgcttttgtttttagccaaagggatttcatactggtttaattatgtt

SEQ ID NO: 7207 - DNA, 120 bp, Artificial Sequence
  ENSG00000006715_44 (sequence is synthesized)
catccttgagaatttttgagaagtttccaacagatttgtagttcattttgctgttgttacaatgtaaagctatatatagttgacccttgaacaacacaggttggaactgcaaggatccac

SEQ ID NO: 7208 - DNA, 120 bp, Artificial Sequence
  ENSG00000006715_45 (sequence is synthesized)
ttatacatggattttcttctgcctctgccacccttgagacggcaagaccaggccctccccttcctcctccttctcagcctactcagtatgaagacgacagagatgaaacacttatgatga

SEQ ID NO: 7209 - DNA, 120 bp, Artificial Sequence
  ENSG00000006715_46 (sequence is synthesized)
agatgaaacacttatgatgatccacttctacttaatgagtagtaaatatattttcttttccttatgattttcttactattttctttagcttgctttattataagaatatagcatataata

SEQ ID NO: 7210 - DNA, 120 bp, Artificial Sequence
  ENSG00000006715_47 (sequence is synthesized)
acttagtggcgtggagctgaactgaagagattaggatttgacgtctgacgtagtcactctgtagctccataatcaagggctgtccaagggaaactgggtcccttgaagaatctacagatg

SEQ ID NO: 7211 - DNA, 120 bp, Artificial Sequence
  ENSG00000006715_48 (sequence is synthesized)
aatttaactttcagttttaaaggctgcatgtggacagtaccatattggacaggaaacctaggctgcacacacttactaaattataatttgaggcagcttacaaccagatgccaaagaaat

SEQ ID NO: 7212 - DNA, 120 bp, Artificial Sequence
  ENSG00000006715_49 (sequence is synthesized)
tcgcatagcaacatgattataatacctgttttgtgtctgatcataccacccctcaggaatgcttttgtaaataagccattctctaaaggcaccttattgctgaaaattaaactgcaactc

SEQ ID NO: 7213 - DNA, 120 bp, Artificial Sequence
  ENSG00000006715_50 (sequence is synthesized)
aatgctatagacttaagtgaacactcagacctactaaaatcaatagggttggcttctagccctattgcaggacatcagtttgctattattttatttattttttgaaaataaaagcagtgg

SEQ ID NO: 7214 - DNA, 120 bp, Artificial Sequence
  ENSG00000006715_51 (sequence is synthesized)
ctcctgggggagtaaatagaatgctttttgaggaggaatgcaggaaagattgagaatgtgattggaagaaataaagaagcagtaaaacgaaaaaggagaagcctaataaacaactgagca

SEQ ID NO: 7215 - DNA, 120 bp, Artificial Sequence
  ENSG00000006715_52 (sequence is synthesized)
actttttccagaagaagaagcgagggttttggagatgactggaacatgtttatgccagtgtatgtagatactcattttatagaacattaaagtacaccttaaatccttaaacacagaata

SEQ ID NO: 7216 - DNA, 120 bp, Artificial Sequence
  ENSG00000006715_53 (sequence is synthesized)
aactcataaaattaaggcaaaaggaacaaagaggaaagagaatactgtgccaggcctagactggacatcatccagccactttctgagacttgtgaagagatctcttctgatgctttgaca

SEQ ID NO: 7217 - DNA, 120 bp, Artificial Sequence
  ENSG00000006715_54 (sequence is synthesized)
gatgtgctaggaattctttccaaggtacaaataacatactactgtaagtctacattaaagacgtcgagagtgacttgtttgttatttggtcacgaggataggtaaaactaggtgtgaaga

SEQ ID NO: 7218 - DNA, 120 bp, Artificial Sequence
  ENSG00000006715_55 (sequence is synthesized)
ctctggggaaaatgtctacttattctgtctctgtttgttttttgtttttttaatatatactttctttctgcctgggatgtttttactgccagcaaatgccagaaaattcttgggaaaaat

SEQ ID NO: 7219 - DNA, 120 bp, Artificial Sequence
  ENSG00000006715_56 (sequence is synthesized)
cttaatggagggaaacagagcttaaacaaatgactacagatttggaaggaagcagtgctgtaaggaaacctgaagtagtgtaaagagagaaagcttagtgggaaaggccctttcttttca

SEQ ID NO: 7220 - DNA, 120 bp, Artificial Sequence
  ENSG00000006715_57 (sequence is synthesized)
tttggtgtcttgttttctactcttgctcatgaaatgttctgagtagcttcaaatatgttttaaattgaattgtgtagagtccagtacctctgagaggtaactgagtgcagctattctagg

SEQ ID NO: 7221 - DNA, 120 bp, Artificial Sequence
  ENSG00000006715_58 (sequence is synthesized)
gagatgtgttctttatttgtttgctttgttttatttttaaagaagctgtggaaaaattctttcaagtgtaagtttaaatgactttattactgtttgttcttatttggtcgcctatagtaa

SEQ ID NO: 7222 - DNA, 120 bp, Artificial Sequence
  ENSG00000006715_59 (sequence is synthesized)
gactgcattgggaatgggtcttgaaaatatcatttgcctgttggccaaagggtgtgaagatttttgacatcatctcaaagcaaagaatcaccaatgtgccccgggatgatataagtcttc

SEQ ID NO: 7223 - DNA, 120 bp, Artificial Sequence
  ENSG00000006715_60 (sequence is synthesized)
acatttgcttttgctaagggcacacttggctttttaggttgtgcctttcctctattctacttaagtcaagcactaagaaatctactgtaaattctggactttccaccatgttttcaggaa

SEQ ID NO: 7224 - DNA, 80 bp, Artificial Sequence
  ENSG00000006740_0 (sequence is synthesized)
agccagcctgcggagactcccgggtccccgcgccggactgggactgggagcaggcagcccgggcggagcgggccggtgcc

SEQ ID NO: 7225 - DNA, 80 bp, Artificial Sequence
  ENSG00000006740_1 (sequence is synthesized)
ggcgcgcgtgagggggatgcggcaggaggcggcgcggcgggaggagtaggcggcggcgccctcgggagggagctgcgcgc

SEQ ID NO: 7226 - DNA, 120 bp, Artificial Sequence
  ENSG00000006740_2 (sequence is synthesized)
tcgcccgggaggctccgcgcgggagccatgtaaccctgcggcgggctccgggctgctccgtccttccccagctcccgggctagcgcggcagcggggccacgatgaagaagcagttcaatc

SEQ ID NO: 7227 - DNA, 120 bp, Artificial Sequence
  ENSG00000006740_3 (sequence is synthesized)
gcatgcgccagctggccaaccagacggtgggcagggctgaaaagacagaagttttgagtgaagaccttcttcaggtggagaagcgtctggagctggtgaaacaggtgtcccacagcacgc

SEQ ID NO: 7228 - DNA, 120 bp, Artificial Sequence
  ENSG00000006740_4 (sequence is synthesized)
acaagaagctcaccgcatgtctgcagggccagcaaggggcagaggctgacaagcgctccaaaaagttgcctttgacaacactggctcagtgtctgatggaggggtcagctatcctgggag

SEQ ID NO: 7229 - DNA, 120 bp, Artificial Sequence
  ENSG00000006740_5 (sequence is synthesized)
atgacacacttcttgggaagatgctgaaactctgtggagagacggaggacaagctggctcaggagctgatacattttgagttgcaagtagagagagacgtgattgagcccctgtttttgc

SEQ ID NO: 7230 - DNA, 120 bp, Artificial Sequence
  ENSG00000006740_6 (sequence is synthesized)
tggcggaggtggaaatcccaaatattcaaaagcagaggaaacacttagccaagttggtgctggacatggattcctcacgaaccaggtggcagcagacttccaagtcttcaggtttgtcca

SEQ ID NO: 7231 - DNA, 120 bp, Artificial Sequence
  ENSG00000006740_7 (sequence is synthesized)
gcagcttacagcctgcgggtgccaaggctgatgccctcagggaagaaatggaagaggctgccaacagagtggagatttgcagggaccagctctcagctgatatgtacagttttgtggcca

SEQ ID NO: 7232 - DNA, 120 bp, Artificial Sequence
  ENSG00000006740_8 (sequence is synthesized)
aagaaattgactatgcaaactactttcaaacgctaatagaagtgcaagctgaataccacaggaagtccctgacactattgcaggctgtattgcctcagatcaaagcacaacaggaggcct

SEQ ID NO: 7233 - DNA, 120 bp, Artificial Sequence
  ENSG00000006740_9 (sequence is synthesized)
gggtagagaagccttccttcgggaagccgctggaggagcacctcaccatcagcggccgggagatcgccttccccatcgaggcgtgtgtgaccatgctgcttgagtgtgggatgcaggagg

SEQ ID NO: 7234 - DNA, 120 bp, Artificial Sequence
  ENSG00000006740_10 (sequence is synthesized)
agggactcttccgagtagccccctctgcctccaaactgaagaagctgaaagcggccctggactgctgcgtggtggatgtgcaggagtactcggcagacccccacgcaattgcaggagctt

SEQ ID NO: 7235 - DNA, 120 bp, Artificial Sequence
  ENSG00000006740_11 (sequence is synthesized)
tgaaatcttacctccgagagttgccagaacctcttatgacctttgaactctatgatgagtggatccaggcttccaatgtccaggagcaagacaagaagcttcaggctctatggaatgctt

SEQ ID NO: 7236 - DNA, 120 bp, Artificial Sequence
  ENSG00000006740_12 (sequence is synthesized)
gtgaaaagttgcccaaggccaatcacaacaacatccgatacttgataaaatttttatccaagctgtcagaatatcaagatgtaaacaagatgactcccagtaatatggcaattgttttag

SEQ ID NO: 7237 - DNA, 120 bp, Artificial Sequence
  ENSG00000006740_13 (sequence is synthesized)
gacccaacctcctatggccacaagcagaagggaacattacagagatgatgaccacagtgtcgctgcaaattgttgggatcattgaacctatcatccagcatgcagactggttcttccctg

SEQ ID NO: 7238 - DNA, 120 bp, Artificial Sequence
  ENSG00000006740_14 (sequence is synthesized)
gggagatagagttcaacattactggcaattatgggagtccagtacacgtgaaccataatgccaactacagctcaatgccctccccagacatggaccctgctgaccggcgccagcccgagc

SEQ ID NO: 7239 - DNA, 120 bp, Artificial Sequence
  ENSG00000006740_15 (sequence is synthesized)
aggcccgccggcccctcagcgtcgccacggataatatgatgctggagttttacaaaaaggatggccttaggaaaatccaaagcatgggtgtgagggtcatggacacaaactgggtggctc

SEQ ID NO: 7240 - DNA, 120 bp, Artificial Sequence
  ENSG00000006740_16 (sequence is synthesized)
gaagaggctcctcggccggtcggaaagtgtcctgcgccccgccctccatgcagcctcccgccccgcccgccgagctggctgcgcccctgccttcgccgctgccggagcagcccctggaca

SEQ ID NO: 7241 - DNA, 120 bp, Artificial Sequence
  ENSG00000006740_17 (sequence is synthesized)
aaaaagcaaggaactttctccaggctctgcacagaaaggaagtccaggctccagccagggcacagcctgtgcagggactcaaccaggggctcaacctggagctcagccgggcgccagccc

SEQ ID NO: 7242 - DNA, 120 bp, Artificial Sequence
  ENSG00000006740_18 (sequence is synthesized)
cagccccagccagccgcctgcagaccagagtcctcacaccctccggaaagtttcaaagaagctggcaccgattccacccaaggtcccctttggccagccgggggctatggcagaccagtc

SEQ ID NO: 7243 - DNA, 120 bp, Artificial Sequence
  ENSG00000006740_19 (sequence is synthesized)
cgctggccagccgtccccagtcagcctgtcccccaccccgcccagcaccccgtcaccctatggactgagctaccctcaggggtactccttggcctcgggccagctctccccagctgcagc

SEQ ID NO: 7244 - DNA, 120 bp, Artificial Sequence
  ENSG00000006740_20 (sequence is synthesized)
tcctcccctggcctctccttctgtctttacaagcactttgagcaaatcgcggcccactcctaagccgcgacagagacctactctgccgcctcctcagcctcccacagtaaacctctcggc

SEQ ID NO: 7245 - DNA, 120 bp, Artificial Sequence
  ENSG00000006740_21 (sequence is synthesized)
ctctagtccacagtccacggaggcccccatgctagatggcatgtcccctggggaaagcatgtctacagatcttgtccactttgatattccctcgatccacatagagctcgggtcgacgct

SEQ ID NO: 7246 - DNA, 120 bp, Artificial Sequence
  ENSG00000006740_22 (sequence is synthesized)
ccgcctgagtcccctggagcacatgcggcgacactcagtaactgacaagagggactcggaggaggagtctgagagcaccgccctctgacatgacaccgcccatcctgcctcgcgtgtaca

SEQ ID NO: 7247 - DNA, 120 bp, Artificial Sequence
  ENSG00000006740_23 (sequence is synthesized)
tacatcacgggccctaggaacgccgccaggagcagcgtccatgagcttgccaagtgttctctgctggctctttcctgccactgccaacacgaggttggaatttggcagaaaattgtgatc

SEQ ID NO: 7248 - DNA, 120 bp, Artificial Sequence
  ENSG00000006740_24 (sequence is synthesized)
tccagtccgtgtggtgatgctggtggtgcaggttttgtttgttcctttcgggtggtgacttcggccttttgtttgacctttgccttttgactttgtgcctcttttgatccactttcagcc

SEQ ID NO: 7249 - DNA, 120 bp, Artificial Sequence
  ENSG00000006740_25 (sequence is synthesized)
tccatgccagaaaacacccacctctccatccaaggctggtcaggaacgtcctttgcagggtcggggtggtgcgggagaggctcactttgcctggttagacccaagggctgctaccttttc

SEQ ID NO: 7250 - DNA, 120 bp, Artificial Sequence
  ENSG00000006740_26 (sequence is synthesized)
cttggacggctcatgtcaggtcttgcaggatcagtttaatggccacagaaaggaagcaggacagcagggcccctctcacccacaactggaccaggtccaggattctagcagtcctggggc

SEQ ID NO: 7251 - DNA, 120 bp, Artificial Sequence
  ENSG00000006740_27 (sequence is synthesized)
actgacctttgccagctacctgggggagggcttgccactggaaaacctttcaggccgcccccatcagtgggctccaaagtaaatggctgaaaacaaaaatgtttcacttcctaacagttt

SEQ ID NO: 7252 - DNA, 120 bp, Artificial Sequence
  ENSG00000006740_28 (sequence is synthesized)
tcctttttccactgtgtgactgaaagctcctatatcattttatatttctgaatctataaaacaaaacaaacaagcctgacagtgtctggaggagccaaaggtggcctccctgtccccaaa

SEQ ID NO: 7253 - DNA, 120 bp, Artificial Sequence
  ENSG00000006740_29 (sequence is synthesized)
tatattggctatatgagagtaattttacccctctacgtacctaaaggcacccagttcactagtctgtggggtcctggagcctgtctcttctttctggaggttcaaactgaatagcaataa

SEQ ID NO: 7254 - DNA, 120 bp, Artificial Sequence
  ENSG00000006740_30 (sequence is synthesized)
ttacgttacccaaagcatgtggaggaaaagtgaaaccagccacggagacgctggcccacgggctcggcctgcggtgtggcctgctttgctcaccagcgtcagccgctcatttccttctca

SEQ ID NO: 7255 - DNA, 120 bp, Artificial Sequence
  ENSG00000006740_31 (sequence is synthesized)
tgaagtcccatctggtcatggggacgagggccgggagggcaccgggtagccttttcacacttggggattaggggagtgagaaaagatttgggccatgcatgcaaagtcaaagtttaaaat

SEQ ID NO: 7256 - DNA, 120 bp, Artificial Sequence
  ENSG00000006740_32 (sequence is synthesized)
tttatccttttcaaatagatgatataatatacctatacatgatataatatttgtatatatgaaatctctctatatttgtttaatttgagccattcaatctaaaccaatgtacaggtgtac

SEQ ID NO: 7257 - DNA, 120 bp, Artificial Sequence
  ENSG00000006740_33 (sequence is synthesized)
aatgaaaaatttaaatgcttagttatttttcccaacacagtgtaaagtcaccctcctctgagagtgggatgtgcagagttttgatgttgcagctttgctcacttcctggcaagggcaggt

SEQ ID NO: 7258 - DNA, 120 bp, Artificial Sequence
  ENSG00000006740_34 (sequence is synthesized)
catgcctcaatttgtaatgggagtctggggtaagggtgggggttgaaagttgttatctttaaatacatgtacaaatcgttgtcaaaagtaacgttattaaaatagatttattatccctga

SEQ ID NO: 7259 - DNA, 120 bp, Artificial Sequence
  ENSG00000006740_35 (sequence is synthesized)
gagggattgctagtgttactgccagtgaacacattcctgcgtgctttgggatgactgggctggcaccaggggtagctcataagatctccttagaagcccaccaatggaaagcaaccctgg

SEQ ID NO: 7260 - DNA, 120 bp, Artificial Sequence
  ENSG00000006740_36 (sequence is synthesized)
aatccatgtgtcccacacaggggcttcttatgggatctctctcggtctaagcccaccagcctggggttctgtttttgctcttattatcgggggttgaagacactgagtcatttggagtgg

SEQ ID NO: 7261 - DNA, 120 bp, Artificial Sequence
  ENSG00000006740_37 (sequence is synthesized)
ggcctcaggagaggctggaagctggttatgatcacaaaacagcatcaaaactcaggtatttcctggatagagcccaagcaactgacaggtataaatgcttatctggagaacaggggctaa

SEQ ID NO: 7262 - DNA, 120 bp, Artificial Sequence
  ENSG00000006740_38 (sequence is synthesized)
gaacccaagatgttttttactattactaaaataagccttgctagaaaaatatacttccagatagatatttagagaggggtgaatttcagaaaacatgcatgtctccattctcctccacca

SEQ ID NO: 7263 - DNA, 120 bp, Artificial Sequence
  ENSG00000006740_39 (sequence is synthesized)
gactcccctccctggccaattccctgaggagctaattggacaaacccacaacgacttaatttagtttgggcttaaatttagaaacaaagacggagctctcttcccccagaaaaatctgta

SEQ ID NO: 7264 - DNA, 120 bp, Artificial Sequence
  ENSG00000006740_40 (sequence is synthesized)
agcacaaaatcgcaaacacacaccacgtttagccaaaaccattcattggctggaaggaacgggatgtttttggaacatctccccagacacttcaaccacataagattataaagtcagggg

SEQ ID NO: 7265 - DNA, 120 bp, Artificial Sequence
  ENSG00000006740_41 (sequence is synthesized)
cctatttgtggtggctgctaaagtcatttgagcattttccttgttcagggagacaggcacagggttgagctgtgtcttgggctagagccaacccacttagtaaagtgcagtagcatggcg

SEQ ID NO: 7266 - DNA, 120 bp, Artificial Sequence
  ENSG00000006740_42 (sequence is synthesized)
gtgagctggagcatatgtgtacctagtgttgtcccaagtagcagaaggtgaggcagcttgggttggaacacacacaccacatacacacacacccactcacccatttcaaagaacagtgct

SEQ ID NO: 7267 - DNA, 120 bp, Artificial Sequence
  ENSG00000006740_43 (sequence is synthesized)
gtcctaggatgcactgggactttttgtgataatgcacttttccctccacgtccttctccaaaagagtgatttatttcttccgtgattagacggaagcagtgaccctgtggggttcagctc

SEQ ID NO: 7268 - DNA, 120 bp, Artificial Sequence
  ENSG00000006740_44 (sequence is synthesized)
cgtgctgcctttgaaaaggctagtccaatttgcaagtgtttgtactgggtcagatttaaatattacggggaagagccatctggtgattcggcttctttatttttggatgtgattaatgtt

SEQ ID NO: 7269 - DNA, 120 bp, Artificial Sequence
  ENSG00000006740_45 (sequence is synthesized)
gaaggtacagctgctgtcatctaccccgaggcttattaaaaattaggcaaatttctccctggaaaatgcagtagcaccacgcccatcttggtgggtcttggtgctgaggtgtctcctgaa

SEQ ID NO: 7270 - DNA, 120 bp, Artificial Sequence
  ENSG00000006740_46 (sequence is synthesized)
ggagcccatgataggagggcacaggcttgctgccctcggggaaggtcacagctgcggaggagctgaaggtcacccgagccaggtctccagggctgctcctcccagtgtgtcacatctggt

SEQ ID NO: 7271 - DNA, 120 bp, Artificial Sequence
  ENSG00000006740_47 (sequence is synthesized)
tcctcccagtgtgtcacatctggtgactcttccagccaccccagggaagggacacaaggtagtgtcaatacataagcaatagaatgagcagaagatggccaggcacggtggctcacgcct

SEQ ID NO: 7272 - DNA, 60 bp, Artificial Sequence
  ENSG00000006740_48 (sequence is synthesized)
tcccagcactttgggaggccgaggagaattagttgggcatggtggcacgtgccacgagat

SEQ ID NO: 7273 - DNA, 120 bp, Artificial Sequence
  ENSG00000006740_49 (sequence is synthesized)
attggggaacaaaagtgggcaacagaaggcctgggaggacagcacccccagggctctaagaagcggagtggctcatgttccatcttgcaggtttaagaactcctgaccttcaggattcat

SEQ ID NO: 7274 - DNA, 120 bp, Artificial Sequence
  ENSG00000006740_50 (sequence is synthesized)
aatgtccctcgccctgtgcggaccctattttaatgtccttttggcagcagactgttgttttgtcccatacgttcaggtctctgagccagtgtagaatccatcatggtttgatgtggcccg

SEQ ID NO: 7275 - DNA, 120 bp, Artificial Sequence
  ENSG00000006740_51 (sequence is synthesized)
tctgggactgtgatattggcatagctttttttttttttttttgtgacgttcatgttttgtcgtgttgattcctttctccgaatcctatcattgtgttcttgcagctgtgtgacatgagtg

SEQ ID NO: 7276 - DNA, 120 bp, Artificial Sequence
  ENSG00000006740_52 (sequence is synthesized)
gcgcagttttggatacgtgtgagggggattttcagggtaagctggccccggcctcgcccctccaccccgctagctagccaggccagctgcccgctcctcccctccgctcctcgtctctgc

SEQ ID NO: 7277 - DNA, 120 bp, Artificial Sequence
  ENSG00000006740_53 (sequence is synthesized)
atgtggctcagaccatttgcatggcagcttcactctccagccttccccggcctcagcaaggatgagttgatccatgagcttatttggctttggggcatccctggcctccttttctttctt

SEQ ID NO: 7278 - DNA, 120 bp, Artificial Sequence
  ENSG00000006740_54 (sequence is synthesized)
ttcattaggaggagctgggggagaacccagccagcccctttcccccaccttctctttcactggaatcacatctgcagctcctccccctccgccctccctcaggcttagaccgtggagctg

SEQ ID NO: 7279 - DNA, 120 bp, Artificial Sequence
  ENSG00000006740_55 (sequence is synthesized)
taacagatctgttcttcgtgtgagacttttgtgctggagacgcttgtgcccagcaccctgggggacatgcacctgctcacctttgtttaggaaggcgtcctgaggggaggtcataccagg

SEQ ID NO: 7280 - DNA, 120 bp, Artificial Sequence
  ENSG00000006740_56 (sequence is synthesized)
tgcagcccagcacagggtccacaccacagcttggaccccattttctgtggccccgagtttgcaccagcagatctccccttccagacttagatcctaacgtctggcttcctccaggctgag

SEQ ID NO: 7281 - DNA, 120 bp, Artificial Sequence
  ENSG00000006740_57 (sequence is synthesized)
actgctggcaaatcctaaagaatccatatcggagctcatcccgctccccttctccctcatcccaagtggatatggccagacagatcctttctatccaactcaataaaatttgggggagca

SEQ ID NO: 7282 - DNA, 120 bp, Artificial Sequence
  ENSG00000006740_58 (sequence is synthesized)
tttatatcagtatctatttggtctcctcctcctataaagagtaaatcctcaaagcataactgagggaaaggcacgaaggaagccagaaggactttggtgtatttgcctcagtaagtaggg

SEQ ID NO: 7283 - DNA, 120 bp, Artificial Sequence
  ENSG00000006740_59 (sequence is synthesized)
gtggccaaagcaaaccaggtcttctccccgatttggcccatggtcctgcagagactaccgaggcgcaccaggatatctggtgctcacagacaggtctcctggcgggtgcttcccgagtgt

SEQ ID NO: 7284 - DNA, 120 bp, Artificial Sequence
  ENSG00000006740_60 (sequence is synthesized)
cctggagacaagcagccactgtgtcccttttcccaggaatgctgatgagggcttctgcccctgaatcccattcccttgcatagtgactcctcccttgggggtgtctttaagggagcagca

SEQ ID NO: 7285 - DNA, 120 bp, Artificial Sequence
  ENSG00000006740_61 (sequence is synthesized)
aggataaaggtatgacagctcacacaagtgcttgttctgggcctgtctaaattcatcaccgccctgtattattcccatttgactgctgaggcacagggaaggtaggaaacttgtccaagg

SEQ ID NO: 7286 - DNA, 120 bp, Artificial Sequence
  ENSG00000006740_62 (sequence is synthesized)
tcatgctcttcctgcctgacatatttgggatttttgaatctaagcaggggagcttggtgctcttacctgatagcgaaccctgcacagtgaggtgggccccgggccactcagcctcacacc

SEQ ID NO: 7287 - DNA, 120 bp, Artificial Sequence
  ENSG00000006740_63 (sequence is synthesized)
tgtgtagagacatgacccaagtagctggggaagggcagaggtgggtctgaggccacctgcttcagaggaacaagtggcactggctgttcctccagccccacgccccaaatctctgcttct

SEQ ID NO: 7288 - DNA, 120 bp, Artificial Sequence
  ENSG00000006740_64 (sequence is synthesized)
ccatcaggcagcaaaacaaagactggaaggacgtgagggctgcctgggggttggggcaagggaggacctttgttcaagagcttccatgtttgtatgatgtctttcaggacagtgtccaaa

SEQ ID NO: 7289 - DNA, 120 bp, Artificial Sequence
  ENSG00000006740_65 (sequence is synthesized)
tgtatgtctgtacacttagtatggtattccccagtctgaacatgtgttcccttcctctgcctcctggagtgctgctcccagccttgcaaagctaagtgacggccagaaactaagcaggca

SEQ ID NO: 7290 - DNA, 84 bp, Artificial Sequence
  ENSG00000006740_66 (sequence is synthesized)
gccttgcaaagctaagtgacggccagaaactaagcaggcaggccgggcgtggttagtgggtgaatcacctgaggtcatgagttc

SEQ ID NO: 7291 - DNA, 120 bp, Artificial Sequence
  ENSG00000006740_67 (sequence is synthesized)
ggaaagcatgtctacagctgtgtgacatgagtggcgcagttttggatacgtgtgagggggattttcaggatcttgtccactttgatattccctcgatccacatagagctcgggtcgacgc

SEQ ID NO: 7292 - DNA, 120 bp, Artificial Sequence
  ENSG00000006740_68 (sequence is synthesized)
tggggattaggggaggtggtgggggtggatgggtgacgcataagaaaaatacaattacgggaaggctgcactgactctcagcagtttaggtgactcgtagcaattaaactgtatctgctg

SEQ ID NO: 7293 - DNA, 120 bp, Artificial Sequence
  ENSG00000006740_69 (sequence is synthesized)
ggaatggcgttgctgcctgcttgatgttaggactgatttcagtggagggagggaggctgcaaaaaggaggcccaagtcctcgggaagatgagataagcagagaatcgcagccaggtaggg

SEQ ID NO: 7294 - DNA, 120 bp, Artificial Sequence
  ENSG00000006740_70 (sequence is synthesized)
gagggggacagaggccccacagtcagaagagtcaggccccgggaagctgcaagaccccgcctgctgccatcacggtgaaaatgggctacatctggactccaggagcggctctgcagggtg

SEQ ID NO: 7295 - DNA, 120 bp, Artificial Sequence
  ENSG00000006740_71 (sequence is synthesized)
tgccaacagagtggagatttgcagggtacctgccctctttgctcctctctactgggacaggctggggagccctcagggattccctttttgttcactggagttctcttaaaactctgtcag

SEQ ID NO: 7296 - DNA, 120 bp, Artificial Sequence
  ENSG00000006740_72 (sequence is synthesized)
tgaggctctagttgaactgaatgtccccaagcccgccggctagcatctccaaggagtccaggatgaacccaaggagttggggctttgatggtgacctagacagggaggcagcattcattt

SEQ ID NO: 7297 - DNA, 120 bp, Artificial Sequence
  ENSG00000006740_73 (sequence is synthesized)
atcattggtggtcctgcatgctaggcaaagaggaatgacctttatttctgtgtgaagcttttgtaaatcatctgagtcccaaagaataaattctaggtgacacaggacagttgagaattt

SEQ ID NO: 7298 - DNA, 120 bp, Artificial Sequence
  ENSG00000006740_74 (sequence is synthesized)
agtcagtgagatatgtgacatgagagaagcttctgtccagtccccgggggacatggctggtgttgagccttggttaaacctggcccttctaattttcttttagatacttgataaaatttt

SEQ ID NO: 7299 - DNA, 120 bp, Artificial Sequence
  ENSG00000006740_75 (sequence is synthesized)
ggcttttaactcctggatttgtcgaatagggcccggatttagctcatccacatgtgccttcatgacaggcccttttccagcccccttagttccgatctgcagtggcagtttcattctctt

SEQ ID NO: 7300 - DNA, 120 bp, Artificial Sequence
  ENSG00000006744_0 (sequence is synthesized)
atgcggagcggctaggtggtgcacgggaaacgcgggcgtaggtgaccggcggctttctcagttttggtggagacgggcgcatgtgggcgctttgctcgctgctgcggtccgcggccggac

SEQ ID NO: 7301 - DNA, 120 bp, Artificial Sequence
  ENSG00000006744_1 (sequence is synthesized)
gcaccatgtcgcagggacgcaccatatcgcaggcacccgcccgccgcgagcggccgcgcaaggacccgctgcggcacctgcgcacgcgagagaagcgcggaccgtcggggtgctccggcg

SEQ ID NO: 7302 - DNA, 120 bp, Artificial Sequence
  ENSG00000006744_2 (sequence is synthesized)
gcccaaacaccgtgtacctgcaggtggtggcagcgggtagccgggactcgggcgccgcgctctacgtcttctccgagttcaaccggtatctcttcaactgtggagaaggcgttcagagac

SEQ ID NO: 7303 - DNA, 120 bp, Artificial Sequence
  ENSG00000006744_3 (sequence is synthesized)
tcatgcaggagcacaagttaaaggttgctcgcctggacaacatattcctgacacgaatgcactggtctaatgttgggggcttaagtggaatgattcttactttaaaggaaaccgggcttc

SEQ ID NO: 7304 - DNA, 120 bp, Artificial Sequence
  ENSG00000006744_4 (sequence is synthesized)
caaagtgtgtactttctggacctccacaactggaaaaatacctcgaagcaatcaaaatattttctggtccattgaaaggaatagaactggctgtgcggccccactctgccccagaatacg

SEQ ID NO: 7305 - DNA, 120 bp, Artificial Sequence
  ENSG00000006744_5 (sequence is synthesized)
aggatgaaaccatgacagtttaccagatccccatacacagtgaacagaggaggggaaagcaccaaccatggcagagtccagaaaggcctctcagcaggctcagtccagagcgatcttcag

SEQ ID NO: 7306 - DNA, 120 bp, Artificial Sequence
  ENSG00000006744_6 (sequence is synthesized)
actccgagtcgaatgaaaatgagccacaccttccacatggtgttagccagagaagaggggtcagggactcttccctggtcgtagctttcatctgtaagcttcacttaaagagaggaaact

SEQ ID NO: 7307 - DNA, 120 bp, Artificial Sequence
  ENSG00000006744_7 (sequence is synthesized)
tcttggtgctcaaagcaaaggagatgggcctcccagttgggacagctgccatcgctcccatcattgctgctgtcaaggacgggaaaagcatcactcatgaaggaagagagattttggctg

SEQ ID NO: 7308 - DNA, 120 bp, Artificial Sequence
  ENSG00000006744_8 (sequence is synthesized)
aagagctgtgtactcctccagatcctggtgctgcttttgtggtggtagaatgtccagatgaaagcttcattcaacccatctgtgagaatgccacctttcagaggtaccaaggaaaggcag

SEQ ID NO: 7309 - DNA, 120 bp, Artificial Sequence
  ENSG00000006744_9 (sequence is synthesized)
atgcccccgtggccttggtggttcacatggccccagcatctgtgcttgtggacagcaggtaccagcagtggatggagaggtttgggcctgacacccagcacttggtcctgaatgagaact

SEQ ID NO: 7310 - DNA, 120 bp, Artificial Sequence
  ENSG00000006744_10 (sequence is synthesized)
gtgcctcagttcacaaccttcgcagccacaagattcaaacccagctcaacctcatccacccggacatcttccccctgctcaccagtttccgctgtaagaaggagggccccaccctcagtg

SEQ ID NO: 7311 - DNA, 120 bp, Artificial Sequence
  ENSG00000006744_11 (sequence is synthesized)
tgcccatggttcagggtgaatgcctcctcaagtaccagctccgtcccaggagggagtggcagagggatgccattattacttgcaatcctgaggaattcatagttgaggcgctgcagcttc

SEQ ID NO: 7312 - DNA, 120 bp, Artificial Sequence
  ENSG00000006744_12 (sequence is synthesized)
ccaacttccagcagagcgtgcaggagtacaggaggagtgcgcaggacggcccagccccagcagagaaaagaagtcagtacccagaaatcatcttccttggaacagggtctgccatcccga

SEQ ID NO: 7313 - DNA, 120 bp, Artificial Sequence
  ENSG00000006744_13 (sequence is synthesized)
tgaagattcgaaatgtcagtgccacacttgtcaacataagccccgacacgtctctgctactggactgtggtgagggcacatttgggcagctgtgccgtcattacggagaccaggtggaca

SEQ ID NO: 7314 - DNA, 120 bp, Artificial Sequence
  ENSG00000006744_14 (sequence is synthesized)
gggtcctgggcaccctggctgctgtgtttgtgtcccacctgcacgcagatcaccacacgggcttgccaagtatcttgctgcagagagaacgcgccttggcatctttgggaaagccgcttc

SEQ ID NO: 7315 - DNA, 120 bp, Artificial Sequence
  ENSG00000006744_15 (sequence is synthesized)
cagtaccacaaccagtgccaggaggtcctgcaccacatcagtatgattcctgccaaatgccttcaggaaggggctgagatctccagtcctgcagtggaaagattgatcagttcgctgttg

SEQ ID NO: 7316 - DNA, 120 bp, Artificial Sequence
  ENSG00000006744_16 (sequence is synthesized)
cgaacatgtgatttggaagagtttcagacctgtctggtgcggcactgcaagcatgcgtttggctgtgcgctggtgcacacctctggctggaaagtggtctattccggggacaccatgccc

SEQ ID NO: 7317 - DNA, 120 bp, Artificial Sequence
  ENSG00000006744_17 (sequence is synthesized)
tgcgaggctctggtccggatggggaaagatgccaccctcctgatacatgaagccaccctggaagatggtttggaagaggaagcagtggaaaagacacacagcacaacgtcccaagccatc

SEQ ID NO: 7318 - DNA, 120 bp, Artificial Sequence
  ENSG00000006744_18 (sequence is synthesized)
agcgtggggatgcggatgaacgcggagttcattatgctgaaccacttcagccagcgctatgccaaggtccccctcttcagccccaacttcagcgagaaagtgggagttgcctttgaccac

SEQ ID NO: 7319 - DNA, 120 bp, Artificial Sequence
  ENSG00000006744_19 (sequence is synthesized)
atgaaggtctgctttggagactttccaacaatgcccaagctgattcccccactgaaagccctgtttgctggcgacatcgaggagatggaggagcgcagggagaagcgggagctgcggcag

SEQ ID NO: 7320 - DNA, 120 bp, Artificial Sequence
  ENSG00000006744_20 (sequence is synthesized)
gtgcgggcggccctcctgtccagggagctggcaggcggcctggaggatggggagcctcagcagaagcgggcccacacagaggagccacaggccaagaaggtcagagcccagtgaagatct

SEQ ID NO: 7321 - DNA, 120 bp, Artificial Sequence
  ENSG00000006744_21 (sequence is synthesized)
gggagaccctgaactcagaaggctgtgtgtcttctgccccacgcacgcacccgtatctgccctccttgctggtagaagctgaagagcacggtcccccaggaggcagctcaggataggtgg

SEQ ID NO: 7322 - DNA, 120 bp, Artificial Sequence
  ENSG00000006744_22 (sequence is synthesized)
tatggagctgtgccgaggcttgggctcccacataagcactagtctatagatgcctcttaggactggtgcctggcacagccgcgggccaggaggctgccacacggaagcaagcagatgaac

SEQ ID NO: 7323 - DNA, 120 bp, Artificial Sequence
  ENSG00000006744_23 (sequence is synthesized)
taatttcatttcaaggcagtttttaaagaagtcttggaaacagacggcggcacctttcctctaatccagcaaagtgattccctgcacaccagagacaagcagagtaacaggatcagtggg

SEQ ID NO: 7324 - DNA, 120 bp, Artificial Sequence
  ENSG00000006744_24 (sequence is synthesized)
tctaagtgtccgagacttaacgaaaatagtatttcagctgcaataaagattgagtttgcaattgtgagttcttttgcttcctcctgctgctgctacagagcagggtctgctgtgcaccac

SEQ ID NO: 7325 - DNA, 120 bp, Artificial Sequence
  ENSG00000006744_25 (sequence is synthesized)
cttggagaaggctctctgtgctgtagtgtggcagctgcctggtacccgggtggcttggaagaagtcagctcccgtcgtagtgagcacctctggaacctgtcctcagagagccacccttat

SEQ ID NO: 7326 - DNA, 120 bp, Artificial Sequence
  ENSG00000006744_26 (sequence is synthesized)
tcgccaagtctttttgacaactcgagctgtgccagctcacagcagggcgtgctttctctatcaatcaatcaatcaatcaatcaaatcaatcagtgagagcctggctgggctggtgtcatt

SEQ ID NO: 7327 - DNA, 120 bp, Artificial Sequence
  ENSG00000006744_27 (sequence is synthesized)
ggtcagggaaatgcaagtcttctggtggttctgggtaaaagtggagacaatagatttgctgtgttgttgcttccatactgagaggagtgaggatcactttgccctcgaaggttttgagaa

SEQ ID NO: 7328 - DNA, 120 bp, Artificial Sequence
  ENSG00000006744_28 (sequence is synthesized)
atggcacacggggctggtttccattgtcctccttgcgggatttacagacgtggattagtgctcgacaaatggagagcattttccaaggaagtaagtaagtaaagtaagtaagtaagtaag

SEQ ID NO: 7329 - DNA, 120 bp, Artificial Sequence
  ENSG00000006744_29 (sequence is synthesized)
taagttgaatctagtatttattgtgtatattccctacccaggagaatgtaaaaagaagagctttaaaaactcaaaagacaagcaagcgagagatcagccagggacctggctttacacagg

SEQ ID NO: 7330 - DNA, 120 bp, Artificial Sequence
  ENSG00000006744_30 (sequence is synthesized)
tggtgaccttcaggctccatcccggtgtgcatttgagattgacggccatgtccccgcaggtttattaaagcaagaacagatgccaagctcagggataataaatctattttaataacgtta

SEQ ID NO: 7331 - DNA, 120 bp, Artificial Sequence
  ENSG00000006744_31 (sequence is synthesized)
tttaaagggaactggagggaaacacatcagcatgttagtaagtggtctgttgtccaggtggtgaaatttcagatgattttcatttctcgtgcctgtgtctcaggtcctctggaaggcaga

SEQ ID NO: 7332 - DNA, 120 bp, Artificial Sequence
  ENSG00000006744_32 (sequence is synthesized)
caccagggtggcattggaggtgcaggaggtttattcgaggaaatttgactgtgagagaggaaggagagagggagcaggaggaggcagggagagcctgggtctggctttgcaggttggacc

SEQ ID NO: 7333 - DNA, 120 bp, Artificial Sequence
  ENSG00000006744_33 (sequence is synthesized)
cgtatgagtggagagggtaggaaggaagtgcagtgctgagaaaggatcagccaggcctactggaaagcccagagcagagcttgccagatacaggaatcccacgtccattggaaatggccc

SEQ ID NO: 7334 - DNA, 120 bp, Artificial Sequence
  ENSG00000006744_34 (sequence is synthesized)
agcaccggggtctgccgtgagcagcctgctgtgagagcatggcctgggcgtggaggctgtcagctcactgcagtgctgcagagggccgcacgatacccctccctggctgcgtggtccctg

SEQ ID NO: 7335 - DNA, 120 bp, Artificial Sequence
  ENSG00000006744_35 (sequence is synthesized)
ccctgcttcacacatgtggttcactgttgcgggggttcgtggagttatggtatctcttcaactgtggagaaggcgttcagagactcatgcaggagcacaagttgctcgcctggacaacat

SEQ ID NO: 7336 - DNA, 120 bp, Artificial Sequence
  ENSG00000006744_36 (sequence is synthesized)
agggcttcggcttccctgcttcacacatgtggttcactgttgcgggggttcgtggagttatggtgggtgggaaatccgagattctttgcatccatgtgatttctgcggatctgtgaagaa

SEQ ID NO: 7337 - DNA, 120 bp, Artificial Sequence
  ENSG00000006744_37 (sequence is synthesized)
cttcaggcctgggtctgagcgtccttttcccaacccttgggccccggcctggctgtcagcactttcggagctccaccctcttccgtgcaccccaaggccagtgtgtcgttgttagcgtgt

SEQ ID NO: 7338 - DNA, 120 bp, Artificial Sequence
  ENSG00000006744_38 (sequence is synthesized)
ggggtggacagatctggtgtgtagccggtggtggagaaaggactcattttgtcctagcacccacacacacaggcccccactcctctccacctctgctaaggagggctcaaaacccaccag

SEQ ID NO: 7339 - DNA, 120 bp, Artificial Sequence
  ENSG00000006744_39 (sequence is synthesized)
tttaatttttttttcttttttttttttccagagtctacaataaaacatctaattggtgtcagagagtttacagaataaaaccttctgaatgtcttgtgtaatgtttgtcttgtaggtatc

SEQ ID NO: 7340 - DNA, 120 bp, Artificial Sequence
  ENSG00000006744_40 (sequence is synthesized)
ccacaaagctggagcctggaggaggcactgccacgttgagttggccctttggctgcgtcttttcctccgcttccaaacttgcccagagcttttgttactcatctctggctaggaaatggt

SEQ ID NO: 7341 - DNA, 120 bp, Artificial Sequence
  ENSG00000006744_41 (sequence is synthesized)
tttttgcaaaactcaacatagtccttctgcgccacaagaatgtcttctcttcctgttcagttcctttcctgcagcaggacaggtttgagtttacccagccttccttgagtcttgaatctc

SEQ ID NO: 7342 - DNA, 120 bp, Artificial Sequence
  ENSG00000006744_42 (sequence is synthesized)
acacggcctgctcagcggaagctttgaccggatgcaggaggtgtggctatgagaccctcaccttggtctcctggggtgccgggccctgggccgttgccctcttcccagcacgggtcgtgt

SEQ ID NO: 7343 - DNA, 120 bp, Artificial Sequence
  ENSG00000006744_43 (sequence is synthesized)
cgctttctgcctgtgacatttcagggccatggcgcagggggctcggcctgtgccacccccactgcggctgtgttagaggctggtgggtgacgtcgggctggcaactcctgcaagagagag

SEQ ID NO: 7344 - DNA, 120 bp, Artificial Sequence
  ENSG00000006744_44 (sequence is synthesized)
ggctgcagaccctaacccggaggggatggccctggggcctggctgacgcatgtctcctgtttccttgccagggcttgccaagtatcttgctgcagagagaacgcgccttggcatctttgg

SEQ ID NO: 7345 - DNA, 120 bp, Artificial Sequence
  ENSG00000006744_45 (sequence is synthesized)
tttggccatgtagtaacactgcttggggcaagtcactgaactgtttgaacacctcatcctcattaccactcctgagctcagcaccactcctcagggggagctgcctcctaacagacgctg

SEQ ID NO: 7346 - DNA, 120 bp, Artificial Sequence
  ENSG00000006744_46 (sequence is synthesized)
cccgtcccgctgggccctcagtgcggcgcagcctctgagcatcggggcacctcccagggcttcggcttccctgcttcacacatgtggttcactgttgcgggggtatctcttcaactgtgg

SEQ ID NO: 7347 - DNA, 120 bp, Artificial Sequence
  ENSG00000006744_47 (sequence is synthesized)
agtgcggcgcagcctctgagcatcggggcacctcccagggcttcggcttccctgcttcacacatgtggttcactgttgcgggggttcgtggagttatggtatctcttcaactgtggagaa

SEQ ID NO: 7348 - DNA, 120 bp, Artificial Sequence
  ENSG00000006744_48 (sequence is synthesized)
ttcatctcttcacttaaagagaggaaacttcttggtgctcaaagcaaaggagatgggcctcccagttgggacagctgccatcgctcccatcattgctgctgtcaaggacgggaaaagcat

SEQ ID NO: 7349 - DNA, 120 bp, Artificial Sequence
  ENSG00000006744_49 (sequence is synthesized)
cccccgtggccttggtggttcacatggccccagcatctgtgcttgtggacagcaggtaccagcagtggatggagaggtatggagcccagcccagcggcacttggggtttgggcctgacac

SEQ ID NO: 7350 - DNA, 120 bp, Artificial Sequence
  ENSG00000006744_50 (sequence is synthesized)
tttataatgagttaatgctgggaaataaaacactgatttaagtcattttggcttttagtactaaagcatttgacaataaatgacttcttcagaatatggtataccttctgaaagcaataa

SEQ ID NO: 7351 - DNA, 120 bp, Artificial Sequence
  ENSG00000006744_51 (sequence is synthesized)
ataccttctgaaagcaataaacgcattttaatgaattgtaaggaaacaacatcattttattttttatttttttttttgagacagactttcgcttttgttgcctaggctggagtgcaatgg

SEQ ID NO: 7352 - DNA, 84 bp, Artificial Sequence
  ENSG00000006744_52 (sequence is synthesized)
tgcccgcctcagcctccgaaagtacattattatttttttttaatctagaaaaatacacttctaagaaaattgattaaaaccaac

SEQ ID NO: 7353 - DNA, 120 bp, Artificial Sequence
  ENSG00000006744_53 (sequence is synthesized)
tgaattagaatcttgagagttaggcttgggactcacaagctcccagatgattttaatgctcagcgaggttgaagagccgcctgtccaaggagttgccactccgtgtgatctggggcttgc

SEQ ID NO: 7354 - DNA, 120 bp, Artificial Sequence
  ENSG00000006744_54 (sequence is synthesized)
taggaaagtgggatctcaggcctcactgcagagctgccgaactggcttctgcgttttgccaaggttcctgggtgtgaacatgagtttcagagtcactcctctagggcccctgcttctcag

SEQ ID NO: 7355 - DNA, 120 bp, Artificial Sequence
  ENSG00000006744_55 (sequence is synthesized)
ctcggaccattgacccctcagaggacatttggcaacatctggaaacgttcttggttgtcacagcctaggaggtgggtagtggtgctgctagtgggtagaggtcaggggtactgcaccagg

SEQ ID NO: 7356 - DNA, 120 bp, Artificial Sequence
  ENSG00000006744_56 (sequence is synthesized)
acagcagcactggccacagaaaaaaactgtcttgccctgagcatcagtagttccccgttgactggccctgaggcagagcgatgcagcatccaaaaggcggtggagcagacctgccccaga

SEQ ID NO: 7357 - DNA, 120 bp, Artificial Sequence
  ENSG00000006744_57 (sequence is synthesized)
tcctagtcacttaaccttcagtgttgatctgaaggaacttcctgcagattgtccccctgaatttattctggacatccccaatggggtctgctgaggccatataccctgtccgtcacctga

SEQ ID NO: 7358 - DNA, 120 bp, Artificial Sequence
  ENSG00000006747_0 (sequence is synthesized)
tgctgctctcggtttagtccaagatcagcgatatcacgcgtcccccggagcatcgcgtgcaggagccatggcgcgggagctataccacgaagagttcgcccgggcgggcaagcaggcggg

SEQ ID NO: 7359 - DNA, 120 bp, Artificial Sequence
  ENSG00000006747_1 (sequence is synthesized)
gctgcaggtctggaggattgagaagctggagctggtgcccgtgccccagagcgctcacggcgacttctacgtcggggatgcctacctggtgctgcacacggccaagacgagccgaggctt

SEQ ID NO: 7360 - DNA, 120 bp, Artificial Sequence
  ENSG00000006747_2 (sequence is synthesized)
cacctaccacctgcacttctggctcggaaaggagtgttcccaggatgaaagcacagctgctgccatcttcactgttcagatggatgactatttgggtggcaagccagtgcagaatagaga

SEQ ID NO: 7361 - DNA, 120 bp, Artificial Sequence
  ENSG00000006747_3 (sequence is synthesized)
acttcaaggatatgagtctaatgactttgttagctatttcaaaggcggtctgaaatacaaggctggaggcgtggcatctggattaaatcatgttcttacgaacgacctgacagccaagag

SEQ ID NO: 7362 - DNA, 120 bp, Artificial Sequence
  ENSG00000006747_4 (sequence is synthesized)
gctcctacatgtgaagggtcgtagagtggtgagagccacagaagttccccttagctgggacagtttcaacaagggtgactgcttcatcattgaccttggcaccgaaatttatcagtggtg

SEQ ID NO: 7363 - DNA, 120 bp, Artificial Sequence
  ENSG00000006747_5 (sequence is synthesized)
tggttcctcgtgcaacaaatatgaacgtctgaaggcaaaccaggtagctactggcattcggtacaatgaaaggaaaggaaggtctgaactaattgtcgtggaagaaggaagtgaaccctc

SEQ ID NO: 7364 - DNA, 120 bp, Artificial Sequence
  ENSG00000006747_6 (sequence is synthesized)
agaacttataaaggtcttaggggaaaagccagagcttccagatggaggtgatgatgatgacattatagcagacataagtaacaggaaaatggctaaactatacatggtttcagatgcaag

SEQ ID NO: 7365 - DNA, 120 bp, Artificial Sequence
  ENSG00000006747_7 (sequence is synthesized)
tggctccatgagagtgactgtggtggcagaagaaaaccccttctcaatggcaatgctgctgtctgaagaatgctttattttggaccacggggctgccaaacaaattttcgtatggaaagg

SEQ ID NO: 7366 - DNA, 120 bp, Artificial Sequence
  ENSG00000006747_8 (sequence is synthesized)
taaagatgctaatccccaagagaggaaggctgcaatgaagacagctgaagaatttctacagcaaatgaattattccaagaatacccaaattcaagttcttccagaaggaggtgaaacacc

SEQ ID NO: 7367 - DNA, 120 bp, Artificial Sequence
  ENSG00000006747_9 (sequence is synthesized)
aatcttcaaacagttttttaaggactggagagataaagatcagagtgatggcttcgggaaagtttatgtcacagagaaagtggctcaaataaaacaaattccctttgatgcctcaaaatt

SEQ ID NO: 7368 - DNA, 120 bp, Artificial Sequence
  ENSG00000006747_10 (sequence is synthesized)
acacagttctccgcagatggcagcccagcacaatatggtggatgatggttctggcaaagtggagatttggcgtgtagaaaacaatggtaggatccaagttgaccaaaactcatatggtga

SEQ ID NO: 7369 - DNA, 120 bp, Artificial Sequence
  ENSG00000006747_11 (sequence is synthesized)
attctatggtggtgactgctacatcatactctacacctatcccagaggacagattatctacacgtggcaaggagcaaatgccacacgagatgagctgacaacatctgcgttcctgactgt

SEQ ID NO: 7370 - DNA, 120 bp, Artificial Sequence
  ENSG00000006747_12 (sequence is synthesized)
tcagttggatcggtcccttggaggacaggctgtgcagatccgagtctcccaaggcaaagagcctgttcacctactgagtttgttcaaagacaaaccgctcattatttacaagaatggaac

SEQ ID NO: 7371 - DNA, 120 bp, Artificial Sequence
  ENSG00000006747_13 (sequence is synthesized)
atcaaagaaaggaggtcaggcacctgctccccctacacgcctctttcaagtccggagaaacctggcatctatcaccagaattgtggaggttgatgttgatgcaaattcactgaattctaa

SEQ ID NO: 7372 - DNA, 120 bp, Artificial Sequence
  ENSG00000006747_14 (sequence is synthesized)
cgatgtttttgtcctgaaactgccacaaaatagtggctacatctgggtaggaaaaggtgctagccaggaggaggagaaaggagcagagtatgtagcaagtgtcctaaagtgcaaaacctt

SEQ ID NO: 7373 - DNA, 120 bp, Artificial Sequence
  ENSG00000006747_15 (sequence is synthesized)
aaggatccaagaaggcgaggagccagaggagttctggaattcccttggagggaaaaaagactaccagacctcaccactactggaaacccaggctgaagaccatccacctcggctttacgg

SEQ ID NO: 7374 - DNA, 120 bp, Artificial Sequence
  ENSG00000006747_16 (sequence is synthesized)
ctgctctaacaaaactggaagatttgttattgaagagattccaggagagttcacccaggatgatttagctgaagatgatgtcatgttactagatgcttgggaacagatatttatttggat

SEQ ID NO: 7375 - DNA, 120 bp, Artificial Sequence
  ENSG00000006747_17 (sequence is synthesized)
tggcaaagatgctaatgaagttgagaaaaaagaatctctgaagtctgccaaaatgtaccttgagacagacccttctggaagagacaagaggacaccaattgtcatcataaaacagggcca

SEQ ID NO: 7376 - DNA, 120 bp, Artificial Sequence
  ENSG00000006747_18 (sequence is synthesized)
tgagccacccacattcacaggctggttcctgggctgggattccagcaagtggtaaattggtatttgtaaaaagcaaacaaacattacaaggcagttatctcattgctgttttgggagagg

SEQ ID NO: 7377 - DNA, 77 bp, Artificial Sequence
  ENSG00000006747_19 (sequence is synthesized)
acattacaaggcagttatctcattgctgttttgggagaggaacgggaaaagctttttgcttatttgtcttttgaaaa

SEQ ID NO: 7378 - DNA, 81 bp, Artificial Sequence
  ENSG00000006747_20 (sequence is synthesized)
ggccgcgtggtggtgcacgcctgtagtccctgctacttggaaggctgagacaggaaaattgcttgaacccaggaggctgag

SEQ ID NO: 7379 - DNA, 63 bp, Artificial Sequence
  ENSG00000006747_21 (sequence is synthesized)
cgccacccctcaaccaaacgcctattttttaatgcttagttttggcttgaaattcttcttcac

SEQ ID NO: 7380 - DNA, 120 bp, Artificial Sequence
  ENSG00000006747_22 (sequence is synthesized)
attttttaatgcttagttttggcttgaaattcttcttcacctggagttttcttacgttaatacattaaaataacctgaaggaaactttcgttatgggccaatattagctcttatggaaac

SEQ ID NO: 7381 - DNA, 120 bp, Artificial Sequence
  ENSG00000006747_23 (sequence is synthesized)
tgatttatatcttttttatgacctttcaaaagtaaaatactatgcataatctagaaagatttgtcagataggaaattttataatgcattagccattagtcagagttgttttttaacatgc

SEQ ID NO: 7382 - DNA, 120 bp, Artificial Sequence
  ENSG00000006747_24 (sequence is synthesized)
cagagaaaaagttgtaatgccttggaagttattctcttttctatagattgtgttcaaaagatgtgtatacttgcaataaggtttatgttaaggtggctttaacaattggttgctattttc

SEQ ID NO: 7383 - DNA, 120 bp, Artificial Sequence
  ENSG00000006747_25 (sequence is synthesized)
cttctttagtcaatatgactttgatgtcattaactgctaagtgttattttctaagaggaattttatcttttttttaaccttattaaaagcctttgaaaacacagctctttcatgacaaaa

SEQ ID NO: 7384 - DNA, 120 bp, Artificial Sequence
  ENSG00000006747_26 (sequence is synthesized)
tgaattgtattgttatccacttagatacatgtacatgtacagtacatgtttaatatcacaggagatcaaaaagacaatgcacaggggagtatcccagggagcagagccaagttcaagtaa

SEQ ID NO: 7385 - DNA, 120 bp, Artificial Sequence
  ENSG00000006747_27 (sequence is synthesized)
gttaacgatatcaagttacttactggcaggtagccactagagaatcttagcaatttttgtcctgcaagatttcagcaaagctacagaaaagtgagtttttatgttttccattcttccctt

SEQ ID NO: 7386 - DNA, 120 bp, Artificial Sequence
  ENSG00000006747_28 (sequence is synthesized)
ttctaagtaataatttttatcgcagttaccctgattctattccattccattctattctattctattatttcattctattttatttccaatataccattgtatatcagtatatactgatac

SEQ ID NO: 7387 - DNA, 120 bp, Artificial Sequence
  ENSG00000006747_29 (sequence is synthesized)
actgagtggcagttgcattatctactaatctatataggtcattgaaaaagaagaagctacgttagaacccatggaaagaactttgcctcatgtagagattctagattcttagccaaaagc

SEQ ID NO: 7388 - DNA, 120 bp, Artificial Sequence
  ENSG00000006747_30 (sequence is synthesized)
tcagaattgttgggccctaaaggatgaacaatgtagggtccaacaattcatcccacatgaatttttctcatccttcatgtggaatgaaaaaactaaagagacaactgacttaccacacaa

SEQ ID NO: 7389 - DNA, 120 bp, Artificial Sequence
  ENSG00000006747_31 (sequence is synthesized)
atggactatggtagaagctgctgtcccttagtattgaatatctctattttcttttaatcatagaattcactgatattttagcagataatgtggccgtccaggcaggcatgagatttctca

SEQ ID NO: 7390 - DNA, 120 bp, Artificial Sequence
  ENSG00000006747_32 (sequence is synthesized)
gccttacttcaacttgattatgaccatgtgacccaattctgacatttgcctaaaggaaaatttacctaaaaaggcgttttcttgctatggcagtgtaacctgtactaataaatatagtgc

SEQ ID NO: 7391 - DNA, 120 bp, Artificial Sequence
  ENSG00000006747_33 (sequence is synthesized)
tagtcctgcatgcaacaaaaatgatgtaagtagacatttaacatttctaggaatgtaattgagtgaaaaataatttttaaaaatatttataaatatcttctgggtcaagctgaatatttt

SEQ ID NO: 7392 - DNA, 120 bp, Artificial Sequence
  ENSG00000006747_34 (sequence is synthesized)
ttgaaggatgatgagaataaaatgatttaataagtagtactttttcacaaaattagtaaaggtcaaggtgagtggcttagggtacactgtattttacgatgtttctctagtttagccagt

SEQ ID NO: 7393 - DNA, 120 bp, Artificial Sequence
  ENSG00000006747_35 (sequence is synthesized)
ggtttttctcatctccaatttatagcacaggccgaggcatatagtagggtctcagttaatatttattgaatggcaatatcaaaaatgagatcagcagcaagatgataaggcagaataaaa

SEQ ID NO: 7394 - DNA, 120 bp, Artificial Sequence
  ENSG00000006747_36 (sequence is synthesized)
gttgctgagagcctaaaatgattattcagttctgttgcagggttttaacctgcccaaaggatggaaaaagaagaacataagcataatttctgaatgcatcacggcaaagatgcatgtact

SEQ ID NO: 7395 - DNA, 120 bp, Artificial Sequence
  ENSG00000006747_37 (sequence is synthesized)
catgaagcataaaattaaaaatatgatacattcactacatgaaaatatgatatacggtttttcttcagtatccgcgggagattggctcgaggaaccccatggataccaacatccttgaat

SEQ ID NO: 7396 - DNA, 120 bp, Artificial Sequence
  ENSG00000006747_38 (sequence is synthesized)
gctcaagtcccttatataaaacggcatagtatttgcataaaacctataccattctcctgtatactctaagtcatctctgcgttacttataatacctaatacagtgtaaacgctgtgtaaa

SEQ ID NO: 7397 - DNA, 120 bp, Artificial Sequence
  ENSG00000006747_39 (sequence is synthesized)
cagttgttatactatattggttttttaatttgcattacttttgtattgttgtattattttattgtttttccccaaatagttttgatccgcagatgtagaacccacagatatgataaatca

SEQ ID NO: 7398 - DNA, 120 bp, Artificial Sequence
  ENSG00000006747_40 (sequence is synthesized)
attcctttcactgaaaagaaactcttacaaatcaatgagtcaacaacccaatggaaaaatggccaaaagacatgaatagaagttcacagaaaagaatgaaaatgaccagtaaataatgaa

SEQ ID NO: 7399 - DNA, 120 bp, Artificial Sequence
  ENSG00000006747_41 (sequence is synthesized)
aagatgttctaagacactcttaattaaataaattcacaataaaataatcatacttttatctatctaccagattagcaaatgttaaaatattaaaatgttagtggtcatcaaaatgtaggg

SEQ ID NO: 7400 - DNA, 120 bp, Artificial Sequence
  ENSG00000006747_42 (sequence is synthesized)
ttacaggttcacccatacactgttaatagatgtataaactggtcaaaactttttgatccatagcacagtattacttttgtaaacatacacaaaaaatattatatatttgccaaacgtatg

SEQ ID NO: 7401 - DNA, 120 bp, Artificial Sequence
  ENSG00000006747_43 (sequence is synthesized)
tactaatctaaaaccaaacacattagactaggtacatgtggagaaagagatacaggtgttccctagcaagttaatatgcttgtgtctcttcaaaccaatatattggcatatttatctaat

SEQ ID NO: 7402 - DNA, 120 bp, Artificial Sequence
  ENSG00000006747_44 (sequence is synthesized)
atttaatcagaagaaagaaagaacagaaagacccaggaagcctactgttagtagaggtcagcctcatcttttctctctgattcaagaaattcatactcaactcagtcaaacagaggtcct

SEQ ID NO: 7403 - DNA, 120 bp, Artificial Sequence
  ENSG00000006747_45 (sequence is synthesized)
gcatttacctcttggtgccggagagccttggtgagccatttagatcctctgtatcttctcaagcacaatcctcagtgttctcttctcgtcttagatagctcatcaaataatatttcccac

SEQ ID NO: 7404 - DNA, 120 bp, Artificial Sequence
  ENSG00000006747_46 (sequence is synthesized)
cacttatttctagcagttctggtaaagagaatggccttcacattgtattttgaacaatgttttggcctccagtaatgattaggaacacactataaacataaaacatcagtccacttaact

SEQ ID NO: 7405 - DNA, 120 bp, Artificial Sequence
  ENSG00000006747_47 (sequence is synthesized)
cattattcagtcatcaagcaattcttgtcccaatcattctccaaagctatatactgtgaatttatactgttgtgtagtgacacaagcccttctgctgaaaaagtaggtagataattactt

SEQ ID NO: 7406 - DNA, 120 bp, Artificial Sequence
  ENSG00000006747_48 (sequence is synthesized)
agcccttctgctgaaaaagtaggtagataattactttgaactgaaagaaaacacttattttattttcttttaaacctaatttattttaaacctaatttatttattttaaacctaatttat

SEQ ID NO: 7407 - DNA, 120 bp, Artificial Sequence
  ENSG00000006747_49 (sequence is synthesized)
aaacctaattcatttgaactgaacttgaatttaaaagcctacaaatgccccgcatatgtagaattatcattcattccgtgttcttgctcttggataaaacggacaactcagagaaaaaac

SEQ ID NO: 7408 - DNA, 120 bp, Artificial Sequence
  ENSG00000006747_50 (sequence is synthesized)
tgctcttggataaaacggacaactcagagaaaaaactggcttataaatgcacttcacaaaaactgttagaaaagtagccattaaacctgtaaaaaggccgggcgcagtggctgacgcctg

SEQ ID NO: 7409 - DNA, 120 bp, Artificial Sequence
  ENSG00000006747_51 (sequence is synthesized)
cttgaacccgggaggcggaggttggagcgaaagtacgcgccactgtactccagcctgcgtgacgatgagagtctccgtctcgggggaagaaaaaaaaaacctgtaaaaagtggctcaact

SEQ ID NO: 7410 - DNA, 120 bp, Artificial Sequence
  ENSG00000006747_52 (sequence is synthesized)
aaaaagtggctcaactttaatattcattaggaaatgactaaaatcaaatattttacttggtaatgccaagtaaaaatacaggagaggatatagtgaaactggagcttacatccactactt

SEQ ID NO: 7411 - DNA, 120 bp, Artificial Sequence
  ENSG00000006747_53 (sequence is synthesized)
gggaagtataaattgatacaatgggtttgaacagtttttgtattttctactaaaatgaacatacacatatcctataatccagaaatcccactccatggtgtgtacccaacaaaaatgcat

SEQ ID NO: 7412 - DNA, 79 bp, Artificial Sequence
  ENSG00000006747_54 (sequence is synthesized)
agaaatcccactccatggtgtgtacccaacaaaaatgcatacatgtgtgtactaaaggatattctcactctgttgccca

SEQ ID NO: 7413 - DNA, 83 bp, Artificial Sequence
  ENSG00000006747_55 (sequence is synthesized)
caattctccccaggagctgggactctaggtgcgtgccaccacgcccagctaattctttgtagagatggggttttgccatgttg

SEQ ID NO: 7414 - DNA, 88 bp, Artificial Sequence
  ENSG00000006747_56 (sequence is synthesized)
gttgtccaggctggtcttgaactcctagactcaggaaatccacctgccttggcctcccaattggacacgaatttttaagttttatata

SEQ ID NO: 7415 - DNA, 120 bp, Artificial Sequence
  ENSG00000006747_57 (sequence is synthesized)
ttttttttttttttttttttgcattggcaaaaaaacaaagatattgtttagcaatttccttgtataatgcaatcagtggaagacaaatcagaggtattattttcccttgggcctttgcag

SEQ ID NO: 7416 - DNA, 120 bp, Artificial Sequence
  ENSG00000006747_58 (sequence is synthesized)
aaatcagaggtattattttcccttgggcctttgcagcctgtgttgtttttctctttttcatattgatgtgaaaagcagccaagtattatttgacaacatcagtcccttattaagatgtta

SEQ ID NO: 7417 - DNA, 120 bp, Artificial Sequence
  ENSG00000006747_59 (sequence is synthesized)
tttctagtttataattgactatggcatttgcatgcatttcatcatgtctccatttcttcggaatgataatttctaatatacttttcttctattataggaataagaattcagtagtcatat

SEQ ID NO: 7418 - DNA, 120 bp, Artificial Sequence
  ENSG00000006747_60 (sequence is synthesized)
ttcctgttgcctataaaaaattgatgctttaatttagttaacatgacaaactccatcttatttagagagattatttttgatgttattataataaaaatgacacctttactaaaaatgtct

SEQ ID NO: 7419 - DNA, 120 bp, Artificial Sequence
  ENSG00000006747_61 (sequence is synthesized)
catcataaattgttttccattatttctgtgctgattgcaaacaatactgaattaaaatatccctgcaagttcactgtgactcaatctaaggttttaataattcatgaaataaaactaatg

SEQ ID NO: 7420 - DNA, 120 bp, Artificial Sequence
  ENSG00000006747_62 (sequence is synthesized)
ttgatgttatccaaatcattctaacgccaacttctaggtaaacagtaaacaagaataagcaaatttgagttttcctaattatttgacattgtcattagcttgtgatccttagatggaata

SEQ ID NO: 7421 - DNA, 120 bp, Artificial Sequence
  ENSG00000006747_63 (sequence is synthesized)
tattttgccagatctcacctcccagggaactgatgagctttaactggaatagtagtgagaatgatagagcagggcccttaactccttagaaaggtcaaaggaagaggtgaatgtgggcag

SEQ ID NO: 7422 - DNA, 120 bp, Artificial Sequence
  ENSG00000006747_64 (sequence is synthesized)
ggtttcactggagtattgacacaccaaagatgctatgtaggtgaaaatctctcctaatgcattccctttccaacgaacctgagcctggattcttcagtaacacaatgccttctgagaaac

SEQ ID NO: 7423 - DNA, 120 bp, Artificial Sequence
  ENSG00000006747_65 (sequence is synthesized)
aatgttgttccacattttagagttttggcatgcataatggagtttatggcagagttcagaggatacaatgaaacaagaaagggaggcaactgatgttgtttgattatctccattattttg

SEQ ID NO: 7424 - DNA, 120 bp, Artificial Sequence
  ENSG00000006747_66 (sequence is synthesized)
aaggagccaggtgcttggggaacctggttgtacagaaaggtgatgccaagactctcttgtatgattttcctctctagcttggggctgcaccctctgctgtgggaaggagtcctcaaggta

SEQ ID NO: 7425 - DNA, 120 bp, Artificial Sequence
  ENSG00000006747_67 (sequence is synthesized)
ttaatatacatcctatcatttattttagatacagatagcattagagtttatcagtaaagttgggcaactcatggaatattacgagtagaaattgtaattactgtagaatgtatagtgttt

SEQ ID NO: 7426 - DNA, 120 bp, Artificial Sequence
  ENSG00000006747_68 (sequence is synthesized)
tgaatggctattgtatttttcagcatacaaattcagaggggtgaaagtaggcaatgacaccactatttatgttttttgttgttgttgtttgtttttgttttgttttgttttgagatggag

SEQ ID NO: 7427 - DNA, 120 bp, Artificial Sequence
  ENSG00000006747_69 (sequence is synthesized)
caggcatgagccaccgcacccagccctatttatgttttttaaaagcaccatttaccacccatttgtctatggacttaatctatgtctctatgagctggtaaacaatagacaggtaaatac

SEQ ID NO: 7428 - DNA, 120 bp, Artificial Sequence
  ENSG00000006747_70 (sequence is synthesized)
gtaaatacagacttggctgtatttgaacagcaccttcaaaaaccagaagccagaaatcaggtagctagatttgtccatgaaagcaggagattcccttaactggtgatgcctgaagttggg

SEQ ID NO: 7429 - DNA, 120 bp, Artificial Sequence
  ENSG00000006747_71 (sequence is synthesized)
ataaagagtcttccaaacatgtgccattttggcatggatatctaaagccaccatgatggctttatattaatgaaggaaataagttgcaggataagtatatccatggtcatccaggggaag

SEQ ID NO: 7430 - DNA, 120 bp, Artificial Sequence
  ENSG00000006747_72 (sequence is synthesized)
aaaatggcgtacataacttatataccatatttaacccagagacagatatcacaggtaaacagtgcaaatcactgtccctagtctgagccatatttagtgtcttgaaagagccacagtggc

SEQ ID NO: 7431 - DNA, 120 bp, Artificial Sequence
  ENSG00000006747_73 (sequence is synthesized)
acagtggctggctaaaatggcacagtggcaaatcctgaccatggactgccctatgcaaaataactagctccccactttacacagagtacaccatgtcaggcctctgagcccaagctaagc

SEQ ID NO: 7432 - DNA, 90 bp, Artificial Sequence
  ENSG00000006747_74 (sequence is synthesized)
atatacatccagatggcctgaagcaattgaagatctacaaaagaagtgaaaattagtgtttctgccccatcctaactgatcagtgtactt

SEQ ID NO: 7433 - DNA, 72 bp, Artificial Sequence
  ENSG00000006747_75 (sequence is synthesized)
atgacattccaccattgtgatgtgtttctgccccatcctaactgatcatcccacccttgagaatgtactttg

SEQ ID NO: 7434 - DNA, 120 bp, Artificial Sequence
  ENSG00000006747_76 (sequence is synthesized)
ggagtttgagaccagcctgggcaacatatggagaccttttccctacaaaacacttttttgagaattagcaaagcatggtggcacgcacctgtagtccaagctgcttgtgagactgaggaa

SEQ ID NO: 7435 - DNA, 120 bp, Artificial Sequence
  ENSG00000006747_77 (sequence is synthesized)
gcacctgtagtccaagctgcttgtgagactgaggaaaggagtgttcccaggatgaaagcacagctgctgccatcttcactgttcagatggatgactatttgggtggcaagccagtgcaga

SEQ ID NO: 7436 - DNA, 120 bp, Artificial Sequence
  ENSG00000006747_78 (sequence is synthesized)
gtcatctggctgcttcttgctggataggggcaatggttgaggggagaggagcaggcactaggaaagacaactcttaagatgttacgatttgtactttaatattcagccatagcttcacat

SEQ ID NO: 7437 - DNA, 120 bp, Artificial Sequence
  ENSG00000006747_79 (sequence is synthesized)
tagaatcatttggaaaagttttttaaagtactggtaactgtgacttgacccctgaagattctgattttaaagttttggaatttggtgtttggacttcttaagactccttccctccaggat

SEQ ID NO: 7438 - DNA, 120 bp, Artificial Sequence
  ENSG00000006747_80 (sequence is synthesized)
gggtcaaagtaacgtctgtatgtgaagtgattctccacctgcctgtctgctgcaatctggtgtccctcttctttatctgcgtgggggttagaattttttagaaactgcacatcagacttt

SEQ ID NO: 7439 - DNA, 120 bp, Artificial Sequence
  ENSG00000006747_81 (sequence is synthesized)
tgcccattcacttcctccacagcctttaattcaagatagtaaaccacagtaggtttagctaagagcacttaagagttattattccttagagcaagttgtgcagacttggcctgaaaccca

SEQ ID NO: 7440 - DNA, 120 bp, Artificial Sequence
  ENSG00000006747_82 (sequence is synthesized)
gatgatatttgtcttcatcgaaatcaatttagaccctggctagttactcctttcctttccgaatctctcagcctcatctactctcctcatttttatgtccctgcacaaggaacacaatga

SEQ ID NO: 7441 - DNA, 120 bp, Artificial Sequence
  ENSG00000006747_83 (sequence is synthesized)
gatcatttcttccaggtcacagagctcttgtgaaccttatgtagaaagacaaacttattttactgcaggggtaacatattaaagaacttgattcttctctcaaatattcaaattcagcgg

SEQ ID NO: 7442 - DNA, 120 bp, Artificial Sequence
  ENSG00000006747_84 (sequence is synthesized)
caattactttagttgtgagaaaaagcaattttggattatatgagcttgatagctaaaccaggataattttccatttccttacttttgtctccactgccagattcatattttcccttaatt

SEQ ID NO: 7443 - DNA, 81 bp, Artificial Sequence
  ENSG00000006747_85 (sequence is synthesized)
cgcctcagcctcccaaagagctttttcatttattcgtccagcagcatcttgtactagtcctgactgtggcgtgtccccaga

SEQ ID NO: 7444 - DNA, 120 bp, Artificial Sequence
  ENSG00000006747_86 (sequence is synthesized)
cagcatcttgtactagtcctgactgtggcgtgtccccagaaggtcatactccaccatgttgtctcatcttgcacatccccaagaagttgcttctccctgacgtctgcgtttaattaagtg

SEQ ID NO: 7445 - DNA, 120 bp, Artificial Sequence
  ENSG00000006747_87 (sequence is synthesized)
cttgctggataggggcgatggttggggggagaggctgggtagtagggactgctgttcctggagctgtcggtattctcggagtagcatcatgtcttgtactgttccatgggtgaaggctct

SEQ ID NO: 7446 - DNA, 120 bp, Artificial Sequence
  ENSG00000006747_88 (sequence is synthesized)
gcttggaagccagcgctgcgctccccgtgggaagcgatcgtctcctctgtcaactcgcgcctgggcacttagcccctcccgtttcagggcgccgcctccccggatggcaaacactataaa

SEQ ID NO: 7447 - DNA, 120 bp, Artificial Sequence
  ENSG00000006756_0 (sequence is synthesized)
cgggcgcggagtgcgcagggcaaggtcctgcgctctgggccagcgctcggccatgcgatccgccgcgcggaggggacgcgccgcgcccgccgccagggactctttgccggtgctactgtt

SEQ ID NO: 7448 - DNA, 120 bp, Artificial Sequence
  ENSG00000006756_1 (sequence is synthesized)
ggtgctactgtttttatgcttgcttctgaagacgtgtgaacctaaaactgcaaatgcctttaaaccaaatatcctactgatcatggcggatgatctaggcactggggatctcggttgcta

SEQ ID NO: 7449 - DNA, 120 bp, Artificial Sequence
  ENSG00000006756_2 (sequence is synthesized)
cgggaacaatacactgagaacgccgaatattgaccagcttgcagaggaaggtgtgaggctcactcagcacctggcggccgccccgctctgcaccccaagccgagctgcattcctcacagg

SEQ ID NO: 7450 - DNA, 120 bp, Artificial Sequence
  ENSG00000006756_3 (sequence is synthesized)
gagacattccttcagatcaggcatggacgccagcaatggataccgggcccttcagtggaacgcaggctcaggtggactccctgagaacgaaaccacttttgcaagaatcttgcagcagca

SEQ ID NO: 7451 - DNA, 120 bp, Artificial Sequence
  ENSG00000006756_4 (sequence is synthesized)
tggctatgcaaccggcctcataggaaaatggcaccagggtgtgaattgtgcatcccgcggggatcactgccaccaccccctgaaccacggatttgactatttctacggcatgcccttcac

SEQ ID NO: 7452 - DNA, 120 bp, Artificial Sequence
  ENSG00000006756_5 (sequence is synthesized)
gctcacaaacgactgtgacccaggcaggccccccgaagtggacgccgccctgagggcgcagctctggggttacacccagttcctggcgctggggattctcaccctggctgccggccagac

SEQ ID NO: 7453 - DNA, 120 bp, Artificial Sequence
  ENSG00000006756_6 (sequence is synthesized)
ctgcggtttcttctctgtctccgcgagagcagtcaccggcatggccggcgtgggctgcctgtttttcatctcttggtactcctccttcgggtttgtgcgacgctggaactgtatcctgat

SEQ ID NO: 7454 - DNA, 120 bp, Artificial Sequence
  ENSG00000006756_7 (sequence is synthesized)
gagaaaccatgacgtcacggagcaacccatggttctggagaaaacagcgagtcttatgctaaaggaagctgtttcctatattgaaagacacaagcatgggccatttctcctcttcctttc

SEQ ID NO: 7455 - DNA, 120 bp, Artificial Sequence
  ENSG00000006756_8 (sequence is synthesized)
tttgctgcatgtgcacattccccttgtgaccacgagtgcattcctggggaaaagtcagcatggcttatatggtgataatgtggaggagatggactggctcataggtaaggttcttaatgc

SEQ ID NO: 7456 - DNA, 120 bp, Artificial Sequence
  ENSG00000006756_9 (sequence is synthesized)
catcgaagacaatggtttaaagaactcaacattcacgtatttcacctctgaccatggaggacatttagaggcaagagatggacacagccagttagggggatggaacggaatttacaaagg

SEQ ID NO: 7457 - DNA, 120 bp, Artificial Sequence
  ENSG00000006756_10 (sequence is synthesized)
tgggaagggcatgggaggatgggaaggtgggatccgcgtgcccgggatcttccactggccgggggtgctcccggccggccgagtgattggagagcccacgagcctgatggacgtgttccc

SEQ ID NO: 7458 - DNA, 120 bp, Artificial Sequence
  ENSG00000006756_11 (sequence is synthesized)
tactgtggtccagctggtgggtggcgaggtgccccaggacagggtgattgatggccacagcctggtacccttgctgcagggagctgaggcacgctcggcacatgagttcctgtttcatta

SEQ ID NO: 7459 - DNA, 120 bp, Artificial Sequence
  ENSG00000006756_12 (sequence is synthesized)
ctgtgggcagcatcttcacgcagcacgctggcaccagaaggacagtggaagcgtctggaaggttcattacacgaccccgcagttccaccccgagggagcgggggcctgctacggccgagg

SEQ ID NO: 7460 - DNA, 120 bp, Artificial Sequence
  ENSG00000006756_13 (sequence is synthesized)
cgtctgcccatgctccggggagggcgtgacccatcacagaccccctttgctctttgacctctccagggacccctccgaggcacggcccctgacccccgactccgagcccctgtaccacgc

SEQ ID NO: 7461 - DNA, 120 bp, Artificial Sequence
  ENSG00000006756_14 (sequence is synthesized)
cgtgatagcaagggtaggtgccgcggtgtcggagcatcggcagaccctgagtcctgtgccccagcagttttccatgagcaacatcctgtggaagccgtggctgcagccgtgctgcggaca

SEQ ID NO: 7462 - DNA, 120 bp, Artificial Sequence
  ENSG00000006756_15 (sequence is synthesized)
tttcccgttctgttcatgccacgaggatggggatggcaccccctgaatgccaggactgtgagagaggatccaggagagcctgactgcgttgcaaacaaaattctccaagcttggttctat

SEQ ID NO: 7463 - DNA, 120 bp, Artificial Sequence
  ENSG00000006756_16 (sequence is synthesized)
cttcagcttccctttttgcaaggaacatgccctggactgagagtgggtccccactttctttctttctttctttcttttttgagacagagtgtcgctctgtccctcaggctggaatgcaat

SEQ ID NO: 7464 - DNA, 64 bp, Artificial Sequence
  ENSG00000006756_17 (sequence is synthesized)
cccaggattacaggcaccaggcacctgccaccatgcctagctaatttttgtagttttagtagag

SEQ ID NO: 7465 - DNA, 120 bp, Artificial Sequence
  ENSG00000006756_18 (sequence is synthesized)
cgcccatgtagggtttccctttcctgatttgtgaaataagactgtcccagtaggcacccactgatgcctcctcttcctcttctaaatctcagggttcgtcattgtgccaatgcccgatgt

SEQ ID NO: 7466 - DNA, 120 bp, Artificial Sequence
  ENSG00000006756_19 (sequence is synthesized)
tttcacccctccgtcttaaagcattgttgcaatttcatcacctagatgacataacagccttacaaaaggacagggaggagtgtctgttcctactctcacatagcggaggaaagttagagc

SEQ ID NO: 7467 - DNA, 90 bp, Artificial Sequence
  ENSG00000006756_20 (sequence is synthesized)
gtctctgtccatgtgtcttcctgatattgttatagaaatggcttcaggctgctggtaacagatgctgcggaaaaagaatgccttaaacaa

SEQ ID NO: 7468 - DNA, 120 bp, Artificial Sequence
  ENSG00000006756_21 (sequence is synthesized)
cacagtgagacctcatctctacaaaaaacaaataattagctagatgtcgtggcgcacagctgtagtctcagctacttaggaggctgaggcgggaggattatttgagcctgggaggtcaaa

SEQ ID NO: 7469 - DNA, 120 bp, Artificial Sequence
  ENSG00000006756_22 (sequence is synthesized)
gcgggaggattatttgagcctgggaggtcaaaactgcaatgagctaagattgcactactgcactccgggctgggagacagagtaagaccctgccttaaaaaaaaaaaaaaaaaaatgcct

SEQ ID NO: 7470 - DNA, 120 bp, Artificial Sequence
  ENSG00000006756_23 (sequence is synthesized)
taaagaaaataataagagaagggtgtgttctcttccaagtaatgagccgatcaaggggaagcaacccaaggctagcaggctcttttcaattcccagctctgccactcttagcatggcaga

SEQ ID NO: 7471 - DNA, 120 bp, Artificial Sequence
  ENSG00000006756_24 (sequence is synthesized)
gagttggcctcattatgccagtatggctgccacagtgtcagacatcacattccaggcagtggaaaggagaaagaaccaaagggcatccctttctcttgaagcagtccctgtgagggggga

SEQ ID NO: 7472 - DNA, 120 bp, Artificial Sequence
  ENSG00000006756_25 (sequence is synthesized)
ttatctggaagccccaacccaatttctgcttccaaccattatccatagaaacaactggaagttgagaagtgcagtcttttaggtgggcacctggctgccctgtatgaaaccagaattagg

SEQ ID NO: 7473 - DNA, 120 bp, Artificial Sequence
  ENSG00000006756_26 (sequence is synthesized)
ttggtcagcaggaaaacaagaaaacacttactgtgttgactgaggtttttgacgcatcgctttattgtcaaattaaacaactctatctcattctgcactgaaacacgtactaccattgcc

SEQ ID NO: 7474 - DNA, 120 bp, Artificial Sequence
  ENSG00000006756_27 (sequence is synthesized)
tataattggaaaatgatcctcagaggcacagaagatgccctgatggaaagtttgccccttgggcaaagagacagccatgggaaccttcagacatagagagagaaggtggcttttctccct

SEQ ID NO: 7475 - DNA, 120 bp, Artificial Sequence
  ENSG00000006756_28 (sequence is synthesized)
acattcctcaaatagctaagatttggccagtgtgttttctaagtcaattctagtgtgtttcatcctcacctcttccctctgtggctttgatgatggaagtgtagtcctaacctactgcac

SEQ ID NO: 7476 - DNA, 120 bp, Artificial Sequence
  ENSG00000006756_29 (sequence is synthesized)
agctgggaccccctgcccctagatcccaatactggggatgggaggaccttgcactattcccctcagtccatctatcgaggtctttgcaggaagcatactgggaattgaaacgagagccta

SEQ ID NO: 7477 - DNA, 120 bp, Artificial Sequence
  ENSG00000006756_30 (sequence is synthesized)
aatgacatctaagaaaggcagtgttcaataccaggtattaggtgaggatgggattctaaggacatcagtgggaggcagggagccaccttcagacctcagcatggaagcttccaagatcca

SEQ ID NO: 7478 - DNA, 120 bp, Artificial Sequence
  ENSG00000006756_31 (sequence is synthesized)
gaggaagaggcaacagcactgagagtcataggtagaagaatcatcacagccctgctaaccaggcagctgatgcccctctcccctggctccctgtgtccaaatcctacaggggcatctgtt

SEQ ID NO: 7479 - DNA, 120 bp, Artificial Sequence
  ENSG00000006756_32 (sequence is synthesized)
ggctgaactcaacctgaagccaaagagaagatgagtggagagaggcaacatttatagagctcaggtttctagggctggagagggatctggagggacacacaggagacacctggcataacc

SEQ ID NO: 7480 - DNA, 120 bp, Artificial Sequence
  ENSG00000006756_33 (sequence is synthesized)
aatgattaaaaaaaaaaaaaaaaagaaacatctatggagcatgggacacggggagtggaggcagctaaaagccatctcatctttcaccgtattcaacaagcccattataacaagtctttc

SEQ ID NO: 7481 - DNA, 120 bp, Artificial Sequence
  ENSG00000006756_34 (sequence is synthesized)
tttcacgctcaaccattcaaacaatcccaacaatcccagcctaagaatttcctggcatttgatgaaaatggctgtgggttttgctatctttaagctccctgggaagcaggatataagccc

SEQ ID NO: 7482 - DNA, 120 bp, Artificial Sequence
  ENSG00000006756_35 (sequence is synthesized)
agggctggcaggctctttctagctacctgctcttgcacatagagtttgcctcatggttgcaagaaggctgccatagctccagatggcacatagacattccaggcagcaggaaaaaggaag

SEQ ID NO: 7483 - DNA, 120 bp, Artificial Sequence
  ENSG00000006756_36 (sequence is synthesized)
gagcacttaaccgaaggaggtcagggagttggttagtctccacctgaagaagagagccatgaaccagcttcagttgactaacgggctcctgtgagtgcatctttggacttttctggaggt

SEQ ID NO: 7484 - DNA, 120 bp, Artificial Sequence
  ENSG00000006756_37 (sequence is synthesized)
tgaaatctagatgtggtatgtgtcttaaagcagccaccaactcctcccattaccttccaagtgagcccaactacacgatggagcctcttccctgcccttggatctgggctgagcctctga

SEQ ID NO: 7485 - DNA, 120 bp, Artificial Sequence
  ENSG00000006756_38 (sequence is synthesized)
cttgcgttgaccaacagaatgcagtgaaagtgatgccgatactaccctccctgccctagacttgggatacctggcagctatattcttccattcctcaggacttgcaaaaacgggtctcag

SEQ ID NO: 7486 - DNA, 120 bp, Artificial Sequence
  ENSG00000006756_39 (sequence is synthesized)
catgccttcccagagccatgaggtgtttctttgcccattcattgatctgagaagtgagtgtaaggagtttaaatcaacctctgttctgtgctagttaaggtaataaagttgctgcagtcc

SEQ ID NO: 7487 - DNA, 120 bp, Artificial Sequence
  ENSG00000006756_40 (sequence is synthesized)
agggggtaggtacctgtggacggctctgcgaataggacagttgcatttcttgggaatcaagtgcatccctaggctggcagtgcagcagaaatactgaataaaatgtgacaaatctccctg

SEQ ID NO: 7488 - DNA, 120 bp, Artificial Sequence
  ENSG00000006756_41 (sequence is synthesized)
cttccttctatggccttcaagaaaccctggagaggaccagtgaggctgcagattcttaaaagagcatagacattaaaattcttgcagaatctgaatgtgtctcctgagacaagcatcgtg

SEQ ID NO: 7489 - DNA, 120 bp, Artificial Sequence
  ENSG00000006756_42 (sequence is synthesized)
atctgaatgtgtctcctgagacaagcatcgtgatagagttcacagtcttaaaagtctgcattttcaggtggggcaaggtggctcatgcctttaatcccagcattttgggaggctaaggca

SEQ ID NO: 7490 - DNA, 73 bp, Artificial Sequence
  ENSG00000006756_43 (sequence is synthesized)
gatgccccccccccccatctctacaaaaaatttaaaaaattagccatggtggtgtgcacctgtggtcccagct

SEQ ID NO: 7491 - DNA, 120 bp, Artificial Sequence
  ENSG00000006756_44 (sequence is synthesized)
ttgagcccaggaggctgaggctgcaatgagctataattattgcaccactgaactccagcctgggccacatagcaagaccctgtctccaaaaaaaaaaagaaataaaagacgaagaatagg

SEQ ID NO: 7492 - DNA, 120 bp, Artificial Sequence
  ENSG00000006756_45 (sequence is synthesized)
gagaaaaacttctctcatatcatttatttggtccttcagtatttctgattacttagtctaattttgcacaaaatcaactgtattagtccattcttgcaaagaaatacctgagactgggta

SEQ ID NO: 7493 - DNA, 120 bp, Artificial Sequence
  ENSG00000006756_46 (sequence is synthesized)
atttataaagaaaagaggttggattggctcacggttctgcaggctgcacaggaagcatggcagcatctgcttctggggagacctcggggagcttttgctcatggtggaaggcgaaggggg

SEQ ID NO: 7494 - DNA, 90 bp, Artificial Sequence
  ENSG00000006756_47 (sequence is synthesized)
acctcggggagcttttgctcatggtggaaggcgaagggggagcaggcgtcttgtggcaggagaaggaccaagagaggagaggaagagccg

SEQ ID NO: 7495 - DNA, 120 bp, Artificial Sequence
  ENSG00000006756_48 (sequence is synthesized)
accattcatgagaactctgtccccatcattcagtcacctccccccaggccccaccgccgattctgaggatgacaattccacatgagatttgggcggggacacacatccaaactatattgt

SEQ ID NO: 7496 - DNA, 120 bp, Artificial Sequence
  ENSG00000006756_49 (sequence is synthesized)
caaccttctacacagccaatgacttaacagcctcattagaagttacagaaactaaagcaataaagttcggacaatgcagagaggtcaccttccttctatggccttgaagaaaccctggag

SEQ ID NO: 7497 - DNA, 120 bp, Artificial Sequence
  ENSG00000006756_50 (sequence is synthesized)
cgtcacggagcaacccatggttctggagaaaacagcgagtcttatgctaaaggaagctgtttcctatattgaaagccagtgacttcatgtcatcatcagaagttaccgaaagtgaagcga

SEQ ID NO: 7498 - DNA, 120 bp, Artificial Sequence
  ENSG00000006756_51 (sequence is synthesized)
atggctatgcaaccggcctcataggtgtggatatgtgggagcctcacattatacggtggttgggaatattcgtgataaaaaagatcccaggccaggcgtggtggcgcacgcctgtagtcc

SEQ ID NO: 7499 - DNA, 120 bp, Artificial Sequence
  ENSG00000006756_52 (sequence is synthesized)
cggagtgcgcagggcaaggtcctgcgctctgggccagcgctcggccatgcgatccgccgcgcggaggggacgcgccgcgcccgccgccagggagctgaggcacgctcggcacatgagttc

SEQ ID NO: 7500 - DNA, 120 bp, Artificial Sequence
  ENSG00000006756_53 (sequence is synthesized)
agctgaggcacgctcggcacatgagttcctgtttcattactgtgggcagcatcttcacgcagcacgctggcaccagaaggacaaaaggtagtagatcgacgctgaacagtttcaacacag

SEQ ID NO: 7501 - DNA, 120 bp, Artificial Sequence
  ENSG00000006756_54 (sequence is synthesized)
gggaaaggggaagaattaaggaacctctatgattctgatttctgaaagcagccacagtgagcgctctgcaatgagtccctttgcctggggcatgcaatgcagagacacaaacggacacac

SEQ ID NO: 7502 - DNA, 120 bp, Artificial Sequence
  ENSG00000006756_55 (sequence is synthesized)
atgggcgcacgcgcgcacacacacatgctctgactttgcaagctgaaggctgtgattgtgtggactgcctcgtgtccctcctccttttcactgaatagggaggttcatgctgataccaca

SEQ ID NO: 7503 - DNA, 120 bp, Artificial Sequence
  ENSG00000006757_0 (sequence is synthesized)
actttcctgggccggctcgcggagagcgtagcgcggccttggtggcggaatggcgttgagtgacggcccggccccgccatctggttaaagggactcgttcaacacggaagtgtcccgggg

SEQ ID NO: 7504 - DNA, 120 bp, Artificial Sequence
  ENSG00000006757_1 (sequence is synthesized)
ctgcattgtgctacagctagaatgaagcacatcaacctatcatttgcagcgtgtggatttctgggcatttaccacttgggggcagcatctgcactttgcagacatggcaaaaaacttgtg

SEQ ID NO: 7505 - DNA, 120 bp, Artificial Sequence
  ENSG00000006757_2 (sequence is synthesized)
aaggatgtcaaagccttcgctggggcgtctgcgggatcgttggttgcttctgttctgctaacagcaccagaaaaaatagaggaatgtaaccaatttacctacaagtttgccgaagaaatc

SEQ ID NO: 7506 - DNA, 120 bp, Artificial Sequence
  ENSG00000006757_3 (sequence is synthesized)
agaaggcagtctttcggggcagtaacgcccggttatgacttcatggcccgactaagaagtgggatggagtcgattcttcctcccagcgctcacgagctggcccagaaccgactgcacgta

SEQ ID NO: 7507 - DNA, 120 bp, Artificial Sequence
  ENSG00000006757_4 (sequence is synthesized)
tccatcaccaacgccaaaaccagagaaaatcacttagtctccactttttcctccagggaggacctcattaaggtcctcctagccagcagttttgtgcccatttatgcaggactgaagcta

SEQ ID NO: 7508 - DNA, 120 bp, Artificial Sequence
  ENSG00000006757_5 (sequence is synthesized)
gtggaatacaaagggcagaagtgggtggacggaggcctcaccaacgctcttcccatcctgcccgtcggccggacagtaaccatctcccccttcagtggacgactggacatctccccgcag

SEQ ID NO: 7509 - DNA, 120 bp, Artificial Sequence
  ENSG00000006757_6 (sequence is synthesized)
gacaaagggcagctagatctgtatgttaatatcgccaagcaggatatcatgttgtccctggcaaacctggtgagactcaaccaagccctttttcccccaagcaagaggaaaatggaatct

SEQ ID NO: 7510 - DNA, 120 bp, Artificial Sequence
  ENSG00000006757_7 (sequence is synthesized)
ttgtatcagtgtggttttgatgacactgttaagtttttacttaaagaaaattggtttgaataaaatgcataaaagtttataatgcaaaacacgttttagatagtttttgatggaagtttc

SEQ ID NO: 7511 - DNA, 120 bp, Artificial Sequence
  ENSG00000006757_8 (sequence is synthesized)
taatcaaatcctttttagaaaatctatcatgactcaattgtattactccttgtaatatttgtgtttatttttaatatttgaattattacttagcacatggatataagaggcactttatta

SEQ ID NO: 7512 - DNA, 120 bp, Artificial Sequence
  ENSG00000006757_9 (sequence is synthesized)
gaatttgacaacgtcattaagaaggatacacttaggtgataaggaatcatttttggtgaactgttgtgtcctttaaaaaatggaggaggataggttctttgggtaaattgaggaacatgg

SEQ ID NO: 7513 - DNA, 120 bp, Artificial Sequence
  ENSG00000006757_10 (sequence is synthesized)
aaaatggagggccaccacttaggttccatggagaatatgtggcatgatcttgacgtgaagcatgggtgtttccgtgacttagctgtgtccctgtagctctggaactgaaggaactaggta

SEQ ID NO: 7514 - DNA, 120 bp, Artificial Sequence
  ENSG00000006757_11 (sequence is synthesized)
ggagaggaaggatttgagaaataggcaactcatggttaaagacctttgatcaggactggaggaacaaaggtttgtgtattagtccattttcacactgctgagaaagacatacccaagact

SEQ ID NO: 7515 - DNA, 79 bp, Artificial Sequence
  ENSG00000006757_12 (sequence is synthesized)
gctgattaatgggctcacagttccacatgactgaggaggcctcacaattgtggtggaaggtgaaaggcatgtctcacat

SEQ ID NO: 7516 - DNA, 77 bp, Artificial Sequence
  ENSG00000006757_13 (sequence is synthesized)
gctacatacagtttgctttccacaggtgtgtgcagttgctcccagtgcagttaggggcagatatccagaagcctagg

SEQ ID NO: 7517 - DNA, 120 bp, Artificial Sequence
  ENSG00000006757_14 (sequence is synthesized)
gctcccagtgcagttaggggcagatatccagaagcctaggagattttgaagaggcttatcccctctcatcttcctcccctaaaccccaccccagtttaggagattatcaagctggttgtc

SEQ ID NO: 7518 - DNA, 120 bp, Artificial Sequence
  ENSG00000006757_15 (sequence is synthesized)
tctctctctctctctctctctctcgccatacctctctgagtatttagctattgttctatatactggatacatctattatgggaacttaaatagataaaatactactaaacacaaagaacc

SEQ ID NO: 7519 - DNA, 120 bp, Artificial Sequence
  ENSG00000006757_16 (sequence is synthesized)
cttaaatagataaaatactactaaacacaaagaaccaagtagcctagtaaataagaattaaatccagaataatcattcacttctcatttttaaatcacgttgtactgatcccaggttttt

SEQ ID NO: 7520 - DNA, 120 bp, Artificial Sequence
  ENSG00000006757_17 (sequence is synthesized)
tactttctgagtagttgtccatcactttgaggacttgtgtatgggcttgtaccaatttactgacactgtcttaaatcctaaatctgtttttatgaggttttgccaagcaagaactcttga

SEQ ID NO: 7521 - DNA, 120 bp, Artificial Sequence
  ENSG00000006757_18 (sequence is synthesized)
ttactaagaggcagttagagacaaaccaatttaattccatgtcttcaattgtcacgcatttcttcttttactctttgaaactattctttgagtcaattttatggttctcagaagccaaaa

SEQ ID NO: 7522 - DNA, 120 bp, Artificial Sequence
  ENSG00000006757_19 (sequence is synthesized)
tacacaacttttagcacataaacaccaacgatggcctctttttgaggagttatgcatagacccactctagagtaatgatggtccctgtggtatatactttctcctactctagcaaacatg

SEQ ID NO: 7523 - DNA, 120 bp, Artificial Sequence
  ENSG00000006757_20 (sequence is synthesized)
tagtttaatcttaatgtgttgtttccataagtgacatgaagtggatagattctcaattgttatgtccacttattcactaggtaaattttcagttttaatacttttctccttaccccttcc

SEQ ID NO: 7524 - DNA, 120 bp, Artificial Sequence
  ENSG00000006757_21 (sequence is synthesized)
tttgatcatttcatgtgaatattctatttgtatgatacactgtatttcaataaattccttgttgatgtacccttaaattgaagaaatttaagctgcaaaaccaaatctcattgtataaga

SEQ ID NO: 7525 - DNA, 120 bp, Artificial Sequence
  ENSG00000006757_22 (sequence is synthesized)
ctgcaaaaccaaatctcattgtataagacttttttgaagtatcttgtatcgactacatatgtatttgaccctgtgggaggatggtacttttctttttaacttttattttaagttcagggg

SEQ ID NO: 7526 - DNA, 120 bp, Artificial Sequence
  ENSG00000006757_23 (sequence is synthesized)
ttgtgtcacgggggtttgttgtaaagattaatttatcacccaggtgttggtacttttctttaaaaatactgtaagatcattgacgtatcagtctgcagcaactttcctacatgaggggaa

SEQ ID NO: 7527 - DNA, 120 bp, Artificial Sequence
  ENSG00000006757_24 (sequence is synthesized)
tacagcggtgtaatgaaacacatacttggtgcacactaggcgctctccggggctggtgcaccaaattctcctgtgagcatgctaccaagcatgctctgcttacctttgctggagtgtgtg

SEQ ID NO: 7528 - DNA, 120 bp, Artificial Sequence
  ENSG00000006757_25 (sequence is synthesized)
ctcatgcagccatactaattgaaaacaggcattcacaacaggatctgcctcacttgtgggatcaaaattttgaggcattgtagaactggcatatagaaaatctgaaaggagtttctgacc

SEQ ID NO: 7529 - DNA, 120 bp, Artificial Sequence
  ENSG00000006757_26 (sequence is synthesized)
cagatactgatatgtttgcagggtaattactgtgattggcagcttgataaattcccaattccctgtgggggcaatttccttatatatttgaatctgtcattaaaaatgtcattagtcttc

SEQ ID NO: 7530 - DNA, 120 bp, Artificial Sequence
  ENSG00000006788_0 (sequence is synthesized)
gaaattgctgtgaccgcagcatctctaggaagacgctttattcctgaaggacactgactgtcacttgggaaccaagaagccctctgcagtcatgagctctgacgcagaaatggccatttt

SEQ ID NO: 7531 - DNA, 120 bp, Artificial Sequence
  ENSG00000006788_1 (sequence is synthesized)
tggagaagcagctccctacctccggaaaccagagaaggagagaatcgaggctcaaaatcgtccattcgattccaagaaagcctgctttgtagcggataataaggaaatgtatgtgaaagg

SEQ ID NO: 7532 - DNA, 120 bp, Artificial Sequence
  ENSG00000006788_2 (sequence is synthesized)
catgatccagactagggaaaatgacaaagtcatagtcaagaccctcgatgaccggatgctcactctgaacaatgaccaggtcttccccatgaaccctcccaaatttgacaagatcgagga

SEQ ID NO: 7533 - DNA, 120 bp, Artificial Sequence
  ENSG00000006788_3 (sequence is synthesized)
catggccatgatgactcacctgcatgaacctgctgttctgtacaacctcaaagagcgctatgcagcctggatgatctacacctactcaggcctcttctgtgtcaccgtcaacccctacaa

SEQ ID NO: 7534 - DNA, 120 bp, Artificial Sequence
  ENSG00000006788_4 (sequence is synthesized)
gtggctgccggtgtacaagcccgaggtggtggctgcctacagaggcaaaaagcgccaggaggccccgccccacatcttctccatctctgacaatgcctatcagttcatgctgactgatcg

SEQ ID NO: 7535 - DNA, 120 bp, Artificial Sequence
  ENSG00000006788_5 (sequence is synthesized)
agacaaccagtctatcctcatcaccggagaatccggggctgggaagactgtgaacaccaagcgtgtcatccagtattttgcaacaattgcagttaccggggacaagaagaaggagacaca

SEQ ID NO: 7536 - DNA, 120 bp, Artificial Sequence
  ENSG00000006788_6 (sequence is synthesized)
gccaggcaaaatgcagggaaccctagaggatcagatcatccaggccaacccactgctggaggcctttggaaatgccaagactgtgaggaatgacaactcctcaagatttgggaagttcat

SEQ ID NO: 7537 - DNA, 120 bp, Artificial Sequence
  ENSG00000006788_7 (sequence is synthesized)
tcggattcattttggagccacaggaaagctggcatcggcagacatcgaaacttatctgttagaaaaatccagagtgacgtttcaattatccagtgagagaagctatcatattttctacca

SEQ ID NO: 7538 - DNA, 120 bp, Artificial Sequence
  ENSG00000006788_8 (sequence is synthesized)
aattatgtcaaacaagaagccagaactaattgacctgcttctgatctccaccaaccccttcgacttccccttcgtgagccaaggagaggtcacggtagccagtatcgatgacagtgaaga

SEQ ID NO: 7539 - DNA, 120 bp, Artificial Sequence
  ENSG00000006788_9 (sequence is synthesized)
actgctggcgacagataatgccattgacatcctgggcttcagctcagaggagaaagtcgggatctacaaactgacgggagccgtgatgcattatgggaacatgaagttcaagcagaagca

SEQ ID NO: 7540 - DNA, 120 bp, Artificial Sequence
  ENSG00000006788_10 (sequence is synthesized)
gcgtgaggagcaggcggagccagacggcaccgaagtggctgacaaagccggatacctgatgggactgaattctgcagaaatgctgaagggcctgtgctgtccaagggtgaaggttggcaa

SEQ ID NO: 7541 - DNA, 120 bp, Artificial Sequence
  ENSG00000006788_11 (sequence is synthesized)
tgaatatgtcactaaagggcaaaatgtccagcaggtgaccaattcggtgggtgctctggccaaagccgtctacgagaagatgttcctgtggatggtcacccgcatcaaccagcagctgga

SEQ ID NO: 7542 - DNA, 120 bp, Artificial Sequence
  ENSG00000006788_12 (sequence is synthesized)
caccaagcagcccaggcagtacttcatcggggtcttggacattgctggctttgagatctttgatttcaacagcctggagcagctgtgcatcaacttcaccaatgagaaactgcaacagtt

SEQ ID NO: 7543 - DNA, 120 bp, Artificial Sequence
  ENSG00000006788_13 (sequence is synthesized)
tttcaaccaccacatgttcgtgctggagcaggaagagtacaagaaggaaggcatcgagtgggagttcattgacttcggaatggacctggctgcctgcatcgagctcatcgagaagcctat

SEQ ID NO: 7544 - DNA, 120 bp, Artificial Sequence
  ENSG00000006788_14 (sequence is synthesized)
gggcatcttctccatcctggaagaggagtgcatgttccccaaggcaacagacacctccttcaagaacaagctgtatgaccagcatcttggaaaatccaacaacttccagaagcccaagcc

SEQ ID NO: 7545 - DNA, 120 bp, Artificial Sequence
  ENSG00000006788_15 (sequence is synthesized)
tgccaaaggcaaggctgaggctcacttctcgctggtgcactatgccggcaccgtggactacaacatcgccggctggctggacaaaaacaaggaccccctgaacgagactgtggtggggct

SEQ ID NO: 7546 - DNA, 120 bp, Artificial Sequence
  ENSG00000006788_16 (sequence is synthesized)
gtaccagaagtcttcgctgaagcttctctccttccttttttccaactatgctggtgcagagacaggcgactccggaggaagcaagaagggcgggaagaagaagggctcctctttccagac

SEQ ID NO: 7547 - DNA, 120 bp, Artificial Sequence
  ENSG00000006788_17 (sequence is synthesized)
cgtgtcggccgtgttcagggaaaatttaaacaaattgatgactaacttaaggagcacccaccctcactttgtacgatgtctgattcccaatgagaccaagactcctggtgtgatggacca

SEQ ID NO: 7548 - DNA, 120 bp, Artificial Sequence
  ENSG00000006788_18 (sequence is synthesized)
ctacttggtcatgcaccagctgcgctgtaacggggtcctcgagggcatccggatttgcaggaagggattccccagccggatcctctatgctgacttcaagcagcggtaccggatcctcaa

SEQ ID NO: 7549 - DNA, 120 bp, Artificial Sequence
  ENSG00000006788_19 (sequence is synthesized)
tgccagtgctatccctgaagggcagttcattgacagcaaaaatgcctcagagaagctcctcaactccatcgatgtggaccgggagcagttcaggttcggcaacaccaaggtgtttttcaa

SEQ ID NO: 7550 - DNA, 120 bp, Artificial Sequence
  ENSG00000006788_20 (sequence is synthesized)
agctgggctcctgggacttttggaggagatgagagatgagaagctggtgacgctgatgacaagcacgcaggcggtgtgcagggggtacctgatgcgggtggagttcaagaagatgatgga

SEQ ID NO: 7551 - DNA, 120 bp, Artificial Sequence
  ENSG00000006788_21 (sequence is synthesized)
gaggagggactccatcttctgcatccagtacaacatccgctcttttatgaacgtcaagcactggccctggatgaacctgttcttcaaaatcaagcccctgctgaagagtgcagaggccga

SEQ ID NO: 7552 - DNA, 120 bp, Artificial Sequence
  ENSG00000006788_22 (sequence is synthesized)
gaaggagatggccaccatgaaggaagactttgagaggaccaaggaagaactggcccgatctgaggctcgccggaaggagctggaggagaaaatggtctccctcctgcaggagaagaatga

SEQ ID NO: 7553 - DNA, 120 bp, Artificial Sequence
  ENSG00000006788_23 (sequence is synthesized)
cctccaattgcaggtccagtctgaaacagaaaatctgatggacgctgaggaacggtgtgaaggactcatcaaaagcaagatcctactggaagcaaaagtcaaggagctgacggagagatt

SEQ ID NO: 7554 - DNA, 120 bp, Artificial Sequence
  ENSG00000006788_24 (sequence is synthesized)
tgaaaaggagaagcatgccacagagaacaaggtaaagaatctttccgaagaaatgacagcacttgaagaaaacatttccaaattgaccaaagaaaagaaatctctacaggaggcccatca

SEQ ID NO: 7555 - DNA, 120 bp, Artificial Sequence
  ENSG00000006788_25 (sequence is synthesized)
gcaaacactggatgatcttcaggtggaagaagataaagtcaatggtctaatcaaaataaatgccaagcttgaacagcaaacagatgatcttgagggttccttagagcaggagaagaaact

SEQ ID NO: 7556 - DNA, 120 bp, Artificial Sequence
  ENSG00000006788_26 (sequence is synthesized)
gcgggcggacttggaaagggcgaagaggaagctggaaggagatctgaaaatgtcccaggaatccattatggatctagaaaatgacaagcagcaaatagaagagaaattgaaaaagaagga

SEQ ID NO: 7557 - DNA, 120 bp, Artificial Sequence
  ENSG00000006788_27 (sequence is synthesized)
gtttgaactcagtcagttacaagccaaaatagatgacgaacaagtccacagtttgcagtttcaaaagaagattaaagaactgcaagcccgcatagaagagctggaggaggaaattgaagc

SEQ ID NO: 7558 - DNA, 120 bp, Artificial Sequence
  ENSG00000006788_28 (sequence is synthesized)
ggaacacacgctcagagccaagattgagaagcagcgctcagatctggccagggaactggaggagatcagcgagaggctggaagaagccagtggggccacttcagcccagattgagatgaa

SEQ ID NO: 7559 - DNA, 120 bp, Artificial Sequence
  ENSG00000006788_29 (sequence is synthesized)
caagaagagggaggctgagttccagaaaatgcgcagggacctggaggaggccaccctgcagcacgaagccacagcagccaccctgaggaagaagcaagcagatagtgtggccgagcttgg

SEQ ID NO: 7560 - DNA, 120 bp, Artificial Sequence
  ENSG00000006788_30 (sequence is synthesized)
ggagcagattgacaacctgcagcgggtgaagcagaagctggagaaggagaagagcgagctgaagatggagattgacgacatggccagcaacatcgaggctctctccaagtcaaagagtaa

SEQ ID NO: 7561 - DNA, 120 bp, Artificial Sequence
  ENSG00000006788_31 (sequence is synthesized)
catagaaagaacgtgccggacggtagaagatcaatttagtgaaatcaaagccaaggacgagcaacagacacagttgatccatgatctgaacatgcagaaagcaagactgcagacccaaaa

SEQ ID NO: 7562 - DNA, 120 bp, Artificial Sequence
  ENSG00000006788_32 (sequence is synthesized)
tggggagctgagccaccgagtggaagagaaggagtctctgatttcacagctgaccaaaagcaagcaggccctcacccagcagctggaggagcttaagaggcaaatggaagaagaaaccaa

SEQ ID NO: 7563 - DNA, 120 bp, Artificial Sequence
  ENSG00000006788_33 (sequence is synthesized)
ggccaagaacgccatggcgcacgccctgcagtcctcccgccacgactgtgacctgctgcgggaacagtatgaggaggagcaggaagccaaggccgagctgcagagggcgctgtccaaggc

SEQ ID NO: 7564 - DNA, 120 bp, Artificial Sequence
  ENSG00000006788_34 (sequence is synthesized)
caacagtgaggttgcccagtggaggaccaaatacgagacggacgccattcagcgcacagaggagctggaggaggccaagaaaaaactggcccagaggctccaggaagcagaggagaacac

SEQ ID NO: 7565 - DNA, 120 bp, Artificial Sequence
  ENSG00000006788_35 (sequence is synthesized)
ggagacggcgaactccaagtgcgcatcgttggagaaaaccaagcagaggctgcagggagaggtggaggatctgatgcgggatctggagcgctcccacaccgcctgtgccacactggacaa

SEQ ID NO: 7566 - DNA, 120 bp, Artificial Sequence
  ENSG00000006788_36 (sequence is synthesized)
gaagcagaggaacttcgacaaggtccttgcagagtggaagcaaaagctggacgaaagccaggctgagttggaagctgctcagaaggagtccaggtcactcagcactgaactcttcaagat

SEQ ID NO: 7567 - DNA, 120 bp, Artificial Sequence
  ENSG00000006788_37 (sequence is synthesized)
gaggaatgcctatgaggaggtggtggaccagttagagacactgaggcgagagaacaaaaatctgcaagaagagatttccgacttaactgagcagattgcagaaactggcaagaatcttca

SEQ ID NO: 7568 - DNA, 120 bp, Artificial Sequence
  ENSG00000006788_38 (sequence is synthesized)
ggaagcggaaaagaccaagaagctagtggagcaggaaaagtcagatctgcaggtcgccttagaagaagtggagggttccttggaacacgaggagagcaagatcttgcgcgtgcagctaga

SEQ ID NO: 7569 - DNA, 120 bp, Artificial Sequence
  ENSG00000006788_39 (sequence is synthesized)
gctgagccaggtgaaatccgagctagaccgcaaggtcattgagaaggatgaagaaatcgagcagctaaaaagaaacagccagcgggcagcagaggccctgcagagcgtgctggatgctga

SEQ ID NO: 7570 - DNA, 120 bp, Artificial Sequence
  ENSG00000006788_40 (sequence is synthesized)
aatccgcagccggaacgacgccctgaggctaaagaagaagatggagggagaccttaatgagatggagattcagctgggccactccaaccgccagatggcagagacccagaagcatctgcg

SEQ ID NO: 7571 - DNA, 120 bp, Artificial Sequence
  ENSG00000006788_41 (sequence is synthesized)
cacggtccagggccagctcaaggactcccagctgcatctcgatgacgccctgaggagcaatgaggacctcaaggagcagctggccatcgtggagcgcaggaatggcctcctgctggagga

SEQ ID NO: 7572 - DNA, 120 bp, Artificial Sequence
  ENSG00000006788_42 (sequence is synthesized)
gctggaggaaatgaaggtggccctggaacagacggagcggacccgcaggctgtcagagcaggagctgctggacgccagcgaccgcgtgcagctcctgcactcccagaacacaagcctgat

SEQ ID NO: 7573 - DNA, 120 bp, Artificial Sequence
  ENSG00000006788_43 (sequence is synthesized)
aaataccaagaaaaaactggaggctgacatagctcagtgccaggcagaggtggagaactcgatccaggagtccaggaacgcagaggagaaggccaagaaggccatcacggatgctgccat

SEQ ID NO: 7574 - DNA, 120 bp, Artificial Sequence
  ENSG00000006788_44 (sequence is synthesized)
gatggctgaggagctaaagaaggaacaggacaccagcgcccacctggagcggatgaagaagaacctggagcagacggtgaaggacctgcagcaccgtctagatgaggctgaacaactggc

SEQ ID NO: 7575 - DNA, 120 bp, Artificial Sequence
  ENSG00000006788_45 (sequence is synthesized)
gctgaagggcgggaagaagcagatccagaaactggagaaccgggtgcgggagctggaaaatgagcttgatgtggaacagaagaggggagctgaagccctgaagggagcccacaagtacga

SEQ ID NO: 7576 - DNA, 120 bp, Artificial Sequence
  ENSG00000006788_46 (sequence is synthesized)
acgcaaagtcaaggagatgacttaccaggctgaggaggaccacaagaatatccttaggctccaggacctggtggacaagctgcaggccaaagtgaagtcttacaagaggcaggctgagga

SEQ ID NO: 7577 - DNA, 120 bp, Artificial Sequence
  ENSG00000006788_47 (sequence is synthesized)
ggcggaggagcaggccaacacgcagctgtccagatgccggagagtccagcatgagctagaggaggccgcggagagggcggacatcgctgagtcccaggtcaacaagctgagggccaagag

SEQ ID NO: 7578 - DNA, 120 bp, Artificial Sequence
  ENSG00000006788_48 (sequence is synthesized)
ccgagacgtgggcagccagaagatggaagaatgaggctcacctgatgctcgttgccatgggacacctccgagagagtggagggaaaatgtgtgagaaataaattctcctaaatactcgga

SEQ ID NO: 7579 - DNA, 120 bp, Artificial Sequence
  ENSG00000006788_49 (sequence is synthesized)
gagagatcagggctacgacgcatttacatctaacaagtaaatggtgctcccccaaatatagccaagttagagtgctgggctggcagatttgggagtataaagagagctggggggtcacac

SEQ ID NO: 7580 - DNA, 120 bp, Artificial Sequence
  ENSG00000006831_0 (sequence is synthesized)
agaagcggcatcgcggcggcggcagcggcggcggctacaccgggcttggccccctccctcctccgttcccccctcctcccccctcccctcagcggtggctcccaagaagtccgagacacg

SEQ ID NO: 7581 - DNA, 120 bp, Artificial Sequence
  ENSG00000006831_1 (sequence is synthesized)
cggatcaactcactatcctgaaggtccattctcccaagaagaggggacagaaagacagatctatttgtaagaaaggcttgggtatcccatgaacgagccaacagaaaaccgattggggtg

SEQ ID NO: 7582 - DNA, 120 bp, Artificial Sequence
  ENSG00000006831_2 (sequence is synthesized)
cagcaggactccagagccagatataaggctcagaaaagggcaccaactggatggtacacgaagaggtgataatgacagccaccaaggagatttggagcccattttagaggcatctgttct

SEQ ID NO: 7583 - DNA, 120 bp, Artificial Sequence
  ENSG00000006831_3 (sequence is synthesized)
atcttcccatcataaaaaaagctctgaggaacatgaatacagtgatgaagctcctcaggaagatgagggctttatgggcatgtcccctctcttacaagcccatcatgctatggaaaaaat

SEQ ID NO: 7584 - DNA, 120 bp, Artificial Sequence
  ENSG00000006831_4 (sequence is synthesized)
ggaagaatttgtttgtaaggtatgggaaggtcggtggcgagtgatccctcatgatgtactaccagactggctcaaggataatgacttcctcttgcatggacaccggcctcctatgccttc

SEQ ID NO: 7585 - DNA, 120 bp, Artificial Sequence
  ENSG00000006831_5 (sequence is synthesized)
tttccgggcctgttttaagagcattttcagaatacacacagaaacaggcaacatttggacacatctcttaggttgtgtattcttcctgtgcctggggatcttttatatgtttcgcccaaa

SEQ ID NO: 7586 - DNA, 120 bp, Artificial Sequence
  ENSG00000006831_6 (sequence is synthesized)
tatctcctttgtggcccctctgcaagagaaggtggtctttggattatttttcttaggagccattctctgcctttctttttcatggctcttccacacagtctactgccactcagagggggt

SEQ ID NO: 7587 - DNA, 120 bp, Artificial Sequence
  ENSG00000006831_7 (sequence is synthesized)
ctctcggctcttctctaaactggattactctggtattgctcttctgattatgggaagttttgttccttggctttattattctttctactgtaatccacaaccttgcttcatctacttgat

SEQ ID NO: 7588 - DNA, 120 bp, Artificial Sequence
  ENSG00000006831_8 (sequence is synthesized)
tgtcatctgtgtgctgggcattgcagccattatagtctcccagtgggacatgtttgccacccctcagtatcggggagtaagagcaggagtgtttttgggcctaggcctgagtggaatcat

SEQ ID NO: 7589 - DNA, 120 bp, Artificial Sequence
  ENSG00000006831_9 (sequence is synthesized)
tcctaccttgcactatgtcatctcggaggggttccttaaggccgccaccatagggcagataggctggttgatgctgatggccagcctctacatcacaggagctgccctgtatgctgcccg

SEQ ID NO: 7590 - DNA, 120 bp, Artificial Sequence
  ENSG00000006831_10 (sequence is synthesized)
gatccccgaacgctttttccctggcaaatgtgacatctggtttcactctcatcagctgtttcatatctttgtggttgctggagcttttgttcacttccatggtgtctcaaacctccagga

SEQ ID NO: 7591 - DNA, 120 bp, Artificial Sequence
  ENSG00000006831_11 (sequence is synthesized)
gtttcgtttcatgatcggcgggggctgcagtgaagaggatgcactgtgatacctaccagtctccagggactatgaccctaaaccagggcctgcggcacttgcgggcctccctgctggcta

SEQ ID NO: 7592 - DNA, 120 bp, Artificial Sequence
  ENSG00000006831_12 (sequence is synthesized)
ctgatgccagtaccagaggagccccaaaactttgacagcctcgtgggctttgtgacggcccagtggctctgcgtggtacatgactgagaagagaaaaacaaaaataaatcatacctcaaa

SEQ ID NO: 7593 - DNA, 120 bp, Artificial Sequence
  ENSG00000006831_13 (sequence is synthesized)
ggatggagtgcatcaattgggagaaaaggagacatagcccaaaccctggcttattcttgggatctactgattgcgggctctgcaagacccttggcaaactggcttctgatccatatcata

SEQ ID NO: 7594 - DNA, 120 bp, Artificial Sequence
  ENSG00000006831_14 (sequence is synthesized)
tttatttgtagaagatggcgaaacagtttagctggtggttctttcttctccctttctctctctctatgacaataatacaaaccaatttaagtgaacatttatatccgataaggggtggga

SEQ ID NO: 7595 - DNA, 120 bp, Artificial Sequence
  ENSG00000006831_15 (sequence is synthesized)
gtgtgattttaaatgctcttttgggagaacaaagaaattaatgtaaataagatttctaactgtttaaataagactttatataaatgtttaaaacataggggtaagggagggagggagaat

SEQ ID NO: 7596 - DNA, 120 bp, Artificial Sequence
  ENSG00000006831_16 (sequence is synthesized)
atgaaacatgcaagtaccacacactgtttgaattttgcacaaaaagtgactgtaggatcaggtgatagccccggaatgtacagtgtcttggtgcaccaagatgccttctaaaggctgaca

SEQ ID NO: 7597 - DNA, 120 bp, Artificial Sequence
  ENSG00000006831_17 (sequence is synthesized)
taccttggaccctaatggggcagagagtatagccctagcccagtggtgacatgaccactccctttgggaggcctgaggtagaggggagtggtatgtgttttctcagtggaagcagcacat

SEQ ID NO: 7598 - DNA, 120 bp, Artificial Sequence
  ENSG00000006831_18 (sequence is synthesized)
gagtgggtgacaggatgttagataaaggctctagttagggtgtcattgtcatttgagagactgacacactcctagcagctggtaaaggggtgctggaggccatggaggagctctagaaac

SEQ ID NO: 7599 - DNA, 120 bp, Artificial Sequence
  ENSG00000006831_19 (sequence is synthesized)
attagcatgggctgatctgattacttcctggcatcccgctcacttttatgggaagtcttattagagggatgggacagttttccatatccttgctgtggagctctggaacactctctaaat

SEQ ID NO: 7600 - DNA, 120 bp, Artificial Sequence
  ENSG00000006831_20 (sequence is synthesized)
ttccctctattaaaaatcactgccctaactacacttcctccttgagggaatagaaatggacctttctctgacatagttcttggcatgggagccagccacaaatgagattctgacgtgtcc

SEQ ID NO: 7601 - DNA, 120 bp, Artificial Sequence
  ENSG00000006831_21 (sequence is synthesized)
aggtttctcctgagctcatctacatagattggtagacccttcctttggattaggaaagatgagttttacctctggtacactgtcttggtaagcctggatgtgacagacacctcggctctc

SEQ ID NO: 7602 - DNA, 120 bp, Artificial Sequence
  ENSG00000006831_22 (sequence is synthesized)
cttgaataagaaagccagcagaactcttaaagccagttgtagtacggagttgtcagcactcactgaacctcactttacagggataagagtggtgtggcattttaaatacaatggtatgtt

SEQ ID NO: 7603 - DNA, 120 bp, Artificial Sequence
  ENSG00000006831_23 (sequence is synthesized)
attgccagggagtgaggtacaagacgatggctcatgtcacaggcctacctgatacggtgtcagagaaagtggtggggaaaggatctggttcatggaattctgatcttggcccataggtga

SEQ ID NO: 7604 - DNA, 120 bp, Artificial Sequence
  ENSG00000006831_24 (sequence is synthesized)
accaccaaaatagtgctcgagtcttaggttactgtcatcaaagacttgggatgactccattatatcctggggttgtgggtattagaactaaatatggaggtcctgagcatggggactggc

SEQ ID NO: 7605 - DNA, 120 bp, Artificial Sequence
  ENSG00000006831_25 (sequence is synthesized)
gtcctcagtaggtgtttgggaatatgggaagggtctcctatttattcaatagagttttctcagttattttcctcccttgcccttgcaatctccagcaaaaggtgggatctaggaagaaag

SEQ ID NO: 7606 - DNA, 120 bp, Artificial Sequence
  ENSG00000006831_26 (sequence is synthesized)
aatccagtgtagaagttgagaagaacttgaacgttttggttctggataaggtcactgtcctaggtgctaggtggaccgagcaaaagactcagtggatgaactggtgcagtgcctgacaga

SEQ ID NO: 7607 - DNA, 120 bp, Artificial Sequence
  ENSG00000006831_27 (sequence is synthesized)
ataaagaacagtattaatccctttgagaaagcatagtccagcaggacagtggccatttggacagaagcccacttagtttcttgggagcaacagcacgtatcagaagccagacttgctctt

SEQ ID NO: 7608 - DNA, 120 bp, Artificial Sequence
  ENSG00000006831_28 (sequence is synthesized)
cggtcatgcactttgggatacagcgtataggtgcagccctgtcacaacaccaacagaagtagcagcctctgggtgcagtcacccacaccccaaagctggaaggatctggttcaacatagc

SEQ ID NO: 7609 - DNA, 120 bp, Artificial Sequence
  ENSG00000006831_29 (sequence is synthesized)
acaaacccttaggaaaaatgaaattaacatcactgatgtgtaatccagtaaaatctccctttttcgggtgtgtatgtgggcatgtgcccatttctatgtgtgtgtctacgtgcagctcac

SEQ ID NO: 7610 - DNA, 120 bp, Artificial Sequence
  ENSG00000006831_30 (sequence is synthesized)
taccaacagcctcatgtgcacttgacctgacagtgctcgctgagaactctcaccaggttggcgcctgaatgccttactctcagcagtcagaggcttgcttgctctgtgcagatttttaat

SEQ ID NO: 7611 - DNA, 120 bp, Artificial Sequence
  ENSG00000006831_31 (sequence is synthesized)
tttcttttttggccctaggctggttgggacctctacagcttcattctttcaccattaaatagtggcctttttcagtattttccctcttcccctttataaattatgctaaagccacaaagc

SEQ ID NO: 7612 - DNA, 120 bp, Artificial Sequence
  ENSG00000006831_32 (sequence is synthesized)
acatttttggggatcatagaaggttggggttccagaaaggcatctgtgtgatggttccattgatgtgggatttccctacttgctgtattctcagtttctaataaaaagaaccaaatgaaa

SEQ ID NO: 7613 - DNA, 120 bp, Artificial Sequence
  ENSG00000006831_33 (sequence is synthesized)
agaagtggcttcattatatcttctaagaagtagcagcagtgtctgatttctttttagattatgcccttagataagtttttatattctgtatattcagtttatgaagctgaagtatttctg

SEQ ID NO: 7614 - DNA, 120 bp, Artificial Sequence
  ENSG00000006831_34 (sequence is synthesized)
ataccaacaatgttggaagtaaaccacaattttggataggcttcagttatttggaagatttttctcattgaacttttgattcagatattgttgtaatgcagaaggattgaaaacagaatc

SEQ ID NO: 7615 - DNA, 120 bp, Artificial Sequence
  ENSG00000006831_35 (sequence is synthesized)
tgttgattcttgtctaaggccttgttttgaccttaagaatttcattataattccacaagggaaatgtattgattgtgtcatttggctcccagtctctgtccttgactgtttctgtgattg

SEQ ID NO: 7616 - DNA, 120 bp, Artificial Sequence
  ENSG00000006831_36 (sequence is synthesized)
tggtgactggcatgtgggataggggtggaagggaatctttttttggtgctgcagaagataaagggctctaccctcctgtggagtagtgtgataccccaagaatggagagaacagaaattc

SEQ ID NO: 7617 - DNA, 120 bp, Artificial Sequence
  ENSG00000006831_37 (sequence is synthesized)
ggtggctcccaagaagtccgagacacgcggtgaggcggcgacgggctccggttgatctcccttttgtgaggtggtttttaagtgaatcattaaagagcaaaggagaagttttcccgtggc

SEQ ID NO: 7618 - DNA, 120 bp, Artificial Sequence
  ENSG00000006831_38 (sequence is synthesized)
tcccacgctgctattcaaaacttcctggatgaaatctttagcatcagttgggctcattagcacctctactaagagaagcaagcacagaatggaagggagagcaaatcataactttttaaa

SEQ ID NO: 7619 - DNA, 120 bp, Artificial Sequence
  ENSG00000006831_39 (sequence is synthesized)
aagttatttctccttagttaaaagtttggaagagaagcaagttgaaactgtaggctgattatgtaaaagtttaagttatcagctctcttatatgtaatgcaggttgattataagtttctg

SEQ ID NO: 7620 - DNA, 120 bp, Artificial Sequence
  ENSG00000006831_40 (sequence is synthesized)
ggctgttgtgacaacaagaaaattatgtttattattaaaaacttgtttatactgcatatatgtgaagggcattatactgtgacaaagctaacaataaaacatacattttaatatttcaga

SEQ ID NO: 7621 - DNA, 120 bp, Artificial Sequence
  ENSG00000006831_41 (sequence is synthesized)
gtgattcactttcttcctttttattttcatgtatttgagggtaagcacagaacttcagaaatgtatttggatttgccattttgttttctgaatttctaatgatgaattttctgactggtt

SEQ ID NO: 7622 - DNA, 120 bp, Artificial Sequence
  ENSG00000006831_42 (sequence is synthesized)
agatcttgtcctcaaaccaggccaagtaaaagttgctatacaaaatgtggtttcatattgtagtgaccactgagaagaaagtattatttaatagaagtaatctgatcttttaaaatgcat

SEQ ID NO: 7623 - DNA, 120 bp, Artificial Sequence
  ENSG00000006831_43 (sequence is synthesized)
tacttatatgcactgctaattttcagtttggcctgaagtagaatatggactgtaattttttctccataatgattgtatattaaagaaagaatactgtagaggaaagaatagtctttccaa

SEQ ID NO: 7624 - DNA, 120 bp, Artificial Sequence
  ENSG00000006831_44 (sequence is synthesized)
caaatggtgctgggataactgagccatatgtaaaagaatgatcccgaactcacatatgcaaaagtgaacccaaaatggatcaaagacccaaacataagagcaaaaactataaaatcctta

SEQ ID NO: 7625 - DNA, 90 bp, Artificial Sequence
  ENSG00000006831_45 (sequence is synthesized)
tttctaagttttaaactttgtgctgatctgagtggtgtgatgaaatctctcaccttccttgccctgtcctgccttacccaggaaatgaat

SEQ ID NO: 7626 - DNA, 120 bp, Artificial Sequence
  ENSG00000006837_0 (sequence is synthesized)
agaacgcagcaactccgccggcgtttccatggtggcaagtggccggttccttgcggggctgagcaacaaagtagtatcagtgttcggtggctccactggaactacgcagagccagaccag

SEQ ID NO: 7627 - DNA, 120 bp, Artificial Sequence
  ENSG00000006837_1 (sequence is synthesized)
cgggaccacagaatgggctgaggcggcggcggctgtttggataaagtcaacagcgggacgtggggcgtgacgccgtagtaaaagcccagcttgaaaatggagatgtatgaaacccttgga

SEQ ID NO: 7628 - DNA, 120 bp, Artificial Sequence
  ENSG00000006837_2 (sequence is synthesized)
aaagtgggagagggaagttacggaacagtcatgaaatgtaaacataagaatactgggcagatagtggccattaagatattttatgagagaccagaacaatctgtcaacaaaattgcgatg

SEQ ID NO: 7629 - DNA, 120 bp, Artificial Sequence
  ENSG00000006837_3 (sequence is synthesized)
agagaaataaagtttctaaagcaatttcatcacgaaaacctggtcaatctgattgaagtttttagacagaaaaagaaaattcatttggtatttgaatttattgaccacacagtattagat

SEQ ID NO: 7630 - DNA, 120 bp, Artificial Sequence
  ENSG00000006837_4 (sequence is synthesized)
gagttacaacattattgtcatggactagagagtaagcgacttagaaaatacctcttccagatccttcgagcaattgactatcttcacagtaataatatcattcatcgagatataaaacct

SEQ ID NO: 7631 - DNA, 120 bp, Artificial Sequence
  ENSG00000006837_5 (sequence is synthesized)
gagaatattttagtatcccagtcaggaattactaagctctgtgattttggttttgcacgaacactagcagctcctggggacatttatacggactatgtggccacacgctggtatagagct

SEQ ID NO: 7632 - DNA, 120 bp, Artificial Sequence
  ENSG00000006837_6 (sequence is synthesized)
cccgaattagtattaaaagatacttcttatggaaaacctgtggatatctgggctttgggctgtatgatcattgagatggccactggaaatccctatcttcctagtagttctgatttggat

SEQ ID NO: 7633 - DNA, 120 bp, Artificial Sequence
  ENSG00000006837_7 (sequence is synthesized)
ttactccataaaattgttttgaaagtgggcaatttgtcacctcacttgcagaatatcttttccaagagccccatttttgctggggtagttcttcctcaagttcaacaccccaaaaatgca

SEQ ID NO: 7634 - DNA, 120 bp, Artificial Sequence
  ENSG00000006837_8 (sequence is synthesized)
agaaaaaaatatccaaagcttaatggattgttggcagatatagttcatgcttgtttacaaattgatcctgctgacaggatatcatctagtgatcttttgcatcatgagtattttactaga

SEQ ID NO: 7635 - DNA, 120 bp, Artificial Sequence
  ENSG00000006837_9 (sequence is synthesized)
caattcattaataaagccaaaagagagttctaaagaaaatgaactcaggaaagatgaaagaaaaacagtttataccaatacactgctaagtagttcagttttgggaaaggaaatagaaaa

SEQ ID NO: 7636 - DNA, 120 bp, Artificial Sequence
  ENSG00000006837_10 (sequence is synthesized)
agagaaaaagcccaaggagatcaaagtcagagttattaaagtcaaaggaggaagaggagatatctcagaaccaaaaaagaaagagtatgaaggtggacttggtcaacaggatgcaaatga

SEQ ID NO: 7637 - DNA, 120 bp, Artificial Sequence
  ENSG00000006837_11 (sequence is synthesized)
aaatgttcatcctatgtctccagatacaaaacttgtaaccattgaaccaccaaaccctatcaatcccagcactaactgtaatggcttgaaagaaaatccacattgcggaggttctgtgac

SEQ ID NO: 7638 - DNA, 120 bp, Artificial Sequence
  ENSG00000006837_12 (sequence is synthesized)
aatgccacccatcaatctaactaacagtaatttgatggctgcaaatctcagttcaaatctctttcaccccagtgtgaggttaactgaaagagcaaaaaagagacgcacttcttcacaatc

SEQ ID NO: 7639 - DNA, 120 bp, Artificial Sequence
  ENSG00000006837_13 (sequence is synthesized)
tattggacaagttatgcctaatagcaggcaagaggatccaggtcctattcaaagccaaatggagaagggtatatttaatgagcgaacaggtcacagtgaccaaatggcaaatgagaacaa

SEQ ID NO: 7640 - DNA, 120 bp, Artificial Sequence
  ENSG00000006837_14 (sequence is synthesized)
aaggaagctgaatttttccagatctgacaggaaagaattccattttccagaattgcctgtcacaatacagtcaaaagatacaaaaggaatggaagttaaacagataaaaatgctgaagag

SEQ ID NO: 7641 - DNA, 120 bp, Artificial Sequence
  ENSG00000006837_15 (sequence is synthesized)
ggagtcaaagaaaacagagtcatctaagataccaactttacttaacgtggatcaaaatcaagaaaaacaagagggtggagatggccattgcgaggggaagaatttgaagagaaacaggtt

SEQ ID NO: 7642 - DNA, 120 bp, Artificial Sequence
  ENSG00000006837_16 (sequence is synthesized)
ttttttctggtagtgtcttttcttttacatagtccaaaaaatacaagatgacaactcttcccgttttatttatctacaatagaagtgtgatgtgagttgttgttaagacagccatccatg

SEQ ID NO: 7643 - DNA, 120 bp, Artificial Sequence
  ENSG00000006837_17 (sequence is synthesized)
tgcatgagcatcatccagctttttttgttagcaaaacatttactgttttcttttcccttttaagactctgttgatgtgataatttgatttggaattataaagtcatctcttctctgccta

SEQ ID NO: 7644 - DNA, 120 bp, Artificial Sequence
  ENSG00000006837_18 (sequence is synthesized)
acttaacgtggatcaaaatcaagaaaaacaagagaatacaggaaatgcacaaactgaaaggaagaagaacttgccagatgtagagtagaaaatgcagcagctgaaaattcagggaatccc

SEQ ID NO: 7645 - DNA, 120 bp, Artificial Sequence
  ENSG00000006837_19 (sequence is synthesized)
agaatcactgtatggttttttaaaaatcctttttattaatgttacatacacaaaaatgctaactagataattttacaggtatatcgtaaatcctgttagttatatgtacattcacctaaa

SEQ ID NO: 7646 - DNA, 120 bp, Artificial Sequence
  ENSG00000006837_20 (sequence is synthesized)
tttgtttttaaatttattaatctttaaattattcatgttttcttaatttgaacatgaatttataaaaactacctgactggtacatcctaataaaattgcagcttacatttagtcatataa

SEQ ID NO: 7647 - DNA, 120 bp, Artificial Sequence
  ENSG00000006837_21 (sequence is synthesized)
agaaacctaaataatacaacattcctgtataatggtatttcaaagaatcgtgttcatagtgtctgtatgtaaactgaacttgaagaaaatatattgaaattaaagctgtataatgggcca

SEQ ID NO: 7648 - DNA, 120 bp, Artificial Sequence
  ENSG00000006837_22 (sequence is synthesized)
gctgtctgcctgctgtcctattttcacaaatatttgctctcagctaactatcaggtacgtctttatcagcggcatgaagacagaccaatacagtgaattggtaccagtagagtggggcat

SEQ ID NO: 7649 - DNA, 82 bp, Artificial Sequence
  ENSG00000006837_23 (sequence is synthesized)
aatggattgttggcagatatagttcatagacggggtttcaccgtgttggctgtggttggccaggctgctcttgaactcctga

SEQ ID NO: 7650 - DNA, 120 bp, Artificial Sequence
  ENSG00000007001_0 (sequence is synthesized)
tatttgataggaaaatttaaaatgctaaaggaaaaattttcttagcaatttcacaggaaaacctaagttttaagagaggttatcattctgactgggaactgaactattatgactaggtct

SEQ ID NO: 7651 - DNA, 120 bp, Artificial Sequence
  ENSG00000007001_1 (sequence is synthesized)
ataatttaataacaagtcacaatatctctctttcttgacatcaatttaaggtgacttttcacatagtagagagaatggcttcagttatacctgcctccaataggtccatgagatctgaca

SEQ ID NO: 7652 - DNA, 120 bp, Artificial Sequence
  ENSG00000007001_2 (sequence is synthesized)
ggaatacatatgttggaaaaaggtttgttcacgttaaaaatccttacttggatttgatggatgaagacattctctatcacttggatttgggaacaaaaacacacaacctaccagcaatgt

SEQ ID NO: 7653 - DNA, 120 bp, Artificial Sequence
  ENSG00000007001_3 (sequence is synthesized)
ttggagatgtaaagtttgtctgtgtcggtgggagccccaacagaatgaaagcatttgcactgtttatgcacaaggagctcgggtttgaggaagctgaagaagacataaaagacatctgtg

SEQ ID NO: 7654 - DNA, 120 bp, Artificial Sequence
  ENSG00000007001_4 (sequence is synthesized)
ctgggacagacagatactgtatgtacaaaaccgggcctgtgctcgccatcagtcacggcatgggcatcccctccatttctattatgcttcatgaactcatcaaattactccaccatgcac

SEQ ID NO: 7655 - DNA, 120 bp, Artificial Sequence
  ENSG00000007001_5 (sequence is synthesized)
ggtgctgcgatgtcaccattattagaatcggtacatcagggggaatagggattgcaccagggactgttgtaataacggatatagctgtagactccttctttaagccccggtttgaacagg

SEQ ID NO: 7656 - DNA, 120 bp, Artificial Sequence
  ENSG00000007001_6 (sequence is synthesized)
tcattttggacaacattgtcacccgaagtactgaactggacaaagaactgtctgaagaactgttcaactgtagcaaagaaatccccaacttcccaaccctcgttggacatacaatgtgta

SEQ ID NO: 7657 - DNA, 120 bp, Artificial Sequence
  ENSG00000007001_7 (sequence is synthesized)
cctatgatttttatgaaggccaaggccgactagatggagcactgtgctccttttccagagaaaaaaagttagactacttgaagagagcatttaaagctggtgtcaggaatattgaaatgg

SEQ ID NO: 7658 - DNA, 120 bp, Artificial Sequence
  ENSG00000007001_8 (sequence is synthesized)
aatctacagtgtttgcagctatgtgtggactctgtggtctaaaagctgctgtggtctgtgtgacacttctcgacagactcgactgtgatcagatcaacttgcctcatgatgtcctggtgg

SEQ ID NO: 7659 - DNA, 120 bp, Artificial Sequence
  ENSG00000007001_9 (sequence is synthesized)
ctagacgtcctaactgggcagcccaaccctcccctgcaagtttgtagctcaagttgtaatgtgaaagtcatattttatttgtggcatttttatatagttctcatccacatgctaaatgga

SEQ ID NO: 7660 - DNA, 120 bp, Artificial Sequence
  ENSG00000007001_10 (sequence is synthesized)
tggaaagactttatgaaatccttctctcttaaaaaggaatttattgtaaaagaatactcacactaaattaaattcaaatttcattttagaataagttaactaaatcagtctaataattaa

SEQ ID NO: 7661 - DNA, 120 bp, Artificial Sequence
  ENSG00000007001_11 (sequence is synthesized)
ttaaaactcctggattatgacatttggagtttcatatgcagcattaattaagctcacatcaaaatagaccagccatttgcacatagttaccagtcactctgtttctgaaaccaatccaga

SEQ ID NO: 7662 - DNA, 120 bp, Artificial Sequence
  ENSG00000007001_12 (sequence is synthesized)
aattcatgttagaacattgtcaggcacttctaggtattggacaagtgacagaaactgatcatccatattcaaaatatttacagaaaaaagtgtcagtgaaatgtaggtctatatggaaaa

SEQ ID NO: 7663 - DNA, 120 bp, Artificial Sequence
  ENSG00000007001_13 (sequence is synthesized)
gttaccattaggaaaatatggccatactgcttttttacccctgcactatttcagtgcaccacagaataggattcgagatttacatatgcctgtttgtgattttatctcagaatataacaa

SEQ ID NO: 7664 - DNA, 120 bp, Artificial Sequence
  ENSG00000007001_14 (sequence is synthesized)
ctctggattacattttcctctcaactgaaaaccctcagtaatgcaaagaaaggccttcctttttcttcagaatcacaagtgactaaattgccttctagccattttttcttgtaaaaaaag

SEQ ID NO: 7665 - DNA, 120 bp, Artificial Sequence
  ENSG00000007001_15 (sequence is synthesized)
tgttttgaggaggctgtattttttattccatttcaatattaaccaaataggctgagaaattcatagcaattgaattaagacttgagttcaagatgttaaaggaatccttttgtatgactt

SEQ ID NO: 7666 - DNA, 120 bp, Artificial Sequence
  ENSG00000007001_16 (sequence is synthesized)
gtccagaccggcctattgccctacccgtttgattctctgggaggcatggtgctcctcctggctgcacatgctctctgtgaactgatcgcatcttgggttcttctcaatttgacatacttg

SEQ ID NO: 7667 - DNA, 120 bp, Artificial Sequence
  ENSG00000007001_17 (sequence is synthesized)
ggagtcggaatgactggatgggggatgggtagaggatgactggcacacttgtatagtatgtaatgttgtgtacatattatttatatggttgtggctcaaataaagtttaattccaacaca

SEQ ID NO: 7668 - DNA, 120 bp, Artificial Sequence
  ENSG00000007001_18 (sequence is synthesized)
ggccgcgcggcacgggtgagtgcccagggacttcaccagtgctgccatgctggccccaggctgtgagttggacccagaccaagaagtggtgaggacaaggcctgaagatgtgcctgcttc

SEQ ID NO: 7669 - DNA, 83 bp, Artificial Sequence
  ENSG00000007001_19 (sequence is synthesized)
cttttcacatagtagagagaatggcttcagttatacctgcctccaataggtccatgagatctgacaggaatacatatgttgga

SEQ ID NO: 7670 - DNA, 120 bp, Artificial Sequence
  ENSG00000007001_20 (sequence is synthesized)
gtcctaggccggttgagtctgaattggcctgctcctgggtggggaatgtctttctctttcaagcaatgacaataaacaagaggtatttatcatcaccaataaacaatcccccaagaggta

SEQ ID NO: 7671 - DNA, 120 bp, Artificial Sequence
  ENSG00000007001_21 (sequence is synthesized)
ggagtatttctatctgaatgtcttcatggtgccagcggctctttatctccctcagatttactgttctaaaaggtggattcctggtatgctgtcccctggaagatcagccaccaagtatag

SEQ ID NO: 7672 - DNA, 120 bp, Artificial Sequence
  ENSG00000007001_22 (sequence is synthesized)
agaccgaaaaccccatggatagggtgctatcatattctcttctttcattactacttcataacatcctgttcccgtaacactgaagcttggaagctggcatctggcaccttttgattttaa

SEQ ID NO: 7673 - DNA, 120 bp, Artificial Sequence
  ENSG00000007001_23 (sequence is synthesized)
cccatttataacgcactttgtgtgagccagaaaagcttgcttggggaagggctgagaatgcattcatggacagctgctgaaacagaggaagttagagaggacatctgatgctgctgtggt

SEQ ID NO: 7674 - DNA, 120 bp, Artificial Sequence
  ENSG00000007038_0 (sequence is synthesized)
agagggggcgtcaggccgcgggagaggaggccatgggcgcgcgcggggcgctgctgctggcgctgctgctggctcgggctggactcaggaagccggagtcgcaggaggcggcgccgttat

SEQ ID NO: 7675 - DNA, 120 bp, Artificial Sequence
  ENSG00000007038_1 (sequence is synthesized)
caggaccatgcggccgacgggtcatcacgtcgcgcatcgtgggtggagaggacgccgaactcgggcgttggccgtggcaggggagcctgcgcctgtgggattcccacgtatgcggagtga

SEQ ID NO: 7676 - DNA, 120 bp, Artificial Sequence
  ENSG00000007038_2 (sequence is synthesized)
gcctgctcagccaccgctgggcactcacggcggcgcactgctttgaaacctatagtgaccttagtgatccctccgggtggatggtccagtttggccagctgacttccatgccatccttct

SEQ ID NO: 7677 - DNA, 120 bp, Artificial Sequence
  ENSG00000007038_3 (sequence is synthesized)
ggagcctgcaggcctactacacccgttacttcgtatcgaatatctatctgagccctcgctacctggggaattcaccctatgacattgccttggtgaagctgtctgcacctgtcacctaca

SEQ ID NO: 7678 - DNA, 120 bp, Artificial Sequence
  ENSG00000007038_4 (sequence is synthesized)
cagcccatctgtctccaggcctccacatttgagtttgagaaccggacagactgctgggtgactggctgggggtacatcaaagaggatgaggcactgccatctccccacaccctccaggaa

SEQ ID NO: 7679 - DNA, 120 bp, Artificial Sequence
  ENSG00000007038_5 (sequence is synthesized)
gttcaggtcgccatcataaacaactctatgtgcaaccacctcttcctcaagtacagtttccgcaaggacatctttggagacatggtttgtgctggcaatgcccaaggcgggaaggatgcc

SEQ ID NO: 7680 - DNA, 120 bp, Artificial Sequence
  ENSG00000007038_6 (sequence is synthesized)
tgcttcggtgactcaggtggacccttggcctgtaacaagaatggactgtggtatcagattggagtcgtgagctggggagtgggctgtggtcggcccaatcggcccggtgtctacaccaat

SEQ ID NO: 7681 - DNA, 120 bp, Artificial Sequence
  ENSG00000007038_7 (sequence is synthesized)
atcagccaccactttgagtggatccagaagctgatggcccagagtggcatgtcccagccagacccctcctggccgctactctttttccctcttctctgggctctcccactcctggggccg

SEQ ID NO: 7682 - DNA, 120 bp, Artificial Sequence
  ENSG00000007038_8 (sequence is synthesized)
gtctgagcctacctgagcccatgcagcctggggccactgccaagtcaggccctggttctcttctgtcttgtttggtaataaacacattccagttgatgccttgcagggcattcttcaaaa

SEQ ID NO: 7683 - DNA, 120 bp, Artificial Sequence
  ENSG00000007038_9 (sequence is synthesized)
tcccagcccaggaaagcatcctgtgtccctgtgccttatttgaccctcatgccaaccccgggaggtggagactgttgccccactctgcagatgcagaaacggaggcttggctgctgccag

SEQ ID NO: 7684 - DNA, 120 bp, Artificial Sequence
  ENSG00000007038_10 (sequence is synthesized)
gcacacacgcgaggggaccctgggtgggcaaaaacgtgctttcccggacggggttgaaggggagaaagggagaggtcgggcttggggggctgcctcccgcggctcagcagttcctctgac

SEQ ID NO: 7685 - DNA, 120 bp, Artificial Sequence
  ENSG00000007038_11 (sequence is synthesized)
gactgctgggtgactggctgggggtacatcaaagaggatgaggataagaggacacagtgagaagatgggggtctgctcgccaggaaggagccctcaccagcagccgcatcgctcagcacc

SEQ ID NO: 7686 - DNA, 120 bp, Artificial Sequence
  ENSG00000007038_12 (sequence is synthesized)
cctccagagctgtgagaaacaaacctctatcatctaccagccgcccacggcgtgggatttgtgttacagcagcctgagctgacccagacgccaaggagcaacacacgcaccagggtaggc

SEQ ID NO: 7687 - DNA, 120 bp, Artificial Sequence
  ENSG00000007038_13 (sequence is synthesized)
tggagaaaccagaacccgggaatcccgcctccctcaacttgaaacttgggaatagtgtattctcttttcaacacttgcactagtagaaggttaattacatgaaagattaggcaaaatgta

SEQ ID NO: 7688 - DNA, 120 bp, Artificial Sequence
  ENSG00000007038_14 (sequence is synthesized)
tgctgctggctcgggctggactcaggaagccggagtcgcaggaggcggcgccgttatcaggtagggcgcccaggacgcgcgattcctgccagggccgttgggccgaggtggacggggggc

SEQ ID NO: 7689 - DNA, 120 bp, Artificial Sequence
  ENSG00000007038_15 (sequence is synthesized)
ggtgagggggtagaggggggcctttactgctctctcgcccccgcccccgggatcgagaactctgttggcgtggaaagtaactaacggacgctggagggggatgggcgggccctgcagagc

SEQ ID NO: 7690 - DNA, 80 bp, Artificial Sequence
  ENSG00000007047_0 (sequence is synthesized)
gcccgcctgcccgccgcccccatggcgcccggggtccccgctgcacggggccactaggaccctcggcgtcccttcccctc

SEQ ID NO: 7691 - DNA, 120 bp, Artificial Sequence
  ENSG00000007047_1 (sequence is synthesized)
ctgcacggggccactaggaccctcggcgtcccttcccctcccccgccctgccccctctcccgccgcgcggacccgggcgttctcggcgcccagcttttgagctcgcgtccccaggccggc

SEQ ID NO: 7692 - DNA, 120 bp, Artificial Sequence
  ENSG00000007047_2 (sequence is synthesized)
ccctgggacccccgccccccccacccggccgcccctgccccccgggacccggagaagatgtcttcgcggacggtgctggccccgggcaacgatcggaactcggacacgcatggcaccttg

SEQ ID NO: 7693 - DNA, 120 bp, Artificial Sequence
  ENSG00000007047_3 (sequence is synthesized)
ggcagtggccgctcctcggacaaaggcccgtcctggtccagccgctcactgggtgcccgttgccggaactccatcgcctcctgtcccgaggagcagccccacgtgggcaactaccgcctg

SEQ ID NO: 7694 - DNA, 120 bp, Artificial Sequence
  ENSG00000007047_4 (sequence is synthesized)
ctgaggaccattgggaagggcaactttgccaaagtcaagctggctcggcacatcctcactggtcgggaggttgccatcaagattatcgacaaaacccagctgaatcccagcagcctgcag

SEQ ID NO: 7695 - DNA, 120 bp, Artificial Sequence
  ENSG00000007047_5 (sequence is synthesized)
aagctgttccgagaagtccgcatcatgaagggcctaaaccaccccaacatcgtgaagctctttgaggtgattgagactgagaagacgctgtacctggtgatggagtacgcaagtgctgga

SEQ ID NO: 7696 - DNA, 120 bp, Artificial Sequence
  ENSG00000007047_6 (sequence is synthesized)
gaagtgtttgactacctcgtgtcgcatggccgcatgaaggagaaggaagctcgagccaagttccgacagattgtttcggctgtgcactattgtcaccagaaaaatattgtacacagggac

SEQ ID NO: 7697 - DNA, 120 bp, Artificial Sequence
  ENSG00000007047_7 (sequence is synthesized)
ctgaaggctgagaacctcttgctggatgccgaggccaacatcaagattgctgactttggcttcagcaacgagttcacgctgggatcgaagctggacacgttctgcgggagccccccatat

SEQ ID NO: 7698 - DNA, 120 bp, Artificial Sequence
  ENSG00000007047_8 (sequence is synthesized)
gccgccccggagctgtttcagggcaagaagtacgacgggccggaggtggacatctggagcctgggagtcatcctgtacaccctcgtcagcggctccctgcccttcgacgggcacaacctc

SEQ ID NO: 7699 - DNA, 120 bp, Artificial Sequence
  ENSG00000007047_9 (sequence is synthesized)
aaggagctgcgggagcgagtactcagagggaagtaccgggtccctttctacatgtcaacagactgtgagagcatcctgcggagatttttggtgctgaacccagctaaacgctgtactctc

SEQ ID NO: 7700 - DNA, 120 bp, Artificial Sequence
  ENSG00000007047_10 (sequence is synthesized)
gagcaaatcatgaaagacaaatggatcaacatcggctatgagggtgaggagttgaagccatacacagagcccgaggaggacttcggggacaccaagagaattgaggtgatggtgggtatg

SEQ ID NO: 7701 - DNA, 120 bp, Artificial Sequence
  ENSG00000007047_11 (sequence is synthesized)
ggctacacacgggaagaaatcaaagagtccttgaccagccagaagtacaacgaagtgaccgccacctacctcctgctgggcaggaagactgaggagggtggggaccggggcgccccaggg

SEQ ID NO: 7702 - DNA, 120 bp, Artificial Sequence
  ENSG00000007047_12 (sequence is synthesized)
ctggccctggcacgggtgcgggcgcccagcgacaccaccaacggaacaagttccagcaaaggcaccagccacagcaaagggcagcggagttcctcttccacctaccaccgccagcgcagg

SEQ ID NO: 7703 - DNA, 120 bp, Artificial Sequence
  ENSG00000007047_13 (sequence is synthesized)
catagcgatttctgtggcccatcccctgcacccctgcaccccaaacgcagcccgacgagcacgggggaggcggagctgaaggaggagcggctgccaggccggaaggcgagctgcagcacc

SEQ ID NO: 7704 - DNA, 120 bp, Artificial Sequence
  ENSG00000007047_14 (sequence is synthesized)
gcggggagtgggagtcgagggctgcccccctccagccccatggtcagcagcgcccacaaccccaacaaggcagagatcccagagcggcggaaggacagcacgagcacccccaacaacctc

SEQ ID NO: 7705 - DNA, 120 bp, Artificial Sequence
  ENSG00000007047_15 (sequence is synthesized)
cctcctagcatgatgacccgcagaaacacctacgtttgcacagaacgcccgggggctgagcgcccgtcactgttgccaaatgggaaagaaaacagctcaggcaccccacgggtgccccct

SEQ ID NO: 7706 - DNA, 120 bp, Artificial Sequence
  ENSG00000007047_16 (sequence is synthesized)
gcctccccctccagtcacagcctggcacccccatcaggggagcggagccgcctggcacgtggttccaccatccgcagcaccttccatggtggccaggtccgggaccggcgggcagggggt

SEQ ID NO: 7707 - DNA, 120 bp, Artificial Sequence
  ENSG00000007047_17 (sequence is synthesized)
gggggtggtgggggtgtgcagaatgggccccctgcctctcccacactggcccatgaggctgcacccctgcccgccgggcggccccgccccaccaccaacctcttcaccaagctgacctcc

SEQ ID NO: 7708 - DNA, 120 bp, Artificial Sequence
  ENSG00000007047_18 (sequence is synthesized)
aaactgacccgaagggttaccctcgatccctctaaacggcagaactctaaccgctgtgtttcgggcgcctctctgccccagggatccaagatcaggtcgcagacgaacctgagagaatcg

SEQ ID NO: 7709 - DNA, 120 bp, Artificial Sequence
  ENSG00000007047_19 (sequence is synthesized)
ggggacctgaggtcacaagttgccatctaccttgggatcaaacggaaaccgccccccggctgctccgattcccctggagtgtgaagctgaccagctcgcgccctcctgaggccctgatgg

SEQ ID NO: 7710 - DNA, 120 bp, Artificial Sequence
  ENSG00000007047_20 (sequence is synthesized)
cagctctgcgccaggccacagcagccgcccgctgccgctgccgccagccacagccgttcctgctggcctgcctgcacgggggtgcgggcgggcccgagcccctgtcccacttcgaagtgg

SEQ ID NO: 7711 - DNA, 120 bp, Artificial Sequence
  ENSG00000007047_21 (sequence is synthesized)
tgtggcgggcaccgccctggccttccgcaccctcgtcacccgcatctccaacgacctcgagctctgagccaccacggtcccagggcccttactcttcctctcccttgtcgccttcacttc

SEQ ID NO: 7712 - DNA, 120 bp, Artificial Sequence
  ENSG00000007047_22 (sequence is synthesized)
tacaggaggggaaggggccagggaggggattctccctttatcatcacctcagtttccctgaattatatttgggggcaaagattgtcccctctgctgttctctggggccgctcagcacaga

SEQ ID NO: 7713 - DNA, 120 bp, Artificial Sequence
  ENSG00000007047_23 (sequence is synthesized)
agaaggatgagggggctcagcggggggagctggcaccttcctggagcctccagccagtcctgtcctccctcgccctaccaagagggcacctgaggagactttggggacagggcaggggca

SEQ ID NO: 7714 - DNA, 120 bp, Artificial Sequence
  ENSG00000007047_24 (sequence is synthesized)
gggagggaaactgaggaaatcttccattcctcccaacagctcaaaattaggccttgggcaggggcagggagagctgctgagcctaaagactggagaatctgggggactgggagtgggggt

SEQ ID NO: 7715 - DNA, 120 bp, Artificial Sequence
  ENSG00000007047_25 (sequence is synthesized)
cagagaggcagattccttcccctcccgtcccctcacgctcaaacccccacttcctgccccaggctggcgcggggcactttgtacaaatccttgtaaataccccacaccctcccctctgca

SEQ ID NO: 7716 - DNA, 120 bp, Artificial Sequence
  ENSG00000007047_26 (sequence is synthesized)
aaggtctcttgaggagctgccgctgtcacctacggtttttaagttattacaccccgaccctcctcctgtcagccccctcacctgcagcctgttgcccaataaatttaagagagtcccccc

SEQ ID NO: 7717 - DNA, 120 bp, Artificial Sequence
  ENSG00000007047_27 (sequence is synthesized)
ctccccaatgctgaccctaggattttccttccctgccctcacctgcaaatgagttaaagaagaggcgtgggaatccaggcagtggtttttcctttcggagcctcggttttctcatctgca

SEQ ID NO: 7718 - DNA, 120 bp, Artificial Sequence
  ENSG00000007047_28 (sequence is synthesized)
gaatgggagcggtgggggtgggaaggtaaggatggtcgtggaagaaggcaggatggaactcggcctcatccccgaggccccagttcctatatcgggccccccattcatccactcacactc

SEQ ID NO: 7719 - DNA, 120 bp, Artificial Sequence
  ENSG00000007047_29 (sequence is synthesized)
ccagccaccatgttacactggactctaagccacttcttactccagtagtaaatttattcaataaacaatcattgacccatgcctactccatgccaggcccagtgctggacacagagacat

SEQ ID NO: 7720 - DNA, 120 bp, Artificial Sequence
  ENSG00000007047_30 (sequence is synthesized)
gaagctctgtctgtgggagacagggattctgacacagacaccggacaaaccattgtcttggggagcccagaagagaaagtgggcagggtggggtcattggggaagatgctctagaggaat

SEQ ID NO: 7721 - DNA, 120 bp, Artificial Sequence
  ENSG00000007047_31 (sequence is synthesized)
taatgctggaatggggtgttgaaggatgagtaggagttagttaggcattgagtttgccctgggcaaaagcccagaagtgggagtatgtggtatatcttcagagaactgggtaatttcagt

SEQ ID NO: 7722 - DNA, 120 bp, Artificial Sequence
  ENSG00000007047_32 (sequence is synthesized)
gtggctgctgtgttgggcatggatggagaatcagcaagagaaatgctgtattaggactaataatccatctacgctgcttaagcaaaaaggtatttgttggtttatgttacttaatagtcc

SEQ ID NO: 7723 - DNA, 120 bp, Artificial Sequence
  ENSG00000007047_33 (sequence is synthesized)
aggggcacctggcttcaggtaggtttgatccaggcatcaggccattgcatctattttttcagtgtaagttgaattctagtaatttttatcaagtaagggctcctttcctggtggcacaga

SEQ ID NO: 7724 - DNA, 120 bp, Artificial Sequence
  ENSG00000007047_34 (sequence is synthesized)
tgacttcagcagttagaagtttctatccctccagctttctgcagcagaaagaccctcattgtcagtttcccagcaaaagtcccagggcagactctcattggcccaaatgggccatgtgat

SEQ ID NO: 7725 - DNA, 120 bp, Artificial Sequence
  ENSG00000007047_35 (sequence is synthesized)
tttctctaaaccaatcactgtgactctagagtggccagactcagagctgcacttagtaggggttcctcaaaggaaggtcaagtgtcatgagcaggagaaaaggcatgggagctggacaga

SEQ ID NO: 7726 - DNA, 120 bp, Artificial Sequence
  ENSG00000007047_36 (sequence is synthesized)
ttatagtggttgaagtctgtgcagtacagaagggcggagcttattcacacagcacctttggggccaaaatgaataagctggactttctccccatggcactggggaaccatggaagttcag

SEQ ID NO: 7727 - DNA, 120 bp, Artificial Sequence
  ENSG00000007047_37 (sequence is synthesized)
ggaacttcagggaagaggcttggtcaattcctgagagcatcctctgtgctggggacacagtggtaatcaagacagccccaacactgccctcatagagctcacagtccaatggaggaggca

SEQ ID NO: 7728 - DNA, 120 bp, Artificial Sequence
  ENSG00000007047_38 (sequence is synthesized)
gatgtgtcctcaggcagcgactgggcagggctggtataggggagtccagaggtgatgcctgcctcagccagggagggcttcctggaggagaaggagccagctagacatggataggagtgc

SEQ ID NO: 7729 - DNA, 120 bp, Artificial Sequence
  ENSG00000007047_39 (sequence is synthesized)
gttttaggcacagcaaatggcacatacaagggccagggagcaagagagaggacaggtcctcaacaaatggcatgtgactttgtaagtgtagaattgctgtgaggtatggggctaggggcg

SEQ ID NO: 7730 - DNA, 120 bp, Artificial Sequence
  ENSG00000007047_40 (sequence is synthesized)
tcagtagggccttgaaggttatggacaggggcctgggctttcttccaagggcactgggggagccatggcaaggttgtaggtagggtagagatgggcgggtttgtgctatgtgcagggtgg

SEQ ID NO: 7731 - DNA, 120 bp, Artificial Sequence
  ENSG00000007047_41 (sequence is synthesized)
aagggagggaagttgacaggtcagaagatcaggaaagaggtcggggctggacagatggggagagcgcagatagatttaagagagtcctgtgaggcaaagtgggcaggacctggtaacagg

SEQ ID NO: 7732 - DNA, 120 bp, Artificial Sequence
  ENSG00000007047_42 (sequence is synthesized)
tgtctggactgtggctttggctggctcagaaggtccccactggcgtgtgtggtctatgtagcctctgggtgtggagctgggatcttcaactggggacagtacagtaaagaacatcacagc

SEQ ID NO: 7733 - DNA, 120 bp, Artificial Sequence
  ENSG00000007047_43 (sequence is synthesized)
cattcctcaggccctgccttcatctcattccccagacggaactccttcttaccaactccttcttctacccattcattcattcaacaaacatttatcgagtgcctctgtttgcctgagctc

SEQ ID NO: 7734 - DNA, 120 bp, Artificial Sequence
  ENSG00000007047_44 (sequence is synthesized)
agtttatacactaacatttgatgttagcgtataaattagtgttctgtgtcaaagaagtgcagaacgtactcttggcagaaaggatttaatacaggaaattaagtgcttttaaaaatgtgg

SEQ ID NO: 7735 - DNA, 72 bp, Artificial Sequence
  ENSG00000007047_45 (sequence is synthesized)
agcatagcagacgccatctcaactaaaaatcaaaaaaattagccaggcatcatgttatgtacctgtggtccc

SEQ ID NO: 7736 - DNA, 120 bp, Artificial Sequence
  ENSG00000007047_46 (sequence is synthesized)
aagaagcatagcagacgccatctcaactaaaaatcaaaaaaattagccaggcatcatgttatgtacctgtggtcccagctactcgaaagaccgaggtgggagaatcacttgagcccagga

SEQ ID NO: 7737 - DNA, 120 bp, Artificial Sequence
  ENSG00000007047_47 (sequence is synthesized)
tcccgccactgcactccattctgggtgacagagcaaaaccctgtctcaataaatcaataaataaaatattaatagtaatttaaaaaatcaggccaggcacagtggcttacgcttgtaatc

SEQ ID NO: 7738 - DNA, 63 bp, Artificial Sequence
  ENSG00000007047_48 (sequence is synthesized)
ctacagtgagctaagattgcgctactgcactccaggataggtgacagagtgagactccatttc

SEQ ID NO: 7739 - DNA, 88 bp, Artificial Sequence
  ENSG00000007047_49 (sequence is synthesized)
caacatactgaggtgggaggatcagcagagcctggggaggccgaggctgcagtgagctgtgaccgtgccactgcactccagcctgggt

SEQ ID NO: 7740 - DNA, 120 bp, Artificial Sequence
  ENSG00000007047_50 (sequence is synthesized)
gagtgacaccctgtctcaaaaaaaaagagaaatggatggaagttaaagtttctgggagtctgaaacttctctccatccccccctcccagaggtgatggtgggtatgggctacacacggga

SEQ ID NO: 7741 - DNA, 120 bp, Artificial Sequence
  ENSG00000007047_51 (sequence is synthesized)
gctgggattacaggcctgagccaccatatccagtggggcttgtggcaccttgaccgtccctcctcctttcctccccctctaggttgccatcaagattatcgacaaaacccagctgaatcc

SEQ ID NO: 7742 - DNA, 120 bp, Artificial Sequence
  ENSG00000007062_0 (sequence is synthesized)
ggatggtgccttgagtgaatgacccccttggagaacattcttccgcatccctcgcctcaagccagcctcagacagaaaactgaagattcagcagatccagtgcttcctgctcctcttctg

SEQ ID NO: 7743 - DNA, 120 bp, Artificial Sequence
  ENSG00000007062_1 (sequence is synthesized)
cccaggaacacgcttgccttccccaaggcttccagaagctctgaggcaggaggcaccaagttctacctcatgtttggaggatcttgctagctatggccctcgtactcggctccctgttgc

SEQ ID NO: 7744 - DNA, 120 bp, Artificial Sequence
  ENSG00000007062_2 (sequence is synthesized)
tgctggggctgtgcgggaactccttttcaggagggcagccttcatccacagatgctcctaaggcttggaattatgaattgcctgcaacaaattatgagacccaagactcccataaagctg

SEQ ID NO: 7745 - DNA, 120 bp, Artificial Sequence
  ENSG00000007062_3 (sequence is synthesized)
gacccattggcattctctttgaactagtgcatatctttctctatgtggtacagccgcgtgatttcccagaagatactttgagaaaattcttacagaaggcatatgaatccaaaattgatt

SEQ ID NO: 7746 - DNA, 120 bp, Artificial Sequence
  ENSG00000007062_4 (sequence is synthesized)
atgacaagccagaaactgtaatcttaggtctaaagattgtctactatgaagcagggattattctatgctgtgtcctggggctgctgtttattattctgatgcctctggtggggtatttct

SEQ ID NO: 7747 - DNA, 120 bp, Artificial Sequence
  ENSG00000007062_5 (sequence is synthesized)
tttgtatgtgtcgttgctgtaacaaatgtggtggagaaatgcaccagcgacagaaggaaaatgggcccttcctgaggaaatgctttgcaatctccctgttggtgatttgtataataataa

SEQ ID NO: 7748 - DNA, 120 bp, Artificial Sequence
  ENSG00000007062_6 (sequence is synthesized)
gcattggcatcttctatggttttgtggcaaatcaccaggtaagaacccggatcaaaaggagtcggaaactggcagatagcaatttcaaggacttgcgaactctcttgaatgaaactccag

SEQ ID NO: 7749 - DNA, 120 bp, Artificial Sequence
  ENSG00000007062_7 (sequence is synthesized)
agcaaatcaaatatatattggcccagtacaacactaccaaggacaaggcgttcacagatctgaacagtatcaattcagtgctaggaggcggaattcttgaccgactgagacccaacatca

SEQ ID NO: 7750 - DNA, 120 bp, Artificial Sequence
  ENSG00000007062_8 (sequence is synthesized)
tccctgttcttgatgagattaagtccatggcaacagcgatcaaggagaccaaagaggcgttggagaacatgaacagcaccttgaagagcttgcaccaacaaagtacacagcttagcagca

SEQ ID NO: 7751 - DNA, 120 bp, Artificial Sequence
  ENSG00000007062_9 (sequence is synthesized)
gtctgaccagcgtgaaaactagcctgcggtcatctctcaatgaccctctgtgcttggtgcatccatcaagtgaaacctgcaacagcatcagattgtctctaagccagctgaatagcaacc

SEQ ID NO: 7752 - DNA, 120 bp, Artificial Sequence
  ENSG00000007062_10 (sequence is synthesized)
ctgaactgaggcagcttccacccgtggatgcagaacttgacaacgttaataacgttcttaggacagatttggatggcctggtccaacagggctatcaatcccttaatgatatacctgaca

SEQ ID NO: 7753 - DNA, 120 bp, Artificial Sequence
  ENSG00000007062_11 (sequence is synthesized)
gagtacaacgccaaaccacgactgtcgtagcaggtatcaaaagggtcttgaattccattggttcagatatcgacaatgtaactcagcgtcttcctattcaggatatactctcagcattct

SEQ ID NO: 7754 - DNA, 120 bp, Artificial Sequence
  ENSG00000007062_12 (sequence is synthesized)
ctgtttatgttaataacactgaaagttacatccacagaaatttacctacattggaagagtatgattcatactggtggctgggtggcctggtcatctgctctctgctgaccctcatcgtga

SEQ ID NO: 7755 - DNA, 120 bp, Artificial Sequence
  ENSG00000007062_13 (sequence is synthesized)
ttttttactacctgggcttactgtgtggcgtgtgcggctatgacaggcatgccaccccgaccacccgaggctgtgtctccaacaccggaggcgtcttcctcatggttggagttggattaa

SEQ ID NO: 7756 - DNA, 120 bp, Artificial Sequence
  ENSG00000007062_14 (sequence is synthesized)
gtttcctcttttgctggatattgatgatcattgtggttcttacctttgtctttggtgcaaatgtggaaaaactgatctgtgaaccttacacgagcaaggaattattccgggttttggata

SEQ ID NO: 7757 - DNA, 120 bp, Artificial Sequence
  ENSG00000007062_15 (sequence is synthesized)
caccctacttactaaatgaagactgggaatactatctctctgggaagctatttaataaatcaaaaatgaagctcacttttgaacaagtttacagtgactgcaaaaaaaatagaggcactt

SEQ ID NO: 7758 - DNA, 120 bp, Artificial Sequence
  ENSG00000007062_16 (sequence is synthesized)
cagaacagcttcaatatcagtgaacatctcaacattaatgagcatactggaagcataagcagtgaattggaaagtctgaaggtaaatcttaatatctttctgttgggtgcagcaggaaga

SEQ ID NO: 7759 - DNA, 120 bp, Artificial Sequence
  ENSG00000007062_17 (sequence is synthesized)
aaaaaccttcaggattttgctgcttgtggaatagacagaatgaattatgacagctacttggctcagactggtaaatcccccgcaggagtgaatcttttatcatttgcatatgatctagaa

SEQ ID NO: 7760 - DNA, 120 bp, Artificial Sequence
  ENSG00000007062_18 (sequence is synthesized)
gcaaaagcaaacagtttgcccccaggaaatttgaggaactccctgaaaagagatgcacaaactattaaaacaattcaccagcaacgagtccttcctatagaacaatcactgagcactcta

SEQ ID NO: 7761 - DNA, 120 bp, Artificial Sequence
  ENSG00000007062_19 (sequence is synthesized)
taccaaagcgtcaagatacttcaacgcacagggaatggattgttggagagagtaactaggattctagcttctctggattttgctcagaacttcatcacaaacaatacttcctctgttatt

SEQ ID NO: 7762 - DNA, 120 bp, Artificial Sequence
  ENSG00000007062_20 (sequence is synthesized)
attgaggaaactaagaagtatgggagaacaataataggatattttgaacattatctgcagtggatcgagttctctatcagtgagaaagtggcatcgtgcaaacctgtggccaccgctcta

SEQ ID NO: 7763 - DNA, 120 bp, Artificial Sequence
  ENSG00000007062_21 (sequence is synthesized)
gatactgctgttgatgtctttctgtgtagctacattatcgaccccttgaatttgttttggtttggcataggaaaagctactgtatttttacttccggctctaatttttgcggtaaaactg

SEQ ID NO: 7764 - DNA, 120 bp, Artificial Sequence
  ENSG00000007062_22 (sequence is synthesized)
gctaagtactatcgtcgaatggattcggaggacgtgtacgatgatgttgaaactatacccatgaaaaatatggaaaatggtaataatggttatcataaagatcatgtatatggtattcac

SEQ ID NO: 7765 - DNA, 120 bp, Artificial Sequence
  ENSG00000007062_23 (sequence is synthesized)
aatcctgttatgacaagcccatcacaacattgatagctgatgttgaaactgcttgagcatcaggatactcaaagtggaaaggatcacagatttttggtagtttctgggtctacaaggact

SEQ ID NO: 7766 - DNA, 120 bp, Artificial Sequence
  ENSG00000007062_24 (sequence is synthesized)
ttccaaatccaggagcaacgccagtggcaacgtagtgactcaggcgggcaccaaggcaacggcaccattggtctctgggtagtgctttaagaatgaacacaatcacgttatagtccatgg

SEQ ID NO: 7767 - DNA, 120 bp, Artificial Sequence
  ENSG00000007062_25 (sequence is synthesized)
tccatcactattcaaggatgactccctcccttcctgtctatttttgttttttacttttttacactgagtttctatttagacactacaacatatggggtgtttgttcccattggatgcatt

SEQ ID NO: 7768 - DNA, 120 bp, Artificial Sequence
  ENSG00000007062_26 (sequence is synthesized)
tctatcaaaactctatcaaatgtgatggctagattctaacatattgccatgtgtggagtgtgctgaacacacaccagtttacaggaaagatgcattttgtgtacagtaaacggtgtatat

SEQ ID NO: 7769 - DNA, 120 bp, Artificial Sequence
  ENSG00000007062_27 (sequence is synthesized)
accttttgttaccacagagttttttaaacaaatgagtattataggactttcttctaaatgagctaaataagtcaccattgacttcttggtgctgttgaaaataatccattttcactaaaa

SEQ ID NO: 7770 - DNA, 120 bp, Artificial Sequence
  ENSG00000007062_28 (sequence is synthesized)
gtgtgtgaaacctacagcatattcttcacgcagagattttcatctattatactttatcaaagattggccatgttccacttggaaatggcatgcaaaagcaatcatagagaaacctgcgta

SEQ ID NO: 7771 - DNA, 120 bp, Artificial Sequence
  ENSG00000007062_29 (sequence is synthesized)
actccatctgacaaattcaaaagagagagagagatcttgagagagaaatgctgttcgttcaaaagtggagttgttttaacagatgccaattacggtgtacagtttaacagagttttctgt

SEQ ID NO: 7772 - DNA, 120 bp, Artificial Sequence
  ENSG00000007062_30 (sequence is synthesized)
tgcattacgataaacattaattggagtgcagctaacatgagtatcatcagactagtatcaagtgttctaaaatgaaatatgagaagatcctgtcacaattcttagatctggtgtccagca

SEQ ID NO: 7773 - DNA, 120 bp, Artificial Sequence
  ENSG00000007062_31 (sequence is synthesized)
tggatgaaacctttgagtttggtccctaaatttgcatgaaagcacaaggtaaatattcatttgcttcaggagtttcatgttggatctgtcattatcaaaagtgatcagcaatgaagaact

SEQ ID NO: 7774 - DNA, 120 bp, Artificial Sequence
  ENSG00000007062_32 (sequence is synthesized)
ggtcggacaaaatttaacgttgatgtaatgaaattccagatgtaggcattccccccaggtcttttcatgtgcagattgcagttctgattcatttgaataaaaaggaacttggaaaacatg

SEQ ID NO: 7775 - DNA, 86 bp, Artificial Sequence
  ENSG00000007062_33 (sequence is synthesized)
aattgcattgggattaggcaacagaagggtctaatgcggccgggatgagacaggagagtttttaggagggtagctgcattctaagt

SEQ ID NO: 7776 - DNA, 120 bp, Artificial Sequence
  ENSG00000007062_34 (sequence is synthesized)
gagacaggagagtttttaggagggtagctgcattctaagtaagggactctgcggggggaaaagaggcgcaagcgttgcaagaagggagtgcagggggttgagcaggcacctctacaggaa

SEQ ID NO: 7777 - DNA, 120 bp, Artificial Sequence
  ENSG00000007062_35 (sequence is synthesized)
atggatgctgtccaggtgctggtgggcgccccagggctacgtggcgaagcagctcagccggtccaatcagagtgcgtccagggctcgggtttcgcgatctttaagtgactgaggcagatc

SEQ ID NO: 7778 - DNA, 120 bp, Artificial Sequence
  ENSG00000007062_36 (sequence is synthesized)
agcttcctctgctccccacctggggtgatgccctcttctggaaggctctcactgctacacacacagtggctgccgaagctcagcctggctttagttccagccctactaggtcttctcagg

SEQ ID NO: 7779 - DNA, 120 bp, Artificial Sequence
  ENSG00000007062_37 (sequence is synthesized)
actcaggatatccaggtggaaggaaggctgtgccagagttgcaagcaagtttatcggagtatcgccatgaagttcgtcccctgcctcctgctggtgaccttgtcctgcctggggactttg

SEQ ID NO: 7780 - DNA, 120 bp, Artificial Sequence
  ENSG00000007062_38 (sequence is synthesized)
aaacgtggtctcagatgttgggtatcccccatgcccccgccaaaagcactccagatgacaaaaatccactacaaagctcttctttaaaaagaaagattctgagaagttccatcaaaagaa

SEQ ID NO: 7781 - DNA, 120 bp, Artificial Sequence
  ENSG00000007062_39 (sequence is synthesized)
gaaaagaagaaatgaagggagggcactgaagggacagtgtcttgatgtcatagttagatcttggactttgaaggcaaactagtgggtttgactcttggccacatggttaatcacctgtga

SEQ ID NO: 7782 - DNA, 120 bp, Artificial Sequence
  ENSG00000007062_40 (sequence is synthesized)
atcccccatgcccccgccaaaagcactccagatgacaaaaatccactacaaagctcttctttaaaaagaaagattctgagaagttccatcaaaagaagaaaagaagaaatgaagggatgg

SEQ ID NO: 7783 - DNA, 120 bp, Artificial Sequence
  ENSG00000007062_41 (sequence is synthesized)
tgccatgagtgaaacaagctgctcagcaggcacttactaaacaccgactacgtgccatgcccagtgttaaggtctggggattgaaagaagagtaggacagagtccatcttggaggcactt

SEQ ID NO: 7784 - DNA, 120 bp, Artificial Sequence
  ENSG00000007062_42 (sequence is synthesized)
tgggcaagtcaccagaatcctctctgtgtcagtttcctcatctgcaaaatggaataatgccttaaacaaggaggaccttgtttctatctatgaagcatggagaacagtgcctggaagata

SEQ ID NO: 7785 - DNA, 120 bp, Artificial Sequence
  ENSG00000007062_43 (sequence is synthesized)
agaggaactgcggggagagcgtggtggtgccggtgcccgtccaacccaaactttttagtctgagtggtggcccgcgacgccccgcttgggtcttctttccatccactggggatgggggcg

SEQ ID NO: 7786 - DNA, 120 bp, Artificial Sequence
  ENSG00000007062_44 (sequence is synthesized)
gagccctttcgataaagagtttgtttctttaccgaaagcataaaaggtagtgcaagaagaggcacacagaaccaagcatgtgcactttctaaagtgaaaaactttagaaggaatgtcttg

SEQ ID NO: 7787 - DNA, 120 bp, Artificial Sequence
  ENSG00000007062_45 (sequence is synthesized)
cctggcagatgccctgatgtcctccgtgcatgtcctcccccaacctcatgtgtctgatgcagcactgcagtgaggcacggtggatcctgcaggttcagaggggttgtgatccacctgaag

SEQ ID NO: 7788 - DNA, 120 bp, Artificial Sequence
  ENSG00000007062_46 (sequence is synthesized)
tcacagtcgggcagggtgtgccagagttgaaactgccgaccttccagatggagttcactagtctccccctggcgtatacctttttggttgtcaaggccattatcacagagtcactttaga

SEQ ID NO: 7789 - DNA, 120 bp, Artificial Sequence
  ENSG00000007062_47 (sequence is synthesized)
ggacactagggctactgttgatggttcacccagagagccacttagaggccgtgtgcactgcctgatcttacacccaggaatttgtagttgtaacaaggtccctgcggaacttccatttgc

SEQ ID NO: 7790 - DNA, 120 bp, Artificial Sequence
  ENSG00000007062_48 (sequence is synthesized)
ttctgtcttctgtcctagaagtggactttagaaagactcttgtggtagacatgtgtactgctgtgttgctgctggtctaatgtcttcaacacgtattcttagtgactcttaacactttta

SEQ ID NO: 7791 - DNA, 120 bp, Artificial Sequence
  ENSG00000007062_49 (sequence is synthesized)
accttagattgtgaatattcacaattcttacttgtcatagtctgtttatcctctttatcttctatgctgtttttaaaagcaatacaaacagaagctagagtaaccagtgttttgtctgac

SEQ ID NO: 7792 - DNA, 120 bp, Artificial Sequence
  ENSG00000007062_50 (sequence is synthesized)
acattcttcttgataaactttatgaggtgtggtttatattcgtctgtacctttagtcacatgcctgcttcttagcacagaggtgatgaaaccacccacagctttgttgggggtattatat

SEQ ID NO: 7793 - DNA, 120 bp, Artificial Sequence
  ENSG00000007062_51 (sequence is synthesized)
ccaagactcccataaagctggacccattggcattctctttgaactagtgcatatctttctctatgtggtacagccgcgtgatttcccagaagatgagaacacaaaggcccagataggaga

SEQ ID NO: 7794 - DNA, 120 bp, Artificial Sequence
  ENSG00000007062_52 (sequence is synthesized)
agcctgctcatttaagaccctgcagccaaatgagagctggtaggataacgaagccagaaagaggacaaggggaatttttgcctgggaggttatctcagcacacaagtgatcctcctgcct

SEQ ID NO: 7795 - DNA, 120 bp, Artificial Sequence
  ENSG00000007062_53 (sequence is synthesized)
cagcctcctgagtagctggaactgtagacgtaagccaccatgaccagcctaatttatcaagaatgatactttgagaaaattcttacagaaggcatatgaatccaaaattgattatgacaa

SEQ ID NO: 7796 - DNA, 120 bp, Artificial Sequence
  ENSG00000007062_54 (sequence is synthesized)
agctgggtcctcatcccggagcgagagaggcatctgctgaccaggcgcggggctgagcgcactccttccactgtactgggggtgtacagtgaggagtggacgggttcgctctgcgccccc

SEQ ID NO: 7797 - DNA, 120 bp, Artificial Sequence
  ENSG00000007062_55 (sequence is synthesized)
ggcggccgtggttccggagcgggagtcggaggtgagtgtgcgaactggaccggggccccagagacttcggactcgctctcggggagaacggtgaccgaggagccccggtggagttgagct

SEQ ID NO: 7798 - DNA, 120 bp, Artificial Sequence
  ENSG00000007062_56 (sequence is synthesized)
cagagtattgatgctagcagaagcagacagaccccagatagccttccagctgcgtgccagggatggtgccttgagtgaatgacccccttggagaacattcttccgcatccctcgcctcaa

SEQ ID NO: 7799 - DNA, 120 bp, Artificial Sequence
  ENSG00000007062_57 (sequence is synthesized)
gaaaagaagaaatgaagagacagggcctctctatgttgcccaggctggtagcaattcttcattgagtaccaactgtgttccaggctctggggatacagaaataagccagggacctgcaca

SEQ ID NO: 7800 - DNA, 120 bp, Artificial Sequence
  ENSG00000007062_58 (sequence is synthesized)
atgtgcaggaccaagacttctggggcttcccaccaggtcagaggacagccacctcctggtcccctttgctcacctttgccatatgcagttcttccatttgcttcccaccccctttttcag

SEQ ID NO: 7801 - DNA, 120 bp, Artificial Sequence
  ENSG00000007080_0 (sequence is synthesized)
ggaggcgcgaccgggccggcgctggggtaagaagcctgctgagggatgcccaagaagttccagggtgagaacaccaagtcggcagcggcccgggcacgtagggcagaggccaaggcggcc

SEQ ID NO: 7802 - DNA, 120 bp, Artificial Sequence
  ENSG00000007080_1 (sequence is synthesized)
gctgatgccaagaagcagaaggagctggaggatgcctactggaaggacgacgacaaacacgtcatgaggaaggagcagcgcaaggaggagaaggagaagcggcgcctcgaccagctggaa

SEQ ID NO: 7803 - DNA, 120 bp, Artificial Sequence
  ENSG00000007080_2 (sequence is synthesized)
cgtaagaaggagacgcagcgcctactggaggaggaggactccaagctcaagggcggcaaggcgccgcgggtggccacgtccagcaaggtcacccgggcccagatcgaggacacgctgcgc

SEQ ID NO: 7804 - DNA, 120 bp, Artificial Sequence
  ENSG00000007080_3 (sequence is synthesized)
cgagaccatcagctcagggaggccccggacacagccgagaaagccaagagccatctggaggtgccgctggaggagaacgtgaaccgccgcgtgctggaggagggcagcgtggaggcgcgc

SEQ ID NO: 7805 - DNA, 120 bp, Artificial Sequence
  ENSG00000007080_4 (sequence is synthesized)
agcgtggcggaggaggcggccgaccggcacccagaaagacgcatgcgggcagccttcacagcctttgaggaagcccagctgccgcggctcaaacaagagaaccccaacatgcggctgtcg

SEQ ID NO: 7806 - DNA, 120 bp, Artificial Sequence
  ENSG00000007080_5 (sequence is synthesized)
cagctgaaacagctgctcaagaaggagtggctccgctctcctgacaaccccatgaaccagcgggccgtgcccttcaatgcccccaagtgagcccagaacttggggagccagttcacccac

SEQ ID NO: 7807 - DNA, 120 bp, Artificial Sequence
  ENSG00000007080_6 (sequence is synthesized)
gggtggtccaggtcacgactctgcacgcccttaggccaggtcagctgcgagggtcacagagcgttccgggggccaaggcgccgggccccggggccatgctcttatcaccagccacccgtc

SEQ ID NO: 7808 - DNA, 120 bp, Artificial Sequence
  ENSG00000007080_7 (sequence is synthesized)
ctcccgccagagggtccctgccccgagtgacaccccatcccctcccatcccccggcgcgtgtgtgtagagcctcagggctgagtgcccaataaaggtggcggcaaggctgcggtgaggca

SEQ ID NO: 7809 - DNA, 77 bp, Artificial Sequence
  ENSG00000007080_8 (sequence is synthesized)
ggggattacaaaccctgctgagggatgcccaagaagttccagggtgagaacaccaagtcggcagcggcccgggcacg

SEQ ID NO: 7810 - DNA, 120 bp, Artificial Sequence
  ENSG00000007080_9 (sequence is synthesized)
cttttacaaggagagcgctaagtccaaagcccttgttttatacagagaaggccacagaggccccaagagggtcatggctgcccaagtgtgattctgggggtgctgagtgccgatgtcccc

SEQ ID NO: 7811 - DNA, 120 bp, Artificial Sequence
  ENSG00000007080_10 (sequence is synthesized)
gtcattatgtcaatgtgggtgaatagcgagagggccctctgagctttggtctgaaaggccaggagggaccaggcgctgtcgctcacgcctgtcatcccagtactttgggaggccgaggca

SEQ ID NO: 7812 - DNA, 74 bp, Artificial Sequence
  ENSG00000007080_11 (sequence is synthesized)
cgtggtggcgcacacttacagtcccagctactctggaggctgaagcagaattgcttcaactgggaggcgcaggt

SEQ ID NO: 7813 - DNA, 120 bp, Artificial Sequence
  ENSG00000007080_12 (sequence is synthesized)
cagtcccagctactctggaggctgaagcagaattgcttcaactgggaggcgcaggttgcagtgagccgaggtctccccgctgcactccagcatgggcaacagagcgagattccatctcaa

SEQ ID NO: 7814 - DNA, 120 bp, Artificial Sequence
  ENSG00000007129_0 (sequence is synthesized)
atagaggaaggaaggacagcagagacaacagtcacagtaaccctgtctagagcgttcctggagcccaagctcctctccacagaggaggacagagcaggcagcagagaccatggggccccc

SEQ ID NO: 7815 - DNA, 120 bp, Artificial Sequence
  ENSG00000007129_1 (sequence is synthesized)
ctcagcttgtccccacagagaatgcatcccctggcaggggctcttgctcacagcctcacttttaactttctggaacgcacccaccactgcctggctctttattgcatcagcgccctttga

SEQ ID NO: 7816 - DNA, 120 bp, Artificial Sequence
  ENSG00000007129_2 (sequence is synthesized)
agttgctgaaggggagaatgttcatctctctgtggtttatctgcccgagaatctttacagctatggctggtacaaagggaaaacggtggagcccaaccagctaatcgcagcatatgtaat

SEQ ID NO: 7817 - DNA, 120 bp, Artificial Sequence
  ENSG00000007129_3 (sequence is synthesized)
agacactcacgttaggactccagggcctgcatacagcggtcgagagacaatatcacccagtggagatctgcatttccagaacgtcaccctagaggacacgggatactacaacctacaagt

SEQ ID NO: 7818 - DNA, 120 bp, Artificial Sequence
  ENSG00000007129_4 (sequence is synthesized)
cacatacagaaattctcagattgaacaggcatctcaccatctccgtgtatacgagtcagtggctcagccctccatccaagccagcagcaccacagtcacagagaagggctccgtggtcct

SEQ ID NO: 7819 - DNA, 120 bp, Artificial Sequence
  ENSG00000007129_5 (sequence is synthesized)
cagcgtctgcaggtcacgaagaggatgaagctgtcctggtttaaccatgtgctcaccatagaccccatcaggcaggaggacgctggggagtatcagtgtgaggtctccaacccagtcagc

SEQ ID NO: 7820 - DNA, 120 bp, Artificial Sequence
  ENSG00000007129_6 (sequence is synthesized)
tccaacaggagcgaccccctcaagctgactgtaaaatcagatgacaacactctaggcatcctgatcggggtcctggttgggagtcttctggtggctgcacttgtgtgtttcctgctcctc

SEQ ID NO: 7821 - DNA, 120 bp, Artificial Sequence
  ENSG00000007129_7 (sequence is synthesized)
cgaaaaactggcagggccagcgatcagagtgacttcagggagcagcagcccccagcctccacccccggccatggaccctctgacagctccatctcctaggaattgctacactctgacaca

SEQ ID NO: 7822 - DNA, 120 bp, Artificial Sequence
  ENSG00000007129_8 (sequence is synthesized)
aacatttactgctggatcgaccacaaagcagatgtggcttcttaggttcctctgggagctgctcctgtgggttgatggagcgtccctgaagcccccagccctggggatggggaaggacat

SEQ ID NO: 7823 - DNA, 120 bp, Artificial Sequence
  ENSG00000007129_9 (sequence is synthesized)
ggagcctgagccagagaaccagctctgagtcctgaggagacacaggcctggggacaggaagggatgggggtccctgctgaatatatagagacctcaacagactgccccgggctctgggtg

SEQ ID NO: 7824 - DNA, 120 bp, Artificial Sequence
  ENSG00000007129_10 (sequence is synthesized)
ggccaaggcgaaggcttcccatcaccacaggaagtgggggcttgcagggaaagtgaatgggcctatggcccacccggggtcacctggaaaggatctgaataaaggggaaacttcctctca

SEQ ID NO: 7825 - DNA, 120 bp, Artificial Sequence
  ENSG00000007129_11 (sequence is synthesized)
gttccgccgagcccgtcccttggcggtggtgtcactggatgctgggaagagatggtgggaagagcctccatccattggcgcgtcactaattagacaaggaggccttgggctcccttgaga

SEQ ID NO: 7826 - DNA, 120 bp, Artificial Sequence
  ENSG00000007129_12 (sequence is synthesized)
gagtcacggtttctcctccgttgacccgcccttcattgaactcctttacttggatattcagagcgctggacagagatcacttggcgctaacaccctcggaggtcctcacggcgctccgtc

SEQ ID NO: 7827 - DNA, 120 bp, Artificial Sequence
  ENSG00000007129_13 (sequence is synthesized)
ggaatgacacagtcggattcccaagctgcgaagggtgagggagggactgcagcgcaggaactgaggaggagaggcccgcgcgcccactggagccgagcggtgaggaataaccggaccgac

SEQ ID NO: 7828 - DNA, 120 bp, Artificial Sequence
  ENSG00000007129_14 (sequence is synthesized)
tctcagattgaacaggcatctcaccatctccgtgtatacggagaatgttctaaatttgactctgagatctctgaggatgcagcatggccccaagacactttctgttggtcactctatcca

SEQ ID NO: 7829 - DNA, 120 bp, Artificial Sequence
  ENSG00000007168_0 (sequence is synthesized)
agacggagctggagcggcggggcggcggcggagtccggcggccgggagagcgagtgagcgagcggaggagcagcgacacgggagtctagggagcgagaaggagaaggaggggagcgctcg

SEQ ID NO: 7830 - DNA, 120 bp, Artificial Sequence
  ENSG00000007168_1 (sequence is synthesized)
ggcgcgagcgagagaaaccgcgagcgccgagcttggactcgagccccggaacggctgaggagcccgcccgctcccctcccctccccctccccgggcccgggcccagcgcgccatcctccc

SEQ ID NO: 7831 - DNA, 120 bp, Artificial Sequence
  ENSG00000007168_2 (sequence is synthesized)
ccctccttccctccctccctccttcctccctcccctctccctccccctcccccgccggtggatgggagtgaaggacggaagaggccctgcggaggcggcggtgcagcgctccggtggaat

SEQ ID NO: 7832 - DNA, 120 bp, Artificial Sequence
  ENSG00000007168_3 (sequence is synthesized)
gaatcttacttgttgaatatcttctggttactagttggattcatttgtgaaagaatcattttcccctgtgtggaagacacttagtggcatatttaaattataagtccacggatcaaaaag

SEQ ID NO: 7833 - DNA, 120 bp, Artificial Sequence
  ENSG00000007168_4 (sequence is synthesized)
ctttttgatttcccaaaggagggacataccactatatcagataagcttgacattacagccaagatggtgctgtcccagagacaacgagatgaactaaatcgagctatagcagattatctt

SEQ ID NO: 7834 - DNA, 120 bp, Artificial Sequence
  ENSG00000007168_5 (sequence is synthesized)
cgttcaaatggctatgaagaggcatattcagtttttaaaaaggaagctgaattagatgtgaatgaagaattagataaaaagtatgctggtcttttggaaaaaaaatggacatctgttatt

SEQ ID NO: 7835 - DNA, 120 bp, Artificial Sequence
  ENSG00000007168_6 (sequence is synthesized)
agattacaaaagaaggttatggaattagaatcaaagctaaatgaagcaaaagaagaatttacgtcaggtggacctcttggtcagaaacgagacccaaaagaatggattccccgtccgcca

SEQ ID NO: 7836 - DNA, 120 bp, Artificial Sequence
  ENSG00000007168_7 (sequence is synthesized)
gaaaaatatgcattgagtggtcacaggagtccagtcactcgagtcattttccatcctgtgttcagtgttatggtctctgcttcagaggatgctacaattaaggtgtgggattatgagact

SEQ ID NO: 7837 - DNA, 120 bp, Artificial Sequence
  ENSG00000007168_8 (sequence is synthesized)
ggagattttgaacgaactcttaaaggacatacagactctgtacaggacatttcattcgaccacagcggcaagcttctggcttcctgttctgcagatatgaccattaaactatgggatttt

SEQ ID NO: 7838 - DNA, 120 bp, Artificial Sequence
  ENSG00000007168_9 (sequence is synthesized)
cagggctttgaatgcatcagaaccatgcacggccatgaccacaatgtttcttcagtagccatcatgcccaatggagatcatatagtgtctgcctcaagggataaaactataaaaatgtgg

SEQ ID NO: 7839 - DNA, 120 bp, Artificial Sequence
  ENSG00000007168_10 (sequence is synthesized)
gaagtgcaaactggctactgtgtgaagacattcacaggacacagagaatgggtacgtatggtacggccaaatcaagatggcactctgatagccagctgttccaatgaccagactgtgcgt

SEQ ID NO: 7840 - DNA, 120 bp, Artificial Sequence
  ENSG00000007168_11 (sequence is synthesized)
gtatgggtcgtagcaacaaaggaatgcaaggctgagctccgagagcatgagcatgtggtagaatgcatttcctgggctccagaaagctcatattcctccatctctgaagcaacaggatct

SEQ ID NO: 7841 - DNA, 120 bp, Artificial Sequence
  ENSG00000007168_12 (sequence is synthesized)
gagactaaaaaaagtggtaaacctgggccattcttgctgtctggatccagagacaagactattaagatgtgggatgtcagtactggcatgtgccttatgaccctcgtgggtcatgataac

SEQ ID NO: 7842 - DNA, 120 bp, Artificial Sequence
  ENSG00000007168_13 (sequence is synthesized)
tgggtacgtggagttctgttccattctggggggaagtttattttgagttgtgctgatgacaagaccctacgcgtatgggattacaagaacaagcgatgcatgaagaccctcaatgcgcat

SEQ ID NO: 7843 - DNA, 120 bp, Artificial Sequence
  ENSG00000007168_14 (sequence is synthesized)
gaacactttgttacctccttggatttccacaagacggcaccctatgtcgtcactggcagcgtagatcaaacagtaaaagtgtgggagtgccgttgattgtgtctccttcggcccctcctc

SEQ ID NO: 7844 - DNA, 120 bp, Artificial Sequence
  ENSG00000007168_15 (sequence is synthesized)
cctcttttcctctggatgcactctgatgataccatggttaccccattgagctctgtttaaataaatattgtcctttcatgtaaattattctggatgtagattgagcttattaaatgttac

SEQ ID NO: 7845 - DNA, 120 bp, Artificial Sequence
  ENSG00000007168_16 (sequence is synthesized)
acacaaagtattcatgcatggtgaatccaaattgtatactgtaaatttacatacgttgtctagaagtaccatagggtttaaaaacctgggctggcattggtcacaccaggcctaagaagg

SEQ ID NO: 7846 - DNA, 120 bp, Artificial Sequence
  ENSG00000007168_17 (sequence is synthesized)
cagaagttgaatcaattgaactagggcactaaactgaatagttgacagtgtcattttatgttggattattaattcctgtttttctttctgctatctgttggtgcctgacttgatggcctc

SEQ ID NO: 7847 - DNA, 120 bp, Artificial Sequence
  ENSG00000007168_18 (sequence is synthesized)
atttggggaaaagtggtggttattagggctttttctgaaatgtgtatctatgtaacatcacttaagtgtgcttaataaatcttctgtaaggattttagatgataaggctacaattcagaa

SEQ ID NO: 7848 - DNA, 120 bp, Artificial Sequence
  ENSG00000007168_19 (sequence is synthesized)
tcttctgaaccatctatgtaatgaatggggattatacattggaatttttgtcatgacacatttgccaaatcagtaggatatatttgttttggcagcctatcacgcagaggctagtggtat

SEQ ID NO: 7849 - DNA, 120 bp, Artificial Sequence
  ENSG00000007168_20 (sequence is synthesized)
atttatgtaagaaaatgactgtaaatctcaagaaaaatctcagcagctaatagcaactcatttatttcattttggtcttaatgctttgtaaacaggtcaaaaaatactgtcatactctaa

SEQ ID NO: 7850 - DNA, 120 bp, Artificial Sequence
  ENSG00000007168_21 (sequence is synthesized)
gcttctattttccacactggacatacttctagttgtattctccatactattagactgtgtagtgatgtgacttccaagtagaatttaatctccccattgagtgtgtcatggtacaaatca

SEQ ID NO: 7851 - DNA, 120 bp, Artificial Sequence
  ENSG00000007168_22 (sequence is synthesized)
ctattcgtttttggtgttttttagggatgtgcaatgtgcattacataatgacagaaatactgagaaggttctgtgtgcccatttgaaaggagtgggaggaatacagcagtttgtttttca

SEQ ID NO: 7852 - DNA, 120 bp, Artificial Sequence
  ENSG00000007168_23 (sequence is synthesized)
agcgtgcataaaaatgtactgttttcaccttttgtttatatgtaaatgtttgtaagtatatgggcctatctgtaagtggataagtctgtatgtgtgtatcatacacatcaacctccatgt

SEQ ID NO: 7853 - DNA, 120 bp, Artificial Sequence
  ENSG00000007168_24 (sequence is synthesized)
ccttagtcctgggtttttgaaaaagtgctaaaacggacaagtagaataaatgttgctgtggaatgccatgctttagaacaaaccctttttgatcttaatgcttctgaaaactaggtctga

SEQ ID NO: 7854 - DNA, 120 bp, Artificial Sequence
  ENSG00000007168_25 (sequence is synthesized)
ctctggggatttttttccagccgaaggaaaatcacttccgttatgtccccctctaatttagccgctcgacattttacacaacccggatatgttgtatattttgacccaaagttacaggta

SEQ ID NO: 7855 - DNA, 120 bp, Artificial Sequence
  ENSG00000007168_26 (sequence is synthesized)
ggtttaagagaatttttagccatgacttttggagcactattccattgtcagttattaataaagaattccattgcttagctaaccaacaggttttttttgtttccaagagagttatttgaa

SEQ ID NO: 7856 - DNA, 120 bp, Artificial Sequence
  ENSG00000007168_27 (sequence is synthesized)
aagttaacagaacaatgagataacagtgacagtttaacaaagataaaattctgaactgcgttttattcatttgtgtactatgtgattttttaaatgtcccctttagtatttaatggaaaa

SEQ ID NO: 7857 - DNA, 120 bp, Artificial Sequence
  ENSG00000007168_28 (sequence is synthesized)
ttggttcctgcaaaagacaaagggtgagagttagcgtcctgtagatacacacagagactaggccgtatattaactagaagcagctttatgtctagcttgtgtctttttgtttgtttgctt

SEQ ID NO: 7858 - DNA, 120 bp, Artificial Sequence
  ENSG00000007168_29 (sequence is synthesized)
gtttgtttttagattcctgagagatgtctctggaagggaaagttttgagaactaatggctatttttgaggacaaaaattacatcttaagctaattccttaaatacatacagtaggtgaat

SEQ ID NO: 7859 - DNA, 120 bp, Artificial Sequence
  ENSG00000007168_30 (sequence is synthesized)
tttcaggacaatattgcctcacaaccctgcttacattgaaaagtctttttcccttagctcttctgactggatttttctacaaaaactatggaaaatatctttgttcttgtttgctgctat

SEQ ID NO: 7860 - DNA, 120 bp, Artificial Sequence
  ENSG00000007168_31 (sequence is synthesized)
tttctgtcctattttgagaaatataaatacatagaaatggtgcatcttaacatttgtttgtacatgtataaatgtcttgtattttaattcatttttagcatgaattgtttaagggtaagc

SEQ ID NO: 7861 - DNA, 120 bp, Artificial Sequence
  ENSG00000007168_32 (sequence is synthesized)
cacaacatctagaaatcactcatagatattgaacaataaaggagaatggtaccgatgcaggaggaagcaagcgtgtcttcccctgcagcacacagcgacttgcgttgacaaaggaggagg

SEQ ID NO: 7862 - DNA, 120 bp, Artificial Sequence
  ENSG00000007168_33 (sequence is synthesized)
aaacgattactctgtaaacaaagttatccttacttgggagattgccacagcctgctgctgagttgagttaccagacatcctccatgtgagaagcagcgaacattgaatctcagggatggc

SEQ ID NO: 7863 - DNA, 120 bp, Artificial Sequence
  ENSG00000007168_34 (sequence is synthesized)
ccacaactgggtccacatgtaatgagccctgtttaataacgaaggggtgggggagagcagtccgtctacaacctggaatcagatttgcaaaatttcctgcactgctgtctgacactgtcc

SEQ ID NO: 7864 - DNA, 120 bp, Artificial Sequence
  ENSG00000007168_35 (sequence is synthesized)
tgttgatgccctttctgactgtgttctctgttttctctgtctgctgtctaaccctgtgccttgcctgggataaggacaatgatgaggttactggtttggattgtaagtagaggactttta

SEQ ID NO: 7865 - DNA, 120 bp, Artificial Sequence
  ENSG00000007168_36 (sequence is synthesized)
ttaattggtttagaggttcactgctgctttgtcactttctcaatcaaattggccacttaagaaataaagagctggtagaattgcatcctcagatgattattgactgtgtgtgtgtgtgaa

SEQ ID NO: 7866 - DNA, 120 bp, Artificial Sequence
  ENSG00000007168_37 (sequence is synthesized)
aacagacattccagtgccacccaaatatatatctgtaacgtgcccaagaaatcctagctgcgctcttgagagtgcatgccatggagactggtttagacaccgcgtggagcctagttgcct

SEQ ID NO: 7867 - DNA, 120 bp, Artificial Sequence
  ENSG00000007168_38 (sequence is synthesized)
gttgtcacggcatcttgcactttaggagactaagaccgtcctggttcgtctgtgtgtggtgtgaccaatggtgtgcccagagcactactctcaaaatcactagtgttagcaagtcgtccc

SEQ ID NO: 7868 - DNA, 120 bp, Artificial Sequence
  ENSG00000007168_39 (sequence is synthesized)
gggctggggagcgttcgccgtagtctttggaagctttggctttagatttaccaagccccgcctccccgctgccagtgccctgctctcccgttcgcctctttctgtttctgtgtgaacttt

SEQ ID NO: 7869 - DNA, 120 bp, Artificial Sequence
  ENSG00000007168_40 (sequence is synthesized)
cccggtaatatcactcgttaaataggttttctttaaacttaattaaagaaaaactatttaaaggtaaaggatattttgttgacatcggtggctcgatcatccttaagcaactgaagttaa

SEQ ID NO: 7870 - DNA, 120 bp, Artificial Sequence
  ENSG00000007168_41 (sequence is synthesized)
aattgttgaaggaaaaggcacttaaattggttactttcatgtccagctgtatataagtccagtgtgttcatctagatgacgcaaagaatctcctggtagagaagcgacatgtaaaaaact

SEQ ID NO: 7871 - DNA, 120 bp, Artificial Sequence
  ENSG00000007168_42 (sequence is synthesized)
ggtggaaaaaggttttggattttttttccagtggggtggggggagggcaagctggatttacaggtcacggctggactgaatgggcctttttatcttcccactgtatcatggaagtagctg

SEQ ID NO: 7872 - DNA, 120 bp, Artificial Sequence
  ENSG00000007168_43 (sequence is synthesized)
cttgcttgtactgtccatccttcaggcatccctaaagctcactctgaagatgttagagacaaacacaaactcttcgagttaaagttgatcctgacactgacatgaaggcaagccttgatt

SEQ ID NO: 7873 - DNA, 120 bp, Artificial Sequence
  ENSG00000007168_44 (sequence is synthesized)
tcgtatgaacgttgctgaagtggtaattgaggaaaacagttccccagattgttaagagttcactgaagatattgacacaattttaaaaaatcagtaaaggaatgtatataatattgctct

SEQ ID NO: 7874 - DNA, 120 bp, Artificial Sequence
  ENSG00000007168_45 (sequence is synthesized)
cgtgttttacagtaagatttgttgctctcagactgtgtaaaacaaaatttattcatgttttctgcatattaaaaaatcttattgtaccaactggtaaactattaaatgcctataaaacta

SEQ ID NO: 7875 - DNA, 120 bp, Artificial Sequence
  ENSG00000007168_46 (sequence is synthesized)
actgtgtgaagacattcacaggacacagagaatggattcctgagagatgtctctggaagggaaagttttgagaactaatggctatttttgaggacaaaaattacatcttaagctaattcc

SEQ ID NO: 7876 - DNA, 120 bp, Artificial Sequence
  ENSG00000007168_47 (sequence is synthesized)
taagattaaaactatttttaccagtgttccaatattagtttaggcagtttggtctgattttaaaacagtcttattatgatatagcattatttttaaaatttatttattctttctgagaag

SEQ ID NO: 7877 - DNA, 120 bp, Artificial Sequence
  ENSG00000007168_48 (sequence is synthesized)
gaatgcctgtatatccttcacttagttaccatttgttggttttccttcatgtatgtgtgtatattttgctgaaatcatttgagcgttctttgcagacatcgtaacactttacccccaagt

SEQ ID NO: 7878 - DNA, 120 bp, Artificial Sequence
  ENSG00000007168_49 (sequence is synthesized)
attttagcatgaaccacctaagaacaaggatagtatataaataaccaaaataaaattattcacactcaagaaatttaccattgatagactacatattgagatttgttcttgttatttcca

SEQ ID NO: 7879 - DNA, 120 bp, Artificial Sequence
  ENSG00000007168_50 (sequence is synthesized)
atcgtacgttatattcactcctcatgtcttatgagttttcagtttcctttaatctagaatcccctagacttttattttcttctggtcttttgatgtttttggtatgtatagttttatcgt

SEQ ID NO: 7880 - DNA, 86 bp, Artificial Sequence
  ENSG00000007168_51 (sequence is synthesized)
cccaagattgcaccacggtgaaaacaaacaaaaaaccaaaatgcaacaaaaaaattggaaatatatatcattattagatagaagcc

SEQ ID NO: 7881 - DNA, 120 bp, Artificial Sequence
  ENSG00000007168_52 (sequence is synthesized)
aggattggttcaaggattaggcacaaatacggagcatttatgccatgcctggaacatcgtgttcagtaaatggatatggcgagactgtgtattgttagatttgagccctgctgtgcctta

SEQ ID NO: 7882 - DNA, 120 bp, Artificial Sequence
  ENSG00000007168_53 (sequence is synthesized)
gctggaggattgcttgagcccaggagttctgggttacagtgtgctgtgctgatgggatgtttgcactaagtgcagcatcaatatggtgacctcctgggaacaggagactcccaggttgcc

SEQ ID NO: 7883 - DNA, 85 bp, Artificial Sequence
  ENSG00000007168_54 (sequence is synthesized)
cctaaggaggggtgacctggctgcagcctcgacttcccagctcaaacagttctgcatcagtctcccgagtagctgggactacagg

SEQ ID NO: 7884 - DNA, 120 bp, Artificial Sequence
  ENSG00000007168_55 (sequence is synthesized)
tgcccggctaattttttttttaattttgtattttgtagagagggggtctcactatgtttgttgtccaggcttacgtgtgagttttaaataaaccatttctttttctttcagatttccaca

SEQ ID NO: 7885 - DNA, 120 bp, Artificial Sequence
  ENSG00000007168_56 (sequence is synthesized)
aggcagaaaggggcggtaggtggccgggccccgctgcctctcgcgcctcccggggcccgccacacacggtgccaacgggacgccgcggtcggccgcatgagcgcaaaagcagggcagcga

SEQ ID NO: 7886 - DNA, 120 bp, Artificial Sequence
  ENSG00000007168_57 (sequence is synthesized)
tctttgtgctggtatacctctgttaggctgaatttggttgtgcatagaattacacttgatttttgtagtacaaagttactagttttactcagattagtagagcatagcttttttccaata

SEQ ID NO: 7887 - DNA, 120 bp, Artificial Sequence
  ENSG00000007168_58 (sequence is synthesized)
tggctggaaatacttttaagtgtgcatttagttttgaaagattttatttcttatacatattttatcttctagatgttgattttattagctccttaatgatatgtctgttagcttattgtt

SEQ ID NO: 7888 - DNA, 120 bp, Artificial Sequence
  ENSG00000007168_59 (sequence is synthesized)
cctactttaattaaccaggattgtacatttattctgtcgacttgcatctctaacttggtaccattctcttcatcccagtacatatttttatatcacttctgggaagtgtcctgatgattg

SEQ ID NO: 7889 - DNA, 120 bp, Artificial Sequence
  ENSG00000007168_60 (sequence is synthesized)
actgcactccagcctgggcgacagagccacactctgtctcaaaaaaaaaaagcagacttaatagggtgaagaaaattaaaagatcctgaaaatgagggcctatgaagagggacaggaggt

SEQ ID NO: 7890 - DNA, 120 bp, Artificial Sequence
  ENSG00000007168_61 (sequence is synthesized)
tgaaggacggaagaggccctgcggaggcggcggtgcagcgctccgagacagagtttctctctggcgcccagcctggagtatagtgccacaatcatggttcactgcagccttgacctcctg

SEQ ID NO: 7891 - DNA, 120 bp, Artificial Sequence
  ENSG00000007171_0 (sequence is synthesized)
ataactttgtagcgagtcgaaaactgaggctccggccgcagagaactcagcctcattcctgctttaaaatctctcggccacctttgatgaggggactgggcagttctagacagtcccgaa

SEQ ID NO: 7892 - DNA, 120 bp, Artificial Sequence
  ENSG00000007171_1 (sequence is synthesized)
gttctcaaggcacaggtctcttcctggtttgactgtccttaccccggggaggcagtgcagccagctgcaagccccacagtgaagaacatctgagctcaaatccagataagtgacataagt

SEQ ID NO: 7893 - DNA, 120 bp, Artificial Sequence
  ENSG00000007171_2 (sequence is synthesized)
gacctgctttgtaaagccatagagatggcctgtccttggaaatttctgttcaagaccaaattccaccagtatgcaatgaatggggaaaaagacatcaacaacaatgtggagaaagccccc

SEQ ID NO: 7894 - DNA, 120 bp, Artificial Sequence
  ENSG00000007171_3 (sequence is synthesized)
tgtgccacctccagtccagtgacacaggatgaccttcagtatcacaacctcagcaagcagcagaatgagtccccgcagcccctcgtggagacgggaaagaagtctccagaatctctggtc

SEQ ID NO: 7895 - DNA, 120 bp, Artificial Sequence
  ENSG00000007171_4 (sequence is synthesized)
aagctggatgcaaccccattgtcctccccacggcatgtgaggatcaaaaactggggcagcgggatgactttccaagacacacttcaccataaggccaaagggattttaacttgcaggtcc

SEQ ID NO: 7896 - DNA, 120 bp, Artificial Sequence
  ENSG00000007171_5 (sequence is synthesized)
aaatcttgcctggggtccattatgactcccaaaagtttgaccagaggacccagggacaagcctacccctccagatgagcttctacctcaagctatcgaatttgtcaaccaatattacggc

SEQ ID NO: 7897 - DNA, 120 bp, Artificial Sequence
  ENSG00000007171_6 (sequence is synthesized)
tccttcaaagaggcaaaaatagaggaacatctggccagggtggaagcggtaacaaaggagatagaaacaacaggaacctaccaactgacgggagatgagctcatcttcgccaccaagcag

SEQ ID NO: 7898 - DNA, 120 bp, Artificial Sequence
  ENSG00000007171_7 (sequence is synthesized)
gcctggcgcaatgccccacgctgcattgggaggatccagtggtccaacctgcaggtcttcgatgcccgcagctgttccactgcccgggaaatgtttgaacacatctgcagacacgtgcgt

SEQ ID NO: 7899 - DNA, 120 bp, Artificial Sequence
  ENSG00000007171_8 (sequence is synthesized)
tactccaccaacaatggcaacatcaggtcggccatcaccgtgttcccccagcggagtgatggcaagcacgacttccgggtgtggaatgctcagctcatccgctatgctggctaccagatg

SEQ ID NO: 7900 - DNA, 120 bp, Artificial Sequence
  ENSG00000007171_9 (sequence is synthesized)
ccagatggcagcatcagaggggaccctgccaacgtggaattcactcagctgtgcatcgacctgggctggaagcccaagtacggccgcttcgatgtggtccccctggtcctgcaggccaat

SEQ ID NO: 7901 - DNA, 120 bp, Artificial Sequence
  ENSG00000007171_10 (sequence is synthesized)
ggccgtgaccctgagctcttcgaaatcccacctgaccttgtgcttgaggtggccatggaacatcccaaatacgagtggtttcgggaactggagctaaagtggtacgccctgcctgcagtg

SEQ ID NO: 7902 - DNA, 120 bp, Artificial Sequence
  ENSG00000007171_11 (sequence is synthesized)
gccaacatgctgcttgaggtgggcggcctggagttcccagggtgccccttcaatggctggtacatgggcacagagatcggagtccgggacttctgtgacgtccagcgctacaacatcctg

SEQ ID NO: 7903 - DNA, 120 bp, Artificial Sequence
  ENSG00000007171_12 (sequence is synthesized)
gaggaagtgggcaggagaatgggcctggaaacgcacaagctggcctcgctctggaaagaccaggctgtcgttgagatcaacattgctgtgctccatagtttccagaagcagaatgtgacc

SEQ ID NO: 7904 - DNA, 120 bp, Artificial Sequence
  ENSG00000007171_13 (sequence is synthesized)
atcatggaccaccactcggctgcagaatccttcatgaagtacatgcagaatgaataccggtcccgtgggggctgcccggcagactggatttggctggtccctcccatgtctgggagcatc

SEQ ID NO: 7905 - DNA, 120 bp, Artificial Sequence
  ENSG00000007171_14 (sequence is synthesized)
acccccgtgtttcaccaggagatgctgaactacgtcctgtcccctttctactactatcaggtagaggcctggaaaacccatgtctggcaggacgagaagcggagacccaagagaagagag

SEQ ID NO: 7906 - DNA, 120 bp, Artificial Sequence
  ENSG00000007171_15 (sequence is synthesized)
attccattgaaagtcttggtcaaagctgtgctctttgcctgtatgctgatgcgcaagacaatggcgtcccgagtcagagtcaccatcctctttgcgacagagacaggaaaatcagaggcg

SEQ ID NO: 7907 - DNA, 120 bp, Artificial Sequence
  ENSG00000007171_16 (sequence is synthesized)
ctggcctgggacctgggggccttattcagctgtgccttcaaccccaaggttgtctgcatggataagtacaggctgagctgcctggaggaggaacggctgctgttggtggtgaccagtacg

SEQ ID NO: 7908 - DNA, 120 bp, Artificial Sequence
  ENSG00000007171_17 (sequence is synthesized)
aatggagactgccctggcaatggagagaaactgaagaaatcgctcttcatgctgaaagagctcaacaacaaattcaggtacgctgtgtttggcctcggctccagcatgtaccctcggttc

SEQ ID NO: 7909 - DNA, 120 bp, Artificial Sequence
  ENSG00000007171_18 (sequence is synthesized)
tgcgcctttgctcatgacattgatcagaagctgtcccacctgggggcctctcagctcaccccgatgggagaaggggatgagctcagtgggcaggaggacgccttccgcagctgggccgtg

SEQ ID NO: 7910 - DNA, 120 bp, Artificial Sequence
  ENSG00000007171_19 (sequence is synthesized)
caaaccttcaaggcagcctgtgagacgtttgatgtccgaggcaaacagcacattcagatccccaagctctacacctccaatgtgacctgggacccgcaccactacaggctcgtgcaggac

SEQ ID NO: 7911 - DNA, 120 bp, Artificial Sequence
  ENSG00000007171_20 (sequence is synthesized)
tcacagcctttggacctcagcaaagccctcagcagcatgcatgccaagaacgtgttcaccatgaggctcaaatctcggcagaatctacaaagtccgacatccagccgtgccaccatcctg

SEQ ID NO: 7912 - DNA, 120 bp, Artificial Sequence
  ENSG00000007171_21 (sequence is synthesized)
gtggaactctcctgtgaggatggccaaggcctgaactacctgccgggggagcaccttggggtttgcccaggcaaccagccggccctggtccaaggtatcctggagcgagtggtggatggc

SEQ ID NO: 7913 - DNA, 120 bp, Artificial Sequence
  ENSG00000007171_22 (sequence is synthesized)
cccacaccccaccagacagtgcgcctggaggccctggatgagagtggcagctactgggtcagtgacaagaggctgcccccctgctcactcagccaggccctcacctacttcctggacatc

SEQ ID NO: 7914 - DNA, 120 bp, Artificial Sequence
  ENSG00000007171_23 (sequence is synthesized)
accacacccccaacccagctgctgctccaaaagctggcccaggtggccacagaagagcctgagagacagaggctggaggccctgtgccagccctcagagtacagcaagtggaagttcacc

SEQ ID NO: 7915 - DNA, 120 bp, Artificial Sequence
  ENSG00000007171_24 (sequence is synthesized)
aacagccccacattcctggaggtgctagaggagttcccgtccctgcgggtgtctgctggcttcctgctttcccagctccccattctgaagcccaggttctactccatcagctcctcccgg

SEQ ID NO: 7916 - DNA, 120 bp, Artificial Sequence
  ENSG00000007171_25 (sequence is synthesized)
gatcacacgcccacagagatccacctgactgtggccgtggtcacctaccacacccgagatggccagggtcccctgcaccacggcgtctgcagcacatggctcaacagcctgaagccccaa

SEQ ID NO: 7917 - DNA, 120 bp, Artificial Sequence
  ENSG00000007171_26 (sequence is synthesized)
gacccagtgccctgctttgtgcggaatgccagcggcttccacctccccgaggatccctcccatccttgcatcctcatcgggcctggcacaggcatcgcgcccttccgcagtttctggcag

SEQ ID NO: 7918 - DNA, 120 bp, Artificial Sequence
  ENSG00000007171_27 (sequence is synthesized)
caacggctccatgactcccagcacaagggagtgcggggaggccgcatgaccttggtgtttgggtgccgccgcccagatgaggaccacatctaccaggaggagatgctggagatggcccag

SEQ ID NO: 7919 - DNA, 120 bp, Artificial Sequence
  ENSG00000007171_28 (sequence is synthesized)
aagggggtgctgcatgcggtgcacacagcctattcccgcctgcctggcaagcccaaggtctatgttcaggacatcctgcggcagcagctggccagcgaggtgctccgtgtgctccacaag

SEQ ID NO: 7920 - DNA, 120 bp, Artificial Sequence
  ENSG00000007171_29 (sequence is synthesized)
gagccaggccacctctatgtttgcggggatgtgcgcatggcccgggacgtggcccacaccctgaagcagctggtggctgccaagctgaaattgaatgaggagcaggtcgaggactatttc

SEQ ID NO: 7921 - DNA, 120 bp, Artificial Sequence
  ENSG00000007171_30 (sequence is synthesized)
tttcagctcaagagccagaagcgctatcacgaagatatctttggtgctgtatttccttacgaggcgaagaaggacagggtggcggtgcagcccagcagcctggagatgtcagcgctctga

SEQ ID NO: 7922 - DNA, 120 bp, Artificial Sequence
  ENSG00000007171_31 (sequence is synthesized)
gggcctacaggaggggttaaagctgccggcacagaacttaaggatggagccagctctgcattatctgaggtcacagggcctggggagatggaggaaagtgatatcccccagcctcaagtc

SEQ ID NO: 7923 - DNA, 120 bp, Artificial Sequence
  ENSG00000007171_32 (sequence is synthesized)
ttatttcctcaacgttgctccccatcaagccctttacttgacctcctaacaagtagcaccctggattgatcggagcctcctctctcaaactggggcctccctggtcccttggagacaaaa

SEQ ID NO: 7924 - DNA, 120 bp, Artificial Sequence
  ENSG00000007171_33 (sequence is synthesized)
tcttaaatgccaggcctggcaagtgggtgaaagatggaacttgctgctgagtgcaccacttcaagtgaccaccaggaggtgctatcgcaccactgtgtatttaactgccttgtgtacagt

SEQ ID NO: 7925 - DNA, 120 bp, Artificial Sequence
  ENSG00000007171_34 (sequence is synthesized)
tatttatgcctctgtatttaaaaaactaacacccagtctgttccccatggccacttgggtcttccctgtatgattccttgatggagatatttacatgaattgcattttactttaatcaca

SEQ ID NO: 7926 - DNA, 80 bp, Artificial Sequence
  ENSG00000007171_35 (sequence is synthesized)
gggcgggggctgcaggctccgagcgataaagcgcgggcgctgggaggcgcgtggagccagcggagctgcgcctaaggagc

SEQ ID NO: 7927 - DNA, 120 bp, Artificial Sequence
  ENSG00000007174_0 (sequence is synthesized)
gaaaccgatgcagctggaggccgcgcgcgatgcggctcgcggaggagcgggccgcgctcgcggcggagaacgcggatggggaacccggcgccgaccgacgactgcgactcctggggacct

SEQ ID NO: 7928 - DNA, 120 bp, Artificial Sequence
  ENSG00000007174_1 (sequence is synthesized)
acctacgtggccatgagcctgcggccggctgcgggcgcctgggagcgttgcgcggggagtgctgaggcggagcagctgctccaggccttcctgggccgcgatgctgccgaggggccgcgg

SEQ ID NO: 7929 - DNA, 120 bp, Artificial Sequence
  ENSG00000007174_2 (sequence is synthesized)
tgctggtggtgcggcccgggcccaggggcctggcaatacgccccgggctggaggtgggacctgagtcgggcctggctggcgctaaggcgctttttttccttcgcaccgggcccgagcctc

SEQ ID NO: 7930 - DNA, 120 bp, Artificial Sequence
  ENSG00000007174_3 (sequence is synthesized)
cagggcccgacagcttccgcggcgcagtggtctgcggggacctgcccgcggcacctctggagcacctagccgcgctgttctcggaggttgttctacccgtcctggccaatgagaagaatc

SEQ ID NO: 7931 - DNA, 120 bp, Artificial Sequence
  ENSG00000007174_4 (sequence is synthesized)
gcctaaactggccccacatgatatgtgaggatgtcaggcggcacgcccacagcctccaatgtgacctctcagttatacttgagcaagtgaagggaaaaactttgctgcctcttccagcag

SEQ ID NO: 7932 - DNA, 120 bp, Artificial Sequence
  ENSG00000007174_5 (sequence is synthesized)
gctcagaaaaaatggagtttgcggattccaaaagtgagacagtcttggattctatagataagtcagtcatctatgccattgagtctgcagtgatcaaatggagctaccaagtccaggtgg

SEQ ID NO: 7933 - DNA, 120 bp, Artificial Sequence
  ENSG00000007174_6 (sequence is synthesized)
tactcaagagagagtcttcccagccactcttacaaggggagaatcccacccctaaggtggagttggagttctggaagagcaggtatgaagatctgaaatacatctataatcaactgagaa

SEQ ID NO: 7934 - DNA, 120 bp, Artificial Sequence
  ENSG00000007174_7 (sequence is synthesized)
caataacggtgaggggcatggccaagctcctggacaagcttcagagtagctactttccagctttcaaagccatgtacagagatgttgttgcagctctagcagaggcacaggacatccatg

SEQ ID NO: 7935 - DNA, 120 bp, Artificial Sequence
  ENSG00000007174_8 (sequence is synthesized)
tgcacctgataccgctccagcgccacctggaagctctggagaatgcagaatttccggaggtgaagccccagctgcggcccctgctccacgtggtctgtctgatttgggccacatgcaagt

SEQ ID NO: 7936 - DNA, 120 bp, Artificial Sequence
  ENSG00000007174_9 (sequence is synthesized)
cctaccgctccccgggaaggctgactgtgctgctccaggagatttgcaaccttctcatccagcaggcctctaattatctcagcccagaagacctgctgagaagtgaggtagaagaaagtc

SEQ ID NO: 7937 - DNA, 120 bp, Artificial Sequence
  ENSG00000007174_10 (sequence is synthesized)
agagaaaactgcaagtggtctcagacactttgagcttcttcaagcaagagtttcaggacagaagggagaatctccacacttacttcaaagagaaccaggaagtcaaggaatgggatttcc

SEQ ID NO: 7938 - DNA, 120 bp, Artificial Sequence
  ENSG00000007174_11 (sequence is synthesized)
agtcttctttggtctttgtgcgattggatggcttcctgggacaactgcacgtggtggagggtcttctgaagacggccctggatttccacaaactgggaaaggtggagttcagcggcgtca

SEQ ID NO: 7939 - DNA, 120 bp, Artificial Sequence
  ENSG00000007174_12 (sequence is synthesized)
gagggaatgctctgagtcagcaggtccagcaaatgcatgaagaatttcaagagatgtacaggcttctctcaggatcctcctccgactgcctgtacctccaaagcacggactttgaaaatg

SEQ ID NO: 7940 - DNA, 120 bp, Artificial Sequence
  ENSG00000007174_13 (sequence is synthesized)
acgtctctgaatttaaccagaaagtagaagatcttgaccgaagattggggactatctttattcaagcttttgatgatgcacctggcttggagcatgcctttaagctgctagacatagcag

SEQ ID NO: 7941 - DNA, 120 bp, Artificial Sequence
  ENSG00000007174_14 (sequence is synthesized)
gaaacctccttgaaagaccgctggtagcgagggatacatctgataaatacctggtcctcatccaaatgttcaacaaagatctggatgcagtgaggatgatctacagtcagcacgtccagg

SEQ ID NO: 7942 - DNA, 120 bp, Artificial Sequence
  ENSG00000007174_15 (sequence is synthesized)
aggaagcagaacttgggttctccccggtgcacaagaacatgcccaccgtggctggcggcctccgctgggcacaggagctgaggcagcgcatccagggtcctttcagcaactttggacgca

SEQ ID NO: 7943 - DNA, 120 bp, Artificial Sequence
  ENSG00000007174_16 (sequence is synthesized)
tcacacacccttgcatggaatctgcagaaggaaagcgaatgcaacaaaaatatgaagatatgctgtcattgctagaaaagtatgagacaagactttatgaggattggtgccggacagtat

SEQ ID NO: 7944 - DNA, 120 bp, Artificial Sequence
  ENSG00000007174_17 (sequence is synthesized)
cagagaagtcacagtacaatctttcccaaccacttctaaaacgtgacccagagacgaaggagatcactatcaactttaacccacagctgatttcagtgctgaaagaaatgagctatcttg

SEQ ID NO: 7945 - DNA, 120 bp, Artificial Sequence
  ENSG00000007174_18 (sequence is synthesized)
aacccagagagatgaaacacatgcctgagacagcagcagccatgttctcctccagggatttctatcggcagcttgtggctaatttagagttgatggcaaattggtacaacaaggttatga

SEQ ID NO: 7946 - DNA, 120 bp, Artificial Sequence
  ENSG00000007174_19 (sequence is synthesized)
aaactctgctggaggtggaatttccattagtggaggaagagctgcaaaatattgatctccgcctcagagcagcagaggagactttgaactggaaaacagaaggcatttgcgattatgtca

SEQ ID NO: 7947 - DNA, 120 bp, Artificial Sequence
  ENSG00000007174_20 (sequence is synthesized)
ctgaaatcaccagtagtattcatgatcttgaacaaagaattcagaaaactaaagacaatgtggaagagatccaaaacatcatgaaaacatgggtgactccaatatttaagacaaaagatg

SEQ ID NO: 7948 - DNA, 120 bp, Artificial Sequence
  ENSG00000007174_21 (sequence is synthesized)
gaaaaagggaatcccttctttctctggatgatcggcatgatcgaatggaaaaatattacaatctcatcaaggaatctggccttaagatccacgcccttgttcaggaaaacctgggtctat

SEQ ID NO: 7949 - DNA, 120 bp, Artificial Sequence
  ENSG00000007174_22 (sequence is synthesized)
tttcagcagacccaacctccaatatctggaagacttatgttaactctattgacaatttgttgctgaatggattctttcttgccattgagtgctccctcaagtatcttctggaaaatactg

SEQ ID NO: 7950 - DNA, 120 bp, Artificial Sequence
  ENSG00000007174_23 (sequence is synthesized)
agtgtaaggcaggacttaccccaatatttgaagcacaactgagtctagccatcccagagctagttttctatccgtctctggagtctggagtgaaggggggtttctgtgacattgttgagg

SEQ ID NO: 7951 - DNA, 120 bp, Artificial Sequence
  ENSG00000007174_24 (sequence is synthesized)
gtctcatcaccagcatttttaggataccatctctggtgccacggctttccccacaaaatggctctcctcactatcaggtcgacctggacggtataccagatttggcaaacatgcggcgca

SEQ ID NO: 7952 - DNA, 120 bp, Artificial Sequence
  ENSG00000007174_25 (sequence is synthesized)
cactcatggagagagtccagagaatgatgggcctctgctgtggctatcagagcaccttcagccagtattcgtacctctatgtggaggaccggaaggaggttctgggtcagtttctgctgt

SEQ ID NO: 7953 - DNA, 120 bp, Artificial Sequence
  ENSG00000007174_26 (sequence is synthesized)
acgggcacatcctcactccggaagaaattgaagaccatgtggaagatggcatcccagagaaccctcccctcctttctcagtttaaagtgcaaatcgactcctatgaaacgctctatgaag

SEQ ID NO: 7954 - DNA, 120 bp, Artificial Sequence
  ENSG00000007174_27 (sequence is synthesized)
aggtgtgcaggctggaacccatcaaggtgtttgacggctggatgaaaattgatattcgaccctttaaggcatctctgctgaatattattaagaggtggagcctcctgttcaaacagcatc

SEQ ID NO: 7955 - DNA, 120 bp, Artificial Sequence
  ENSG00000007174_28 (sequence is synthesized)
ttgtggaccacgtcactcacagcttggccaacctggatgcgtttataaagaagagtgagagcggcttactcaagaaagttgaaaaaggagatttccaaggcttggttgagatcatgggac

SEQ ID NO: 7956 - DNA, 120 bp, Artificial Sequence
  ENSG00000007174_29 (sequence is synthesized)
accttatggctgttaaagaacggcagagtaacactgatgagatgtttgagcccttaaagcagactattgaattgctgaagacctatgaacaagaattgccagaaacagtgtttaagcagc

SEQ ID NO: 7957 - DNA, 120 bp, Artificial Sequence
  ENSG00000007174_30 (sequence is synthesized)
tggaggagctgcctgagaaatggaacaacataaaaaaggtggccattactgtgaagcagcaggtggccccactgcaggcaaatgaagtgacactcctccgccagaggtgcacagccttcg

SEQ ID NO: 7958 - DNA, 120 bp, Artificial Sequence
  ENSG00000007174_31 (sequence is synthesized)
atgcagaacagcagcaattctgggagcaattccacaaagaagccccgttcaggtttgatagcatccaccctcatcaaatgctggatgccaggcacatcgagatccagcagatggaatcca

SEQ ID NO: 7959 - DNA, 120 bp, Artificial Sequence
  ENSG00000007174_32 (sequence is synthesized)
ctatggcctccatttctgagtctgccagcttatttgaagtcaatgtccctgactataagcagctgaggcagtgcaggaaggaggtctgccagctgaaggagctctgggacaccattggaa

SEQ ID NO: 7960 - DNA, 120 bp, Artificial Sequence
  ENSG00000007174_33 (sequence is synthesized)
tggtgacctccagcatccatgcctgggagaccacaccctggaggaatatcaacgtggaagccatggagttggagtgcaaacagtttgcccggcatatccgaaacctggacaaggaggtca

SEQ ID NO: 7961 - DNA, 120 bp, Artificial Sequence
  ENSG00000007174_34 (sequence is synthesized)
gggcctgggatgcattcacaggcctggaaagcactgtgtggaacacgctgagctccctgagggcagtagctgagctgcagaatccagccatccgggagcggcactggaggcagctgatgc

SEQ ID NO: 7962 - DNA, 120 bp, Artificial Sequence
  ENSG00000007174_35 (sequence is synthesized)
aggccaccggtgtgagcttcactatggaccaggacaccaccctagcgcacctgctgcagctccagctgcaccactatgaggatgaggtccggggcattgtggacaaagctgcaaaagaga

SEQ ID NO: 7963 - DNA, 120 bp, Artificial Sequence
  ENSG00000007174_36 (sequence is synthesized)
tgggtatggagaaaaccttaaaggagctgcagactacctgggctggcatggaattccagtatgagccccacccacggaccaatgtccccctcctgtgctctgatgaggacctcatagagg

SEQ ID NO: 7964 - DNA, 120 bp, Artificial Sequence
  ENSG00000007174_37 (sequence is synthesized)
ttctggaggataatcaagttcaacttcagaacctggtgatgtccaagtatgttgctttcttcttggaggaggtgtcgggctggcagaagaagctgtccacagtggacgctgtcatctcta

SEQ ID NO: 7965 - DNA, 120 bp, Artificial Sequence
  ENSG00000007174_38 (sequence is synthesized)
tctggtttgaagtgcagcgaacatggactcacctggaaagcatattcactggatctgaagatattcgggcacagctaccccaggattctaaaaggtttgaaggcatcgacattgacttta

SEQ ID NO: 7966 - DNA, 120 bp, Artificial Sequence
  ENSG00000007174_39 (sequence is synthesized)
aagagctagcttatgatgcccagaaaattccaaatgtagtgcaaaccaccaacaagccaggcctgtatgaaaagctggaggatattcagggcagattgtgcctgtgtgagaaggccctgg

SEQ ID NO: 7967 - DNA, 120 bp, Artificial Sequence
  ENSG00000007174_40 (sequence is synthesized)
cagagtacctcgacaccaagaggcttgccttcccgcggttttactttctctcctcctccgatctgttagacatcctttccaacggcacagctccacaacaggttcaacgtcacctttcca

SEQ ID NO: 7968 - DNA, 120 bp, Artificial Sequence
  ENSG00000007174_41 (sequence is synthesized)
aactctttgacaacatggccaagatgcgattccagctagatgccagtggggaaccaaccaagacaagcctcggcatgtacagcaaagaagaggagtatgtggctttcagtgagccctgtg

SEQ ID NO: 7969 - DNA, 120 bp, Artificial Sequence
  ENSG00000007174_42 (sequence is synthesized)
actgcagcgggcaggtagaaatatggctgaaccatgtccttggtcacatgaaggccactgtgaggcatgagatgacagaaggtgtaactgcctatgaagaaaagccgagggagcagtggc

SEQ ID NO: 7970 - DNA, 120 bp, Artificial Sequence
  ENSG00000007174_43 (sequence is synthesized)
tttttgaccacccagctcaggtggccctgacctgtactcagatctggtggacaacagaagtgggcatggcatttgccaggctggaggaaggctatgagagtgccatgaaggactattata

SEQ ID NO: 7971 - DNA, 120 bp, Artificial Sequence
  ENSG00000007174_44 (sequence is synthesized)
agaagcaagtggcccagctcaaaacccttatcaccatgctgattggccagctctccaagggagaccggcagaagattatgactatatgcaccatcgatgtgcatgcccgggatgtggtag

SEQ ID NO: 7972 - DNA, 120 bp, Artificial Sequence
  ENSG00000007174_45 (sequence is synthesized)
ccaagatgattgctcagaaggtagacaatgcccaggctttcctctggctgtctcagctgcgccatcgttgggatgacgaggtcaaacactgctttgccaacatctgtgatgcccagtttt

SEQ ID NO: 7973 - DNA, 120 bp, Artificial Sequence
  ENSG00000007174_46 (sequence is synthesized)
tgtattcctatgagtacctgggaaacacacctcgcttggtgatcacacctttgactgacaggtgctacatcaccctcacccagtccctgcacctgaccatgagtggggctcccgcaggac

SEQ ID NO: 7974 - DNA, 120 bp, Artificial Sequence
  ENSG00000007174_47 (sequence is synthesized)
ctgcaggcacaggcaagaccgagaccaccaaggacctgggccgcgcactgggcatcctggtctatgtgttcaactgctcggagcagatggattacaagtcttgtggcaacatctacaaag

SEQ ID NO: 7975 - DNA, 120 bp, Artificial Sequence
  ENSG00000007174_48 (sequence is synthesized)
gccttgctcagactggtgcctggggctgctttgatgagtttaatcgaatctccgtggaggtcttgtcagtggtggcagtgcaggtaaaaagcattcaagatgcgattagagataagaagc

SEQ ID NO: 7976 - DNA, 120 bp, Artificial Sequence
  ENSG00000007174_49 (sequence is synthesized)
agtggttcagcttccttggggaggagatcagcctgaatccttctgtcggtatcttcatcaccatgaacccaggctatgctggccgcacagagctgccagagaatctcaagtctctcttca

SEQ ID NO: 7977 - DNA, 120 bp, Artificial Sequence
  ENSG00000007174_50 (sequence is synthesized)
ggccttgtgcaatggtggttccagactttgaattgatctgtgaaatcatgctggtggcagaaggattcattgaagcccagtcattagccagaaagttcatcactctttaccagttgtgca

SEQ ID NO: 7978 - DNA, 120 bp, Artificial Sequence
  ENSG00000007174_51 (sequence is synthesized)
aagagcttctctccaaacaggatcactacgactggggcctacgggccatcaagtccgtgctggtggtggcaggatccctgaagagaggagaccctgaccggcctgaggaccaggtcctga

SEQ ID NO: 7979 - DNA, 120 bp, Artificial Sequence
  ENSG00000007174_52 (sequence is synthesized)
tgcgctccttgcgggatttcaacatccccaagattgtgactgatgacatgcccatcttcatgggcctgatcggggacctctttcccgccctggatgtcccccggaggagagaccccaact

SEQ ID NO: 7980 - DNA, 120 bp, Artificial Sequence
  ENSG00000007174_53 (sequence is synthesized)
tcgaagctttggttaggaaggcgatagtggatctgaagctccaggctgaggacaactttgtgctcaaggtggtccagctggaggagctcctggctgtgcggcactctgtatttgtggtgg

SEQ ID NO: 7981 - DNA, 120 bp, Artificial Sequence
  ENSG00000007174_54 (sequence is synthesized)
gtggcgctggtaccggcaagtcacaggtgctgaggtccttgcacaagacctatcagatcatgaaacggcgccccgtctggactgacctcaatcccaaagcagtcacaaatgatgagctct

SEQ ID NO: 7982 - DNA, 120 bp, Artificial Sequence
  ENSG00000007174_55 (sequence is synthesized)
ttggcatcatcaatccagccacaggagaatggaaggatggattgttctcttccatcatgcgggagcttgccaacatcacccatgatgggcccaagtggattttactggatggcgacatag

SEQ ID NO: 7983 - DNA, 120 bp, Artificial Sequence
  ENSG00000007174_56 (sequence is synthesized)
atccaatgtggattgaatccctgaatactgtcatggatgataacaaggtgctgacattggccagcaatgagaggattcctctgaaccccaccatgaagctcctctttgagatcagccacc

SEQ ID NO: 7984 - DNA, 120 bp, Artificial Sequence
  ENSG00000007174_57 (sequence is synthesized)
agcagggatcttgtacatcaacccggcagacttgggatggaaccctccagtgagcagctggattgagaagagggaaatccagacagagagagccaacttaaccattttgttcgacaagta

SEQ ID NO: 7985 - DNA, 120 bp, Artificial Sequence
  ENSG00000007174_58 (sequence is synthesized)
tcttccaacctgcctagacacactcagaaccaggtttaagaagatcattcccatcccagagcagagcatggttcagatggtgtgtcaccttctggaatgtctcctgaccacggaggacat

SEQ ID NO: 7986 - DNA, 120 bp, Artificial Sequence
  ENSG00000007174_59 (sequence is synthesized)
ccctgcagactgccctaaggaaatttatgagcattattttgtgtttgctgccatctgggctttcggcggagcaatggtccaagatcagcttgtggactaccgggcagagttcagcaaatg

SEQ ID NO: 7987 - DNA, 120 bp, Artificial Sequence
  ENSG00000007174_60 (sequence is synthesized)
gtggctgactgagttcaaaacagtcaagtttccttcccaaggaaccatctttgactattacatcgacccagagaccaagaaattcgagccttggtccaagctcgtcccccagttcgaatt

SEQ ID NO: 7988 - DNA, 120 bp, Artificial Sequence
  ENSG00000007174_61 (sequence is synthesized)
tgaccccgagatgcccttgcaggcgtgtttggtgcacacgagtgagaccatccgtgtgtgctacttcatggagcggttgatggcgcggcagcggcctgtcatgctggtgggcacggctgg

SEQ ID NO: 7989 - DNA, 120 bp, Artificial Sequence
  ENSG00000007174_62 (sequence is synthesized)
cactggcaagtcggtgctggtgggagctaagctggccagccttgaccccgaggcatacctggtgaaaaacgtgccattcaactactacaccacgtcagcaatgctgcaggctgtcctgga

SEQ ID NO: 7990 - DNA, 120 bp, Artificial Sequence
  ENSG00000007174_63 (sequence is synthesized)
gaagcctctggaaaagaaggctggcagaaactatggccctccagggaacaagaaactcatctatttcattgatgacatgaacatgcctgaggtggatgcctacgggacggtgcagcccca

SEQ ID NO: 7991 - DNA, 120 bp, Artificial Sequence
  ENSG00000007174_64 (sequence is synthesized)
caccatcatccggcagcatctggactatggccactggtatgatcggagcaagctgtccctaaaggagatcacaaatgtacagtatgtttcctgtatgaaccccacggcaggcagcttcac

SEQ ID NO: 7992 - DNA, 120 bp, Artificial Sequence
  ENSG00000007174_65 (sequence is synthesized)
catcaacccccggcttcagcgtcacttcagcgtgtttgtcctctccttcccgggggcagatgccctgtcctctatctacagcatcatcctcactcagcatctgaagctcggaaacttccc

SEQ ID NO: 7993 - DNA, 120 bp, Artificial Sequence
  ENSG00000007174_66 (sequence is synthesized)
ggcgtccctgcagaaatccatccccccactgatcgatctggccctcgccttccaccagaaaattgctaccaccttcctacccacaggaatcaaattccactacatcttcaacctcagaga

SEQ ID NO: 7994 - DNA, 120 bp, Artificial Sequence
  ENSG00000007174_67 (sequence is synthesized)
ttttgccaacattttccagggcattctcttctcctcagtggaatgtgtgaaatccacatgggatcttataaggctctatctgcatgaatcaaatcgagtttatcgggataagatggtaga

SEQ ID NO: 7995 - DNA, 120 bp, Artificial Sequence
  ENSG00000007174_68 (sequence is synthesized)
agaagtgctcaagaaaacttttgatgatattgaagaccctgtggagcagacccaaagcccgaacctgtattgtcactttgcaaatggtattggggagcccaaatacatgcctgtacagtc

SEQ ID NO: 7996 - DNA, 120 bp, Artificial Sequence
  ENSG00000007174_69 (sequence is synthesized)
tggtattggggagcccaaatacatgcctgtacagtcttgggaacttttgacccagactctggtggaggccttggagaaccacaatgaagtcaacacagtgatggacctagttctctttga

SEQ ID NO: 7997 - DNA, 120 bp, Artificial Sequence
  ENSG00000007174_70 (sequence is synthesized)
ggatgccatgcgccatgtctgccatatcaatcgcatcttggagtccccgcggggaaatgctctgctggttggtgtaggtgggagcggcaagcagagcctgacaaggctggcagctttcat

SEQ ID NO: 7998 - DNA, 120 bp, Artificial Sequence
  ENSG00000007174_71 (sequence is synthesized)
cagctccatggatgtcttccagatcacactgcgcaaaggctaccagatccaggacttcaagatggacctggccagcctgtgtctgaaagctggagtgaagaatctcaacacagtgtttct

SEQ ID NO: 7999 - DNA, 120 bp, Artificial Sequence
  ENSG00000007174_72 (sequence is synthesized)
catgactgatgcccaagtggctgatgagaggttccttgtgctcatcaatgatcttttggcatctggggagatcccagatctctactctgatgatgaagttgaaaacatcataagcaatgt

SEQ ID NO: 8000 - DNA, 120 bp, Artificial Sequence
  ENSG00000007174_73 (sequence is synthesized)
gaggaatgaagtcaagagccagggtctggttgacaacagagagaactgttggaagttctttatagatcggatccggcgacagctgaaggtgactctctgtttctcccctgtgggaaacaa

SEQ ID NO: 8001 - DNA, 120 bp, Artificial Sequence
  ENSG00000007174_74 (sequence is synthesized)
gctaagagtccgcagcaggaagttcccagccattgtgaactgcacagccatccactggttccacgagtggcctcagcaagcattggagtctgtcagcctccgcttcttgcagaacacaga

SEQ ID NO: 8002 - DNA, 120 bp, Artificial Sequence
  ENSG00000007174_75 (sequence is synthesized)
gggcattgagcccacagtaaagcagtcgattagcaaattcatggcctttgtccacacaagtgtcaaccaaacatcccagtcttatctgagcaatgaacagcgctacaactatacaactcc

SEQ ID NO: 8003 - DNA, 120 bp, Artificial Sequence
  ENSG00000007174_76 (sequence is synthesized)
caagtcctttctggagttcatcagactctaccagagcttgttgcacaggcacagaaaagagctcaagtgcaagacagagcggttggagaacgggctgctgaagctgcatagcacctctgc

SEQ ID NO: 8004 - DNA, 120 bp, Artificial Sequence
  ENSG00000007174_77 (sequence is synthesized)
ccaggtggatgatctgaaagcaaagctggctgcccaggaagtagagctgaagcagaaaaatgaagatgcagacaaactgattcaggtcgtgggtgtggagactgacaaagtgagcagaga

SEQ ID NO: 8005 - DNA, 120 bp, Artificial Sequence
  ENSG00000007174_78 (sequence is synthesized)
gaaagccatggcagatgaagaggagcagaaggtggccgtcatcatgctagaggtgaaacagaagcagaaggactgtgaggaggacctggcaaaggctgagccagcactcacagcagcgca

SEQ ID NO: 8006 - DNA, 120 bp, Artificial Sequence
  ENSG00000007174_79 (sequence is synthesized)
ggcagctctcaacaccctgaacaagaccaacctgacagagctgaagtcatttggctctccgcctctggccgtcagcaatgtcagcgctgcggtgatggtactgatggctcccaggggtag

SEQ ID NO: 8007 - DNA, 120 bp, Artificial Sequence
  ENSG00000007174_80 (sequence is synthesized)
ggtgcccaaggaccggagctggaaggctgctaaggtcaccatggccaaagtggatggcttcctggactcgctaataaacttcaacaaagagaacattcacgagaactgcctcaaagccat

SEQ ID NO: 8008 - DNA, 120 bp, Artificial Sequence
  ENSG00000007174_81 (sequence is synthesized)
caggccgtatctgcaagaccccgagttcaatcctgagtttgtggccaccaaatcctatgcggctgcaggcctctgctcctgggtcatcaatattgtgagattttatgaggtgttctgtga

SEQ ID NO: 8009 - DNA, 120 bp, Artificial Sequence
  ENSG00000007174_82 (sequence is synthesized)
tgtggaacccaagcgccaggcactgaacaaagccaccgcggacctcacagctgcccaggagaagctggctgccatcaaagccaagatcgctcaccttaatgaaaacctggcaaagctcac

SEQ ID NO: 8010 - DNA, 120 bp, Artificial Sequence
  ENSG00000007174_83 (sequence is synthesized)
agccaggtttgagaaagcaacagcagacaaactcaaatgtcagcaagaagccgaagtgaccgcagtcaccatctcccttgccaaccgcctggttggaggactcgcttctgaaaacgtgag

SEQ ID NO: 8011 - DNA, 120 bp, Artificial Sequence
  ENSG00000007174_84 (sequence is synthesized)
gtgggcagatgccgtgcagaacttcaaacagcaggaaaggacgttatgtggagacattttacttataacggctttcatttcctaccttggcttcttcacaaagaaataccggcagagcct

SEQ ID NO: 8012 - DNA, 120 bp, Artificial Sequence
  ENSG00000007174_85 (sequence is synthesized)
cctggacagaacttggaggccctacctgagccagctgaaaactcccattccagtcaccccagccctggatcccctgaggatgctgatggatgatgctgacgtggctgcctggcagaacga

SEQ ID NO: 8013 - DNA, 120 bp, Artificial Sequence
  ENSG00000007174_86 (sequence is synthesized)
gggcctcccagccgaccgcatgtccgtggagaatgccaccattctcatcaactgtgagcgctggccactcatggttgaccctcagctacaaggcatcaaatggatcaagaataaatatgg

SEQ ID NO: 8014 - DNA, 120 bp, Artificial Sequence
  ENSG00000007174_87 (sequence is synthesized)
tgaagatctccgggtcacgcagattggtcagaaaggctaccttcaaatcatagagcaggccctggaagctggagctgtggtgctgattgaaaatctagaggagtccattgatcctgttct

SEQ ID NO: 8015 - DNA, 120 bp, Artificial Sequence
  ENSG00000007174_88 (sequence is synthesized)
gggacccctgcttgggagagaagtcattaaaaaaggacgattcattaaaattggagacaaagaatgtgaatacaatcccaagttccggctcatcctccacaccaagctggctaatcctca

SEQ ID NO: 8016 - DNA, 120 bp, Artificial Sequence
  ENSG00000007174_89 (sequence is synthesized)
ctaccagcctgagctgcaggctcaggccaccctgatcaacttcaccgtgaccagggatggcctggaggaccagttgctggccgctgtggtcagcatggagaggccagacttggagcagct

SEQ ID NO: 8017 - DNA, 120 bp, Artificial Sequence
  ENSG00000007174_90 (sequence is synthesized)
gaagtccgatctcacaaagcagcagaatggattcaaaattaccctgaaaacgttggaagacagtcttctctctcgcctctcctccgcctctgggaacttcctgggagaaacagtgctggt

SEQ ID NO: 8018 - DNA, 120 bp, Artificial Sequence
  ENSG00000007174_91 (sequence is synthesized)
ggaaaacctagagatcaccaagcagactgctgccgaagttgagaaaaaggtccaggaggccaaggtgactgaagtgaaaatcaacgaggcccgagagcactaccggccagcagctgccag

SEQ ID NO: 8019 - DNA, 120 bp, Artificial Sequence
  ENSG00000007174_92 (sequence is synthesized)
ggcctcactgctctacttcatcatgaacgacctcagcaagatccatccaatgtaccagttttctctcaaggccttcagtatcgtcttccagaaggctgtggagagggctgctcctgacga

SEQ ID NO: 8020 - DNA, 120 bp, Artificial Sequence
  ENSG00000007174_93 (sequence is synthesized)
aagcctcagggagcgggtggccaacctaatagacagcataaccttctctgtgtaccagtacaccatccgcgggctctttgagtgtgataagctgacctaccttgcccagctcacctttca

SEQ ID NO: 8021 - DNA, 120 bp, Artificial Sequence
  ENSG00000007174_94 (sequence is synthesized)
gattctcctcatgaaccgagaagtcaatgcagtggagttggatttcctgcttcgatctccagtgcagacgggcaccgccagccccgtggagttcctctcccatcaggcgtggggagctgt

SEQ ID NO: 8022 - DNA, 120 bp, Artificial Sequence
  ENSG00000007174_95 (sequence is synthesized)
caaggtactttcatcaatggaagaattctctaatctggatcgggacatagagggatctgctaagagctggaaaaagtttgtggagtccgaatgtcctgagaaagagaagctcccacagga

SEQ ID NO: 8023 - DNA, 120 bp, Artificial Sequence
  ENSG00000007174_96 (sequence is synthesized)
gtggaagaacaagacagccctgcagcgcctctgcatgctgagagccatgcggcccgaccggatgacctatgctttgcgagattttgttgaagagaagttaggaagcaaatacgtggtggg

SEQ ID NO: 8024 - DNA, 120 bp, Artificial Sequence
  ENSG00000007174_97 (sequence is synthesized)
aagagccctagattttgcaacctcatttgaagaatcgggaccagccactcctatgtttttcatcctgtctccaggggtggacccactgaaggatgtagaaagtcaaggaagaaaacttgg

SEQ ID NO: 8025 - DNA, 120 bp, Artificial Sequence
  ENSG00000007174_98 (sequence is synthesized)
atacaccttcaacaatcagaactttcacaacgtgtctttggggcaaggacaggaagtggtggctgaggctgcgctggacctcgctgccaagaaaggtcactgggttattttgcagaacat

SEQ ID NO: 8026 - DNA, 120 bp, Artificial Sequence
  ENSG00000007174_99 (sequence is synthesized)
tcacctggtggccaagtggctcagcaccctggagaagaagctggaggagcacagtgagaacagccacccagagttcagggtcttcatgagtgcagagccagcaccctcccctgagggcca

SEQ ID NO: 8027 - DNA, 120 bp, Artificial Sequence
  ENSG00000007174_100 (sequence is synthesized)
catcatcccccagggcatcctggagaactccattaagatcaccaatgagccccccacgggcatgcatgccaacctgcacaaggccctggacaacttcactcaggacactctggagatgtg

SEQ ID NO: 8028 - DNA, 120 bp, Artificial Sequence
  ENSG00000007174_101 (sequence is synthesized)
ttctcgggagacggagtttaagagcatcctctttgctctttgttacttccatgcggtggtggcagaaagacgaaaatttgggccccagggatggaatcgctcatacccctttaacactgg

SEQ ID NO: 8029 - DNA, 120 bp, Artificial Sequence
  ENSG00000007174_102 (sequence is synthesized)
agacctcactatctctgtgaatgtcctctacaacttcctggaggccaacgcaaaggtcccctatgatgatttgcgctacctgtttggagagatcatgtatggaggccatatcacagatga

SEQ ID NO: 8030 - DNA, 120 bp, Artificial Sequence
  ENSG00000007174_103 (sequence is synthesized)
ctgggacagaagactctgcagaacctacctgggggaattcattcgaccagaaatgttagaaggagaactgtctttggccccagggttcccactcccaggcaacatggactacaatggtta

SEQ ID NO: 8031 - DNA, 120 bp, Artificial Sequence
  ENSG00000007174_104 (sequence is synthesized)
tcatcagtacatcgatgctgagctgcccccagaatccccctacctctatggcctccacccgaacgcagagattggcttcctgacccaaacctcagaaaagctcttccgcactgtgctgga

SEQ ID NO: 8032 - DNA, 120 bp, Artificial Sequence
  ENSG00000007174_105 (sequence is synthesized)
gctgcagcctcgggacagccaggccagagacggagcgggcgccacaagagaagaaaaggtcaaggcacttctggaagaaatattggagcgggtgacagacgagtttaacatcccagaact

SEQ ID NO: 8033 - DNA, 120 bp, Artificial Sequence
  ENSG00000007174_106 (sequence is synthesized)
gatggccaaagtggaggagcgcaccccttacattgtagttgccttccaggagtgtggccggatgaatatcctcaccagagagattcagcgctcactgagggagctggagctcggcttaaa

SEQ ID NO: 8034 - DNA, 120 bp, Artificial Sequence
  ENSG00000007174_107 (sequence is synthesized)
gggggagctgactatgaccagccacatggagaacttacagaatgccctgtacttcgatatggtgccagagtcctgggctagacgagcctacccttccacagcaggcctggcagcctggtt

SEQ ID NO: 8035 - DNA, 120 bp, Artificial Sequence
  ENSG00000007174_108 (sequence is synthesized)
tccagacctcctcaacagaatcaaggagctagaggcttggacgggtgactttacaatgccctccactgtgtggctgacaggcttcttcaacccccagtcgttcctgactgccatcatgca

SEQ ID NO: 8036 - DNA, 120 bp, Artificial Sequence
  ENSG00000007174_109 (sequence is synthesized)
gtccacggctcgcaagaatgagtggccactggaccagatggccctgcaatgtgacatgacgaagaagaacagagaagagtttaggagtcctcctcgggaaggggcctacatccatggcct

SEQ ID NO: 8037 - DNA, 120 bp, Artificial Sequence
  ENSG00000007174_110 (sequence is synthesized)
cttcatggaaggtgcctgctgggacacacaggctgggatcattacagaggcaaagctgaaggatctgacaccccctatgcctgtgatgttcatcaaggccattcctgcagataagcagga

SEQ ID NO: 8038 - DNA, 120 bp, Artificial Sequence
  ENSG00000007174_111 (sequence is synthesized)
ctgccgcagtgtctattcctgtcctgtgtacaagactagtcagcggggacccacctacgtgtggactttcaacctgaagactaaggaaaacccatccaagtgggttctggctggagtagc

SEQ ID NO: 8039 - DNA, 120 bp, Artificial Sequence
  ENSG00000007174_112 (sequence is synthesized)
cttgcttctccagatttagcatcctgcagagccaccgagaaaataaaaaagctgggcttggaggctgcctagagggacaggtgggtgaagggtcaccacagacacttagaacggtaagaa

SEQ ID NO: 8040 - DNA, 120 bp, Artificial Sequence
  ENSG00000007174_113 (sequence is synthesized)
accatgagcactcacaattctgtagaattcctctagggaacttggagaggtgtgcctaaggtgaggctgagctgaaggaatgtgggcccaggtttcttaataaaatgatttactcttcaa

SEQ ID NO: 8041 - DNA, 120 bp, Artificial Sequence
  ENSG00000007174_114 (sequence is synthesized)
tacagagatgttgttgcagctccattctgcattttctattcctactgtcagatgggactgcaatttcctggccatttgagcaccagacaagatctacgcttatcaaaattgccaagccag

SEQ ID NO: 8042 - DNA, 120 bp, Artificial Sequence
  ENSG00000007174_115 (sequence is synthesized)
tccctttttcttgtaaaatctcctctttgctcttcagtaccataggtcaaaatgtgcttttaaaggtctttgtcatttcacatggtctaagcttaattaaagcagtgattttcaaacatt

SEQ ID NO: 8043 - DNA, 120 bp, Artificial Sequence
  ENSG00000007174_116 (sequence is synthesized)
atgagtacctgggaaacacacctcgcttggtgatcacacctttgactgacaggtgagcactggtgtcaaccactgacagccttactgctgtctggttcaggccagctagtgggcatctag

SEQ ID NO: 8044 - DNA, 120 bp, Artificial Sequence
  ENSG00000007174_117 (sequence is synthesized)
ggtcaaagtccctgtcacttgctatttgtccatagagctacagggaaagggcctgactcaacacagcctgtttaaagtgaaactgaaaggatgtagggcagagcctttcttggaacaaat

SEQ ID NO: 8045 - DNA, 120 bp, Artificial Sequence
  ENSG00000007174_118 (sequence is synthesized)
cccagagcaaatcaatgagccgtgactttttgaggaattactaaatggtcatacacacccgagttctaacaccagccctaacacataccagctgtttgattattaaaaacattgacctaa

SEQ ID NO: 8046 - DNA, 120 bp, Artificial Sequence
  ENSG00000007174_119 (sequence is synthesized)
gaagccatgtctattctccagcttcaccggagtcctagtcccgtctctctctaatggggcagtgggcatctcttgaatgcccttctcttgcattgtggttagcactcttcctttctccct

SEQ ID NO: 8047 - DNA, 120 bp, Artificial Sequence
  ENSG00000007174_120 (sequence is synthesized)
gccagattccccaccatcaggaaggatcatctcattttccctgagatcctggtggaaaacttcaggaacctgggttacttcatgtccttccttccctacctctaatcggtcaccagtgtc

SEQ ID NO: 8048 - DNA, 120 bp, Artificial Sequence
  ENSG00000007174_121 (sequence is synthesized)
caaagctcaccatcccacagcaagataatgccccagcctcgctgacaggaccaggagatatgtgtcttgtggcaacatctacaaaggccttgctcagactggtgcctggggctgctttga

SEQ ID NO: 8049 - DNA, 120 bp, Artificial Sequence
  ENSG00000007174_122 (sequence is synthesized)
tgagtttaatcgaatctccgtggaggtcttgtcagtggtggcagtgcaggtaagggccagaagttggtgggagccttgtggtcttcatattgattactgcggaagtctatgtcctcttgt

SEQ ID NO: 8050 - DNA, 120 bp, Artificial Sequence
  ENSG00000007174_123 (sequence is synthesized)
agtccttgtaaatttccgacccgacacaaactagcatggtggcaagaataccacatctagatacatgagagcagctaaacagagctatgctgtttgcagttccactgctgtatggcctgg

SEQ ID NO: 8051 - DNA, 120 bp, Artificial Sequence
  ENSG00000007174_124 (sequence is synthesized)
gaaaattcacctagcccctctgagctttagtacgtgtgttggttatggggcatacacttctgcctacttttctaggtccgtgtgagattatacaggtggaagaacttattgacttaacac

SEQ ID NO: 8052 - DNA, 120 bp, Artificial Sequence
  ENSG00000007174_125 (sequence is synthesized)
aacaatgttcctggagctgtccctttgtgtctttcaaacactggggccaggacatacagttctggggtggccattatggagcctgtgtgaccaactccagggtggtcatgtgagtccatc

SEQ ID NO: 8053 - DNA, 120 bp, Artificial Sequence
  ENSG00000007174_126 (sequence is synthesized)
tgtcctaatcaaggactacccttctggcaagacagcctaaccatgccttccaggacctgggattattggctgggacccctcattaactaagtgcttgtacctccctggcacgctgggaac

SEQ ID NO: 8054 - DNA, 120 bp, Artificial Sequence
  ENSG00000007174_127 (sequence is synthesized)
tcctgggtctggtcaaaggtctttctgggcctgtcttcagggtctggaaactactagaagaaagttcttccatccgatctgcctacagctgctgctttgcactgtacaaatccatgttgt

SEQ ID NO: 8055 - DNA, 120 bp, Artificial Sequence
  ENSG00000007174_128 (sequence is synthesized)
gttttaagaaacaagaaaggtcagggtggctgtggttggaacctccaacaggaaggttgttcttcccacgaatccaaaggctgtacaagggcaaagacactacagctgcctgaagttagt

SEQ ID NO: 8056 - DNA, 120 bp, Artificial Sequence
  ENSG00000007174_129 (sequence is synthesized)
gctttaggatatggagcataaagagaggaagagatgagatccacttggataccagcaccccactccagcctcgaggaagcttttacacagtctgccatggttttacacagtttaaaactg

SEQ ID NO: 8057 - DNA, 120 bp, Artificial Sequence
  ENSG00000007174_130 (sequence is synthesized)
cagacagaaagaagcagtccaggggtccaaaaagtggaataggaaaatgcacaacacaacctcatagccaaccctccatcagctggaataatccataataaaggttcaattggccagtca

SEQ ID NO: 8058 - DNA, 120 bp, Artificial Sequence
  ENSG00000007174_131 (sequence is synthesized)
agaagacggggtgtgatgggaaaggggcccaacccctgctctgttccagcataccaccaaacctccaacaaggccttttgcagtctcagtctcgcgcttgcatcagaagggcattggaga

SEQ ID NO: 8059 - DNA, 120 bp, Artificial Sequence
  ENSG00000007174_132 (sequence is synthesized)
tattggccctgagcaggacagagcatatctgtaacagtgtccaggaacaatatacctttgacggaagatgcttattgccagattattgggatttctccaaatatgaaagacttcgttcta

SEQ ID NO: 8060 - DNA, 120 bp, Artificial Sequence
  ENSG00000007174_133 (sequence is synthesized)
ctgaaacaaaaggccggtgggtcaaggaatccatgaagaaattaaagaaagaataaatgcaaaagccagtcactcccattcttcccggctttcactaccatgaacctcccccatctcctg

SEQ ID NO: 8061 - DNA, 120 bp, Artificial Sequence
  ENSG00000007174_134 (sequence is synthesized)
attactggtgacatcacatcttgctgctgggtctttgtccttaattattcagttatttatttggagcctagcaactgagagatctgcccctcccagggcctccttttccagaaacatcag

SEQ ID NO: 8062 - DNA, 85 bp, Artificial Sequence
  ENSG00000007174_135 (sequence is synthesized)
tgcagtgagccgagatcgcgccactgtgctctagcctggcgatagaggctgtattgctttgctgtctcactcataagtgggagtt

SEQ ID NO: 8063 - DNA, 120 bp, Artificial Sequence
  ENSG00000007202_0 (sequence is synthesized)
ctgcgcgcgcagctggtcggcccgcggcggtgctgcgcggatccggcgtcggggcccggcatggcgggggccggggccaagccgggccggacccggacctaaatgcctctgttcttctcc

SEQ ID NO: 8064 - DNA, 120 bp, Artificial Sequence
  ENSG00000007202_1 (sequence is synthesized)
gcgctgttggtcttgctgctagttgcgcttagcgccctctttctaggccggtggcttgtggtccggttggccaccaagtggtgtcagcggaagctgcaggcggagctaaagattggctcc

SEQ ID NO: 8065 - DNA, 120 bp, Artificial Sequence
  ENSG00000007202_2 (sequence is synthesized)
ttccgctttttttggatccagaatgtcagtcttaagtttcagcaacaccagcaaacagtggaaattgataacctgtggatttccagcaaactccttagccatgatcttccacactatgtg

SEQ ID NO: 8066 - DNA, 120 bp, Artificial Sequence
  ENSG00000007202_3 (sequence is synthesized)
gcattgtgctttggagaagtgcgtatcagaacggacctacagaaagtttctgacctgtctgccccattctcccagagcgctggggtggatcaaaaggaactgtccttcagcccatcctta

SEQ ID NO: 8067 - DNA, 120 bp, Artificial Sequence
  ENSG00000007202_4 (sequence is synthesized)
ttgaagatcttctgccaactattctccattcatgtagatgctataaacatcatggttctcaaggtggatacctctgagtccttatggcatattcagatcagtagaagcagatttcttttg

SEQ ID NO: 8068 - DNA, 120 bp, Artificial Sequence
  ENSG00000007202_5 (sequence is synthesized)
gatagtgatgggaaaaggctaatctgtgaggtgagcttatgtaagatcaacagcaaagttctaaagagtggtcagctggaggacacctgcctagtggagctttcactggccctggacctg

SEQ ID NO: 8069 - DNA, 120 bp, Artificial Sequence
  ENSG00000007202_6 (sequence is synthesized)
tgtctaaaggtgggcattagcagtcggcatctcactgctatcactgtggatgtgtggacactccatgctgaactgcatgagggcctcttccagagccaactgctgtgccagggcccaagc

SEQ ID NO: 8070 - DNA, 120 bp, Artificial Sequence
  ENSG00000007202_7 (sequence is synthesized)
ctagcatctaagcctgttccctgttcagaggtgacagaaaacttagttgagccaactctgcctggcctattccttctccagcagctgccagaccaggtcaaggttaagatggagaacaca

SEQ ID NO: 8071 - DNA, 120 bp, Artificial Sequence
  ENSG00000007202_8 (sequence is synthesized)
agcgtggtattgtccatgaatagtcaaaagaggcacctgacttggactctgaagctgctgcagttcctgtaccaccgtgatgaggatcagctgccccttcgaagcttcacagcaaactct

SEQ ID NO: 8072 - DNA, 120 bp, Artificial Sequence
  ENSG00000007202_9 (sequence is synthesized)
gatatggcacagatgagcactgaactgctgctggaagatgggttgttgttgtcccagagtcgccaacgcattgtctgcctcaactccctcaaggctagtgtgcaggtgaccaccattgac

SEQ ID NO: 8073 - DNA, 120 bp, Artificial Sequence
  ENSG00000007202_10 (sequence is synthesized)
ctctcagcctccctagttctgaacacttgcatcattcactaccggcaccaggaattctctcactggctgcacctgctagcactggaaacccaagggtctagttcacctgttctaaagcaa

SEQ ID NO: 8074 - DNA, 120 bp, Artificial Sequence
  ENSG00000007202_11 (sequence is synthesized)
aggaaaaaaagaaccttcccccaaatcctggctcccatcatctttagcacctccatctccaatgtcaacatttccattcaacttggagatacaccaccttttgccttgggattcaattct

SEQ ID NO: 8075 - DNA, 120 bp, Artificial Sequence
  ENSG00000007202_12 (sequence is synthesized)
atctctctggattaccagcacctcaggccacaaagcatccatcagcggggcgtcctaactgtggaccacctctgctggcgtgtgggcagtgactcccacattcagcgggcgccacaccca

SEQ ID NO: 8076 - DNA, 120 bp, Artificial Sequence
  ENSG00000007202_13 (sequence is synthesized)
cccaatatgcatgtttggggtgaggcacttgttctggactccttcacactacagggtagctataaccagcctctgggcctgtccagcacccagtcagataccctttttcttgattgtacc

SEQ ID NO: 8077 - DNA, 120 bp, Artificial Sequence
  ENSG00000007202_14 (sequence is synthesized)
attcgaggacttcaggtggaagcatcagatacctgtgcccaatgtctgtctcgtatcttatccctgatgggtccacaatctgggaagtcagctgtctctaggcactcttcatttggggaa

SEQ ID NO: 8078 - DNA, 120 bp, Artificial Sequence
  ENSG00000007202_15 (sequence is synthesized)
tctgtgtcattactgtggaaggtggacttgaaggtcgaagacatgaacttgtttaccctttctgccttggttggtgcttcagaggtacgactggacaccctaactatcctgggcagtgca

SEQ ID NO: 8079 - DNA, 120 bp, Artificial Sequence
  ENSG00000007202_16 (sequence is synthesized)
gagacgtccactgtggggattcaaggacttgtgttagcgctggtgaaatcagtcacggagaagatgcaaccctgttgcaaggcccctgacatccctaccccagtgctcagcctttccatg

SEQ ID NO: 8080 - DNA, 120 bp, Artificial Sequence
  ENSG00000007202_17 (sequence is synthesized)
ctctccatcacctatcacagcagcatccgctctctggaggttcagtgtggtgcagggctgaccttactttggagccccccagatcacatgtacctgtaccagcatgtcctggccactcta

SEQ ID NO: 8081 - DNA, 120 bp, Artificial Sequence
  ENSG00000007202_18 (sequence is synthesized)
cagtgccgagacctactaagagccactgtgtttcctgagactgtaccatcccttgcactagagacttcaggaactacttctgagctagaaggccgtgcccctgagccattacccccaaag

SEQ ID NO: 8082 - DNA, 120 bp, Artificial Sequence
  ENSG00000007202_19 (sequence is synthesized)
cggctgctaaacctaaccctggaggtgagcacagccaagctcacagcttttgtagctgaggacaagttcattaccctggctgcagagagtgtgtcactgagccggcatggaggttccctg

SEQ ID NO: 8083 - DNA, 120 bp, Artificial Sequence
  ENSG00000007202_20 (sequence is synthesized)
caggcatactgtccagagctggctgctggctttgatggcaatagtatcttcaacttcaaggaggtggaggtgcagctgctacctgagctggaagagatgatcctccaccggaaccccttc

SEQ ID NO: 8084 - DNA, 120 bp, Artificial Sequence
  ENSG00000007202_21 (sequence is synthesized)
cctgcgctgcagaccctccggaaccgtgtttggctcctctctttcggctcagtctcggtggagtttccttatcagtatgacttttctcgaactctagatgaggctgtgggagttcagaag

SEQ ID NO: 8085 - DNA, 120 bp, Artificial Sequence
  ENSG00000007202_22 (sequence is synthesized)
tggctgaagggactacatcaagggactcgtgcttgggcctctccaagccctgtcccactcccacctgatctactcttaaaggttgagcacttctcatgggttttcttggatgatgttttt

SEQ ID NO: 8086 - DNA, 120 bp, Artificial Sequence
  ENSG00000007202_23 (sequence is synthesized)
gaggtgaaacttcatgataactacgagctgatgaaggatgaaagtaaggagagtgccaaaagactacagctactggatgctaaagtggccgcccttcggaagcagcatggggagttgttg

SEQ ID NO: 8087 - DNA, 120 bp, Artificial Sequence
  ENSG00000007202_24 (sequence is synthesized)
cctgcccgcaaaattgaggagctctatgcctctttggaacgcaaaaacattgaaatctacatccagcgttcccgtcgtctctatggcaacacacccatgcgccgggcactgcttacttgg

SEQ ID NO: 8088 - DNA, 120 bp, Artificial Sequence
  ENSG00000007202_25 (sequence is synthesized)
agcttagcagggctagaactggtagctctggcagatgcctccttccatggtcctgagcatgtggtagaacaggttcaagagcttgatccaggcagcccttttccccctgagggattagat

SEQ ID NO: 8089 - DNA, 120 bp, Artificial Sequence
  ENSG00000007202_26 (sequence is synthesized)
cttgtcattcagtggtgtcgaatgctcaagtgcaatgtcaagagctttctggttcggatcagggactatccacggtacctgtttgagatccgtgactggcggctaatgggtcgacttgtg

SEQ ID NO: 8090 - DNA, 120 bp, Artificial Sequence
  ENSG00000007202_27 (sequence is synthesized)
ggcaccgagcagagtggtcagccttgctcccgtcggcgtcagatcttgcacttggggcttccgtggggtaacgtggcagtggagaggaacatgcccccactcaaattctaccatgacttt

SEQ ID NO: 8091 - DNA, 120 bp, Artificial Sequence
  ENSG00000007202_28 (sequence is synthesized)
cactcggaaatattccagtacacagtggtgtggggcccatgctgggatccagcctggacactaattggccagtgtgtggacctcttgaccaagccctcagctgaccccagcccacctttg

SEQ ID NO: 8092 - DNA, 120 bp, Artificial Sequence
  ENSG00000007202_29 (sequence is synthesized)
ccctggtgggacaagagccgtcttctgttccatggagactggcacatggacattgaacaggcgaacctgcaccagctggccactgaggatccatacaacacaactgaaaatatgcactgg

SEQ ID NO: 8093 - DNA, 120 bp, Artificial Sequence
  ENSG00000007202_30 (sequence is synthesized)
cacctgcctgacctctgcatgacactggacctgcagtggctgtgccatgggaacccccatgatcaccatagtgtcactctgcgggccccagagttcctgcctgaggtgcccttgggccag

SEQ ID NO: 8094 - DNA, 120 bp, Artificial Sequence
  ENSG00000007202_31 (sequence is synthesized)
cttcatgactcctaccgggcctttcgctcggagaacctcaatctctccatcaagatggatctgactcggcacagtggaacaatatcccagccccgaattctgctatatagtagtaccctg

SEQ ID NO: 8095 - DNA, 120 bp, Artificial Sequence
  ENSG00000007202_32 (sequence is synthesized)
cgctggatgcaaaacttctgggcaacttggacaagtgtcacaaggcctatctgcaggggaaagctcttcaataacctgaaacccagcaagaagaaacttggtcagcactacaagcaactt

SEQ ID NO: 8096 - DNA, 120 bp, Artificial Sequence
  ENSG00000007202_33 (sequence is synthesized)
tcctatacagccctctttccccagctgcaggtacattattgggcctcatttgcccagcaacggggcatccagattgagtgcagtcagggccatgtcttcactcgggggactcagcggctt

SEQ ID NO: 8097 - DNA, 120 bp, Artificial Sequence
  ENSG00000007202_34 (sequence is synthesized)
atacctcaagcaggcacagtgatgcggcgccttatctctgattggagtgttacccagatggtgagtgacctaagtcaggtgaccgttcacctgatggcctcacccactgaagagaatgct

SEQ ID NO: 8098 - DNA, 120 bp, Artificial Sequence
  ENSG00000007202_35 (sequence is synthesized)
gatcactgtcttgatcccttggtaacaaagacccacctgctgagcttgtcctccctcacctaccaacggcatagcaatcgcacagctgaggaggagctctctgctcgtgatggggatcct

SEQ ID NO: 8099 - DNA, 120 bp, Artificial Sequence
  ENSG00000007202_36 (sequence is synthesized)
acctttcatacacatcagctgcacttagtagatttacggatttcctggacaactaccaatcgagacattgcctttgggttatatgatgggtacaaaaaggcagctgtactcaaacgtaat

SEQ ID NO: 8100 - DNA, 120 bp, Artificial Sequence
  ENSG00000007202_37 (sequence is synthesized)
ctttctactgaggccctgaaggggttaaagattgatccacagatgccagccaaaaagccaaagcggggtgtcccaactagtgcctcagccccacctcgtgttaacactcccagcttcagt

SEQ ID NO: 8101 - DNA, 120 bp, Artificial Sequence
  ENSG00000007202_38 (sequence is synthesized)
ggacaacctgataaggggtcatcaggaggtgcttacatgttgcagaagctaattgaagagacagataggtttgtagtgttcacagaagaggaatcaggcatgagtgaccagttgtgtggc

SEQ ID NO: 8102 - DNA, 120 bp, Artificial Sequence
  ENSG00000007202_39 (sequence is synthesized)
attgctgcctgccagacggatgacatatacaaccgaaactgccttattgaattggtcaactgtcagatggttcttcgtggagcagagacagaaggctgtgtcattgtgtcagctgccaaa

SEQ ID NO: 8103 - DNA, 120 bp, Artificial Sequence
  ENSG00000007202_40 (sequence is synthesized)
gcccaactgctgcagtgccagcaccatccagcctggtatggtgatacattgaagcaaaagacatcctggacttgcctcttggatggcatgcagtactttgccaccactgaaagcagcccc

SEQ ID NO: 8104 - DNA, 120 bp, Artificial Sequence
  ENSG00000007202_41 (sequence is synthesized)
acagagcaggatggccgacagctctggttagaggtgaagaatatcgaggagcaccggcagcgtagtctggactctgtgcaggagctgatggagagtgggcaggcagtgggcggcatggtt

SEQ ID NO: 8105 - DNA, 120 bp, Artificial Sequence
  ENSG00000007202_42 (sequence is synthesized)
accacaaccacagattggaaccagccagctgaggcacagcaagcccagcaagtccagcggatcatttcgcgttgcaactgccgaatgtactatattagttacagccatgacattgatcct

SEQ ID NO: 8106 - DNA, 120 bp, Artificial Sequence
  ENSG00000007202_43 (sequence is synthesized)
gaactagcaactcagattaagccacctgaagttcttgagaaccaggaaaaggaagatctcctaaagaagcaggaaggggctgtggataccttcacccttatccaccatgagctggaaatt

SEQ ID NO: 8107 - DNA, 120 bp, Artificial Sequence
  ENSG00000007202_44 (sequence is synthesized)
tccaccaacccagctcagtatgccatgatcctggacattgtcaacaacctgctgctccatgtagaacctaagcggaaggaacatagtgagaagaagcaacgggtcaggttccagcttgag

SEQ ID NO: 8108 - DNA, 120 bp, Artificial Sequence
  ENSG00000007202_45 (sequence is synthesized)
atctctagcaatccagaggagcaacgcagcagcatactgcatttgcaggaggctgtgcggcagcatgtggcccaaatacgacagctggagaagcagatgtattctatcatgaagtctttg

SEQ ID NO: 8109 - DNA, 120 bp, Artificial Sequence
  ENSG00000007202_46 (sequence is synthesized)
caggatgacagcaagaatgagaatctgcttgacctgaaccagaagcttcagttgcagctaaaccaggagaaggccaacctgcagctggaaagtgaagaactgaatatcctcatcaggtgt

SEQ ID NO: 8110 - DNA, 120 bp, Artificial Sequence
  ENSG00000007202_47 (sequence is synthesized)
tttaaggatttccaactgcagcgggctaacaagatggagctgcgaaagcagcaagaagatgtgagtgtggtccgtcgcactgagttttactttgctcaggcacggtggcgcctgacagag

SEQ ID NO: 8111 - DNA, 120 bp, Artificial Sequence
  ENSG00000007202_48 (sequence is synthesized)
gaagatggacagctgggaattgctgaattagaactgcagaggttcctctacagcaaggtgaataagtctgatgacacagcagaacatcttctggagttgggctggtttaccatgaacaac

SEQ ID NO: 8112 - DNA, 120 bp, Artificial Sequence
  ENSG00000007202_49 (sequence is synthesized)
ctcctccccaatgctgtctataaggtagtactgcggccccagagctcctgccagtctgggcgacagctagctctccgcctcttcagcaaagttcggccccctgttgggggtatctctgtt

SEQ ID NO: 8113 - DNA, 120 bp, Artificial Sequence
  ENSG00000007202_50 (sequence is synthesized)
aaggagcattttgaggtaaatgtggtgcctctcaccatccagctgacacaccagttcttccacagaatgatgggctttttctttcctggccgaagtgtggaagatgatgaagttggtgat

SEQ ID NO: 8114 - DNA, 120 bp, Artificial Sequence
  ENSG00000007202_51 (sequence is synthesized)
gaagaggataagtccaaactggtgactactggaataccagtggtgaagcctcggcagctgattgcaacagatgatgcagtaccactgggccctgggaagggtgtggcacagggtttgact

SEQ ID NO: 8115 - DNA, 120 bp, Artificial Sequence
  ENSG00000007202_52 (sequence is synthesized)
cggagttctggggtcagaaggtcatttcgcaaatcgccagagcaccctgtggatgacattgacaagatgaaagagcgagctgccatgaacaactccttcatctacataaagattccacag

SEQ ID NO: 8116 - DNA, 120 bp, Artificial Sequence
  ENSG00000007202_53 (sequence is synthesized)
gttccactgtgtgtcagctacaagggtgagaagaacagtgtggactggggtgaccttaacctggtgctgccctgtctggagtaccacaacaacacatggacatggctagactttgccatg

SEQ ID NO: 8117 - DNA, 120 bp, Artificial Sequence
  ENSG00000007202_54 (sequence is synthesized)
gctgtcaaaagggacagccgcaaagccctggttgcccaggtaatcaaagagaagctaaggctgaagtctgcaacaggctctgaggtccggggaaagctagaaactaaatcggacctgaac

SEQ ID NO: 8118 - DNA, 120 bp, Artificial Sequence
  ENSG00000007202_55 (sequence is synthesized)
atgcaacagcaggaagaggaggagaaagcccggctcctcattggtttaagtgtgggcgacaagaaccctggcaagaagtccatctttggcaggcgcaaatgatttggcgattcgagtggc

SEQ ID NO: 8119 - DNA, 120 bp, Artificial Sequence
  ENSG00000007202_56 (sequence is synthesized)
tgcagtacaggatctgactctggctcaggctccagggacttgtggggtgggaggggcttcccgttatccacgaggatttgtgggtgtcagagcccataggcatcactcttcagcacctgg

SEQ ID NO: 8120 - DNA, 120 bp, Artificial Sequence
  ENSG00000007202_57 (sequence is synthesized)
tctgttcgctgcagggcatggtggacagtaatgctgagttctgtctcacactgatcaggctcagggccagagaggcaacaagagagcaagacccagggaatgggcccagggcaggaccct

SEQ ID NO: 8121 - DNA, 120 bp, Artificial Sequence
  ENSG00000007202_58 (sequence is synthesized)
attcccttggggtcaagtgaaagggtagggggatagtcctgatcaagtgtgataaatttttatagacatatataaatatatatatattatatatatatttctaagtgtaactgtccttcc

SEQ ID NO: 8122 - DNA, 120 bp, Artificial Sequence
  ENSG00000007202_59 (sequence is synthesized)
tctgtgccaggaaacgggagggggctgatcctctgatcctcactccactgtcatgtttgaaagaggtattggtgttctggagtgggggtcaacccctccccagtctctgtgctaagttca

SEQ ID NO: 8123 - DNA, 120 bp, Artificial Sequence
  ENSG00000007202_60 (sequence is synthesized)
cttgggaggatggcagtaggagccagggctggccatgggtcccctacccttccccgtaggatataccctggagaatggcaaaatgatttaaagagaaaaaaaaagatattttaaatttga

SEQ ID NO: 8124 - DNA, 120 bp, Artificial Sequence
  ENSG00000007202_61 (sequence is synthesized)
agctgggaattgctgaattagaactgcagaggttcctctacagcaaggtatctggggtatatggtcacacaaaggcagctgtattgagagacattgacctagcttaggagtctaactcat

SEQ ID NO: 8125 - DNA, 120 bp, Artificial Sequence
  ENSG00000007202_62 (sequence is synthesized)
tttcagccaccttcttgtcagttggattctctgggattcttttggtccaaattggcatcctgtgttaaatatgtatttggttgtttgacctcctcaaatccgagtctcaacagcaatcct

SEQ ID NO: 8126 - DNA, 120 bp, Artificial Sequence
  ENSG00000007202_63 (sequence is synthesized)
gttttatatatctttcccattagactagactccttgatagcagaatgctgtcctctttgtttttatgtcctcggtgctcagtgtagtgttttatacaaaataaatgtttgttgaactgaa

SEQ ID NO: 8127 - DNA, 120 bp, Artificial Sequence
  ENSG00000007202_64 (sequence is synthesized)
ggaagagaggggtaatgttgtgaacaagttatagcctttgttcctctaccccagcggaaatattccagtacacagtggtgtggggcccatgctgggatccagcctggacactaattggcc

SEQ ID NO: 8128 - DNA, 120 bp, Artificial Sequence
  ENSG00000007202_65 (sequence is synthesized)
gagacaggtgctgatttgggagatgaggatggttttcttacctatatctcaccaaattctcgggggtggtcataggatccatacaacacaactgaaaatatgcactgggagtggagccac

SEQ ID NO: 8129 - DNA, 120 bp, Artificial Sequence
  ENSG00000007202_66 (sequence is synthesized)
gatgagcactgaactgctgctggaaggttcatgggtcggggtactggtactgagcgagaatgggaggactagatactctctttgctcatgccccatatggtctccttaatctaatctcag

SEQ ID NO: 8130 - DNA, 120 bp, Artificial Sequence
  ENSG00000007202_67 (sequence is synthesized)
tgtaactggggagtggaaggagggaacatactgagagaaaatagccccagctcacaagttttgatgacagtctgttgatccctttgccggcttctgaccctctcccagttttacctcttg

SEQ ID NO: 8131 - DNA, 120 bp, Artificial Sequence
  ENSG00000007202_68 (sequence is synthesized)
cagagtgacactcttctgcagaggcatcacaatccaaggaggaagggaggttgttgctgaagtcttcctgttagcctgggtgccattgtgttgtgaggaagatattgataactgctatga

SEQ ID NO: 8132 - DNA, 120 bp, Artificial Sequence
  ENSG00000007202_69 (sequence is synthesized)
aactaatctctgtgatttgagctatatttctaggaaggatgagaaagtgaatgtgagggtggggaatagactgctatgggagggatggacctggtggcagtgagatttctcttctgggca

SEQ ID NO: 8133 - DNA, 120 bp, Artificial Sequence
  ENSG00000007202_70 (sequence is synthesized)
gaccccagcccacctttgccctggtgggacaagagccgtcttctgttccatggagactggcacatggacattgaacaggcgaacctgcaccagctggccactgagtttgtgttcaagggt

SEQ ID NO: 8134 - DNA, 120 bp, Artificial Sequence
  ENSG00000007202_71 (sequence is synthesized)
agctgtatgttggtatctctgtaaccagcctagtatttgctgagcttgtctacggggagaaaggaagtagaaatggttacatccatgtagtgtgggaaaaattaaaaaaattattattat

SEQ ID NO: 8135 - DNA, 120 bp, Artificial Sequence
  ENSG00000007202_72 (sequence is synthesized)
ggtaccaaacatgcccctgatgatagaaaaatgggagagtcttgaggtcctgtttggtgtggcttgggatttcttcggtttcctctaagtccattctagggataaaagaagagggagatg

SEQ ID NO: 8136 - DNA, 120 bp, Artificial Sequence
  ENSG00000007202_73 (sequence is synthesized)
cagcaaagttctaaagagtggtcagctggtaagtatgccatgatcattcagatgcctcatttcctcctgggcgtaaagtgtgaaggagcttagggcttacatcctaggttctttgacctt

SEQ ID NO: 8137 - DNA, 120 bp, Artificial Sequence
  ENSG00000007202_74 (sequence is synthesized)
agggggttccctcaagtcagtacccagtgttccagatcaccacattttgacctaaaacttccaaactttcttacatacaccttagaggcttatcatccccacaggaggacacctgcctag

SEQ ID NO: 8138 - DNA, 120 bp, Artificial Sequence
  ENSG00000007216_0 (sequence is synthesized)
ggagaacagcagaaaggaaaggccgggccagcggaggtggcttgggggctgcctgtggagggtggctgggggactctccttccttctccagctcctccagcaccaccctcagcagcctcc

SEQ ID NO: 8139 - DNA, 120 bp, Artificial Sequence
  ENSG00000007216_1 (sequence is synthesized)
aagaacagaaggagttaacgctgggattaacttcttgaaggaacctgaagttttttaatccttgttctttcctccttccttctccctctcccttcctgatctttactccgcctgtgggtc

SEQ ID NO: 8140 - DNA, 120 bp, Artificial Sequence
  ENSG00000007216_2 (sequence is synthesized)
cctcctccttactctcacctccccaactccaaaaacactctgattgccagactgggtcaatggttaacactcaactggctttatataagcctgccacctgcctgcttggctgcatctttg

SEQ ID NO: 8141 - DNA, 120 bp, Artificial Sequence
  ENSG00000007216_3 (sequence is synthesized)
gtccttctgttacccagctcctggaggcagtggctgtagcagcccttgctgctccacaccatggccacctgctggcaggccctgtgggcctatcgctcctacctgatcgtgttcttcgtg

SEQ ID NO: 8142 - DNA, 120 bp, Artificial Sequence
  ENSG00000007216_4 (sequence is synthesized)
cccattctcctgctgcctctgcccatcctcgtccccagtaaggaggcctactgcgcgtatgccatcatcctcatggcgctcttctggtgcactgaggccctgcccctggccgtcactgcc

SEQ ID NO: 8143 - DNA, 120 bp, Artificial Sequence
  ENSG00000007216_5 (sequence is synthesized)
ctcttccccttaatcctgttccctatgatgggcatcgtggatgcctctgaggttgccgtcgagtatcttaaggactccaacctcctgttcttcggggggctgctggtggccatcgcggtg

SEQ ID NO: 8144 - DNA, 120 bp, Artificial Sequence
  ENSG00000007216_6 (sequence is synthesized)
gaacactggaacctgcataaacgcatcgccctccgtgtcctcctcatcgttggggtgcggcctgccccgctaatcctgggcttcatgctggtcacggccttcctgtccatgtggatcagc

SEQ ID NO: 8145 - DNA, 120 bp, Artificial Sequence
  ENSG00000007216_7 (sequence is synthesized)
aacacggccacctcagccatgatggtgcccatcgcacatgccgtcctggaccagctgcacagctcgcaagccagcagcaacgtcgaggagggcagcaacaaccccaccttcgagctccag

SEQ ID NO: 8146 - DNA, 120 bp, Artificial Sequence
  ENSG00000007216_8 (sequence is synthesized)
gaaccaagtccccagaaggaggtgaccaagcttgataatgggcaggccctccctgtcacgtctgcctcttcggaggggagggcacatctcagccagaagcatctccacctcacccagtgc

SEQ ID NO: 8147 - DNA, 120 bp, Artificial Sequence
  ENSG00000007216_9 (sequence is synthesized)
atgagcctgtgcgtgtgctactccgccagcatcgggggcatcgccacgctgactggcaccgcacccaacctggtgctgcaaggccagatcaactcgctcttcccccaaaacggcaacgtg

SEQ ID NO: 8148 - DNA, 120 bp, Artificial Sequence
  ENSG00000007216_10 (sequence is synthesized)
gtgaacttcgcctcctggttcagcttcgccttccccaccatggtcatcttgctgctgctggcctggttgtggctgcagatcctcttcctgggcttcaacttccggaagaactttggcatt

SEQ ID NO: 8149 - DNA, 120 bp, Artificial Sequence
  ENSG00000007216_11 (sequence is synthesized)
catgacctttgcagaaaaggccatcagcatcctattcgtcatcctggtgctgctctggttcacccgggagccgggcttttttcttggctggggcaatttggcttttcccaatgccaaggg

SEQ ID NO: 8150 - DNA, 120 bp, Artificial Sequence
  ENSG00000007216_12 (sequence is synthesized)
ggagagcatggtgtccgatgggacagtggccatcttcatcggcataattatgttcatcataccctccaagttcccagggctgacccaggacccagaaaacccagggaagctgaaggcccc

SEQ ID NO: 8151 - DNA, 120 bp, Artificial Sequence
  ENSG00000007216_13 (sequence is synthesized)
tcttggcctcctcgactggaagacggtgaaccagaagatgccgtggaatatcgtgttattgctgggtggtggctatgccctggccaagggcagtgagcgatcgggcctgtcagagtggct

SEQ ID NO: 8152 - DNA, 120 bp, Artificial Sequence
  ENSG00000007216_14 (sequence is synthesized)
gggaaacaagctgaccccactgcagagtgtgccagctccagccattgccatcatcctctccctcctggtggccaccttcaccgagtgcactagcaacgtggccaccactacgatcttcct

SEQ ID NO: 8153 - DNA, 120 bp, Artificial Sequence
  ENSG00000007216_15 (sequence is synthesized)
gcccatcctagcctccatggcccaggccatctgcctccaccctctctacgtcatgctcccctgcactctggccacctccctggccttcatgttgcctgtggccaccccgcccaatgccat

SEQ ID NO: 8154 - DNA, 120 bp, Artificial Sequence
  ENSG00000007216_16 (sequence is synthesized)
cgtcttctctttcggggacctcaaagtgttggatatggcccgggcaggattcctcctcaacatcattggagtcctgatcatcgcactggccatcaacagctggggcatccccctcttcag

SEQ ID NO: 8155 - DNA, 120 bp, Artificial Sequence
  ENSG00000007216_17 (sequence is synthesized)
cctgcactctttcccctcctgggcacagtccaacaccacagcccagtgcctgccaagcctggccaacaccaccacaccaagcccctaggctggggcacagcctggccatgcccaggaaga

SEQ ID NO: 8156 - DNA, 120 bp, Artificial Sequence
  ENSG00000007216_18 (sequence is synthesized)
cccaccccattcccactcctctgagcccggaggggacaccccaagctccaagctccaagctccaggccaaaggctgaaaggcacgtgtgtacataatctcttgcgtgtctgtaaggaagg

SEQ ID NO: 8157 - DNA, 120 bp, Artificial Sequence
  ENSG00000007216_19 (sequence is synthesized)
ggtgtatgctcagtttcctatgtgctggaataaaaggtgtgtgcatgtgtgtgtgcgcatatgtgtgcgcctgcatggatgtgaggggtgtgtgacgtgaggctatctgaggggggctgt

SEQ ID NO: 8158 - DNA, 120 bp, Artificial Sequence
  ENSG00000007216_20 (sequence is synthesized)
gtgcatgcacatgatcctaggtatgtatgttggacagtgcacacgtgtgtgttcacagacaatacaacatgccctctctggtgccccaggtcttggtatccccagcttagtgaccagact

SEQ ID NO: 8159 - DNA, 120 bp, Artificial Sequence
  ENSG00000007216_21 (sequence is synthesized)
tacttgcactgtatttattgaaattcaggcttggagtggcctgggaggagggcctgccagcagctgccacgggaacagcctctgggctgttaaagtcacattaaagtctttttcagtaaa

SEQ ID NO: 8160 - DNA, 120 bp, Artificial Sequence
  ENSG00000007216_22 (sequence is synthesized)
gggcctatcgctcctacctgatcgtgttcttcgtgcccattctcctgctgcctctgcccatcctcgtccccagtaaggttgccgtcgagtatcttaaggactccaacctcctgttcttcg

SEQ ID NO: 8161 - DNA, 120 bp, Artificial Sequence
  ENSG00000007216_23 (sequence is synthesized)
ctcgggaaggagggaagggtatagggcccccattgcagaacaggaggtaacacttggtgggggatgaaggttccccaggcttgtctatgggagaggctcatctccaccaccctccaccct

SEQ ID NO: 8162 - DNA, 120 bp, Artificial Sequence
  ENSG00000007216_24 (sequence is synthesized)
ctcttccccttaatcctgttccctatgatgggcatcgtggatgcctctgagatcattcagagaccatttccatccagtttcgagagcccaggggaatgccagtctgtgggaatgtcagtg

SEQ ID NO: 8163 - DNA, 120 bp, Artificial Sequence
  ENSG00000007216_25 (sequence is synthesized)
actgcatcccataacctcgggggcaccgtgggagactccagggtcttcccgccgctcagccatgtctccacctgccaggttgccgtcgagtatcttaaggactccaacctcctgttcttc

SEQ ID NO: 8164 - DNA, 120 bp, Artificial Sequence
  ENSG00000007216_26 (sequence is synthesized)
atgcaacttgtaaaagcatttgaagcacatagaatatgacgcctggcacaaagtcatcctccaatacttatacagaaacttcttcctgaatcagcagagaggcctactgcgcgtatgcca

SEQ ID NO: 8165 - DNA, 80 bp, Artificial Sequence
  ENSG00000007237_0 (sequence is synthesized)
ccggagcgccgggcgcctgggaccccgcggagccgctgcccagcccgtggggctcggcgggaatgcaggctgcgctgtga

SEQ ID NO: 8166 - DNA, 120 bp, Artificial Sequence
  ENSG00000007237_1 (sequence is synthesized)
gcgggaatgcaggctgcgctgtgaacccgggcgccaaggccatgtccggcgctcgctgccggaccctgtaccccttctccggggagcggcacggccaggggctgcgcttcgccgcgggcg

SEQ ID NO: 8167 - DNA, 120 bp, Artificial Sequence
  ENSG00000007237_2 (sequence is synthesized)
agctgatcacgctgctgcaggtcccggacggcggctggtgggaaggcgagaaggaggacgggctccgtggctggttcccggcgagctacgtgcagttgctggagaagcctggaatggtcc

SEQ ID NO: 8168 - DNA, 120 bp, Artificial Sequence
  ENSG00000007237_3 (sequence is synthesized)
cccctccgccgggagaagaaagccagacggtcatccttccacctggctggcagagctacctgtcgcctcagggccggcggtactatgtcaacacgaccaccaatgagaccacctgggaac

SEQ ID NO: 8169 - DNA, 120 bp, Artificial Sequence
  ENSG00000007237_4 (sequence is synthesized)
gtcccagcagttctcctgggattccagccagccctggctctcacaggagctctctgcctccaacagtgaatggataccacgcatcagggaccccagcgcaccctccagagactgcccaca

SEQ ID NO: 8170 - DNA, 120 bp, Artificial Sequence
  ENSG00000007237_5 (sequence is synthesized)
tgagtgtccgaaaatccaccggtgattcccagaacctgggatcctcatcgccaagcaaaaagcagagcaaggaaaacaccatcacaataaactgtgtgacgttccctcacccagacacga

SEQ ID NO: 8171 - DNA, 120 bp, Artificial Sequence
  ENSG00000007237_6 (sequence is synthesized)
tgccggaacagcagctgctgaaaccaaccgagtggagctactgcgactacttctgggctgataagaaggacccccaaggcaacggcaccgtggctgggtttgaactactgctccagaaac

SEQ ID NO: 8172 - DNA, 120 bp, Artificial Sequence
  ENSG00000007237_7 (sequence is synthesized)
agctgaagggcaaacaaatgcagaaggaaatgtcagaattcatccgggaaaggataaagattgaagaagactatgcgaagaacttagctaagctctctcagaactccttggcttcacagg

SEQ ID NO: 8173 - DNA, 120 bp, Artificial Sequence
  ENSG00000007237_8 (sequence is synthesized)
aggaaggctccttgggagaggcgtgggcccaggtgaagaagagcctggcggacgaagcagaagttcacctcaagttctctgccaagcttcacagcgaggtggagaagcccctgatgaact

SEQ ID NO: 8174 - DNA, 120 bp, Artificial Sequence
  ENSG00000007237_9 (sequence is synthesized)
tccgtgagaacttcaagaaagacatgaagaagtgcgaccaccacattgccgaccttcgcaagcagctcgccagccgctatgcctcggtggagaaggcccggaaagccctcacagagcggc

SEQ ID NO: 8175 - DNA, 120 bp, Artificial Sequence
  ENSG00000007237_10 (sequence is synthesized)
agagagacctggagatgaagacccagcagctggagatcaagctgagcaacaagacagaggaggacatcaagaaggcgcggagaaagtccacacaggctggagacgacctcatgcgctgtg

SEQ ID NO: 8176 - DNA, 120 bp, Artificial Sequence
  ENSG00000007237_11 (sequence is synthesized)
tggatctctacaaccaggcccagtccaaatggtttgaagagatggtgaccaccacattggagctagagcggctggaggtggagagggtagagatgatccggcagcacctgtgccagtaca

SEQ ID NO: 8177 - DNA, 120 bp, Artificial Sequence
  ENSG00000007237_12 (sequence is synthesized)
cgcagctgcggcatgaaacagacatgttcaaccaaagcacagtcgagcccgtggatcagctgcttcgaaaagtggacccggccaaagacagggagctgtgggtcagagagcacaagacgg

SEQ ID NO: 8178 - DNA, 120 bp, Artificial Sequence
  ENSG00000007237_13 (sequence is synthesized)
gcaacatccgccctgtggacatggagatctagatgggcctgtgcagcttcggggggtcctgctggggaggggggctgggctcccaccatggggcccatgccgagtggatgccccccaccc

SEQ ID NO: 8179 - DNA, 120 bp, Artificial Sequence
  ENSG00000007237_14 (sequence is synthesized)
tctctcctgggccactgaggagaggggagagagctggtgattccagaagggtgacccggacagcctagctgggggctcccccatattcccaggcccagaagacagacccacagccctgcc

SEQ ID NO: 8180 - DNA, 120 bp, Artificial Sequence
  ENSG00000007237_15 (sequence is synthesized)
cttgtctctgaggctgaagaccccctgactcccatgctgtgcttgccgctctgaaacaaacagaggctggaactttgtggtccttgccgagttttgtaggggtcactgtcacatgcttgt

SEQ ID NO: 8181 - DNA, 120 bp, Artificial Sequence
  ENSG00000007237_16 (sequence is synthesized)
gccctggaagccccaaggctcttcctccagctggctcccttgtctccagggctttggaggatcagggtagggagggctctgtctctaagccaggtgtcaggatcagaatcatgggtagaa

SEQ ID NO: 8182 - DNA, 120 bp, Artificial Sequence
  ENSG00000007237_17 (sequence is synthesized)
ggtgccattcagctcacagccgcacccagaatcctttgcagccctccttctttatttttttcccattgcattctgggagtccacatctggctttctcagccactgttcatcaccaggggt

SEQ ID NO: 8183 - DNA, 120 bp, Artificial Sequence
  ENSG00000007237_18 (sequence is synthesized)
tttaggaggaaggcttggctcctgtcttcccagacccaccatgcctggagaggtcaggatggaactacctcattcggcaaattagccccaaattgagcgctgaatcgtgtcccatgagat

SEQ ID NO: 8184 - DNA, 120 bp, Artificial Sequence
  ENSG00000007237_19 (sequence is synthesized)
caggcgccatctgtaaagtctcctctggaaatgccaatccatccttcccccagctgcttcctcggggaggcccctgcccccaccctgccagcccttcccagtctcattagaggaagcttt

SEQ ID NO: 8185 - DNA, 120 bp, Artificial Sequence
  ENSG00000007237_20 (sequence is synthesized)
ggatggaaacaaaccagctcgtctcagaggccagcaagctggggcctgtccgccacggtgccctgtgcacctttgggctgccctggcccccactctcccgggccgcccaccacaggctct

SEQ ID NO: 8186 - DNA, 120 bp, Artificial Sequence
  ENSG00000007237_21 (sequence is synthesized)
taatggggccgggtcagtcctacatgtgagatgggttagggcaagtctttgccatcccccagatggctctgtcttcttgtgtatggcagggctgggactgctgtcccttgtacagttttc

SEQ ID NO: 8187 - DNA, 120 bp, Artificial Sequence
  ENSG00000007237_22 (sequence is synthesized)
tgtcactggtgggcactggacaggcatagcagactctcttgtggccacactaggttgtcgcctttcaggcagtgtcccgccacctttgcttcccgctccttctggacattccagagccct

SEQ ID NO: 8188 - DNA, 120 bp, Artificial Sequence
  ENSG00000007237_23 (sequence is synthesized)
gcaccaaacccttacttggtgtctgcacctcctttccctctctccatcttccaatccctggaaaagtctggtctgagtgtgacttgggaagctttcagtgctgctgtttggcccagctca

SEQ ID NO: 8189 - DNA, 120 bp, Artificial Sequence
  ENSG00000007237_24 (sequence is synthesized)
ttactttctccctttctctaccacagcaaacacattctccaccatgtcagtctaaagagtctaaaggggccgggagaagcatgagcgaggggcagattctagtcgggagcccatgccctg

SEQ ID NO: 8190 - DNA, 120 bp, Artificial Sequence
  ENSG00000007237_25 (sequence is synthesized)
gaaatccatctttcttcatctttcccattgaccactttgggtttgacctgcacatctgcagtgagggcagaattcaacaagcacaactcactggtctttcagtcaacgtgctagaaaccg

SEQ ID NO: 8191 - DNA, 120 bp, Artificial Sequence
  ENSG00000007237_26 (sequence is synthesized)
atgacttattaatctctaattttttggcgcctctttcattgaatgagaattgctttcgtatagttcacattagaaaaatgcctaatatactaaagtaaaccaaacgttgtcacttttctc

SEQ ID NO: 8192 - DNA, 120 bp, Artificial Sequence
  ENSG00000007237_27 (sequence is synthesized)
ttgttcttgaaacattgcaaccaaaaaggtcagcacaaaggccttcacctacgtgaagacctcctggtaggatctgtccatgggatggagaaccactctgtccagatctggggttgggtc

SEQ ID NO: 8193 - DNA, 120 bp, Artificial Sequence
  ENSG00000007237_28 (sequence is synthesized)
atgacaccagctaccaattttagaatattatttcttggtttctttatgaaaaatgggtgctagtggtaattgctttgtggcttagtaaactactctgtggatgatttccaaacattcaaa

SEQ ID NO: 8194 - DNA, 120 bp, Artificial Sequence
  ENSG00000007237_29 (sequence is synthesized)
gccaatagccttgttattaacaagatattttgagtacaatatggctcattgacttttccattacatctgaggattccagagtcctctgttcatccctgggatagagtgagccctcttgcg

SEQ ID NO: 8195 - DNA, 120 bp, Artificial Sequence
  ENSG00000007237_30 (sequence is synthesized)
tcttccagggtagctcaggttggcccagtttgggccagtccatttttggaggtcactctttcccccctcatcccctcacctccttctctttacccccttcacgtacttcctttctttctt

SEQ ID NO: 8196 - DNA, 120 bp, Artificial Sequence
  ENSG00000007237_31 (sequence is synthesized)
ccctctgttattcattcatcaagcaggttaaagccattgtgctaagatctaatctgaggacactataatggccctgtcgtcagggaagcccgtgatcgctcgttttcaggggtcttaccg

SEQ ID NO: 8197 - DNA, 120 bp, Artificial Sequence
  ENSG00000007237_32 (sequence is synthesized)
gtcagcaaccttggcattgatacataggcactctacagaatttaagttttcagaggtaagtctgttgttctgattaatctgcattcattcagcgaatgctcaagacaagccaggcatgct

SEQ ID NO: 8198 - DNA, 120 bp, Artificial Sequence
  ENSG00000007237_33 (sequence is synthesized)
gagaagcggcgctctagttgtatgtaagatgggcattcctctgctctcctctattctccatgtcgactgagaagagtataataagaacattgtaccctctccacacttaaccctctggga

SEQ ID NO: 8199 - DNA, 120 bp, Artificial Sequence
  ENSG00000007237_34 (sequence is synthesized)
ttctttattataatataaaccaccgtcgtgaggcatttacctgttggatggaaggtagacagcaacaagattttaatcacctggtcaccagaccctcacggcccatatccaattcgaatt

SEQ ID NO: 8200 - DNA, 84 bp, Artificial Sequence
  ENSG00000007237_35 (sequence is synthesized)
ctggtcaccagaccctcacggcccatatccaattcgaatttcagaaatttctctgtttgctttaaataactctttacaaataag

SEQ ID NO: 8201 - DNA, 68 bp, Artificial Sequence
  ENSG00000007237_36 (sequence is synthesized)
gtataaataactctttgcaaataggaaagtgaagctcaagggtaaccagtgaggctatgaaattgcca

SEQ ID NO: 8202 - DNA, 120 bp, Artificial Sequence
  ENSG00000007237_37 (sequence is synthesized)
gtgaagctcaagggtaaccagtgaggctatgaaattgccagtgaattaagaccagggctagagtcaacagtccagaacccctatccgtatgaacaggggcccgtttctggttgaaatcaa

SEQ ID NO: 8203 - DNA, 120 bp, Artificial Sequence
  ENSG00000007237_38 (sequence is synthesized)
ggttaggatgcaactgagaaaataaaagactgcactttggagaggcaagcacgctatccgggttgttgttttgttttatgtcttggtgcttaggtgaggacttagctgggtttattcaaa

SEQ ID NO: 8204 - DNA, 120 bp, Artificial Sequence
  ENSG00000007237_39 (sequence is synthesized)
gtgggcgggtctgggctattcttgagaatgtcccttccatttctgagaacaagtcagccccttctacctgcctccacccaggagactgatgcacaagatctgtttgtgaaagcctgattt

SEQ ID NO: 8205 - DNA, 120 bp, Artificial Sequence
  ENSG00000007237_40 (sequence is synthesized)
ctatatataaatgctgctttgcacagtgaattagccgatgccacggggaagcagcggatgtggggatggtggcagaaaatgaccagcgtgtcagatttgcataaggacacaccacaaggc

SEQ ID NO: 8206 - DNA, 120 bp, Artificial Sequence
  ENSG00000007237_41 (sequence is synthesized)
agaatgtgtgccgtagtattagagtttggtctgtaggtccctttcacctcaatttctggtgaacctgttacaattccttcattatagaagaaagcagccaccttacatttcaaaataagg

SEQ ID NO: 8207 - DNA, 120 bp, Artificial Sequence
  ENSG00000007237_42 (sequence is synthesized)
cctctctgctcccagaggagctgtcctctgtgcaggggctctgaatgctcaggtgcttctcactgctcatgctcacgcaaccccggaggtcacgtgtgtgctgcctctgacctcaggggt

SEQ ID NO: 8208 - DNA, 120 bp, Artificial Sequence
  ENSG00000007237_43 (sequence is synthesized)
agtgggttctttgtgaaagaacagcaatgagcaaagccacaggaacctccgctggggtgcccagaacactggccctgggctagcgacttgcctcagccccatttcccggagaggctgcca

SEQ ID NO: 8209 - DNA, 120 bp, Artificial Sequence
  ENSG00000007237_44 (sequence is synthesized)
tgaagaggaagccggcggagtcttggtgctgagtctgagggcttcaggcaggacccaagactctcctctgaggtagcagcccccagagaaggttagctgttctctgatgaagcctggaat

SEQ ID NO: 8210 - DNA, 120 bp, Artificial Sequence
  ENSG00000007237_45 (sequence is synthesized)
attgcttctgggtttggggtgtgagaggatgcagagtgggagaccttaaaaccgtctgatctggctgctaaagcgagtgtctgacgaccacccattaacaccagcgagtagcgtttgctc

SEQ ID NO: 8211 - DNA, 120 bp, Artificial Sequence
  ENSG00000007237_46 (sequence is synthesized)
aaaagaaaaaaaaaattccttaagccaaatggtgttccaagttggttgctgtgacaacctccaggaagagccacttgttaccctctattctttctagtgctttcagtcagtggcaacaca

SEQ ID NO: 8212 - DNA, 120 bp, Artificial Sequence
  ENSG00000007237_47 (sequence is synthesized)
taggccccttggaccgtggggatggcggccctgagattctgtcagtgggaccaccctgggcctcctttctacctccactcagcaccctgttggccaaggagaatttctgcggtgggaggc

SEQ ID NO: 8213 - DNA, 120 bp, Artificial Sequence
  ENSG00000007237_48 (sequence is synthesized)
agtgctctgctagtcaggattgataaacagctgggcacaccgaaacagtgtaccaacgaattcaccaaccaggggtttctttccctaccctttgtgaaaaccaatcaattactagatgag

SEQ ID NO: 8214 - DNA, 120 bp, Artificial Sequence
  ENSG00000007237_49 (sequence is synthesized)
tggatggatgcagaaaaatctgggctgagccaaagtcccttttggaaatacaagccataacattcgaaggacatcagcgaccttggcttgtttaggtgattttacttccagctgcaggta

SEQ ID NO: 8215 - DNA, 120 bp, Artificial Sequence
  ENSG00000007237_50 (sequence is synthesized)
gtcttgacaaggagtgtttaaacagaaggctcaagatgcattccttgtgtaggtcggagagagcacttctaatgttaagtggggtacagatcagctgcccccccacgtagcctggacatc

SEQ ID NO: 8216 - DNA, 120 bp, Artificial Sequence
  ENSG00000007237_51 (sequence is synthesized)
gtcttatccccataatccttgccatccctacaaggcccatcgccaccaccttttcccaggtttattgaggtatgattgacatccagtaaaattcaccctttggaaatatacagctctgtg

SEQ ID NO: 8217 - DNA, 120 bp, Artificial Sequence
  ENSG00000007237_52 (sequence is synthesized)
aattttgacaaatttagtgtcttgtgaccatcaccaagatcaacctgtttttaaccctccaaaaaattcccttctcctgccctctttccctggcaaccctgattgattatctgatcctat

SEQ ID NO: 8218 - DNA, 120 bp, Artificial Sequence
  ENSG00000007237_53 (sequence is synthesized)
aattttgccttttctagaatgtcatataaatggagtcacactgatgtcgccttttgagtctggcatctttccctcagcttaatgcttttgagtcattcatgatgtgtgcgtgtggtttgt

SEQ ID NO: 8219 - DNA, 120 bp, Artificial Sequence
  ENSG00000007237_54 (sequence is synthesized)
tccttctccttgccgggaagtatttcattgcatgggcgtactactctgcttctttatttttacactgagcctttcgccctggaagttcttggcccagggtcttcaacttgtttgcacgac

SEQ ID NO: 8220 - DNA, 120 bp, Artificial Sequence
  ENSG00000007237_55 (sequence is synthesized)
cacttccagcttgctgcttccttcagttccccaggctcctcctccaaatgccagctgtgcccacaagctgttcttagggctcacactcgccttttggcgcgtggtgggtttttggtagtg

SEQ ID NO: 8221 - DNA, 120 bp, Artificial Sequence
  ENSG00000007237_56 (sequence is synthesized)
cagaaagaatccagggatgggaggggaagggacggatgggtgctcaattgctgctcacgtctgctgcaacctgaagcttgcatctcagccagcagatctgctcccttctgggacccaggc

SEQ ID NO: 8222 - DNA, 120 bp, Artificial Sequence
  ENSG00000007237_57 (sequence is synthesized)
ttcagtgtcacacggtccttggctatgtattgggcgttggaggctttgaaaggcgagcagaagcagcatggacaagaaggctggggctggccctggggctcatcatgatgctttcctgga

SEQ ID NO: 8223 - DNA, 120 bp, Artificial Sequence
  ENSG00000007237_58 (sequence is synthesized)
tctgttgcttcatctgcaagctgagggtgtttgttctagatgagtgtctcaggccaccggcaactgcatgtacctcctccctttctcatttccaatgatgtaccctgtacacgtgttcat

SEQ ID NO: 8224 - DNA, 120 bp, Artificial Sequence
  ENSG00000007237_59 (sequence is synthesized)
gctgtgtctggctctcatctgcacaatcgtgcatagaattgcctcaagtcctggtgagagagatgccgtggtacttttccatttagattcaaatggagctaaaattaagagttttatgag

SEQ ID NO: 8225 - DNA, 120 bp, Artificial Sequence
  ENSG00000007237_60 (sequence is synthesized)
ctgttaagaatgaggtagtttctcctaggaccccccaaagacagtgcaagtaatgaccgtttggatctcattcgtcgatctttgatagtatgttctggagtctactccccaggagccagg

SEQ ID NO: 8226 - DNA, 120 bp, Artificial Sequence
  ENSG00000007237_61 (sequence is synthesized)
acaggcgtgaagatggagtccttgtcgcagctggagccttgcctagctggtgatcacacagcctggcctgtacctgcaccccactggatggtggtacatggtggcagggacaggaccaca

SEQ ID NO: 8227 - DNA, 120 bp, Artificial Sequence
  ENSG00000007237_62 (sequence is synthesized)
cccagttaaggccagaccaggctgagtgtgacccctgaggtaaacactccactaagctgtgtcttgttcatgccccctgctcagtgaaaggtgagtcccgagaccagttgggtacctctc

SEQ ID NO: 8228 - DNA, 120 bp, Artificial Sequence
  ENSG00000007237_63 (sequence is synthesized)
tatgcgaaccagagacatttctggatccaggccaggtgaagattagggccaggaagcctgagcccccggggcctcaaggtagggagccgaagaggctgccaggactctgctgggttgaaa

SEQ ID NO: 8229 - DNA, 120 bp, Artificial Sequence
  ENSG00000007237_64 (sequence is synthesized)
tttgccggggaggactcttgtctccccctcaggagtatttttgttgaggctttcctggaggtgaagaagcaattcccattgcagcaggttagagcgagaatcagacagagggcaaaaacc

SEQ ID NO: 8230 - DNA, 120 bp, Artificial Sequence
  ENSG00000007237_65 (sequence is synthesized)
aattcgcttctccccacgttctaaatgctggggcatggctgtcaggagggcttcctgggaggtgtctctgggggtggggtgaggttggggcgatggcctttggagattgcgtgtggtgtt

SEQ ID NO: 8231 - DNA, 120 bp, Artificial Sequence
  ENSG00000007237_66 (sequence is synthesized)
caggactgttccttggtgtttgagggaaactttagtgggattgcagtggaatgtaaggtcagggcacgtgggtgctctctcggggtggggtgactgggagacctagagggaaagcctgct

SEQ ID NO: 8232 - DNA, 120 bp, Artificial Sequence
  ENSG00000007237_67 (sequence is synthesized)
atgcagggggagagcacaggactggccctgctctgcggcctcctttgtcccataacctgaagttaagtcacatcccctgtcgggacctccgtgcactcatctgtcaagtgggggcgcttc

SEQ ID NO: 8233 - DNA, 120 bp, Artificial Sequence
  ENSG00000007237_68 (sequence is synthesized)
ccttccagcatcacctgcagcagacgggctctcgggagtcgtgggttccaggcagctgtgtggacccagggacagacattcaaagggacgccagccatccttagtgacaggggccccaac

SEQ ID NO: 8234 - DNA, 120 bp, Artificial Sequence
  ENSG00000007237_69 (sequence is synthesized)
ttagcatcccttcccttccgttaggaaggagatgaccggaagcaaccccttcacagacacgagcacatcggcaaaccctatgaaagtggaattttctaacaaaataaacttgcttgtttg

SEQ ID NO: 8235 - DNA, 120 bp, Artificial Sequence
  ENSG00000007237_70 (sequence is synthesized)
atctgttttctgtaacttttgctaaatactttatacatttttcatgttaaagagccgtgtctcccgccagcactcctcaccccggtatgaatgtgtttcctccacattgtatatccttcc

SEQ ID NO: 8236 - DNA, 120 bp, Artificial Sequence
  ENSG00000007237_71 (sequence is synthesized)
accctctggctgcctagatcagtaaataaaattgatgtaatataatttataagtaacactgttgaaaccctgatcccagtggaggctgtaacccacctgcccccgcaccacccccctgac

SEQ ID NO: 8237 - DNA, 120 bp, Artificial Sequence
  ENSG00000007237_72 (sequence is synthesized)
ccctgttaccgcatttgtgtgtattaatgctgaagaattaaatgtttaaagagtttaaattttgaaggcgtttgctatatacagttgtcctgcattattataaagagttttcaggaagtt

SEQ ID NO: 8238 - DNA, 120 bp, Artificial Sequence
  ENSG00000007237_73 (sequence is synthesized)
aattcgccttcagcccgagagctgggcgtgggaacagcgtggggtcagggagacccctgcttgccctggcccagaatatggtgacttaggattcagactgagcatccctgattccccagc

SEQ ID NO: 8239 - DNA, 120 bp, Artificial Sequence
  ENSG00000007237_74 (sequence is synthesized)
acagtcccctggtttcttgagcccaaccccaatgctgtaattctgtttattttgctgaatatgaaatccatatggttctgatttcttccttgtaatccgtcatctctgtgtggcttcgga

SEQ ID NO: 8240 - DNA, 120 bp, Artificial Sequence
  ENSG00000007237_75 (sequence is synthesized)
aggaagccggcggagtcttggtgctgagtctgagggcttcaggcaggacccaagactctcctctgaggtagcagcccccagagaaggttagctgttctctgatggccaagtctctgaatc

SEQ ID NO: 8241 - DNA, 120 bp, Artificial Sequence
  ENSG00000007237_76 (sequence is synthesized)
gattttcttccctggagtgagaagcaggcagaggatcactcggtggctgtgtataccctgcctttggtggtggcaccccagtcagaaacgggaccctgaagctgggatttaggatgctgg

SEQ ID NO: 8242 - DNA, 120 bp, Artificial Sequence
  ENSG00000007237_77 (sequence is synthesized)
tgtagacgtgtgtgggggcctcctgagctaaggtgacctgcctaagctgagacctgataggcagccacgtgtcagggggtgtctctcaccttcctgccaggtcgctaccccagactcatc

SEQ ID NO: 8243 - DNA, 120 bp, Artificial Sequence
  ENSG00000007237_78 (sequence is synthesized)
ctcacttgcctggggaagtgggggtgcccctcccatccctcctccctgcactggcttacagctgatgccctgggtcctgagtgtgcgtctctactctcccaacagcttcacagcgaggtg

SEQ ID NO: 8244 - DNA, 120 bp, Artificial Sequence
  ENSG00000007237_79 (sequence is synthesized)
aatgtcacgctactgtagggtgaattcatcagcctttgccttcctggtttaaaaactcttgcaaaaatgccaaatgggtgtgaccttttctttcttctccaacagaagcctggaatggtc

SEQ ID NO: 8245 - DNA, 120 bp, Artificial Sequence
  ENSG00000007237_80 (sequence is synthesized)
agttctctcagagcctgtgcaggaggcttccttaattcgccttcagcccgagagctgggcgtgggaacagcgtggggtcagggagacccctgcttgccctggcccagaatatgaacctgg

SEQ ID NO: 8246 - DNA, 120 bp, Artificial Sequence
  ENSG00000007255_0 (sequence is synthesized)
aggcgtgcgaggagggggcatggcggatactgtgttgtttgagtttcttcacacggagatggtggctgagctgtgggctcacgaccccgaccccggcccggggggacagaagatgagcct

SEQ ID NO: 8247 - DNA, 120 bp, Artificial Sequence
  ENSG00000007255_1 (sequence is synthesized)
gtcggtcctggagggtatggggttccgtgtgggccaggctctaggcgagaggctgccccgggagacgctggccttcagggaggagctggatgtcctcaagttcttgtgcaaagacctgtg

SEQ ID NO: 8248 - DNA, 120 bp, Artificial Sequence
  ENSG00000007255_2 (sequence is synthesized)
ggtggcggtgttccagaagcagatggacagcctgcgcaccaatcaccaggggacctacgtcctgcaagacaacagcttccccctcctcctcccgatggcctctggcctgcagtatctgga

SEQ ID NO: 8249 - DNA, 120 bp, Artificial Sequence
  ENSG00000007255_3 (sequence is synthesized)
tgcgcggcgccctctataccctgggcattgagagcgtggtcaccgcctccgtggcagccctgcccgtctgtaagttccaggtggtgattccgaaatcctaagcctgcctcgcacctgctg

SEQ ID NO: 8250 - DNA, 120 bp, Artificial Sequence
  ENSG00000007255_4 (sequence is synthesized)
agccgcactgctgcccctggcctcaccggcctcaggagacggtggggccgctgcatttcggggtggtcttgggaatcccaggccctaggggtcacatttgctcaggaagtgggtatcaaa

SEQ ID NO: 8251 - DNA, 120 bp, Artificial Sequence
  ENSG00000007255_5 (sequence is synthesized)
ttgaggtgggggtgtcagaggaggcaaaggggtcccagctgcggtcaggactgtggtgggattcccgcctcggcagcgtcactgcccagtagctgctcaataaaggctgtgtgtgtggaa

SEQ ID NO: 8252 - DNA, 120 bp, Artificial Sequence
  ENSG00000007255_6 (sequence is synthesized)
aggcgtgcgaggagggggcatggcggatactgtgttgtttgagtttcttcacacggagatggtggctgagctgtgggctcacgaccccgaccccggcccgggggctgccccgggagacgc

SEQ ID NO: 8253 - DNA, 120 bp, Artificial Sequence
  ENSG00000007255_7 (sequence is synthesized)
atactgtgttgtttgagtttcttcacacggagatggtggctgagctgtgggctcacgaccccgaccccggcccgggggtgagcgccgggctccgtggggaggaagcgggggccaccaagg

SEQ ID NO: 8254 - DNA, 120 bp, Artificial Sequence
  ENSG00000007255_8 (sequence is synthesized)
accccggcctgcccgtccagcttcctcctgagggcaagaccaagagagtgggaggggaatcccccggcgccagagcagcggctgccgggacccgcccagagctttcccacaggcggccgc

SEQ ID NO: 8255 - DNA, 120 bp, Artificial Sequence
  ENSG00000007264_0 (sequence is synthesized)
gcggcggcgcgcggaggagaccgcagtgcggccggcgctaggacccgcgggggcctcccaggccgcggcgcctcccgctttcccccactccccgacccttcttcgcccccaaaatgagga

SEQ ID NO: 8256 - DNA, 120 bp, Artificial Sequence
  ENSG00000007264_1 (sequence is synthesized)
aatgaggaaacggagcaactcgctccaagttgtgcagccgggaccgcctcggggtgtgcagccggctcgcggaggccctcctgggggcgggcgcggggcgcggctcgggggcgccccctg

SEQ ID NO: 8257 - DNA, 120 bp, Artificial Sequence
  ENSG00000007264_2 (sequence is synthesized)
agcaggtgagcccccgcttcctccgagcctggcacccccctcccgtctcagccaggatgccaacgaggcgctgggccccgggcacccagtgtatcaccaaatgcgagcacacccgcccca

SEQ ID NO: 8258 - DNA, 120 bp, Artificial Sequence
  ENSG00000007264_3 (sequence is synthesized)
agccaggggagctggccttccgcaagggcgacgtggtcaccatcctggaggcctgcgagaacaagagctggtaccgcgtcaagcaccacaccagtggacaggaggggctgctggcagctg

SEQ ID NO: 8259 - DNA, 120 bp, Artificial Sequence
  ENSG00000007264_4 (sequence is synthesized)
gggcgctgcgggagcgggaggccctctccgcagaccccaagctcagcctcatgccgtggttccacgggaagatctcgggccaggaggctgtccagcagctgcagcctcccgaggatgggc

SEQ ID NO: 8260 - DNA, 120 bp, Artificial Sequence
  ENSG00000007264_5 (sequence is synthesized)
tgttcctggtgcgggagtccgcgcgccaccccggcgactacgtcctgtgcgtgagctttggccgcgacgtcatccactaccgcgtgctgcaccgcgacggccacctcacaatcgatgagg

SEQ ID NO: 8261 - DNA, 120 bp, Artificial Sequence
  ENSG00000007264_6 (sequence is synthesized)
ccgtgttcttctgcaacctcatggacatggtggagcattacagcaaggacaagggcgctatctgcaccaagctggtgagaccaaagcggaaacacgggaccaagtcggccgaggaggagc

SEQ ID NO: 8262 - DNA, 120 bp, Artificial Sequence
  ENSG00000007264_7 (sequence is synthesized)
gtggccgtgaagaatatcaagtgtgatgtgacagcccaggccttcctggacgagacggccgtcatgacgaagatgcaacacgagaacctggtgcgtctcctgggcgtgatcctgcaccag

SEQ ID NO: 8263 - DNA, 120 bp, Artificial Sequence
  ENSG00000007264_8 (sequence is synthesized)
gggctgtacattgtcatggagcacgtgagcaagggcaacctggtgaactttctgcggacccggggtcgagccctcgtgaacaccgctcagctcctgcagttttctctgcacgtggccgag

SEQ ID NO: 8264 - DNA, 120 bp, Artificial Sequence
  ENSG00000007264_9 (sequence is synthesized)
ggcatggagtacctggagagcaagaagcttgtgcaccgcgacctggccgcccgcaacatcctggtctcagaggacctggtggccaaggtcagcgactttggcctggccaaagccgagcgg

SEQ ID NO: 8265 - DNA, 120 bp, Artificial Sequence
  ENSG00000007264_10 (sequence is synthesized)
aaggggctagactcaagccggctgcccgtcaagtggacggcgcccgaggctctcaaacacgggaagttcaccagcaagtcggatgtctggagttttggggtgctgctctgggaggtcttc

SEQ ID NO: 8266 - DNA, 120 bp, Artificial Sequence
  ENSG00000007264_11 (sequence is synthesized)
tcatatggacgggctccgtaccctaaaatgtcactgaaagaggtgtcggaggccgtggagaaggggtaccgcatggaaccccccgagggctgtccaggccccgtgcacgtcctcatgagc

SEQ ID NO: 8267 - DNA, 120 bp, Artificial Sequence
  ENSG00000007264_12 (sequence is synthesized)
agctgctgggaggcagagcccgcccgccggccacccttccgcaaactggccgagaagctggcccgggagctacgcagtgcaggtgccccagcctccgtctcagggcaggacgccgacggc

SEQ ID NO: 8268 - DNA, 120 bp, Artificial Sequence
  ENSG00000007264_13 (sequence is synthesized)
tccacctcgccccgaagccaggagccctgaccccacccggtggggcccttggccccagaggaccgagagagtggagagtgcggcgtgggggcactgaccaggcccaaggagggtccaggc

SEQ ID NO: 8269 - DNA, 120 bp, Artificial Sequence
  ENSG00000007264_14 (sequence is synthesized)
gggcaagtcatcctcctggtgcccacagcaggggctggcccacgtagggggctctgggcggcccgtggacaccccagacctgcgaaggatgatcgcccgataaagacggattctaaggac

SEQ ID NO: 8270 - DNA, 120 bp, Artificial Sequence
  ENSG00000007264_15 (sequence is synthesized)
agttggttagcgaagggattcggtgcagatggatggaccgtctgggctgcggagtccacgggcctgaaacgcggtcgctcctgacccgtcctccgcaaccctcgtcccaccaggccgcgg

SEQ ID NO: 8271 - DNA, 120 bp, Artificial Sequence
  ENSG00000007264_16 (sequence is synthesized)
ttcccggagcaggccggcgggtggcaggaagacaccaggctgcagggggctggagaagcaacacccctctccctccccgccagagaactggagcgcggggacctcggttgcggatgctag

SEQ ID NO: 8272 - DNA, 120 bp, Artificial Sequence
  ENSG00000007264_17 (sequence is synthesized)
ctggggcggagggtgctcagaggcgatcggaccccgcgtggtggtggctggggtttcctgggtgcgggtgtgcgcggctacgagccccgggcgtgtgtacccgcgcgtccacgtggaggg

SEQ ID NO: 8273 - DNA, 120 bp, Artificial Sequence
  ENSG00000007264_18 (sequence is synthesized)
ctgtgcgcgtgtggccgaaaagcgtgtgcgcggccctgcgtagcgccctgcgtgcccgagtggcccggcgctggcgcccaggtgttccagtgtggggcggctgtgtgtgtgccgggggcg

SEQ ID NO: 8274 - DNA, 120 bp, Artificial Sequence
  ENSG00000007264_19 (sequence is synthesized)
tgtgtccgagccctgtgtgtttctgtgcgtgtgcatgcatccgtatgcgtaaaacaggaagaaccaggctcggtccagtggcacccagctccctacctcctgtgccagccgactggcctg

SEQ ID NO: 8275 - DNA, 120 bp, Artificial Sequence
  ENSG00000007264_20 (sequence is synthesized)
tggcaggccattcccagcgtccccgactgtgaccacttgctcagtgtgcctctcacctgcctcagtttccctctgggggcgatggcggggcgaggctctctggtttcctggcgggcattt

SEQ ID NO: 8276 - DNA, 120 bp, Artificial Sequence
  ENSG00000007264_21 (sequence is synthesized)
ggtgctagagcatcttaaatgtccctctcatgcagggacatttccctgctgaacgaagagaaggcagacctcggcgagggacccgtggtcagcagcagcttctgaggactcatcccttag

SEQ ID NO: 8277 - DNA, 65 bp, Artificial Sequence
  ENSG00000007264_22 (sequence is synthesized)
acccgtggtcagcagcagcttctgaggactcatcccttagaaaggatgataaggtaggatcgctt

SEQ ID NO: 8278 - DNA, 78 bp, Artificial Sequence
  ENSG00000007264_23 (sequence is synthesized)
ccaggagtccaagaccagcctgggcaacaaagtgagacttcatctcaaaaaaataaaaataaaaatacaaaagttagc

SEQ ID NO: 8279 - DNA, 120 bp, Artificial Sequence
  ENSG00000007264_24 (sequence is synthesized)
accccatcctccagcattccctccttggccaggttcccaagacctgcgggctggttactgaacctgcagcatttgacattgggagcacagatcggagagggagagtttggagctgtcctg

SEQ ID NO: 8280 - DNA, 120 bp, Artificial Sequence
  ENSG00000007264_25 (sequence is synthesized)
aaggctgtggggacagagggaagggacaggggaaggggcacaccctggcaggcctggcgatcacagcagcccctggtgggaggcacctcgtcccctgctgtgaaccccaggcggtacctg

SEQ ID NO: 8281 - DNA, 120 bp, Artificial Sequence
  ENSG00000007264_26 (sequence is synthesized)
cagccccgcttccttccttatgccccgggagaggcggctctcggaagcctcccacccacagttcccgttcccatccctggctcccggggaaggcaaacaggattcctgccaccaggccgc

SEQ ID NO: 8282 - DNA, 120 bp, Artificial Sequence
  ENSG00000007264_27 (sequence is synthesized)
cctctccgctcttttccaatctctatacctttctccctcctgtcctctttcccctcccgtgcctctgctccccacatctccgtgatgtcctccctttgcccctctcccggccccctctgc

SEQ ID NO: 8283 - DNA, 71 bp, Artificial Sequence
  ENSG00000007264_28 (sequence is synthesized)
aagcttttaaggccggatgtgacacagacccagtttccacggatgaaacctgcaagtgtggctggaaaaca

SEQ ID NO: 8284 - DNA, 120 bp, Artificial Sequence
  ENSG00000007264_29 (sequence is synthesized)
agtttccacggatgaaacctgcaagtgtggctggaaaacaacctgtccggctgcgtcttaaggacgaggaagacggggcaagggttttccagcaaagacgcccaaagcagctcgccccaa

SEQ ID NO: 8285 - DNA, 120 bp, Artificial Sequence
  ENSG00000007306_0 (sequence is synthesized)
gaatgagaggggaggggacagaggactcctgagcagagaccccacccctggaccatgtgatcttggaaagtgctcctgccctgggaggaggctcagcacagaggtaggaaggacagcaga

SEQ ID NO: 8286 - DNA, 120 bp, Artificial Sequence
  ENSG00000007306_1 (sequence is synthesized)
gctgacagtcacagcagccctgacaagagagttcctggagcccaagctcttctccacagaggacaagcaggcagcagagaccatggggtccccttcagcctgtccatacagagtgtgcat

SEQ ID NO: 8287 - DNA, 120 bp, Artificial Sequence
  ENSG00000007306_2 (sequence is synthesized)
tccctggcaggggctcctgctcacagcctcgcttttaaccttctggaacctgccaaacagtgcccagaccaatattgatgtcgtgccgttcaatgtcgcagaagggaaggaggtccttct

SEQ ID NO: 8288 - DNA, 120 bp, Artificial Sequence
  ENSG00000007306_3 (sequence is synthesized)
agtagtccataatgagtcccagaatctttatggctacaactggtacaaaggggaaagggtgcatgccaactatcgaattataggatatgtaaaaaatataagtcaagaaaatgccccagg

SEQ ID NO: 8289 - DNA, 120 bp, Artificial Sequence
  ENSG00000007306_4 (sequence is synthesized)
gcccgcacacaacggtcgagagacaatataccccaatggaaccctgctgatccagaacgtcacccacaatgacgcaggaatctataccctacacgttataaaagaaaatcttgtgaatga

SEQ ID NO: 8290 - DNA, 120 bp, Artificial Sequence
  ENSG00000007306_5 (sequence is synthesized)
agaagtaaccagacaattctacgtattctcggagccacccaagccctccatcaccagcaacaacttcaatccggtggagaacaaagatattgtggttttaacctgtcaacctgagactca

SEQ ID NO: 8291 - DNA, 120 bp, Artificial Sequence
  ENSG00000007306_6 (sequence is synthesized)
gaacacaacctacctgtggtgggtaaacaatcagagcctcctggtcagtcccaggctgctgctctccactgacaacaggaccctcgttctactcagcgccacaaagaatgacataggacc

SEQ ID NO: 8292 - DNA, 120 bp, Artificial Sequence
  ENSG00000007306_7 (sequence is synthesized)
ctatgaatgtgaaatacagaacccagtgggtgccagccgcagtgacccagtcaccctgaatgtccgctatgagtcagtacaagcaagttcacctgacctctcagctgggaccgctgtcag

SEQ ID NO: 8293 - DNA, 120 bp, Artificial Sequence
  ENSG00000007306_8 (sequence is synthesized)
catcatgattggagtactggctgggatggctctgatatagcagccttggtgtagtttctgcatttcgggaagagtgtttttattatccacctgcagactggactggattcttctagctcc

SEQ ID NO: 8294 - DNA, 120 bp, Artificial Sequence
  ENSG00000007306_9 (sequence is synthesized)
ttcaatcccattttctcctgtggcatcactaagtataagacctgctctcttcctgaagacctataagctggaggtggacaactcaatgtaaatttcaaggaaaaaccctcatgcctgaga

SEQ ID NO: 8295 - DNA, 120 bp, Artificial Sequence
  ENSG00000007306_10 (sequence is synthesized)
gctgtggacagtttttcccaagatgtcccaagcctcatcgtgacgaggctcttatcccactccatttttccctgctcatgcctgcctctttaatttggtaagataatgctgtaactagaa

SEQ ID NO: 8296 - DNA, 120 bp, Artificial Sequence
  ENSG00000007306_11 (sequence is synthesized)
tttcacaatcagcgccttgtgcaggtaatttgacagagtgttggatgtgtcatgtcatcatgtcaaacccaaatatttgacctaagggatcctttattctgcccagtggctaactttaac

SEQ ID NO: 8297 - DNA, 120 bp, Artificial Sequence
  ENSG00000007306_12 (sequence is synthesized)
aacatccctaatacaactgtttattcaaatgcacggtggtccctgttagagttagacctctagactcacctgttctcacgccctgttttaatttaacccagctatgggatgccagataac

SEQ ID NO: 8298 - DNA, 120 bp, Artificial Sequence
  ENSG00000007306_13 (sequence is synthesized)
agaattgctgcctactagctgaacagggaggagtttgtgcagttgctgacacttcttgttgcacataaataaatacagtgggtactatagagactcagttgcaaaaattaacaaatatgc

SEQ ID NO: 8299 - DNA, 120 bp, Artificial Sequence
  ENSG00000007306_14 (sequence is synthesized)
tgcttgattaaaatgggtaggcttctcatgtggctcattctttaatctattctcttttatttggtttggttcatggggtctctgcctatggatcatacttcaaactcttggtgtgatcct

SEQ ID NO: 8300 - DNA, 120 bp, Artificial Sequence
  ENSG00000007306_15 (sequence is synthesized)
cctgattgtcacaatattagttaccctggtgtgctgtattctctaaaacctttaaatgtttgcatgcagccattcgtcaaatgtcaaatattctctctttggctggaatgacaaaaactc

SEQ ID NO: 8301 - DNA, 120 bp, Artificial Sequence
  ENSG00000007306_16 (sequence is synthesized)
aaataaatgtatgattaggaggacatcataacctatgaatgatggaagtccaaaatgatggtaactgacagtagtgttaatgccttatgtttagtcaaactctcatttaggtgacagcct

SEQ ID NO: 8302 - DNA, 120 bp, Artificial Sequence
  ENSG00000007306_17 (sequence is synthesized)
ggtgactccagaatggagccagtcatgctaaatgccatatactcacactgaaacatgaggaagcaggtagatcccagaacagacaaaattttcctaaaaacatgagagtccaggctgtct

SEQ ID NO: 8303 - DNA, 120 bp, Artificial Sequence
  ENSG00000007306_18 (sequence is synthesized)
gagtcagcacagtaagaaagtcctttctgctttaactcttagaaaaaagtaatatgaagtattctgaaattaaccaatcagtttatttaaatcaatttatttatattcttctgttcctgg

SEQ ID NO: 8304 - DNA, 120 bp, Artificial Sequence
  ENSG00000007306_19 (sequence is synthesized)
attcccattttacaaaacccactgttctactgttgtattgcccagtaggagctatcactatattttgcagaatggaaactgccctgactcatgaatcacaaataaaagccaattgtatct

SEQ ID NO: 8305 - DNA, 120 bp, Artificial Sequence
  ENSG00000007306_20 (sequence is synthesized)
gtaaccagacaattctacgtattctatgagtcagtacaagcaagttcacctgacctctcagctgggaccgctgtcagcatcatgattggagtactggctgggatggctctgatatagcag

SEQ ID NO: 8306 - DNA, 120 bp, Artificial Sequence
  ENSG00000007306_21 (sequence is synthesized)
agtccgtgtgaggagctcggagggcgaggaggacgtgggccgaggtatctgccctggagaagtgggcagtaatttgacttccagaagttcttgacatctgcagatccgggcgacagccaa

SEQ ID NO: 8307 - DNA, 120 bp, Artificial Sequence
  ENSG00000007312_0 (sequence is synthesized)
aggggacaggctgcagccggtgcagttacacgttttcctccaaggagcctcggacgttgtcacgggtttggggtcggggacagagcggtgaccatggccaggctggcgttgtctcctgtg

SEQ ID NO: 8308 - DNA, 120 bp, Artificial Sequence
  ENSG00000007312_1 (sequence is synthesized)
cccagccactggatggtggcgttgctgctgctgctctcagctgagccagtaccagcagccagatcggaggaccggtaccggaatcccaaaggtagtgcttgttcgcggatctggcagagc

SEQ ID NO: 8309 - DNA, 120 bp, Artificial Sequence
  ENSG00000007312_2 (sequence is synthesized)
ccacgtttcatagccaggaaacggggcttcacggtgaaaatgcactgctacatgaacagcgcctccggcaatgtgagctggctctggaagcaggagatggacgagaatccccagcagctg

SEQ ID NO: 8310 - DNA, 120 bp, Artificial Sequence
  ENSG00000007312_3 (sequence is synthesized)
aagctggaaaagggccgcatggaagagtcccagaacgaatctctcgccaccctcaccatccaaggcatccggtttgaggacaatggcatctacttctgtcagcagaagtgcaacaacacc

SEQ ID NO: 8311 - DNA, 120 bp, Artificial Sequence
  ENSG00000007312_4 (sequence is synthesized)
tcggaggtctaccagggctgcggcacagagctgcgagtcatgggattcagcaccttggcacagctgaagcagaggaacacgctgaaggatggtatcatcatgatccagacgctgctgatc

SEQ ID NO: 8312 - DNA, 120 bp, Artificial Sequence
  ENSG00000007312_5 (sequence is synthesized)
gatcacacctacgagggcctggacattgaccagacagccacctatgaggacatagtgacgctgcggacaggggaagtgaagtggtctgtaggtgagcacccaggccaggagtgagagcca

SEQ ID NO: 8313 - DNA, 120 bp, Artificial Sequence
  ENSG00000007312_6 (sequence is synthesized)
ggtcgccccatgacctgggtgcaggctccctggcctcagtgactgcttcggagctgcctggctcatggcccaacccctttcctggaccccccagctggcctctgaagctggcccaccaga

SEQ ID NO: 8314 - DNA, 120 bp, Artificial Sequence
  ENSG00000007312_7 (sequence is synthesized)
gctgccatttgtctccagcccctggtccccagctcttgccaaagggcctggagtagaaggacaacagggcagcaacttggagggagttctctggggatggacgggacccagccttctggg

SEQ ID NO: 8315 - DNA, 120 bp, Artificial Sequence
  ENSG00000007312_8 (sequence is synthesized)
ggtgctatgaggtgatccgtccccacacatgggatgggggaggcagagactggtccagagcccgcaaatggactcggagccgagggcctcccagcagagcttgggaagggccatggaccc

SEQ ID NO: 8316 - DNA, 120 bp, Artificial Sequence
  ENSG00000007312_9 (sequence is synthesized)
aactgggccccagaagagccacaggaacatcattcctctcccgcaaccactcccaccccagggaggccctggcctccagtgccttcccccgtggaataaacggtgtgtcctgagaaacca

SEQ ID NO: 8317 - DNA, 120 bp, Artificial Sequence
  ENSG00000007312_10 (sequence is synthesized)
atggccaggctggcgttgtctcctgtgcccagccactggatggtggcgttgctgctgctgctctcagctgagccagtaccagcagccagatcggaggaccggtaccggaatcccaaagga

SEQ ID NO: 8318 - DNA, 120 bp, Artificial Sequence
  ENSG00000007312_11 (sequence is synthesized)
tctgcctcctgcttgctccaccctcctcctctgtctctcactctttaccgcctgtctccctctcatggccctggggcctgggtctgtgggtgtcagctgcacgtggtgatgggctcagga

SEQ ID NO: 8319 - DNA, 120 bp, Artificial Sequence
  ENSG00000007312_12 (sequence is synthesized)
gcctgtggccccagttcctctcctgcctggagagcatcaggctgagctgggcatgaggagcaaaccagagttagcaaccaggaccgtggaagaactaggctcaggaggaagagaggctga

SEQ ID NO: 8320 - DNA, 120 bp, Artificial Sequence
  ENSG00000007312_13 (sequence is synthesized)
tgtcccacaccctgagaagcaaggactaagcccagggagtctgtgccagccagggcaggggcctgctgctggggctggcactcaggaagatgccaagcggaatgctgagcctggccttgg

SEQ ID NO: 8321 - DNA, 120 bp, Artificial Sequence
  ENSG00000007312_14 (sequence is synthesized)
ggcctccttaggatctcctctgagccccacccccagcccactgtcatcctcatcagacacatgccctccagccttggccactgaagggctgggctaaactctgggtcatagcaagggagc

SEQ ID NO: 8322 - DNA, 120 bp, Artificial Sequence
  ENSG00000007312_15 (sequence is synthesized)
ctgggggttcctctaggactcaggcccgggcctgtctagctgggaatctggctgagtctcgggtgagccctccagtgcagggtcactatgtgaggggctcagggattcccgggcagtgct

SEQ ID NO: 8323 - DNA, 120 bp, Artificial Sequence
  ENSG00000007314_0 (sequence is synthesized)
ccagcaccccggggctgcgcactgcagctccccaggccacccaccacccttctggtctctgagcccaggatgcgaggatggccagaccatctctgtgcaccctggtgcctctgggccctg

SEQ ID NO: 8324 - DNA, 120 bp, Artificial Sequence
  ENSG00000007314_1 (sequence is synthesized)
agtgcttgcgccccttcacccgggagtcactggcagccatagaacagcgggcggtggaggaggaggcccggctgcagcggaataagcagatggagattgaggagcccgaacggaagccac

SEQ ID NO: 8325 - DNA, 120 bp, Artificial Sequence
  ENSG00000007314_2 (sequence is synthesized)
gaagtgacttggaggctggcaagaacctacccatgatctacggagaccccccgccggaggtcatcggcatccccctggaggacctggatccctactacagcaataagaagaccttcatcg

SEQ ID NO: 8326 - DNA, 120 bp, Artificial Sequence
  ENSG00000007314_3 (sequence is synthesized)
tactcaacaagggcaaggccatcttccgcttctccgccacacctgctctctacctgctgagccccttcagcgtagtcaggcgcggggccatcaaggtgctcatccatgcgctgttcagca

SEQ ID NO: 8327 - DNA, 120 bp, Artificial Sequence
  ENSG00000007314_4 (sequence is synthesized)
tgttcatcatgatcaccatcttgaccaactgcgtattcatgaccatgagtgacccgcctccctggtccaagaatgtggagtacaccttcacagggatctacacctttgagtccctcatca

SEQ ID NO: 8328 - DNA, 120 bp, Artificial Sequence
  ENSG00000007314_5 (sequence is synthesized)
agatactggcccgaggcttctgtgtcgacgacttcacattcctccgggacccctggaactggctggacttcagtgtcatcatgatggcgtacctgacagagtttgtggacttgggcaaca

SEQ ID NO: 8329 - DNA, 120 bp, Artificial Sequence
  ENSG00000007314_6 (sequence is synthesized)
tctcagccctgaggaccttccgggtgctgcgggccctcaaaaccatcacggtcatcccagggctgaagacgatcgtgggggccctgatccagtcggtgaaaaagctgtcggatgtgatga

SEQ ID NO: 8330 - DNA, 120 bp, Artificial Sequence
  ENSG00000007314_7 (sequence is synthesized)
tcctcactgtcttctgcctgagcgtctttgcgctggtaggactgcagctcttcatgggaaacctgaggcagaagtgtgtgcgctggcccccgccgttcaacgacaccaacaccacgtggt

SEQ ID NO: 8331 - DNA, 120 bp, Artificial Sequence
  ENSG00000007314_8 (sequence is synthesized)
acagcaatgacacgtggtacggcaatgacacatggtatggcaatgagatgtggtacggcaatgactcatggtatgccaacgacacgtggaacagccatgcaagctgggccaccaacgata

SEQ ID NO: 8332 - DNA, 120 bp, Artificial Sequence
  ENSG00000007314_9 (sequence is synthesized)
cctttgattgggacgcctacatcagtgatgaagggaacttctacttcctggagggctccaacgatgccctgctctgtgggaacagcagtgatgctgggcactgccctgagggttatgagt

SEQ ID NO: 8333 - DNA, 120 bp, Artificial Sequence
  ENSG00000007314_10 (sequence is synthesized)
gcatcaagaccgggcggaaccccaactatggctacaccagctatgacaccttcagctgggccttcttggctctcttccgcctcatgacacaggactattgggagaacctcttccagctga

SEQ ID NO: 8334 - DNA, 120 bp, Artificial Sequence
  ENSG00000007314_11 (sequence is synthesized)
cccttcgagcagctggcaagacctacatgatcttcttcgtggtcatcatcttcctgggctctttctacctcatcaatctgatcctggccgtggtggccatggcatatgccgagcagaatg

SEQ ID NO: 8335 - DNA, 120 bp, Artificial Sequence
  ENSG00000007314_12 (sequence is synthesized)
aggccaccctggccgaggataaggagaaagaggaggagtttcagcagatgcttgagaagttcaaaaagcaccaggaggagctggagaaggccaaggccgcccaagctctggaaggtgggg

SEQ ID NO: 8336 - DNA, 120 bp, Artificial Sequence
  ENSG00000007314_13 (sequence is synthesized)
aggcagatggggacccagcccatggcaaagactgcaatggcagcctggacacatcgcaaggggagaagggagccccgaggcagagcagcagcggagacagcggcatctccgacgccatgg

SEQ ID NO: 8337 - DNA, 120 bp, Artificial Sequence
  ENSG00000007314_14 (sequence is synthesized)
aagaactggaagaggcccaccaaaagtgcccaccatggtggtacaagtgcgcccacaaagtgctcatatggaactgctgcgccccgtggctgaagttcaagaacatcatccacctgatcg

SEQ ID NO: 8338 - DNA, 120 bp, Artificial Sequence
  ENSG00000007314_15 (sequence is synthesized)
tcatggacccgttcgtggacctgggcatcaccatctgcatcgtgctcaacaccctcttcatggccatggaacattaccccatgacggagcactttgacaacgtgctcactgtgggcaacc

SEQ ID NO: 8339 - DNA, 120 bp, Artificial Sequence
  ENSG00000007314_16 (sequence is synthesized)
tggtcttcacaggcatcttcacagcagagatggttctgaagctgattgccatggacccctacgagtatttccagcagggttggaatatcttcgacagcatcatcgtcaccctcagcctgg

SEQ ID NO: 8340 - DNA, 120 bp, Artificial Sequence
  ENSG00000007314_17 (sequence is synthesized)
tagagctaggcctggccaacgtacagggactgtctgtgctacgctccttccgtctgctgcgggtcttcaagctggccaagtcgtggccaacgctgaacatgctcatcaagatcattggca

SEQ ID NO: 8341 - DNA, 120 bp, Artificial Sequence
  ENSG00000007314_18 (sequence is synthesized)
attcagtgggggcgctgggtaacctgacgctggtgctggctatcatcgtgttcatcttcgccgtggtgggcatgcagctgtttggcaagagctacaaggagtgcgtgtgcaagattgcct

SEQ ID NO: 8342 - DNA, 120 bp, Artificial Sequence
  ENSG00000007314_19 (sequence is synthesized)
tggactgcaacctgccgcgctggcacatgcatgatttcttccactccttcctcatcgtcttccgcatcctgtgcggggagtggatcgagaccatgtgggactgcatggaggtggccggcc

SEQ ID NO: 8343 - DNA, 120 bp, Artificial Sequence
  ENSG00000007314_20 (sequence is synthesized)
aagccatgtgcctcaccgtcttcctcatggtcatggtcatcggcaatcttgtggtcctgaacctgttcctggctctgctgctgagctccttcagcgccgacagtctggcagcctcggatg

SEQ ID NO: 8344 - DNA, 120 bp, Artificial Sequence
  ENSG00000007314_21 (sequence is synthesized)
aggatggcgagatgaacaacctgcagattgccatcgggcgcatcaagttgggcatcggctttgccaaggccttcctcctggggctgctgcatggcaagatcctgagccccaaggacatca

SEQ ID NO: 8345 - DNA, 120 bp, Artificial Sequence
  ENSG00000007314_22 (sequence is synthesized)
tgctcagcctcggggaggctgacggggccggggaggctggagaggcgggggagactgcccccgaggatgagaagaaggagccgcccgaggaggacctgaagaaggacaatcacatcctga

SEQ ID NO: 8346 - DNA, 120 bp, Artificial Sequence
  ENSG00000007314_23 (sequence is synthesized)
accacatgggcctggctgacggccccccatccagcctcgagctggaccaccttaacttcatcaacaacccctacctgaccatacaggtgcccatcgcctccgaggagtccgacctggaga

SEQ ID NO: 8347 - DNA, 120 bp, Artificial Sequence
  ENSG00000007314_24 (sequence is synthesized)
tgcccaccgaggaggaaaccgacactttctcagagcctgaggatagcaagaagccgccgcagcctctctatgatgggaactcgtccgtctgcagcacagctgactacaagccccccgagg

SEQ ID NO: 8348 - DNA, 120 bp, Artificial Sequence
  ENSG00000007314_25 (sequence is synthesized)
aggaccctgaggagcaggcagaggagaaccccgagggggagcagcctgaggagtgcttcactgaggcctgcgtgcagcgctggccctgcctctacgtggacatctcccagggccgtggga

SEQ ID NO: 8349 - DNA, 120 bp, Artificial Sequence
  ENSG00000007314_26 (sequence is synthesized)
agaagtggtggactctgcgcagggcctgcttcaagattgtcgagcacaactggttcgagaccttcattgtcttcatgatcctgctcagcagtggggctctggccttcgaggacatctaca

SEQ ID NO: 8350 - DNA, 120 bp, Artificial Sequence
  ENSG00000007314_27 (sequence is synthesized)
ttgagcagcggcgagtcattcgcaccatcctagaatatgccgacaaggtcttcacctacatcttcatcatggagatgctgctcaaatgggtggcctacggctttaaggtgtacttcacca

SEQ ID NO: 8351 - DNA, 120 bp, Artificial Sequence
  ENSG00000007314_28 (sequence is synthesized)
acgcctggtgctggctcgacttcctcatcgtggatgtctccatcatcagcttggtggccaactggctgggctactcggagctgggacccatcaaatccctgcggacactgcgggccctgc

SEQ ID NO: 8352 - DNA, 120 bp, Artificial Sequence
  ENSG00000007314_29 (sequence is synthesized)
gtcccctgagggcactgtcccgattcgagggcatgagggtggtggtgaacgccctcctaggcgccatcccctccatcatgaatgtgctgcttgtctgcctcatcttctggctgatcttca

SEQ ID NO: 8353 - DNA, 120 bp, Artificial Sequence
  ENSG00000007314_30 (sequence is synthesized)
gcatcatgggtgtcaacctgtttgccggcaagttctactactgcatcaacaccaccacctctgagaggttcgacatctccgaggtcaacaacaagtctgagtgcgagagcctcatgcaca

SEQ ID NO: 8354 - DNA, 120 bp, Artificial Sequence
  ENSG00000007314_31 (sequence is synthesized)
caggccaggtccgctggctcaatgtcaaggtcaactacgacaacgtgggtctgggctacctctccctcctgcaggtggccaccttcaagggttggatggacatcatgtatgcagccgtgg

SEQ ID NO: 8355 - DNA, 120 bp, Artificial Sequence
  ENSG00000007314_32 (sequence is synthesized)
cgggagaaggaggagcagccgcagtacgaggtgaacctctacatgtacctctactttgtcatcttcatcatctttggctccttcttcaccctcaacctcttcattggcgtcatcattgac

SEQ ID NO: 8356 - DNA, 120 bp, Artificial Sequence
  ENSG00000007314_33 (sequence is synthesized)
aacttcaaccagcagaagaagaagttaggggggaaagacatctttatgacggaggaacagaagaaatactataacgccatgaagaagcttggctccaagaagcctcagaagccaattccc

SEQ ID NO: 8357 - DNA, 120 bp, Artificial Sequence
  ENSG00000007314_34 (sequence is synthesized)
cggccccagaacaagatccagggcatggtgtatgacctcgtgacgaagcaggccttcgacatcaccatcatgatcctcatctgcctcaacatggtcaccatgatggtggagacagacaac

SEQ ID NO: 8358 - DNA, 120 bp, Artificial Sequence
  ENSG00000007314_35 (sequence is synthesized)
cagagccagctcaaggtggacatcctgtacaacatcaacatgatcttcatcatcatcttcacaggggagtgcgtgctcaagatgctcgccctgcgccagtactacttcaccgttggctgg

SEQ ID NO: 8359 - DNA, 120 bp, Artificial Sequence
  ENSG00000007314_36 (sequence is synthesized)
aacatctttgacttcgtggtcgtcatcctgtccattgtgggccttgccctctctgacctgatccagaagtacttcgtgtcacccacgctgttccgtgtgatccgcctggcgcggattggg

SEQ ID NO: 8360 - DNA, 120 bp, Artificial Sequence
  ENSG00000007314_37 (sequence is synthesized)
cgtgtcctgcggctgatccgcggggccaagggcatccggacgctgctgttcgccctcatgatgtcgctgcctgccctcttcaacatcggcctcctcctcttcctggtcatgttcatctac

SEQ ID NO: 8361 - DNA, 120 bp, Artificial Sequence
  ENSG00000007314_38 (sequence is synthesized)
tccatcttcggcatgtccaactttgcctacgtcaagaaggagtcgggcatcgatgatatgttcaacttcgagaccttcggcaacagcatcatctgcctgttcgagatcaccacgtcggcc

SEQ ID NO: 8362 - DNA, 120 bp, Artificial Sequence
  ENSG00000007314_39 (sequence is synthesized)
ggctgggacgggctcctcaaccccatcctcaacagcgggcccccagactgtgaccccaacctggagaacccgggcaccagtgtcaagggtgactgcggcaacccctccatcggcatctgc

SEQ ID NO: 8363 - DNA, 120 bp, Artificial Sequence
  ENSG00000007314_40 (sequence is synthesized)
ttcttctgcagctatatcatcatctccttcctcatcgtggtcaacatgtacatcgccatcatcctggagaacttcaatgtggccacagaggagagcagcgagccccttggtgaagatgac

SEQ ID NO: 8364 - DNA, 120 bp, Artificial Sequence
  ENSG00000007314_41 (sequence is synthesized)
tttgagatgttctacgagacatgggagaagttcgaccccgacgccacccagttcatcgcctacagccgcctctcagacttcgtggacaccctgcaggaaccgctgaggattgccaagccc

SEQ ID NO: 8365 - DNA, 120 bp, Artificial Sequence
  ENSG00000007314_42 (sequence is synthesized)
aacaagatcaagctcatcacactggacttgcccatggtgccaggggacaagatccactgcctggacatcctctttgccctgaccaaagaggtcctgggtgactctggggaaatggacgcc

SEQ ID NO: 8366 - DNA, 120 bp, Artificial Sequence
  ENSG00000007314_43 (sequence is synthesized)
ctcaagcagaccatggaggagaagttcatggcagccaacccctccaaggtgtcctacgagcccatcaccaccaccctcaagaggaagcacgaggaggtgtgcgccatcaagatccagagg

SEQ ID NO: 8367 - DNA, 120 bp, Artificial Sequence
  ENSG00000007314_44 (sequence is synthesized)
gcctaccgccggcacctgctacagcgctccatgaagcaggcatcctacatgtaccgccacagccacgacggcagcggggatgacgcccctgagaaggaggggctgcttgccaacaccatg

SEQ ID NO: 8368 - DNA, 120 bp, Artificial Sequence
  ENSG00000007314_45 (sequence is synthesized)
agcaagatgtatggccacgagaatgggaacagcagctcgccaagcccggaggagaagggcgaggcaggggacgccggacccactatggggctgatgcccatcagcccctcagacactgcc

SEQ ID NO: 8369 - DNA, 120 bp, Artificial Sequence
  ENSG00000007314_46 (sequence is synthesized)
tggcctcccgcccctcccccagggcagactgtgcgcccaggtgtcaaggagtctcttgtctagcaggcagcatcggggtggcccactgagtctcggcatagtccccagagctcccccgtg

SEQ ID NO: 8370 - DNA, 120 bp, Artificial Sequence
  ENSG00000007314_47 (sequence is synthesized)
gtgcctgcacacagagtgagggaggagggctttgaatctgggactgtgcctggctccctgatgggggacaggatttggccacactggggctgacacccaggcccgagcgcctgcgttccc

SEQ ID NO: 8371 - DNA, 120 bp, Artificial Sequence
  ENSG00000007314_48 (sequence is synthesized)
agaccatgggaaatgggaattgcgctcaggggctccatgctgggtctgaggcccctgcctccaagatttaacctgcaagttgctctgacctcctctgggccctgtcgcccctccttttgg

SEQ ID NO: 8372 - DNA, 120 bp, Artificial Sequence
  ENSG00000007314_49 (sequence is synthesized)
cctgggggaggtcagaacattcgaatctctgcccctcacttgaggaggagctggcctgcggtggagggatcagttgccccccatcaccagagtcttaagggtcactggcctctccccagg

SEQ ID NO: 8373 - DNA, 120 bp, Artificial Sequence
  ENSG00000007314_50 (sequence is synthesized)
aagtggctcagacccctcagccccagcccagacaaagatgtcttaacctcagggagtgcagacacctaaccccagggcactgccagcccaccccctttgactctggggtgcagcttcacc

SEQ ID NO: 8374 - DNA, 120 bp, Artificial Sequence
  ENSG00000007314_51 (sequence is synthesized)
caccaggccagctcaggaattccctggaaaagggaaatgtgactggttcagaaatagctcctcaaagcctcaaaacctgattggccactggatcctgctgctttgggctgggatggtgac

SEQ ID NO: 8375 - DNA, 120 bp, Artificial Sequence
  ENSG00000007314_52 (sequence is synthesized)
tcctgaaacctcttcctaggccacgtccaggtccgtagctcccctggctggctcctaggggaagagcagaaggaaggatgccacttgggaatgaattgtccttttctaggaagcacgggg

SEQ ID NO: 8376 - DNA, 120 bp, Artificial Sequence
  ENSG00000007314_53 (sequence is synthesized)
gagtgagacaggctgggtcctgccagctggatcgctgcacatggcctgagcatccagacctgagcgggagtcagggacctgctgctcagtaagaagattctcgccccttccctctctccc

SEQ ID NO: 8377 - DNA, 120 bp, Artificial Sequence
  ENSG00000007314_54 (sequence is synthesized)
tgcctcactcctccgtgagcaccaccagggctccaggagcctcatccagcctcagagatctcccttctcatctccccacgcccgtctctttctcacctttcccacctctctccccaaagt

SEQ ID NO: 8378 - DNA, 120 bp, Artificial Sequence
  ENSG00000007314_55 (sequence is synthesized)
gatcctaagaatgtacagttgagctcaggttagatatttcgaccctggggcgtgcagcagggaaggcccaactggttcaggctcaaccttccaacttcctgtggcctgaagaagcacttc

SEQ ID NO: 8379 - DNA, 120 bp, Artificial Sequence
  ENSG00000007314_56 (sequence is synthesized)
tgctgcatcgctgttctgggcatggcagggccaggcctctgctggctcaggaggaggggtgagagacctgctcaggcgtcgctggatttattcacttgtgtgtgtacctgtggctgtgtg

SEQ ID NO: 8380 - DNA, 120 bp, Artificial Sequence
  ENSG00000007314_57 (sequence is synthesized)
tctgcttgtatgcttttataggcctgtgtgtatagctgtgtgtgtgttcaagtgcgtgactgtatgtgtgtgtgtgaaccactgtgtactggagcctgcattatgcacgtgtctgggtat

SEQ ID NO: 8381 - DNA, 120 bp, Artificial Sequence
  ENSG00000007314_58 (sequence is synthesized)
ctttgtatatatgtgtatatatgtgtgccctggactgtttcaaggtccatggagtacggctggtgtgtcatactgtgcaggcctgtccctgggagtgttcccgtgcctgggagagtggac

SEQ ID NO: 8382 - DNA, 120 bp, Artificial Sequence
  ENSG00000007314_59 (sequence is synthesized)
ctgtgctgtgagtgtgtggatgcgtgtgaacgcatgtggtaaggtgtgtactcagggcattctgttggcctaagtgcctcttctttttcttcttgtttctcatgaaaagtttgattaaaa

SEQ ID NO: 8383 - DNA, 120 bp, Artificial Sequence
  ENSG00000007314_60 (sequence is synthesized)
ttcaggaagcagcaaaaccttcaaaacaagacatgtatgtgtgcttgagtgtgtgaacacgtgtgtgtgtgtgcacatctacatgccatgcctatgggccagagttgtctttattgtcca

SEQ ID NO: 8384 - DNA, 120 bp, Artificial Sequence
  ENSG00000007314_61 (sequence is synthesized)
ccatgctctctcacctgctcccagtcctgcctgaacagccctctctctcactcccctctcctccccttcctgtttctcgttgtcacacccatggcctcagccctgctccctgcctcctgc

SEQ ID NO: 8385 - DNA, 120 bp, Artificial Sequence
  ENSG00000007314_62 (sequence is synthesized)
ctatgtctcctctatggaaggaggcctccactccttccatctcttccttcagaagtttcgtctaatgggggcagtctccccttcctggcacattgcccctctgccttgccctcctgggcc

SEQ ID NO: 8386 - DNA, 120 bp, Artificial Sequence
  ENSG00000007314_63 (sequence is synthesized)
ctgggctggcacagcccctggagcctcagaaatctgtttgattggatattctcctcggactgtgtgcaggttgcagaggaagagtagatgagccgggtccggcctctccctgcctgtggc

SEQ ID NO: 8387 - DNA, 120 bp, Artificial Sequence
  ENSG00000007314_64 (sequence is synthesized)
ccctcccctgcagacggatgcccattcctgcctggtccagtggggaacaggtcccacgccaggccagcaggcgggctcctttgtacagttcttacaataaaccctccttggtgcctctgg

SEQ ID NO: 8388 - DNA, 120 bp, Artificial Sequence
  ENSG00000007314_65 (sequence is synthesized)
acctacgtccccgtggttcctcgaccatccagggctggatgaatgaatgaatggatgagtttgctcctccctctcttcttcccttcccttctggtctcccatcctgccccatctggtagg

SEQ ID NO: 8389 - DNA, 120 bp, Artificial Sequence
  ENSG00000007314_66 (sequence is synthesized)
ctcactgaggcggtggagcttggagccggccgcgctcagagcgcggggctttggggtgaagccatgtggggcggaggttacaggggaggtgacagtaagggtgacgcaagaggcggtgga

SEQ ID NO: 8390 - DNA, 120 bp, Artificial Sequence
  ENSG00000007314_67 (sequence is synthesized)
acttggaataggccttgctagagggttgagatgtggagtgctaaggggcggggcttggaaggtggaacaaaagctctagctggagccgggggcacgtgaggggataatcctcaccagata

SEQ ID NO: 8391 - DNA, 120 bp, Artificial Sequence
  ENSG00000007341_0 (sequence is synthesized)
agctcctggcgcctgcgatagcggcaagatggcggaccgtggcggcgtgggtgaagccgcagctgttggagcgtctcctgcatctgtccctggcctaaacccgacgctaggctggaggga

SEQ ID NO: 8392 - DNA, 120 bp, Artificial Sequence
  ENSG00000007341_1 (sequence is synthesized)
gcgactgcgggccgggctggcggggactggggcctcgttgtggttcgtggcggggctggggctgctttacgccctgaggatccctttgaggctgtgtgagaatttggcagcggtgactgt

SEQ ID NO: 8393 - DNA, 120 bp, Artificial Sequence
  ENSG00000007341_2 (sequence is synthesized)
atttttaaattcattgacacccaaattctatgtggcacttacagggacctcttcattgatatcaggactaatatttatatttgaatggtggtacttccataagcatggcacatcttttat

SEQ ID NO: 8394 - DNA, 120 bp, Artificial Sequence
  ENSG00000007341_3 (sequence is synthesized)
tgagcaagtatctgtaagccatttgcaaccactgatgggaggaacagagagcagcatttcagaaccaggttctccttcgaggaacagagaaaatgaaaccagcagacagaatttgtcaga

SEQ ID NO: 8395 - DNA, 120 bp, Artificial Sequence
  ENSG00000007341_4 (sequence is synthesized)
atgtaaggtatggagaaaccctctaaatcttttcagaggagcagaatataggagatacacttgggtgactggtaaagagccacttacatactatgacatgaacctgtcagctcaggacca

SEQ ID NO: 8396 - DNA, 120 bp, Artificial Sequence
  ENSG00000007341_5 (sequence is synthesized)
tcagacctttttcacctgtgacacagattttttacgtccttcagacacagttatgcagaaggcttggagggaaagaaatcctccagctcgaatcaaagcagcctatcaagctttagaatt

SEQ ID NO: 8397 - DNA, 120 bp, Artificial Sequence
  ENSG00000007341_6 (sequence is synthesized)
aaacaatgactgtgccactgcatatgttctactggctgaggaagaagcaacaactattgtagatgctgaaaggttatttaaacaggcactcaaggcaggagaaacaatttataggcagtc

SEQ ID NO: 8398 - DNA, 120 bp, Artificial Sequence
  ENSG00000007341_7 (sequence is synthesized)
acagcagtgccagcaccaaagtcctcagcatgaagctcaactgaggagagataccaatgtactggtatatattaaaagaagattggcaatgtgtgcaagaaaattaggaagaataagaga

SEQ ID NO: 8399 - DNA, 120 bp, Artificial Sequence
  ENSG00000007341_8 (sequence is synthesized)
agcagtaaaaataatgagagatttgatgaaagaatttcctcctcttaccatgttgaacatccatgaaaatctcttagaatcacttttagaattacaggcctatccagatgttcaggcagt

SEQ ID NO: 8400 - DNA, 120 bp, Artificial Sequence
  ENSG00000007341_9 (sequence is synthesized)
cctagcaaaatatgatgatataagccttccaaagtcagcagcaatctgttacacagcagcactgttgaagacaaggactgtttcagaaaaattctctccagaaacagcctccagaagagg

SEQ ID NO: 8401 - DNA, 120 bp, Artificial Sequence
  ENSG00000007341_10 (sequence is synthesized)
attaagcacagcagaaattaatgccgtggaagcaattcatagagctgtggaatttaatcctcatgttccaaaatatttattagagatgaaaagtttaattttacctccagaacacattct

SEQ ID NO: 8402 - DNA, 120 bp, Artificial Sequence
  ENSG00000007341_11 (sequence is synthesized)
gaaacggggtgatagtgaagcaattgcctatgctttctttcatcttcagcactggaaacgaatagaaggtgctcttaatctgttacagtgtacatgggaaggcacttttagaatgattcc

SEQ ID NO: 8403 - DNA, 120 bp, Artificial Sequence
  ENSG00000007341_12 (sequence is synthesized)
atacccgttagagaaaggacatctattttacccttatcccagctgcacagagacggctgatagagagctattacctacctttcatcatgtttctgtttacccaaaaaaggagcttccttt

SEQ ID NO: 8404 - DNA, 120 bp, Artificial Sequence
  ENSG00000007341_13 (sequence is synthesized)
gttcatccatttcacagcaggattttgctcttctacagcaatgatagccattctcactcaccagtttcctgaaatcatgggtatttttgctaaagctgtgctgggactctggtgccccca

SEQ ID NO: 8405 - DNA, 120 bp, Artificial Sequence
  ENSG00000007341_14 (sequence is synthesized)
accctgggcatcctcaggctttgaggagaatacacaggatttgaagtcagaagacctaggtttgagttctggctgagccacgcactgttcatgtgaccttggacaaatcaccaaattttt

SEQ ID NO: 8406 - DNA, 120 bp, Artificial Sequence
  ENSG00000007341_15 (sequence is synthesized)
ctgaacagcatctgtaaagtgacagtaacccctacctcacagggttgttgtgaggattacatatatgctaaagcattttgcatatgaaaaagcttcttatgaatattgttattcctaggc

SEQ ID NO: 8407 - DNA, 120 bp, Artificial Sequence
  ENSG00000007341_16 (sequence is synthesized)
aaaccccccttggaagctgtcaaaaaggacaactgtagatgaaattgtcttccttttttcttcattcagcttagcctttctgtttggccagggctacttacaggggctgttggggttgaa

SEQ ID NO: 8408 - DNA, 120 bp, Artificial Sequence
  ENSG00000007341_17 (sequence is synthesized)
gctgctccatcgatatactcatagaatggaagtgagcaaaggaaaattttaagccaggatagttaaccgttagggggccagtgggagaatgcttgccttgcatttgcacatccagaatga

SEQ ID NO: 8409 - DNA, 120 bp, Artificial Sequence
  ENSG00000007341_18 (sequence is synthesized)
ctaaaacatcttaagtaaatgaggaatagccaccgagatgctcagagataatataagccatgagtgggaagtgggaaaatgagtttgtcaacgccctctcttttctatccctttaccttt

SEQ ID NO: 8410 - DNA, 120 bp, Artificial Sequence
  ENSG00000007341_19 (sequence is synthesized)
gaggtcagggacagggcatattactgacaccccactggctattgccctatacctgccaatcacccaaagaaaataatagcttctgagaaagctcaattcactgtagcaactgtgatatat

SEQ ID NO: 8411 - DNA, 120 bp, Artificial Sequence
  ENSG00000007341_20 (sequence is synthesized)
ttaccctaataaagccaccacttggtcttttccagtgcttctctcttatggagatcatccctggaatccaaagctctccagttttctaacccagttaagagttaaaaacaaccacaggtc

SEQ ID NO: 8412 - DNA, 120 bp, Artificial Sequence
  ENSG00000007341_21 (sequence is synthesized)
atgagcagtaggcttggcagttataccccatgcagtcataggagactgctccatcattctcagcacatagggtgcacatctcactatctctggcatgaaccagccttgcgaacttataca

SEQ ID NO: 8413 - DNA, 120 bp, Artificial Sequence
  ENSG00000007341_22 (sequence is synthesized)
gtctcagccactctgctttgatggtaattcttcaccactgatctctcctcaccatgcccttcctgcatccttcccccaaccacccaccagaggagttctggtccccaaaccaaagagttg

SEQ ID NO: 8414 - DNA, 120 bp, Artificial Sequence
  ENSG00000007341_23 (sequence is synthesized)
cctgcaggttggtaatgtgactttgtagatattccttgattaaagccagaccctattggtatcctttttgaagtactggatcgaaatctaattgcttttttttttaattgttggggagag

SEQ ID NO: 8415 - DNA, 120 bp, Artificial Sequence
  ENSG00000007341_24 (sequence is synthesized)
gaggatgagcagaactcctatgcagcctgagagaagttctctatgtgtctgtatatgtacacctctgtgtgtgtgtgtgtaacctcatggttgtgctcaggctgacagggagggcaaaga

SEQ ID NO: 8416 - DNA, 120 bp, Artificial Sequence
  ENSG00000007341_25 (sequence is synthesized)
gtgaaaaggaagcatctctttcttgttatccaacattgcttcaaagatgcccaacccccgtagtagcaggcagttcccaagtggagggtcggggcagaggcctccaccaaggccatcaat

SEQ ID NO: 8417 - DNA, 120 bp, Artificial Sequence
  ENSG00000007341_26 (sequence is synthesized)
aaccaggtgtgagctacaggtctctgtgtaatgtgaagctctcccgtatttcatttctgcacccagggggcggctctgcaggattgcttacggagaactctgtgtctggcacctctctcc

SEQ ID NO: 8418 - DNA, 120 bp, Artificial Sequence
  ENSG00000007341_27 (sequence is synthesized)
acaaggcccaggcgcccagggtcccaccgacctgcccaggaatgcatcacattgttctctggtgctgtaatttggctgcaggagctaggctgaatgcctcccagggatgagaaacatact

SEQ ID NO: 8419 - DNA, 120 bp, Artificial Sequence
  ENSG00000007341_28 (sequence is synthesized)
ctccctggcgtcctcccttcgccccagctagcttgagcttctgccctatgaccactgagtgcatttaaataaaaacctcagaaagactgaggaaaaaaaaatcctaattatctctcttct

SEQ ID NO: 8420 - DNA, 120 bp, Artificial Sequence
  ENSG00000007341_29 (sequence is synthesized)
gttaagccatgtagagactcgtgtcctgagtgggtctgagaatttggcaaagacttactggttggtgttcttgataagggaagtgagacaaaggagaagaaattactccctgcaacagga

SEQ ID NO: 8421 - DNA, 120 bp, Artificial Sequence
  ENSG00000007341_30 (sequence is synthesized)
actccctgcaacaggaggaatagaaatgaagcagtgagtgttcagaaattagatctacaagaagttttgcaaacagaccctcagggccaggcaatgtttgtttttgttttttgttttttg

SEQ ID NO: 8422 - DNA, 120 bp, Artificial Sequence
  ENSG00000007341_31 (sequence is synthesized)
gaagcccctgattttatttttccagcatcactctaaggaagagtgtggattagtgccattattcagggctggtattaataaaagttagcttttatctgcagggctaggttaaggctggca

SEQ ID NO: 8423 - DNA, 120 bp, Artificial Sequence
  ENSG00000007341_32 (sequence is synthesized)
ttcttacttttacattaaaaaaactggctacaggctgcgcagctgaggtacttcagtcatgtgccttctctaaaggattcttagatccttaaaatatatagtatgttttaagtttgtatc

SEQ ID NO: 8424 - DNA, 120 bp, Artificial Sequence
  ENSG00000007341_33 (sequence is synthesized)
taaatagcacttactgtaatgtattatacctaaatgtttattaaaagttagaagaaatgagtaccaacaggaaggaatggaagagaggagaggggctaagacattgctgatctgagggac

SEQ ID NO: 8425 - DNA, 120 bp, Artificial Sequence
  ENSG00000007341_34 (sequence is synthesized)
agacctctatcaaatagaagagggctgggagaaggggtgattagaagcagagtgagggaactaaatggagccctgactgcaccaaataaagttctcattttgctgcttgttccaaataaa

SEQ ID NO: 8426 - DNA, 120 bp, Artificial Sequence
  ENSG00000007341_35 (sequence is synthesized)
cacacaagaaaccatctctgatctgcctgtgctaacccagctgaacaatggaagatatttgttgtaaattaaaggaattgatttgtatatagttgctgccataaatacatcaaacataaa

SEQ ID NO: 8427 - DNA, 120 bp, Artificial Sequence
  ENSG00000007341_36 (sequence is synthesized)
aagaaagccgagtgatggaatcaccgcggcggccgtcggaaggacccgcccggaaacgccgaccaagagggccccatgtcagttatgcgcgggagtgacgtctcctaacgccagcgcccg

SEQ ID NO: 8428 - DNA, 120 bp, Artificial Sequence
  ENSG00000007341_37 (sequence is synthesized)
tagaaaactcaaaacagcagagtgctgtggtgtgcatgtttgtgtttcccccaaaattctaatcaccaatgtgatgttacgaggtagggtctttgggaggtgatcaggtcatgagggcag

SEQ ID NO: 8429 - DNA, 120 bp, Artificial Sequence
  ENSG00000007341_38 (sequence is synthesized)
aggaagtagggtttgccttaggtgatttgaagtctaatatctttcccaatgagttacactcatttcccatccatctaatgggcgctggcagcgtgtttcgattattcttggcttctggcc

SEQ ID NO: 8430 - DNA, 120 bp, Artificial Sequence
  ENSG00000007341_39 (sequence is synthesized)
tccatccgaccaaatagctgttgctactcctacaagtttttctggtgcccgttatctccacgacagccgaatccaaagctttaagagctgctcggcagctggaacgatcggtggcttttc

SEQ ID NO: 8431 - DNA, 120 bp, Artificial Sequence
  ENSG00000007341_40 (sequence is synthesized)
caaccccggggggggggcggtgtgaaaggtgaccctcatttcgtttggaagcggtaacacttcggggtcacatctcagtccagttcctccagaataggcgctgctgtccgccccttccct

SEQ ID NO: 8432 - DNA, 120 bp, Artificial Sequence
  ENSG00000007341_41 (sequence is synthesized)
gagaaggcgccgtctgtgaaccagaaagcagaccctcaccagacaccaaatttgttggtaccttggtcatagacttcccagcctccagaactgttaaaaataaatttatactgtttataa

SEQ ID NO: 8433 - DNA, 120 bp, Artificial Sequence
  ENSG00000007341_42 (sequence is synthesized)
accaaatacatatgctgtttccttccctctaatttgagacagtggttttgtatcctaccaaaataaatatggagtagttttgaacctcctttgtaaaagcatatttatctttttattctt

SEQ ID NO: 8434 - DNA, 120 bp, Artificial Sequence
  ENSG00000007341_43 (sequence is synthesized)
acagacttgcaaaagttctatctaaattatgacttataagtgctttagttttattctccaaagcaagctgaattacctcattttgatttgttgcaaatagtgataagccattatgtataa

SEQ ID NO: 8435 - DNA, 120 bp, Artificial Sequence
  ENSG00000007341_44 (sequence is synthesized)
tatatatacaaattaaaactttttcaagtgaatttcacactagatattaatactacttaagtcccaccactcataaagatacttgcatatttgtaacctaagtactttaaatttgcattt

SEQ ID NO: 8436 - DNA, 120 bp, Artificial Sequence
  ENSG00000007341_45 (sequence is synthesized)
acaggcatgagccaccaggcctggcccattctgtcttcttttctttcaacattcatagccccatatctaggcccttaaacatctcttcccttggctattgctatagtatcctaagtggtt

SEQ ID NO: 8437 - DNA, 120 bp, Artificial Sequence
  ENSG00000007341_46 (sequence is synthesized)
tcccttcctcttacacttccccttctagtacatactctctccttactaggtaaaaaaaaaagtggttctcaaactttttagactaagaaatcctttacattcttaaaaaattatccagga

SEQ ID NO: 8438 - DNA, 120 bp, Artificial Sequence
  ENSG00000007341_47 (sequence is synthesized)
atatactgtactattctttagctgtagacaggatgaagtgtttagggcccaggtccccttaccatgtgattatatttcactcaagatctgagcagcaacctcagaacaagatataagtat

SEQ ID NO: 8439 - DNA, 120 bp, Artificial Sequence
  ENSG00000007341_48 (sequence is synthesized)
gtgtgagaatttggcagcgggtgagaggaccagacctcctggggcagggcggggggccaggagagatgtcgggggcaagagccaaagggcaagagattctcggtagtcctagagggcctc

SEQ ID NO: 8440 - DNA, 120 bp, Artificial Sequence
  ENSG00000007341_49 (sequence is synthesized)
aatcatgggtatttttgctaaagctgtagtaggagttaaaacccaaaaagaaaatgctgattaattatattcccaaaaatgaaaacactgagaaccatggaaaaactagtccttacttgt

SEQ ID NO: 8441 - DNA, 120 bp, Artificial Sequence
  ENSG00000007341_50 (sequence is synthesized)
gaaactgtgcaactgtcagaagaaaagttattccaccttagaatgtgctcttgtatttaagacccttttcaagaaatgagcatacaaaatgcacactgacaaattcaactgatcaaagac

SEQ ID NO: 8442 - DNA, 120 bp, Artificial Sequence
  ENSG00000007341_51 (sequence is synthesized)
tccacagtggagcatcaaagaaggcaggatgctttgttcagtcttgaacgtgttaacataaggtttattatgtgttacagaaaacctttctggaggttaagaaaatccatcagctattct

SEQ ID NO: 8443 - DNA, 120 bp, Artificial Sequence
  ENSG00000007341_52 (sequence is synthesized)
agatttgttaacaagaaacaaaattttcaaaaattatcgttaaaagggatgtgtctatagggaaagactggtgttcaaattctgaagcaaatgccctgaggctcacagatttattatagc

SEQ ID NO: 8444 - DNA, 120 bp, Artificial Sequence
  ENSG00000007341_53 (sequence is synthesized)
gaatcagacaggcgacagtacaggagaaaagtagtgcatgtgtagggagatggacaacatttgggacctctccttgtcgaagagtcgtgacagcaaaatcacttcctgaggaaggaggag

SEQ ID NO: 8445 - DNA, 120 bp, Artificial Sequence
  ENSG00000007341_54 (sequence is synthesized)
caaaagggaagttaagaggccatcctgaccaggaagtgactcgccctaaactaaccccaattatatctacaaatggggggatggggtgagccccaactgctaaaggcggtaaaataactg

SEQ ID NO: 8446 - DNA, 120 bp, Artificial Sequence
  ENSG00000007341_55 (sequence is synthesized)
ctttttgatatgtcgcaacataaccaccaccctctcgcaaaattacagaaaaaagtccacagtcacgatccaataaaggaaacgtctgttcccttgcagggaggcccctgggctgtgcct

SEQ ID NO: 8447 - DNA, 120 bp, Artificial Sequence
  ENSG00000007341_56 (sequence is synthesized)
caggcctgagagaaaaggagagtcgaggaacgaggaactggggccaccgtgaggcagaggaaagccccctaagagggaagcgtcccgactgcggagagcgtatgtcagcatggaccaaga

SEQ ID NO: 8448 - DNA, 120 bp, Artificial Sequence
  ENSG00000007350_0 (sequence is synthesized)
gccattcgctcttcagacgccggagacgtaggagtgggtcttcagactccaaaggggttggactaatggcggatgctgaggcgagggctgagttcccggaggaggccagacctgacaggg

SEQ ID NO: 8449 - DNA, 120 bp, Artificial Sequence
  ENSG00000007350_1 (sequence is synthesized)
gcaccttgcaggtgttgcaagatatggccagccgcttgcgaatccattccatcagggccacatgctccacgagctccggccaccctacatcatgtagcagttcttctgagatcatgtctg

SEQ ID NO: 8450 - DNA, 120 bp, Artificial Sequence
  ENSG00000007350_2 (sequence is synthesized)
tgctgttcttctacatcatgaggtacaagcagtcagatccagagaatccggacaacgaccgatttgtcctcgcaaagagactgtcgtttgtggatgtggcaacaggatggctcggacaag

SEQ ID NO: 8451 - DNA, 120 bp, Artificial Sequence
  ENSG00000007350_3 (sequence is synthesized)
gactgggagttgcatgtggaatggcatatactggcaagtacttcgacagggccagctaccgggtgttctgcctcatgagtgatggcgagtcctcagaaggctctgtctgggaggcaatgg

SEQ ID NO: 8452 - DNA, 120 bp, Artificial Sequence
  ENSG00000007350_4 (sequence is synthesized)
cctttgcttcctactacagtctggacaatcttgtggcaatctttgatgtgaaccgcctgggacacagtggtgcattgcccgccgagcactgcataaacatctatcagaggcgctgcgaag

SEQ ID NO: 8453 - DNA, 120 bp, Artificial Sequence
  ENSG00000007350_5 (sequence is synthesized)
cctttgggtggaacacttatgtggtggacggccgggacgtggaggcactgtgccaggtattctggcaggcttctcaggtgaagcacaagcccactgctgtggtggccaagaccttcaagg

SEQ ID NO: 8454 - DNA, 120 bp, Artificial Sequence
  ENSG00000007350_6 (sequence is synthesized)
gccggggcaccccaagtattgaggatgcagaaagttggcatgcaaagccaatgccgagagaaagagcagatgccattatcaaattaattgagagccagatacagaccagcaggaatcttg

SEQ ID NO: 8455 - DNA, 120 bp, Artificial Sequence
  ENSG00000007350_7 (sequence is synthesized)
acccacagccccccattgaggactcacctgaagtcaacatcacagatgtaaggatgacctctccacctgattacagagttggtgacaagatagctactcggaaagcatgcggtctggctc

SEQ ID NO: 8456 - DNA, 120 bp, Artificial Sequence
  ENSG00000007350_8 (sequence is synthesized)
tggctaagctgggctacgcgaacaacagagtcgttgtgctggatggtgacaccaggtactctactttctctgagatattcaacaaggagtaccctgagcgcttcatcgagtgctttatgg

SEQ ID NO: 8457 - DNA, 120 bp, Artificial Sequence
  ENSG00000007350_9 (sequence is synthesized)
ctgaacaaaacatggtgagcgtggctctgggctgtgcctcccgtggacggaccattgcttttgctagcacctttgctgcctttctgactcgagcatttgatcacatccggataggaggcc

SEQ ID NO: 8458 - DNA, 120 bp, Artificial Sequence
  ENSG00000007350_10 (sequence is synthesized)
gatcttctacccaactgatgccgtctccacggagcatgctgttgctctggcagccaatgccaaggggatgtgcttcattcggaccacccgaccagaaactatggttatttacaccccaca

SEQ ID NO: 8459 - DNA, 120 bp, Artificial Sequence
  ENSG00000007350_11 (sequence is synthesized)
agaacgctttgagatcggacaggccaaggtcctccgccactgtgtcagtgacaaggtcacagttattggagctggaattactgtgtatgaagccttagcagctgctgatgagctttcgaa

SEQ ID NO: 8460 - DNA, 120 bp, Artificial Sequence
  ENSG00000007350_12 (sequence is synthesized)
acaagatatttttatccgtgtcatcgacctgtttaccattaaacctctggatgtcgccaccatcgtctccagtgcaaaagccacagagggccggatcattacagtggaggatcactaccc

SEQ ID NO: 8461 - DNA, 120 bp, Artificial Sequence
  ENSG00000007350_13 (sequence is synthesized)
gcaaggtggcatcggggaagctgtctgcgcagccgtctccatggatcctgacattcaggttcattcgctggcagtgtcgggagtgccccagagtgggaagtccgaggaattgctggatat

SEQ ID NO: 8462 - DNA, 120 bp, Artificial Sequence
  ENSG00000007350_14 (sequence is synthesized)
gtatggaattagtgccagacatatcatagtggccgtgaaatgcatgttgctgaactaaaatagctgttagctttggtcttttggcctctttaccctgtgtttatgtttgttccaaaacca

SEQ ID NO: 8463 - DNA, 120 bp, Artificial Sequence
  ENSG00000007350_15 (sequence is synthesized)
tcatttaaatctctactgtcacattttgtttcttaaaagcaaagccagctaacaccttcattcatccctagttcggaaattcaagctaactacttaccctttaaactgtcactgcatatg

SEQ ID NO: 8464 - DNA, 120 bp, Artificial Sequence
  ENSG00000007350_16 (sequence is synthesized)
caagtaccgctctaatttttggatcattaaagggagttacacaacttttaagtgaaaaaaataggtaacaaaacaaccacctgatagtaagttttctgataagactatagataagtggta

SEQ ID NO: 8465 - DNA, 120 bp, Artificial Sequence
  ENSG00000007350_17 (sequence is synthesized)
gaggtaatcaattcttccgaagtgtttccttcgtgaataactggtagaggtaatagttttttcaatgtatttccttcatgagtaaagaaaatgtggattgaagtatagattccagtagcc

SEQ ID NO: 8466 - DNA, 120 bp, Artificial Sequence
  ENSG00000007350_18 (sequence is synthesized)
tagtttccacagcacgataacaccatgacgcctactgctgttcccaccttgggattctgtgtgctgccatcccacctgcagctgccctggaattcccttcgctgtttgccttcatctccc

SEQ ID NO: 8467 - DNA, 120 bp, Artificial Sequence
  ENSG00000007350_19 (sequence is synthesized)
tccacgtttgagaggctgtcaggcagcagcgaaagcttgttaggatgtcctgtgctgcttgtgatgagagcctccacactgtactgttcaagtcaatgttaataaagcatttcaaaacca

SEQ ID NO: 8468 - DNA, 120 bp, Artificial Sequence
  ENSG00000007350_20 (sequence is synthesized)
aaacttgccccgagtccacggtgctctgcggttaggagctggcctcactgtgcacagggggaggggtggtgagcttaccgggctttaaagcgcccttccaacctgtgagccctgcattcc

SEQ ID NO: 8469 - DNA, 120 bp, Artificial Sequence
  ENSG00000007350_21 (sequence is synthesized)
ttacccttggttggattcttcccgggctgggagaaatgaccgcttctatgaggagaccatgtgccgaggtcgtgtgctaggaagccagttgctgtgagaaatgaccagtgtcatgtctgt

SEQ ID NO: 8470 - DNA, 120 bp, Artificial Sequence
  ENSG00000007350_22 (sequence is synthesized)
agatgtaaaagcaggacaaggcggagatggggctgtgaagataaaaggtgctggcgcacacctgaatggaaatagaatgatccaagagaaagggaagtagcacaagaggggaggaggagc

SEQ ID NO: 8471 - DNA, 120 bp, Artificial Sequence
  ENSG00000007350_23 (sequence is synthesized)
agaggcacaaaggaaacttgccccgagtccacggtgctctgcggttaggagctggcctcactgtgcacagggggaggggtgccaccctacatcatgtagcagttcttctgagatcatgtc

SEQ ID NO: 8472 - DNA, 120 bp, Artificial Sequence
  ENSG00000007350_24 (sequence is synthesized)
attcattgtagaaggtagaatgggatcttcatggcatttctgattcacaatgctcctgaaagttcctcggcatgtggaaaggccacagatgaatttaagcatgtgaaagaatactcatgt

SEQ ID NO: 8473 - DNA, 120 bp, Artificial Sequence
  ENSG00000007350_25 (sequence is synthesized)
agctgcagaacggttgtgccactgaacagatcttacagggaggctgtgagggttctcagagttcaggcacacaagatcttagcactcagcgtgttgccaatgcccagaatgttctcatta

SEQ ID NO: 8474 - DNA, 120 bp, Artificial Sequence
  ENSG00000007350_26 (sequence is synthesized)
acatgttagtcactggagtccaatctttgcatgccatagtgagctctcaaaccagactcctgatgggtatgtggcgtatccatgctccaggacagctggagcagtgtaatttcctatcaa

SEQ ID NO: 8475 - DNA, 120 bp, Artificial Sequence
  ENSG00000007372_0 (sequence is synthesized)
cgcccgcccgccggccctcgggctttgtgccgcactgggctccggcgcagaagagtcagccggcactcgagcgccgaggggggcaccgcgcccgccaccagcccgagtggagtcagtcgg

SEQ ID NO: 8476 - DNA, 120 bp, Artificial Sequence
  ENSG00000007372_1 (sequence is synthesized)
caaggcagccgcacgctggaggtagagggaagagcgagctagcgcgagccgggaaggaagccaccaggccaaggcggtggaacgcgcgctccgagggagctcagagccgagcgggaggac

SEQ ID NO: 8477 - DNA, 120 bp, Artificial Sequence
  ENSG00000007372_2 (sequence is synthesized)
tgtcagcttccacccagcccccgggctcttgcccccaactccactggagcgctgagctcggaacttgaaaactctctgctccccaggcttcccccgactctcatctcccttgccttgcgg

SEQ ID NO: 8478 - DNA, 120 bp, Artificial Sequence
  ENSG00000007372_3 (sequence is synthesized)
aggctggggctcttccctgttctccggccccctgcgcttgggggaagactttaactaggggcgcgcagatgtgtgaggccttttattgtgagagtggacagacatccgagatttcagagc

SEQ ID NO: 8479 - DNA, 120 bp, Artificial Sequence
  ENSG00000007372_4 (sequence is synthesized)
cccatattcgagccccgtggaatcccgcggcccccagccagagccagcatgcagaacagtcacagcggagtgaatcagctcggtggtgtctttgtcaacgggcggccactgccggactcc

SEQ ID NO: 8480 - DNA, 120 bp, Artificial Sequence
  ENSG00000007372_5 (sequence is synthesized)
acccggcagaagattgtagagctagctcacagcggggcccggccgtgcgacatttcccgaattctgcagacccatgcagatgcaaaagtccaagtgctggacaatcaaaacgtgtccaac

SEQ ID NO: 8481 - DNA, 120 bp, Artificial Sequence
  ENSG00000007372_6 (sequence is synthesized)
ggatgtgtgagtaaaattctgggcaggtattacgagactggctccatcagacccagggcaatcggtggtagtaaaccgagagtagcgactccagaagttgtaagcaaaatagcccagtat

SEQ ID NO: 8482 - DNA, 120 bp, Artificial Sequence
  ENSG00000007372_7 (sequence is synthesized)
aagcgggagtgcccgtccatctttgcttgggaaatccgagacagattactgtccgagggggtctgtaccaacgataacataccaagcgtgtcatcaataaacagagttcttcgcaacctg

SEQ ID NO: 8483 - DNA, 120 bp, Artificial Sequence
  ENSG00000007372_8 (sequence is synthesized)
gctagcgaaaagcaacagatgggcgcagacggcatgtatgataaactaaggatgttgaacgggcagaccggaagctggggcacccgccctggttggtatccggggacttcggtgccaggg

SEQ ID NO: 8484 - DNA, 120 bp, Artificial Sequence
  ENSG00000007372_9 (sequence is synthesized)
caacctacgcaagatggctgccagcaacaggaaggagggggagagaataccaactccatcagttccaacggagaagattcagatgaggctcaaatgcgacttcagctgaagcggaagctg

SEQ ID NO: 8485 - DNA, 120 bp, Artificial Sequence
  ENSG00000007372_10 (sequence is synthesized)
gagaacccattatccagatgtgtttgcccgagaaagactagcagccaaaatagatctacctgaagcaagaatacaggtatggttttctaatcgaagggccaaatggagaagagaagaaaa

SEQ ID NO: 8486 - DNA, 120 bp, Artificial Sequence
  ENSG00000007372_11 (sequence is synthesized)
actgaggaatcagagaagacaggccagcaacacacctagtcatattcctatcagcagtagtttcagcaccagtgtctaccaaccaattccacaacccaccacaccggtttcctccttcac

SEQ ID NO: 8487 - DNA, 120 bp, Artificial Sequence
  ENSG00000007372_12 (sequence is synthesized)
atctggctccatgttgggccgaacagacacagccctcacaaacacctacagcgctctgccgcctatgcccagcttcaccatggcaaataacctgcctatgcaacccccagtccccagcca

SEQ ID NO: 8488 - DNA, 120 bp, Artificial Sequence
  ENSG00000007372_13 (sequence is synthesized)
gacctcctcatactcctgcatgctgcccaccagcccttcggtgaatgggcggagttatgatacctacacccccccacatatgcagacacacatgaacagtcagccaatgggcacctcggg

SEQ ID NO: 8489 - DNA, 120 bp, Artificial Sequence
  ENSG00000007372_14 (sequence is synthesized)
cgggcaccacttcaacaggactcatttcccctggtgtgtcagttccagttcaagttcccggaagtgaacctgatatgtctcaatactggccaagattacagtaaaaaaaaaaaaaaaaaa

SEQ ID NO: 8490 - DNA, 120 bp, Artificial Sequence
  ENSG00000007372_15 (sequence is synthesized)
aggaaaggaaatattgtgttaattcagtcagtgactatggggacacaacagttgagctttcaggaaagaaagaaaaatggctgttagagccgcttcagttctacaattgtgtcctgtatt

SEQ ID NO: 8491 - DNA, 120 bp, Artificial Sequence
  ENSG00000007372_16 (sequence is synthesized)
gtaccactggggaaggaatggacttgaaacaaggacctttgtatacagaaggcacgatatcagttggaacaaatcttcattttggtatccaaacttttattcattttggtgtattatttg

SEQ ID NO: 8492 - DNA, 120 bp, Artificial Sequence
  ENSG00000007372_17 (sequence is synthesized)
taaatgggcatttgtatgttataatgaaaaaaagaacaatgtagactggatggatgtttgatctgtgttggtcatgaagttgttttttttttttttaaaaagaaaaccatgatcaacaag

SEQ ID NO: 8493 - DNA, 120 bp, Artificial Sequence
  ENSG00000007372_18 (sequence is synthesized)
ctttgccacgaatttaagagttttatcaagatatatcgaatacttctacccatctgttcatagtttatggactgatgttccaagtttgtatcattcctttgcatataattaaacctggaa

SEQ ID NO: 8494 - DNA, 120 bp, Artificial Sequence
  ENSG00000007372_19 (sequence is synthesized)
caacatgcactagatttatgtcagaaatatctgttggttttccaaaggttgttaacagatgaagtttatgtgcaaaaaagggtaagatataaattcaaggaagaaaaaaagttgatagct

SEQ ID NO: 8495 - DNA, 120 bp, Artificial Sequence
  ENSG00000007372_20 (sequence is synthesized)
aaaaggtagagtgtgtcttcgatataatccaatttgttttatgtcaaaatgtaagtatttgtcttccctagaaatcctcagaatgatttctataataaagttaatttcatttatatttga

SEQ ID NO: 8496 - DNA, 120 bp, Artificial Sequence
  ENSG00000007372_21 (sequence is synthesized)
accctcttttcttatcattgacatttaaactctggggcaggtcctcgcgtagaacgcggctgtcagatctgccacttcccctgccgagcggcggtgagaagtgtgggaaccggcgctgcc

SEQ ID NO: 8497 - DNA, 120 bp, Artificial Sequence
  ENSG00000007372_22 (sequence is synthesized)
gtttcttttttggccagcaaaagttaattgttcttagatatagttgtattactgttcacggtccaatcattttgtgcatctagagttcattcctaatcaattaaaagtgcttgcaagagt

SEQ ID NO: 8498 - DNA, 120 bp, Artificial Sequence
  ENSG00000007372_23 (sequence is synthesized)
tttaaacttaagtgttttgaagttgttcacaactacatatcaaaattaaccattgttgattgtaaaaaaccatgccaaagcctttgtatttcctttattatacagttttctttttaacct

SEQ ID NO: 8499 - DNA, 120 bp, Artificial Sequence
  ENSG00000007372_24 (sequence is synthesized)
ggtgcatttgcatgttgcggagtgattagtgggtttgaaaagggaaccgtggctcggcctcatttcccgctctggttcaggcgcaggaggaagtgttttgctggaggatgatgacagagg

SEQ ID NO: 8500 - DNA, 120 bp, Artificial Sequence
  ENSG00000007372_25 (sequence is synthesized)
aatctgagaattgctctcacacaccaacccagcaacatccgtggagaaaactctcaccagcaactcctttaaaacaccgtcatttcaaaccattgtggtcttcaagcaacaacagcagca

SEQ ID NO: 8501 - DNA, 120 bp, Artificial Sequence
  ENSG00000007372_26 (sequence is synthesized)
atagataccataaatcaaaaacgtgttagaaaaaaattccacttacagcagggtgtagatctgtgcccatttatacccacaacatatatacaaaatggtaacatttcccagttagccatt

SEQ ID NO: 8502 - DNA, 120 bp, Artificial Sequence
  ENSG00000007372_27 (sequence is synthesized)
taattctaaagctcaaagtctagaaataatttaaaaatgcaacaagcgattagctaggaattgttttttgaattaggactggcattttcaatctgggcagatttccattgtcagcctatt

SEQ ID NO: 8503 - DNA, 120 bp, Artificial Sequence
  ENSG00000007372_28 (sequence is synthesized)
tcaacaatgatttcactgaagtatattcaaaagtagatttcttaaaggagactttctgaaagctgttgcctttttcaaataggccctctcccttttctgtctccctcccctttgcacaag

SEQ ID NO: 8504 - DNA, 120 bp, Artificial Sequence
  ENSG00000007372_29 (sequence is synthesized)
aggcatcatttcccattgaaccactacagctgttcccatttgaatcttgctttctgtgcggttgtggatggttggagggtggaggggggatgttgcatgtcaaggaataatgagcacaga

SEQ ID NO: 8505 - DNA, 120 bp, Artificial Sequence
  ENSG00000007372_30 (sequence is synthesized)
taaaggccttcagtcattggcagcttaagccaaacattcccaaatctatgaagcagggcccattgttggtcagttgttatttgcaatgaagcacagttctgatcatgtttaaagtggagg

SEQ ID NO: 8506 - DNA, 120 bp, Artificial Sequence
  ENSG00000007372_31 (sequence is synthesized)
cacgcagggcaggagtgcttgagcccaagcaaaggatggaaaaaaataagcctttgttgggtaaaaaaggactgtctgagactttcatttgttctgtgcaacatataagtcaatacagat

SEQ ID NO: 8507 - DNA, 120 bp, Artificial Sequence
  ENSG00000007372_32 (sequence is synthesized)
aagtcttcctctgcaaacttcactaaaaagcctgggggttctggcagtctagattaaaatgcttgcacatgcagaaacctctggggacaaagacacacttccactgaattatactctgct

SEQ ID NO: 8508 - DNA, 120 bp, Artificial Sequence
  ENSG00000007372_33 (sequence is synthesized)
ttaaaaaaatccccaaaagcaaatgatcagaaatgtagaaattaatggaaggatttaaacatgaccttctcgttcaatatctactgttttttagttaaggaattacttgtgaacagataa

SEQ ID NO: 8509 - DNA, 120 bp, Artificial Sequence
  ENSG00000007372_34 (sequence is synthesized)
ttgagattcattgctccggcatgaaatatactaataattttattccaccagagttgctgcacatttggagacaccttcctaagttgcagtttttgtatgtgtgcatgtagttttgttcag

SEQ ID NO: 8510 - DNA, 120 bp, Artificial Sequence
  ENSG00000007372_35 (sequence is synthesized)
tgtcagcctgcactgcacagcagcacatttctgcaggggagtgagcacacatacgcactgttggtacaattgccggtgcagacatttctacctcctgacattttgcagcctacattccct

SEQ ID NO: 8511 - DNA, 120 bp, Artificial Sequence
  ENSG00000007372_36 (sequence is synthesized)
gagggctgtgtgctgagggaactgtcagagaagggctatgtgggagtgcatgccacagctgctggctggcttacttcttccttctcgctggctgtaatttccaccacggtcaggcagcca

SEQ ID NO: 8512 - DNA, 120 bp, Artificial Sequence
  ENSG00000007372_37 (sequence is synthesized)
gttccggcccacggttctgttgtgtagacagcagagactttggagacccggatgtcgcacgccaggtgcaagaggtgggaatgggagaaaaggagtgacgtgggagcggagggtctgtat

SEQ ID NO: 8513 - DNA, 120 bp, Artificial Sequence
  ENSG00000007372_38 (sequence is synthesized)
gtgtgcacttgggcacgtatatgtgtgctctgaaggtcaggattgccagggcaaagtagcacagtctggtatagtctgaagaagcggctgctcagctgcagaagccctctggtccggcag

SEQ ID NO: 8514 - DNA, 120 bp, Artificial Sequence
  ENSG00000007372_39 (sequence is synthesized)
gatgggaacggctgccttgccttctgcccacaccctagggacatgagctgtccttccaaacagagctccaggcactctcttggggacagcatggcaggctctgtgtggtagcagtgcctg

SEQ ID NO: 8515 - DNA, 120 bp, Artificial Sequence
  ENSG00000007372_40 (sequence is synthesized)
ggagttggccttttactcattgttgaaataatttttgtttattatttatttaacgatacatatatttatatatttatcaatggggtatctgcagggatgttttgacaccatcttccagga

SEQ ID NO: 8516 - DNA, 120 bp, Artificial Sequence
  ENSG00000007372_41 (sequence is synthesized)
tggagattatttgtgaagacttcagtagaatcccaggactaaacgtctaaattttttctccaaacttgactgacttgggaaaaccaggtgaatagaataagagctgaatgttttaagtaa

SEQ ID NO: 8517 - DNA, 120 bp, Artificial Sequence
  ENSG00000007372_42 (sequence is synthesized)
taaacgttcaaactgctctaagtaaaaaaatgcattttactgcaatgaatttctagaatatttttcccccaaagctatgcctcctaacccttaaatggtgaacaactggtttcttgctac

SEQ ID NO: 8518 - DNA, 120 bp, Artificial Sequence
  ENSG00000007372_43 (sequence is synthesized)
agctcactgccatttcttcttactatcatcactaggtttcctaagattcactcatacagtattatttgaagattcagctttgttctgtgaatgtcatcttaggattgtgtctatattctt

SEQ ID NO: 8519 - DNA, 120 bp, Artificial Sequence
  ENSG00000007372_44 (sequence is synthesized)
ttgcttatttctttttactctgggcctctcatactagtaagattttaaaaagccttttcttctctgtatgtttggctcaccaaggcgaaatatatattcttctctttttcatttctcaag

SEQ ID NO: 8520 - DNA, 120 bp, Artificial Sequence
  ENSG00000007372_45 (sequence is synthesized)
aataaacctcatctgcttttttgtttttctgtgttttggcttggtactgaatgactcaactgctcggttttaaagttcaaagtgtaagtacttagggttagtactgcttatttcaataat

SEQ ID NO: 8521 - DNA, 120 bp, Artificial Sequence
  ENSG00000007372_46 (sequence is synthesized)
gttgacggtgactatctttggaaagcagtaacatgctgtcttagaaatgacattaataatgggcttaaacaaatgaataggggggtccccccactctccttttgtatgcctatgtgtgtc

SEQ ID NO: 8522 - DNA, 120 bp, Artificial Sequence
  ENSG00000007372_47 (sequence is synthesized)
tgatttgttaaaagatggacagggaattgattgcagagtgtcgcttccttctaaagtagttttattttgtctactgttagtatttaaagatcctggaggtggacataaggaataaatgga

SEQ ID NO: 8523 - DNA, 120 bp, Artificial Sequence
  ENSG00000007372_48 (sequence is synthesized)
agagaaaagtagatattgtatggtggctactaaaaggaaattcaaaaagtcttagaacccgagcacctgagcaaactgcagtagtcaaaatatttatctcatgttaaagaaaggcaaatc

SEQ ID NO: 8524 - DNA, 120 bp, Artificial Sequence
  ENSG00000007372_49 (sequence is synthesized)
tagtgtaagaaatgagtaccatatagggttttgaagttcatatactagaaacacttaaaagatatcatttcagatattacgtttggcattgttcttaagtatttatatctttgagtcaag

SEQ ID NO: 8525 - DNA, 120 bp, Artificial Sequence
  ENSG00000007372_50 (sequence is synthesized)
ctgataattaaaaaaaatctgttaatggagtgtatatttcataatgtatcaaaatggtgtctatacctaaggtagcattattgaagagagatatgtttatgtagtaagttattaacataa

SEQ ID NO: 8526 - DNA, 120 bp, Artificial Sequence
  ENSG00000007372_51 (sequence is synthesized)
tgagtaacaaataatgtttccagaagaaaggaaaacacattttcagagtgcgtttttatcagaggaagacaaaaatacacacccctctccagtagcttatttttacaaagccggcccagt

SEQ ID NO: 8527 - DNA, 120 bp, Artificial Sequence
  ENSG00000007372_52 (sequence is synthesized)
gaattagaaaaacaaagcacttggatatgatttttggaaagcccaggtacacttattattcaaaatgcacttttactgagtttgaaaagtttcttttatatttaaaataagggttcaaat

SEQ ID NO: 8528 - DNA, 120 bp, Artificial Sequence
  ENSG00000007372_53 (sequence is synthesized)
atgcatattcaatttttatagtagttatctatttgcaaagcatatattaactagtaattggctgttaattttatagacatggtagccagggaagtatatcaatgacctattaagtatttt

SEQ ID NO: 8529 - DNA, 120 bp, Artificial Sequence
  ENSG00000007372_54 (sequence is synthesized)
gacaagcaatttacatatctgatgacctcgtatctctttttcagcaagtcaaatgctatgtaattgttccattgtgtgttgtataaaatgaatcaacacggtaagaaaaaggttagagtt

SEQ ID NO: 8530 - DNA, 120 bp, Artificial Sequence
  ENSG00000007372_55 (sequence is synthesized)
attaaaataataaactgactaaaatactcatttgaatttattcagaatgttcataatgctttcaaaggacatagcagagcttttgtggagtatccgcacaacattatttattatctatgg

SEQ ID NO: 8531 - DNA, 120 bp, Artificial Sequence
  ENSG00000007372_56 (sequence is synthesized)
actaaatcaattttttgaagttgctttaaaatttaaaagcacctttgcttaatataaagccctttaattttaactgacagatcaattctgaaactttattttgaaaagaaaatggggaag

SEQ ID NO: 8532 - DNA, 120 bp, Artificial Sequence
  ENSG00000007372_57 (sequence is synthesized)
aatctgtgtctttagaattaaaagaaatgaaaaaaataaacccgacattctaaaaaaatagaataagaaacctgatttttagtactaatgaaatagcgggtgacaaaatagttgtctttt

SEQ ID NO: 8533 - DNA, 120 bp, Artificial Sequence
  ENSG00000007372_58 (sequence is synthesized)
tgattttgatcacaaaaaataaactggtagtgacaggatatgatggagagatttgacatcctggcaaatcactgtcattgattcaattattctaattctgaataaaagctgtatacagta

SEQ ID NO: 8534 - DNA, 120 bp, Artificial Sequence
  ENSG00000007372_59 (sequence is synthesized)
gccatcaccaatcagcataggtgtgctggctgcagccacttccctcacccacactctttatctctcactctccagccgctgacagcccattttattgtcaatctctgtctccttcccagg

SEQ ID NO: 8535 - DNA, 120 bp, Artificial Sequence
  ENSG00000007372_60 (sequence is synthesized)
cacacacacacagagagagagagagaatccctcccagcattggtcatccgcccccccacccaggcttccactccccctcccctcttatctcccctggcttcccctcctctcgggcgctgc

SEQ ID NO: 8536 - DNA, 80 bp, Artificial Sequence
  ENSG00000007372_61 (sequence is synthesized)
ctacttccagcgaaagcccgcgtcggagggcgactgccggcgagcgggagcggcgcagggctcggggcgggcggccagct

SEQ ID NO: 8537 - DNA, 120 bp, Artificial Sequence
  ENSG00000007372_62 (sequence is synthesized)
cgcgggaagaagggagactccaggcgcgacagcagccgcggctcctagccccagcgtcgcccaatgctcccgacccgcgggaaaagacgaagaggctctgtggtgcccaaggccctggaa

SEQ ID NO: 8538 - DNA, 120 bp, Artificial Sequence
  ENSG00000007372_63 (sequence is synthesized)
cggccgcagagagcaaccgctgccggctgctttgtccagcccgaggcccagcgaacgcgcagagagcgggcgctccgaggactcgccgagggagcgccgagggaacctgctcgccgcgtc

SEQ ID NO: 8539 - DNA, 120 bp, Artificial Sequence
  ENSG00000007372_64 (sequence is synthesized)
tcccaccctctctctccactgtctcttagtctgtgtcctctccctgctccacatttgtctcctttgtacctgggggaacagagaggaatgccctgacttttctttgactgtctggaaaat

SEQ ID NO: 8540 - DNA, 120 bp, Artificial Sequence
  ENSG00000007372_65 (sequence is synthesized)
gggagtcaagtgtggggagtcattcacttcatttgcatgctgcaaaacagagggcggaggcaccagggaaaggcacttgaatgaagaaggaaaatgagaaccagattgtaacttcgtcct

SEQ ID NO: 8541 - DNA, 120 bp, Artificial Sequence
  ENSG00000007372_66 (sequence is synthesized)
aatagtttttattttcgggcagtcttttaacaaagcaaagcaaccgtgtgagttaggtcaccagagacaccaagcaatggtgaaggaccccctccgcccaattctctatccaactaaatt

SEQ ID NO: 8542 - DNA, 120 bp, Artificial Sequence
  ENSG00000007372_67 (sequence is synthesized)
tccatgcccaaagtgatagctatcattttttccacggtgtatctgcaaatccacccactgtcccggggtggctgggagctttttaacgggttgagagttgctttttaaggttgtgggtga

SEQ ID NO: 8543 - DNA, 120 bp, Artificial Sequence
  ENSG00000007372_68 (sequence is synthesized)
tcaaacttgacgtgcagctagttttattttaaagacaaatgtcagagaggctcatcatattttcccccctcttctatatttggagcttatttattgctaagaagctcaggctcctggcgt

SEQ ID NO: 8544 - DNA, 120 bp, Artificial Sequence
  ENSG00000007372_69 (sequence is synthesized)
caatttatcagtaggctccaaggagaagagaggagaggagaggagagctgaacagggagccacgtcttttcctgggagggctgctatctaagtcggggctgcaggtcacagcggagtgaa

SEQ ID NO: 8545 - DNA, 120 bp, Artificial Sequence
  ENSG00000007372_70 (sequence is synthesized)
tgcctatgcaagtaagtgcggctggtggtggcctgcataacccaggccccagagaagtgaggagtggctcagggcctgcggacctcattggctgtgtctgcacccttgagagcttttcgc

SEQ ID NO: 8546 - DNA, 120 bp, Artificial Sequence
  ENSG00000007372_71 (sequence is synthesized)
actacagtgattggcttgaccagtcaagtcggagacagtcaatcccatcacttttaagtgattgactcattaattcatgccctaaaaaaatgagtaataaaaatctgtccagttttgtca

SEQ ID NO: 8547 - DNA, 120 bp, Artificial Sequence
  ENSG00000007372_72 (sequence is synthesized)
ttggggagggggactacaaagaggggctaactccctctccctattctctaaggttggaccacagggatgaggttgtgagatacaaagataaaggagggatggggaacactatgatgtggt

SEQ ID NO: 8548 - DNA, 120 bp, Artificial Sequence
  ENSG00000007372_73 (sequence is synthesized)
atttttcttttctgttttttctttttgataatatctatccttggctaaggggagggcggagttcagcggcggaaataaagcgagcagtggctggtgcgaaccgactcccggctctaagcc

SEQ ID NO: 8549 - DNA, 120 bp, Artificial Sequence
  ENSG00000007372_74 (sequence is synthesized)
ttacttgcggtggccggacttgtctgtggctgaagccgagcccgggctctgactctcacgtctgcactggaggtgcggaaacctggactggggttcaccagccacatactggctgctctg

SEQ ID NO: 8550 - DNA, 120 bp, Artificial Sequence
  ENSG00000007372_75 (sequence is synthesized)
gttgttctctcctcttccttcttctattctaaccaaacaaaacccaactcgatgcttgtgccaggccttggccagtttggacggtgatggaaacatttctggattttagcgtctaaggga

SEQ ID NO: 8551 - DNA, 120 bp, Artificial Sequence
  ENSG00000007372_76 (sequence is synthesized)
gcactcaagggctgtaaggtttgctatcactgtcccaacactgcagagaccttgaaggttcagtgtgggatctgtagaacccatggtttgcggtgacactcagaggggatctttgggaga

SEQ ID NO: 8552 - DNA, 120 bp, Artificial Sequence
  ENSG00000007372_77 (sequence is synthesized)
tttatagagccggttcttagcgctttgtgggttcagaggctggctgcagtgtttatgaagaggggcagtgggctggggacactgctggggttatggctgtagtgaggtccatgtgtactt

SEQ ID NO: 8553 - DNA, 120 bp, Artificial Sequence
  ENSG00000007372_78 (sequence is synthesized)
gttccttggcatgtgtctgactctgtgttgctgctgcagtacagtgggcaggggcacggttgcttggactgggctgcccgatgtctggcatggctggtggtcctgttgtcctttatttga

SEQ ID NO: 8554 - DNA, 120 bp, Artificial Sequence
  ENSG00000007372_79 (sequence is synthesized)
tcctcttccccttcctcctctcctttctgttcttgttctccctcatcttcctcttccttcttctccctcttcttcctcttcactctgctctcttctcttcttttcccctttcctctcctc

SEQ ID NO: 8555 - DNA, 120 bp, Artificial Sequence
  ENSG00000007372_80 (sequence is synthesized)
ctttccctaagtcaagaagagtctagcgtacccttcggctgcttcatttcagcctccctgcctcagctcttcagccctattccccctcgccctgtcctggggtgtgtacagcagcccagg

SEQ ID NO: 8556 - DNA, 120 bp, Artificial Sequence
  ENSG00000007372_81 (sequence is synthesized)
ccttccttctccttcccggctccgtggcccgaagccgccgagagagctcgggacagcgcaggaccaggcagccgctcgctctcctgtcaccttaactgcaggctccgaggggcgcctttg

SEQ ID NO: 8557 - DNA, 120 bp, Artificial Sequence
  ENSG00000007372_82 (sequence is synthesized)
gagtgtactgaggtgtgtcctaatcgtgcggcattcaacaaatggacttctggtgtgtggtcagaagagaaaagccatttacttactttcctccccggttttctggcaacagctgaaggg

SEQ ID NO: 8558 - DNA, 120 bp, Artificial Sequence
  ENSG00000007372_83 (sequence is synthesized)
gagctgcctccgtggactgagcagacccaggagagggagtcgtggtgcggagacacacgcaccacacacagatgaccggtggcacacacgacacacgctgacataccgacatcgccagtg

SEQ ID NO: 8559 - DNA, 120 bp, Artificial Sequence
  ENSG00000007372_84 (sequence is synthesized)
cgcgccttggtgagggccccccctcagccccaagccttcggctaccctgaaaacgcggctcccctcgaaggggaaacaagtgcagttcaatctcgtctgagtgatctacaaataaggacg

SEQ ID NO: 8560 - DNA, 120 bp, Artificial Sequence
  ENSG00000007372_85 (sequence is synthesized)
gaaagggtcgttttatcacggtcccgtttgtcgtgacgatgcaatttcccggagcggagcactgtcacaaagtgacaaggctgccacaagcgccccgactgatcttttcaattagccttc

SEQ ID NO: 8561 - DNA, 120 bp, Artificial Sequence
  ENSG00000007372_86 (sequence is synthesized)
actgcagggcagagctgagtgaccctcagatcgccccaagaggttgagtggatcaattcctaaagaacggagattctcctgtcctagccccaggtccacctcggttgggagttcaggcct

SEQ ID NO: 8562 - DNA, 120 bp, Artificial Sequence
  ENSG00000007372_87 (sequence is synthesized)
aggtgttgggatttcagcaagttttgaggtgcagagttggtttgcttttttgtttgttttactccgaatccccttatgtttttcttggtaaggccttgaaaataaatctgtatgaaagca

SEQ ID NO: 8563 - DNA, 120 bp, Artificial Sequence
  ENSG00000007372_88 (sequence is synthesized)
gcacttagtgttcacgtttacttaagtaattagatagcttcttagcgagagggaagtgggaatggagcagaactggaatttgaaatactaccaccttcccagctgcttcgaaaactaatc

SEQ ID NO: 8564 - DNA, 120 bp, Artificial Sequence
  ENSG00000007372_89 (sequence is synthesized)
aacgaggcctctttgtgctcagctactgaatttaaaaaaaaatggtatcaagaagttacaagccaggatgggagcattctgttgtgattgtgcacagcgtgggttacaaagtggagttct

SEQ ID NO: 8565 - DNA, 120 bp, Artificial Sequence
  ENSG00000007372_90 (sequence is synthesized)
ggaagttttacccctcctaggggaattccattccccatctccccacctactactcctttgcagcttcagggtcctgcatttgttggggtggggtattttgcattagagttggagattttg

SEQ ID NO: 8566 - DNA, 120 bp, Artificial Sequence
  ENSG00000007372_91 (sequence is synthesized)
cctatccagggcatggctatgggtgccgggactgagagacaggaaggaagcattggagagccaacctagataagggtaactagtaaccctctgctgtggccagtatttacccaatgctga

SEQ ID NO: 8567 - DNA, 120 bp, Artificial Sequence
  ENSG00000007372_92 (sequence is synthesized)
gaaaaagtcctcattttcggtttatttttatggatttaagctgtctaccaagtagttaaaaagtagaccaggaatggccttgtagagtaaaatgtgcttcttgaaattctttgcttgcag

SEQ ID NO: 8568 - DNA, 120 bp, Artificial Sequence
  ENSG00000007372_93 (sequence is synthesized)
gcaggcagatcaataatcaccataggtaaaacagaaaaaataatgcatttaaaaaaaaacagagagaaatgatgctgtgactgttttgttattttacctctttttggggggcagacctct

SEQ ID NO: 8569 - DNA, 120 bp, Artificial Sequence
  ENSG00000007372_94 (sequence is synthesized)
tgaatgggctctttattgtaactctctcttcccaattgagctccccacggtgccgttgtatctttttacagcccctaacaactcacaccagtaacacaattacctccagatatttacaac

SEQ ID NO: 8570 - DNA, 120 bp, Artificial Sequence
  ENSG00000007372_95 (sequence is synthesized)
aagaaattacttttctattttctccactcacccaaaagactttttttttttttcctttgggaaaggtagggaggtgttcgtacgggagcagcctcggggacccctgcactgggtcagggc

SEQ ID NO: 8571 - DNA, 120 bp, Artificial Sequence
  ENSG00000007372_96 (sequence is synthesized)
ttatgaagctagaagcgtccctctgttccctttgtgagttggtgggttgttggtacatttggttggaagctgtgttgctggttagggagactcggttttgctccttgggttcgaggaaag

SEQ ID NO: 8572 - DNA, 120 bp, Artificial Sequence
  ENSG00000007372_97 (sequence is synthesized)
ctggagaatagaagccattgtttgccgtctgtcggctttgtcgaccacgctcaccccctcctgttcgtactttttaaagcagtgaggcgaggtagacagggtgtgtcacagtacagttaa

SEQ ID NO: 8573 - DNA, 120 bp, Artificial Sequence
  ENSG00000007372_98 (sequence is synthesized)
ttgggcttgcccctttcaaagtcccagaaagctgggaggtagatggagagggggccattgggaagtttttttggtgtagggagaggagtagaagataaagggtaagcagagtgttgggtt

SEQ ID NO: 8574 - DNA, 120 bp, Artificial Sequence
  ENSG00000007372_99 (sequence is synthesized)
ctgggggtcttgtgaagttccttaaggaaggagggagtgtggccctgcagccctcccaaactgctccagcctatgctctccggcaccaggaagttccaaggttcccttcccctggtctcc

SEQ ID NO: 8575 - DNA, 120 bp, Artificial Sequence
  ENSG00000007372_100 (sequence is synthesized)
cacaggcttaaggagggtccccagcaccttatccatctgttttggaaacgccggtcgccccctggtgcttccggggctggtcacagcggagtgaatcagctcggtggtgtctttgtcaac

SEQ ID NO: 8576 - DNA, 120 bp, Artificial Sequence
  ENSG00000007372_101 (sequence is synthesized)
gggctggggaggcctctggcctcgtttagttctcggcccggcaacctcctctcggcctaggcttcgccgcggcctccgcagctggaatggagctgccaggacccagtgacgctcccgccc

SEQ ID NO: 8577 - DNA, 120 bp, Artificial Sequence
  ENSG00000007372_102 (sequence is synthesized)
gggctacaaatgtaattttaagaaaaaaagctctctacagtaagttctcataccattgaaggtatatttttgtgttatagacccatgcagatgcaaaagtccaagtgctggacaatcaaa

SEQ ID NO: 8578 - DNA, 120 bp, Artificial Sequence
  ENSG00000007372_103 (sequence is synthesized)
tcctttacccaagagcaaattgaggccctggagaaaggtgatagagtttttcaaagtagagaagcagtaaatcaaagtaaatgccacatcttcagtacaaagagctaaatttagccaggg

SEQ ID NO: 8579 - DNA, 120 bp, Artificial Sequence
  ENSG00000007372_104 (sequence is synthesized)
tcttcagtacaaagagctaaatttagccagggccctttgcatagaagaatgaaaagatttccttttttctgtctttttatttctctgggcatcttttcagtgtgtgtgtgtgtgtgtgtg

SEQ ID NO: 8580 - DNA, 120 bp, Artificial Sequence
  ENSG00000007372_105 (sequence is synthesized)
gtttcttcttttcatctaccagtaattcaaagactaaatgtctgacttataaggaaaaatgatgatttggctatttcaggccacagaaaggtcactgaatgccattccaaagaaaattta

SEQ ID NO: 8581 - DNA, 120 bp, Artificial Sequence
  ENSG00000007372_106 (sequence is synthesized)
acttggttctggtgggaaagttcttccaagtacagtcaacactagaagcattttaaagggaattggttggaggtaatgggagtggggaggtgggaaccagtttgatgcacagtttggtca

SEQ ID NO: 8582 - DNA, 120 bp, Artificial Sequence
  ENSG00000007372_107 (sequence is synthesized)
gaagcaagaatacaggtaccgagagactgtgcagtttcacactttgtgattcataccatttgtctttcctagagacagaggtgcttgtacagagtactatttatttataggactaatata

SEQ ID NO: 8583 - DNA, 120 bp, Artificial Sequence
  ENSG00000007372_108 (sequence is synthesized)
ataaaaaggttcagtctgctaaatgctctgctgccatgggcgtggggagggcagcagtggaggtgccaaggtggggctgggctcgacgtagacacagtgctaacctgtcccacctgattt

SEQ ID NO: 8584 - DNA, 120 bp, Artificial Sequence
  ENSG00000007372_109 (sequence is synthesized)
actgggagtcccgagtccagcttagggggagtgggggcgcgacccccaacccagaaaccttcacttgaccgctcaagttcgcggcagcagggcgggccgcgccgaatctcggcgtgcgcg

SEQ ID NO: 8585 - DNA, 120 bp, Artificial Sequence
  ENSG00000007372_110 (sequence is synthesized)
gagcggggagatgcaggcgagcgccagagcccgggctcgggggccctgcgccggggagaggagccgggacccaccggcggagccgaaaacaagtgtattcatattcaaacaaacggacca

SEQ ID NO: 8586 - DNA, 120 bp, Artificial Sequence
  ENSG00000007372_111 (sequence is synthesized)
gccttttattatactgttaccttgataatgttgggtggtggtggggcatgttttgggtaccagggagccttgcaccagaaagtggaaataatgctggcacattatcagatagcagattag

SEQ ID NO: 8587 - DNA, 120 bp, Artificial Sequence
  ENSG00000007372_112 (sequence is synthesized)
tagtttaaaatttgggtttatattaatgtgtttgtatgctaaatatagaatctgtgcacgcatttggggcattactttgggtatatgtgataaactagtgagaaagaaaaaaggatcaga

SEQ ID NO: 8588 - DNA, 120 bp, Artificial Sequence
  ENSG00000007372_113 (sequence is synthesized)
aatgggattcatatttacatggtgagatatacataatataatgagaatgctagttttctgtctgtatctacaataagaaaaggcatagcaggtatttgctggaaatttagtgtgtctttg

SEQ ID NO: 8589 - DNA, 120 bp, Artificial Sequence
  ENSG00000007372_114 (sequence is synthesized)
agcctgcctctcctcttagttctgtcccaaatatctattagcccctacatttagaggtcctgcactaggttcaccctttatgatgtaagttggataaggcagatggtttgtactagacct

SEQ ID NO: 8590 - DNA, 120 bp, Artificial Sequence
  ENSG00000007372_115 (sequence is synthesized)
ttgttgctggatggattcttgataggaaaaatgtctgtcttctggtaggcctttcccagtggttttcctagaactcctgtttgtgcaacaattagagatattagatggtacgatattggc

SEQ ID NO: 8591 - DNA, 120 bp, Artificial Sequence
  ENSG00000007372_116 (sequence is synthesized)
cagcatgagcctctgctggaaacagttctggggctacactgattgtttattctccattgaacattttttgctggatttcaaatccaaataacagcaaaataaatgtttcacagtcttcag

SEQ ID NO: 8592 - DNA, 120 bp, Artificial Sequence
  ENSG00000007372_117 (sequence is synthesized)
actaatataggagcagctagataagcaacttcagaggaattattcacatgtttatttttattgcatctggatattgttggccatagtgcaattgatgtaaattaagggattaacagccca

SEQ ID NO: 8593 - DNA, 120 bp, Artificial Sequence
  ENSG00000007372_118 (sequence is synthesized)
ttagttggtgttgctataactgcgttggaattttccagaagtcaggttgcctagaggaactcattgcaggaattagaaacaaatgcaagctgaaattctggcaggccctcaaggcctgtt

SEQ ID NO: 8594 - DNA, 120 bp, Artificial Sequence
  ENSG00000007372_119 (sequence is synthesized)
tgcctctttgaacttgatgttagcattcatcatctgactttaataaggccacagagtgtctcgttcagtttcatgtattataacaacatccaggtttctgtgaagatagcaaaatgtgta

SEQ ID NO: 8595 - DNA, 120 bp, Artificial Sequence
  ENSG00000007372_120 (sequence is synthesized)
tgtgagaaaataataagacgaacaagtagatgctgcaattatattagggctgtttccacatacagagcggtatggggaatcaatctatttcaaacactgacttttaaaaattacataatt

SEQ ID NO: 8596 - DNA, 120 bp, Artificial Sequence
  ENSG00000007372_121 (sequence is synthesized)
tgtataattcaaaaagtacatgcattcattaagcataaagaaaatcaaaatgatcaataactttactcttcagagaaaactactctttgaattttggagtgggtgagcccgattgtctat

SEQ ID NO: 8597 - DNA, 120 bp, Artificial Sequence
  ENSG00000007372_122 (sequence is synthesized)
ccatttattcattctcttgaccaaaatcatcattttacaaatggtgggtgtcttcctctggaccttctctgatatgcttccctctctgagcatatggattttggaaattaaacatttctc

SEQ ID NO: 8598 - DNA, 120 bp, Artificial Sequence
  ENSG00000007372_123 (sequence is synthesized)
cagtttgcagagaagagaaatgatagtatactgtactatcatctgacctgcttgttcccgacacacttcttttaattcatcccaagtttgctgccatggcatagtaccatgagagctcat

SEQ ID NO: 8599 - DNA, 120 bp, Artificial Sequence
  ENSG00000007372_124 (sequence is synthesized)
gaggcgttttgttaggagaaaggtttacctcctcagtgctgccattccgaacagttcgagggtagcaacagttttctagttataagtcagtctgggcttttgggtctgttaggaagtcat

SEQ ID NO: 8600 - DNA, 120 bp, Artificial Sequence
  ENSG00000007372_125 (sequence is synthesized)
ggttaattctcaggatggaggtcgttatatttactaacacttctgatcactttaacttggggtcattacagatctgcttcttcaaagaatctttaatcccatcagtgaaaggttcccaag

SEQ ID NO: 8601 - DNA, 120 bp, Artificial Sequence
  ENSG00000007372_126 (sequence is synthesized)
gtccctgaaccatactttactgagagctcctcccactgctctctgtcccaaagcttgagatatgggctctgggggtcatagggttcccaaataaatccagatttgcagggagaggggatg

SEQ ID NO: 8602 - DNA, 120 bp, Artificial Sequence
  ENSG00000007372_127 (sequence is synthesized)
tgttttgatgaaggtcctcatgctataggttcttcaaagatgctagcagaggttagagacaaaaatcctattaatttatggatagtggcaaccatctagctggacagttgtcagaaccta

SEQ ID NO: 8603 - DNA, 120 bp, Artificial Sequence
  ENSG00000007372_128 (sequence is synthesized)
aagtgctttagaggcttgatacataggcagctttcttctagctgtggccagtggaaggactagctcgaggcccaatcttagatttatcatatggaattccagtacttcacgtgaaggcat

SEQ ID NO: 8604 - DNA, 120 bp, Artificial Sequence
  ENSG00000007372_129 (sequence is synthesized)
ctttaatgatcagacttgttggcagagttcctcgggaggagggagcctggggctgtggctgtgtgatgtgttcctcagtaaccacaggtttgcctctctcctcacagcccccagtcccca

SEQ ID NO: 8605 - DNA, 120 bp, Artificial Sequence
  ENSG00000007372_130 (sequence is synthesized)
aagctgtgacaaccagaaaggatgcctcataaagctccctaagccattctggacgtttaactcgaacttgggaaggttttagaaggggctgggagcagaaaatgaaatgaaaggcaaaga

SEQ ID NO: 8606 - DNA, 120 bp, Artificial Sequence
  ENSG00000007372_131 (sequence is synthesized)
gcttgagcctgggggaagactttaactaggggcgcgcagatgtgtgaggccttttattgtgagagtggacagacatccgagatttcagagccccatattcgagccccgtggaatcccgcg

SEQ ID NO: 8607 - DNA, 120 bp, Artificial Sequence
  ENSG00000007372_132 (sequence is synthesized)
gactcccggctctaagccttacttgcggtggccggacttgtctgtggctgaagccgagcccgggctctgactctcacgtctgcactggaggccttggccagtttggacggtgatggaaac

SEQ ID NO: 8608 - DNA, 120 bp, Artificial Sequence
  ENSG00000007372_133 (sequence is synthesized)
gcatccctttgcctgtcccctactctcccaaccatttcctctcagggcttccatgcttggggaatgtcatgggtgagactgcatttgaaggcctgggacacatcgaccacattatggctg

SEQ ID NO: 8609 - DNA, 120 bp, Artificial Sequence
  ENSG00000007372_134 (sequence is synthesized)
agagcgaacggaagaggactgaggactgaacccagggagcccctagcactggccatttggcaggaggcgaggaagggcgagggcaccgcggcttccccccaagccgagcagtggccacag

SEQ ID NO: 8610 - DNA, 120 bp, Artificial Sequence
  ENSG00000007372_135 (sequence is synthesized)
cctgaaggtgccacggggcggctctgggatcttcttggcttttctaggctctgggctcggcgaggctgccgggttagcgggaaccggcaggttgctggagaaaggagagggacaaaggcc

SEQ ID NO: 8611 - DNA, 120 bp, Artificial Sequence
  ENSG00000007372_136 (sequence is synthesized)
tggaagtgggggaggcaccagggactgggcggccgggatgggagcctttgcctttagggctcactggacccgtttgccagctccgcggacaagggatcccaccttcccagggtctgcaaa

SEQ ID NO: 8612 - DNA, 120 bp, Artificial Sequence
  ENSG00000007372_137 (sequence is synthesized)
aagagagacgtttggggcactacaaagtgacgcaggtgtctgccaagactttccttctccaaaaaatgccagtcttcaccctttccagcgcgccggcgctgcgcctctgcttgaccgggg

SEQ ID NO: 8613 - DNA, 120 bp, Artificial Sequence
  ENSG00000007372_138 (sequence is synthesized)
aaagagagagtttggaggtgtcagaactgtcagaactccggatgggaggctcttggttctgaagctgggagctggaggcacttccccccagaagtgggcacttctttgcctccccgaagg

SEQ ID NO: 8614 - DNA, 120 bp, Artificial Sequence
  ENSG00000007372_139 (sequence is synthesized)
gcgagctcccggggaagggttagagccggcagccctccccagcccggggaggggagagggttatgcgaccccacctctggctagggccggggaggcctttgcttcccgggagccctgccc

SEQ ID NO: 8615 - DNA, 120 bp, Artificial Sequence
  ENSG00000007372_140 (sequence is synthesized)
gggctccttggtcgcagggctgctgggtcccaggcaggaacgagagggtgaggcccacatgtggcccggcggcccagggcggcttgcagcgtcctcactgtcccggctgccaggggctgc

SEQ ID NO: 8616 - DNA, 120 bp, Artificial Sequence
  ENSG00000007372_141 (sequence is synthesized)
aataaaaggaagttaggagaaaccggaaacgtgggccaggccttgctctgttggagaagcggtgtccccgcaaagtccctgcttgcgctggtcccggccggagcccagatcccccaaacg

SEQ ID NO: 8617 - DNA, 120 bp, Artificial Sequence
  ENSG00000007372_142 (sequence is synthesized)
gaaaagcagccgcacttagtcaacaaatggcacgtgggagaagttggtgagtgtttggtgaggactcttcagggcttttcacaagaaccctctgtacacaaaggggaagactttaactag

SEQ ID NO: 8618 - DNA, 120 bp, Artificial Sequence
  ENSG00000007372_143 (sequence is synthesized)
cgacgcccgcgctggcccggccgccgaccgactgaggcccggggacctgcggcggctgctccccgctccgcgcccggcagcccgggaggggagggcgtttgcttggctcttctcgatact

SEQ ID NO: 8619 - DNA, 120 bp, Artificial Sequence
  ENSG00000007372_144 (sequence is synthesized)
gcttggctcttctcgatactggagaagcaggggctgggcccttaagaacagcccgcccgagttttcgaagctgcggtagagaaaccccatcccccccaaatcctgtaactcacaccccct

SEQ ID NO: 8620 - DNA, 120 bp, Artificial Sequence
  ENSG00000007372_145 (sequence is synthesized)
ctcgcccctgcccgggctctgaccccggagagaggggctgggctgatcagggcggggcgaagtcttctcctagttgagcgagaaggaggcccctttgggcttagccaagactgaaagtct

SEQ ID NO: 8621 - DNA, 120 bp, Artificial Sequence
  ENSG00000007372_146 (sequence is synthesized)
ccaccaacccggcggggttgggggcttctctccccaagtcactctcagggcagctcctcccctcctcaccccactacgggcctagaagggatggggagaggagcccccaggcctgcagca

SEQ ID NO: 8622 - DNA, 120 bp, Artificial Sequence
  ENSG00000007372_147 (sequence is synthesized)
gggtaggggtggtaaactcgctgttacagggcgcgggagagagcacggtttactgggtctggtaaggaggtgcccaggaattggaaaatccctgccctggcaactgcaattgcttgggtc

SEQ ID NO: 8623 - DNA, 120 bp, Artificial Sequence
  ENSG00000007372_148 (sequence is synthesized)
ctgatagtcccaggcccagagcgcttttgatacttatggcccttgtacctccctgctttcctctgcccagaccccgtggggtcccacccaccttcctgttcgtggtgggtgctggtacgc

SEQ ID NO: 8624 - DNA, 120 bp, Artificial Sequence
  ENSG00000007372_149 (sequence is synthesized)
ggcagggctagtctagagctccgacctgggagcctggaggcccagcgaaaccaggcccggtttgaggttacggttgaggcacacggcgtcggggctcaactgaactcaaagtgtggaaag

SEQ ID NO: 8625 - DNA, 120 bp, Artificial Sequence
  ENSG00000007372_150 (sequence is synthesized)
cgcgtagctgaggaaagggcacaaaggtggcgagctttgcgggagtagttgtgcagaacctgccggaccccagggcttggccggtaggctcgccttcggcggctgggctctccccttgga

SEQ ID NO: 8626 - DNA, 120 bp, Artificial Sequence
  ENSG00000007372_151 (sequence is synthesized)
cccttggagctcagactccccagccgcaggctgtctctcgggcgggccccagccagggcgcgcagccctgagcgtttgtcgctgcggcccggctggcaggccccgaggggcgcggggtcg

SEQ ID NO: 8627 - DNA, 120 bp, Artificial Sequence
  ENSG00000007372_152 (sequence is synthesized)
ccggcagggctttgtgccgctcgttcccgggtgtgcgcgaggcgcggagcatccaaattgacaccatatgttttcctattagttgcttcgcggtcgagttctaggcgcataatcatcgcc

SEQ ID NO: 8628 - DNA, 120 bp, Artificial Sequence
  ENSG00000007372_153 (sequence is synthesized)
agtgggcgagagcgccagcagtccctagggaagggacacaatgattgaggcttaacctctgaaggggaatttggagctgcgctttctctctgccatttcgatgctgggagtggcgctctg

SEQ ID NO: 8629 - DNA, 120 bp, Artificial Sequence
  ENSG00000007372_154 (sequence is synthesized)
gccctggcgtctcctgggcaagcaccagccggcggtatctgcggaggtggctggcacgttgttattttttgaaatgagtgaggagggaggtctagatttaggcggccttacgcgcccgcc

SEQ ID NO: 8630 - DNA, 120 bp, Artificial Sequence
  ENSG00000007372_155 (sequence is synthesized)
ttggcattagcagactgggaattgccgtggctatgcccgaagtttggaaagtctctctcggtctctttctgggacagcctttctttttccgggaagcttcctgtgcctagaggtggggct

SEQ ID NO: 8631 - DNA, 120 bp, Artificial Sequence
  ENSG00000007372_156 (sequence is synthesized)
cgccgccccactcgccgcccccgcggccctccactctcaacgccctctcttcatttcttactgtaaacgatgctaattatggacccccccaccctcacccaccccagtccccagtccccc

SEQ ID NO: 8632 - DNA, 120 bp, Artificial Sequence
  ENSG00000007372_157 (sequence is synthesized)
cacccactcccctgccttcccactttcccctctccttccaccatccttccctatctctttcaacctgggtcagttacataagataactcatctgcttcagaaaaatattgtgtgcggatt

SEQ ID NO: 8633 - DNA, 120 bp, Artificial Sequence
  ENSG00000007372_158 (sequence is synthesized)
tttttaaaaaaatctttctctttttatttggtaaagacattcattgtgggaacagtttatgaaccgtaataagctgagttatataaaccggcataatttcattctgctctccccagccca

SEQ ID NO: 8634 - DNA, 120 bp, Artificial Sequence
  ENSG00000007372_159 (sequence is synthesized)
tgcttacctcagcttttgaggtatttgtttattcttcatgtttatgaataatatatattgattttaaaaggcaaatgctatttactcctccctaactcacatttactcaattgagtattt

SEQ ID NO: 8635 - DNA, 120 bp, Artificial Sequence
  ENSG00000007372_160 (sequence is synthesized)
tttaaagaagaagaagtaaaaaaatcagtttattttttacctttgttctttaaaacataacgccactttaagcaaggtcagcacaaaaataaatttatctacttcgttttgatgcatctt

SEQ ID NO: 8636 - DNA, 120 bp, Artificial Sequence
  ENSG00000007372_161 (sequence is synthesized)
gcagctctccatatgtgcatccctttgcctgtcccctactctcccaaccatttcctctcagggcttccatgcttggggaatgtcatgggtgagactgcatttgaaggcctgggacacatc

SEQ ID NO: 8637 - DNA, 80 bp, Artificial Sequence
  ENSG00000007376_0 (sequence is synthesized)
gcggaagcgctgccaggcgtccggagcggagcttccagggtctctgggtcgccagcgcgcgggcgcgcggctggagccgg

SEQ ID NO: 8638 - DNA, 120 bp, Artificial Sequence
  ENSG00000007376_1 (sequence is synthesized)
cagcaggccggccatggagccaggcagcgtggagaacctgtccatcgtgtaccggagccgcgacttcctggtggtcaacaagcactgggacgttcgcattgacagcaaggcgtggcggga

SEQ ID NO: 8639 - DNA, 120 bp, Artificial Sequence
  ENSG00000007376_2 (sequence is synthesized)
gactctgaccctgcagaagcagctgcggtaccgctttcccgagctggccgaccctgacacctgctacgggttcaggttctgccaccagctggatttctccaccagcggggcgctgtgcgt

SEQ ID NO: 8640 - DNA, 120 bp, Artificial Sequence
  ENSG00000007376_3 (sequence is synthesized)
ggccctaaacaaggcagccgccggcagcgcgtacaggtgcttcaaggagcggcgcgtgaccaaggcttacctggcattgctgcgggggcacatccaggagagccgggtaaccatcagcca

SEQ ID NO: 8641 - DNA, 120 bp, Artificial Sequence
  ENSG00000007376_4 (sequence is synthesized)
tgccattggcaggaacagcacggagggccgggcccacaccatgtgcatcgagggctcgcagggttgtgagaacccaaagccaagcctcacagatctcgtggttctggaacacgggctgta

SEQ ID NO: 8642 - DNA, 120 bp, Artificial Sequence
  ENSG00000007376_5 (sequence is synthesized)
cgcaggcgatcctgtctccaaagtgctgctgaagccgctcacgggccggacacaccagctgcgcgtgcactgcagtgccctgggccaccccgtggtgggcgacctgacctacggagaagt

SEQ ID NO: 8643 - DNA, 120 bp, Artificial Sequence
  ENSG00000007376_6 (sequence is synthesized)
ctcgggccgggaggaccggccgttcagaatgatgctgcacgctttctacctgcgcatccccacggacaccgagtgtgtggaggtctgcacgcctgaccccttcctgccctccctggatgc

SEQ ID NO: 8644 - DNA, 120 bp, Artificial Sequence
  ENSG00000007376_7 (sequence is synthesized)
ctgctggagcccccacacactgctgcagtcgctggaccagctcgtgcaggccttacgggccacccccgaccctgaccccgaggataggggccccaggccaggcagcccctccgcactcct

SEQ ID NO: 8645 - DNA, 120 bp, Artificial Sequence
  ENSG00000007376_8 (sequence is synthesized)
ccggccggcctcctccacccccaaccaagccccctgagactgaggcacagcggggcccctgcctgcagtggctgtcggagtggacgctggaaccggacagctgagagccgtggggctggg

SEQ ID NO: 8646 - DNA, 120 bp, Artificial Sequence
  ENSG00000007376_9 (sequence is synthesized)
gcagggggtgtcagctgcacagcgggactctagggagatgggcgagcgagcgtctgctcactggctctggggcctcgaggtgccaggcagcatcaggcccactgggttgccccggccagg

SEQ ID NO: 8647 - DNA, 120 bp, Artificial Sequence
  ENSG00000007376_10 (sequence is synthesized)
cctgcgaggaagggctgaggtggggccggcagggggcgccaggcagccgtgatcacaggtgacgaccgcaccgcggccgtgggactgatgcgggatcccgagggccttcctgcccacatg

SEQ ID NO: 8648 - DNA, 120 bp, Artificial Sequence
  ENSG00000007376_11 (sequence is synthesized)
ccccgggagaaaccgaggcccctccctcctcctggaacagcttccggctctcaagcgtcaccccaggggcgtcagttttacggactcaaggtcacctcaggaagaggcagggccaggttt

SEQ ID NO: 8649 - DNA, 120 bp, Artificial Sequence
  ENSG00000007376_12 (sequence is synthesized)
tgggataggctttgcctccaggatgggctgctcctgggcctggtgagctactgcccccaacctaccctctagaggggctgggaagggccgttctgggctcacctggcctgggagacccat

SEQ ID NO: 8650 - DNA, 120 bp, Artificial Sequence
  ENSG00000007376_13 (sequence is synthesized)
ctggtccctgcgtcctctgcccctcactgctctgtgcagatcctgtcgccctcagctgcctcctcccgagacctaatggtccctgctgggctcgagtctgcaggcccggctgcgtgtgcc

SEQ ID NO: 8651 - DNA, 120 bp, Artificial Sequence
  ENSG00000007376_14 (sequence is synthesized)
ttggcctcactgtaccagtggttccctctctgcccggattctgagctcagtgtggtgtttggtgcacaggggttggtcaggggccatggccaaggccctgccacgcacgcccatccctca

SEQ ID NO: 8652 - DNA, 120 bp, Artificial Sequence
  ENSG00000007376_15 (sequence is synthesized)
gatccactgtgagcaccaacctgctgcagtctcttgggcccctgctggcagctctgccacgtcaccgcctgcctggctcccacacagccatgcattgtcactctgcctccgggaccccag

SEQ ID NO: 8653 - DNA, 120 bp, Artificial Sequence
  ENSG00000007376_16 (sequence is synthesized)
cttgggagctgtgggtctgccaggtcccacctcctctgtcccccatgccacaacctgggctcctggctacagcagggctccagggactccaaataaatgttcagtgactggctccaagga

SEQ ID NO: 8654 - DNA, 120 bp, Artificial Sequence
  ENSG00000007376_17 (sequence is synthesized)
ggcttaggtcaggcagggcccttcaggtcagcccggagcaggctgactccttgactccccagctgacgccctggggactgatctcggggactgaggatgcaggtgcacagtagggctgcg

SEQ ID NO: 8655 - DNA, 120 bp, Artificial Sequence
  ENSG00000007376_18 (sequence is synthesized)
ctcacctgacacagggtccctgctggctcctgactgattccttgggggtctggctggcctagattctccaggaccgagcaccaccctggccctgtcctcaccagtggtgacctgaacaca

SEQ ID NO: 8656 - DNA, 120 bp, Artificial Sequence
  ENSG00000007376_19 (sequence is synthesized)
atcttctgtcctaaatactgtcatcctcactcatggcaggggacagggagagttccaccccaagaggctgcttcaagactgcagcggggtcatgacgggaggtgggtcctggtcagggag

SEQ ID NO: 8657 - DNA, 80 bp, Artificial Sequence
  ENSG00000007384_0 (sequence is synthesized)
agcggcggcagcctcctccccggcgccctcaggaccccccagagcccccggcggcggcagcctgccttgctctgccagga

SEQ ID NO: 8658 - DNA, 120 bp, Artificial Sequence
  ENSG00000007384_1 (sequence is synthesized)
cctgccttgctctgccaggaaccatgagtgaggcccgcagggacagcacgagcagcctgcagcgcaagaagccaccctggctaaagctggacattccctctgcggtgcccctgacggcag

SEQ ID NO: 8659 - DNA, 120 bp, Artificial Sequence
  ENSG00000007384_2 (sequence is synthesized)
aagagcccagcttcctgcagcccctgaggcgacaggctttcctgaggagtgtgagtatgccagccgagacagcccacatctcttcaccccaccatgagctccggcggccggtgctgcaac

SEQ ID NO: 8660 - DNA, 120 bp, Artificial Sequence
  ENSG00000007384_3 (sequence is synthesized)
gccagacgtccatcacacagaccatccgcagggggaccgccgactggtttggagtgagcaaggacagtgacagcacccagaaatggcagcgcaagagcatccgtcactgcagccagcgct

SEQ ID NO: 8661 - DNA, 120 bp, Artificial Sequence
  ENSG00000007384_4 (sequence is synthesized)
acgggaagctgaagccccaggtcctccgggagctggacctgcccagccaggacaacgtgtcgctgaccagcaccgagacgccacccccactctacgtggggccatgccagctgggcatgc

SEQ ID NO: 8662 - DNA, 120 bp, Artificial Sequence
  ENSG00000007384_5 (sequence is synthesized)
agaagatcatagaccccctggcccgtggccgtgccttccgtgtggcagatgacactgcggaaggcctgagtgccccacacactcccgtcacgccgggtgctgcctccctctgctccttct

SEQ ID NO: 8663 - DNA, 120 bp, Artificial Sequence
  ENSG00000007384_6 (sequence is synthesized)
ccagctcccgctcaggtttccaccggctcccgcggcggcgcaagcgagagtcggtggccaagatgagcttccgggcggccgcagcgctgatgaaaggccgctccgttagggatggcacct

SEQ ID NO: 8664 - DNA, 120 bp, Artificial Sequence
  ENSG00000007384_7 (sequence is synthesized)
ttcgccgggcacagcgtcgaagcttcactccagctagctttctggaggaggacacaactgatttccccgatgagctggacacatccttctttgcccgggaaggtatcctccatgaagagc

SEQ ID NO: 8665 - DNA, 120 bp, Artificial Sequence
  ENSG00000007384_8 (sequence is synthesized)
tgtccacatacccggatgaagttttcgagtccccatcggaggcagcgctaaaggactgggagaaggcaccggagcaggcggacctcaccggcggggccctggaccgcagcgagcttgagc

SEQ ID NO: 8666 - DNA, 120 bp, Artificial Sequence
  ENSG00000007384_9 (sequence is synthesized)
gcagccacctgatgctgcccttggagcgaggctggcggaagcagaaggagggcgccgcagccccgcagcccaaggtgcggctccgacaggaggtggtgagcaccgcggggccgcgacggg

SEQ ID NO: 8667 - DNA, 120 bp, Artificial Sequence
  ENSG00000007384_10 (sequence is synthesized)
gccagcgtatcgcggtgccggtgcgcaagctcttcgcccgggagaagcggccgtatgggctgggcatggtgggacggctcaccaaccgcacctaccgcaagcgcatcgacagcttcgtca

SEQ ID NO: 8668 - DNA, 120 bp, Artificial Sequence
  ENSG00000007384_11 (sequence is synthesized)
agcgccagatcgaggacatggacgaccacaggcccttcttcacctactggcttaccttcgtgcactcgctcgtcaccatcctagccgtgtgcatctatggcatcgcgcccgtgggcttct

SEQ ID NO: 8669 - DNA, 120 bp, Artificial Sequence
  ENSG00000007384_12 (sequence is synthesized)
cctgggcgccaagttttcgccctgcatgcgccaggacccgcaggtgcacagcttcattcgctcggcgcgcgagcgcgagaagcactccgcctgctgcgtgcgcaacgacaggtcgggctg

SEQ ID NO: 8670 - DNA, 120 bp, Artificial Sequence
  ENSG00000007384_13 (sequence is synthesized)
cgtgcagacctcggaggaggagtgctcgtccacgctggcagtgtgggtgaagtggcccatccatcccagcgccccagagcttgcgggccacaagagacagtttggctctgtctgccacca

SEQ ID NO: 8671 - DNA, 120 bp, Artificial Sequence
  ENSG00000007384_14 (sequence is synthesized)
ggatcccagggtgtgtgatgagccctcctccgaagaccctcatgagtggccagaagacatcaccaagtggccgatctgcaccaaaaacagcgctgggaaccacaccaaccatccccacat

SEQ ID NO: 8672 - DNA, 120 bp, Artificial Sequence
  ENSG00000007384_15 (sequence is synthesized)
ggactgtgtcatcacaggacggccctgctgcattggcaccaagggcaggtgtgagatcacctcccgggagtactgtgacttcatgaggggctacttccatgaggaggccacgctctgctc

SEQ ID NO: 8673 - DNA, 120 bp, Artificial Sequence
  ENSG00000007384_16 (sequence is synthesized)
tcaggtgcactgcatggatgatgtgtgtgggctcctgccttttctcaaccccgaggtgcctgaccagttctaccgcctgtggctatccctcttcctgcacgccgggatcttgcactgcct

SEQ ID NO: 8674 - DNA, 120 bp, Artificial Sequence
  ENSG00000007384_17 (sequence is synthesized)
ggtgtccatctgcttccagatgactgtcctgcgggacctggagaagctggcaggctggcaccgcatagccatcatctacctgctgagtggtgtcaccggcaacctggccagtgccatctt

SEQ ID NO: 8675 - DNA, 120 bp, Artificial Sequence
  ENSG00000007384_18 (sequence is synthesized)
cctgccataccgagcagaggtgggtcctgctggctcccagttcggcatcctggcctgcctcttcgtggagctcttccagagctggcagatcctggcgcggccctggcgtgccttcttcaa

SEQ ID NO: 8676 - DNA, 120 bp, Artificial Sequence
  ENSG00000007384_19 (sequence is synthesized)
gctgctggctgtggtgctcttcctcttcacctttgggctgctgccgtggattgacaactttgcccacatctcagggttcatcagtggcctcttcctctccttcgccttcttgccctacat

SEQ ID NO: 8677 - DNA, 120 bp, Artificial Sequence
  ENSG00000007384_20 (sequence is synthesized)
cagctttggcaagttcgacctgtaccggaaacgctgccagatcatcatctttcaggtggtcttcctgggcctcctggctggcctggtggtcctcttctacgtctatcctgtccgctgtga

SEQ ID NO: 8678 - DNA, 120 bp, Artificial Sequence
  ENSG00000007384_21 (sequence is synthesized)
gtggtgtgagttcctcacctgcatccccttcactgacaagttctgtgagaagtacgaactggacgctcagctccactgagctggctgcgggctccagcggccgtgtgctccagcaggcca

SEQ ID NO: 8679 - DNA, 120 bp, Artificial Sequence
  ENSG00000007384_22 (sequence is synthesized)
gagccagacacgacctccctgagcctcacaggcttacaggagtcacctgctccatgtggggactggcctgtttcctgaacacagacctctttcttgtgccttgttcacttctgttgaacc

SEQ ID NO: 8680 - DNA, 120 bp, Artificial Sequence
  ENSG00000007384_23 (sequence is synthesized)
cctcgtactgccgggcatttattatactacttcctgtcataaccttctaacttgtttcttgacgaccacctcatgtggccaataaatggactgggagcgttttagctgccattaacttga

SEQ ID NO: 8681 - DNA, 120 bp, Artificial Sequence
  ENSG00000007384_24 (sequence is synthesized)
ttagggagccctccgtgtcatgtgggagagaatgccacaccccacccactggtgataccagagattcccatcatgggaccacctcacgttttcagaggctgtgcacctgccctttgtaca

SEQ ID NO: 8682 - DNA, 120 bp, Artificial Sequence
  ENSG00000007384_25 (sequence is synthesized)
gcctgtccatcaaccagcgcctgcccctctgagcaagtagatcaagagaactagatggagacttgaaaggtcaagtgacattattccagtttgatagagactcagtgtggtggcctgctt

SEQ ID NO: 8683 - DNA, 120 bp, Artificial Sequence
  ENSG00000007384_26 (sequence is synthesized)
gaagtcaaggaagccacaccgttttctgctttatgagcccacccatctttgcctctacccccaaacgtggtgtggggccaaaggttgggggaggccctgactcagctcgtcctcatttgt

SEQ ID NO: 8684 - DNA, 120 bp, Artificial Sequence
  ENSG00000007384_27 (sequence is synthesized)
tgggagctgggggctggtggggcagaggcaggtacacagaggatggaaatgagaacaagggccctcttgtttcagcttcctcctccatctcggtccccaccatccccttgccctcctcct

SEQ ID NO: 8685 - DNA, 120 bp, Artificial Sequence
  ENSG00000007384_28 (sequence is synthesized)
gttctggatactgaccgctctcaccccactaccctgctccactcccttctcttcagcactcactctctccttctctgtctccaccgcccggatgctcttgcctcttagcagccgacaagt

SEQ ID NO: 8686 - DNA, 120 bp, Artificial Sequence
  ENSG00000007384_29 (sequence is synthesized)
acgcttcgggcgtgtccacactctgcccctcttgggtccccgggctgcccgcagggccttcccacagcgccagtctctctcttggtccctgctcaggtatctcatacaggtcatgagtgt

SEQ ID NO: 8687 - DNA, 120 bp, Artificial Sequence
  ENSG00000007384_30 (sequence is synthesized)
tgtgacctcttgggagctgccagtgtggttggcattccctggggctcctaacggcaggtgctggcagtgtttttgtttgcatgtccaagtgctgtggacagcctgcctgggcccgtaagc

SEQ ID NO: 8688 - DNA, 120 bp, Artificial Sequence
  ENSG00000007384_31 (sequence is synthesized)
acctgctgtctgagctctgtggtgtcctggggccaagctctctcgggttgagctctcagctccttctctggactcagtgcctcccctcaactgcccctcagggatggtggggtgagggcc

SEQ ID NO: 8689 - DNA, 120 bp, Artificial Sequence
  ENSG00000007384_32 (sequence is synthesized)
tctatgaagcactcaaccgggcaaggccagctgcggtctagtggaaacttggagttggctaacagttcagggggtggctggaacccactcatcctcttattagaccttgcccactcagac

SEQ ID NO: 8690 - DNA, 120 bp, Artificial Sequence
  ENSG00000007384_33 (sequence is synthesized)
cctggtccctggagtgactacaggcctgggggcagcatgctgccccggaggagggcctttgaagtcccctgcctgggaggggcgatctggccgccccttgctgagtccctgccatgccag

SEQ ID NO: 8691 - DNA, 120 bp, Artificial Sequence
  ENSG00000007384_34 (sequence is synthesized)
atgcacgtgcatctcaagagtgggggtgacttgtagaagcggagggaagagctcagtggttttgccttcgactcctgactccctgcgtgcccctcattgccctgacccaactggacctga

SEQ ID NO: 8692 - DNA, 120 bp, Artificial Sequence
  ENSG00000007384_35 (sequence is synthesized)
ggtccccgggctgcccgcagggccttcccacagcgccagtctctctcttggtccctgctcagggggaccgccgactggtttggagtgagcaaggacagtgacagcacccagaaatggcag

SEQ ID NO: 8693 - DNA, 120 bp, Artificial Sequence
  ENSG00000007384_36 (sequence is synthesized)
agtgttgcttttttactggcaaggagaaggcagatgccgggcgacttgcgcagtatattcgccaggatagagacagggtgccctggtgccccccggggagggactgcagcagtttgcggg

SEQ ID NO: 8694 - DNA, 120 bp, Artificial Sequence
  ENSG00000007392_0 (sequence is synthesized)
gaaagagccgagtgggctcgaggccgacgcgaccatcgtttgtcgacgccgctgccaccgcctgcctgagagaagtcgtcgcggccgaccccgtcgcctccgccggctaccatgtccgcc

SEQ ID NO: 8695 - DNA, 120 bp, Artificial Sequence
  ENSG00000007392_1 (sequence is synthesized)
caggcgcagatgcgggccctgctggaccagctcatgggcacggctcgggacggagacgaaaccagacagagggtcaagtttacagatgaccgtgtctgcaagagtcaccttctggactgc

SEQ ID NO: 8696 - DNA, 120 bp, Artificial Sequence
  ENSG00000007392_2 (sequence is synthesized)
tgcccccatgacatcctggctgggacgcgcatggatttaggagaatgtaccaaaatccacgacttggccctccgagcagattatgagattgcaagtaaagaaagagacctgttttttgaa

SEQ ID NO: 8697 - DNA, 120 bp, Artificial Sequence
  ENSG00000007392_3 (sequence is synthesized)
ttagatgcaatggatcacttggagtcctttattgctgaatgtgatcggagaactgagctcgccaagaagcggctggcagaaacacaggaggaaatcagtgcggaagtttctgcaaaggca

SEQ ID NO: 8698 - DNA, 120 bp, Artificial Sequence
  ENSG00000007392_4 (sequence is synthesized)
gaaaaagtacatgagttaaatgaagaaataggaaaactccttgctaaagccgaacagctaggggctgaaggtaatgtggatgaatcccagaagattcttatggaagtggaaaaagttcgt

SEQ ID NO: 8699 - DNA, 120 bp, Artificial Sequence
  ENSG00000007392_5 (sequence is synthesized)
gcgaagaaaaaagaagctgaggaagaatacagaaattccatgcctgcatccagttttcagcagcaaaagctgcgtgtctgcgaggtctgttcagcctaccttggtctccatgacaatgac

SEQ ID NO: 8700 - DNA, 120 bp, Artificial Sequence
  ENSG00000007392_6 (sequence is synthesized)
acttcggtggcaagttacacttggggttcattcagatccgagagaagcttgatcagttgaggaaaactgtcgctgaaaagcaggagaagagaaatcaggatcgcttgaggaggagagagg

SEQ ID NO: 8701 - DNA, 120 bp, Artificial Sequence
  ENSG00000007392_7 (sequence is synthesized)
agagggaacgggaggagcgtctgagcaggaggtcgggatcaagaaccagagatcgcaggaggtcacgctcccgggatcggcgtcggaggcggtcaagatctacctcccgagagcgacgga

SEQ ID NO: 8702 - DNA, 120 bp, Artificial Sequence
  ENSG00000007392_8 (sequence is synthesized)
aattgtcccggtcccggtcccgagatagacatcggcgccaccgcagccgttcccggagccacagccggggacatcgtcgggcttcccgggaccgaagtgcgaaatacaagttctccagag

SEQ ID NO: 8703 - DNA, 120 bp, Artificial Sequence
  ENSG00000007392_9 (sequence is synthesized)
agcgggcatccagagaggagtcctgggagagcgggcggagcgagcgagggcccccggactggaggcttgagagctccaacgggaagatggcttcacggaggtcagaagagaaggaggccg

SEQ ID NO: 8704 - DNA, 120 bp, Artificial Sequence
  ENSG00000007392_10 (sequence is synthesized)
gcgagatctgaacccgtctcccgggtgctgtaaatagtctgataaacgttcacacagtctaaaattaccctttatatttgctgaatacaactcatcttttgtagtttaaaatttctattg

SEQ ID NO: 8705 - DNA, 120 bp, Artificial Sequence
  ENSG00000007392_11 (sequence is synthesized)
ttttggagctagctgtgagtttctagaagtgtacagagttgctcctgtgttcccgggtcatgttgagtaggaataaataaatctgatgctgcctcctgaggctgcggggggtttctgctg

SEQ ID NO: 8706 - DNA, 120 bp, Artificial Sequence
  ENSG00000007392_12 (sequence is synthesized)
gcgggccctgctggaccagctcatgggcacggctcgggacggtgagtcagagcggccaaccaggcgagggtctggggtgggagtgaggcgaggccgccgggcggcctgaggcgggggccg

SEQ ID NO: 8707 - DNA, 120 bp, Artificial Sequence
  ENSG00000007392_13 (sequence is synthesized)
cgatcgtctgcgcctgcgcctgcgcggggcatcgctcctcctcccccgcgctccgaccgcaggcgccgggcctttgtctaagccggtgcgtctctgaggcggccgtgggtccaggtcggg

SEQ ID NO: 8708 - DNA, 120 bp, Artificial Sequence
  ENSG00000007392_14 (sequence is synthesized)
ctcctctctcggagtctgcgccatggatggggcttcagcctccttcctatgtaccgtcctgctacttcctccccggcgggcgccgcggctccgtgcccctccgcgaactgtggagtcggc

SEQ ID NO: 8709 - DNA, 120 bp, Artificial Sequence
  ENSG00000007392_15 (sequence is synthesized)
ggagggctggaatcagcgtgggctccaggtcgctggcagccgggtggcagaactcttccgaggctccttgggaagaagctacacccgagggagccggatgggcctcgaaaacctggcccg

SEQ ID NO: 8710 - DNA, 120 bp, Artificial Sequence
  ENSG00000007392_16 (sequence is synthesized)
ctctggttctgtaccattgcaaggggaaccgtaaactgagcttttctaacgtgggtttctgccaagtacttttccagctgcccccttccccccagcacacaggagagcctctgtgtagcc

SEQ ID NO: 8711 - DNA, 120 bp, Artificial Sequence
  ENSG00000007392_17 (sequence is synthesized)
agcgcttgacagtcgttaggtaggttgtactgtgtagggaggagctcaagatcatgatggttgtcacaggagaaagcggttgcatctttgcaaaactatatacctgctgtggtttgtgtt

SEQ ID NO: 8712 - DNA, 120 bp, Artificial Sequence
  ENSG00000007392_18 (sequence is synthesized)
ttcttttctgctgagtaatgaagttgtaagttcacactggcacattctcagggctgtgcagattatttgcactttatttcataggtgaataagtgctttttagctttctttgtatattga

SEQ ID NO: 8713 - DNA, 120 bp, Artificial Sequence
  ENSG00000007392_19 (sequence is synthesized)
gttgcttttgaattgcttcccatatttttatttcatacaaactgaacaattgtggcccctctattttatttataaaggttcagtgtatctttgcctgcctacatcaatctgcaagggagt

SEQ ID NO: 8714 - DNA, 120 bp, Artificial Sequence
  ENSG00000007392_20 (sequence is synthesized)
tgcagaaagcctcatgttcatcgagccgtgagtcacaaccaatttctaagctgttataacaaaaaagtgtttgctttttttcacaagtaactttaaaagtgtagtttagaaagaaaacat

SEQ ID NO: 8715 - DNA, 120 bp, Artificial Sequence
  ENSG00000007392_21 (sequence is synthesized)
tttcaataaaaagacactacattaatcctggatgcttgcaaatcctaaaatatattcctcctctagcgttgcacagctctgtgttgtatacacagactagctttaaaatttgtcacatac

SEQ ID NO: 8716 - DNA, 120 bp, Artificial Sequence
  ENSG00000007392_22 (sequence is synthesized)
ttttggtgctcagctgtttacgtctgactccttgacttctttggtacagtgatggagtcagatctcattaagtgtgattctccatgatataactagcctcaaaaaaatgtgtattccact

SEQ ID NO: 8717 - DNA, 120 bp, Artificial Sequence
  ENSG00000007392_23 (sequence is synthesized)
ccagttgtaaatatctttagatcagcttttcattgcatttgatggggagaacacagaaatgatagtctgcaaatcatccaggtgaattgttatactagttattttttggtggttaatgtg

SEQ ID NO: 8718 - DNA, 120 bp, Artificial Sequence
  ENSG00000007392_24 (sequence is synthesized)
atgtaagttttatttaatgttgatttattcctactgcgaagaacccaatattgaactaacaagaaaaatgtaacatacgtaagttatgaagcaaaataataaggtagttgcttgttatcc

SEQ ID NO: 8719 - DNA, 120 bp, Artificial Sequence
  ENSG00000007392_25 (sequence is synthesized)
tgccactcaagctcagagctagaatacagccagtactgtttatatgttgtgtccagcgtcctgtcagtgtcctaaatgataatatgtgttatctcattttgttgcttttaaaaattttaa

SEQ ID NO: 8720 - DNA, 120 bp, Artificial Sequence
  ENSG00000007392_26 (sequence is synthesized)
ttacatttttatgagtccttgaacagtgtttatttttgcttagttttgaatggtttcatagtgtagagtctttaaaattagatttttttggttcagtatcatgtttctgtttgcccaggt

SEQ ID NO: 8721 - DNA, 120 bp, Artificial Sequence
  ENSG00000007392_27 (sequence is synthesized)
tgttgcatatagttttcattgctgcttgaataattctcaaacgatctttgctttattcatagacatttagattgattctagttttgctactgcagacaatatgaatatttttgcataact

SEQ ID NO: 8722 - DNA, 120 bp, Artificial Sequence
  ENSG00000007392_28 (sequence is synthesized)
cattcccccgacttccttactgcaggtgtgggcaagaaaacttttcctttaacacttttcaacagcgggcataaaattctgcagctgaggtcttgaagaatgcagatgggtacagtatgt

SEQ ID NO: 8723 - DNA, 120 bp, Artificial Sequence
  ENSG00000007392_29 (sequence is synthesized)
gttggagctcacagtgtgtattgactaacctagttccttttttgctttttttggtattgtcttgttaaaagtgactcccaggtagcaactctcttttttaagggtgggaacgaaagggac

SEQ ID NO: 8724 - DNA, 120 bp, Artificial Sequence
  ENSG00000007392_30 (sequence is synthesized)
gtaggaagaatagatctagattatttaacagtcttcgatagagtttgaaagctttcttcttcattcaattttgggcaaaatactgcctctgcatttgttcataacaaaaagattagatta

SEQ ID NO: 8725 - DNA, 120 bp, Artificial Sequence
  ENSG00000007392_31 (sequence is synthesized)
ataagtagcttttgttggtggaaattaccagctctataagtcacccttggtggttcatggacctctgattagcttgggttttgcagtctcattgccacatgtatatgtggagccaatggc

SEQ ID NO: 8726 - DNA, 75 bp, Artificial Sequence
  ENSG00000007392_32 (sequence is synthesized)
caggagaagagaaatcaggatcgcttgaggaggagagaggagagggaacgggaggagcgtctgagcaggaggtta

SEQ ID NO: 8727 - DNA, 120 bp, Artificial Sequence
  ENSG00000007392_33 (sequence is synthesized)
gagcccttctctgtgttcccagggtctgctgagggccgtgtctggtggggatggggctgggctcaccctcaggagtagggctggggagtcgtgaacgggactcaggtgtgggaagaggcg

SEQ ID NO: 8728 - DNA, 120 bp, Artificial Sequence
  ENSG00000007392_34 (sequence is synthesized)
agagggctgtggaggagctcgcacggcgccaggtgatgggctgcacaggcactgtcccctgcctgcgtcctggggcctgtgcactgttgcgtccatgctcagagtggctgagacttgtgt

SEQ ID NO: 8729 - DNA, 120 bp, Artificial Sequence
  ENSG00000007392_35 (sequence is synthesized)
cctgaccaggccctgcttacctctgttttggtttttgtttttgatatttttttttccattgtgtttttacgtagtgtcatgttctgtgcatatagtgttgtattctcctttgcactgttt

SEQ ID NO: 8730 - DNA, 120 bp, Artificial Sequence
  ENSG00000007392_36 (sequence is synthesized)
atgttacagtgaaggctctccttattaaaaatcttcgcaaaggtcactttttaatggctatctaacactccatatgtggtgggcaagtctggttggcctccggggggtttccaggtatag

SEQ ID NO: 8731 - DNA, 120 bp, Artificial Sequence
  ENSG00000007392_37 (sequence is synthesized)
gggatgtagggccttgcctggcctggtctgcgggtccatcgtcagtgcctgagcggccagcagaaggggggcagcagcctccactgagcctctggttcccatttcccaggttctccagag

SEQ ID NO: 8732 - DNA, 120 bp, Artificial Sequence
  ENSG00000007392_38 (sequence is synthesized)
ctaggggctgaaggtaatgtggatgaatcccagaagattcttatggaagtggaaaaagttcgtgcgaagaaaaaagaagctgagaaaactgtcgctgaaaagcaggagaagagaaatcag

SEQ ID NO: 8733 - DNA, 120 bp, Artificial Sequence
  ENSG00000007392_39 (sequence is synthesized)
ttattacagctgacctactgtctcctgtctgttttaggagcggtgacttaggttatcaccccttagtgttttcctgtcatctgccttctcatctccacctaaaatttagtttttggtaaa

SEQ ID NO: 8734 - DNA, 120 bp, Artificial Sequence
  ENSG00000007392_40 (sequence is synthesized)
agatcatgctatctaaccttgtcatcattgcaaaacaaacttatttatgtttatcatgatgctgacattagcaagctgactcatggtttaatgttagtgtttcttactactggtcactgg

SEQ ID NO: 8735 - DNA, 65 bp, Artificial Sequence
  ENSG00000007392_41 (sequence is synthesized)
tcatggtttaatgttagtgtttcttactactggtcactggctgacagtcggaaaagtgatgccct

SEQ ID NO: 8736 - DNA, 79 bp, Artificial Sequence
  ENSG00000007392_42 (sequence is synthesized)
gaactacaggtgcatgctcttcactgtattgggaaggctggtcttgaacctctgacctcatggatcctcccgcctcggc

SEQ ID NO: 8737 - DNA, 72 bp, Artificial Sequence
  ENSG00000007392_43 (sequence is synthesized)
gtttttagtagagatggggcttcactgtattgggaaggctggtcttgaacctctgacctcatggatccggcc

SEQ ID NO: 8738 - DNA, 86 bp, Artificial Sequence
  ENSG00000007392_44 (sequence is synthesized)
ttgtttttgtttttgatggtggtctggtctcagttcactacaacttctgcctccgaggctcaagcgattctcctgcctcagccacc

SEQ ID NO: 8739 - DNA, 120 bp, Artificial Sequence
  ENSG00000007392_45 (sequence is synthesized)
gtgagccactgcgtccggtcctgtctctgtttttatctgaaattatgttagcctttgcctagttatggtgaattaaccttagcatatgatagttctcttaatgtttcccaccaccctttt

SEQ ID NO: 8740 - DNA, 120 bp, Artificial Sequence
  ENSG00000007392_46 (sequence is synthesized)
aacaaaatgtattcatagctctcagtaatatttgttctattgttttgtttttgaggtgaaaggggggaccctaccctcagaacatgagggaataatatttacgtggctcacaaagaccag

SEQ ID NO: 8741 - DNA, 120 bp, Artificial Sequence
  ENSG00000007392_47 (sequence is synthesized)
atgaattgctgccaagtgttttaattttcctcagaatttctttgtaatgttattgagggttggaggtccttttacaaattttggaaataagtaaatcaaatgagaagaccatgcttccaa

SEQ ID NO: 8742 - DNA, 120 bp, Artificial Sequence
  ENSG00000007392_48 (sequence is synthesized)
acaatcattctgtttaacagatccccttgatttaatgcaattatgaatgcgttagtggtagtgtagtttaagatctttcccttgaatgtacaggctttaaagaaacgaacctaggagtgt

SEQ ID NO: 8743 - DNA, 80 bp, Artificial Sequence
  ENSG00000007402_0 (sequence is synthesized)
ccaccctggccccggcacccggcgcccgacgtccgggcccccgcgcccgctgtggctgctgctgccgcttctaccgctgc

SEQ ID NO: 8744 - DNA, 120 bp, Artificial Sequence
  ENSG00000007402_1 (sequence is synthesized)
ccgcgcccgctgtggctgctgctgccgcttctaccgctgctcgccgcccccggcgcctctgcctacagcttcccccagcagcacacgatgcagcactgggcccggcgtctggagcaggag

SEQ ID NO: 8745 - DNA, 120 bp, Artificial Sequence
  ENSG00000007402_2 (sequence is synthesized)
gtcgacggcgtgatgcggatttttggaggcgtccagcagctccgtgagatttacaaggacaaccggaacctgttcgaggtacaggagaatgagcctcagaagttggtggagaaggtggca

SEQ ID NO: 8746 - DNA, 120 bp, Artificial Sequence
  ENSG00000007402_3 (sequence is synthesized)
ggggacattgagagccttctggacaggaaggtgcaggccctgaagagactggctgatgctgcagagaacttccagaaagcacaccgctggcaggacaacatcaaggaggaagacatcgtg

SEQ ID NO: 8747 - DNA, 120 bp, Artificial Sequence
  ENSG00000007402_4 (sequence is synthesized)
tactatgacgccaaggctgacgctgagctggacgaccctgagagtgaggatgtggaaagggggtctaaggccagcaccctaaggctggacttcatcgaggacccaaacttcaagaacaag

SEQ ID NO: 8748 - DNA, 120 bp, Artificial Sequence
  ENSG00000007402_5 (sequence is synthesized)
gtcaactattcatacgcggctgtacagatccctacggacatctacaaaggctccactgtcatcctcaatgagctcaactggacagaggccctggagaatgtgttcatggaaaaccgcaga

SEQ ID NO: 8749 - DNA, 120 bp, Artificial Sequence
  ENSG00000007402_6 (sequence is synthesized)
caagaccccacactgctgtggcaggtcttcggcagcgccacaggagtcactcgctactacccggccaccccgtggcgagcccccaagaagatcgacctgtacgatgtccgaaggagaccc

SEQ ID NO: 8750 - DNA, 120 bp, Artificial Sequence
  ENSG00000007402_7 (sequence is synthesized)
tggtatatccagggggcctcgtcacccaaagacatggtcatcatcgtggatgtgagtggcagtgtgagcggcctgaccctgaagctgatgaagacatctgtctgcgagatgctggacacg

SEQ ID NO: 8751 - DNA, 120 bp, Artificial Sequence
  ENSG00000007402_8 (sequence is synthesized)
ctgtctgatgatgactatgtgaatgtggcctcgttcaacgagaaggcacagcctgtgtcatgcttcacacacctggtgcaggccaatgtgcgcaacaagaaggtgttcaaggaagctgtg

SEQ ID NO: 8752 - DNA, 120 bp, Artificial Sequence
  ENSG00000007402_9 (sequence is synthesized)
cagggcatggtggccaagggcaccacaggctacaaggccggctttgagtatgcctttgaccagctgcagaactccaacatcactcgggccaactgcaacaagatgatcatgatgttcacg

SEQ ID NO: 8753 - DNA, 120 bp, Artificial Sequence
  ENSG00000007402_10 (sequence is synthesized)
gatggtggtgaggaccgcgtgcaggacgtctttgagaagtacaattggccaaaccggacggtgcgcgtgtttactttctccgtggggcagcataactatgacgtcacaccgctgcagtgg

SEQ ID NO: 8754 - DNA, 120 bp, Artificial Sequence
  ENSG00000007402_11 (sequence is synthesized)
atggcctgtgccaacaaaggctactattttgagatcccttccatcggagccatccgcatcaacacacaggaatatctagatgtgttgggcaggcccatggtgctggcaggcaaggaggcc

SEQ ID NO: 8755 - DNA, 120 bp, Artificial Sequence
  ENSG00000007402_12 (sequence is synthesized)
aagcaggtgcagtggaccaacgtgtatgaggatgcactgggactggggttggtggtaacagggaccctccctgttttcaacctgacacaggatggccctggggaaaagaagaaccagctg

SEQ ID NO: 8756 - DNA, 120 bp, Artificial Sequence
  ENSG00000007402_13 (sequence is synthesized)
atcctgggcgtgatgggcattgacgtggctctgaatgacatcaagaggctgacccccaactacacgcttggagccaacggctatgtgtttgccattgacctgaacggctacgtgttgctg

SEQ ID NO: 8757 - DNA, 120 bp, Artificial Sequence
  ENSG00000007402_14 (sequence is synthesized)
caccccaatctcaagccccagaccaccaacttccgggagcctgtgactctggacttcctggatgcggagctagaggatgagaacaaggaagagatccgtcggagcatgattgatggcaac

SEQ ID NO: 8758 - DNA, 120 bp, Artificial Sequence
  ENSG00000007402_15 (sequence is synthesized)
aagggccacaagcagatcagaacgttggtcaagtccctggatgagaggtacatagatgaggtgacacggaactacacctgggtgcctataaggagcactaactacagcctggggctggtg

SEQ ID NO: 8759 - DNA, 120 bp, Artificial Sequence
  ENSG00000007402_16 (sequence is synthesized)
ctcccaccctacagcaccttctacctccaagccaatctcagtgaccagatcctgcaggtcaagtattttgagttcctgctccccagcagctttgagtctgaaggacacgttttcattgct

SEQ ID NO: 8760 - DNA, 120 bp, Artificial Sequence
  ENSG00000007402_17 (sequence is synthesized)
cccagagagtactgcaaggacctgaatgcctcagacaacaacaccgagttcctgaaaaactttattgagctcatggagaaagtgactccagactccaagcagtgcaacaacttccttctg

SEQ ID NO: 8761 - DNA, 120 bp, Artificial Sequence
  ENSG00000007402_18 (sequence is synthesized)
cacaacctgatcttggacacgggcatcacgcagcagctggtagagcgtgtgtggagggaccaggatctcaacacgtacagcctactggccgtgttcgctgccacagacggtggcatcacc

SEQ ID NO: 8762 - DNA, 120 bp, Artificial Sequence
  ENSG00000007402_19 (sequence is synthesized)
cgagtcttccccaacaaggcagctgaggactggacagagaaccctgagcccttcaatgccagcttctaccgccgcagcctggataaccacggttatgtcttcaagcccccacaccaggat

SEQ ID NO: 8763 - DNA, 120 bp, Artificial Sequence
  ENSG00000007402_20 (sequence is synthesized)
gccctgttaaggccgctggagctggagaatgacactgtgggcatcctcgtcagcacagctgtggagctcagcctaggcaggcgcacactgaggccagcagtggtgggcgtcaagctggac

SEQ ID NO: 8764 - DNA, 120 bp, Artificial Sequence
  ENSG00000007402_21 (sequence is synthesized)
cccaccaagaccagcctcagaagtgcggccccaacagccactgtgagatggactgcgaggttaacaatgaggacttactctgtgtcctcattgatgatggaggattcctggtgctgtcaa

SEQ ID NO: 8765 - DNA, 120 bp, Artificial Sequence
  ENSG00000007402_22 (sequence is synthesized)
accagaaccatcagtgggaccaggtgggcaggttcttcagtgaggtggatgccaacctgatgctggcactctacaataactccttctacacccgcaaggagtcctatgactatcaggcag

SEQ ID NO: 8766 - DNA, 120 bp, Artificial Sequence
  ENSG00000007402_23 (sequence is synthesized)
cctgtgcccctcagccccctggcaacctgggtgctgcaccccggggtgtctttgtgcccaccgttgcagatttccttaacctggcctggtggacctctgctgccgcctggtccctgttcc

SEQ ID NO: 8767 - DNA, 120 bp, Artificial Sequence
  ENSG00000007402_24 (sequence is synthesized)
agcagcttctctacggcctcatctaccacagctggttccaagcagaccccgcggaggccgaggggagccccgagacgcgcgagagcagctgcgtcatgaaacagacccagtactacttcg

SEQ ID NO: 8768 - DNA, 120 bp, Artificial Sequence
  ENSG00000007402_25 (sequence is synthesized)
gctcggtaaacgcctcctacaacgccatcatcgactgcggaaactgctccaggctgttccacgcgcagagactgaccaacaccaatcttctctttgtggtggccgagaagccgctgtgca

SEQ ID NO: 8769 - DNA, 120 bp, Artificial Sequence
  ENSG00000007402_26 (sequence is synthesized)
gccagtgcgaggctggccggctgctgcagaaggagacgcactcggacggcccggagcagtgtgagctagtgcagagaccgcgataccggagaggcccgcacatctgcttcgactacaacg

SEQ ID NO: 8770 - DNA, 120 bp, Artificial Sequence
  ENSG00000007402_27 (sequence is synthesized)
cgacagaagatacctcagactgtggccgcggggcctccttcccgccgtcgctgggcgtcctggtctccctgcaactgctgctcctcctgggcctgccgccccggccgcagcctcaagtcc

SEQ ID NO: 8771 - DNA, 120 bp, Artificial Sequence
  ENSG00000007402_28 (sequence is synthesized)
tcgtccacgcctctcgccgcctctgagcaccctgccccaccccacctccactcccacctcacccggcctcttcgcctttcccaccctcctgccccacactccccgccttagagcctcgtc

SEQ ID NO: 8772 - DNA, 120 bp, Artificial Sequence
  ENSG00000007402_29 (sequence is synthesized)
cctccctcactgaaggacctgagctggccaggccctgagagtctggtctgcgccttgggatggggagtcccaaagcgggacgccgcaggtgtttggcacccaaatcacatctcacctccg

SEQ ID NO: 8773 - DNA, 120 bp, Artificial Sequence
  ENSG00000007402_30 (sequence is synthesized)
aactgttcaagtgtccccagacccttcttgcctgctgggctccccccagtgggatgggacagggaggccacacgcactggtgccaaaaccaggcctctgctgccgcccttcctggaggct

SEQ ID NO: 8774 - DNA, 120 bp, Artificial Sequence
  ENSG00000007402_31 (sequence is synthesized)
gcctatgttgggggggaccctgcctcagctgacccggcctctctgccccacccaagcccaaacttggtttctgtgagaatagtggaggaaggtgagatggccagtttgaagcctgtgcct

SEQ ID NO: 8775 - DNA, 120 bp, Artificial Sequence
  ENSG00000007402_32 (sequence is synthesized)
cccagcttaaatcctagcaggagagaggctctggggcagcccccatgggctcctgcccctttcaggcctacagccacatccccaagcccaccaggtgtcaggatagtcacagtgatacca

SEQ ID NO: 8776 - DNA, 120 bp, Artificial Sequence
  ENSG00000007402_33 (sequence is synthesized)
gttcagacactaccccatatacacctggaacattgaggatggaaactggactcacattcgacataccccactgggcacacgcacaaacacacacactatggggtggggtgggtgtagggg

SEQ ID NO: 8777 - DNA, 120 bp, Artificial Sequence
  ENSG00000007402_34 (sequence is synthesized)
cttacaaagccttacacagggcgaggggttggtgggagggttggcacctgcacactccatctcctgctcaccacctgcctctaatctgagctgcagcctggctggtcctcccatttctaa

SEQ ID NO: 8778 - DNA, 120 bp, Artificial Sequence
  ENSG00000007402_35 (sequence is synthesized)
agctgaatgtcaaacagtgccaaatgctggggcagggggtgaagaaccctctgtcccacccctagccaccagtgtcctccaagtgccccctcacctctccaggtgctcattgtaaccatt

SEQ ID NO: 8779 - DNA, 120 bp, Artificial Sequence
  ENSG00000007402_36 (sequence is synthesized)
tctcactagtgtcaggcccccagtgggaccacatgccactgcctgcacctttcggcagaggaacccccaccagacatcaccctttgccttagcaggggtgactttgtctctcctggctgg

SEQ ID NO: 8780 - DNA, 120 bp, Artificial Sequence
  ENSG00000007402_37 (sequence is synthesized)
gccatccttccgccaatctggcccttacacactcaggcctgtgcccactccctatctccttcccacccctacacacacactccctgcttgcaggaggccaaactgtccctcccttgctga

SEQ ID NO: 8781 - DNA, 120 bp, Artificial Sequence
  ENSG00000007402_38 (sequence is synthesized)
acacacacacacacacacacacacaggtggggactgggcacagctcttcacaccattcattctggtcatttcccccaaaggcatcccagcctgggggccagtggggaactgagggcaagg

SEQ ID NO: 8782 - DNA, 120 bp, Artificial Sequence
  ENSG00000007402_39 (sequence is synthesized)
ggatatagtgatggggctcagatggactgggaggagggggagggtgatgcattaattaatggcttcgttaattaatgtcatgttgcttgtcgctttctcagtgtgtgtgtgtggtccatg

SEQ ID NO: 8783 - DNA, 120 bp, Artificial Sequence
  ENSG00000007402_40 (sequence is synthesized)
cccactgctggtgccagggtgggtgtccatgtgcacccggcctggatgccagctgtgtccttcgggggcgtgcgtgtaactgtagtgtagtcaggtgctcaatggagaatataaacatat

SEQ ID NO: 8784 - DNA, 120 bp, Artificial Sequence
  ENSG00000007402_41 (sequence is synthesized)
acagaaaaatatatattttaagtttaaaaaacagaaaaacagacaaaacaatccccatcaggtagctgtctaacccccagctgggtctaatccttctcattacccacccgacctggctgc

SEQ ID NO: 8785 - DNA, 120 bp, Artificial Sequence
  ENSG00000007402_42 (sequence is synthesized)
ccctcaccttgggctgggggactggggggccatttccttttctctgccctttttttgttgttctattttgtacagacaagttggaaaaacaacagcgacaaaaaagtcaagaaactttgt

SEQ ID NO: 8786 - DNA, 80 bp, Artificial Sequence
  ENSG00000007402_43 (sequence is synthesized)
gcgcagcccgcagaggcgctgcggcccgtgcagccccggaggcccctcgcggagaaggcggcggcggaggagaggccgag

SEQ ID NO: 8787 - DNA, 120 bp, Artificial Sequence
  ENSG00000007402_44 (sequence is synthesized)
gcgaagcgagtggctgcagagggctgcatcctgccgtccccagccccccacaaccgtacagccgtgcccaggtttccgcttagggaaccaggaggtccaggccctttctgccagcagccg

SEQ ID NO: 8788 - DNA, 120 bp, Artificial Sequence
  ENSG00000007402_45 (sequence is synthesized)
cccaaatgggctcagccctggccgaaggagggacaaggaagaatcagtccccaacatgacctcaagaaaatctggtgcagagtggccacctctgtaaatcagctgatgcctgcaccactg

SEQ ID NO: 8789 - DNA, 120 bp, Artificial Sequence
  ENSG00000007402_46 (sequence is synthesized)
taaccacagctgttgacaggctgcagggcagaagctaagcaggaagaggcccagagcagagggcaagtgagcacggcagtaagaagttgaaaaccattaattgtccgtccagaggaggcg

SEQ ID NO: 8790 - DNA, 120 bp, Artificial Sequence
  ENSG00000007402_47 (sequence is synthesized)
gatgcccacaacattctgggcaaaggagatggtgtgtgcaaaagcacggaggtgtgagaatatagcatagtagacattcatcattcctttctcatgcactggagtgtctgtgcagccagg

SEQ ID NO: 8791 - DNA, 120 bp, Artificial Sequence
  ENSG00000007402_48 (sequence is synthesized)
ctgcagaaggagacgcactgtatcctgcccccgccctccccgccgcccgctccccctctgccccgcgcgccccctccgtgccgccgccgccgtccgcctccttgactccccacccatgcc

SEQ ID NO: 8792 - DNA, 120 bp, Artificial Sequence
  ENSG00000007516_0 (sequence is synthesized)
agacacgggcgaggggaggaagaaggcgcctcgggctccggtctcctgcgctcctgctgggcgccagcggctggaccttggcagccgtctgaggcttcggggagcccaaggccaccggca

SEQ ID NO: 8793 - DNA, 120 bp, Artificial Sequence
  ENSG00000007516_1 (sequence is synthesized)
gcgcttgttagaatgcagattcccggggttcgactggaatgagaccccggggagcagcgtttgcagcgggcccgccaggtgacctgcacctgggcaccgccatcggcttcgcaggggcca

SEQ ID NO: 8794 - DNA, 120 bp, Artificial Sequence
  ENSG00000007516_2 (sequence is synthesized)
tctggaggagtcggtcacccgccatgtcgaccttgctggacattaagagcagcgtgctcaggcaggtgcaggtgtgcccgtccttccgccgcaggactgagcaggacccagggagtgcca

SEQ ID NO: 8795 - DNA, 120 bp, Artificial Sequence
  ENSG00000007516_3 (sequence is synthesized)
gcgccgacccgcaggagcctgccacgggggcctggaaacccggggatggcgtggagttctttgcccacatgcgcctcatgctgaagaagggggaaggcagacagggcttgccgtgcctcg

SEQ ID NO: 8796 - DNA, 120 bp, Artificial Sequence
  ENSG00000007516_4 (sequence is synthesized)
aggtccccctgcgcagtggctcgccagcacccccggagcctgtggatcccagcctcggcctgagagccctggccccagaggaggtggagatgctctacgaggaggccctgtacacggtgc

SEQ ID NO: 8797 - DNA, 120 bp, Artificial Sequence
  ENSG00000007516_5 (sequence is synthesized)
tttaccgcgcgggtaccatgggccctgaccaggtggacgacgaggaggccctgctcagctatctccagcaggtgtttggcaccagccttgaggagcacactgaggccatcgagcgagtga

SEQ ID NO: 8798 - DNA, 120 bp, Artificial Sequence
  ENSG00000007516_6 (sequence is synthesized)
ggaaggccaaggcccccacgtatgccctgaaagtctctgtcatgcgtgccaagaaccttctggccaaggaccccaacggcttcagcgacccatactgcatgctgggcatcctgcctgcct

SEQ ID NO: 8799 - DNA, 120 bp, Artificial Sequence
  ENSG00000007516_7 (sequence is synthesized)
cggacgccacgcgggagccccgtgcacagaaggagcagcgcttcggcttccgcaagggcagcaagcgcggtggacccctgcctgccaagtgcatccaggtcaccgaggtgaagagcagca

SEQ ID NO: 8800 - DNA, 120 bp, Artificial Sequence
  ENSG00000007516_8 (sequence is synthesized)
ccctgaaccccgtctggaaggagcacttcctcttcgagattgaggatgtgagcacggaccagctgcacctggacatctgggatcatgacgacgatgtatccctggtagaagcgtgcagga

SEQ ID NO: 8801 - DNA, 120 bp, Artificial Sequence
  ENSG00000007516_9 (sequence is synthesized)
agctgaatgaagtcatcggcctgaagggcatgggcaggtacttcaaacagatcgtcaagtcagcccgcgcaaacgggacagcaggacccaccgaggaccacaccgatgacttcctggggt

SEQ ID NO: 8802 - DNA, 120 bp, Artificial Sequence
  ENSG00000007516_10 (sequence is synthesized)
gcctcaacatacctgtccgggaggtgcctgtggctggcgtcgaccgctggttcaagctggagccacgctccagtgcctcgcgtgtgcagggacactgccacctggttctcaagctgatca

SEQ ID NO: 8803 - DNA, 120 bp, Artificial Sequence
  ENSG00000007516_11 (sequence is synthesized)
ctacgcagagggatacggccatgagccagcgcgggcgatccggcttcctgtcccacctgctgctgctcagccatctgctgcggttggagcactcagcagaggagcccaactccagcagct

SEQ ID NO: 8804 - DNA, 120 bp, Artificial Sequence
  ENSG00000007516_12 (sequence is synthesized)
ggcgaggagagctcagcacaccagccgccaccatcctctgcctgcacggagcccagagcaacctgtcacccttgcagctggccgtgctgcactggcaggtcagcagccgccaccatcaaa

SEQ ID NO: 8805 - DNA, 120 bp, Artificial Sequence
  ENSG00000007516_13 (sequence is synthesized)
cctgcacgctggactacagctacctgctggggctgctggaggacatgcaggcacactgggaagaggctccttcactgccccaggagcaggaggagagcctggctgatagcctttccgcct

SEQ ID NO: 8806 - DNA, 120 bp, Artificial Sequence
  ENSG00000007516_14 (sequence is synthesized)
tctctgagttcgggctgcagctgctgcgccagctccgagactacttccctgccaccaacagcaccgctgtccaccgcctggagctgctgctgaagtgtctgggcaagctgcagctcttcc

SEQ ID NO: 8807 - DNA, 120 bp, Artificial Sequence
  ENSG00000007516_15 (sequence is synthesized)
aaccctcctttgagatctgccccttcgagtcggagctgaacatggacattgctgcggccctgaagagaggcaaccgtgagtggtacgacaggatcctgaatgacaagagtccccgagagc

SEQ ID NO: 8808 - DNA, 120 bp, Artificial Sequence
  ENSG00000007516_16 (sequence is synthesized)
agccaggaccacagcgcctgcctgggctggttgtgctggctgacgccgtctatgatgaccttcagttctgctacagtgtgtacgccagcctcttccacagcatcctcaatgtggacgtct

SEQ ID NO: 8809 - DNA, 120 bp, Artificial Sequence
  ENSG00000007516_17 (sequence is synthesized)
tcaccctgaccttccggcagctggagcgtctggtggctgaggaggcgtgggtgctgacggaggagctgagccccaagatgaccctggaggtggcctcggggctctttgagctctacctga

SEQ ID NO: 8810 - DNA, 120 bp, Artificial Sequence
  ENSG00000007516_18 (sequence is synthesized)
ccctggctgacctccagcgcttctgggatagcatccctggccgggacagccgctctctggccctggctggcatccacgcccccttcctgcctgctgtgaagctctggttccaagtgctga

SEQ ID NO: 8811 - DNA, 120 bp, Artificial Sequence
  ENSG00000007516_19 (sequence is synthesized)
ccaggagttgtgggtgcgcctggcgtggcctgaccctgcccaggctcaggggctgggcacccagcttggccaggacgtgtgtgaggccaccctcttctatacggagctgcttcggaagaa

SEQ ID NO: 8812 - DNA, 120 bp, Artificial Sequence
  ENSG00000007516_20 (sequence is synthesized)
ggtggacactcagccaggggcggccggtgaagcagtgagcgaggcgctctgcgtggtcctcaacaatgtggagctcgtgcgcaaggctgctgggcaggccttgaagggcctggcatggcc

SEQ ID NO: 8813 - DNA, 120 bp, Artificial Sequence
  ENSG00000007516_21 (sequence is synthesized)
agagggggccacggggcccgagggggtgctcccccgccctctgctcagctgcacacaggccctggacgatgatctgcaacgggaggcccacacggtgacagcgcacctgacctctaagat

SEQ ID NO: 8814 - DNA, 120 bp, Artificial Sequence
  ENSG00000007516_22 (sequence is synthesized)
ggtgggcgacatccgcaagtatgtacagcacatcagtctctcgcctgactccatccagaacgatgaggccgtggccccgctcatgaagtacctggatgagaagctggccctgctgaacgc

SEQ ID NO: 8815 - DNA, 120 bp, Artificial Sequence
  ENSG00000007516_23 (sequence is synthesized)
ctcgctggtgaaggggaacctgagcagggtgctggaggccctgtgggagctactcctccaggccattctgcaggcgctgggtgcaaaccgtgacgtctctgctgatttctacagccgctt

SEQ ID NO: 8816 - DNA, 120 bp, Artificial Sequence
  ENSG00000007516_24 (sequence is synthesized)
ccatttcacgctggaggccctggtcagttttttccacgcagagggtcagggtttgcccctggagagcctgagggatggaagctacaagaggctgaaggaggagctgcggctgcacaaatg

SEQ ID NO: 8817 - DNA, 120 bp, Artificial Sequence
  ENSG00000007516_25 (sequence is synthesized)
ttccacccgcgagtgcatcgagcagttctacctggacaagctcaaacagaggaccctggagcagaaccggtttggacgcctgagcgtccgttgccattacgaggcggctgagcagcggct

SEQ ID NO: 8818 - DNA, 120 bp, Artificial Sequence
  ENSG00000007516_26 (sequence is synthesized)
ggccgtggaggtgctgcacgccgcggacctgctccccctggacgccaacggcttaagtgacccctttgtgatcgtggagctgggcccaccgcatctctttccactggtccgcagccagag

SEQ ID NO: 8819 - DNA, 120 bp, Artificial Sequence
  ENSG00000007516_27 (sequence is synthesized)
gacccaggtgaagacccggacgctgcaccctgtatacgacgaactcttctacttttccgtgcctgccgaggcgtgccgccgccgcgcggcctgtgtgttgttcaccgtcatggaccacga

SEQ ID NO: 8820 - DNA, 120 bp, Artificial Sequence
  ENSG00000007516_28 (sequence is synthesized)
ctggctgtccaccaacgacttcgctggggaggcggccctcggcctaggtggcgtcactggtgtcgcccggccccaggtgggcgggggtgcaagggctgggcagcctgtcaccctgcacct

SEQ ID NO: 8821 - DNA, 120 bp, Artificial Sequence
  ENSG00000007516_29 (sequence is synthesized)
gtgccggcccagagcccaggtgagatctgcgctgaggaggctggaaggccgcaccagcaaggaggcgcaggagttcgtgaagaaactcaaggagctggagaagtgcatggaggcggaccc

SEQ ID NO: 8822 - DNA, 120 bp, Artificial Sequence
  ENSG00000007516_30 (sequence is synthesized)
ctgagtccatcagctgccagccccggccctggcccccaccccaagttccctgaagcatcctccagctcactgtggccagctttgtgcaaccagggcccacggcgcccctcctgtgctgtg

SEQ ID NO: 8823 - DNA, 120 bp, Artificial Sequence
  ENSG00000007516_31 (sequence is synthesized)
acgtgtgtgtcgtggctggccccgcggcgcctaccgccctggccgtgtctgtctggtgtgtgctgtgaacccctgcacccaaccccacatctgggtggccaacttggcaggacttggcca

SEQ ID NO: 8824 - DNA, 120 bp, Artificial Sequence
  ENSG00000007516_32 (sequence is synthesized)
gcagctgcccaggacacagtgcaggccagagcgggcttgaccacctggtgggcctccctgcccgcttccttgggctccccggccctgggtgggcggtgggcagctggtctccagggactc

SEQ ID NO: 8825 - DNA, 120 bp, Artificial Sequence
  ENSG00000007516_33 (sequence is synthesized)
agtgagtggctgtgctctctgcacaacgggcaatgtgcagacgcatttttggtaatcacagctggggagtgaaaagggtgccactggcaccactgggtggatggtccagagcctccaccc

SEQ ID NO: 8826 - DNA, 120 bp, Artificial Sequence
  ENSG00000007516_34 (sequence is synthesized)
acagaggggatgcaaagggcaggtgagtcaagaaccgcataggtctccagtccccacggggctcccaggccggggaaaggttcccctgaggtcactctgaggccagggacgtcacccaag

SEQ ID NO: 8827 - DNA, 120 bp, Artificial Sequence
  ENSG00000007516_35 (sequence is synthesized)
gctggtggtcagtgtgaagggctccgtgccaactggtcagctgtccttcacgcacatatccgtggccacctgagacctgctccacgacccttccaggcagagccgagagttcgccccaac

SEQ ID NO: 8828 - DNA, 120 bp, Artificial Sequence
  ENSG00000007516_36 (sequence is synthesized)
ccttccccaggcccagtgtgaaaaacagactcacaaggggcttcttggcctgcagcttcatttgcgagagcgccgaggcaggacacagagcacagctgtgctggaagtgtggggagaacc

SEQ ID NO: 8829 - DNA, 120 bp, Artificial Sequence
  ENSG00000007516_37 (sequence is synthesized)
cggacagctcagtcctgccagcagccgcaaagagccgaggctgccaggcccatttatgtccctcatgtctctagattttctcgtcacccagcctcaaaaatatatgtgtctgcaaccctc

SEQ ID NO: 8830 - DNA, 120 bp, Artificial Sequence
  ENSG00000007516_38 (sequence is synthesized)
actggcttcgggggacagcagggggagcagcctcttccacccagcaagggaggggaagggggcttgtgactcccaggcccctgaggatttcacgactggctgtgggggtgacagcttcca

SEQ ID NO: 8831 - DNA, 120 bp, Artificial Sequence
  ENSG00000007516_39 (sequence is synthesized)
agtcagaccccgcccccgcagcggcgtccgcccagcagttgctcagtcgtcggcgcgcgcggctgggagcggtagctgtgcctcggcgtccccgagctggtgccgagcgcagcgccccag

SEQ ID NO: 8832 - DNA, 120 bp, Artificial Sequence
  ENSG00000007516_40 (sequence is synthesized)
ggggcagtcgtctgcagcggctgctccctcagccgtttagaggcacctactgtgtgcacagggtctggtgatggcagagagccagggtgagtgggtgggtgagtgaggagcggaggggct

SEQ ID NO: 8833 - DNA, 120 bp, Artificial Sequence
  ENSG00000007516_41 (sequence is synthesized)
gaacctgagcaggtgcgggcgggtggggtgggatgggctgggctggcccgtggtcactgaggccgccctgcagggtgccggaggccctgtgggagctactcctccaggccattctgcagg

SEQ ID NO: 8834 - DNA, 120 bp, Artificial Sequence
  ENSG00000007516_42 (sequence is synthesized)
gagtcctccccgccggcccccgcctcagggctgctctgatccctccctttgtccccactggcctgcctggtctcctgtggctggagagcagccactccagggctgtccacagcgcctcct

SEQ ID NO: 8835 - DNA, 120 bp, Artificial Sequence
  ENSG00000007516_43 (sequence is synthesized)
gggctggtgacacttagagaagggcctggggagtgtcccagccttcaaggggcagggcactgcctggagaagctcctgcttttgggcctccactgagtgcgcttgtcaccctcattcccc

SEQ ID NO: 8836 - DNA, 120 bp, Artificial Sequence
  ENSG00000007516_44 (sequence is synthesized)
ccagcctcccccgcctccccagcaaccccagcctccccagcaacccccagcctcctccgcctccccagcctccccctcaaccccagcctccccggcctcctccgcaaccccagcctcccc

SEQ ID NO: 8837 - DNA, 120 bp, Artificial Sequence
  ENSG00000007516_45 (sequence is synthesized)
agcaaccccagcctccccagcaaccccagcctcctcagcaaccccagcctcccccgcaaccccagcctcctcagcaaccccagcctcccccacaaccccagcctccccggcctcctccgc

SEQ ID NO: 8838 - DNA, 120 bp, Artificial Sequence
  ENSG00000007516_46 (sequence is synthesized)
cccgcctcccccacctccccagcctcccctgcctccccagcaaacccagcctcccctgcctccctagctggagcccgtggacgcctcctccaggcacagcagctccgcagccactgctgg

SEQ ID NO: 8839 - DNA, 80 bp, Artificial Sequence
  ENSG00000007520_0 (sequence is synthesized)
agccgcacagcccattgggaggccgaggggcgcggccgtggggtggggagtccccggcaccccaggtccgcgccatgggc

SEQ ID NO: 8840 - DNA, 80 bp, Artificial Sequence
  ENSG00000007520_1 (sequence is synthesized)
gccctcggcacctcccgacgcgctccctggaggccttcgccgaggaggtcggcgccgcgctgcaggcttccgtggagcca

SEQ ID NO: 8841 - DNA, 120 bp, Artificial Sequence
  ENSG00000007520_2 (sequence is synthesized)
tgccctgcacgctggccatgtgggagttgggccactgcgacccccggcgctgcacgggccgcaagctggcccgcctggggctggtgcgctgcctgcgcctgggccacagattcggcggtc

SEQ ID NO: 8842 - DNA, 120 bp, Artificial Sequence
  ENSG00000007520_3 (sequence is synthesized)
tggtgctgagccccgtgggcaagcagtacgcgtcccccgcagacagacagctggtggcgcagtctggggtcgccgtcatcgactgctcctgggccaggctggacgagacaccgtttggga

SEQ ID NO: 8843 - DNA, 120 bp, Artificial Sequence
  ENSG00000007520_4 (sequence is synthesized)
agatgcgagggagccacttgcgcctgttgccctacctggtggccgccaaccccgtgaactatggccggccctacagactttcctgcgtggaagcgtttgctgccaccttctgcatcgtag

SEQ ID NO: 8844 - DNA, 120 bp, Artificial Sequence
  ENSG00000007520_5 (sequence is synthesized)
ccttgctgtcattttgctgcggaagtttaaatggggcaagggcttcttggacctgaaccgccagctcctggacaagtacgcggcctgcggcagcccggaggaggtgctgcaggcggagca

SEQ ID NO: 8845 - DNA, 120 bp, Artificial Sequence
  ENSG00000007520_6 (sequence is synthesized)
ggagttcttggccaatgccaaggagagcccccaggaggaggagatcgatcccttcgatgtggattcagggagagagtttggaaaccccaacaggcctgtggccagcacccggctgccctc

SEQ ID NO: 8846 - DNA, 120 bp, Artificial Sequence
  ENSG00000007520_7 (sequence is synthesized)
ggacactgatgacagtgatgcgtctgaggacccagggcctggcgccgagcgcggaggagccagcagcagctgctgtgaagaggagcagacgcagggacggggggctgaggccagggcccc

SEQ ID NO: 8847 - DNA, 120 bp, Artificial Sequence
  ENSG00000007520_8 (sequence is synthesized)
ggctgaggtttggaaaggaatcaagaaacggcagagagactgagggttgcagacacatatatttttgaggctgggtgacgagaaaatctagagacatgagggacataaatgggcctggca

SEQ ID NO: 8848 - DNA, 120 bp, Artificial Sequence
  ENSG00000007520_9 (sequence is synthesized)
gcctcggctctttgcggctgctggcaggactgagctgtccgggttctccccacacttccagcacagctgtgctctgtgtcctgcctcggcgctctcgcaaatgaagctgcaggccaagaa

SEQ ID NO: 8849 - DNA, 120 bp, Artificial Sequence
  ENSG00000007541_0 (sequence is synthesized)
gtctgcccgggcccgcccatcggggtccccaaccccatccggaccccgccgcccgagcgcgcggccccggaagcacccgcctcccggcatggtgctcaaggccttcttccccacgtgctg

SEQ ID NO: 8850 - DNA, 120 bp, Artificial Sequence
  ENSG00000007541_1 (sequence is synthesized)
cgtctcgacggacagcgggctgctggtgggacggtgggtgccggagcagagcagcgccgtggtcctggcggtcctgcactttcccttcatccccatccaggtcaagcagctcctggccca

SEQ ID NO: 8851 - DNA, 120 bp, Artificial Sequence
  ENSG00000007541_2 (sequence is synthesized)
ggtgcggcaggccagccaggtgggcgtggccgtgctgggcacctggtgccactgccggcaggagcccgaggagagcctgggccgcttcctggagagcctgggtgctgtcttcccccatga

SEQ ID NO: 8852 - DNA, 120 bp, Artificial Sequence
  ENSG00000007541_3 (sequence is synthesized)
gccctggctgcggctgtgccgggagagaggcggcacgttctggagctgcgaggccacccaccggcaagcgcccactgcccccggtgcccctggtgaggaccaggtcatgctcatcttcta

SEQ ID NO: 8853 - DNA, 120 bp, Artificial Sequence
  ENSG00000007541_4 (sequence is synthesized)
tgaccagcgccaggtgttgctgtcacagctacacctgcccaccgtcctgcccgaccgccaggctggagccaccactgccagcacggggggcctggctgccgtcttcgacacggtagcacg

SEQ ID NO: 8854 - DNA, 120 bp, Artificial Sequence
  ENSG00000007541_5 (sequence is synthesized)
cagtgaggtgctcttccgcagtgaccgctttgatgagggccccgtgcggctgagccactggcagtcggagggcgtggaggccagcatcctcgcggagctggccaggcgagcctcgggacc

SEQ ID NO: 8855 - DNA, 120 bp, Artificial Sequence
  ENSG00000007541_6 (sequence is synthesized)
catttgcctgctgttggccagcctgctgtcgctggtctcagctgtcagtgcctgccgagtgttcaagctctggcccctgtccttcctcgggagcaaactctccacgtgcgaacagctccg

SEQ ID NO: 8856 - DNA, 120 bp, Artificial Sequence
  ENSG00000007541_7 (sequence is synthesized)
gcaccggctggagcacctcacgctaatcttcagtacacggaaggcggagaaccctgcccagctgatgaggaaggccaacacggtggcctctgtgctgctggacgtggccctgggcctcat

SEQ ID NO: 8857 - DNA, 120 bp, Artificial Sequence
  ENSG00000007541_8 (sequence is synthesized)
gctgctgtcctggctccacgggagaagccgcatcgggcatctggccgacgccctcgttcctgtggctgaccacgtggccgaggagctccagcatctgctgcagtggctgatgggtgctcc

SEQ ID NO: 8858 - DNA, 120 bp, Artificial Sequence
  ENSG00000007541_9 (sequence is synthesized)
cgccgggctcaagatgaaccgtgcactggaccaggtgctgggccgcttcttcctctaccacatccacctgtggatcagctacatccacctcatgtcccccttcgtggagcacatcctttg

SEQ ID NO: 8859 - DNA, 120 bp, Artificial Sequence
  ENSG00000007541_10 (sequence is synthesized)
gcacgtgggcctctcggcctgcctgggcctgacggtggccctgtccctcctctcggacattatcgccctcctcaccttccacatctactgcttttacgtctatggagccaggctgtactg

SEQ ID NO: 8860 - DNA, 120 bp, Artificial Sequence
  ENSG00000007541_11 (sequence is synthesized)
cctatgacctggaccagctgttcatcgggactctgctcttcaccatcctgctcttcctcctgcctaccacagccctgtactacctggtgttcaccctgctccggctcctggtggtcgccg

SEQ ID NO: 8861 - DNA, 120 bp, Artificial Sequence
  ENSG00000007541_12 (sequence is synthesized)
tgcagggcctgatccatctgctcgtggacctcatcaactccctgccgctgtactcactgggtcttcggctctgccggccctacaggctggcggataaacccactgccctacagccgcgtg

SEQ ID NO: 8862 - DNA, 120 bp, Artificial Sequence
  ENSG00000007541_13 (sequence is synthesized)
gtgcacacctaccgcctccccagctgtggctgccaccccaagcactcctggggcgccctgtgccgcaagctgttccttggggagctcatctacccctggaggcagagaggggacaagcag

SEQ ID NO: 8863 - DNA, 120 bp, Artificial Sequence
  ENSG00000007541_14 (sequence is synthesized)
gactgagggaactgctggctcgcctggcaccaccacacggccacagccagccatctgctctgccagggtggcaccagctcagctggcgcatgtcctgtgctttgtggacgctgctgtgtg

SEQ ID NO: 8864 - DNA, 120 bp, Artificial Sequence
  ENSG00000007541_15 (sequence is synthesized)
ctcctgaacacggcaggccctgctatcacaccttgggcttggaggtcattgggagtgagcagatgtgggggtggccagccaggctggccgcactccatcactggcactgcctgccttggg

SEQ ID NO: 8865 - DNA, 120 bp, Artificial Sequence
  ENSG00000007541_16 (sequence is synthesized)
acccgcttcccacctgctgcggtcaccatggtggcgagcacagcaaccccaggtgtccagagcactgccccatgcccaccctgtgtacccaggtccagagggtccgtccaccacagcagc

SEQ ID NO: 8866 - DNA, 120 bp, Artificial Sequence
  ENSG00000007541_17 (sequence is synthesized)
cccaggtggagggctggtctccctgggggctccccagtggctctgccctggctgtgggggtggagggaccttgccaggatgaaccccccagtcccaggcaccctctagctccctcagccg

SEQ ID NO: 8867 - DNA, 120 bp, Artificial Sequence
  ENSG00000007541_18 (sequence is synthesized)
aacagcaccctgcatctgggggattgaagcagtcgctgacccccgtccccagcgggcccgggccctcactccctgaaccacacggggtttatttgcggatgttccctggagaggtcgctt

SEQ ID NO: 8868 - DNA, 120 bp, Artificial Sequence
  ENSG00000007541_19 (sequence is synthesized)
tgtgaagaaaccatcagcaggctgtgagcatcgccaggctgctgtgggggcgggagcagcctcagtgtcaagggcccgcccactgacccagccgtacctattcgtccacggtgccccgta

SEQ ID NO: 8869 - DNA, 120 bp, Artificial Sequence
  ENSG00000007541_20 (sequence is synthesized)
gcagcaggtcctgcggccaaatctgtctcccttcatgggcctcccagggaaggaggaagccctgctgtgcagacacctctgtggccccccaggagtgtgagtggcctggggagggggccg

SEQ ID NO: 8870 - DNA, 120 bp, Artificial Sequence
  ENSG00000007541_21 (sequence is synthesized)
tggcactgaggccgaaagtgcctgccagacggcacggtctgggtgcgggtgttccctgtgagcccgagtccgcttcaggaggggagcctgcaggtgccggctggtgaggggatgacgcgc

SEQ ID NO: 8871 - DNA, 120 bp, Artificial Sequence
  ENSG00000007541_22 (sequence is synthesized)
tgtgggtgggaggaggcagcgcccatctcagcagcaccaggactgcctgggactccctggcaacccagcaccggggaagccgtcagctgctgtgacaataaaacctgccccgtgtctgga

SEQ ID NO: 8872 - DNA, 120 bp, Artificial Sequence
  ENSG00000007541_23 (sequence is synthesized)
ctagtttccaacaacagaggctgcagccacccagccccgaagcagggcccagcgagacagggcccagtggggccttattctctctcttgcagccccaagcgtgacccagctgcagagaag

SEQ ID NO: 8873 - DNA, 88 bp, Artificial Sequence
  ENSG00000007541_24 (sequence is synthesized)
aaccccatccggaccccgccgcccgagcgcgcggccccggaagcacccgtagagacttggtttcacccccatcgaggctggtcttaag

SEQ ID NO: 8874 - DNA, 120 bp, Artificial Sequence
  ENSG00000007541_25 (sequence is synthesized)
gtgctctgtgtggcttctgccagcgctgcctgggagcagtcagctgtggggcgggctgtctcctgctgcaggccacgtgggtggcctttcaggaccctctgggcagtgagtgctgcgctc

SEQ ID NO: 8875 - DNA, 120 bp, Artificial Sequence
  ENSG00000007541_26 (sequence is synthesized)
tggagtgggcgaggccctatcctggccagtaagacaccctcactgccctggagcacgcagctgggtgcgtggtggaaggaccccacggcaggtggggtcacgcaagaggcctcccctggt

SEQ ID NO: 8876 - DNA, 120 bp, Artificial Sequence
  ENSG00000007541_27 (sequence is synthesized)
gcctggcactggggcagacagtgggaggtgagcagaaccacctccagcacctgcttgattcccaggcctcgatcccctctgcatgtgaggctgtggggaggcacctctgacctggtgaga

SEQ ID NO: 8877 - DNA, 120 bp, Artificial Sequence
  ENSG00000007541_28 (sequence is synthesized)
gggccgggtgctccgcctccagctttgctccagagcaaggcccaatggcagactccgtgccctgctcagggtggggtccctgctctccccaggaccctgcagcctctgggcccccttcat

SEQ ID NO: 8878 - DNA, 120 bp, Artificial Sequence
  ENSG00000007541_29 (sequence is synthesized)
cctggagacctgaggccacaggcctttgttcttctgccttgggattttctgggcttgggagtctgaactgcaggccaggggccaagcgcggcaaagtcagaggcactaggagccagcagg

SEQ ID NO: 8879 - DNA, 120 bp, Artificial Sequence
  ENSG00000007541_30 (sequence is synthesized)
gcggccaccatccactggcgtgaagttccgtgtcctccggcacgaggccggcaggcccctccgcctcctgatgcagggcctgaggacactggtgtggtcctgtggatggggcccattctg

SEQ ID NO: 8880 - DNA, 120 bp, Artificial Sequence
  ENSG00000007541_31 (sequence is synthesized)
ccctgtgtcggaggcgcccttggctggctggggctgccctgggccccacagggctcaagttctgggtggaacagaaccgactgagtgagtcctggggtggggtgtgcgtccctgtggcac

SEQ ID NO: 8881 - DNA, 120 bp, Artificial Sequence
  ENSG00000007541_32 (sequence is synthesized)
agaggacttacaggtcacaccaccccgacgtgtgcatcctgctctgttccctcgtccctaaggatgtggtgggctctgagacctccaggcatcctgcctcccggcatggtgctcaaggcc

SEQ ID NO: 8882 - DNA, 120 bp, Artificial Sequence
  ENSG00000007541_33 (sequence is synthesized)
ggtgggagcccatcacgaaagagcctggggagatgcaggtgctgagcctggctgcccccgccccagcgtggcccctgtgtccctgcagcacgtggccgaggagctccagcatctgctgca

SEQ ID NO: 8883 - DNA, 120 bp, Artificial Sequence
  ENSG00000007541_34 (sequence is synthesized)
cagggaccccagagcttgctgaagagggtagggacccagccagaccccgccccctgtgcccccaactctgctccccagcgtcctgtgtgtgtgaggcctgctgtgctcagctgagggctg

SEQ ID NO: 8884 - DNA, 120 bp, Artificial Sequence
  ENSG00000007541_35 (sequence is synthesized)
gggcctgggcacctcccgagggctgaccccaccctgccaggctacacgcacctcatgtcctgtgtgtgtgagggttgtgctgggccgagggctggggtctgagcgcctcctgagggccta

SEQ ID NO: 8885 - DNA, 120 bp, Artificial Sequence
  ENSG00000007541_36 (sequence is synthesized)
cgggggcggggcggggcggggcggggccgggcccgacagcactgcgtcctgtaggctgtactgcctgaagatccatggcctgtcctcactgtggcgtctgttccgggggaagaagtggaa

SEQ ID NO: 8886 - DNA, 120 bp, Artificial Sequence
  ENSG00000007541_37 (sequence is synthesized)
ggaacgttctgcgccagcgcgtggactcctgttcctatgacctggaccaggtatggggcagggttcgtggctggaggggctgactgcctccggcctgtgcccgctgggccagcgcggtgc

SEQ ID NO: 8887 - DNA, 120 bp, Artificial Sequence
  ENSG00000007541_38 (sequence is synthesized)
tgtgggctgcacgtggggctctgaagcagcgcagagcttccctgggccacagagaagagacagacacacagccccgaaggtggtgcaggcacaggccctagaggtgccccgggcccagag

SEQ ID NO: 8888 - DNA, 120 bp, Artificial Sequence
  ENSG00000007541_39 (sequence is synthesized)
tgccccgggcccggagactagaggtgcccgggctcggagactagagttgcccgggcccgtctgctgctcacacttgccgcagccgctggatgctgccatgcagagcatgttcttggtgac

SEQ ID NO: 8889 - DNA, 120 bp, Artificial Sequence
  ENSG00000007541_40 (sequence is synthesized)
ttggtgactgtgtggccacgcaccgtcttgggtggtctggcccccacctgtctccctgcgagtcccctagtccgtggggtgtgggtggacagccctcctgctactgggactgcttctgag

SEQ ID NO: 8890 - DNA, 120 bp, Artificial Sequence
  ENSG00000007541_41 (sequence is synthesized)
caggccatcccgagttccctcaggaagccgcaaggtcccgactgcagctccgggatgggggagggcacagtgctgggccgtccctgggcgcggggtcctgctgatgcccggtgtgctggc

SEQ ID NO: 8891 - DNA, 120 bp, Artificial Sequence
  ENSG00000007541_42 (sequence is synthesized)
ccctccctacagctgttcatcgggactctgctcttcaccatcctgctcttcctcctgcctaccacagccctgtactacctggtgttcaccctggaccctgcagcctctgggcccccttca

SEQ ID NO: 8892 - DNA, 120 bp, Artificial Sequence
  ENSG00000007541_43 (sequence is synthesized)
cacttcctccagttctagtttccaacaacagaggctgcagccacccagccccgaagcagggcccagcgagacagggcccagccccaagcgtgacccagctgcagagaagctgagacggtg

SEQ ID NO: 8893 - DNA, 120 bp, Artificial Sequence
  ENSG00000007541_44 (sequence is synthesized)
ctgtctcgctcacctgtggtcatcccgggcagcccccagcctctgcgatggggtggggcctctggaggggactgtgtcagctgtgggcttccctgcagggctggagccgaatcagggtct

SEQ ID NO: 8894 - DNA, 120 bp, Artificial Sequence
  ENSG00000007541_45 (sequence is synthesized)
gccaggcctcagtgcgtccacgtgtttggggccgagggctccagtgggtcctgtggccgaggtagtgagaggggaggaagatggtagaggtgggtgcaggcagggggccacgcggatgcc

SEQ ID NO: 8895 - DNA, 120 bp, Artificial Sequence
  ENSG00000007541_46 (sequence is synthesized)
cccggtgtcccgggtgggcgtggggacccctcctgggcagcagagccttcccgggccagagccaccgccccacaaagccagttctaccttctccatgctctggagacacggccctcccct

SEQ ID NO: 8896 - DNA, 120 bp, Artificial Sequence
  ENSG00000007541_47 (sequence is synthesized)
gaaccagaagcaggaactccaggggcgctggggcctgggcagggcaggcctcgcaggtacacccccctttccttctgaaggggctgtgtgcaggagccagccgggctgaggctctgggga

SEQ ID NO: 8897 - DNA, 120 bp, Artificial Sequence
  ENSG00000007541_48 (sequence is synthesized)
gcccgcctctccctgtgggcccagcgtcctggtatctcccttgtggtccctgagatcagcgttgccctcctggctctctggggccctctgcagagccagggtcatgaaacctttcctgtc

SEQ ID NO: 8898 - DNA, 120 bp, Artificial Sequence
  ENSG00000007541_49 (sequence is synthesized)
cagggaggcccatgtgcagcccagctgggacttcctgccctgcccctgtgctgattctgtaactcctgtgctgagagccagaggcacagcttgtctcccatctcccaccttccctgcatg

SEQ ID NO: 8899 - DNA, 120 bp, Artificial Sequence
  ENSG00000007541_50 (sequence is synthesized)
gtctgtgccccgtttccagccgggtgcagccccctcctctgcagatctagtgcatttccatgctgcctctgggccttcagcttctctgtcttcctccctcagcaccaaagccccgtctct

SEQ ID NO: 8900 - DNA, 120 bp, Artificial Sequence
  ENSG00000007541_51 (sequence is synthesized)
tccattaggagcttgtcttcctgctgggggtggtacctgactctttggcccaccctcgggcctctgtggaggcctccttgaggcctgactgggtgggtcttgtgtgggctgcaggtgtgc

SEQ ID NO: 8901 - DNA, 120 bp, Artificial Sequence
  ENSG00000007541_52 (sequence is synthesized)
actgggcctgcttgtggccaggccaggcctctgggggcagcatcaggcacgtctgtgtggctgtgggggtgcagggagctccagcccagaaggaaggaggggcggggctggggaaggggc

SEQ ID NO: 8902 - DNA, 120 bp, Artificial Sequence
  ENSG00000007541_53 (sequence is synthesized)
tcggcagctttgcctgtggtcgtccgcacctgccaccggcctactttgtcctagacctcccttttgcaaaagtgctcagaaatataaatatttaatttaaaaatgaaagtctcttcctgc

SEQ ID NO: 8903 - DNA, 120 bp, Artificial Sequence
  ENSG00000007541_54 (sequence is synthesized)
ggcctgtcctcactgtggcgtctgttccgggggaagaagtggaacgttctgcgccagcgcgtggactcctgttcctatgacctggaccagctccggctcctggtggtcgccgtgcagggc

SEQ ID NO: 8904 - DNA, 120 bp, Artificial Sequence
  ENSG00000007541_55 (sequence is synthesized)
ggcgtgagccaccgtgcctggctgcaggaggctttgatgccggcctggcagccagctccaggagttgggcgacggagggggcggggagagcttcgtgggtggccacggccagcagcaccc

SEQ ID NO: 8905 - DNA, 120 bp, Artificial Sequence
  ENSG00000007541_56 (sequence is synthesized)
agcttcgtgggtggccacggccagcagcacccgggtgcccctcagagaggaaggtacctgcagcctctgctcatgtgtggggccagcccccacgcgtcccctcgtcagccgcttgctatc

SEQ ID NO: 8906 - DNA, 120 bp, Artificial Sequence
  ENSG00000007541_57 (sequence is synthesized)
cggagaaccctgcccagctgatgaggtgtgggcctgccctggtctctgcagggctgggtgcgtgccctctggccccttctccatccccctctgcaccacgctgacccctccggccaggca

SEQ ID NO: 8907 - DNA, 120 bp, Artificial Sequence
  ENSG00000007541_58 (sequence is synthesized)
tgtcttcccccatgagccctggctgcggctgtgccgggagagaggcggcacgttctggagctgcgaggccacccaccggcaagcgcccactgcccccggtgcccctgagtgttcaagctc

SEQ ID NO: 8908 - DNA, 120 bp, Artificial Sequence
  ENSG00000007545_0 (sequence is synthesized)
atgacagtgaagttgggcgacggcggcagcggggaggacgggctcaagaagctgggcaagcgggcggccgatgaggagtccctggaaggagaaggggccggcggcgcagacgcggccgag

SEQ ID NO: 8909 - DNA, 80 bp, Artificial Sequence
  ENSG00000007545_1 (sequence is synthesized)
cgaggagagcagcggcacaaagagggacgagaagaccccccgggccggcgccgacggcccccccgcgccccccggcgcgc

SEQ ID NO: 8910 - DNA, 120 bp, Artificial Sequence
  ENSG00000007545_2 (sequence is synthesized)
cacttcctccggtccagcgtgcggccgcagagcaagaggcccaggaaggatcctccgagcgctgtggggagcggcaacgccggtggctcggggccccgcggaaaaggagctgaaggtggt

SEQ ID NO: 8911 - DNA, 120 bp, Artificial Sequence
  ENSG00000007545_3 (sequence is synthesized)
ggatcatcgtctggaaatgtgtctggggttgcccctgctgcccctgcagggggctcgcgctcctcctcccggaacttagggtcttctggtggcgagaaggaagaaggcaaaaaggtccgg

SEQ ID NO: 8912 - DNA, 120 bp, Artificial Sequence
  ENSG00000007545_4 (sequence is synthesized)
cggcagtgggagtcgtggagcacagaggacaagaacaccttcttcgaggggctgtacgagcatgggaaagactttgaagcgattcagaacaacattgcgctgaagtacaagaagaaaggc

SEQ ID NO: 8913 - DNA, 120 bp, Artificial Sequence
  ENSG00000007545_5 (sequence is synthesized)
aagccagcaagcatggtgaagaacaaggagcaggtccgccacttctactaccgcacctggcacaagatcaccaagtacatcgactttgatcatgtgttctctcgaggcctgaagaagtca

SEQ ID NO: 8914 - DNA, 120 bp, Artificial Sequence
  ENSG00000007545_6 (sequence is synthesized)
tcccaggaactgtatggcctgatctgctatggcgagctgcgcaagaagattgggggctgtatggatgacaagaatgcaacaaagctgaatgaactcattcaggttggggccaccactgta

SEQ ID NO: 8915 - DNA, 120 bp, Artificial Sequence
  ENSG00000007545_7 (sequence is synthesized)
cgttacaaagggcggaacctgcggatcaaagcgcccatgtgccgggccctgaagaagctgtgcgatccagatggcttgagtgatgaagaggaccagaagccagtgcgcctgcctctgaaa

SEQ ID NO: 8916 - DNA, 120 bp, Artificial Sequence
  ENSG00000007545_8 (sequence is synthesized)
gtccctatagagctacagccgcggaacaaccacgcctgggcccgtgtgcagagccttgcccagaacccacgcctcaggatgatcgtggagctacatcgaaaggtctccagcctcatcgaa

SEQ ID NO: 8917 - DNA, 120 bp, Artificial Sequence
  ENSG00000007545_9 (sequence is synthesized)
ttcttgaagcagaagtgggcgctccatgaggtgcgagttcggaagacactcgaggagcggcagctgcaggactcatgctccgcaccgatgcaggagaaggtgacactgcacttgttccca

SEQ ID NO: 8918 - DNA, 120 bp, Artificial Sequence
  ENSG00000007545_10 (sequence is synthesized)
ggcgagaactgtacactgacaccgctgccgggcgtggctcgcgtggtgcactccaaggccttctgcacagtgcactggcaggagggcggccggtgcaagcagagtgccaaggacgcccac

SEQ ID NO: 8919 - DNA, 120 bp, Artificial Sequence
  ENSG00000007545_11 (sequence is synthesized)
gtgctgcccccagcccagatcctgggcatccagagtgggcagggcacggcccggggccaggtgaaatgcccgcggagcggagctgagggcaagggtgtggggcggccccctcctgcggct

SEQ ID NO: 8920 - DNA, 120 bp, Artificial Sequence
  ENSG00000007545_12 (sequence is synthesized)
gacgccttgcagagctccggagagagttcccccgaaagcgcccccggggagggggctgccctaagcttgagcagcccggacgctcctgacaggcctcctcccaggcaccaggacactggg

SEQ ID NO: 8921 - DNA, 120 bp, Artificial Sequence
  ENSG00000007545_13 (sequence is synthesized)
ccatgtcttgagaagacccctgcagaaggcagggacagtcccacccgggagccaggggccttgccgtgtgcctgtggccagctcccagacctggaggacgagctctcgcttctagacccc

SEQ ID NO: 8922 - DNA, 120 bp, Artificial Sequence
  ENSG00000007545_14 (sequence is synthesized)
ttgccccgctacctaaagtcctgtcaggacctcattgtccccgagcagtgccgctgtgcggacacacggcctgggagcgagcagccccctctgggcggggcggcctccccagaggtgctg

SEQ ID NO: 8923 - DNA, 120 bp, Artificial Sequence
  ENSG00000007545_15 (sequence is synthesized)
gctcctgtcagcaaggaggctgctgaccttgctcccactggcccatccccgaggcccggccccgggctcctgctggatgtttgcactaaagacttggcagatgcacctgcggaggagctc

SEQ ID NO: 8924 - DNA, 120 bp, Artificial Sequence
  ENSG00000007545_16 (sequence is synthesized)
caggagaaggggagccccgcggggcctccgccgtctcagggacagcctgccgccaggcccccgaaggaggtccccgccagccggctggctcagcagctccgtgaggagggctggaacctg

SEQ ID NO: 8925 - DNA, 120 bp, Artificial Sequence
  ENSG00000007545_17 (sequence is synthesized)
cagacctccgaaagcctcacgctggccgaagtctacctcatgatgggcaagcccagcaagctgcagctggagtacgactggctggggcccggccgccaggacccccgccccggctcccta

SEQ ID NO: 8926 - DNA, 120 bp, Artificial Sequence
  ENSG00000007545_18 (sequence is synthesized)
cccaccgccctccacaagcagcgcctcctcagctgcctcctgaagctcatttccaccgaggtcaaccccaagctggctctggaagcaaacaccatctctacagcctcagtaaggcccgcc

SEQ ID NO: 8927 - DNA, 120 bp, Artificial Sequence
  ENSG00000007545_19 (sequence is synthesized)
caggaggagcagtcgatgacgcccccagggaaggtggtgaccgtcagctctcgcagcccccgctgccctcggaaccaggcctccctccgcagcagcaagaccttcccgcccagctctgca

SEQ ID NO: 8928 - DNA, 120 bp, Artificial Sequence
  ENSG00000007545_20 (sequence is synthesized)
ccctgctcctcaggtttgagaaaccctccaagacccctcttggtgcctggtccctccagcacaggaagcaatgactcagatggaggcctttttgctgtcccgacaaccttgccacccaac

SEQ ID NO: 8929 - DNA, 120 bp, Artificial Sequence
  ENSG00000007545_21 (sequence is synthesized)
agccgacacgggaagctcttctctcccagtaaagaagcagagctgactttccgccagcatctgaactccatcagtatgcagtcggatttcttcctgccaaagccccggaagctgcggaac

SEQ ID NO: 8930 - DNA, 120 bp, Artificial Sequence
  ENSG00000007545_22 (sequence is synthesized)
cggcacctgcggaagccactggtggtccagagaacactgctccctagaccatcggaaaaccagtcccacaacgtttgttccttctccatcctgtctaactcttccgtaactgggagaggt

SEQ ID NO: 8931 - DNA, 120 bp, Artificial Sequence
  ENSG00000007545_23 (sequence is synthesized)
tcgttccggcccatccagtcttctctgaccaaagcagctctgtctcggccgatcgtgcccaaggtccttccaccccaggccacgagtcacctggccagtgctatcgacttagcagctaca

SEQ ID NO: 8932 - DNA, 120 bp, Artificial Sequence
  ENSG00000007545_24 (sequence is synthesized)
agtgccggcatcctttccgggaaccccctccctgccttggacaccgagggcttgtctggcatctctccactgtcttcagacgaggtgacgggtgccatctcggggcaggactctactgga

SEQ ID NO: 8933 - DNA, 120 bp, Artificial Sequence
  ENSG00000007545_25 (sequence is synthesized)
actcaccaggatggagacaccctccccaccgtggggggctccgacccatttgtcagcatcccttcgaggcctgagcaggagccagtggcagacagtttccagggctcatctgttctctcc

SEQ ID NO: 8934 - DNA, 120 bp, Artificial Sequence
  ENSG00000007545_26 (sequence is synthesized)
ttatctgagctgcccaaggcccctctccagaatggcctctccataccgctgtcctcgtcagagagctccagcacccggctgtctccaccagacgtctctgctctgctcgacatctccctg

SEQ ID NO: 8935 - DNA, 120 bp, Artificial Sequence
  ENSG00000007545_27 (sequence is synthesized)
cccggcccacctgaggatgcgctgtcacagggcgagcctgccacacacattagcgactccatcattgagatcgccatcagctccggtcagtacggtgaaggagtccctctttctccagca

SEQ ID NO: 8936 - DNA, 120 bp, Artificial Sequence
  ENSG00000007545_28 (sequence is synthesized)
aaactgaatggcagtgacagttccaagagccttccctccccgtccagcagcccccagccacactggatcgcctctcccacccacgacccccagtggtaccccagtgactccaccgactcc

SEQ ID NO: 8937 - DNA, 120 bp, Artificial Sequence
  ENSG00000007545_29 (sequence is synthesized)
tcgctcagcagcctgtttgcaagcttcatctccccagagaagagccggaagatgttgccgactcccattgggaccaacagtggcacttccttgcttggccccagcttgttggatggaaac

SEQ ID NO: 8938 - DNA, 120 bp, Artificial Sequence
  ENSG00000007545_30 (sequence is synthesized)
tcgcgggactcatttgtgtccaggtccctggctgacgttgcagaggttgtggattcccagctggtgtgcatgatgaacgaaaacagcattgattacatttctcggttcaatgacctggcc

SEQ ID NO: 8939 - DNA, 120 bp, Artificial Sequence
  ENSG00000007545_31 (sequence is synthesized)
gaagccctcttcgagctagagaaaaatagataagcccagcagccccagaagatggtctgaacagaggcatctccgcacccaagactgtgcaacgggcaggaacgtggtcacagagctgct

SEQ ID NO: 8940 - DNA, 120 bp, Artificial Sequence
  ENSG00000007545_32 (sequence is synthesized)
tccccacgagcagcaggcaacggcgtccaaggagactaggatgagttcttggcaagggccagcgttagaaatcactgtggtactagagccgttcttcaccacgcctgggcccatgttagg

SEQ ID NO: 8941 - DNA, 120 bp, Artificial Sequence
  ENSG00000007545_33 (sequence is synthesized)
gtctgcataatgatcccatttcagcctgtgctctgcctcgattgttgtgttggacattccggtggcatttccttctgagacaagggagtatgtgtgccttggtgtagttgctgtgcacta

SEQ ID NO: 8942 - DNA, 120 bp, Artificial Sequence
  ENSG00000007545_34 (sequence is synthesized)
ggagctgtgatctccctctctgcagggaggccccagcccctgctgcttgctttctgccaaacctgtgctatgcatcagctgtgccctctgtggactgtaacgggcaggacagttgggtgt

SEQ ID NO: 8943 - DNA, 120 bp, Artificial Sequence
  ENSG00000007545_35 (sequence is synthesized)
ggcctgggctcatgcctggtggtgtcacatcccaaggcagcaagagcatggataccgatcacagggctgctgcggagtcgtggggccctgggctggtgcctcccctccctagaggttttg

SEQ ID NO: 8944 - DNA, 120 bp, Artificial Sequence
  ENSG00000007545_36 (sequence is synthesized)
ttcgtactcttaacagggagtgggggcaggaagagtcctgtactatgcaggttgtgtggactttacatgggaccctgctaagctggttgaaaatgtttttcttgtgttttaagaattagg

SEQ ID NO: 8945 - DNA, 120 bp, Artificial Sequence
  ENSG00000007545_37 (sequence is synthesized)
agacatggaagaggaagaacaaagtcccctctgtagttggtttccttcctgtgtccctttgcaagcttccaggcgatctaaggtgtcatttctccctcctggggtgacccttaggcgcta

SEQ ID NO: 8946 - DNA, 120 bp, Artificial Sequence
  ENSG00000007545_38 (sequence is synthesized)
atatgattacagcgaagactttcctgataagttctcaaactcgatgtgtgactgtttggcacttgagacaaacctgcctttgcagggaaagtgtctctcacgggcattggtgtgggcgtg

SEQ ID NO: 8947 - DNA, 120 bp, Artificial Sequence
  ENSG00000007545_39 (sequence is synthesized)
cctgacatacgtgttcagtcccttgcatacctttgccttgagacttctgtgtctccttcccatttgggacacccaggtgagggcccagacatctggatgtggtcagacctcaccaaatat

SEQ ID NO: 8948 - DNA, 120 bp, Artificial Sequence
  ENSG00000007545_40 (sequence is synthesized)
atgccttcgtggtggtctccctccttgcgccctcttgggtggccagcgttcctactgcagacggcccaacatccagtctttccccaggacagagctaacaagggcccctttgccttctca

SEQ ID NO: 8949 - DNA, 120 bp, Artificial Sequence
  ENSG00000007545_41 (sequence is synthesized)
tcctcaggagttccaggcacatgagtcaccgtccatccacatccagtgtggcctggagctgctacagaggtgttgggcaggccatgcctgtgccgccatctctcccttcctgcctcattt

SEQ ID NO: 8950 - DNA, 120 bp, Artificial Sequence
  ENSG00000007545_42 (sequence is synthesized)
catcccccgcagcagccgggattgattgtgctttcctaacccccttggacctactctccctcctccccaccattcctcttcccccacatgtgtggcacgctgcagccctcaaggccagcc

SEQ ID NO: 8951 - DNA, 120 bp, Artificial Sequence
  ENSG00000007545_43 (sequence is synthesized)
ctggcccctccactgcttctctccccatccacaatggagaaggtgaaaagaggagggaaaggcctttggtgtggacaagcatgtggacgccctccgtcctgcagtcttgccagcccacca

SEQ ID NO: 8952 - DNA, 120 bp, Artificial Sequence
  ENSG00000007545_44 (sequence is synthesized)
cagccactgtagaccacaggcaggccgtgtactgcaccactgggaggacgtggagaggacagtgaacttccaggcaagagcttccttcttttgtctcacgagtttttcttagagctcttg

SEQ ID NO: 8953 - DNA, 120 bp, Artificial Sequence
  ENSG00000007545_45 (sequence is synthesized)
cctgagctggcttccctccttcagacattgacatgagatcttaagcaaacagtcccaaacctcttaggggtgaaaaaagaaacatgccacttgattaggagagagacagcagtgtttgaa

SEQ ID NO: 8954 - DNA, 120 bp, Artificial Sequence
  ENSG00000007545_46 (sequence is synthesized)
ctacagcatctttacactagcttgtgttttgtgctacgtataccagcttccaaaattagcatctcattgagccagagaagacaaggagatctccctctgggcatctggctttgctgcgtc

SEQ ID NO: 8955 - DNA, 120 bp, Artificial Sequence
  ENSG00000007545_47 (sequence is synthesized)
tctagagggttaggataccaggccgagttcaggccactgctagctttctcatactcccacaggctagaccagagatgccaagtcccaacagcactgagctgtgtgcactgtgccagggac

SEQ ID NO: 8956 - DNA, 120 bp, Artificial Sequence
  ENSG00000007545_48 (sequence is synthesized)
aggagggtttgtgaactgcctgtcagggtacctgttagcccctgacaactcagtggggtgaagttttggaggtcagagtctgctttcgtaggctctttagacagcacctaccacttggtt

SEQ ID NO: 8957 - DNA, 120 bp, Artificial Sequence
  ENSG00000007545_49 (sequence is synthesized)
ctccagcgtagactcctgggagcagccaactgcagccattgccatccagtggggagatgggttagggaggaggacgggctgactcctctcctgtaataaagctgacaagagttctagagg

SEQ ID NO: 8958 - DNA, 120 bp, Artificial Sequence
  ENSG00000007545_50 (sequence is synthesized)
attctgcttctctagtaactagacaggtgatacgcatttgcttgccacattaagggaaaatggtgtcatttgttgcagaaaaacaatggatacattttcttctggcctaaatgaatattt

SEQ ID NO: 8959 - DNA, 120 bp, Artificial Sequence
  ENSG00000007545_51 (sequence is synthesized)
atgtgcaaacataggcaactgttaaaggctggaattttcaaaagatccaaacagagacttcctgcatcttctgcctttccaacagaagcggtgatcgtctaagtatgagcctgtggcttc

SEQ ID NO: 8960 - DNA, 120 bp, Artificial Sequence
  ENSG00000007545_52 (sequence is synthesized)
ctttgtgcatttgagcatgctgtaattaagatgagatcagtttcttagaaaaagctttcctgaatccctctgacgttgcctgggatctttctgttgattcgtcttttctggagattggga

SEQ ID NO: 8961 - DNA, 120 bp, Artificial Sequence
  ENSG00000007545_53 (sequence is synthesized)
cagagcatctgtggtccagggaagttagtcctctggcctcaattctgttgtggatgtgcagtgataagcgggcattgcgtgcctcgggggatgcctagttcgtggcttcctggctgtttt

SEQ ID NO: 8962 - DNA, 120 bp, Artificial Sequence
  ENSG00000007545_54 (sequence is synthesized)
gtccttctgtgtcttgtagctgtagggtgccagctcagggagtggggtgttggcggcgtttccgcggttggcctccttgctttgccgcacctccaggttctgggcatgagaggccgtggc

SEQ ID NO: 8963 - DNA, 120 bp, Artificial Sequence
  ENSG00000007545_55 (sequence is synthesized)
ctcatttctggtggataacctttttagtttaatagcatctttaattagatcacagcattgaattcaaaatttcttctgcaaagaaagttgtggggcataagacaccgggaatgagggagg

SEQ ID NO: 8964 - DNA, 120 bp, Artificial Sequence
  ENSG00000007545_56 (sequence is synthesized)
gaggaggaagacagttgtgttttctctttaaaccttgagctctagccgatgcatttgtcaggaaatacagcactttgtcttaagaaaacaaggaaggaggccgggcgcagtggctcacgc

SEQ ID NO: 8965 - DNA, 120 bp, Artificial Sequence
  ENSG00000007545_57 (sequence is synthesized)
ccgaggcgggcggatcacctgaggtggggagtatgagaccaccctgactaacatggagagaccctgtctctactaaaagtacagaattagccgggcgtggtggcgcatgcccataatccc

SEQ ID NO: 8966 - DNA, 120 bp, Artificial Sequence
  ENSG00000007545_58 (sequence is synthesized)
ctaaaagtacagaattagccgggcgtggtggcgcatgcccataatcccagctactgaggagacttgaggtaggagaatcacttgaacctcagcggcggaggttgcagtgagtcgagatcg

SEQ ID NO: 8967 - DNA, 120 bp, Artificial Sequence
  ENSG00000007545_59 (sequence is synthesized)
gagcgaaactgggtctcaagttaaaaaaagaaagcaaggaaagagtaatttacaacgaaggaaaaaaacccacagcacacccttcgcggctgtcagcgctctcctgatgtcacagtggct

SEQ ID NO: 8968 - DNA, 120 bp, Artificial Sequence
  ENSG00000007545_60 (sequence is synthesized)
gcgtgtccttggggtgggtgaggtgtggggagcccagcccctggccctgcctcccgcgccccgctccccttctctctcttactcggttaagccatagcgaggcctccgctcgtttcagat

SEQ ID NO: 8969 - DNA, 120 bp, Artificial Sequence
  ENSG00000007545_61 (sequence is synthesized)
atgaatttgttttatagattataaatatgcatatacagtgtatgtataaagcagaatgcctgcctttcctggttattttttgtaccatattgtaaattatattatttattctttaccaat

SEQ ID NO: 8970 - DNA, 120 bp, Artificial Sequence
  ENSG00000007545_62 (sequence is synthesized)
tttgggaataaaaggtgttttggttatttaatataataagagctgttaaacttctgtttaaatttccagttcaacttgtaaatgtttttattgtgcataaatacatactaatgttgatct

SEQ ID NO: 8971 - DNA, 120 bp, Artificial Sequence
  ENSG00000007545_63 (sequence is synthesized)
ctcagcttgggggcttgtcacccttcaagagccatttccgcaggatgacagtggtgaccgcagccttccagtagctcctgggaggcacagtggtgggtgccagagcttgtgtcacgttgg

SEQ ID NO: 8972 - DNA, 120 bp, Artificial Sequence
  ENSG00000007545_64 (sequence is synthesized)
gggcctgtgtgacctctgactcctcatgttagcatttggaatgttcagtggcttccagcttggctcggctcccacactcccaacagtggctgtaaaggaagccccctgcggccacatcct

SEQ ID NO: 8973 - DNA, 120 bp, Artificial Sequence
  ENSG00000007545_65 (sequence is synthesized)
atgcacgaaggcctgttaaacgagaagagctcgtcacggcgtgttgagtccctcggaagctcttcgcacaagtctggattggggccggggccggggctagggcttgggctggctgccccc

SEQ ID NO: 8974 - DNA, 120 bp, Artificial Sequence
  ENSG00000007866_0 (sequence is synthesized)
aacacaaactttccgtcccgctcgctccctcctccgcgctcggcgcctcccgctccagcccggctcattccgcacattccggccagccccctccccacgaccccccttccccggcccccc

SEQ ID NO: 8975 - DNA, 120 bp, Artificial Sequence
  ENSG00000007866_1 (sequence is synthesized)
ttgcggctccctcgggcccggcggagcggcccggccggagcgcccccgcgagctcggaccaggctcagccgcccagtgggctcaggcccagagcccagagcaaccagcacaatagcgtcc

SEQ ID NO: 8976 - DNA, 120 bp, Artificial Sequence
  ENSG00000007866_2 (sequence is synthesized)
aacagctggaacgccagcagcagccccggggaggcccgggaggatgggcccgagggcctggacaaggggctggacaacgatgcggagggcgtgtggagcccggacatcgagcagagcttc

SEQ ID NO: 8977 - DNA, 120 bp, Artificial Sequence
  ENSG00000007866_3 (sequence is synthesized)
caggaggccctggccatctacccgccctgcggccggcggaagatcatcctgtcagacgagggcaagatgtacggccgaaatgagttgattgcacgctatattaaactgaggacggggaag

SEQ ID NO: 8978 - DNA, 120 bp, Artificial Sequence
  ENSG00000007866_4 (sequence is synthesized)
actcggacgagaaaacaggtgtccagccacatacaggttctagctcggaagaaggtgcgggagtaccaggttggcatcaaggccatgaacctggaccaggtctccaaggacaaagccctt

SEQ ID NO: 8979 - DNA, 120 bp, Artificial Sequence
  ENSG00000007866_5 (sequence is synthesized)
cagagcatggcgtccatgtcctctgcccagatcgtctctgccagtgtcctgcagaacaagttcagcccaccttcccctctgccccaggccgtcttctccacttcctcgcggttctggagc

SEQ ID NO: 8980 - DNA, 120 bp, Artificial Sequence
  ENSG00000007866_6 (sequence is synthesized)
agcccccctctcctgggacagcagcctggaccctctcaggacatcaagccctttgcacagccagcctaccccatccagccgcccctgccgccgacgctcagcagttatgagcccctggcc

SEQ ID NO: 8981 - DNA, 120 bp, Artificial Sequence
  ENSG00000007866_7 (sequence is synthesized)
ccgctcccctcagctgctgcctctgtgcctgtgtggcaggaccgtaccattgcctcctcccggctgcggctcctggagtattcagccttcatggaggtgcagcgagaccctgacacgtac

SEQ ID NO: 8982 - DNA, 120 bp, Artificial Sequence
  ENSG00000007866_8 (sequence is synthesized)
agcaaacacctgtttgtgcacatcggccagacgaaccccgccttctcagacccacccctggaggcagtagatgtgcgccagatctatgacaaattccccgagaaaaagggaggattgaag

SEQ ID NO: 8983 - DNA, 120 bp, Artificial Sequence
  ENSG00000007866_9 (sequence is synthesized)
gagctctatgagaaggggccccctaatgccttcttccttgtcaagttctgggccgacctcaacagcaccatccaggagggcccgggagccttctatggggtcagctctcagtacagctct

SEQ ID NO: 8984 - DNA, 120 bp, Artificial Sequence
  ENSG00000007866_10 (sequence is synthesized)
gctgatagcatgaccatcagcgtctccaccaaggtgtgctcctttggcaaacaggtggtagagaaggtggagactgagtatgccaggctggagaacgggcgctttgtgtaccgtatccac

SEQ ID NO: 8985 - DNA, 120 bp, Artificial Sequence
  ENSG00000007866_11 (sequence is synthesized)
cgctcgcccatgtgcgagtacatgatcaacttcatccacaagctgaagcacctgcccgagaagtacatgatgaacagcgtgctggagaacttcaccatcctgcaggtggtcacgagccgg

SEQ ID NO: 8986 - DNA, 120 bp, Artificial Sequence
  ENSG00000007866_12 (sequence is synthesized)
tctgcgcctccttaaggatgcagggtgagcatctcctctccacacctgcctggcacccctgggggggtccaggattgaggattcatctacctgccaggcctcaggcccaggacccaggag

SEQ ID NO: 8987 - DNA, 120 bp, Artificial Sequence
  ENSG00000007866_13 (sequence is synthesized)
gcctccccacctaccccagcacacacactccctgccactgttctgcgctttaattgtgggagaagagaggagaggagggctcagcggtggggcagcctgtccggggcgctgacccaccat

SEQ ID NO: 8988 - DNA, 120 bp, Artificial Sequence
  ENSG00000007866_14 (sequence is synthesized)
caccctgctctgcccagcctcgcgtgacctcagagaggtggggataggggacaccttcagcctccagcatgtgtggccactgtacccccacccacccttgggggagcatgatgggcaggt

SEQ ID NO: 8989 - DNA, 120 bp, Artificial Sequence
  ENSG00000007866_15 (sequence is synthesized)
gagggcaggatggagaccaagggagtcagtgagcagaggccctgggagtgtccggttggggttggactgaggacagaggggcccacacttccttgcccctttgtgtcccaggcctggtgc

SEQ ID NO: 8990 - DNA, 120 bp, Artificial Sequence
  ENSG00000007866_16 (sequence is synthesized)
ccagactccttgcatggcttgtgtggtcctcagactccgcacagcgagcgtaggtctctgggtttcagatgaagtgcccaggctccaggaagttgagggacccacaggagaggtgggcag

SEQ ID NO: 8991 - DNA, 120 bp, Artificial Sequence
  ENSG00000007866_17 (sequence is synthesized)
agctggagttctcatccagggctgcttgtccccagagcccaggtttatactacctccctggggcgggggctggccgcagggtaggggagaggctctgcagtgtggagtggagcctcatcg

SEQ ID NO: 8992 - DNA, 120 bp, Artificial Sequence
  ENSG00000007866_18 (sequence is synthesized)
aggggcgctgggttaggggagcacctgtttcagactgggcatgaagaagggagcacagcagctactagaccccattagcacctcattagcccacaagccagccaggggccccaggaagat

SEQ ID NO: 8993 - DNA, 120 bp, Artificial Sequence
  ENSG00000007866_19 (sequence is synthesized)
ggggcaccccccagcaccctccagattgagagcaaggtagaggaaggagtcccagcctctgggcagaccagaggcccagagggagagagtagcagaaggcttttgatttttctcttgcct

SEQ ID NO: 8994 - DNA, 120 bp, Artificial Sequence
  ENSG00000007866_20 (sequence is synthesized)
gaggcttgaatctgacaaacccttggtgggcactgctcccttaggttcttccccacctcaatctacctgcctagagtagcagctcccagacccagttctgggactgaaggttaacccttc

SEQ ID NO: 8995 - DNA, 120 bp, Artificial Sequence
  ENSG00000007866_21 (sequence is synthesized)
acctgctgtcccttcttaacacccaggcccccagagccagctgggcctgtccagcagccacctgtgggtatttatgagtttcatatgaagtactgtgccccttcccttcctcatcccgac

SEQ ID NO: 8996 - DNA, 120 bp, Artificial Sequence
  ENSG00000007866_22 (sequence is synthesized)
cctgcccgagcttcctgaaggtcctcactgtttgcatatcgctcaggccacctccaaaccccacctaggttttataatgtatattatatatttttttgtgtatttttaaaatccagctgt

SEQ ID NO: 8997 - DNA, 120 bp, Artificial Sequence
  ENSG00000007866_23 (sequence is synthesized)
tttttgtgtatttttaaaatccagctgtgatgggttatatcataaatgcagcttggggttggagcaggggccctcaaaggcccagctcctgctcaaaaaaaaaaaaaaaaaaaaattaaa

SEQ ID NO: 8998 - DNA, 120 bp, Artificial Sequence
  ENSG00000007908_0 (sequence is synthesized)
agctgttcttggctgacttcacatcaaaactcctatactgacctgagacagaggcagcagtgatacccacctgagagatcctgtgtttgaacaactgcttcccaaaacggaaagtatttc

SEQ ID NO: 8999 - DNA, 120 bp, Artificial Sequence
  ENSG00000007908_1 (sequence is synthesized)
aagcctaaacctttgggtgaaaagaactcttgaagtcatgattgcttcacagtttctctcagctctcactttggtgcttctcattaaagagagtggagcctggtcttacaacacctccac

SEQ ID NO: 9000 - DNA, 120 bp, Artificial Sequence
  ENSG00000007908_2 (sequence is synthesized)
ggaagctatgacttatgatgaggccagtgcttattgtcagcaaaggtacacacacctggttgcaattcaaaacaaagaagagattgagtacctaaactccatattgagctattcaccaag

SEQ ID NO: 9001 - DNA, 120 bp, Artificial Sequence
  ENSG00000007908_3 (sequence is synthesized)
ttattactggattggaatcagaaaagtcaacaatgtgtgggtctgggtaggaacccagaaacctctgacagaagaagccaagaactgggctccaggtgaacccaacaataggcaaaaaga

SEQ ID NO: 9002 - DNA, 120 bp, Artificial Sequence
  ENSG00000007908_4 (sequence is synthesized)
tgaggactgcgtggagatctacatcaagagagaaaaagatgtgggcatgtggaatgatgagaggtgcagcaagaagaagcttgccctatgctacacagctgcctgtaccaatacatcctg

SEQ ID NO: 9003 - DNA, 120 bp, Artificial Sequence
  ENSG00000007908_5 (sequence is synthesized)
cagtggccacggtgaatgtgtagagaccatcaataattacacttgcaagtgtgaccctggcttcagtggactcaagtgtgagcaaattgtgaactgtacagccctggaatcccctgagca

SEQ ID NO: 9004 - DNA, 120 bp, Artificial Sequence
  ENSG00000007908_6 (sequence is synthesized)
tggaagcctggtttgcagtcacccactgggaaacttcagctacaattcttcctgctctatcagctgtgataggggttacctgccaagcagcatggagaccatgcagtgtatgtcctctgg

SEQ ID NO: 9005 - DNA, 120 bp, Artificial Sequence
  ENSG00000007908_7 (sequence is synthesized)
agaatggagtgctcctattccagcctgcaatgtggttgagtgtgatgctgtgacaaatccagccaatgggttcgtggaatgtttccaaaaccctggaagcttcccatggaacacaacctg

SEQ ID NO: 9006 - DNA, 120 bp, Artificial Sequence
  ENSG00000007908_8 (sequence is synthesized)
tacatttgactgtgaagaaggatttgaactaatgggagcccagagccttcagtgtacctcatctgggaattgggacaacgagaagccaacgtgtaaagctgtgacatgcagggccgtccg

SEQ ID NO: 9007 - DNA, 120 bp, Artificial Sequence
  ENSG00000007908_9 (sequence is synthesized)
ccagcctcagaatggctctgtgaggtgcagccattcccctgctggagagttcaccttcaaatcatcctgcaacttcacctgtgaggaaggcttcatgttgcagggaccagcccaggttga

SEQ ID NO: 9008 - DNA, 120 bp, Artificial Sequence
  ENSG00000007908_10 (sequence is synthesized)
atgcaccactcaagggcagtggacacagcaaatcccagtttgtgaagctttccagtgcacagccttgtccaaccccgagcgaggctacatgaattgtcttcctagtgcttctggcagttt

SEQ ID NO: 9009 - DNA, 120 bp, Artificial Sequence
  ENSG00000007908_11 (sequence is synthesized)
ccgttatgggtccagctgtgagttctcctgtgagcagggttttgtgttgaagggatccaaaaggctccaatgtggccccacaggggagtgggacaacgagaagcccacatgtgaagctgt

SEQ ID NO: 9010 - DNA, 120 bp, Artificial Sequence
  ENSG00000007908_12 (sequence is synthesized)
gagatgcgatgctgtccaccagcccccgaagggtttggtgaggtgtgctcattcccctattggagaattcacctacaagtcctcttgtgccttcagctgtgaggagggatttgaattaca

SEQ ID NO: 9011 - DNA, 120 bp, Artificial Sequence
  ENSG00000007908_13 (sequence is synthesized)
tggatcaactcaacttgagtgcacatctcagggacaatggacagaagaggttccttcctgccaagtggtaaaatgttcaagcctggcagttccgggaaagatcaacatgagctgcagtgg

SEQ ID NO: 9012 - DNA, 120 bp, Artificial Sequence
  ENSG00000007908_14 (sequence is synthesized)
ggagcccgtgtttggcactgtgtgcaagttcgcctgtcctgaaggatggacgctcaatggctctgcagctcggacatgtggagccacaggacactggtctggcctgctacctacctgtga

SEQ ID NO: 9013 - DNA, 120 bp, Artificial Sequence
  ENSG00000007908_15 (sequence is synthesized)
agctcccactgagtccaacattcccttggtagctggactttctgctgctggactctccctcctgacattagcaccatttctcctctggcttcggaaatgcttacggaaagcaaagaaatt

SEQ ID NO: 9014 - DNA, 120 bp, Artificial Sequence
  ENSG00000007908_16 (sequence is synthesized)
atggaagctaccaaaagccttcttacatcctttaagttcaaaagaatcagaaacaggtgcatctggggaactagagggatacactgaagttaacagagacagataactctcctcgggtct

SEQ ID NO: 9015 - DNA, 120 bp, Artificial Sequence
  ENSG00000007908_17 (sequence is synthesized)
ctggcccttcttgcctactatgccagatgcctttatggctgaaaccgcaacacccatcaccacttcaatagatcaaagtccagcaggcaaggacggccttcaactgaaaagactcagtgt

SEQ ID NO: 9016 - DNA, 120 bp, Artificial Sequence
  ENSG00000007908_18 (sequence is synthesized)
tccctttcctactctcaggatcaagaaagtgttggctaatgaagggaaaggatattttcttccaagcaaaggtgaagagaccaagactctgaaatctcagaattccttttctaactctcc

SEQ ID NO: 9017 - DNA, 120 bp, Artificial Sequence
  ENSG00000007908_19 (sequence is synthesized)
cttgctcgctgtaaaatcttggcacagaaacacaatattttgtggctttctttcttttgcccttcacagtgtttcgacagctgattacacagttgctgtcataagaatgaataataatta

SEQ ID NO: 9018 - DNA, 120 bp, Artificial Sequence
  ENSG00000007908_20 (sequence is synthesized)
tccagagtttagaggaaaaaaatgactaaaaatattataacttaaaaaaatgacagatgttgaatgcccacaggcaaatgcatggagggttgttaatggtgcaaatcctactgaatgctc

SEQ ID NO: 9019 - DNA, 120 bp, Artificial Sequence
  ENSG00000007908_21 (sequence is synthesized)
tgtgcgagggttactatgcacaatttaatcactttcatccctatgggattcagtgcttcttaaagagttcttaaggattgtgatatttttacttgcattgaatatattataatcttccat

SEQ ID NO: 9020 - DNA, 120 bp, Artificial Sequence
  ENSG00000007908_22 (sequence is synthesized)
acttcttcattcaatacaagtgtggtagggacttaaaaaacttgtaaatgctgtcaactatgatatggtaaaagttacttattctagattaccccctcattgtttattaacaaattatgt

SEQ ID NO: 9021 - DNA, 120 bp, Artificial Sequence
  ENSG00000007908_23 (sequence is synthesized)
tacatctgttttaaatttatttcaaaaagggaaactattgtcccctagcaaggcatgatgttaaccagaataaagttctgagtgtttttactacagttgttttttgaaaacatggtagaa

SEQ ID NO: 9022 - DNA, 120 bp, Artificial Sequence
  ENSG00000007908_24 (sequence is synthesized)
ttggagagtaaaaactgaatggaaggtttgtatattgtcagatattttttcagaaatatgtggtttccacgatgaaaaacttccatgaggccaaacgttttgaactaataaaagcataaa

SEQ ID NO: 9023 - DNA, 120 bp, Artificial Sequence
  ENSG00000007908_25 (sequence is synthesized)
tgcaaacacacaaaggtataattttatgaatgtctttgttggaaaagaatacagaaagatggatgtgctttgcattcctacaaagatgtttgtcagatatgatatgtaaacataattctt

SEQ ID NO: 9024 - DNA, 120 bp, Artificial Sequence
  ENSG00000007908_26 (sequence is synthesized)
gtatattatggaagattttaaattcacaatagaaactcaccatgtaaaagagtcatctggtagatttttaacgaatgaagatgtctaatagttattccctatttgttttcttctgtatgt

SEQ ID NO: 9025 - DNA, 120 bp, Artificial Sequence
  ENSG00000007908_27 (sequence is synthesized)
tagggtgctctggaagagaggaatgcctgtgtgagcaagcatttatgtttatttataagcagatttaacaattccaaaggaatctccagttttcagttgatcactggcaatgaaaaattc

SEQ ID NO: 9026 - DNA, 120 bp, Artificial Sequence
  ENSG00000007908_28 (sequence is synthesized)
tcagtcagtaattgccaaagctgctctagccttgaggagtgtgagaatcaaaactctcctacacttccattaacttagcatgtgttgaaaaaaaagtttcagagaagttctggctgaaca

SEQ ID NO: 9027 - DNA, 120 bp, Artificial Sequence
  ENSG00000007908_29 (sequence is synthesized)
ctggcaacaacaaagccaacagtcaaaacagagatgtgataaggatcagaacagcagaggttcttttaaaggggcagaaaaactctgggaaataagagagaacaactactgtgatcaggc

SEQ ID NO: 9028 - DNA, 120 bp, Artificial Sequence
  ENSG00000007908_30 (sequence is synthesized)
tatgtatggaatacagtgttattttctttgaaattgtttaagtgttgtaaatatttatgtaaactgcattagaaattagctgtgtgaaataccagtgtggtttgtgtttgagttttattg

SEQ ID NO: 9029 - DNA, 120 bp, Artificial Sequence
  ENSG00000007908_31 (sequence is synthesized)
tgtgtgaaataccagtgtggtttgtgtttgagttttattgagaattttaaattataacttaaaatattttataatttttaaagtatatatttatttaagcttatgtcagacctatttgac

SEQ ID NO: 9030 - DNA, 120 bp, Artificial Sequence
  ENSG00000007908_32 (sequence is synthesized)
acatccgggaactcagagtgttaaaacttgagctcattattttcccctagacaccaattattccttttttattttccgtctttattaacgaaagtgtttactgcctaagccagacactga

SEQ ID NO: 9031 - DNA, 120 bp, Artificial Sequence
  ENSG00000007908_33 (sequence is synthesized)
gagccaccatgtattcctctctctctctcacctattcccatgtttaatccattatttggattggtccattttatctccattttctcaaatacaggaaaagacagatcatcatcaaccagc

SEQ ID NO: 9032 - DNA, 120 bp, Artificial Sequence
  ENSG00000007908_34 (sequence is synthesized)
atggtgtcatatggtgatcgtgagctgagactatgaagtcagaccctgctgggtttgagtcctagattcaccagttatttattttggcaccttgacaagatagtttaactctctatgtca

SEQ ID NO: 9033 - DNA, 120 bp, Artificial Sequence
  ENSG00000007908_35 (sequence is synthesized)
gttttctcattgtaaaatgaggataataatagtgtgaacttcataggctcatggttacatggtgcctggcacacaggacacattcaataaactgtaattctgtgtccctgcgaggaacat

SEQ ID NO: 9034 - DNA, 120 bp, Artificial Sequence
  ENSG00000007923_0 (sequence is synthesized)
gtgaaaggttgcgaagatggcgacggccttgagcgaggaggagctggacaatgaagactattactcgttgctgaacgtgcgcagggaggcctcttctgaagagctgaaagctgcctaccg

SEQ ID NO: 9035 - DNA, 120 bp, Artificial Sequence
  ENSG00000007923_1 (sequence is synthesized)
gaggctctgtatgctctaccatccagacaagcacagagacccagagctcaagtcacaggcggaacgactgtttaaccttgttcaccaggcttatgaagtgcttagtgacccccaaaccag

SEQ ID NO: 9036 - DNA, 120 bp, Artificial Sequence
  ENSG00000007923_2 (sequence is synthesized)
ggccatctatgatatatatgggaagagaggactggaaatggaaggatgggaggttgtggaaaggaggagaacccctgctgaaattcgagaggagtttgagcggctgcagagagagagaga

SEQ ID NO: 9037 - DNA, 120 bp, Artificial Sequence
  ENSG00000007923_3 (sequence is synthesized)
agagaggagattgcagcagcgaaccaatcccaagggaacgatcagcgttggagtagatgccaccgacctttttgatcgctatgatgaggagtatgaagatgtgtccggcagtagctttcc

SEQ ID NO: 9038 - DNA, 120 bp, Artificial Sequence
  ENSG00000007923_4 (sequence is synthesized)
gcagattgaaattaataaaatgcacatatcccagtccattgaggcacccttgacagcgacagacacagccatcctctctggaagcctctcaacccagaatggaaatggaggaggttccat

SEQ ID NO: 9039 - DNA, 120 bp, Artificial Sequence
  ENSG00000007923_5 (sequence is synthesized)
taactttgcgctcagacgagtaacttcggcaaagggatggggagagttggaatttggagctggagacctacaggggcctttgttcggtctcaagctgttccgtaatctcacaccaagatg

SEQ ID NO: 9040 - DNA, 120 bp, Artificial Sequence
  ENSG00000007923_6 (sequence is synthesized)
ctttgtgacaacaaactgtgctctgcagttttcatcccgtggaatccgacccggcctgaccactgtcctagctcggaacctagacaagaacaccgtgggctacctgcagtggcgatgggg

SEQ ID NO: 9041 - DNA, 120 bp, Artificial Sequence
  ENSG00000007923_7 (sequence is synthesized)
tatccagtcagccatgaacactagcatcgtccgagacactaaaaccagccacttcactgtggccctgcagctgggaatccctcactcctttgcactgatcagctatcagcacaaattcca

SEQ ID NO: 9042 - DNA, 120 bp, Artificial Sequence
  ENSG00000007923_8 (sequence is synthesized)
agatgacgatcagactcgtgtgaaaggatccctcaaagcaggcttctttgggacggtggtggagtacggagctgagaggaagatctccaggcacagcgttttgggtgcagctgtcagcgt

SEQ ID NO: 9043 - DNA, 120 bp, Artificial Sequence
  ENSG00000007923_9 (sequence is synthesized)
tggagttccacagggtgtttctctcaaagtcaagctcaacagggccagtcagacatacttcttccctattcacttgacggaccagcttctgcccagcgccatgttctatgccaccgtggg

SEQ ID NO: 9044 - DNA, 120 bp, Artificial Sequence
  ENSG00000007923_10 (sequence is synthesized)
gcctctagtggtctactttgccatgcaccgtctgatcatcaaaccatacctcagggctcagaaagagaaggaattggagaagcagagggaaagcgccgccaccgatgtgctgcagaagaa

SEQ ID NO: 9045 - DNA, 120 bp, Artificial Sequence
  ENSG00000007923_11 (sequence is synthesized)
gcaagaggcggagtccgctgtccggctgatgcaggaatctgtccgaaggataattgaggcagaagagtccagaatgggcctcatcatcgtcaatgcctggtacgggaagtttgtcaatga

SEQ ID NO: 9046 - DNA, 120 bp, Artificial Sequence
  ENSG00000007923_12 (sequence is synthesized)
caagagcaggaagagcgagaaggtgaaggtgattgacgtgactgtgcccctgcagtgcctggtgaaggactcgaagctcatcctcacggaggcctccaaggctgggctgcctggctttta

SEQ ID NO: 9047 - DNA, 120 bp, Artificial Sequence
  ENSG00000007923_13 (sequence is synthesized)
cagtgaggccctccggataccaaagcagtcccacaggatcgatacagatggataaactgccaagaaccagatttttaaaaggccgcaaaaaatcttttcctgggagtctacaaatttgga

SEQ ID NO: 9048 - DNA, 120 bp, Artificial Sequence
  ENSG00000007923_14 (sequence is synthesized)
aatgaaaaaacccagacatcagatgtttttattttatattattattatagaaggtggtaccattatcaattatgtgaagggacatgcagacaccccagcttttgagggtgctgggggtag

SEQ ID NO: 9049 - DNA, 120 bp, Artificial Sequence
  ENSG00000007923_15 (sequence is synthesized)
gactgaggcagccccactgggaaccagactgcagcctggcccatggctgttttcccaaggatcagttcctggagggaagggctctggccctgactccgctgtgtcccgagcacacgtgct

SEQ ID NO: 9050 - DNA, 120 bp, Artificial Sequence
  ENSG00000007923_16 (sequence is synthesized)
gaccgcagcccgccgccctgtagttcttggctgggtctggaggtgtctgtggagcaccctgccctcaccacaggagcgtgagccacttctgcagtccacgctgaacatgggaaacaacct

SEQ ID NO: 9051 - DNA, 120 bp, Artificial Sequence
  ENSG00000007923_17 (sequence is synthesized)
gaaaagcaggcaggcctcccggtcagggagcctctgctgtgctggcttcccatgaccacctcctcttgctgaaatattactgcttgaatctggagcagattgcgggtttataaaactgct

SEQ ID NO: 9052 - DNA, 120 bp, Artificial Sequence
  ENSG00000007923_18 (sequence is synthesized)
ttttatctgagaacaaacgggtttggaaattagtcgtcttttttccccactcccagagctgctcaagtcattccaccggccccctcggcttgggacagggtagtgtaactcccgatccca

SEQ ID NO: 9053 - DNA, 120 bp, Artificial Sequence
  ENSG00000007923_19 (sequence is synthesized)
gggcctagccctgacacaggtggcttcccgtatcccggtgggaaaacgccctgccaccagcgggcttgagctggcctgtgtccctccaccgcctgcaccacccacctccagagtgcagtg

SEQ ID NO: 9054 - DNA, 120 bp, Artificial Sequence
  ENSG00000007923_20 (sequence is synthesized)
ctgggcaagggcagctcaagaggacaggaccaggcgcttggcaagacatcagacacacccaacccaaaggcgtggaccccaggcccggcccgtggtacccagcaggtggcactgcagctc

SEQ ID NO: 9055 - DNA, 120 bp, Artificial Sequence
  ENSG00000007923_21 (sequence is synthesized)
cccgctcctgcaggtccagcgtcctcacaggaacaccagggcctgtgctccggagccttccttcagacccttcctccacgtgcccacttgggatgcagaatgcagcggagctaggacccc

SEQ ID NO: 9056 - DNA, 120 bp, Artificial Sequence
  ENSG00000007923_22 (sequence is synthesized)
ctccacggcctggacctcggctgcagtaaagttacgtgaggcctgtctctcggggcctggaagtggcagccatcagttgctcttgctgacccctcggagcaagcgccgcacaggtggtgg

SEQ ID NO: 9057 - DNA, 120 bp, Artificial Sequence
  ENSG00000007923_23 (sequence is synthesized)
ctgagacagctggcgcggggggccccaagctgcgccggcctccagcccacccacagctgttgctgaagtcaggcctccctccccagcactggtatctgagtaacggctaagaacctcctt

SEQ ID NO: 9058 - DNA, 120 bp, Artificial Sequence
  ENSG00000007923_24 (sequence is synthesized)
cctctggttttgaaaagcagttcgggttgtccaattctgtaacattcatctccattttttaaaaaggtttctctgacggccccacggcccgagccgcggtgagcgtcgtgttgcatgagc

SEQ ID NO: 9059 - DNA, 120 bp, Artificial Sequence
  ENSG00000007923_25 (sequence is synthesized)
ctgggccccgggcttcccgtgcgcctctgccgcaggtgcttctgggcacccatcctctgcgtttcatttgcagtcgactgtacagaaggcactcaccacaataaacctttcctgaaagca

SEQ ID NO: 9060 - DNA, 120 bp, Artificial Sequence
  ENSG00000007923_26 (sequence is synthesized)
ctgcagtttggttcggactgtgacattcatgctttgtgggcttcctggtggagtgtcctacctaaacccagtgaaccctgaagtcaaatgacttgttcaattaaagcgagctggctgttg

SEQ ID NO: 9061 - DNA, 120 bp, Artificial Sequence
  ENSG00000007923_27 (sequence is synthesized)
gtgagtgctgccccaccgttcccaagcgagggctgtaggggacacactccacaccccacatgttggtctcagggccttagaggtcagacttctcttctccaacaacttggctctccactt

SEQ ID NO: 9062 - DNA, 120 bp, Artificial Sequence
  ENSG00000007923_28 (sequence is synthesized)
agtctttattgtgggatgcgacactgggctctgcagtccctgccctgaagataattaccctccaaaggcctaacaagggcttttttaaagtggtgagtattggcctctttttcttccctc

SEQ ID NO: 9063 - DNA, 120 bp, Artificial Sequence
  ENSG00000007923_29 (sequence is synthesized)
tgagtgttctgccttttactgagcaggagggagcaggcttcctgggtatgtggcgagcatactgccaggtggccatgggccgtgtgcgcggcctggcgagcacatgcctgtctgaggggg

SEQ ID NO: 9064 - DNA, 120 bp, Artificial Sequence
  ENSG00000007923_30 (sequence is synthesized)
cggcacagctatgcccagcagaatggcaccacaggagaacacaggtcctttctcaagaggagctgggattccagcttctcctgtgaaatctctttatttttaaagctgacaacgcattgt

SEQ ID NO: 9065 - DNA, 120 bp, Artificial Sequence
  ENSG00000007923_31 (sequence is synthesized)
ttttttattgggtcaacaaatcccacccacgcattaatgatccctagaaagggagctcccaccggtggccaccggagggtcatgccgtttcaggtgcttctcaccttctgacccagagct

SEQ ID NO: 9066 - DNA, 120 bp, Artificial Sequence
  ENSG00000007923_32 (sequence is synthesized)
gcctgccctaggtctaggagtttcagagtgagccactcgggtagcagagctgtcagggtgcccactcccttcctttccaggccctgagcaagtatgttgacgtggacaagactgcctgcc

SEQ ID NO: 9067 - DNA, 120 bp, Artificial Sequence
  ENSG00000007923_33 (sequence is synthesized)
caaagggatggggagagagaatgacagactgcctcatcatcgggttgattgacatatgccagagatgtagtccccagccagcctctgcttcctgtcgtctctgctgctgccatgtcacac

SEQ ID NO: 9068 - DNA, 120 bp, Artificial Sequence
  ENSG00000007923_34 (sequence is synthesized)
gtgagagtgctgtagataggtgacgcaccctcgatgattttaagcctgggcagcgggaacgcatcttgttcacgaaatagaacccagaatgcccttgcgaggtcacagagcaatcactgt

SEQ ID NO: 9069 - DNA, 120 bp, Artificial Sequence
  ENSG00000007923_35 (sequence is synthesized)
catgccacttaggacctttagtttgttcttggatgattttaacaatctttttattttaaagcttccttaaaaagaaccacttccccctttttagtaattattgatttatattgggttatt

SEQ ID NO: 9070 - DNA, 120 bp, Artificial Sequence
  ENSG00000007923_36 (sequence is synthesized)
agagaagaaaatgttttcaatatttttaatgtttaaagtagtggacgagttcctaggattttttggatgcgtttttgtatttttttttatttgttgaaaaataaaatcaagttgcacaaa

SEQ ID NO: 9071 - DNA, 90 bp, Artificial Sequence
  ENSG00000007923_37 (sequence is synthesized)
gaaagaaattcataaggttgtggaaaggaggagaacccctgctgaaattcgagaggagtttgagcggctgcagagagagagagaagagag

SEQ ID NO: 9072 - DNA, 120 bp, Artificial Sequence
  ENSG00000007923_38 (sequence is synthesized)
atatcccagtccattgaggtaaagcacacaaccacctctccgagtacagcaagggctcgagttaatgaggcacagcacaccaagcagctggaatgagagtctgcccagggtttttctcat

SEQ ID NO: 9073 - DNA, 120 bp, Artificial Sequence
  ENSG00000007923_39 (sequence is synthesized)
taacaagggcttttttaaagtggtccggctgatgcaggaatctgtccgaaggataattgaggcagaagagtccagaatgggcctcatcatcgtcaatgcctggtacgggaagtttgtcaa

SEQ ID NO: 9074 - DNA, 120 bp, Artificial Sequence
  ENSG00000007933_0 (sequence is synthesized)
aaactgcccagacggttggacaggacgtagacacacagaagaaaagaagacaaagaacgggtaggaaaattaaaaaggttaccatggggaagaaagtggccatcattggagctggtgtga

SEQ ID NO: 9075 - DNA, 120 bp, Artificial Sequence
  ENSG00000007933_1 (sequence is synthesized)
gtggcttggcctccatcaggagctgtctggaagaggggctggagcccacctgctttgagaagagcaatgacattgggggcctgtggaaattttcagaccatgcagaggagggcagggcta

SEQ ID NO: 9076 - DNA, 120 bp, Artificial Sequence
  ENSG00000007933_2 (sequence is synthesized)
gcatttacaaatcagtcttttccaactcttccaaagagatgatgtgtttcccagacttcccatttcccgatgacttccccaactttatgcacaacagcaagatccaggaatatatcattg

SEQ ID NO: 9077 - DNA, 120 bp, Artificial Sequence
  ENSG00000007933_3 (sequence is synthesized)
catttgccaaagaaaagaacctcctgaagtacatacaatttaagacatttgtatccagtgtaaataaacatcctgattttgcaactactggccagtgggatgttaccactgaaagggatg

SEQ ID NO: 9078 - DNA, 120 bp, Artificial Sequence
  ENSG00000007933_4 (sequence is synthesized)
gtaaaaaagaatcggctgtctttgatgctgtaatggtttgttccggacatcatgtgtatcccaacctaccaaaagagtcctttccaggactaaaccactttaaaggcaaatgcttccaca

SEQ ID NO: 9079 - DNA, 120 bp, Artificial Sequence
  ENSG00000007933_5 (sequence is synthesized)
gcagggactataaagaaccaggtgtattcaatggaaagcgtgtcctggtggttggcctggggaattcgggctgtgatattgccacagaactcagccgcacagcagaacaggtcatgatca

SEQ ID NO: 9080 - DNA, 120 bp, Artificial Sequence
  ENSG00000007933_6 (sequence is synthesized)
gttccagaagtggctcctgggtgatgagccgggtctgggacaatggttatccttgggacatgctgctcgtcactcgatttggaaccttcctcaagaacaatttaccgacagccatctctg

SEQ ID NO: 9081 - DNA, 120 bp, Artificial Sequence
  ENSG00000007933_7 (sequence is synthesized)
actggttgtacgtgaagcagatgaatgcaagattcaagcatgaaaactatggcttgatgcctttaaatggagtcctgaggaaagagcctgtatttaacgatgagctcccagcaagcattc

SEQ ID NO: 9082 - DNA, 120 bp, Artificial Sequence
  ENSG00000007933_8 (sequence is synthesized)
aaagcctaacgtgaaggaattcacagagacctcggccatttttgaggatgggaccatatttgagggcattgactgtgtaatctttgcaacagggtatagttttgcctaccccttccttga

SEQ ID NO: 9083 - DNA, 120 bp, Artificial Sequence
  ENSG00000007933_9 (sequence is synthesized)
tgagtctatcatcaaaagcagaaacaatgagatcattttatttaaaggagtatttcctcctctacttgagaagtcaaccatagcagtgattggctttgtccagtcccttggggctgccat

SEQ ID NO: 9084 - DNA, 120 bp, Artificial Sequence
  ENSG00000007933_10 (sequence is synthesized)
tcccacagttgacctccagtcccgctgggcagcacaagtaataaagggaacttgtactttgccttctatggaagacatgatgaatgatattaatgagaaaatggagaaaaagcgcaaatg

SEQ ID NO: 9085 - DNA, 120 bp, Artificial Sequence
  ENSG00000007933_11 (sequence is synthesized)
gtttggcaaaagcgagaccatacagacagattacattgtttatatggatgaactctcctccttcattggggcaaagcccaacatcccatggctgtttctcacagatcccaaattggccat

SEQ ID NO: 9086 - DNA, 120 bp, Artificial Sequence
  ENSG00000007933_12 (sequence is synthesized)
ggaagtttattttggcccttgtagtccctaccagtttaggctggtgggcccagggcagtggccaggagccagaaatgccatactgacccagtgggaccggtcgttgaaacccatgcagac

SEQ ID NO: 9087 - DNA, 120 bp, Artificial Sequence
  ENSG00000007933_13 (sequence is synthesized)
acgagtggtcgggagacttcagaagccttgcttctttttccattggctgaagctctttgcaattcctattctgttaatcgctgttttccttgtgttgacctaatcatcattttctctagg

SEQ ID NO: 9088 - DNA, 120 bp, Artificial Sequence
  ENSG00000007933_14 (sequence is synthesized)
atttctgaaagttactgacaatacccagacaggggctttgctatttaaaaattaaaattttcacaccacctgcttttctattcagcatcttttgcagtactctgtagacattagtcagta

SEQ ID NO: 9089 - DNA, 120 bp, Artificial Sequence
  ENSG00000007933_15 (sequence is synthesized)
atacagtgttatttctaggctctgaaatagccactttaagaatcatgtcatgatcttaagagagcactaatcatttctgtttgagttccactaacacttcaaaatcagaactatgttctt

SEQ ID NO: 9090 - DNA, 120 bp, Artificial Sequence
  ENSG00000007933_16 (sequence is synthesized)
tatatctaacttaaatcatttcctgaaacattttgacatgattcctttttccttttaaacaatgtatgaaagatgtattttaaatctaaataaagagcaaattaagcagaataattataa

SEQ ID NO: 9091 - DNA, 73 bp, Artificial Sequence
  ENSG00000007933_17 (sequence is synthesized)
ccaggctggagtgcaatggcacaatctgagctcactacaacctccacctcctgggatgtgtgccatcacgccc

SEQ ID NO: 9092 - DNA, 120 bp, Artificial Sequence
  ENSG00000007933_18 (sequence is synthesized)
gaattataggcatgagccaccactcctggccagccatatcttatacacagtgatcttaaccaaagcctcatactcaaatttagtttgcaagacgttgctgaagatagaacgcactgctga

SEQ ID NO: 9093 - DNA, 120 bp, Artificial Sequence
  ENSG00000007933_19 (sequence is synthesized)
tatggctattgagaggaacacagccaaagacagctaatttgtcttttcttgctgctcgaggaagactttaaaatttgaacctggcagcataggttgataaaactgaactgcaacatgtgc

SEQ ID NO: 9094 - DNA, 120 bp, Artificial Sequence
  ENSG00000007933_20 (sequence is synthesized)
tacccttcaagaaaaagaaaggatagcccagagggtagagcctcaggccctgagggcagaggcctgagccaaagccttcaagcctgaaggaatttgtcctactggatttcaaaattgctt

SEQ ID NO: 9095 - DNA, 120 bp, Artificial Sequence
  ENSG00000007933_21 (sequence is synthesized)
agaggatggcctgtaataggctgaacaatttaacaatgcccctcctcaaagatatcacatccaaattcctggaacctgtaaatgttatcttacttacaagagaaaagggtatttgcaaat

SEQ ID NO: 9096 - DNA, 120 bp, Artificial Sequence
  ENSG00000007933_22 (sequence is synthesized)
ataattaagttaaaaatcttaagatggagagatttttctgcattatgtgggtgagccccaaacgctataatgaatgcatcgttaaaagagagaggcagagggagatttaacacaaagaga

SEQ ID NO: 9097 - DNA, 120 bp, Artificial Sequence
  ENSG00000007933_23 (sequence is synthesized)
ccattgtattttggaagaagataacttgttttctagtttcacaggttcacagatagaaattttgcctcatcctggtccatatccagagtctcatttatacctgatttagataatttatat

SEQ ID NO: 9098 - DNA, 120 bp, Artificial Sequence
  ENSG00000007933_24 (sequence is synthesized)
gatgatgagattttggacttttgaattgaaaatatataaatgagagttgagacttgatttcatgctgctatgggttgagactttgaggatgttgggattgggttaatgtattttgcagat

SEQ ID NO: 9099 - DNA, 120 bp, Artificial Sequence
  ENSG00000007944_0 (sequence is synthesized)
aggacaggggcagctggcgggcagcgggtgagggggtggcggggacgcgagtggcggccgcggggccccggacaagggtccgcagagctgcagccttcgagggccagccctctccgagtc

SEQ ID NO: 9100 - DNA, 120 bp, Artificial Sequence
  ENSG00000007944_1 (sequence is synthesized)
tgcagccttcgagggccagccctctccgagtccggggctgggtcccaccagtgacaaggcggcagccccgcgcacaccaaagagaaggcggctgtggcggcagcggcagccccagccatg

SEQ ID NO: 9101 - DNA, 120 bp, Artificial Sequence
  ENSG00000007944_2 (sequence is synthesized)
ctgtgttatgtgacgaggccggacgcggtgctgatggaggtggaggtggaggcgaaagccaacggcgaggactgcctcaaccaggtgtgcaggcgactgggaatcatagaagttgactat

SEQ ID NO: 9102 - DNA, 120 bp, Artificial Sequence
  ENSG00000007944_3 (sequence is synthesized)
tttggactgcagtttacgggtagcaaaggtgaaagtttatggctaaacctgagaaaccggatctcccagcagatggatgggctagccccttacaggcttaaacttagagtcaagttcttc

SEQ ID NO: 9103 - DNA, 120 bp, Artificial Sequence
  ENSG00000007944_4 (sequence is synthesized)
gtggagcctcatctcatcttacaggagcagactaggcatatctttttcttgcacatcaaggaggccctcttggcaggccacctcttgtgttccccagagcaggcagtggaactcagtgcc

SEQ ID NO: 9104 - DNA, 120 bp, Artificial Sequence
  ENSG00000007944_5 (sequence is synthesized)
ctcctggcccagaccaagtttggagactacaaccagaacactgccaagtataactatgaggagctctgtgccaaggagctctcctctgccaccttgaacagcattgttgcaaaacataag

SEQ ID NO: 9105 - DNA, 120 bp, Artificial Sequence
  ENSG00000007944_6 (sequence is synthesized)
gagttggaggggaccagccaggcttcagctgaataccaagttttgcagattgtgtcggcaatggaaaactatggcatagaatggcattctgtgcgggatagcgaagggcagaaactgctc

SEQ ID NO: 9106 - DNA, 120 bp, Artificial Sequence
  ENSG00000007944_7 (sequence is synthesized)
attggggttggacctgaaggaatctcaatttgtaaagatgactttagcccaattaataggatagcttatcctgtggtgcagatggccacccagtcaggaaagaatgtatatttgacggtc

SEQ ID NO: 9107 - DNA, 120 bp, Artificial Sequence
  ENSG00000007944_8 (sequence is synthesized)
accaaggaatctgggaacagcatcgtgctcttgtttaaaatgatcagcaccagggcggccagcgggctctaccgagcgataacagagacgcacgcattctacaggtgtgacacagtgacc

SEQ ID NO: 9108 - DNA, 120 bp, Artificial Sequence
  ENSG00000007944_9 (sequence is synthesized)
agcgccgtgatgatgcagtatagccgtgacttgaagggccacttggcatctctgtttctgaatgaaaacattaaccttggcaagaaatatgtctttgatattaaaagaacatcaaaggag

SEQ ID NO: 9109 - DNA, 120 bp, Artificial Sequence
  ENSG00000007944_10 (sequence is synthesized)
gtgtatgaccatgccaggagggctctgtacaatgctggcgttgtggacctcgtttcaagaaacaaccagagcccttcacactcgcctctgaagtcctcagaaagcagcatgaactgcagc

SEQ ID NO: 9110 - DNA, 120 bp, Artificial Sequence
  ENSG00000007944_11 (sequence is synthesized)
agctgcgagggcctcagctgccagcagacccgggtgctgcaggagaagctacgcaagctgaaggaagccatgctgtgcatggtgtgctgcgaggaggagatcaactccaccttctgtccc

SEQ ID NO: 9111 - DNA, 120 bp, Artificial Sequence
  ENSG00000007944_12 (sequence is synthesized)
gagcatgtccagcacgtctatctgccaacgcacaccagtcttctcaatctgactgtaatctaatctgttgtgcttttgttggacttggcatgtttccatgaactgcactattataaacta

SEQ ID NO: 9112 - DNA, 120 bp, Artificial Sequence
  ENSG00000007944_13 (sequence is synthesized)
ttaaaatgatagattgtggagaaagtaattattccaacacccatctgccatgcgatgttaaaaaaaaaaaaaaggaagaaaaataacacagctactcctcactgcaaaaacatatccatg

SEQ ID NO: 9113 - DNA, 120 bp, Artificial Sequence
  ENSG00000007944_14 (sequence is synthesized)
cgtagaatcaacaactccagtcatgggaccaggaggagctctgggacgcagacacattccttggatgttgattttttttatgatctagtaaaggaataggtaaagtctttgatgtcagtg

SEQ ID NO: 9114 - DNA, 120 bp, Artificial Sequence
  ENSG00000007944_15 (sequence is synthesized)
aagtggcaacatagccaaaaagttgggtaccttttaggaaatgatgttgtaagtctccttaatgtatcctgaggtaagtttcctactggcagcagattttgtaagaattacttttaagaa

SEQ ID NO: 9115 - DNA, 120 bp, Artificial Sequence
  ENSG00000007944_16 (sequence is synthesized)
tttcattctttttgtatggtcatggagctccaaccatttttaataggaaagtcttttgtaaattgttgtcgttttaatgtcatttctgtctttataacttgatcaagaatgattggaagg

SEQ ID NO: 9116 - DNA, 120 bp, Artificial Sequence
  ENSG00000007944_17 (sequence is synthesized)
caaacaggtttacaaatcaattctgtgacttttaaaaagttgacaatgttgtcagatttaaaccagtgtggctagtaaaaagcagctcactcaatgtgggtggctccctattcctttacg

SEQ ID NO: 9117 - DNA, 120 bp, Artificial Sequence
  ENSG00000007944_18 (sequence is synthesized)
ctccccctatccctaccccacaagcctttcgattataaaatactaccaatcttgttataagattactgtggagtagtcaagtactccccgggccttctgagctggtggaatattttattt

SEQ ID NO: 9118 - DNA, 120 bp, Artificial Sequence
  ENSG00000007944_19 (sequence is synthesized)
cagactgaaaacagagagcactctccttgggaagggaaagcggagcttgctgagtgagagatggagcctcatggtgtacaactgagggtagttaactcatcacttctcccaagcactcga

SEQ ID NO: 9119 - DNA, 120 bp, Artificial Sequence
  ENSG00000007944_20 (sequence is synthesized)
tcccagcttcacccactggtgttgctttgcttgaactgttcaagccttttatagccttaccataagtatttagatatggtgtccttttctgtttttggggggggagttttgttgtgtttt

SEQ ID NO: 9120 - DNA, 120 bp, Artificial Sequence
  ENSG00000007944_21 (sequence is synthesized)
tttaaagtaagtgcttaagtattaactttgggttgtcccctctgtatgtttcgaaggggttttggttctttttgcttctgttttcttaaacatgttttccactcccacttgggcattttg

SEQ ID NO: 9121 - DNA, 120 bp, Artificial Sequence
  ENSG00000007944_22 (sequence is synthesized)
gaagctggtcagctagcaggttttctgggatgtcgggagacctagatgaccttatcgggtgcaatactagctaaggtaaagctagaaacctacactgtcactttactgagatttctgagt

SEQ ID NO: 9122 - DNA, 120 bp, Artificial Sequence
  ENSG00000007944_23 (sequence is synthesized)
atacttttcatattgccttaatgtagcagtaatgtgtttatgcatttgtttctttgcacagacattttgtcaaatattaaaactctacttttttatggcacatattagcatataagcctt

SEQ ID NO: 9123 - DNA, 120 bp, Artificial Sequence
  ENSG00000007944_24 (sequence is synthesized)
tattccaagaggtatttattttttcacttgtaaaaaaataatgtttccacgtaaagaactctgttatatcctagaggactctgtcttttatattcgggataataaagactttaaagcaaa

SEQ ID NO: 9124 - DNA, 120 bp, Artificial Sequence
  ENSG00000007952_0 (sequence is synthesized)
gctggtctatctaagctgatagcacagttctgtccagagaaggaaggcagaataaacttattcattcccaggaactcttggggtaggtgtgtgtttttcacatcttaaaggctcacagac

SEQ ID NO: 9125 - DNA, 120 bp, Artificial Sequence
  ENSG00000007952_1 (sequence is synthesized)
cctgcgctggacaaatgttccattcctgaaggacctctccagaatccggattgctgaatcttccctgttgcctagaagggctccaaaccacctcttgacaatgggaaactgggtggttaa

SEQ ID NO: 9126 - DNA, 120 bp, Artificial Sequence
  ENSG00000007952_2 (sequence is synthesized)
ccactggttttcagttttgtttctggttgtttggttagggctgaatgttttcctgtttgtggatgccttcctgaaatatgagaaggccgacaaatactactacacaagaaaaatccttgg

SEQ ID NO: 9127 - DNA, 120 bp, Artificial Sequence
  ENSG00000007952_3 (sequence is synthesized)
gtcaacattggcctgtgcccgagcgtctgctctctgcttgaattttaacagcacgctgatcctgcttcctgtgtgtcgcaatctgctgtccttcctgaggggcacctgctcattttgcag

SEQ ID NO: 9128 - DNA, 120 bp, Artificial Sequence
  ENSG00000007952_4 (sequence is synthesized)
ccgcacactgagaaagcaattggatcacaacctcaccttccacaagctggtggcctatatgatctgcctacatacagctattcacatcattgcacacctgtttaactttgactgctatag

SEQ ID NO: 9129 - DNA, 120 bp, Artificial Sequence
  ENSG00000007952_5 (sequence is synthesized)
cagaagccgacaggccacagatggctcccttgcctccattctctccagcctatctcatgatgagaaaaaggggggttcttggctaaatcccatccagtcccgaaacacgacagtggagta

SEQ ID NO: 9130 - DNA, 120 bp, Artificial Sequence
  ENSG00000007952_6 (sequence is synthesized)
tgtgacattcaccagcattgctggtctcactggagtgatcatgacaatagccttgattctcatggtaacttcagctactgagttcatccggaggagttattttgaagtcttctggtatac

SEQ ID NO: 9131 - DNA, 120 bp, Artificial Sequence
  ENSG00000007952_7 (sequence is synthesized)
tcaccacctttttatcttctatatccttggcttagggattcacggcattggtggaattgtccggggtcaaacagaggagagcatgaatgagagtcatcctcgcaagtgtgcagagtcttt

SEQ ID NO: 9132 - DNA, 120 bp, Artificial Sequence
  ENSG00000007952_8 (sequence is synthesized)
tgagatgtgggatgatcgtgactcccactgtaggcgccctaagtttgaagggcatccccctgagtcttggaagtggatccttgcaccggtcattctttatatctgtgaaaggatcctccg

SEQ ID NO: 9133 - DNA, 120 bp, Artificial Sequence
  ENSG00000007952_9 (sequence is synthesized)
gttttaccgctcccagcagaaggttgtgattaccaaggttgttatgcacccatccaaagttttggaattgcagatgaacaagcgtggcttcagcatggaagtggggcagtatatctttgt

SEQ ID NO: 9134 - DNA, 120 bp, Artificial Sequence
  ENSG00000007952_10 (sequence is synthesized)
tggaatggcatccttttactttgacctctgctccagaggaagatttcttctccattcatatccgagcagcaggggactggacagaaaatctcataagggctttcgaacaacaatattcac

SEQ ID NO: 9135 - DNA, 120 bp, Artificial Sequence
  ENSG00000007952_11 (sequence is synthesized)
caattcccaggattgaagtggatggtccctttggcacagccagtgaggatgttttccagtatgaagtggctgtgctggttggagcaggaattggggtcaccccctttgcttctatcttga

SEQ ID NO: 9136 - DNA, 120 bp, Artificial Sequence
  ENSG00000007952_12 (sequence is synthesized)
aatccatctggtacaaattccagtgtgcagaccacaacctcaaaacaaaaaagatctatttctactggatctgcagggagacaggtgccttttcctggttcaacaacctgttgacttccc

SEQ ID NO: 9137 - DNA, 120 bp, Artificial Sequence
  ENSG00000007952_13 (sequence is synthesized)
tggaacaggagatggaggaattaggcaaagtgggttttctaaactaccgtctcttcctcaccggatgggacagcaatattgttggtcatgcagcattaaactttgacaaggccactgaca

SEQ ID NO: 9138 - DNA, 120 bp, Artificial Sequence
  ENSG00000007952_14 (sequence is synthesized)
tcgtgacaggtctgaaacagaaaacctcctttgggagaccaatgtgggacaatgagttttctacaatagctacctcccaccccaagtctgtagtgggagttttcttatgtggccctcgga

SEQ ID NO: 9139 - DNA, 120 bp, Artificial Sequence
  ENSG00000007952_15 (sequence is synthesized)
ctttggcaaagagcctgcgcaaatgctgtcaccgatattccagtctggatcctagaaaggttcaattctacttcaacaaagaaaatttttgagttataggaataaggacggtaatctgca

SEQ ID NO: 9140 - DNA, 120 bp, Artificial Sequence
  ENSG00000007952_16 (sequence is synthesized)
ttttgtctctttgtatcttcagtaatttacttggtctcgtcaggtttgagcagtcactttaggataagaatgtgcctctcaagccttgactccctggtattctttttttgattgcattca

SEQ ID NO: 9141 - DNA, 120 bp, Artificial Sequence
  ENSG00000007952_17 (sequence is synthesized)
acttcgttacttgagcttcagcaacttaagaacttctgaagttcttaaagttctgaagttcttaaagcccatggatcctttctcagaaaaataactgtaaatctttctggacagccatga

SEQ ID NO: 9142 - DNA, 120 bp, Artificial Sequence
  ENSG00000007952_18 (sequence is synthesized)
ctgtagcaaggcttgatagcagaggtttggtggttcagagttatacaactaatcccaggtgattttatcaattccagtgttaccatctcctgagttttggtttgtaatcttttgtccctc

SEQ ID NO: 9143 - DNA, 120 bp, Artificial Sequence
  ENSG00000007952_19 (sequence is synthesized)
ccacccccacagaagatttctaagtagggtgactttttaaataaaaatttattgaataattaatgataaaacataataataaacataaataataaacaaaattaccgagaaccccatccc

SEQ ID NO: 9144 - DNA, 120 bp, Artificial Sequence
  ENSG00000007952_20 (sequence is synthesized)
catataacaccaacagtgtacatgtttactgtcacttttgatatggtcttatccagtgtgaacagcaatttattcttatttttgctcatcaaaaaataaaggattttcttcttcacttga

SEQ ID NO: 9145 - DNA, 120 bp, Artificial Sequence
  ENSG00000007952_21 (sequence is synthesized)
atccatccccatataacaccaacagtgtacatgtttactgtcacttttgatatggtcttatccagtgtgaacagcaatttattcttatttttgctcatcaaaaaataaaggattttcttc

SEQ ID NO: 9146 - DNA, 120 bp, Artificial Sequence
  ENSG00000007968_0 (sequence is synthesized)
agagaaagactcaaggactagagagcgagccgcaaggaagtcggtgcagtcgagacccccctccccatcccagcgcatcgcgtctccgccgagcttgagggcacgccggggacccctccc

SEQ ID NO: 9147 - DNA, 120 bp, Artificial Sequence
  ENSG00000007968_1 (sequence is synthesized)
gaccccaggtgccgaggccttggggagcgcggggcgtcccgggtcgcggtgccctcgggacgagacagcccctggcagtgccaccaccgcagccgccgggcgatctccaagcggcgatct

SEQ ID NO: 9148 - DNA, 120 bp, Artificial Sequence
  ENSG00000007968_2 (sequence is synthesized)
aagcggcgatctctaagcgctgctctctgctcggccgcgggccaggaggggagggtccggccttgccccgcaggcgtccattggcggcttcccccggcctccgcgccatgccgcgggccg

SEQ ID NO: 9149 - DNA, 120 bp, Artificial Sequence
  ENSG00000007968_3 (sequence is synthesized)
tgtgaaaggcggcagcaccggaacccgcaggtgtccgcgggcgcgccaagcccttttgggtagggggcgccttactcgctatgctgcaagggccccgggccttggcttcggccgctgggc

SEQ ID NO: 9150 - DNA, 120 bp, Artificial Sequence
  ENSG00000007968_4 (sequence is synthesized)
agaccccgaaggtggtgcccgcgatgagccccacagagctgtggccatccggcctcagcagcccccagctctgcccagctactgctacctactacacaccgctgtacccgcagacggcgc

SEQ ID NO: 9151 - DNA, 120 bp, Artificial Sequence
  ENSG00000007968_5 (sequence is synthesized)
ctcccgcagcggcgccaggcacctgcctcgacgccactccccacggacccgagggccaagttgtgcgatgcctgccggcaggccggctgccggccaaaaggaagctggatctggagggga

SEQ ID NO: 9152 - DNA, 120 bp, Artificial Sequence
  ENSG00000007968_6 (sequence is synthesized)
ttgggaggcccgtcgtccctgagttcccaacccccaaggggaagtgcatcagagtggatggcctccccagccccaaaacccccaaatcccccggggagaagactcggtatgacacttcgc

SEQ ID NO: 9153 - DNA, 120 bp, Artificial Sequence
  ENSG00000007968_7 (sequence is synthesized)
tggggctgctcaccaagaagttcatttacctcctgagcgagtcagaggatggggtcctggacctgaactgggccgctgaggtgctggacgtgcagaagcggcgcatctatgacatcacca

SEQ ID NO: 9154 - DNA, 120 bp, Artificial Sequence
  ENSG00000007968_8 (sequence is synthesized)
acgtgctggaaggcatccagctcatccgcaagaaggccaagaacaacatccagtgggtaggcaggggaatgtttgaagaccccaccagacctgggaagcagcaacagctggggcaggagc

SEQ ID NO: 9155 - DNA, 120 bp, Artificial Sequence
  ENSG00000007968_9 (sequence is synthesized)
tgaaggagctgatgaacacggagcaggccttggaccagctcatccagagctgctctctgagcttcaagcacctgactgaggacaaggccaacaagaggctggcctatgtgacttaccagg

SEQ ID NO: 9156 - DNA, 120 bp, Artificial Sequence
  ENSG00000007968_10 (sequence is synthesized)
atatccgtgctgttggcaactttaaggagcagacagtgattgccgtcaaggcccctccgcagacgagactggaagtgcccgacaggactgaggacaacctgcagatatatctcaagagca

SEQ ID NO: 9157 - DNA, 120 bp, Artificial Sequence
  ENSG00000007968_11 (sequence is synthesized)
cccaagggcccatcgaagtctacctgtgcccagaggaggtgcaggagccggacagtccttccgaggagcctctcccctctacctccaccctctgccccagccctgactctgcccagccca

SEQ ID NO: 9158 - DNA, 120 bp, Artificial Sequence
  ENSG00000007968_12 (sequence is synthesized)
gcagcagcaccgaccctagcatcatggagcccacagcatcctcagtgccagcaccagcgccaaccccccagcaggccccaccgcctccatccctggtccccttggaggctactgacagcc

SEQ ID NO: 9159 - DNA, 120 bp, Artificial Sequence
  ENSG00000007968_13 (sequence is synthesized)
tgctggagctgccgcacccactcctgcagcagactgaggaccagttcctgtccccgaccctggcgtgcagctcccctctgatcagcttctccccatccttggaccaggacgactacctgt

SEQ ID NO: 9160 - DNA, 120 bp, Artificial Sequence
  ENSG00000007968_14 (sequence is synthesized)
ggggcttggaggcgggtgagggcatcagcgatctcttcgactcctacgaccttggggacctgttgattaattgagtggccctgcctgcccccagcagcctgcccccgactctacctcctc

SEQ ID NO: 9161 - DNA, 120 bp, Artificial Sequence
  ENSG00000007968_15 (sequence is synthesized)
acagacaggctgacagcccctctgcctgcacagggacattggacactaggtgctgccctcagggcatggggtctcctcgcctttcctgccccagccggcagaagctgtgtggggagatat

SEQ ID NO: 9162 - DNA, 120 bp, Artificial Sequence
  ENSG00000007968_16 (sequence is synthesized)
gaatggtacgggtgaggagtggataaggggtggtcctcaccttcctaatggaagctgggcctagggaggcccatccagtcttctgacttctgacctctcacaagaaggctgcaggtgagg

SEQ ID NO: 9163 - DNA, 120 bp, Artificial Sequence
  ENSG00000007968_17 (sequence is synthesized)
tggccaagtccagggaaaggccctgctacctccttttgaggggtaattaggaccctcgacgtaccaagaagcacataatgcctttgtatttatttcaggttgagttgtttgtttgtcctc

SEQ ID NO: 9164 - DNA, 120 bp, Artificial Sequence
  ENSG00000007968_18 (sequence is synthesized)
cctgagttttagcagggaggttgttctagtttttagtgagacctctgcagacaggcccatcactgtccatgttccagggcaggtctgggtttccaagggaggggcccaggctacatcctt

SEQ ID NO: 9165 - DNA, 120 bp, Artificial Sequence
  ENSG00000007968_19 (sequence is synthesized)
ggtttccccactgtggtgggggctgggactctgaggggctgtccagtctgctagaatgctaattgcacttaggcctcatggttctagtaaacggcagctgtgggcccttttgcctcttcc

SEQ ID NO: 9166 - DNA, 120 bp, Artificial Sequence
  ENSG00000007968_20 (sequence is synthesized)
cctgttcttggcctcacatctccagctgagctgccggtcttggcttcctggtcgcctctgtcccagagatggtcccagggagccatcctagggcaggtagcactgaggctcctgtggaaa

SEQ ID NO: 9167 - DNA, 120 bp, Artificial Sequence
  ENSG00000007968_21 (sequence is synthesized)
aagtccttacctctccccttgagatgtaaaaatggtccagcagagacaagctcccgtggaaaacagacaggagcatgggggcagctgtcatggctgtggcgggcacttttcctcagagtt

SEQ ID NO: 9168 - DNA, 120 bp, Artificial Sequence
  ENSG00000007968_22 (sequence is synthesized)
tctgccttgcgctggtccaggagccattttgcaccaaggacttggtaggcagaggcagccccactgtaaagaagggtcagattaaaacaaaaaactgccaaaagcatcccctctgccccc

SEQ ID NO: 9169 - DNA, 120 bp, Artificial Sequence
  ENSG00000007968_23 (sequence is synthesized)
catgtggcactggcatcattctctgcttccctgggaggaattttttcaccatgttattgaaggggatggttcattaaggactccacccctcagagctcactcagaccccaaggacagagg

SEQ ID NO: 9170 - DNA, 120 bp, Artificial Sequence
  ENSG00000007968_24 (sequence is synthesized)
tgactggggcttggtgacttgttcactccttttttcccaggtatactgaaggggtgacagagagaggtcttcatggcagaccaggccttcacagctaatggggagaggaactcatgttac

SEQ ID NO: 9171 - DNA, 120 bp, Artificial Sequence
  ENSG00000007968_25 (sequence is synthesized)
ctctgcaggcctggggtcctgagggggtcttttggcttcagcctgttcccccagaggcttgatcatcccacattgtcccttcagctcagctgctcttctcccccacccaccctgggatgt

SEQ ID NO: 9172 - DNA, 120 bp, Artificial Sequence
  ENSG00000007968_26 (sequence is synthesized)
gggtgctctgggctgaaccaaggctatgacttctggagagaggctcaggggttggtctgagaggcctgccatccacccctcagggagctaggttttctcagaggctcagctggacagcac

SEQ ID NO: 9173 - DNA, 120 bp, Artificial Sequence
  ENSG00000007968_27 (sequence is synthesized)
tttttagaaaagtttgtagcattaagctggtttaaaatatgaagttggttttgttggatggctcctgagctgactgactgatgtctgaagtttgagacgagggattatttcagggtgggg

SEQ ID NO: 9174 - DNA, 120 bp, Artificial Sequence
  ENSG00000007968_28 (sequence is synthesized)
cccaatgtgatctaatgcccagctggggacaattgtgcctcatcatttgctcaaattcctgggcccccaagttagccccctcccaggagtggtcagcgggtcacagctgcccccactcta

SEQ ID NO: 9175 - DNA, 120 bp, Artificial Sequence
  ENSG00000007968_29 (sequence is synthesized)
taagcagggctaattgtgtaccctttgcagaaatgcttttggtctcctacccaaatactcacaagggtcttatcagacgcccgtcttaaagtccagcatgctcagggaccctgtgtagga

SEQ ID NO: 9176 - DNA, 120 bp, Artificial Sequence
  ENSG00000007968_30 (sequence is synthesized)
tctcgtttgtggtgagtgggctgctctgaggtctccactgggctgccatttagccatgtgccatctctgaagtcagaggtgtttgactcccattccttgggctctggagctttccccaag

SEQ ID NO: 9177 - DNA, 120 bp, Artificial Sequence
  ENSG00000007968_31 (sequence is synthesized)
aattacatcagagaaaaggaagaaggggcctgcaggacccattgggaatgagtttaatactgaagtctggaatgtaagctcatgccctagaggcctctccatatggctggtcaggggagc

SEQ ID NO: 9178 - DNA, 120 bp, Artificial Sequence
  ENSG00000007968_32 (sequence is synthesized)
tgccttcaggcttgtgccccgtgtgctcagcagctgcctctgtccccctctactgtccctttcacaccttgcctggccaaggggctagacctcccaggctaagcctcagattcagtgcag

SEQ ID NO: 9179 - DNA, 120 bp, Artificial Sequence
  ENSG00000007968_33 (sequence is synthesized)
cagtgcaggacacaagctcatgcccccgtcttgccagtgacacttgaagcctcccgacttccacagagtgcttcaggacacattttgagtggtattttcttttctttttttcttcttttt

SEQ ID NO: 9180 - DNA, 66 bp, Artificial Sequence
  ENSG00000007968_34 (sequence is synthesized)
tttggtcgagacggggttttggcctcccaaagtgttgagatgacaggcacgagccaccaggcccag

SEQ ID NO: 9181 - DNA, 120 bp, Artificial Sequence
  ENSG00000007968_35 (sequence is synthesized)
ccaaagtgttgagatgacaggcacgagccaccaggcccagcctgagtggtattttctttagggaccaggtagactttaaaacgagggtaagagaaaagccagtgtctttctgaggtaaat

SEQ ID NO: 9182 - DNA, 120 bp, Artificial Sequence
  ENSG00000007968_36 (sequence is synthesized)
aatttctgccaggaaacttcccagccccaccagcagcccccctaaaaaaatcactcgtgtccccagggacttctaaagcttggggctccaggaaatcatccagtagagttggagattcag

SEQ ID NO: 9183 - DNA, 120 bp, Artificial Sequence
  ENSG00000007968_37 (sequence is synthesized)
agatttcttgaagccagggacatgctcctaactcctttcccattaaaggtgttagaatagaccagagggtgtcccttttccacagtaatgggatcggctggtgtgccttcagggaggaag

SEQ ID NO: 9184 - DNA, 120 bp, Artificial Sequence
  ENSG00000007968_38 (sequence is synthesized)
agggaggtggtcaagcttgaaaaactggctttaggatggttctgactttgttctccctccccaagtgttctcaacctccattctgcagtgttcagagttttagggaaagggtttgggtgc

SEQ ID NO: 9185 - DNA, 120 bp, Artificial Sequence
  ENSG00000007968_39 (sequence is synthesized)
cccagcatccaggtgttgtgtggcttagcgcatgtgaagtgaaaaccttctggggttgtttggaagcagctttctggttcttgtgattgtatcctgaggtcccagaaccctattctccca

SEQ ID NO: 9186 - DNA, 120 bp, Artificial Sequence
  ENSG00000007968_40 (sequence is synthesized)
cgaggatcctcagtgaccatggtggccacacgcctggccagcctgctggctcctgggtgagctgaagaaccttgcctgtggcacttttcgagggtgagctggaaccgagagaacatggtc

SEQ ID NO: 9187 - DNA, 120 bp, Artificial Sequence
  ENSG00000007968_41 (sequence is synthesized)
cccgtgctgggactcatgcgggtcatttcctgccggcctggtttcgcctggtcgtgtctttatgagcaccatgtaagcctccttgtattgagataattgggcattaaacattaaactgca

SEQ ID NO: 9188 - DNA, 120 bp, Artificial Sequence
  ENSG00000007968_42 (sequence is synthesized)
agatgaagcctttacataaggcaacattttttatgatttataatgtaaggcaacattttttatgatttatattcccatttgctttccaaagggatctaaggtagcttatgagattaacag

SEQ ID NO: 9189 - DNA, 120 bp, Artificial Sequence
  ENSG00000007968_43 (sequence is synthesized)
gttacagattgtattatttctaagttgtacaaggagtgagaaagtaatgttcagaggcttaggagaggtgggtgaaggtgctccctggcaggtttggggtttgaattttgaccagacagt

SEQ ID NO: 9190 - DNA, 120 bp, Artificial Sequence
  ENSG00000008018_0 (sequence is synthesized)
gtccggtcaaggcagccatctcgccgtgagacagcaagtgtcggatccgcaggcgcagccgtgcgatgttgtcctctacagccatgtattcggctcctggcagagacttggggatggaac

SEQ ID NO: 9191 - DNA, 120 bp, Artificial Sequence
  ENSG00000008018_1 (sequence is synthesized)
cgcacagagccgcgggccctttgcagctgcgattttcgccctacgttttcaacggaggtactatactggcaattgctggagaagattttgcaattgttgcttctgatactcgattgagtg

SEQ ID NO: 9192 - DNA, 120 bp, Artificial Sequence
  ENSG00000008018_2 (sequence is synthesized)
aagggttttcaattcatacgcgggatagccccaaatgttacaaattaacagacaaaacagtcattggatgcagcggttttcatggagactgtcttacgctgacaaagattattgaagcaa

SEQ ID NO: 9193 - DNA, 120 bp, Artificial Sequence
  ENSG00000008018_3 (sequence is synthesized)
ttgctgcaatgctgtctacaatcctgtattcaaggcgcttctttccatactatgtttacaacatcatcggtggacttgatgaagaaggaaagggggctgtatacagctttgatccagtag

SEQ ID NO: 9194 - DNA, 120 bp, Artificial Sequence
  ENSG00000008018_4 (sequence is synthesized)
ggtcttaccagagagactccttcaaggctggaggctcagcaagtgccatgctacagcccctgcttgacaaccaggttggttttaagaacatgcagaatgtggagcatgttccgctgtcct

SEQ ID NO: 9195 - DNA, 120 bp, Artificial Sequence
  ENSG00000008018_5 (sequence is synthesized)
tggacagagccatgcggctggtgaaagatgtcttcatttctgcggctgagagagatgtgtacactggggacgcactccggatctgcatagtgaccaaagagggcatcagggaggaaactg

SEQ ID NO: 9196 - DNA, 120 bp, Artificial Sequence
  ENSG00000008018_6 (sequence is synthesized)
tttccttaaggaaggactgatctgtgtgctcttatcaccaatcagttcagacctggttgattttgtactttggaactgtaccttggatggttttgtttattaaaagagaaacctgaagta

SEQ ID NO: 9197 - DNA, 120 bp, Artificial Sequence
  ENSG00000008018_7 (sequence is synthesized)
ttcttgctcagaataccttcatgatttcttgctaaaattccaaaatctttagcttggcatttgggattttctacagtaggaaccctgtccatcacataaaccttaacgtcactacatgtg

SEQ ID NO: 9198 - DNA, 120 bp, Artificial Sequence
  ENSG00000008018_8 (sequence is synthesized)
cttatgcaaaaagggctgcctgaatgagttgcttgaatgtatgtactatttgaataattacctgtttgccattgcttgctgtttatattacctggaatgccatccttttcttcttgagag

SEQ ID NO: 9199 - DNA, 120 bp, Artificial Sequence
  ENSG00000008018_9 (sequence is synthesized)
ctttagcacaaatccctcctcagtaaaaatagtggcttaagtttcctgagtgcttacgtctgtgaggcaccatgcctttaatttccactattgcattgaagcagtggttatagttatcag

SEQ ID NO: 9200 - DNA, 120 bp, Artificial Sequence
  ENSG00000008018_10 (sequence is synthesized)
tcaagccttgtacattaaaatatacacacccaaatatatatacacaccttgtgacacaggtactgttatcatcaacttgcatttggaggatttgtccaagatcacatacctagtaagtag

SEQ ID NO: 9201 - DNA, 120 bp, Artificial Sequence
  ENSG00000008018_11 (sequence is synthesized)
caagagtgggtctctgtctcatgtaattccagagcccaggtgcttagtcatactccagtgccatagcacttatagctaacacttactagaggaccagttacatgtcagggactgctataa

SEQ ID NO: 9202 - DNA, 120 bp, Artificial Sequence
  ENSG00000008018_12 (sequence is synthesized)
gggcttacatatttgatcctttgaacaccctaatgaggtagcaactgcagtgatctctgttgtatatatgatgaaattgacgctttgagaagtaacttacccacagtctcatatctgcga

SEQ ID NO: 9203 - DNA, 120 bp, Artificial Sequence
  ENSG00000008018_13 (sequence is synthesized)
aacgggaaagccagaattagaacccaggcggtctgcttttggaattctactgtaagtctctttgataagctgtcaaattgtacagccacagagggaaaaatttactgtttgtccatctat

SEQ ID NO: 9204 - DNA, 120 bp, Artificial Sequence
  ENSG00000008018_14 (sequence is synthesized)
ttgtcattatataagggattgggtataaagaaataagcattatataggcgttatataaggacttggatataaagaaatgaagcaagaaaaaaaaatctcatcttctctaaactcatagag

SEQ ID NO: 9205 - DNA, 120 bp, Artificial Sequence
  ENSG00000008018_15 (sequence is synthesized)
gtctatacctgatcctcaagggcacagatgtggtatttagttgttctgtattagtagtaccttgcgcgagtaagtatttaatgtgttggtgatgataattcattggcttttctgttaact

SEQ ID NO: 9206 - DNA, 120 bp, Artificial Sequence
  ENSG00000008018_16 (sequence is synthesized)
cctgccaaggagactttgccctgatttaggcttattaataatttttttttcccagacaactcgtagccaggcgttcattctcttcccgctcatctttcctcttcccatttgaatcatgtt

SEQ ID NO: 9207 - DNA, 120 bp, Artificial Sequence
  ENSG00000008018_17 (sequence is synthesized)
tttgttgacatctagagtattttatcccattatgtactatggagcattcttctatttgtagggataggattaccaccctggagaattaatttttttcttttttcctcagtactatactgg

SEQ ID NO: 9208 - DNA, 120 bp, Artificial Sequence
  ENSG00000008056_0 (sequence is synthesized)
agtctgcggtgggcagcggaggagtcgtgtcgtgcctgagagcgcagctgtgctcctgggcaccgcgcagtccgcccccgcggctcctggccagaccacccctaggaccccctgccccaa

SEQ ID NO: 9209 - DNA, 120 bp, Artificial Sequence
  ENSG00000008056_1 (sequence is synthesized)
gtcgcagccatgaactacctgcggcgccgcctgtcggacagcaactttatggccaatctgccaaatgggtacatgacagacctgcagcgtccgcagccgcccccaccgccgcccggtgcc

SEQ ID NO: 9210 - DNA, 120 bp, Artificial Sequence
  ENSG00000008056_2 (sequence is synthesized)
gccacgcccggtcccgggaccgccactgccgagaggtcctccggggtcgccccagcggcctctccggccgcccctagccccgggtcctcggggggcggtggcttcttctcgtcgctgtcc

SEQ ID NO: 9211 - DNA, 120 bp, Artificial Sequence
  ENSG00000008056_3 (sequence is synthesized)
tcgtcgctgtccaacgcggtcaagcagaccacggcggcggcagctgccaccttcagcgagcaggtgggcggcggctctgggggcgcaggccgcgggggagccgcctccagggtgctgctg

SEQ ID NO: 9212 - DNA, 120 bp, Artificial Sequence
  ENSG00000008056_4 (sequence is synthesized)
gtcatcgacgagccgcacaccgactgggcaaaatacttcaaagggaaaaagatccatggagaaattgacattaaagtagaacaggccgaattctctgatctcaaccttgtggcccatgcc

SEQ ID NO: 9213 - DNA, 120 bp, Artificial Sequence
  ENSG00000008056_5 (sequence is synthesized)
aatggtggattctctgtggatatggaagttcttcggaatggggtgaaggtcgtgcggtctctgaagccggattttgtgctgatccgccagcacgccttcagcatggcacgcaacggagac

SEQ ID NO: 9214 - DNA, 120 bp, Artificial Sequence
  ENSG00000008056_6 (sequence is synthesized)
taccgcagtttggtcattgggctgcagtatgctggaatccccagtgttaactccttgcattctgtctacaacttctgtgacaagccctgggtgtttgcccagatggttcgactgcataag

SEQ ID NO: 9215 - DNA, 120 bp, Artificial Sequence
  ENSG00000008056_7 (sequence is synthesized)
aaactggggacagaagaattccctctaattgatcagaccttctaccccaatcacaaagaaatgctcagcagtacaacgtaccccgtggttgtgaagatggggcacgcacactctgggatg

SEQ ID NO: 9216 - DNA, 120 bp, Artificial Sequence
  ENSG00000008056_8 (sequence is synthesized)
ggcaaggtcaaggttgacaaccagcatgacttccaggacatcgcaagtgtcgtggcactgaccaagacgtatgccactgccgagcccttcatcgatgccaaatatgacgtgcgtgtccag

SEQ ID NO: 9217 - DNA, 120 bp, Artificial Sequence
  ENSG00000008056_9 (sequence is synthesized)
aagattgggcagaactacaaggcctacatgaggacgtcagtgtcagggaactggaagaccaatactggctctgcgatgctggagcaaattgccatgtctgacagatacaagctgtgggtg

SEQ ID NO: 9218 - DNA, 120 bp, Artificial Sequence
  ENSG00000008056_10 (sequence is synthesized)
gacacgtgctcagagatttttgggggactggacatctgcgcagtggaagcgctacatggcaaggacggaagggatcacatcattgaggtggtgggttcctccatgccgctcattggtgac

SEQ ID NO: 9219 - DNA, 120 bp, Artificial Sequence
  ENSG00000008056_11 (sequence is synthesized)
caccaggatgaagacaaacagctcatcgtagagctcgtggtcaacaagatggctcaggccctgccccggcagcgacagcgggatgcctcccctggcaggggctcccatggccagactccg

SEQ ID NO: 9220 - DNA, 120 bp, Artificial Sequence
  ENSG00000008056_12 (sequence is synthesized)
ggatgcctcccctggcaggggctcccatggccagactccgtccccaggggccctgcccttgggccgccagacctcccagcagcccgcagggcccccggctcagcagcgacccccaccaca

SEQ ID NO: 9221 - DNA, 120 bp, Artificial Sequence
  ENSG00000008056_13 (sequence is synthesized)
gacccccagctggcagccccctgccccagcgccttccaagtcccacctcagcgccccagcagcccgcgtcccaggccgcgccgccgacccagggtcaaggccgccaatcccggccagtgg

SEQ ID NO: 9222 - DNA, 120 bp, Artificial Sequence
  ENSG00000008056_14 (sequence is synthesized)
ccgcccgcctctccgtctccccagcgccaggcgggccccccacaggctacccgtcagacatccgtctctggcccggctccgccaaaggcctctggggccccaccgggcgggcagcagcgc

SEQ ID NO: 9223 - DNA, 120 bp, Artificial Sequence
  ENSG00000008056_15 (sequence is synthesized)
cccacacgccaggccagccaggcgggtcccgtgccccgcactgggccacccaccacgcagcagcctcggcccagcggcccgggccccgctggacgtcccaaaccacagctggcccagaaa

SEQ ID NO: 9224 - DNA, 120 bp, Artificial Sequence
  ENSG00000008056_16 (sequence is synthesized)
cccgctggacgtcccaaaccacagctggcccagaaacccagccaggacgtgccgccacccgccaccgccgctgcagggggacctccgcacccccagctcaacaaatcccagtctctgacc

SEQ ID NO: 9225 - DNA, 120 bp, Artificial Sequence
  ENSG00000008056_17 (sequence is synthesized)
aatgccttcaaccttccagagccagccccgcccaggcccagccttagccaggacgaggtgaaagctgagaccatccgcagcctgaggaagtctttcgccagcctcttctccgactgatac

SEQ ID NO: 9226 - DNA, 120 bp, Artificial Sequence
  ENSG00000008056_18 (sequence is synthesized)
cccactctgagaaccccaaaatccctgggcaacccttctctgggccctgaatccatttctcacttttggagtctccaaatcccttgagaacccatctcccggttctccaagattccacct

SEQ ID NO: 9227 - DNA, 120 bp, Artificial Sequence
  ENSG00000008056_19 (sequence is synthesized)
ctcattcctcaagatccccgagtaccttgagaaacctgactcctcctggccctaaatccggttctcacatgtggaatccccaagtccttttagaaccccactcgtggtcacttcaggatc

SEQ ID NO: 9228 - DNA, 120 bp, Artificial Sequence
  ENSG00000008056_20 (sequence is synthesized)
tacttctgttttagaacctccacattcctgaagacctccgcccctggtttccccagagggcgttttccttcctggaagtgcccaaataccaggcaacccattgcagaatcccttcctgga

SEQ ID NO: 9229 - DNA, 120 bp, Artificial Sequence
  ENSG00000008056_21 (sequence is synthesized)
gccctgaagttcctggaaaaccctatttttggtcccaaatctctccagcacacctatttcccatcataattttccaaatcctcaagaaacccctactgttgagccccttcccatggatct

SEQ ID NO: 9230 - DNA, 120 bp, Artificial Sequence
  ENSG00000008056_22 (sequence is synthesized)
tccatccctctgaagatccacatcttcaaatgccacccaacacctagccccacaaggatttcccttcaccagctcccctcaacctcattcaataccttgggagcccctcccacttccagg

SEQ ID NO: 9231 - DNA, 120 bp, Artificial Sequence
  ENSG00000008056_23 (sequence is synthesized)
acccctcggttcccccagggaccccctccccagtttcctgcctctgacagctgtctttaaatatgcaaactccacccatcttcccagaatcctttgcacacggaaggccagtggtctccg

SEQ ID NO: 9232 - DNA, 120 bp, Artificial Sequence
  ENSG00000008056_24 (sequence is synthesized)
cttccccacctttgctgtggtgtctgtgtctgtgactgacgtggcctccttttgtgccgtgcttggcatatgtggtcctcgttcatcgtgccgcctgtggtgatgcgtgcagtgacgctg

SEQ ID NO: 9233 - DNA, 120 bp, Artificial Sequence
  ENSG00000008056_25 (sequence is synthesized)
tttatgtggtccgcacctccccctgaccttcactccttgcctggactcaccccacccctcagcggctctgaaccccaagagaagagtcgggaaacaaaataaacaagcaaaggcccagca

SEQ ID NO: 9234 - DNA, 120 bp, Artificial Sequence
  ENSG00000008056_26 (sequence is synthesized)
gagggaagagtcataactactgcaataatattaaatattggtatattatcagcagtgcgatatcaagagtgtggctgctgtgtgcacgtggagtcatgaagttgctttgtgatagggtct

SEQ ID NO: 9235 - DNA, 120 bp, Artificial Sequence
  ENSG00000008056_27 (sequence is synthesized)
accgtgaatttccttatgcttacaaggaaaactaaatcatgatccattctaatatgtatcagatcctgttactcatgttgtctatttttgccagtattaaaaacctatttctaatgtgaa

SEQ ID NO: 9236 - DNA, 120 bp, Artificial Sequence
  ENSG00000008056_28 (sequence is synthesized)
acaggttcaggactccactaggaaactggattgtctgtgagggggaaaagagagagggacactgggactgaggaacatttatggcgtaaagagctgggatcttagtatcacatcaggagc

SEQ ID NO: 9237 - DNA, 120 bp, Artificial Sequence
  ENSG00000008056_29 (sequence is synthesized)
ttttgggtctcggagacctaccccattccttcaggcagagcagggtcaggagcttgtattttggtgaggagactggtgtgggggagaaatggacattaaattattggtactaatcataca

SEQ ID NO: 9238 - DNA, 120 bp, Artificial Sequence
  ENSG00000008083_0 (sequence is synthesized)
ggagttgactcttctgctcgcactgctgctgcagcacaaacgtgacttccaacattttttatttatctttcccttttcttttccaagatgtaactacggatcagacactaaggaccttca

SEQ ID NO: 9239 - DNA, 120 bp, Artificial Sequence
  ENSG00000008083_1 (sequence is synthesized)
cgtttcgctgatgtagtttttggaggaaaaaggggggggagtgaagggcgtcggtttttttttgtgtgtgtgtgtatgtgtttcgggggaaattttccattatgagtgttttactaaagt

SEQ ID NO: 9240 - DNA, 120 bp, Artificial Sequence
  ENSG00000008083_2 (sequence is synthesized)
gaatttttttttgtttgcttcgttcgtctttggctctttttttttccttcccaatttcggatttatttcaaggcgaatctggctttgggggaagaggaagaaaagtcggattacaagatc

SEQ ID NO: 9241 - DNA, 120 bp, Artificial Sequence
  ENSG00000008083_3 (sequence is synthesized)
aaccaccaccaacaacaataaaaaccaccaggatatttttttgcaaatttctgacggctttaaattcatgaagcaattgtccccttttgcaatcagcatttggatctcagaatgagcaag

SEQ ID NO: 9242 - DNA, 120 bp, Artificial Sequence
  ENSG00000008083_4 (sequence is synthesized)
gaaagacccaagaggaatatcattcagaagaaatacgatgacagtgatgggattccgtggtcagaagaacgggtggtacgtaaagtcctttatttgtctctgaaggagttcaagaattcc

SEQ ID NO: 9243 - DNA, 120 bp, Artificial Sequence
  ENSG00000008083_5 (sequence is synthesized)
cagaagaggcagcatgcggaaggcattgctgggagcctgaaaactgtgaatgggctccttggtaatgaccagtctaagggattaggaccagcatcagaacagtcagagaatgaaaaggac

SEQ ID NO: 9244 - DNA, 120 bp, Artificial Sequence
  ENSG00000008083_6 (sequence is synthesized)
gatgcatcccaagtgtcctccactagcaacgatgttagttcttcagattttgaagaagggccgtcgaggaaaaggcccaggctgcaagcacaaaggaagtttgctcagtctcagccgaat

SEQ ID NO: 9245 - DNA, 120 bp, Artificial Sequence
  ENSG00000008083_7 (sequence is synthesized)
agtcccagcacaactccagtaaagatagtggagccattgctaccccctccagctactcagatatcagacctctctaaaaggaagcctaagacagaagattttcttacctttctctgcctt

SEQ ID NO: 9246 - DNA, 120 bp, Artificial Sequence
  ENSG00000008083_8 (sequence is synthesized)
cgaggttctcctgcgctgcccaacagcatggtgtattttggaagctctcaggatgaggaggaagtcgaggaggaagatgatgagacagaagacgtcaaaacagccaccaacaatgcttca

SEQ ID NO: 9247 - DNA, 120 bp, Artificial Sequence
  ENSG00000008083_9 (sequence is synthesized)
tcttcatgccagtcgacccccaggaaaggaaaaacccacaaacatgttcacaacgggcatgttttcaatggttccagcaggtcaacacgggagaaggaacctgttcaaaaacacaaaagc

SEQ ID NO: 9248 - DNA, 120 bp, Artificial Sequence
  ENSG00000008083_10 (sequence is synthesized)
aaagaggccactcccgcaaaggagaagcacagcgatcaccgggctgacagccgccgggagcaggcttcagctaaccaccccgcagcggccccctccacgggttcctcggccaaggggctt

SEQ ID NO: 9249 - DNA, 120 bp, Artificial Sequence
  ENSG00000008083_11 (sequence is synthesized)
gctgccacccatcaccacccccctctgcatcggtcggctcaggacttacggaaacaggtttctaaggtaaacggagtcactcgaatgtcatctctgggtgcaggtgtaaccagtgccaaa

SEQ ID NO: 9250 - DNA, 120 bp, Artificial Sequence
  ENSG00000008083_12 (sequence is synthesized)
aagatgcgcgaggtcagaccttcaccatccaaaactgtgaagtacactgccacggtgacgaagggggctgtcacatacaccaaagccaagagagaactggtcaaggacaccaaacccaat

SEQ ID NO: 9251 - DNA, 120 bp, Artificial Sequence
  ENSG00000008083_13 (sequence is synthesized)
caccacaagcccagttccgctgtcaaccacacaatctcagggaaaactgaaagtagcaatgcaaaaacccgcaaacaggtgctatccctcgggggggcgtccaagtccactgggcccgcc

SEQ ID NO: 9252 - DNA, 120 bp, Artificial Sequence
  ENSG00000008083_14 (sequence is synthesized)
gtcaatggcctcaaggtcagtggcaggttgaacccaaagtcatgcactaaggaggtgggggggcggcagctgcgggagggcctgcagctgcgggaggggctgcggaactccaagaggaga

SEQ ID NO: 9253 - DNA, 120 bp, Artificial Sequence
  ENSG00000008083_15 (sequence is synthesized)
ctggaagaggcacaccaggcggagaagccgcagtcgccccccaagaagatgaaaggggcggctggccccgccgaaggccctggcaagaaggccccggccgagagaggtctgctgaacgga

SEQ ID NO: 9254 - DNA, 120 bp, Artificial Sequence
  ENSG00000008083_16 (sequence is synthesized)
cacgtgaagaaggaagtgccggagcgcagtctggagaggaatcggccgaagcgggccacggccgggaagagcacgccaggcagacaagcacatggcaaggcggacagcgcctcctgtgaa

SEQ ID NO: 9255 - DNA, 120 bp, Artificial Sequence
  ENSG00000008083_17 (sequence is synthesized)
aatcgttctacctcgcaaccggagtccgtgcacaagccgcaggactcgggcaaggccgagaagggcggcggcaaggccgggtgggcggccatggacgagatccccgtcctcaggccctcc

SEQ ID NO: 9256 - DNA, 120 bp, Artificial Sequence
  ENSG00000008083_18 (sequence is synthesized)
gccaaggagttccacgatccgctcatctacatcgagtcggtccgcgctcaggtggagaagttcgggatgtgcagggtgatcccccctccggactggcggcccgagtgcaagctcaacgat

SEQ ID NO: 9257 - DNA, 120 bp, Artificial Sequence
  ENSG00000008083_19 (sequence is synthesized)
gagatgcggtttgtcacgcagattcagcacatccacaagctgggccggcgctggggccccaacgtgcagcggctggcctgcatcaagaagcacctcaaatctcagggcatcaccatggac

SEQ ID NO: 9258 - DNA, 120 bp, Artificial Sequence
  ENSG00000008083_20 (sequence is synthesized)
gagctcccgctcatagggggctgtgagctcgacctggcctgctttttccggctgattaatgagatgggcggcatgcagcaagtgactgacctcaaaaaatggaacaaactagcagacatg

SEQ ID NO: 9259 - DNA, 120 bp, Artificial Sequence
  ENSG00000008083_21 (sequence is synthesized)
ctgcgcatccccagaactgcccaggaccggctggccaagctgcaggaggcctactgccagtacctactctcctacgactccctgtccccagaggagcaccggcggctggagaaggaggtg

SEQ ID NO: 9260 - DNA, 120 bp, Artificial Sequence
  ENSG00000008083_22 (sequence is synthesized)
ctgatggagaaggagatcctggagaagcgcaaggggccgctggaaggccacacagagaacgaccaccacaagttccaccctctgccccgcttcgagcccaagaatgggctcatccacggc

SEQ ID NO: 9261 - DNA, 120 bp, Artificial Sequence
  ENSG00000008083_23 (sequence is synthesized)
gtggcccccaggaacggcttccgcagcaagctcaaggaggtgggccaggcccagttgaagactggccggcggcgactcttcgctcaggaaaaagaagtggtcaaggaagaggaggaggac

SEQ ID NO: 9262 - DNA, 120 bp, Artificial Sequence
  ENSG00000008083_24 (sequence is synthesized)
aaaggcgtcctcaatgacttccacaagtgcatctataagggaaggtctgtttctctaacaactttttatcgaacagcgaggaatatcatgagcatgtgtttcagcaaggagcctgcccca

SEQ ID NO: 9263 - DNA, 120 bp, Artificial Sequence
  ENSG00000008083_25 (sequence is synthesized)
gaaatcgagcaagagtactggaggctagtggaagagaaggactgccacgtggcagtgcactgcggcaaggtggacaccaacactcacggcagtggattcccagtaggaaaatcagaaccc

SEQ ID NO: 9264 - DNA, 120 bp, Artificial Sequence
  ENSG00000008083_26 (sequence is synthesized)
ttttcgaggcatggatggaacctcaccgtcctccccaataacacagggtccatcctgcgtcacctcggtgctgtgcctggagtgactattccctggctaaatattggcatggtcttttct

SEQ ID NO: 9265 - DNA, 120 bp, Artificial Sequence
  ENSG00000008083_27 (sequence is synthesized)
acctcatgctggtctcgagaccaaaatcaccttccatacattgactacttacacactggtgctgactgcatttggtattgcattcctgctgaggaggagaacaagctggaagatgtggtc

SEQ ID NO: 9266 - DNA, 120 bp, Artificial Sequence
  ENSG00000008083_28 (sequence is synthesized)
cacaccctgctgcaagccaatggcaccccagggctgcagatgctggaaagcaacgtcatgatctccccggaggtgctgtgcaaagaggggatcaaggtgcacaggaccgtgcagcagagt

SEQ ID NO: 9267 - DNA, 120 bp, Artificial Sequence
  ENSG00000008083_29 (sequence is synthesized)
ggccagtttgtcgtctgcttcccgggatcctttgtgtccaaagtgtgctgtgggtacagcgtgtctgaaaccgtgcactttgctaccacccagtggacaagtatgggctttgagaccgcc

SEQ ID NO: 9268 - DNA, 120 bp, Artificial Sequence
  ENSG00000008083_30 (sequence is synthesized)
aaggaaatgaagcgtcgccatatagctaagccattctccatggagaagttactctaccagattgcacaagcagaagcaaaaaaagaaaacggtcccactctcagtaccatctcagccctc

SEQ ID NO: 9269 - DNA, 120 bp, Artificial Sequence
  ENSG00000008083_31 (sequence is synthesized)
ctggatgagctcagggatacagagctgcggcagcgcaggcagctgttcgaggctggcctccactcctccgcacgctatggcagccacgatggcagcagcacggtggcggacgggaagaaa

SEQ ID NO: 9270 - DNA, 120 bp, Artificial Sequence
  ENSG00000008083_32 (sequence is synthesized)
aagcctcgaaagtggctgcagttggagacgtcagagaggaggtgtcagatctgccagcacctgtgctacctgtccatggtggtacaagagaacgaaaacgtcgtgttctgtctggagtgt

SEQ ID NO: 9271 - DNA, 120 bp, Artificial Sequence
  ENSG00000008083_33 (sequence is synthesized)
gctctgcgccacgtggagaaacagaagtcctgccgagggctgaagttgatgtaccgctacgatgaggaacagattatcagtctggtcaatcagatctgcggcaaagtgtctggtaaaaac

SEQ ID NO: 9272 - DNA, 120 bp, Artificial Sequence
  ENSG00000008083_34 (sequence is synthesized)
ggcagcattgagaactgtctcagtaaacccacaccaaaaagaggtccccgcaagagagcgacagtggacgtgcccccctcccgtctgtcagcctccagttcatccaaaagtgcttcgagc

SEQ ID NO: 9273 - DNA, 120 bp, Artificial Sequence
  ENSG00000008083_35 (sequence is synthesized)
tcatcatgaagatgccaacgcccgtggtcgatttatatatatttttttgtaattattatattctagtttggagtacttgctgtaggattcaagctgtctttgcactagctctaaagaaga

SEQ ID NO: 9274 - DNA, 120 bp, Artificial Sequence
  ENSG00000008083_36 (sequence is synthesized)
ttttcttctggttttagagaactaattttgttttagcattaaactgttgaacttttttttgtacttagaaaacctagatactgcagtcagattttggaaactgccgtatagtcactgttt

SEQ ID NO: 9275 - DNA, 120 bp, Artificial Sequence
  ENSG00000008083_37 (sequence is synthesized)
ctgcagtcagattttggaaactgccgtatagtcactgttttaaaaaccccggaggggctgtattaatttgtattgccccatggctgacaaaagcctttttttttggttttgatttttttt

SEQ ID NO: 9276 - DNA, 120 bp, Artificial Sequence
  ENSG00000008083_38 (sequence is synthesized)
ttttgaagagggtgaagtttggagaacaaatttaaaaaccatcagtcatgtgagcagattttttagaagggataggagacacacgcgcacacacacacacacacgaaacttgaaatggct

SEQ ID NO: 9277 - DNA, 120 bp, Artificial Sequence
  ENSG00000008083_39 (sequence is synthesized)
ttgctttggctgtcgtcttctgccgtgtgccagatgagcttgtgatctgggaagccggggcacccccgttttgtttctctgggcggttgtggcagctgaaggcggacgttgtttcctaac

SEQ ID NO: 9278 - DNA, 120 bp, Artificial Sequence
  ENSG00000008083_40 (sequence is synthesized)
cataggtggaacgaggagacgggagcgagtgggctctccaccagcacatcactatgcatctgttccaggaaagaagaaaagcgagcgaggaagacggaaaagactgcctgccttggaggg

SEQ ID NO: 9279 - DNA, 120 bp, Artificial Sequence
  ENSG00000008083_41 (sequence is synthesized)
gtcacatgagggagacctgtgcctgatttcattaggaaatccattctgttattttttggtgctgttggctactttatcaaaaaacccttcaatagcatccttaagatttaaaaaaaaaaa

SEQ ID NO: 9280 - DNA, 120 bp, Artificial Sequence
  ENSG00000008083_42 (sequence is synthesized)
aaaaaaaaaggaaaaaaaagtgatggaagccgtaagtgcttctttgtcatcgacgtgcaatctttctaacattccatctccatctcaccgcttcttgtttgacaccttcacaagtcagca

SEQ ID NO: 9281 - DNA, 120 bp, Artificial Sequence
  ENSG00000008083_43 (sequence is synthesized)
ttaatctttcttttaaaacttgtttcatttatgatcatgtagagagccactaggaggcctgcagttatttttgaatgtgaaaatgcatttgcgttcatcttgtctattttttctcttcat

SEQ ID NO: 9282 - DNA, 120 bp, Artificial Sequence
  ENSG00000008083_44 (sequence is synthesized)
gttgtaacaaaaaggaaaaaagaaaaaaaaatcccatcccttttgtacatatgcctgtaaattgttttaaatacttgagcctttttctcggtggggggtggggaggggggtgagaagaca

SEQ ID NO: 9283 - DNA, 120 bp, Artificial Sequence
  ENSG00000008083_45 (sequence is synthesized)
agatgaagaaaagccttacatttcagtttcttcatcggttggattggatgcttacagggtttttcttgtaacatttataagtgctgcttacatcactgaacaacaacaaaaaaataataa

SEQ ID NO: 9284 - DNA, 120 bp, Artificial Sequence
  ENSG00000008083_46 (sequence is synthesized)
tggagtagctgttgcccttctccggttgtgtgtacagtatgtgtggaataaaaaagggaaactgttttcacaagctgttctttgtttcataattggattcatcaatcccgtagctaccca

SEQ ID NO: 9285 - DNA, 120 bp, Artificial Sequence
  ENSG00000008083_47 (sequence is synthesized)
tattgcactgagcttgccagtggtgactgccaggaacgtcctatgatccactttgttggttgttgttgcagaagactgaactgttttggaatatttaacaattacagaaacagtcaagtg

SEQ ID NO: 9286 - DNA, 120 bp, Artificial Sequence
  ENSG00000008083_48 (sequence is synthesized)
ttttccaatgtggttgtccggtttctatggccttgctgtgtactttccctctttttgacagtaaacttctgcctatggcttacagtttgacatttaatttattagcgctgctctgcaccc

SEQ ID NO: 9287 - DNA, 120 bp, Artificial Sequence
  ENSG00000008083_49 (sequence is synthesized)
ctcccttgggagggagacttcatgtggtttattgcgagttttttgtttacttttcaggtttgtactacaaggtttaataataaaaacaaagttttttggacatttgtctgtcttgtggaa

SEQ ID NO: 9288 - DNA, 120 bp, Artificial Sequence
  ENSG00000008083_50 (sequence is synthesized)
gggcgggggcgggggctgccgcagagccgggctgcggcgtgggaggaggaagaggaggaagatgcgctcggcctctgccttccgctccggagcgtcgcgcttcccaccaggatgacagtg

SEQ ID NO: 9289 - DNA, 120 bp, Artificial Sequence
  ENSG00000008086_0 (sequence is synthesized)
agttgtctctgccgctggggaaggtaaagcggcgacggcgtcctcaggagctgtggggtcccctgctagaagtgggggactcggcgggggagtcatttaatacttcatgattagaacaaa

SEQ ID NO: 9290 - DNA, 120 bp, Artificial Sequence
  ENSG00000008086_1 (sequence is synthesized)
tatgtgaaagttcccaccaaccagtgagaatttcttccttcagacggttttggatcttactgcacagctttctgagaagttcttttggtgccatgttttgtggcttgcatcaaaagagga

SEQ ID NO: 9291 - DNA, 120 bp, Artificial Sequence
  ENSG00000008086_2 (sequence is synthesized)
gtttgtcttcatgaagattcctaacattggtaatgtgatgaataaatttgagatccttggggttgtaggtgaaggagcctatggagttgtacttaaatgcagacacaaggaaacacatga

SEQ ID NO: 9292 - DNA, 120 bp, Artificial Sequence
  ENSG00000008086_3 (sequence is synthesized)
aattgtggcgatcaagaaattcaaggacagtgaagaaaatgaagaagtcaaagaaacgactttacgagagcttaaaatgcttcggactctcaagcaggaaaacattgtggagttgaagga

SEQ ID NO: 9293 - DNA, 120 bp, Artificial Sequence
  ENSG00000008086_4 (sequence is synthesized)
agcatttcgtcggaggggaaagttgtacttggtgtttgagtatgttgaaaaaaatatgctcgaattgctggaagaaatgccaaatggagttccacctgagaaagtaaaaagctacatcta

SEQ ID NO: 9294 - DNA, 120 bp, Artificial Sequence
  ENSG00000008086_5 (sequence is synthesized)
tcagctaatcaaggctattcactggtgccataagaatgatattgtccatcgagatataaaaccagaaaatctcttaatcagccacaatgatgtcctaaaactgtgtgactttggttttgc

SEQ ID NO: 9295 - DNA, 120 bp, Artificial Sequence
  ENSG00000008086_6 (sequence is synthesized)
tcgtaatctgtcagaaggcaataatgctaattacacagagtacgttgccaccagatggtatcggtccccagaactcttacttggcgctccctatggaaagtccgtggacatgtggtcggt

SEQ ID NO: 9296 - DNA, 120 bp, Artificial Sequence
  ENSG00000008086_7 (sequence is synthesized)
gggctgtattcttggggagcttagcgatggacagcctttatttcctggagaaagtgaaattgaccaactttttactattcagaaggtgctaggaccacttccatctgagcagatgaagct

SEQ ID NO: 9297 - DNA, 120 bp, Artificial Sequence
  ENSG00000008086_8 (sequence is synthesized)
tttctacagtaatcctcgcttccatgggctccggtttccagctgttaaccatcctcagtccttggaaagaagataccttggaattttgaatagtgttctacttgacctaatgaagaattt

SEQ ID NO: 9298 - DNA, 120 bp, Artificial Sequence
  ENSG00000008086_9 (sequence is synthesized)
actgaagttggacccagctgacagatacttgacagaacagtgtttgaatcaccctacatttcaaacccagagacttctggatcgttctccttcaaggtcagcaaaaagaaaaccttacca

SEQ ID NO: 9299 - DNA, 120 bp, Artificial Sequence
  ENSG00000008086_10 (sequence is synthesized)
tgtggaaagcagcacattgtctaatagaaaccaagccggcaaaagtactgctttgcagtctcaccacagatctaacagcaaggacatccagaacctgagtgtaggcctgccccgggctga

SEQ ID NO: 9300 - DNA, 120 bp, Artificial Sequence
  ENSG00000008086_11 (sequence is synthesized)
cgaaggtctccctgccaatgaaagcttcctaaatggaaaccttgctggagctagtcttagtccactgcacaccaaaacctaccaagcaagcagccagcctgggtctaccagcaaagatct

SEQ ID NO: 9301 - DNA, 120 bp, Artificial Sequence
  ENSG00000008086_12 (sequence is synthesized)
caccaacaacaacataccacaccttcttagcccaaaagaagccaagtcaaaaacagagtttgattttaatattgacccaaagccttcagaaggcccagggacaaagtacctcaagtcaaa

SEQ ID NO: 9302 - DNA, 120 bp, Artificial Sequence
  ENSG00000008086_13 (sequence is synthesized)
cagcagatctcagcagaaccgccactcattcatggaaagctctcaaagcaaagctgggacactgcagcccaatgaaaagcagagtcggcatagctatattgacacaattccccagtcctc

SEQ ID NO: 9303 - DNA, 120 bp, Artificial Sequence
  ENSG00000008086_14 (sequence is synthesized)
taggagtccctcctacaggaccaaggccaaaagccatggggcactgagtgactccaagtctgtgagcaacctttctgaagccagggcccaaattgcggagcccagtaccagtaggtactt

SEQ ID NO: 9304 - DNA, 120 bp, Artificial Sequence
  ENSG00000008086_15 (sequence is synthesized)
cccatctagctgcttagacttgaattctcccaccagcccaacccccaccagacacagtgacacgagaactttgctcagcccttctggaagaaataaccgaaatgagggaacgctggactc

SEQ ID NO: 9305 - DNA, 120 bp, Artificial Sequence
  ENSG00000008086_16 (sequence is synthesized)
acgtcgaaccacaaccagacattctaagacgatggaggaattgaagctgccggagcacatggacagtagccattcccattcactgtctgcacctcacgaatctttttcttatggactggg

SEQ ID NO: 9306 - DNA, 120 bp, Artificial Sequence
  ENSG00000008086_17 (sequence is synthesized)
ctacaccagccccttttcttcccagcaacgtcctcataggcattctatgtatgtgacccgtgacaaagtgagagccaagggcttggatggaagcttgagcatagggcaagggatggcagc

SEQ ID NO: 9307 - DNA, 120 bp, Artificial Sequence
  ENSG00000008086_18 (sequence is synthesized)
tagagccaacagcctgcaactcttgtcaccccagcctggagaacagctccctccagagatgactgtggcaagatcttcggtcaaagagacctccagagaaggcacctcttccttccatac

SEQ ID NO: 9308 - DNA, 120 bp, Artificial Sequence
  ENSG00000008086_19 (sequence is synthesized)
acgccagaagtctgagggtggagtgtatcatgacccacactctgatgatggcacagcccccaaagaaaatagacacctatacaatgatcctgtgccaaggagagttggtagcttttacag

SEQ ID NO: 9309 - DNA, 120 bp, Artificial Sequence
  ENSG00000008086_20 (sequence is synthesized)
agtgccatctccacgtccagacaattctttccatgaaaataatgtgtcaactagagtttcttctctaccatcagagagcagttctggaaccaaccactcaaaaagacaaccagcattcga

SEQ ID NO: 9310 - DNA, 120 bp, Artificial Sequence
  ENSG00000008086_21 (sequence is synthesized)
tccatggaaaagtcctgaaaatattagtcattcagagcaactcaaggaaaaagagaagcaaggatttttcaggtcaatgaaaaagaaaaagaagaaatctcaaacagtacccaattccga

SEQ ID NO: 9311 - DNA, 120 bp, Artificial Sequence
  ENSG00000008086_22 (sequence is synthesized)
cagccctgatcttctgacgttgcagaaatccattcattctgctagcactccaagcagcagaccaaaggagtggcgccccgagaagatctcagatctgcagacccaaagccagccattaaa

SEQ ID NO: 9312 - DNA, 120 bp, Artificial Sequence
  ENSG00000008086_23 (sequence is synthesized)
atcactgcgcaagttgttacatctctcttcggcctcaaatcacccggcttcctcagatccccgcttccagcccttaacagctcaacaaaccaaaaattccttctcagaaattcggattca

SEQ ID NO: 9313 - DNA, 120 bp, Artificial Sequence
  ENSG00000008086_24 (sequence is synthesized)
ccccctgagccaggcctctggcgggagcagcaacatccggcaggaacccgcaccgaagggcaggccagccctccagctgccaggtcagatggatcctggttggcatgtgtcctctgtgac

SEQ ID NO: 9314 - DNA, 120 bp, Artificial Sequence
  ENSG00000008086_25 (sequence is synthesized)
caggagtgccacagagggcccttcctactctgaacagctgggtgccaaaagtgggccaaatgggcacccctataacagaacaaatcgctcacgaatgccaaatctgaatgatttaaaaga

SEQ ID NO: 9315 - DNA, 120 bp, Artificial Sequence
  ENSG00000008086_26 (sequence is synthesized)
gacagccttgtaatttgtgctggtaggggggaggggtggacagacaagccagtggggaggggtgggaaagggtgggctgggcttggggcatgggccgggccaagtggtgagccaatattt

SEQ ID NO: 9316 - DNA, 120 bp, Artificial Sequence
  ENSG00000008086_27 (sequence is synthesized)
tcagctttatgaaggtgtgtgcaatattgcatgtgttggggccgttgagctcctcgcggccacaaatgctagtcagggatcttagagccacaggagttccttagggatcgccactcccca

SEQ ID NO: 9317 - DNA, 120 bp, Artificial Sequence
  ENSG00000008086_28 (sequence is synthesized)
caggtcttgtgtgagaatagatagagtgtgccattgaggaagaagaaattcttgccagtttctcccctttacattccagctttagtgcaatctctgttgaacttgggaatgccaggatgt

SEQ ID NO: 9318 - DNA, 120 bp, Artificial Sequence
  ENSG00000008086_29 (sequence is synthesized)
gtcctggcactgcaagggataggaaagtcgtgttgaccgatgcccttactacatatttttttctgcctagagtaaatgtggggtttattgtaatccaagagtatccctttgaagggttag

SEQ ID NO: 9319 - DNA, 120 bp, Artificial Sequence
  ENSG00000008086_30 (sequence is synthesized)
agggttagcagatgaactgtatgtcttaaattgttttctaaacttccatatttgataggatttgtaacatttatttataattaatattgtactgttaaaatcatatcttttatgttataa

SEQ ID NO: 9320 - DNA, 120 bp, Artificial Sequence
  ENSG00000008086_31 (sequence is synthesized)
tattttgagctgtttgaaacattgtgaagcagtgggacagctacagtagtttctataaaaactaaacagtaacatttatatattgcatcaggagtattttattctatatataatatatat

SEQ ID NO: 9321 - DNA, 120 bp, Artificial Sequence
  ENSG00000008086_32 (sequence is synthesized)
atatggtaaatatctgttttataaatatattcatttaaagaaagtatcgttatgacactatctgccatatttttatacatttgtgatatgaagtgagtattatacttctactaaagggag

SEQ ID NO: 9322 - DNA, 120 bp, Artificial Sequence
  ENSG00000008086_33 (sequence is synthesized)
ttgaattgtggctacacgtgactgtaacagtatgaaccttgctcaactttgaggccccagcagtagcctctagacatgatccttggtagcagacgagatgcagcatctctttccaaacct

SEQ ID NO: 9323 - DNA, 120 bp, Artificial Sequence
  ENSG00000008086_34 (sequence is synthesized)
gcaggggaagaaagtcagataggccagtgagaattccagcaggcctggtttccgtcctcacacacttggctcctgtttgtgtccagggacgttacttgcacacaggggagaatagattga

SEQ ID NO: 9324 - DNA, 120 bp, Artificial Sequence
  ENSG00000008086_35 (sequence is synthesized)
ggcgttactcgtgggtctttgtagagagaatgtgctcttccacttagcattagtgtagagcgtagaccaaagatttgccagtgaacattccttgttgtgagatcataagaggtacctgtc

SEQ ID NO: 9325 - DNA, 120 bp, Artificial Sequence
  ENSG00000008086_36 (sequence is synthesized)
tgcagatcttgcaaaccatctctatgctcctgaatattgtccactgtcccggagactcttggctgatggggtgtgagatatatgtgtggcatttctatttctgaatgccttttttgctat

SEQ ID NO: 9326 - DNA, 120 bp, Artificial Sequence
  ENSG00000008086_37 (sequence is synthesized)
tgctctctccaataccatatttaaaaggctcctggagcaattccagatagataaaaaattactctatccatttttttcttcctggggctgtccacttatgacaagattttcatgcacacc

SEQ ID NO: 9327 - DNA, 120 bp, Artificial Sequence
  ENSG00000008086_38 (sequence is synthesized)
tgttacgcacacaacccccatcagaacaggacctatcttcccctcatctgatctctttcagctcccaagttactcccaagtatcatcaaaccctttggccatcaagtgttatcctcccat

SEQ ID NO: 9328 - DNA, 120 bp, Artificial Sequence
  ENSG00000008086_39 (sequence is synthesized)
gcctctgggtcatccttgagggaagtcacctcagcaccatcatctatcagtagtagtagatttttggaattagtctctgagcaataatacttttaaaggtccctcccacccctcaaagag

SEQ ID NO: 9329 - DNA, 120 bp, Artificial Sequence
  ENSG00000008086_40 (sequence is synthesized)
ataacttctcagtatttattacttgtcctcaaattctgagtgtcagcccctgcatcaagtcagctatgatcaaaatgtgctgttactgttaaccctcccccgagattttgagaatcatag

SEQ ID NO: 9330 - DNA, 120 bp, Artificial Sequence
  ENSG00000008086_41 (sequence is synthesized)
ctctgatgattatgaagattataaagactaaggtcctagtttccctgaagcttaaattgtgcacatattgcatttttatataaatactataatgtgtattgattatatagataggtcatt

SEQ ID NO: 9331 - DNA, 120 bp, Artificial Sequence
  ENSG00000008086_42 (sequence is synthesized)
ttaaggtgctttttatttaattttaatgagtgtaataggcactaaaatgaaactcgactgggtactattactgaaaaaatttgactcaaaccaatagttttgcatgctctttagttcttt

SEQ ID NO: 9332 - DNA, 120 bp, Artificial Sequence
  ENSG00000008086_43 (sequence is synthesized)
ttctgtcttacttctttcaccagttcagtactgtttgggtagctctgaattctggcttttccaggcagctgcttgatgatacaaatgaggtggaccatcagcagttttgcctggacacta

SEQ ID NO: 9333 - DNA, 120 bp, Artificial Sequence
  ENSG00000008086_44 (sequence is synthesized)
atgactctaaaagggtgtgtatttaactcttctttttcatactagatctctaccttgtattccccccttgcaaaccagaaactacactttttttctctggaaagacttctcactgtgcta

SEQ ID NO: 9334 - DNA, 120 bp, Artificial Sequence
  ENSG00000008086_45 (sequence is synthesized)
tgcgcttaggaactgcacggtcccgttgccatgctgtggcattcgaggctcgtcacctaggggctggtttcccatgttgtcatccttgctaacactgggatctcagatgtttgcagaaca

SEQ ID NO: 9335 - DNA, 120 bp, Artificial Sequence
  ENSG00000008086_46 (sequence is synthesized)
tttctattcatgacggttcttcaaagaagggctagaatatttgccttctacctagagcaaagtaaacctaattgttgaagagtcaatacgtactttttgtactttcccagatttgagcca

SEQ ID NO: 9336 - DNA, 120 bp, Artificial Sequence
  ENSG00000008086_47 (sequence is synthesized)
gaaaatacctacagatatctacaaatgttttcaaccagtgttttcgaggtagctctttaatcctcttctcagcttttgtctgttctgacttttcatccaataagctgtaagtgaactaca

SEQ ID NO: 9337 - DNA, 120 bp, Artificial Sequence
  ENSG00000008086_48 (sequence is synthesized)
atctgcatttccagcatgcaattctcttcctgctcacggagggggatgcaaaagttttctctcacacctaatgggccctctcttagcttttaactgttgttttcccctgttgatgaaaaa

SEQ ID NO: 9338 - DNA, 120 bp, Artificial Sequence
  ENSG00000008086_49 (sequence is synthesized)
ttactgacatcacaaagattgccatccatggtagaaaggacttgatttaaagtcagaaaaatttgccttttctttaggaaggggaattcatgacatccatgtcctattatcggccgtaac

SEQ ID NO: 9339 - DNA, 120 bp, Artificial Sequence
  ENSG00000008086_50 (sequence is synthesized)
ttcctaaagaagaaaaagggtgaatgaaagcttatgttacttttatgaaagtatcactgatctcctttggaaaagaaactctgcttcactgtttttctacctttatttctctgccatcct

SEQ ID NO: 9340 - DNA, 120 bp, Artificial Sequence
  ENSG00000008086_51 (sequence is synthesized)
cgtttttcctctctgaagttctaaataccctttaactgaaccttgttggtcttgctctaaaatttagcctctttctagagcccaagaccaaaagggagtgcttcatgctgaggggctcaa

SEQ ID NO: 9341 - DNA, 120 bp, Artificial Sequence
  ENSG00000008086_52 (sequence is synthesized)
gtgagctgactctacaactgtggttctcaactaggggcagatttacccccaagggtacatttggcaatgtctggggacatttggttgtcatagctgggggggaggtgatggtatgctact

SEQ ID NO: 9342 - DNA, 120 bp, Artificial Sequence
  ENSG00000008086_53 (sequence is synthesized)
ggcatcaagtggttagaggccacagatgctactaaacaccctgccatgcacaggacagccccccaaacaaacagtggtccagccccaagcactactagtgctgaggttgagaaaccctgc

SEQ ID NO: 9343 - DNA, 120 bp, Artificial Sequence
  ENSG00000008086_54 (sequence is synthesized)
cctacaccatcccaagcccaccagtctgcagagcttggctctggccttgttctgtccaggctacagtactgcaggtgtgatttcttcaacatcacattctcttaagagtcttcaaccact

SEQ ID NO: 9344 - DNA, 120 bp, Artificial Sequence
  ENSG00000008086_55 (sequence is synthesized)
atgcctgaatccttggaatcctattgttcgtttccattgtcttgggcctgctaaaaggtgcatactttggaaggagaccagagttactttataggtgttggagaacttaaattctaggtt

SEQ ID NO: 9345 - DNA, 120 bp, Artificial Sequence
  ENSG00000008086_56 (sequence is synthesized)
agcatccttagaaaatctttcatagagccatgaggcttatatttagaagcaagcaacagcctggcagattggcatgatttttaccaactgctcaaaggcatccgtggctttcagctgtgt

SEQ ID NO: 9346 - DNA, 120 bp, Artificial Sequence
  ENSG00000008086_57 (sequence is synthesized)
ctcccgaaagaaaatgtctttgttttttattcaagtcatttaatagctctttacaaatattagcatatggcagaccaattagaagcaaaaaagtccgtattggtggttgtgatgtggctg

SEQ ID NO: 9347 - DNA, 120 bp, Artificial Sequence
  ENSG00000008086_58 (sequence is synthesized)
ttatagaagtatttgtgctgtatgctttggttaaatctgttttaaaacatgctttaagattcaccttacgcagttgtactttaattctaagctcagagctatgctgtcagtctctagtca

SEQ ID NO: 9348 - DNA, 120 bp, Artificial Sequence
  ENSG00000008086_59 (sequence is synthesized)
cgccatgtattataaagtatgttgtggttgtagagttagccagtttagcatgttcctaatctgagaattagtggactatactaggaaatgctatcccattttccctttccagcccctctt

SEQ ID NO: 9349 - DNA, 120 bp, Artificial Sequence
  ENSG00000008086_60 (sequence is synthesized)
gaaaaaagccatttattttcttctagccatgtattattgagaatgactcatagtacaactttttttcaaaggccagaggattactttgcaagtgtgtagaaagatctgtctatttctgtt

SEQ ID NO: 9350 - DNA, 120 bp, Artificial Sequence
  ENSG00000008086_61 (sequence is synthesized)
cacctgggacctggtggtgactgaactctttcagcaagggcaatggctcaatgtgattcggtgctggagctcagctgggactcagtaaatctgcacgttctctgctggtcagaacatgtt

SEQ ID NO: 9351 - DNA, 120 bp, Artificial Sequence
  ENSG00000008086_62 (sequence is synthesized)
tcctggagagcattgcttttctatctagaagttcgttacctcctgcatgatagtgggatattgagatgtgggttctaagatccacagactcatacttttgtgaactttggaatgtggtag

SEQ ID NO: 9352 - DNA, 120 bp, Artificial Sequence
  ENSG00000008086_63 (sequence is synthesized)
ggtacactgaaccaagtcagaaaatagtgaaatatttccttgcctccttcagttcatcactaagaaagtgtgtaggcagagaaaacttacttatggtttgaagaaccacaattgtttttg

SEQ ID NO: 9353 - DNA, 120 bp, Artificial Sequence
  ENSG00000008086_64 (sequence is synthesized)
aaaggggacatagaaaagacagtacaaaggttgtaagtgtcctgtcgctaattcccagggccagaatctcacaagaagatcctctcaaagacttaaaagcctggcttacaaaaataacca

SEQ ID NO: 9354 - DNA, 120 bp, Artificial Sequence
  ENSG00000008086_65 (sequence is synthesized)
gaaaccaaacttgtaagcagttacaatttcttccttttgcttcttgaccagctgagatacagaatatcttgaggtctggttcagctgatgaaaaattctgtctcagaaacgatgagtaag

SEQ ID NO: 9355 - DNA, 120 bp, Artificial Sequence
  ENSG00000008086_66 (sequence is synthesized)
aaaccatacaagaaaaagaagtccctcatctatctgcatacacgcaatgtgggagaagtggggtggctaggaaactctgggcctgctgcccccttcgattctttttttttttctttgtga

SEQ ID NO: 9356 - DNA, 120 bp, Artificial Sequence
  ENSG00000008086_67 (sequence is synthesized)
attgaatgtacgatacaaatggtaggccttcatgtgagccagttactacatgaatcttcatttcccacagtggtttgttcattcatcagcgttaggcttggtcctggctccacctttctc

SEQ ID NO: 9357 - DNA, 120 bp, Artificial Sequence
  ENSG00000008086_68 (sequence is synthesized)
ctctccgggcactgaccccacctttccgtgtatttactgtaggctattaaatatgatcatgacccgccttgcattttcattcatcacctgtttatgcccaaatttaaaggaagtttgtct

SEQ ID NO: 9358 - DNA, 120 bp, Artificial Sequence
  ENSG00000008086_69 (sequence is synthesized)
cattttgccagaaaaaaattgtaatagtcggcacgctggatttgtagggccagcaaaattgcggcagtgaaactagtttcacttctaaagcccttcatttcccacaaggttaagctctcg

SEQ ID NO: 9359 - DNA, 120 bp, Artificial Sequence
  ENSG00000008086_70 (sequence is synthesized)
aaaccccatttgatccttggttcctatttcgatcctcctttggaatctgaaaatcggtctccatgttgtatgcagattagaagttgccttgtttgttactcttccaacacagggtatcag

SEQ ID NO: 9360 - DNA, 120 bp, Artificial Sequence
  ENSG00000008086_71 (sequence is synthesized)
ggagaaagaggccttatctgttcctccatcccccctgttttgacagactgctaagaattcctcaggacttcctttggttggggattttactttcccaaaagtctgatctgatttctttca

SEQ ID NO: 9361 - DNA, 120 bp, Artificial Sequence
  ENSG00000008086_72 (sequence is synthesized)
ggggtagacaagcttgtcctagtgctctgcttcaggtcttatcagaagaaacccaggaatagaaaaggtagatgccttgacttttgtccctgttgtggggactaaagtgttttttgccag

SEQ ID NO: 9362 - DNA, 120 bp, Artificial Sequence
  ENSG00000008086_73 (sequence is synthesized)
aattgtcaaaagctccggttcaaactctgtagagtttcatggaaaaacaaaacaaaacaaaaaagatgcttatcgtcccggagaatgtgtaagtaagttctccagcacggcttaggtttt

SEQ ID NO: 9363 - DNA, 120 bp, Artificial Sequence
  ENSG00000008086_74 (sequence is synthesized)
ccaaaatggaaagcaaagcttgcagacaacctgttttctctagagacacacaatgattctggccctcagtctgtttccctccccttgtttactctttggtcaccgatcgagtcaggctag

SEQ ID NO: 9364 - DNA, 120 bp, Artificial Sequence
  ENSG00000008086_75 (sequence is synthesized)
aggggtaatacggtgattaaaagaagtaaattctcactgtaaacttggattgattaacagaaacaattaaaccaaacaaaatcattgccccaaatttctatctccaagaattgctttgtg

SEQ ID NO: 9365 - DNA, 120 bp, Artificial Sequence
  ENSG00000008086_76 (sequence is synthesized)
ccattttgaattcaggtagttattctgtatatacttagctaactattcagagcttcttcaatctctagtaagcttgaaggtggtgtctgggaagacacagggcagggtgacatttagact

SEQ ID NO: 9366 - DNA, 120 bp, Artificial Sequence
  ENSG00000008086_77 (sequence is synthesized)
ctgttcattcttaaaaatagggataagccagaatgatgtgacatctagtatgtggtagatgaagaatcagtggaaattcttaattgcacagactttataatccattatataaagtgtaat

SEQ ID NO: 9367 - DNA, 120 bp, Artificial Sequence
  ENSG00000008086_78 (sequence is synthesized)
tccatactttttactgtggcaagggtgtgatgtgattgttaatctttttaatttttgaatccaaactgaatttaaagtgttgaatacttaaatcctcacaagtgaattatgaaccatttg

SEQ ID NO: 9368 - DNA, 120 bp, Artificial Sequence
  ENSG00000008086_79 (sequence is synthesized)
taaagtgtttctataactctttgtatcatgtgttggtacatcttatcaagttttttctggcatgtaattccattctaaacttatgtaaaatttctattgttgctgtaaatattacacaaa

SEQ ID NO: 9369 - DNA, 120 bp, Artificial Sequence
  ENSG00000008086_80 (sequence is synthesized)
tatctattccgtgataaccttcattatcagcatgaaatggttaatttttactgagcacaatgtatttttgaatggatcttcccaaatgtctttaataaaatgcagattttgcactgactg

SEQ ID NO: 9370 - DNA, 120 bp, Artificial Sequence
  ENSG00000008086_81 (sequence is synthesized)
atgtgactgccaggccgtcccaatcttgagcactgtggtccttcgtgtttgaactgcgaacagctccattttagttccttcttgggaagaaagaatgcattcgaattcaaatgagggatg

SEQ ID NO: 9371 - DNA, 120 bp, Artificial Sequence
  ENSG00000008086_82 (sequence is synthesized)
atgggcctttgaggttgtaatcagtttgagacagaaattaatgtaaaactaggcaaatcctgtaacttaatgatgttgatctttgttttcctatttataaagcttttttccccttacggc

SEQ ID NO: 9372 - DNA, 120 bp, Artificial Sequence
  ENSG00000008086_83 (sequence is synthesized)
attttgaaaactttggtttgttttatacttgagtgttgtcacctttgcacgtcgctagacactcacgtggtagtttgaggaggatgggaagagaggccaatcttgtgctaagtgctatgg

SEQ ID NO: 9373 - DNA, 120 bp, Artificial Sequence
  ENSG00000008086_84 (sequence is synthesized)
agaaagcaaagatgcacagcttaataagggttttttgattctagaggagaggtgggcaagcttttcctgtaaagggccagatggtaaatattgggggctctgtggcccatcagttccctg

SEQ ID NO: 9374 - DNA, 120 bp, Artificial Sequence
  ENSG00000008086_85 (sequence is synthesized)
tcaacattactcagctctgcctttgtattgcagaggctgcatggataatatgtaaatcagtaagtgtggctgtggtcccgtaaaactttacttatagaaacaggccatagtttactaacc

SEQ ID NO: 9375 - DNA, 120 bp, Artificial Sequence
  ENSG00000008086_86 (sequence is synthesized)
cgttttaggccctcagtttcatcatttagggtaacaccaaccgagtacatgttcaatcaggagggaaagaacttagcttttgtgataacttatagatgaaatattccccagttttctttc

SEQ ID NO: 9376 - DNA, 120 bp, Artificial Sequence
  ENSG00000008086_87 (sequence is synthesized)
tctttctaaacaaagggtaggagctgaaagtcagtgctctccattcttaaaagtcctctgtcaaccacctcttcactctatctccttaagtgacatggaaacttgtggcctgtgctttca

SEQ ID NO: 9377 - DNA, 120 bp, Artificial Sequence
  ENSG00000008086_88 (sequence is synthesized)
actataatcttaccaagactgaatgaaagtatttggtgcttatactttttaatgttcatagcacttactatggccaggcacaatgcccaagtgttttgctttattattattattattatt

SEQ ID NO: 9378 - DNA, 120 bp, Artificial Sequence
  ENSG00000008086_89 (sequence is synthesized)
ttattattattattattattattttcacaacaacccagcgaaacaggtactattattatcccctttttgtaaatgaggaaacagatttccatacttgacattaacctgcccaaggtcacc

SEQ ID NO: 9379 - DNA, 120 bp, Artificial Sequence
  ENSG00000008086_90 (sequence is synthesized)
cacccagtttggaagtggcagggccaggatttgaagccgaatatgttcattgtaaagcccatatacccttaaaagtcactgcacgtccacgtatggtaatgtggtcacaatcagtattgt

SEQ ID NO: 9380 - DNA, 120 bp, Artificial Sequence
  ENSG00000008086_91 (sequence is synthesized)
ttctctttagtaattcagatttattcaagtaactccaaggttcaaattttcaaaaacagtttccaacacaggttatattaaaaactttgcctgaagtttactctaggtgcagaaataaag

SEQ ID NO: 9381 - DNA, 120 bp, Artificial Sequence
  ENSG00000008086_92 (sequence is synthesized)
acaacttagtcaagtgaaggaaagggtaacagacttagaaatggctatctacactgatggaataagtatactaattagagcaggtaacaagtccccacgatgtataacatattcttctct

SEQ ID NO: 9382 - DNA, 120 bp, Artificial Sequence
  ENSG00000008086_93 (sequence is synthesized)
aaaagctcacaacaatttatgtgccaccttccatcccctttcccagcagatggtaattgatgcaatttgagaatagaacacttcattgaaacaagtcactggaggtcctctggggatgca

SEQ ID NO: 9383 - DNA, 70 bp, Artificial Sequence
  ENSG00000008086_94 (sequence is synthesized)
cttcattgaaacaagtcactggaggtcctctggggatgcagcttaaaagcccaggctgagacgggcagat

SEQ ID NO: 9384 - DNA, 65 bp, Artificial Sequence
  ENSG00000008086_95 (sequence is synthesized)
cacctggacgacagagcgagacgccatctcaaaaataaataaataaataaatccctaggatatag

SEQ ID NO: 9385 - DNA, 120 bp, Artificial Sequence
  ENSG00000008086_96 (sequence is synthesized)
atctcaaaaataaataaataaataaatccctaggatatagagtccgcttgcctgggtggagtcttggctccatctcctacatctcatgtgacttgaagcaaggcacttcactatgcctca

SEQ ID NO: 9386 - DNA, 120 bp, Artificial Sequence
  ENSG00000008086_97 (sequence is synthesized)
gtttccttatctttaaatggaggtaatcacagtacctacctcagtgttgttgtgaagatttaatgagataataacctgcagagcacttgagagtctcaagaaatatgagctcttataaca

SEQ ID NO: 9387 - DNA, 120 bp, Artificial Sequence
  ENSG00000008086_98 (sequence is synthesized)
ttattgctattgtaaaacattgctattacttctgtcccaatttggcagtttcaggaaattgagaaggaatgtcactgaatctttaatgccagttacacagagctcagtaggtgtccgcac

SEQ ID NO: 9388 - DNA, 120 bp, Artificial Sequence
  ENSG00000008086_99 (sequence is synthesized)
agccctttagatgcacgtagcctatttgatcttcgtatcagccctgtaaggttgggcttaagaatgacccagcatggaagtactcttgggaccacaggggaagcaacagtccttgtaagc

SEQ ID NO: 9389 - DNA, 120 bp, Artificial Sequence
  ENSG00000008086_100 (sequence is synthesized)
tgtttgtcagtgggccttagcaaccaagccccaagtggacagaaagatggggttctgtgagcatccattccaagggtcactttaggggtgcaatcttctgggctctgagaatggattcac

SEQ ID NO: 9390 - DNA, 120 bp, Artificial Sequence
  ENSG00000008086_101 (sequence is synthesized)
agcagcatctctatctggaaatacctttgctttgtccaagtaacctcctcccacacagagtacccgaatcagctcagattttttttccttaatattggcaacacttaatgctacttcttt

SEQ ID NO: 9391 - DNA, 120 bp, Artificial Sequence
  ENSG00000008086_102 (sequence is synthesized)
gttcgtaacatttcatttaattatttaaaaatctgcaaatgttgtgtatattttaccgcaatttttaaacaaactccagtgtagaccgtgctctagcatttctaaaaataaaagtaaata

SEQ ID NO: 9392 - DNA, 120 bp, Artificial Sequence
  ENSG00000008086_103 (sequence is synthesized)
tgttaaaataaggtaagagtgagtttttcctacactatgtataatttttaattgaaagtttcccccacaaaagaaatgatacttggaagcatagtttgtgtgtttgacagcaagattcta

SEQ ID NO: 9393 - DNA, 120 bp, Artificial Sequence
  ENSG00000008086_104 (sequence is synthesized)
ttaggcttcagatttccctcaataaaagttttagtttttatacattctgtcatgaattgaatgaagtaaataatatgctgttgtaagcaaattatctgcagataaatgtcttatgaatcg

SEQ ID NO: 9394 - DNA, 120 bp, Artificial Sequence
  ENSG00000008086_105 (sequence is synthesized)
tatatcttactgtttattaaattctgaagtattgagcagtttccaatgtgaaatcccagctggcttctttgcaatgatggacaagttagttataattcatatggaaattcaaggaaccca

SEQ ID NO: 9395 - DNA, 120 bp, Artificial Sequence
  ENSG00000008086_106 (sequence is synthesized)
gaatagccaaaacaatcccgaagagcaaagttggaggactcacatgccccaatttcaaaacttactacaaagctacaataatgaagaaagtgaggtaatagaatttggagtccagaaata

SEQ ID NO: 9396 - DNA, 120 bp, Artificial Sequence
  ENSG00000008086_107 (sequence is synthesized)
aaccctctcacatttatggtcaattgttttttgacaagggtgccaagatcattcaatgggggaaagaatagtcttttcagcaaatagtggtgggacaactggatatccacatgcaaaaga

SEQ ID NO: 9397 - DNA, 120 bp, Artificial Sequence
  ENSG00000008086_108 (sequence is synthesized)
atgacgttggactcctatttcacaccatatacaaaaattaactcaaaatggaacaaagatctaactgtaagaggtagaactataaaactcatagaagaaaacataggggtaaatcttcat

SEQ ID NO: 9398 - DNA, 120 bp, Artificial Sequence
  ENSG00000008086_109 (sequence is synthesized)
gaccttggatttggcagtggtttctcagatatgacaccaaaggcacaagcaaagagaaaaataaattggacttcatcaaatatttaaaattttgtgcttaagaggactctatcgagaggg

SEQ ID NO: 9399 - DNA, 120 bp, Artificial Sequence
  ENSG00000008086_110 (sequence is synthesized)
ttaaaaagatccacagaatgggagaaaatatttgcaaatcatatccaataagggaattagaatatacaaagaattcttaaactcagtaagttgtaagccgatttaaaatgggcagaggat

SEQ ID NO: 9400 - DNA, 120 bp, Artificial Sequence
  ENSG00000008086_111 (sequence is synthesized)
ctgaaaaacctttatccaaagatgtacaaatggccagtaaacacatgaaaagatgctcaacatcattagtcactagggaaatgcaaatcaaaaccacagttgagatgcaacttcacacat

SEQ ID NO: 9401 - DNA, 120 bp, Artificial Sequence
  ENSG00000008086_112 (sequence is synthesized)
tatgggtatagtcaaagatggacagtaacaagtgttgctgaggatgtggagaaagtggaagcctcctacattgctggtggaaatgtaaaatgatgcagccacttgggataatagttcctc

SEQ ID NO: 9402 - DNA, 120 bp, Artificial Sequence
  ENSG00000008086_113 (sequence is synthesized)
caaagattaaacaagagtgactgtgtgtcccagcagttttactcctaagtatatacccaagataaatgaaaacacacatccgcacaaaaacttatacacaaatgttcatagcagcattat

SEQ ID NO: 9403 - DNA, 120 bp, Artificial Sequence
  ENSG00000008086_114 (sequence is synthesized)
tcataatagctaaagagtggaaacccaaatatccatcaatggatgaatggataaataacaatgtgctcttgacatgatactgaacaatgatgttcagcaataaaaaggagtgacaagtga

SEQ ID NO: 9404 - DNA, 120 bp, Artificial Sequence
  ENSG00000008086_115 (sequence is synthesized)
catagtgatacacatgttataacgtggatgaactttaaaacactatgctaagtgaaagaagccagtcacgaaataccacatactatatgatttcatttatgtagaacgtccagaaggcca

SEQ ID NO: 9405 - DNA, 120 bp, Artificial Sequence
  ENSG00000008086_116 (sequence is synthesized)
atctacagagacagtcgattcgtggttgcagagggcttggggtggccgatgggttggggagtgttggctgatgggtgcaggatttctctttggggtgataaactttctaaaattgatcta

SEQ ID NO: 9406 - DNA, 120 bp, Artificial Sequence
  ENSG00000008086_117 (sequence is synthesized)
gtgataatggttgcacaactctgaatataccaaaagtcatcaaattgtacactttaaatggatacaaattgtatgtgaacttaatctcaataaagccgtgacaaaagtttccaacatgaa

SEQ ID NO: 9407 - DNA, 120 bp, Artificial Sequence
  ENSG00000008086_118 (sequence is synthesized)
ccccacccgcgacacccctccagctgggaagacaagcccgagcgatcagggggaggggcacaaggccaggagaatacttctgctgtggtgacccaaagaagcctcacactccgtgcgtcc

SEQ ID NO: 9408 - DNA, 120 bp, Artificial Sequence
  ENSG00000008086_119 (sequence is synthesized)
gtccaatctccagtcctgctccctatccagtactccaggtccgaggcacttccatgtgcccgacactccaggtccgaggcactgatgctttcagctgcccaacccagcaatccgggttct

SEQ ID NO: 9409 - DNA, 120 bp, Artificial Sequence
  ENSG00000008086_120 (sequence is synthesized)
ctttcttcgtgagacacgttatgagggaagccctgattcacagggcccaggtaaaccaagctgcgctcctgacataccatgagaatgcggcactgacgggcaagtgacttctgcaagcct

SEQ ID NO: 9410 - DNA, 120 bp, Artificial Sequence
  ENSG00000008086_121 (sequence is synthesized)
ccagccctccagctgccagacggtggatgtgatggcagaagacagagacaccattctggaccccaagatagacgcttcatgttaaggacgacagaacaacaaggagaatacttctgctgt

SEQ ID NO: 9411 - DNA, 120 bp, Artificial Sequence
  ENSG00000008086_122 (sequence is synthesized)
gagttggaggaggaagaccctacaggaagttgaggtatcatatcctcaatttctgtgacccccagtggtttcacactatcttttcagcaagccacattggatttcacgcatttactgact

SEQ ID NO: 9412 - DNA, 120 bp, Artificial Sequence
  ENSG00000008086_123 (sequence is synthesized)
acctcaggactctttagagctctgagtgagtggggtgggggagttggaggaggaagaccctacaggaagttgagctgtactctccaacaggcgagcacatggtcgtctcctctctccctt

SEQ ID NO: 9413 - DNA, 120 bp, Artificial Sequence
  ENSG00000008086_124 (sequence is synthesized)
aatttctgtgacccccagtggtttcacactatcttttcagcaagccacattggatttcacgcatttactgactcttctacccgttctttttggtgtccagctgtactctccaacagggag

SEQ ID NO: 9414 - DNA, 120 bp, Artificial Sequence
  ENSG00000008086_125 (sequence is synthesized)
ttgtttgaacgtaatggttatatagttaatgtaaaagattacacaaattaatttgtctgagagcgtttgtcagaaacaggagacagagatgtgtatagaacaggattatcgttttaggta

SEQ ID NO: 9415 - DNA, 120 bp, Artificial Sequence
  ENSG00000008086_126 (sequence is synthesized)
tggctgcccgcgagggtgggctagcgaccgggcgccggccccgcggctccgcaacctcccccggacaagtttcaggcgatgctgtgaagttcacgactggcatagtgcggggaagaagaa

SEQ ID NO: 9416 - DNA, 80 bp, Artificial Sequence
  ENSG00000008086_127 (sequence is synthesized)
gagtggcgccccgagaagatctcagatctgcagacccaaggtcttactcaatcactcaggctggagtgcagtggcaagat

SEQ ID NO: 9417 - DNA, 120 bp, Artificial Sequence
  ENSG00000008086_128 (sequence is synthesized)
cacgccaccatacatggccagttttttaatttttttatagagacggggtctcgccttgttgcccaggctagaagctcttttcaaataactttatagctcttgctgaatgcagcttattgt

SEQ ID NO: 9418 - DNA, 120 bp, Artificial Sequence
  ENSG00000008086_129 (sequence is synthesized)
aattgcttgatagttacatgtggtcaaggctataaaaatcaccaggagtctcatcgtgttataccaatttaattatttttaaaaagccacttttgagcacttagagtgtacagtgtgctc

SEQ ID NO: 9419 - DNA, 120 bp, Artificial Sequence
  ENSG00000008086_130 (sequence is synthesized)
tgctacttcctgtagggagcacaaagctttcttgggaagactttgaaatgatgatggagaatactttcccctgaaacaatatctacttgagtcagttctgaagccatttaccttgggttt

SEQ ID NO: 9420 - DNA, 120 bp, Artificial Sequence
  ENSG00000008086_131 (sequence is synthesized)
cagtgcctagttccttcaaatcttgtaatgttccttgagttcgtcaacattttattcaaactttactgagcccttaaatgcatgtcccttataccatgacatttacagcaaaggtactct

SEQ ID NO: 9421 - DNA, 120 bp, Artificial Sequence
  ENSG00000008086_132 (sequence is synthesized)
gagaattggccccagaggggtcccaaggctagggttgtagcccaagtggccaaatccagcagtcatgattggctgtgaatttccaagtgctttccatgtctcttccgagatcgaggaaga

SEQ ID NO: 9422 - DNA, 120 bp, Artificial Sequence
  ENSG00000008086_133 (sequence is synthesized)
ggagattgagccatctttcatcgttcaggagcatgaggctcaggaattgtccagtgagcagacggctctgaggctcctcccctctgccctgaagtcagtctccctccttgatgcagcacc

SEQ ID NO: 9423 - DNA, 120 bp, Artificial Sequence
  ENSG00000008086_134 (sequence is synthesized)
tggggatgtctagctgcacagtagacagacaggcagggcggaccactgtgagcccatgttaggaattgaaggcctcctgtgaattaattctttagatagttctgatggggttttgcatat

SEQ ID NO: 9424 - DNA, 120 bp, Artificial Sequence
  ENSG00000008086_135 (sequence is synthesized)
gggggagttggaggaggaagaccctacaggaagttgagctgtactctccaacaggcgagcacatggtcgtctcctctctcccttcaggctgctcatcttcaaggggaaaacatggctact

SEQ ID NO: 9425 - DNA, 120 bp, Artificial Sequence
  ENSG00000008086_136 (sequence is synthesized)
ttcacatttaagatacatatctatttatgtgaataaatttcaaattagtgtatactaactaaattgttattaaattgatggctttattagcataggtttattcacttgtgttctgatgat

SEQ ID NO: 9426 - DNA, 120 bp, Artificial Sequence
  ENSG00000008086_137 (sequence is synthesized)
ttgcttttcagccttcttttcacatggaactttttaatttcataaatatacaagtgtgctgcacataaatttgttcacaataatttggaaattatcaaaacattatattttttcagttgc

SEQ ID NO: 9427 - DNA, 120 bp, Artificial Sequence
  ENSG00000008086_138 (sequence is synthesized)
aaaatggaatcaatactgcagtatttgagtcattgttcattgcacaatggaatgctaaactatcctttgaatactatttcttttcccattacagtgtttataatccctattataatattt

SEQ ID NO: 9428 - DNA, 120 bp, Artificial Sequence
  ENSG00000008086_139 (sequence is synthesized)
tatttccgaattttttaatagtacttgtggatttaaaaagtggttagaattcaaattctaatcttttttctaatttttaagttccagtttttcaaaatcttttttagtgtatacattttt

SEQ ID NO: 9429 - DNA, 120 bp, Artificial Sequence
  ENSG00000008086_140 (sequence is synthesized)
acacactaaactttggttatcttatattgtttctttatccaaaatattaagcatcccccaaatataccaaatgtatgaatgttgaacaaacatatttgtagtgatttgaggaaagccctg

SEQ ID NO: 9430 - DNA, 120 bp, Artificial Sequence
  ENSG00000008086_141 (sequence is synthesized)
aaaacttggattccccagatttgaaggttcttgttttagtagatgtttctggtccactgacggtgaaacatcaaatcttcttttcaaattagtgtattgtcttgggtccgtgcatggtgg

SEQ ID NO: 9431 - DNA, 82 bp, Artificial Sequence
  ENSG00000008086_142 (sequence is synthesized)
agagtgagattctgttagtgtattgtcttgggcagcctttcctagacttgacaactttgtacaaaacttttctgagaatatg

SEQ ID NO: 9432 - DNA, 120 bp, Artificial Sequence
  ENSG00000008086_143 (sequence is synthesized)
tagacttgacaactttgtacaaaacttttctgagaatatgtgaaatagcgtcttagaaagtataaactttccccaaatgaggaggagtcaccttattagagtgcccagtgagttataggc

SEQ ID NO: 9433 - DNA, 86 bp, Artificial Sequence
  ENSG00000008086_144 (sequence is synthesized)
ggaggagtcaccttattagagtgcccagtgagttataggctacttcttccacctaccccaaaaacaactttttaagttttcagcca

SEQ ID NO: 9434 - DNA, 120 bp, Artificial Sequence
  ENSG00000008118_0 (sequence is synthesized)
acagacctgtaggagctggagtgggagctcaagcaggattcttcccgagtccctgggtaagacaaccctgcttcttttcttggctttagagggtctccttgcttaatgggaagcgtgcag

SEQ ID NO: 9435 - DNA, 120 bp, Artificial Sequence
  ENSG00000008118_1 (sequence is synthesized)
cacctagtgagtggatttgaagagccactttgtaagcaacttgggcatttatttcagccccagttccagtcttccctgactcttttggcatcaaggcatcctcagaagcttcaactctgg

SEQ ID NO: 9436 - DNA, 120 bp, Artificial Sequence
  ENSG00000008118_2 (sequence is synthesized)
aggcaatgggtcgaaaggaagaagatgactgcagttcctggaagaaacagaccaccaacatccggaaaaccttcatttttatggaagtgctgggatcaggagctttctcagaagttttcc

SEQ ID NO: 9437 - DNA, 120 bp, Artificial Sequence
  ENSG00000008118_3 (sequence is synthesized)
tggtgaagcaaagactgactgggaagctctttgctctgaagtgcatcaagaagtcacctgccttccgggacagcagcctggagaatgagattgctgtgttgaaaaagatcaagcatgaaa

SEQ ID NO: 9438 - DNA, 120 bp, Artificial Sequence
  ENSG00000008118_4 (sequence is synthesized)
acattgtgaccctggaggacatctatgagagcaccacccactactacctggtcatgcagcttgtttctggtggggagctctttgaccggatcctggagcggggtgtctacacagagaagg

SEQ ID NO: 9439 - DNA, 120 bp, Artificial Sequence
  ENSG00000008118_5 (sequence is synthesized)
atgccagtctggtgatccagcaggtcttgtcggcagtgaaatacctacatgagaatggcatcgtccacagagacttaaagcccgaaaacctgctttaccttacccctgaagagaactcta

SEQ ID NO: 9440 - DNA, 120 bp, Artificial Sequence
  ENSG00000008118_6 (sequence is synthesized)
agatcatgatcactgactttggtctgtccaagatggaacagaatggcatcatgtccactgcctgtgggaccccaggctacgtggctccagaagtgctggcccagaaaccctacagcaagg

SEQ ID NO: 9441 - DNA, 120 bp, Artificial Sequence
  ENSG00000008118_7 (sequence is synthesized)
ctgtggattgctggtccatcggcgtcatcacctacatattgctctgtggataccccccattctatgaagaaacggagtctaagcttttcgagaagatcaaggagggctactatgagtttg

SEQ ID NO: 9442 - DNA, 120 bp, Artificial Sequence
  ENSG00000008118_8 (sequence is synthesized)
agtctccattctgggatgacatttctgagtcagccaaggactttatttgccacttgcttgagaaggatccgaacgagcggtacacctgtgagaaggccttgagtcatccctggattgacg

SEQ ID NO: 9443 - DNA, 120 bp, Artificial Sequence
  ENSG00000008118_9 (sequence is synthesized)
gaaacacagccctccaccgggacatctacccatcagtcagcctccagatccagaagaactttgctaagagcaagtggaggcaagccttcaacgcagcagctgtggtgcaccacatgagga

SEQ ID NO: 9444 - DNA, 120 bp, Artificial Sequence
  ENSG00000008118_10 (sequence is synthesized)
tcccctgagatcaccatcaccgaggcacctgtcctggaccacagtgtagcactccctgccctgacccaattaccctgccagcatggccgccggcccactgcccctggtggcaggtccctc

SEQ ID NO: 9445 - DNA, 120 bp, Artificial Sequence
  ENSG00000008118_11 (sequence is synthesized)
aactgcctggtcaatggctccctccacatcagcagcagcctggtgcccatgcatcaggggtccctggccgccgggccctgtggctgctgctccagctgcctgaacattgggagcaaagga

SEQ ID NO: 9446 - DNA, 120 bp, Artificial Sequence
  ENSG00000008118_12 (sequence is synthesized)
aagtcctcctactgctctgagcccacactcctcaaaaaggccaacaaaaaacagaacttcaagtcggaggtcatggtaccagttaaagccagtggcagctcccactgccgggcagggcag

SEQ ID NO: 9447 - DNA, 120 bp, Artificial Sequence
  ENSG00000008118_13 (sequence is synthesized)
actggagtctgtctcattatgtgattcctggagcctgtgcctatgtcactgcaattttcaggagacatattcaactcctctgctcttccaaacctggtgtctatccggcagagggaggaa

SEQ ID NO: 9448 - DNA, 120 bp, Artificial Sequence
  ENSG00000008118_14 (sequence is synthesized)
ggcagagcaagtggagcagggcttagcaggagcagtttctggccagaagcaccagcctgctgccagcggggcagcccctcataggaggcccaggagggagccccaaggcgtagaagcctt

SEQ ID NO: 9449 - DNA, 120 bp, Artificial Sequence
  ENSG00000008118_15 (sequence is synthesized)
gttgaagctgtgagcaggagaagcggtgcccaccagcttccaggtctccctgacctgcctgctctatgccccacaccctacgtgccgtggctctgtgcagtgtacgtagatagctctcgc

SEQ ID NO: 9450 - DNA, 120 bp, Artificial Sequence
  ENSG00000008118_16 (sequence is synthesized)
ctgggtctgtgctgtttgtcgtgaaaagcttaatgggctggccaggctgtgtcaccttctccaagcaaagccatatggagcatctacccagactcccactctgcacacactcactcccac

SEQ ID NO: 9451 - DNA, 120 bp, Artificial Sequence
  ENSG00000008118_17 (sequence is synthesized)
ctctcaagcctccaacctcttggccagattgggctcattaatgtcgttgcctgcccatctgcatgaatgacaggcagctccccatggtggtctgcctgtgagctcttcaagttctaatcc

SEQ ID NO: 9452 - DNA, 120 bp, Artificial Sequence
  ENSG00000008118_18 (sequence is synthesized)
ttaactccaggattagctcccaagtgcgctgagacccagccagcacacttctggcccttctccctgcctcaatctaaaagcagtgccacaccctccaaagtggaatagaaagaagttcat

SEQ ID NO: 9453 - DNA, 120 bp, Artificial Sequence
  ENSG00000008118_19 (sequence is synthesized)
gagtaagggctgcaaggaattcttatcctggccacatgtcctccgtgcacacacccaatggagttaaccttggaagttgactattttaatgtctgccaggagttctaatcctgcctctgt

SEQ ID NO: 9454 - DNA, 120 bp, Artificial Sequence
  ENSG00000008118_20 (sequence is synthesized)
tcccttttctctccttgaaagtccagcacaccattcttgtccttccccagtttcctcgccctccacccctccagcttcatgctcagtgttgtgcttaataaaatggacatatttttctct

SEQ ID NO: 9455 - DNA, 120 bp, Artificial Sequence
  ENSG00000008118_21 (sequence is synthesized)
caccaccacctaaaattgagagacgagtctttttgttctcactgtatctgcactctgtcccatctgctacctccagctgccactccagtgtgccatcctgagtcacattgaaagtggcat

SEQ ID NO: 9456 - DNA, 120 bp, Artificial Sequence
  ENSG00000008118_22 (sequence is synthesized)
gaattgactctgtagtggcttctttttagtgggcatgccaagtgaagaaatctctccacagctgcagtggagtctctgtctctaggggtcattcccaaactatagaaccaggaaataaca

SEQ ID NO: 9457 - DNA, 120 bp, Artificial Sequence
  ENSG00000008118_23 (sequence is synthesized)
cctgcctagcccctgaatctgtggtggcatctttttcttccaatatggtcttcaaattagaaagcacattagcatgtcagatacaactgccatcaacataactcagcagcgcccacatga

SEQ ID NO: 9458 - DNA, 120 bp, Artificial Sequence
  ENSG00000008118_24 (sequence is synthesized)
caatgaagagtaattatcagtccttccctcatctaccctttcactttgcctctaagtttgattgtttaactttttagttggaaataatttcaaacttagaaaaacgtttcaaaaataaga

SEQ ID NO: 9459 - DNA, 120 bp, Artificial Sequence
  ENSG00000008118_25 (sequence is synthesized)
ataacgccaggcttggtggctcatacctgtaatcccaacgctttggaaagccaaaggagaagagctgcttgatcccaggagttcaagaccagtttgggcaactggaggagctttctcaga

SEQ ID NO: 9460 - DNA, 120 bp, Artificial Sequence
  ENSG00000008128_0 (sequence is synthesized)
atatcatcattaggcgtcaacacaggaagtgaggatacttctggcgagcgccggttgctgtttcttctcaggctcagggaccggccgcggccccgtagggtgttttaactcaaatgggtg

SEQ ID NO: 9461 - DNA, 120 bp, Artificial Sequence
  ENSG00000008128_1 (sequence is synthesized)
atgaaaaggactcttggaaagtgaaaactttagatgaaattcttcaggaaaagaaacgaaggaaggaacaagaggagaaagcagagataaaacgcttaaaaaattctgatgaccgggatt

SEQ ID NO: 9462 - DNA, 120 bp, Artificial Sequence
  ENSG00000008128_2 (sequence is synthesized)
ccaagcgggattcccttgaggagggggagctgagagatcactgcatggagatcacaataaggaactccccgtatagaagagaagactcaatggaagacagaggagaagaagatgattctt

SEQ ID NO: 9463 - DNA, 120 bp, Artificial Sequence
  ENSG00000008128_3 (sequence is synthesized)
tggccatcaaaccaccccagcaaatgtctcggaaagaaaaagttcatcacagaaaagatgaaaagagaaaagaaaaatgtaggcatcatagccattcagcagaaggggggaagcatgcta

SEQ ID NO: 9464 - DNA, 120 bp, Artificial Sequence
  ENSG00000008128_4 (sequence is synthesized)
gagtgaaagaaagagagcacgaacgtcggaaacgacatcgagaagaacaggataaagctcgccgggaatgggaaagacagaagagaagggaaatggcaagggagcattccaggagagaaa

SEQ ID NO: 9465 - DNA, 120 bp, Artificial Sequence
  ENSG00000008128_5 (sequence is synthesized)
gggaccgcttggagcagttagaaaggaagcgggagcgggagcgcaagatgcgggagcagcagaaggagcagcgggagcagaaggagcgcgagcggcgggcggaggagcggcgcaaggagc

SEQ ID NO: 9466 - DNA, 120 bp, Artificial Sequence
  ENSG00000008128_6 (sequence is synthesized)
gggaggcccgcagggaagtgtctgcacatcaccgaacgatgagagaggactacagcgacaaagtgaaagccagccactggagtcgcagcccgcctcggccgccgcgggagcggttcgagt

SEQ ID NO: 9467 - DNA, 120 bp, Artificial Sequence
  ENSG00000008128_7 (sequence is synthesized)
tgggagacggccggaagccagtaaaagaagagaaaatggaagaaagggacctgctgtccgacttacaggacatcagcgacagcgagaggaagaccagctcggccgagtcctcgtcagcgg

SEQ ID NO: 9468 - DNA, 120 bp, Artificial Sequence
  ENSG00000008128_8 (sequence is synthesized)
ggaggaggaggaagaggaggaggaggaagggagcaccagtgaagaatcagaggaggaggaggaggaagaggaagaggaggaggaggagaccggcagcaactctgaggaggcatcagagca

SEQ ID NO: 9469 - DNA, 120 bp, Artificial Sequence
  ENSG00000008128_9 (sequence is synthesized)
gcagcaactctgaggaggcatcagagcagtctgccgaagaagtaagtgaggaagaaatgagtgaagatgaagaacgagaaaatgaaaaccacctcttggttgttccagagtcacggttcg

SEQ ID NO: 9470 - DNA, 120 bp, Artificial Sequence
  ENSG00000008128_10 (sequence is synthesized)
accgagattccggggagagtgaagaagcagaggaagaagtgggtgagggaacgccgcagagcagcgccctgacagagggcgactatgtgcccgactcccctgccctgttgcccatcgagc

SEQ ID NO: 9471 - DNA, 120 bp, Artificial Sequence
  ENSG00000008128_11 (sequence is synthesized)
tcaagcaggagctgcccaagtacctgccggccctgcagggctgccggagcgtcgaggagttccagtgcctgaacaggatcgaggagggcacctatggagtggtctacagagcaaaagaca

SEQ ID NO: 9472 - DNA, 120 bp, Artificial Sequence
  ENSG00000008128_12 (sequence is synthesized)
cagcatcccaacattgtcaccgttagagagattgtggtgggcagcaacatggacaagatctacatcgtgatgaactacgtggagcacgacctcaagagcctgatggagaccatgaaacag

SEQ ID NO: 9473 - DNA, 120 bp, Artificial Sequence
  ENSG00000008128_13 (sequence is synthesized)
cccttcctgccaggggaggtgaagaccctgatgatccagctgctgcggggggtgaaacacctgcacgacaactggatcctgcaccgtgacctcaagacgtccaacctgctgctgagccac

SEQ ID NO: 9474 - DNA, 120 bp, Artificial Sequence
  ENSG00000008128_14 (sequence is synthesized)
gccggcatcctcaaggtgggtgattttgggctggcgcgggagtacggatcccctctgaaggcctacaccccggtcgtggtgacccagtggtaccgcgccccagagctgctgcttggtgcc

SEQ ID NO: 9475 - DNA, 120 bp, Artificial Sequence
  ENSG00000008128_15 (sequence is synthesized)
aaggaatactccacggccgtggacatgtggtcagtgggctgcatcttcggggagctgctgactcagaagcctctgttccccgggaattcggaaatcgatcagatcaacaaagtgttcaag

SEQ ID NO: 9476 - DNA, 120 bp, Artificial Sequence
  ENSG00000008128_16 (sequence is synthesized)
gagctggggacccccagtgagaaaatctggcccggctacagtgagctcccagtagtcaaaaagatgaccttcagcgagcacccctacaacaacctccgcaagcgcttcggggctctgctc

SEQ ID NO: 9477 - DNA, 120 bp, Artificial Sequence
  ENSG00000008128_17 (sequence is synthesized)
tcagaccagggcttcgacctcatgaacaagttcctgacctacttccccgggaggaggatcagcgctgaggacggcctcaagcatgagtatttccgcgagacccccctccccatcgacccc

SEQ ID NO: 9478 - DNA, 120 bp, Artificial Sequence
  ENSG00000008128_18 (sequence is synthesized)
tccatgttccccacgtggcccgccaagagcgagcagcagcgtgtgaagcggggcaccagcccgaggccccctgagggaggcctgggctacagccagctgggtgacgacgacctgaaggag

SEQ ID NO: 9479 - DNA, 120 bp, Artificial Sequence
  ENSG00000008128_19 (sequence is synthesized)
acgggcttccaccttaccaccacgaaccagggggcctctgccgcgggccccggcttcagcctcaagttctgaaggtcagagtggaccccgtcatggggagaactcagccgggaccacagg

SEQ ID NO: 9480 - DNA, 120 bp, Artificial Sequence
  ENSG00000008128_20 (sequence is synthesized)
cgtggctactgcggctggagctgcgatgagactcggaactcctcgtcttactttgtgctccatgttttgtttttgtattttggtttgtaaatttgtagaattaaatcattttccttgttg

SEQ ID NO: 9481 - DNA, 120 bp, Artificial Sequence
  ENSG00000008128_21 (sequence is synthesized)
tggaggaaagagctgtgttttctccgtgacttgccagggcatcttcgggtgcccacgtggggcagcacaaacctccacacaccctctcccactctcgacacgcacggggctggctgggcc

SEQ ID NO: 9482 - DNA, 120 bp, Artificial Sequence
  ENSG00000008128_22 (sequence is synthesized)
gtgatttggaaaggaactggtgggagccgggtggattgtttaatcttcggagctggagacctgtttctgtgttgggatgagcgatgccctcttgccccaacccactcgtccagaccagcc

SEQ ID NO: 9483 - DNA, 120 bp, Artificial Sequence
  ENSG00000008128_23 (sequence is synthesized)
ctgtccacacaggcccccggcccccaacccccagccccagctgtgccagcagactcgacaggtttttatacaaggttgttgagttttaaaatgtattaaaatattcttcgaggaaagctc

SEQ ID NO: 9484 - DNA, 120 bp, Artificial Sequence
  ENSG00000008128_24 (sequence is synthesized)
aaatgtaagccatatttttttaagtaagtggttttcttaaaggagatttaatttctttgccctcatttttccattagaacaacgcttcttcggtgaagttcttttgtacttccaaatgtc

SEQ ID NO: 9485 - DNA, 120 bp, Artificial Sequence
  ENSG00000008128_25 (sequence is synthesized)
tgcacctggccaaaaattctttatattttataacactggctcattcagagtacatgtgaaagtttgttttgggatgttgcccaggtttgattatcattaaaaatacttttatctatgaag

SEQ ID NO: 9486 - DNA, 120 bp, Artificial Sequence
  ENSG00000008128_26 (sequence is synthesized)
gtttctttcctgttcctactcttctgccttccccagagcaccactgaaaaaccagagaaagcaaactgtagctgaaagcataatggtgtcacagaccgttcagaagggctatagagagaa

SEQ ID NO: 9487 - DNA, 120 bp, Artificial Sequence
  ENSG00000008128_27 (sequence is synthesized)
acagtgctgcagggagggccagctgcatccacagggaaagccctgagaagcctctgttgctgccgaggcgagcgggccaccctgagtgccctgggcttggggcggccgggtccacatggg

SEQ ID NO: 9488 - DNA, 120 bp, Artificial Sequence
  ENSG00000008128_28 (sequence is synthesized)
agtgagcatggccccaccacgcctggccccgggtggaaggcttttccgacagggccccgtgctgtcctggggccgggtgcttcctacactctcctgcacttagtggagcccttcacagac

SEQ ID NO: 9489 - DNA, 120 bp, Artificial Sequence
  ENSG00000008128_29 (sequence is synthesized)
ccgggtggcaccggaggtccttactgtccctcagcatctgcgcccgggtgcaggggtgggtgggggcctggaggtgcccagcacccacagagccgtgccctgcaggagattgtggtgggc

SEQ ID NO: 9490 - DNA, 120 bp, Artificial Sequence
  ENSG00000008128_30 (sequence is synthesized)
gccgcggccccgtaggggtgagttccgactgggcggaccaggtgtgggagcgcgacgagaactgcgcaccgaggtctttcttccgagcaggcctcggagcggggcggacccgggcccggg

SEQ ID NO: 9491 - DNA, 120 bp, Artificial Sequence
  ENSG00000008128_31 (sequence is synthesized)
aacgtctgccaggctgaacctcaagtgtgcgggactgaacccgaggaaatagcccagtgcccgggtcaggtggccttgttcgcgagcacatctcggagcatctccccggtctcaagtgtt

SEQ ID NO: 9492 - DNA, 120 bp, Artificial Sequence
  ENSG00000008128_32 (sequence is synthesized)
tgcaggaatggggctgcggggcgcacaggtgctgggttgagatggggaccagggccactgagagccctcctggtggcttgtcttctctgacgggacacaggtgccaacactgtgggccac

SEQ ID NO: 9493 - DNA, 120 bp, Artificial Sequence
  ENSG00000008128_33 (sequence is synthesized)
ggtcccgagccatagcggtgacttcccagtcccaggcctacctgctggctcaccacgttccagaactgctctggtgcctggcgtcccatgccctgagccccgtcccaacacagcccatct

SEQ ID NO: 9494 - DNA, 120 bp, Artificial Sequence
  ENSG00000008128_34 (sequence is synthesized)
gactgaacccgaggaaatagcccagtgcccgggtcaggtggccttgttcgcgagcacatctcggagcatctccccggtctcaaggtgcagctgtccagtgtgctagtggcttcacgtagt

SEQ ID NO: 9495 - DNA, 120 bp, Artificial Sequence
  ENSG00000008128_35 (sequence is synthesized)
ccaagcggtctttctagcagattctgacagtaaaagcagtgtttgatgagtggcaggtcctgagttaagagcctttaaacggatgatctttaatccgcgatcgatactatcactgtttta

SEQ ID NO: 9496 - DNA, 120 bp, Artificial Sequence
  ENSG00000008128_36 (sequence is synthesized)
gagcccaaaatgtattctaatattcagttgacattaaaggcagatttaacacactaaagctgtgtctagattgagcatacatggagaataaaatacgttgaatgttaagtcattagcaaa

SEQ ID NO: 9497 - DNA, 80 bp, Artificial Sequence
  ENSG00000008130_0 (sequence is synthesized)
gcattgctgctcggcggcgccggcgccggggtccgggcggccatggggcaacaggcggccagggcgccaagggccaggta

SEQ ID NO: 9498 - DNA, 120 bp, Artificial Sequence
  ENSG00000008130_1 (sequence is synthesized)
gcggggcctgcgggctcggtccggcatgtagacgcccccgcaggcgcccgcggcagcgaacggcatcagtgtttttctgaccgaagttctcatttcctgacaatggaaatggaacaagaa

SEQ ID NO: 9499 - DNA, 120 bp, Artificial Sequence
  ENSG00000008130_2 (sequence is synthesized)
aaaatgaccatgaataaggaattgagtccagacgcggctgcttactgctgctcggcctgccacggcgatgagacctggagttacaaccaccccatccggggccgggccaagtctcgcagc

SEQ ID NO: 9500 - DNA, 120 bp, Artificial Sequence
  ENSG00000008130_3 (sequence is synthesized)
ctgtctgcctcgcccgccctggggagcaccaaggagttcaggaggacacgctctcttcatgggccatgcccggtgaccacttttggaccaaaggcctgtgtgctgcagaacccccagacc

SEQ ID NO: 9501 - DNA, 120 bp, Artificial Sequence
  ENSG00000008130_4 (sequence is synthesized)
atcatgcacattcaggaccccgcgagccagcggctgacgtggaacaagtccccaaagagcgtccttgtcatcaagaagatgagagatgccagcctactgcagccgttcaaggagctctgc

SEQ ID NO: 9502 - DNA, 120 bp, Artificial Sequence
  ENSG00000008130_5 (sequence is synthesized)
acgcacctcatggaggagaacatgatcgtgtatgtggaaaagaaagtgctagaagaccctgccatcgccagcgatgaaagctttggggcagtgaagaagaaattctgtacctttcgagaa

SEQ ID NO: 9503 - DNA, 120 bp, Artificial Sequence
  ENSG00000008130_6 (sequence is synthesized)
gattatgatgacatttccaatcagatagacttcatcatctgcctggggggagacgggacgctgctgtacgcttcctcgcttttccagggcagcgtccctccggtcatggccttccacctg

SEQ ID NO: 9504 - DNA, 120 bp, Artificial Sequence
  ENSG00000008130_7 (sequence is synthesized)
ggctccctgggcttcctgaccccattcagctttgagaactttcagtcccaagttactcaggtgatagaggggaacgcagctgttgttctccggagtcggctgaaggtcagggtggtgaag

SEQ ID NO: 9505 - DNA, 120 bp, Artificial Sequence
  ENSG00000008130_8 (sequence is synthesized)
gagctccgggggaagaagacggccgtgcacaatgggctgggtgagaacggctcgcaggctgcaggcctggacatggatgtcgggaagcaggccatgcagtaccaggtcctgaatgaggtg

SEQ ID NO: 9506 - DNA, 120 bp, Artificial Sequence
  ENSG00000008130_9 (sequence is synthesized)
gtgattgacagaggcccctcctcctacctgtccaatgtggatgtctacctggacggacacctcatcaccacggtgcagggcgacggagtgatcgtgtccaccccgacgggcagcacggcg

SEQ ID NO: 9507 - DNA, 120 bp, Artificial Sequence
  ENSG00000008130_10 (sequence is synthesized)
tatgcggccgcggccggggcctccatgatccaccccaacgtgccggccatcatgatcacgcccatctgcccccactcgctgtccttccggcccatcgtggtccccgcaggggtcgagctg

SEQ ID NO: 9508 - DNA, 120 bp, Artificial Sequence
  ENSG00000008130_11 (sequence is synthesized)
aagatcatgctgtcacctgaagcaaggaacacagcatgggtgtcctttgatggacggaagagacaagagatccgccatggagacagcatcagcatcactacctcatgctacccgctcccc

SEQ ID NO: 9509 - DNA, 120 bp, Artificial Sequence
  ENSG00000008130_12 (sequence is synthesized)
tccatctgtgtgcgggaccccgtgagcgactggtttgagagcctcgcccagtgcctgcattggaacgtccggaagaagcaagcccacttcgaggaggaggaggaggaggaggaggagggc

SEQ ID NO: 9510 - DNA, 120 bp, Artificial Sequence
  ENSG00000008130_13 (sequence is synthesized)
ttctgtagctgggttagagcctgggtctgccttttgtccagatcagctgtttttttaaaatgtctgactttttttgcatttctaaagaagcgtgagaaatgggctgggagtgcttctgtc

SEQ ID NO: 9511 - DNA, 120 bp, Artificial Sequence
  ENSG00000008130_14 (sequence is synthesized)
ctgctgacaccccgcggtgggtccctggagcgcggcctccagctgccgcaatttccatgccaggatatttttccgcaaatcagtcggttgaaattcagaggagtcagaatgactcgacct

SEQ ID NO: 9512 - DNA, 120 bp, Artificial Sequence
  ENSG00000008130_15 (sequence is synthesized)
gtccttcaatgttgataataaatgtctcagccaaaaaccttccttgagctgccatgcttttccccttgacctgcacctcttcccctaaaacttctgcagggaagcccctggcggaggcgc

SEQ ID NO: 9513 - DNA, 120 bp, Artificial Sequence
  ENSG00000008130_16 (sequence is synthesized)
cattgaaagcatggtcttgccagtggctggcaaggcggttttgttctgctcagtttctggagagggttggatgcgtcccctgccatccagccctccccgcttgaggccagcactgagtct

SEQ ID NO: 9514 - DNA, 120 bp, Artificial Sequence
  ENSG00000008130_17 (sequence is synthesized)
gggacactcagcgggaagggggctggcatcgccagcgacccacacattcctcacgtagcttctgctcccaggaaggtagtttaaatcctgtatatactttttagagactcttttaaactt

SEQ ID NO: 9515 - DNA, 120 bp, Artificial Sequence
  ENSG00000008130_18 (sequence is synthesized)
tctgaagtgctgatgtacatactttctcgtacacacttttgtgaagatttcaaggggaagggagtcgtctgccattcaatgtttacatttatgttctgcaagacgctgtcctcagggacc

SEQ ID NO: 9516 - DNA, 120 bp, Artificial Sequence
  ENSG00000008130_19 (sequence is synthesized)
attaggggaccattctgttcagtgcgatcctgatggtccgggagatgagggtttccggggctagtgatcgtgatcccttttatttgcaactgtaatgagaatttttcacactaacacagc

SEQ ID NO: 9517 - DNA, 120 bp, Artificial Sequence
  ENSG00000008130_20 (sequence is synthesized)
gagggactcaacacgctgattctcctcctgcctctcccgtgagtctccagcctgcccagcaccggcagctgtggagcacgtggatgctgcctaccccggcgcccgcgtcttccacgggca

SEQ ID NO: 9518 - DNA, 120 bp, Artificial Sequence
  ENSG00000008130_21 (sequence is synthesized)
caggtgtgtggaggccgtggtcggaccctggtgtcctggttactgctgcccgggtgtcttttttttgagtaactgctctctgagttttgcacacgaagttgccctcatctgctggagatc

SEQ ID NO: 9519 - DNA, 120 bp, Artificial Sequence
  ENSG00000008130_22 (sequence is synthesized)
gataaggaaggcacaagacgttctcctctgcccgtgaggagcttcccgcagccgcctggcccagcctgggcacgttctccgaggcatgtgtctccctgctcaccctcgtctgggcacctc

SEQ ID NO: 9520 - DNA, 120 bp, Artificial Sequence
  ENSG00000008130_23 (sequence is synthesized)
agcatctgtggacttgagcgtccaaaaaccctgagtgtgattctgggcagccggcctggcttgaagtccgccatgaccctgggcacaggggaagcccagccgtgggcttaggagagaggg

SEQ ID NO: 9521 - DNA, 120 bp, Artificial Sequence
  ENSG00000008130_24 (sequence is synthesized)
accagcgcccagcgttagggctggaagacggcagtgttcagaattccagccgctcatctgaacacagaaggtgtgaactgacctctaaagcagcgtgagatgggaatgatctagaaaact

SEQ ID NO: 9522 - DNA, 120 bp, Artificial Sequence
  ENSG00000008130_25 (sequence is synthesized)
ttggatttttgaagtaaattttaatgtttcatattaatttcttgaaaatgtattaaatgtcattgaaagccttattacgcttttcagatcctttcaataaacaagacttgtagaaaataa

SEQ ID NO: 9523 - DNA, 120 bp, Artificial Sequence
  ENSG00000008130_26 (sequence is synthesized)
agagcttaggcttctagtgtgggcgcacagtcaggaccataccgatggggcggccgcgtgttcgccaagcgtggcctggatgctgtggacacactggccggctcccagcaggcaggggct

SEQ ID NO: 9524 - DNA, 120 bp, Artificial Sequence
  ENSG00000008130_27 (sequence is synthesized)
aaatcccccaagttctcatgatccttgcttccctttccagtcacccttggtgccctgtacttcactgtggtcctgaactgaagagctgtgtttttcaggaagacttggccaggccgtgtt

SEQ ID NO: 9525 - DNA, 120 bp, Artificial Sequence
  ENSG00000008130_28 (sequence is synthesized)
gtcactcgcatctcagctgctgccttcaccagccgtcagtcactcgggccagggcggggtcaccggacaggtgcatgttctgcctcagccctcagaccagggcgtactcagtggtccccg

SEQ ID NO: 9526 - DNA, 120 bp, Artificial Sequence
  ENSG00000008130_29 (sequence is synthesized)
agctgcccgaggccagacagccccgcaggaggaagcggtgacccaggaagaggtcgaggcgctggtttgtggtcacacacagcggtgggtgcctgggccggtgtacgacgccgctgctgg

SEQ ID NO: 9527 - DNA, 120 bp, Artificial Sequence
  ENSG00000008130_30 (sequence is synthesized)
taaggcccgcagcactgtcctggggccctgagcgtccctcgggcgggagtgacgcctgcgcctgtccctgtcaggagtgatcgtgtccaccccgacgggcagcacggcgtatgcggccgc

SEQ ID NO: 9528 - DNA, 120 bp, Artificial Sequence
  ENSG00000008130_31 (sequence is synthesized)
ctgggtttgtgtgtgccgccatggcaagcaccagactgggtgaccaacaatgagctggtgggctcgtggccctggaggccgggaagtccgagatcaaggggccacatctgacgtgggcct

SEQ ID NO: 9529 - DNA, 120 bp, Artificial Sequence
  ENSG00000008130_32 (sequence is synthesized)
tcctgctgtgtcttctcttcagaagagcaggcgtgggggttgcggcgcccaggaaagccactcctgaaataacagccttagtcaattcctgagagggagccccctccgcccagtcatctc

SEQ ID NO: 9530 - DNA, 120 bp, Artificial Sequence
  ENSG00000008130_33 (sequence is synthesized)
ttaaaggtcctgcttcctcctggcgcgttggtgatgaagtttcagcgtgagcgtgggggggcgggcatgcaggccacgatgccaggtctctgaccacagcgcccgtgagtcgggaacctc

SEQ ID NO: 9531 - DNA, 120 bp, Artificial Sequence
  ENSG00000008130_34 (sequence is synthesized)
cagagtgagactccatctcaaaataaaaagaaaaaggcacagaagtgtgtcaacttgggagaagaaagagccctctgactcccactggcctccctggggtggggcccctgaccccactga

SEQ ID NO: 9532 - DNA, 120 bp, Artificial Sequence
  ENSG00000008130_35 (sequence is synthesized)
ccctagaccatcatgtgagtgccgggggccatgggatgggggagtcctcgggatgtgtgtggagttgtgggatcgctgtgttgaggaagattctagcacttcatgtgagaagtacatgtt

SEQ ID NO: 9533 - DNA, 120 bp, Artificial Sequence
  ENSG00000008130_36 (sequence is synthesized)
taggtcatttaaacaaaaagccacatgggcgtcctccctgaaccccctgagtgcaggcatccgagcgggggctccccagctgtggcttttccagtggctttgagaaagtggacggcaggc

SEQ ID NO: 9534 - DNA, 120 bp, Artificial Sequence
  ENSG00000008130_37 (sequence is synthesized)
ggttttcatgccacagacggggcagctgctggagctccctacacagcgggacacgcgaagggcacctgctgtgtgacctggggcccacgacagtcactggttgcctctgcagaagcagtt

SEQ ID NO: 9535 - DNA, 120 bp, Artificial Sequence
  ENSG00000008130_38 (sequence is synthesized)
tttccagacccacaccaggttctagtctaggtgctgcgtaacgaggggctcacaagcatggcttccattgcttttcacccctttatacgagagcagtcacctagagcggccagcactgag

SEQ ID NO: 9536 - DNA, 120 bp, Artificial Sequence
  ENSG00000008130_39 (sequence is synthesized)
gcccatggtggcagcccggtggggtgcgacggtggggccaggggcagtgtggacacagtgctacggctgggggtggccagcgcccgcctgggacagcagggagtggcgcagggtggtggg

SEQ ID NO: 9537 - DNA, 120 bp, Artificial Sequence
  ENSG00000008196_0 (sequence is synthesized)
agacatctgctcctcacatgaatgcactcacctcctagagaccaggctgccatcatgctctggaagcttgtggagaatgtcaagtacgaagatatctatgaggaccggcacgatggtgtc

SEQ ID NO: 9538 - DNA, 120 bp, Artificial Sequence
  ENSG00000008196_1 (sequence is synthesized)
ccgagccacagctcgcggctctcccagctgggctcggtgtcccaaggaccctactcgagcgccccgccgctgtcccacaccccgtcgtcggacttccagccgccctacttcccacccccc

SEQ ID NO: 9539 - DNA, 120 bp, Artificial Sequence
  ENSG00000008196_2 (sequence is synthesized)
taccagccgctcccctaccaccagagccaggacccctactcccacgtcaacgacccctactccctgaacccactgcaccagccccagcaacatccctgggggcaacggcagcggcaagaa

SEQ ID NO: 9540 - DNA, 120 bp, Artificial Sequence
  ENSG00000008196_3 (sequence is synthesized)
gtgggttcggaagccggctctctcctgccccagcctcgggccgccttgccccagctctcgggccttgacccccggagggactaccactcggtccgccggccggacgtgctgctgcattcg

SEQ ID NO: 9541 - DNA, 120 bp, Artificial Sequence
  ENSG00000008196_4 (sequence is synthesized)
gcgcaccacggcctggacgcgggcatgggtgacagcctctcgctgcacggcctcggccatcccggaatggaagacgtccagtcagttgaagatgccaataacagcggcatgaatctattg

SEQ ID NO: 9542 - DNA, 120 bp, Artificial Sequence
  ENSG00000008196_5 (sequence is synthesized)
gaccagtctgtcattaaaaaagttccagttcctcccaaatcggtgacttctctaatgatgaataaagacggcttcctgggaggcatgtctgtcaacaccggcgaggtgttttgctccgtc

SEQ ID NO: 9543 - DNA, 120 bp, Artificial Sequence
  ENSG00000008196_6 (sequence is synthesized)
ccaggccgtttgtctctgctcagttcaacttcgaagtacaaagtaactgtgggagaagttcagagacggctgtcgccccctgaatgcctcaatgcatctctcctcggcggagtcctcaga

SEQ ID NO: 9544 - DNA, 120 bp, Artificial Sequence
  ENSG00000008196_7 (sequence is synthesized)
agagccaaatcgaaaaatggggggagatctttgcgagaaaggctagaaaaaatcggtttgaatttacccgcgggcaggcgcaaagcagcaaatgtcacgttactcacctccctggtggaa

SEQ ID NO: 9545 - DNA, 120 bp, Artificial Sequence
  ENSG00000008196_8 (sequence is synthesized)
ggagaagctgttcacttagctagggattttgggtacatttgcgaaacggagtttcccgccaaagccgtctctgagtatttgaaccggcagcacacagacccgagtgacctgcactcccga

SEQ ID NO: 9546 - DNA, 120 bp, Artificial Sequence
  ENSG00000008196_9 (sequence is synthesized)
aagaatatgctgttggccaccaagcaactttgtaaagaatttacggatctactggcgcaggaccggacaccgatagggaacagccgacccagccccatcctggagccggggatccagagc

SEQ ID NO: 9547 - DNA, 120 bp, Artificial Sequence
  ENSG00000008196_10 (sequence is synthesized)
tgcctcacgcacttcagcctcatcacgcacggcttcggcgccccggccatttgcgccgcgctcacggccctgcagaactatctcaccgaggcgctcaaaggcatggacaagatgttcttg

SEQ ID NO: 9548 - DNA, 120 bp, Artificial Sequence
  ENSG00000008196_11 (sequence is synthesized)
aacaacaccaccactaacaggcacacgtctggggaaggcccaggtagtaaaactggcgacaaggaggagaaacacaggaaatgaaaaatttttaaaaaaagaaggaaaaatgttttaaat

SEQ ID NO: 9549 - DNA, 120 bp, Artificial Sequence
  ENSG00000008196_12 (sequence is synthesized)
acaaaaggaaaaacagacaaaaatttaattttagctttaaaatattggattggctttggaagaattatattaggtagaatacacatacaatcaaaattttaaaaaaaaaagctaaataac

SEQ ID NO: 9550 - DNA, 120 bp, Artificial Sequence
  ENSG00000008196_13 (sequence is synthesized)
ttaaaaaaaaactgaggcgtacaacggagcaacaatatcggttctcagtgtctatttcaagatacatttggagacaaccgtccggattttccacttcggttctttcgagtttagtaatac

SEQ ID NO: 9551 - DNA, 120 bp, Artificial Sequence
  ENSG00000008196_14 (sequence is synthesized)
tgataataaaagaaaaccatgatttccccttccctttggaaaataaacataagactaaacatgagaaaaacgctaacttattggaagaaaatcggagaaacgttggtgtcaatgctttga

SEQ ID NO: 9552 - DNA, 120 bp, Artificial Sequence
  ENSG00000008196_15 (sequence is synthesized)
gagctggttgactgagacgcacgaactttttaattttaaatatatttttaggaaactctcgcagtccccgccctccatctcacctcacccgtctcccaaccacccttttccatgttaccc

SEQ ID NO: 9553 - DNA, 120 bp, Artificial Sequence
  ENSG00000008196_16 (sequence is synthesized)
tcccttcctcacattgttacgggaatcttctgggatgaaaatgagtgtggttggcccttttgcgttgtttcagtcctctcggtacctccccgcccagccctgcgatcttaactcaccggg

SEQ ID NO: 9554 - DNA, 120 bp, Artificial Sequence
  ENSG00000008196_17 (sequence is synthesized)
cccggctccccggccgcttgcataattagggagggcgagggcggggcgggaggcctgtggagaccaggcggaggctgcaatttttggtgccggccggcagagcaggttctggcggctgag

SEQ ID NO: 9555 - DNA, 120 bp, Artificial Sequence
  ENSG00000008196_18 (sequence is synthesized)
gaaaatccggaccaataagttgattcaaacatcatcagttcctttcagaaatgttactagctcccagccttgccagcatctgcatagagagaatctcacatttattatatttgtgtcatc

SEQ ID NO: 9556 - DNA, 120 bp, Artificial Sequence
  ENSG00000008196_19 (sequence is synthesized)
tactaattttatgaactatagtaaaaaaaaaaaaacacacacacacacaatatgaatacgttgattagtatgtaattccttcggaggggtatgtaccatttcattctcttctgttttcca

SEQ ID NO: 9557 - DNA, 120 bp, Artificial Sequence
  ENSG00000008196_20 (sequence is synthesized)
aagctttgcccgcatggtttatgagcttcttcaaagaggacttgggcttcctacacaatctataaggtacagagaaaaaaaaatccgatccctttttaatcaaagcctgtgtgtcagaat

SEQ ID NO: 9558 - DNA, 120 bp, Artificial Sequence
  ENSG00000008196_21 (sequence is synthesized)
tctgcaggtgcacttctttaaagaagctcaaagggaataatttagaaagtggccaatatgatggaagcagctttgaatctacatgctaacattcctcaacactccaattccggtggaggt

SEQ ID NO: 9559 - DNA, 120 bp, Artificial Sequence
  ENSG00000008196_22 (sequence is synthesized)
ggcaggggagggggtctgcaaaatgaattttaagggaaaagagtaaggattcttagagccctatattctaatagtattgccctgcatttaaaattgatttgatttccctgggttctttgg

SEQ ID NO: 9560 - DNA, 120 bp, Artificial Sequence
  ENSG00000008196_23 (sequence is synthesized)
aatgaggcatttttccctcccagacgtgcacttgttttggcatataatggcaaaataatgcaaagtgaagggagatgtatttcagctttgatttttaccgtctggatacatcgggactat

SEQ ID NO: 9561 - DNA, 120 bp, Artificial Sequence
  ENSG00000008196_24 (sequence is synthesized)
tcccagtggataaagtttcatgcatttaatatttctcacttctggcagcccagctcctttcttgggctccatcttagcattatcatgaaataagatctggaatccattgtctgcacctcc

SEQ ID NO: 9562 - DNA, 120 bp, Artificial Sequence
  ENSG00000008196_25 (sequence is synthesized)
gcaaaagcagtgagaaattatcccgggataagggtgaatgagagaggtctctaaatatagtgttgatacactcacctatttaacaaagtagacgagatctttgcaataccccttaaagat

SEQ ID NO: 9563 - DNA, 120 bp, Artificial Sequence
  ENSG00000008196_26 (sequence is synthesized)
aacgacatagatgttgttctgcaggatttatagttaggacccactcaattctccaggactcccggttttgcccccctcccgctttgccttggtgggggtggggattgggggagtggggat

SEQ ID NO: 9564 - DNA, 120 bp, Artificial Sequence
  ENSG00000008196_27 (sequence is synthesized)
tgcgttggggttttaggaatctgctgagagctttgcccatttttattaaaagaggaaagggaagttaggaagctcgtctcaggtcaccaaaagggcccaagcaactgttagggccacact

SEQ ID NO: 9565 - DNA, 120 bp, Artificial Sequence
  ENSG00000008196_28 (sequence is synthesized)
gcagcccatctccaacccctagcttcgtttagcacttctgatcttcatggcccagccctagaactgttgagaggaatgcaatggccaagagctagacgttacggagagtgtagtcactct

SEQ ID NO: 9566 - DNA, 120 bp, Artificial Sequence
  ENSG00000008196_29 (sequence is synthesized)
cttttcccagctcagaggcctgcgccttcgtccgagagctcggccgatcgcattagatgtgttctgattgcacaaggccaggagagaccacactgaaaacgatcgtctcctttccttgca

SEQ ID NO: 9567 - DNA, 120 bp, Artificial Sequence
  ENSG00000008196_30 (sequence is synthesized)
gggcaacgcgccccacgcgtgtgacgtgcgagagacgcgatggacgcgccttgctcttactgtgcaggtcctgagagcgtgtgggccacaggcgcccagtcgtgttgaggacatagaatc

SEQ ID NO: 9568 - DNA, 120 bp, Artificial Sequence
  ENSG00000008196_31 (sequence is synthesized)
agccgctggaggggctgccgactgcgcgggcccttcccgctctcggtctcaccctaagggctaaggcgaccgagaaagccccattctccagtaggtaatggggcggcgcccggtgggctg

SEQ ID NO: 9569 - DNA, 120 bp, Artificial Sequence
  ENSG00000008196_32 (sequence is synthesized)
caggtggggagggctcccagcgccgccagcggccacccggggcgccggctcctggagggagagtggcctagaaatatccaaggaatccgaagcttcccctcctccacctctgccagtacg

SEQ ID NO: 9570 - DNA, 120 bp, Artificial Sequence
  ENSG00000008196_33 (sequence is synthesized)
gaaacaccccaccgtcacaatcctaaagcggggagatgggatgggaattgtcttacttggcaaggcagggtaccttcattgccagacgccctcatttgtgtgttcctccttgctccagcg

SEQ ID NO: 9571 - DNA, 120 bp, Artificial Sequence
  ENSG00000008196_34 (sequence is synthesized)
agatagaaccttttgcgcccccaaccccgtttcgtggagtgagcccactaccccttctccctccctcacttctcctttcatgtaggacccccgcccccttgctttccttagccaggcccg

SEQ ID NO: 9572 - DNA, 120 bp, Artificial Sequence
  ENSG00000008196_35 (sequence is synthesized)
ctacatttatctgataattgagttattaaaagatttggtttccttgggcctataaatcaataaacagtaggattaacgcaatagtttgccttttaagtcaagggagacgtttaaggcaag

SEQ ID NO: 9573 - DNA, 120 bp, Artificial Sequence
  ENSG00000008196_36 (sequence is synthesized)
cccctttgagctttgttttcaaaccaaacaggtgagttgcagctctccccccggcccctgcactcttcagacatttggtccctgcccactcctaaacgctcagtcccaaaacaaaatagc

SEQ ID NO: 9574 - DNA, 120 bp, Artificial Sequence
  ENSG00000008196_37 (sequence is synthesized)
gaaagacaggaggagtcaggatgtggcagtgctgccttcacactttccacttcgcaagttcttttaaaggttccaaagatctccagaccattctctgccaaaccctgccgcctcctgcac

SEQ ID NO: 9575 - DNA, 120 bp, Artificial Sequence
  ENSG00000008196_38 (sequence is synthesized)
gtattgcaggtctctggggagcaagaaatgtcctgtttgggtgaggattccgtcacctaaaaagatctttaacttctcccccaaagtgggaaggtaactttctcccccttttccccacca

SEQ ID NO: 9576 - DNA, 120 bp, Artificial Sequence
  ENSG00000008196_39 (sequence is synthesized)
ccttcactcctacacccccaattaccttgcattttctttccttccttctggcctccacacccatagctttcctccatccccacttaaagaaccgaagaggcttttaaagacctggctgct

SEQ ID NO: 9577 - DNA, 120 bp, Artificial Sequence
  ENSG00000008196_40 (sequence is synthesized)
ttgttttccttggccaaggaagccactttctctcaagcaattatttcatatcctacgaaaactttggtcgaatggaaaactcgaaacctcgagcttatctacacactgttcctctgctac

SEQ ID NO: 9578 - DNA, 120 bp, Artificial Sequence
  ENSG00000008196_41 (sequence is synthesized)
aatgctttcctagttaagagtgtttatagagaatttgtcatcacatctgatatcctgtacttgtaatacattatgtggaaaggaaataaccttaaaccgtctgatgttgcctcaagagcc

SEQ ID NO: 9579 - DNA, 120 bp, Artificial Sequence
  ENSG00000008196_42 (sequence is synthesized)
caaacggcgtttccccacctttgacgatgtatgtgaaattactggcttaaaaaaaaaagtatcaatttttttttaacggaatgaacactatccttctttaaatgccaaaatcgactccac

SEQ ID NO: 9580 - DNA, 120 bp, Artificial Sequence
  ENSG00000008196_43 (sequence is synthesized)
ctttgagttggtctctaattctctaacattgtttttgccacacaatcaagaaatatcaatctattgactcttcacgagaagagctctggagggtattcatgttaagtttgtatatattta

SEQ ID NO: 9581 - DNA, 120 bp, Artificial Sequence
  ENSG00000008196_44 (sequence is synthesized)
tttatgcttaatttaatgggaatgtgtaaatatggcgagcaagtagtttgggattatttatctgtgaatctatacctctgtgaatgggtggttaaaaaacctcttgaccctagatagaat

SEQ ID NO: 9582 - DNA, 120 bp, Artificial Sequence
  ENSG00000008196_45 (sequence is synthesized)
cctatctgaatttttctgttctttataaacaagctgttatggtaatgggtagaaattggtttattgtccagtgttaatctgatttacataaataaaaagattgttgtgttttcatcttca

SEQ ID NO: 9583 - DNA, 120 bp, Artificial Sequence
  ENSG00000008196_46 (sequence is synthesized)
aattattatgaggcggtgtaggcaagcggagggaggaaggggcggccgagcagtctgagcccagcttcgggtgaaagaggactgcatctggagccccgaagaacggcagaagaaaagagg

SEQ ID NO: 9584 - DNA, 120 bp, Artificial Sequence
  ENSG00000008196_47 (sequence is synthesized)
ccaaaaagacagcaaagagacagatgaatagttctgtctgtgtgtgacaggcatcgccaatcttgttggggtggggggcgggtgtaattttttttttttttttttgatggcttgtcctgg

SEQ ID NO: 9585 - DNA, 120 bp, Artificial Sequence
  ENSG00000008196_48 (sequence is synthesized)
aaacacatcaagctcagctcctgtgtccagctcgcttctctgctggactccttgattttttttttaatcattgtttgattttgagcagtaaccaggcttttttttccagatgttagtcca

SEQ ID NO: 9586 - DNA, 120 bp, Artificial Sequence
  ENSG00000008196_49 (sequence is synthesized)
tttttctctttgctgaggcttacttgtccagcctattgtttgagacaacagatataagttgcgatgggagaggagcgtcggatttggtgtgtatcccccatttccaattatagatggatc

SEQ ID NO: 9587 - DNA, 120 bp, Artificial Sequence
  ENSG00000008196_50 (sequence is synthesized)
attacagacagcggagtcctgagaagccagacatctgctcctcacatgaatgcactcacctcctagagaccaggctgccatcatgctctggaagcttgtggagaatgtcaagtacgaaga

SEQ ID NO: 9588 - DNA, 120 bp, Artificial Sequence
  ENSG00000008197_0 (sequence is synthesized)
agggagctgcttttgtgcagagggaaaattttgttcctacaggtttttaagtgggtacgaggcaaggagctatctgatccgggcaaaaccattacaatttagatatctacctatagaaca

SEQ ID NO: 9589 - DNA, 120 bp, Artificial Sequence
  ENSG00000008197_1 (sequence is synthesized)
ttttttttttcctttaaaaattggaaaatacaagaagtttggatttttttttcccgattctttttttggagggggaaattgcatcgtaagctttcggagaaacccaacatgtcaactacc

SEQ ID NO: 9590 - DNA, 120 bp, Artificial Sequence
  ENSG00000008197_2 (sequence is synthesized)
tttccgggactagtccacgatgccgagatacgtcacgacggatcaaacagctaccgtttgatgcagcttggctgtctggagtcagtagccaattccactgtcgcctattcctcctcctct

SEQ ID NO: 9591 - DNA, 120 bp, Artificial Sequence
  ENSG00000008197_3 (sequence is synthesized)
cctttaacttactccaccaccggcaccgagtttgcgtccccctacttctccactaaccaccagtacaccccgctccaccaccagtccttccattacgagtttcagcacagccacccggcc

SEQ ID NO: 9592 - DNA, 120 bp, Artificial Sequence
  ENSG00000008197_4 (sequence is synthesized)
gtcacccccgacgcctactctctgaactctctccaccactcgcaacagtactaccagcagatccaccacggggagcccaccgactttattaacctgcacaatgcgcgggcgctcaagtcg

SEQ ID NO: 9593 - DNA, 120 bp, Artificial Sequence
  ENSG00000008197_5 (sequence is synthesized)
tcctgcctggacgagcagaggcgggagctgggctgcctcgatgcctaccgccgccatgacctgtccctcatgagccatggctctcagtatggaatgcacccagatcaaagactcctgcca

SEQ ID NO: 9594 - DNA, 120 bp, Artificial Sequence
  ENSG00000008197_6 (sequence is synthesized)
gggcccagcctggggctggccgccgcgggagcagacgacttgcagggctctgtggaggcccagtgtgggcttgttctcaatggccaaggtggagtgataagaagaggtggcacctgtgtg

SEQ ID NO: 9595 - DNA, 120 bp, Artificial Sequence
  ENSG00000008197_7 (sequence is synthesized)
ctggccgtttgtcccttcttagttctacttccaaatacaaggtgaccattgctgaggtaaagaggcgcctctccccacctgagtgcctcaatgcttcactcttgggaggcattttgagaa

SEQ ID NO: 9596 - DNA, 120 bp, Artificial Sequence
  ENSG00000008197_8 (sequence is synthesized)
gagcaaaatcaaagaatgggggccgctgcctgagagagaaattggataggcttggcttaaacttaccagcaggaagacggaaagcagctaatgtcaccctccttacttccttggttgaag

SEQ ID NO: 9597 - DNA, 120 bp, Artificial Sequence
  ENSG00000008197_9 (sequence is synthesized)
gggaggctttgcacttggctcgggattttggctacacttgtgaaacagagtttccagccaaagcagtaggagaacatcttgccagacaacatatggaacagaaagaacagacagcaagaa

SEQ ID NO: 9598 - DNA, 120 bp, Artificial Sequence
  ENSG00000008197_10 (sequence is synthesized)
aaaagatgatcctggcgaccaaacaaatctgtaaagaattccaagacctcttgagccaagatagatcaccactgggatcctccagacccactccaattctagaccttgacatccagagac

SEQ ID NO: 9599 - DNA, 120 bp, Artificial Sequence
  ENSG00000008197_11 (sequence is synthesized)
atttaacacatttcagtttgatcactcatggctttgggactccggcaatatgtgcagctctaagcactttccaaacagttctcagtgaaatgctgaactacttggaaaaacacactactc

SEQ ID NO: 9600 - DNA, 120 bp, Artificial Sequence
  ENSG00000008197_12 (sequence is synthesized)
acaagaacggcggagcggcggattctggccaaggacatgccaactcggagaaagctcccctgcggaaaacttcagaggctgccgtgaaagagggcaaaacagaaaagacagactagctac

SEQ ID NO: 9601 - DNA, 120 bp, Artificial Sequence
  ENSG00000008197_13 (sequence is synthesized)
atcaaacagaatctatttccagagagtcttgctgctgatattttttctaatatatatatcattgagggtgactaatcttcagtggaccaaatctctacccttccccaaccctccataaaa

SEQ ID NO: 9602 - DNA, 120 bp, Artificial Sequence
  ENSG00000008197_14 (sequence is synthesized)
aaaaagatttgctatggccaacaaaggaaactgtcacaccttttcccatcaccgctttaatttatgctcagtctccaagttttttttttttcatattgatttgataatcactttaaggca

SEQ ID NO: 9603 - DNA, 120 bp, Artificial Sequence
  ENSG00000008226_0 (sequence is synthesized)
agcggcgtctcggttgccatggagaccaggagctccaaaacgcggaggtctttagcgtcccggaccaacgagtgccaggggacaatgtgggcgccaacttcgccaccagccgggtccagc

SEQ ID NO: 9604 - DNA, 120 bp, Artificial Sequence
  ENSG00000008226_1 (sequence is synthesized)
agccccagccagcccacctggaagtcctccttgtattcctccctcgcctactctgaggccttccactacagcttcgcagcccggccccgccgcctcacgcagcttgcgctggcgcagcgt

SEQ ID NO: 9605 - DNA, 120 bp, Artificial Sequence
  ENSG00000008226_2 (sequence is synthesized)
cccgagcctcagctgcttcgtctgcgcccctcctcgctgcgcacccaagatatctcgcacttgctcaccggcgtcttccgcaacttgtactcagccgaggtcatcggcgacgaagtgagc

SEQ ID NO: 9606 - DNA, 120 bp, Artificial Sequence
  ENSG00000008226_3 (sequence is synthesized)
gcaagcttgatcaaggcccgcggcagcgagaatgagcgccacgaggagttcgtggaccagctgcagcagattcgggagctctataagcagcggctggatgagtttgaaatgttggagaga

SEQ ID NO: 9607 - DNA, 120 bp, Artificial Sequence
  ENSG00000008226_4 (sequence is synthesized)
catatcactcaggcccaagcacgggctattgcggaaaatgagcgggtcatgagccaggctggagtacaggacctcgagagccttgtcaggttgcctccagtgaagagtgtctccagatgg

SEQ ID NO: 9608 - DNA, 120 bp, Artificial Sequence
  ENSG00000008226_5 (sequence is synthesized)
tgtatagacagcgagttgctacggaaacatcatttgatctccccagaagattactacaccgatacagtgccgtttcactctgcacctaaaggcatctccctacctggatgttcaaaactg

SEQ ID NO: 9609 - DNA, 120 bp, Artificial Sequence
  ENSG00000008226_6 (sequence is synthesized)
acatttagctgtgagaagcgttccgtccagaagaaagagctgaacaagaagcttgaagattcatgcaggaagaagcttgctgagttcgaagatgagttagaccacactgtggacagcctg

SEQ ID NO: 9610 - DNA, 120 bp, Artificial Sequence
  ENSG00000008226_7 (sequence is synthesized)
acatggaatttaactcctaaggccaaagaaaggaccagagaacctctcaagaaagcaagtcaaccaaggaataaaaactggatgaaccacttacgtgtgccacagagagagctagacaga

SEQ ID NO: 9611 - DNA, 120 bp, Artificial Sequence
  ENSG00000008226_8 (sequence is synthesized)
cttctgcttgccagaatggagagtcggaaccacttcctaaaaaatccccgtttttttcctcctaacactcgatatggaggcaagtctcttgtttttcctccaaagaagccagcaccgata

SEQ ID NO: 9612 - DNA, 120 bp, Artificial Sequence
  ENSG00000008226_9 (sequence is synthesized)
ggagaattccagagtacagagccagaacagagttgtgctgatactccagtgtttctagctaagccaccaattgggtttttcacagattatgaaattggtccagtttatgagatggtaatt

SEQ ID NO: 9613 - DNA, 120 bp, Artificial Sequence
  ENSG00000008226_10 (sequence is synthesized)
gcgctgcagaacaccaccacgaccagccgctacctgcgagtcctcccgccttccacgccatacttcgctctgggactggggatgttcccaggaaaaggtggaatggtggctcctggaatg

SEQ ID NO: 9614 - DNA, 120 bp, Artificial Sequence
  ENSG00000008226_11 (sequence is synthesized)
acctgccagtacattgtccagttttttcccgactgccttggggattttgatgattttattttagtggagacccagtcagcccacacacttctgatccccctgcaggcccggaggccgccc

SEQ ID NO: 9615 - DNA, 120 bp, Artificial Sequence
  ENSG00000008226_12 (sequence is synthesized)
cccgtgctgacattgtcaccggtgttggactgtggttactgcctcattgggggagtcaagatgaccagattcatctgcaaaaatgtgggtttcagtgttggcaggttctgcattatgccc

SEQ ID NO: 9616 - DNA, 120 bp, Artificial Sequence
  ENSG00000008226_13 (sequence is synthesized)
aaaacaagctggccaccactaagtttcaaggccattgcaaccgtcggctttgttgaacaacctccttttggaatcctgccttcggtgtttgagctggccccgggacatgctatattagtg

SEQ ID NO: 9617 - DNA, 120 bp, Artificial Sequence
  ENSG00000008226_14 (sequence is synthesized)
gaggtcttgttttccccaaagagcctaggaaaggcagagcagaccttcatcatcatgtgcgacaactgccagataaaggagctggtgaccataggaattgggcagctgattgctttggat

SEQ ID NO: 9618 - DNA, 120 bp, Artificial Sequence
  ENSG00000008226_15 (sequence is synthesized)
ctgatctatatttctggtgaaaaaagccagccagaccctggagagctcacagacttaacagcccagcacttcatacgatttgagcctgaaaaccttcggtccacggctaggaagcagctg

SEQ ID NO: 9619 - DNA, 120 bp, Artificial Sequence
  ENSG00000008226_16 (sequence is synthesized)
attattagaaatgctacgcacgtggagctggccttctactggcagatcatgaagcccaacctgcagcccctcatgcctggagaaaccttcagcatggacagcatcaagtgctaccccgac

SEQ ID NO: 9620 - DNA, 120 bp, Artificial Sequence
  ENSG00000008226_17 (sequence is synthesized)
aaggagactgccttctccatcatgcccagaaagggggttctaagcccccacacagaccacgagttcatcctgagcttttctcctcatgagctgagggattttcacagtgtgctccagatg

SEQ ID NO: 9621 - DNA, 120 bp, Artificial Sequence
  ENSG00000008226_18 (sequence is synthesized)
gtgctagaggaagtcccagagcctgtaagttcagaagcggagagcctggggcactcctcctactctgtggatgatgtgattgtcctggaaatcgaggtgaaaggctcagtagaacctttc

SEQ ID NO: 9622 - DNA, 120 bp, Artificial Sequence
  ENSG00000008226_19 (sequence is synthesized)
caggttctcttagagccatatgccctcatcatcccaggggagaactacattgggataaatgtgaagaaggcttttaagatgtggaacaacagcaagtcacccatcagatacctgtggggg

SEQ ID NO: 9623 - DNA, 120 bp, Artificial Sequence
  ENSG00000008226_20 (sequence is synthesized)
aagatcagcgactgccacatcattgaagtggagcccggcacaggggtcatagagcccagtgaggtcggggattttgagttgaactttactgggggtgtccctggccccacaagccaggac

SEQ ID NO: 9624 - DNA, 120 bp, Artificial Sequence
  ENSG00000008226_21 (sequence is synthesized)
ctgctgtgtgaaatcgaagactcgccctcgccagtggtgttacacattgaggctgtctttaaggggcctgccctcatcatcaacgtctcagcccttcagtttggtctgctccgcctgggg

SEQ ID NO: 9625 - DNA, 120 bp, Artificial Sequence
  ENSG00000008226_22 (sequence is synthesized)
cagaaagccacaaactccatccagatccggaacgtcagccagctcccagccacatggcgcatgaaggagagcccagtctccctccaggaaaggcctgaggatgtgtctcccttcgacatt

SEQ ID NO: 9626 - DNA, 120 bp, Artificial Sequence
  ENSG00000008226_23 (sequence is synthesized)
gagccttcgagtggccagcttcactctctgggggagtgcagggtggacatcaccttggaggccctgcactgccagcatctggagaccgtcctggagctggaggtggaaaatggtgcctgg

SEQ ID NO: 9627 - DNA, 120 bp, Artificial Sequence
  ENSG00000008226_24 (sequence is synthesized)
agctaccttcctgtgtatgctgaggtacagaagccccatgtgtacctacagagcagccaggtggaggttagaaatctctacctgggtgtgcccacgaagacaaccatcacacttatcaat

SEQ ID NO: 9628 - DNA, 120 bp, Artificial Sequence
  ENSG00000008226_25 (sequence is synthesized)
ggcacgctcctgcctacccagttccactggggcaagctcctcggacaccaagcagaattctgcatggtgacagtctcccccaaacatggcctgctgggcccaagtgaggagtgccagctc

SEQ ID NO: 9629 - DNA, 120 bp, Artificial Sequence
  ENSG00000008226_26 (sequence is synthesized)
aagttggagttgactgctcatacccaggaagagctgacccatctggccctcccttgtcacgtgtcaggcatgaagaagccactggttctaggcatttctgggaagccccagggactgcaa

SEQ ID NO: 9630 - DNA, 120 bp, Artificial Sequence
  ENSG00000008226_27 (sequence is synthesized)
gtggccattaccatctctaaggagagctctgattgcagcacagagcagtggccaggccacccaaaggagctccgcctggactttggctcagcggtgccactgaggacccgtgtgactcgc

SEQ ID NO: 9631 - DNA, 120 bp, Artificial Sequence
  ENSG00000008226_28 (sequence is synthesized)
tttcgggagcccccaaaacagcctgagcaaaaagaccagccttcccaacatgcctcctgccctgctaaagacagtgcggatgcaagagcacctggccaagcgagagcagctggattttat

SEQ ID NO: 9632 - DNA, 120 bp, Artificial Sequence
  ENSG00000008226_29 (sequence is synthesized)
ggagagcatgctatcccacgggaaaggagctgctttcttccctcacttttcccagggcatgctggggccctaccagcagctgtgcattgacatcacaggctgtgccaacatgtggggcga

SEQ ID NO: 9633 - DNA, 120 bp, Artificial Sequence
  ENSG00000008226_30 (sequence is synthesized)
gtactgggacaacctcatctgcacggtgggagacctgctgccggaagtcatcccagtgcacatggcagcggtgggctgccccatcagctccctgaggaccacctcctacactattgacca

SEQ ID NO: 9634 - DNA, 120 bp, Artificial Sequence
  ENSG00000008226_31 (sequence is synthesized)
ggcccagaaggaaccagccatgaggttcggcacccaggtctccggaggagacacagttacccgaacccttcgcctgaataactccagcccctgtgacatccgcctggattgggagaccta

SEQ ID NO: 9635 - DNA, 120 bp, Artificial Sequence
  ENSG00000008226_32 (sequence is synthesized)
tgttccagaagacaaggaagaccggctggtggagctgctggtgttttatgggccacctttcccgctgcgggaccaagccgggaatgagcttgtgtgccctgatacccctgagggtggctg

SEQ ID NO: 9636 - DNA, 120 bp, Artificial Sequence
  ENSG00000008226_33 (sequence is synthesized)
cctcctctggtccccaggcccctccagttcatcggaattcagccatgaaactgactcatcagttgagggcagctccagtgccagcaatagggtggcacagaagctcatctcagtcatcct

SEQ ID NO: 9637 - DNA, 120 bp, Artificial Sequence
  ENSG00000008226_34 (sequence is synthesized)
gcaggcacatgagggggtgccctccggccacctgtactgtatcagccccaagcaggtggtggtccctgctgggggcagcagtaccatctacatctccttcacccctatggtgctcagccc

SEQ ID NO: 9638 - DNA, 120 bp, Artificial Sequence
  ENSG00000008226_35 (sequence is synthesized)
tgagatcctgcacaaggtggagtgtactggctacgccctgggtttcatgagcttggacagcaaggtggaaagggagattccagggaagaggcatcgcctgcaggactttgcggtgggacc

SEQ ID NO: 9639 - DNA, 120 bp, Artificial Sequence
  ENSG00000008226_36 (sequence is synthesized)
cctgaaactggacctgcatagctacgtgaggcctgcacagctaagtgtggagctggactacggcggcagtatggaattccagtgccaggccagtgacctcattcccgagcagccctgctc

SEQ ID NO: 9640 - DNA, 120 bp, Artificial Sequence
  ENSG00000008226_37 (sequence is synthesized)
tggggtgctgagtgagctggtgaccacccaccacctgaagctgaccaacactacagagatcccacactacttccggcttatggtctccaggcccttctccgtttctcaagatggggcgag

SEQ ID NO: 9641 - DNA, 120 bp, Artificial Sequence
  ENSG00000008226_38 (sequence is synthesized)
ccaggaccacagagctcctggccctggccagaagcaggagtgtgaggaggagacagcctcagcggacaagcagctggtgctccaagcacaggagaacatgctggtgaacgtgtccttctc

SEQ ID NO: 9642 - DNA, 120 bp, Artificial Sequence
  ENSG00000008226_39 (sequence is synthesized)
actctccctggagctgctctcctatcagaagctcccagctgaccagacactgcctggggtggacattcagcagagtgcgagtggagagagagagatggtgtttactcagaacctgctcct

SEQ ID NO: 9643 - DNA, 120 bp, Artificial Sequence
  ENSG00000008226_40 (sequence is synthesized)
ggagtacaccaaccagaccactcaggtggtgcccctgcgggctgtggtggccgtgcctgagctgcagctctccaccagctgggtggactttgggacctgctttgtgagccagcagcgagt

SEQ ID NO: 9644 - DNA, 120 bp, Artificial Sequence
  ENSG00000008226_41 (sequence is synthesized)
ccgggaggtctacctgatgaacctgagcgggtgccgaagctactggactatgctgatgggccagcaggagccagccaaggccgctgtggccttcagggtctccccaaacagtgggctgct

SEQ ID NO: 9645 - DNA, 120 bp, Artificial Sequence
  ENSG00000008226_42 (sequence is synthesized)
agaagcacgatccgccaatgcacccccaacctccatcgccttgcaggttttcttcactgccaggagtagtgagctgtacgagtccacgatggtggtggaaggtgtgctcggtgagaagtc

SEQ ID NO: 9646 - DNA, 120 bp, Artificial Sequence
  ENSG00000008226_43 (sequence is synthesized)
ctgcaccctgcggctccggggccaaggctcctatgatgagagatacatgttgcctcaccagccctgaggctccgccccagccctcagccccaggccccagctggagaaaaaacattgccc

SEQ ID NO: 9647 - DNA, 120 bp, Artificial Sequence
  ENSG00000008226_44 (sequence is synthesized)
agggattaggagcagctcttcagcacaaagacacagacttggggacctggggacctctgggcagctcctggaatggaagaacccccttccacaatggtctcagcctaggccctcatgata

SEQ ID NO: 9648 - DNA, 120 bp, Artificial Sequence
  ENSG00000008226_45 (sequence is synthesized)
tgtcctcagagctaacataaaggacaggccacaccacagcagagaccaccacattgagatcactactcagtgcatagcgaagaccagtatggcaaaattagtcttggaaaaaaaccacag

SEQ ID NO: 9649 - DNA, 120 bp, Artificial Sequence
  ENSG00000008226_46 (sequence is synthesized)
ccactaagataaattcatgcacttttactatgcccattgcacttctcatccatggatttgccttgccttaagaattaaccatggccttgtggcctgggtgacccaggctgcttttatctt

SEQ ID NO: 9650 - DNA, 120 bp, Artificial Sequence
  ENSG00000008226_47 (sequence is synthesized)
gcacagctaaagagggtctgatgggtggctcaacaccccacccactcctataccatgtcatcagtgttcacattttccaaatgagttgaagtgccttgatctgtccactgccaccaccac

SEQ ID NO: 9651 - DNA, 120 bp, Artificial Sequence
  ENSG00000008226_48 (sequence is synthesized)
cagtgctgagttttcccatgtggttttgcttttgtggtgttactgccttgctgctagagcagcaggactgtctgcgtagcgcctccagcctgggacctcactcagttcccagggtattca

SEQ ID NO: 9652 - DNA, 120 bp, Artificial Sequence
  ENSG00000008226_49 (sequence is synthesized)
aagacggcagcggctcccattccagtcccgatgcacatggacaccactccgtatgccctgtgaaaacaaaacttaattggctgggcaaaggcacccaccaaattacctccagaccaggct

SEQ ID NO: 9653 - DNA, 120 bp, Artificial Sequence
  ENSG00000008226_50 (sequence is synthesized)
gacccagaaggacgtcatggacaagtaggatgcaaaaccatcagaccagatctgtgggcaagcggtaccctggcctcccacttgggcacacacacggtgacagatgcccactgcaggcta

SEQ ID NO: 9654 - DNA, 120 bp, Artificial Sequence
  ENSG00000008226_51 (sequence is synthesized)
gtatccctttcaaggctggcccttaaggaaaacagggatcatgcccctacatcctaagttcagggtgtttctgtgtgcatgttcccctccccagggatcgatcataatcccaaaagacac

SEQ ID NO: 9655 - DNA, 120 bp, Artificial Sequence
  ENSG00000008226_52 (sequence is synthesized)
aatcccaaacacaatcatcccaaatgttgaaatcctggaagaacaaaatccctaaagtctaaaatcctgaaaatcacaatcctaaaagatcaaaatcctgaaaatataattctggaaaaa

SEQ ID NO: 9656 - DNA, 120 bp, Artificial Sequence
  ENSG00000008226_53 (sequence is synthesized)
ataatttggaagcctggcctggtggcatctacttgtagtcccagctattcagcaggctgaggcaagaggatcacttgtgcctaggagttcaagaccagcctaggcaatatagcaagaccc

SEQ ID NO: 9657 - DNA, 120 bp, Artificial Sequence
  ENSG00000008226_54 (sequence is synthesized)
caatatagcaagaccccatcttagaaaaaaacttttttaaaagattgatttaaaagatatttacatttttaggccaggtgtggtggctcaaacctgtaatcccaacactttgggaggccg

SEQ ID NO: 9658 - DNA, 120 bp, Artificial Sequence
  ENSG00000008226_55 (sequence is synthesized)
cctgcacaaggtggagtgtactggctacgccctgggtttcatgagcttggacagcaaggtgagctcttccggcctggggtgggggccgcagccactgctccctcctgggtagcatgctgc

SEQ ID NO: 9659 - DNA, 120 bp, Artificial Sequence
  ENSG00000008226_56 (sequence is synthesized)
ctactcagcccagggatcagctgtgatcagacttgggctcagtaggtggaaagggagattccagggaagaggcatcgcctgcaggactttgcggtgggacccctgaaactggacctgcat

SEQ ID NO: 9660 - DNA, 120 bp, Artificial Sequence
  ENSG00000008226_57 (sequence is synthesized)
agctacgtgaggcctgcacagtgagtcagctggggtgccccatctcctttcatccccatggggtgcaccctcaccaggcactggtggagccaggcagggttctcagagcaaaaggacggg

SEQ ID NO: 9661 - DNA, 120 bp, Artificial Sequence
  ENSG00000008226_58 (sequence is synthesized)
catgggtggagaagtcagcagaggagcccagggaaaggctggcccgaggctggatgagcagagtgggggcagccagaaggccccaggcgcccggcttgccccaacaatgcctattgctgg

SEQ ID NO: 9662 - DNA, 120 bp, Artificial Sequence
  ENSG00000008226_59 (sequence is synthesized)
agatggtgtcatctcagtagccacacatggttggatcatgtatttagaccccccacctgtgttcctcaatcacactgaagccacagctgggcccaccgaggtgctatcctgcccaggcca

SEQ ID NO: 9663 - DNA, 120 bp, Artificial Sequence
  ENSG00000008226_60 (sequence is synthesized)
gcacttggctgagttgggttggagtacacacctggtgtgcagggtgaagcagctcattttgtctggtcctgatcccagactcaccccatctgcagcaagacccttggctggcttcctccg

SEQ ID NO: 9664 - DNA, 120 bp, Artificial Sequence
  ENSG00000008226_61 (sequence is synthesized)
ctctgggtgtctcccacatgtctactatggcaaaaaacattaccatccccacccataccacagcatcccctagagagagtgaggtgcagggacccgagggccaggttagcacagcgctgg

SEQ ID NO: 9665 - DNA, 120 bp, Artificial Sequence
  ENSG00000008226_62 (sequence is synthesized)
ccccagcatggagggaagccctgtgggccacggtaggctagaagggaattcgagctgggcatgaaaaggatgctccggggccattgttagtgggtttggggctgagatgagtgatcctgc

SEQ ID NO: 9666 - DNA, 120 bp, Artificial Sequence
  ENSG00000008226_63 (sequence is synthesized)
ctctggtcccagcatccagctgcctcgttgtctatcctgggagggtgtggtgcttcggacacgttgaggggctttgtcagcatcaggaaggcctttgcttcttgcacccaggcccagctg

SEQ ID NO: 9667 - DNA, 120 bp, Artificial Sequence
  ENSG00000008226_64 (sequence is synthesized)
agacaggcccctgagtcctggctcatgttctggcagcaacttcacttttcctaaggaggggaggaggcagcagggaagcaaccctgggttttcagaaggtccttctgatggctaggctaa

SEQ ID NO: 9668 - DNA, 120 bp, Artificial Sequence
  ENSG00000008226_65 (sequence is synthesized)
ggggaggaagaattcctgccatgccccagccttctccaggacaacctgctggaacgcagtggtgttttcagggcactgtgtttgccttgcagctgagggattttcacagtgtgctccaga

SEQ ID NO: 9669 - DNA, 120 bp, Artificial Sequence
  ENSG00000008226_66 (sequence is synthesized)
aggggacagggctgtaggtaccctgggcttgcccacatgaggcccagcaactgggagccatgccagcatgccgctggccagggacggtttgtgcagagtttgaggcctctctcagcatca

SEQ ID NO: 9670 - DNA, 120 bp, Artificial Sequence
  ENSG00000008226_67 (sequence is synthesized)
tgggtgggcaggaaaggtgggtctgtggttggcagctcaatgaaacaggagtctgaggatgaagcctggtgtctgggcagcttctgcatgcccacccaagatggctccctgggcagggcc

SEQ ID NO: 9671 - DNA, 120 bp, Artificial Sequence
  ENSG00000008256_0 (sequence is synthesized)
tccctccggcggcgtccccagcccgcggcccctctgctgccggcccccggctcgccggctgcgggagtggcctcaagatggatgaagacggcggcggcgagggtggtggcgtgcctgaag

SEQ ID NO: 9672 - DNA, 120 bp, Artificial Sequence
  ENSG00000008256_1 (sequence is synthesized)
gatgaagacggcggcggcgagggtggtggcgtgcctgaagacctctcattagaagagagagaagaacttctagacattcgtcgaagaaaaaaggaacttattgatgacattgagaggctg

SEQ ID NO: 9673 - DNA, 120 bp, Artificial Sequence
  ENSG00000008256_2 (sequence is synthesized)
aaatatgaaattgcagaggtgatgacagagatcgacaatctaacttccgtagaggagagcaaaacgactcagaggaacaaacagatagccatgggaagaaagaaattcaacatggatccc

SEQ ID NO: 9674 - DNA, 120 bp, Artificial Sequence
  ENSG00000008256_3 (sequence is synthesized)
aaaaagggaattcagtttctaatagaaaatgacctgctacagagttccccagaagacgtcgcccagttcctttataaaggagaaggcctaaataagaccgtcattggggactacctgggt

SEQ ID NO: 9675 - DNA, 120 bp, Artificial Sequence
  ENSG00000008256_4 (sequence is synthesized)
gaaagggatgaatttaatattaaagttcttcaagcctttgttgaactccatgagtttgctgatctcaaccttgtacaagccttaaggcagttcttatggagcttcaggctgcccggggag

SEQ ID NO: 9676 - DNA, 120 bp, Artificial Sequence
  ENSG00000008256_5 (sequence is synthesized)
gcgcagaagattgatcgcatgatggaggctttcgcttctcgctactgcctgtgcaaccccggggtcttccagtccacagacacgtgctacgtgctgtcattcgccatcatcatgctcaac

SEQ ID NO: 9677 - DNA, 120 bp, Artificial Sequence
  ENSG00000008256_6 (sequence is synthesized)
accagcctccacaaccacaacgtgcgtgacaagcccacggcagaacggttcatcgccatgaaccgcggcatcaacgagggcggggacctccctgaggagctgctgaggaatttgtatgag

SEQ ID NO: 9678 - DNA, 120 bp, Artificial Sequence
  ENSG00000008256_7 (sequence is synthesized)
agcattaagaacgagccatttaagatcccggaggacgacgggaacgacctgacccacaccttcttcaaccccgaccgcgagggctggctcctgaagctgggagggcgtgtgaagacctgg

SEQ ID NO: 9679 - DNA, 120 bp, Artificial Sequence
  ENSG00000008256_8 (sequence is synthesized)
aagcgccggtggttcatcctgaccgataactgcctctattactttgaatacacaacagataaggagcccaggggaatcatcccgttggaaaacctcagcatcagggaggtggaggacccc

SEQ ID NO: 9680 - DNA, 120 bp, Artificial Sequence
  ENSG00000008256_9 (sequence is synthesized)
cggaaacccaactgttttgagctctacaatcccagccacaaagggcaggtcatcaaggcctgtaagactgaggccgacggccgcgtggtagaggggaaccatgtggtgtaccggatctca

SEQ ID NO: 9681 - DNA, 120 bp, Artificial Sequence
  ENSG00000008256_10 (sequence is synthesized)
gccccgagcccggaggagaaggaggagtggatgaaatccatcaaagccagtatcagcagagatcccttctatgacatgttggcaacgaggaaacgaaggattgccaataaaaaatagctt

SEQ ID NO: 9682 - DNA, 120 bp, Artificial Sequence
  ENSG00000008256_11 (sequence is synthesized)
tcctggctaaaagacccaggtaaaagacccaaccccagcagaaagacaccgcgggcggcccctccgcggaaggcgtggcagggaggcagtcgccctgcggtgcaagctgctgctccagag

SEQ ID NO: 9683 - DNA, 120 bp, Artificial Sequence
  ENSG00000008256_12 (sequence is synthesized)
cataccgtggcccaggtggtatccccaaggcctcgtgccgtggctggggtcctgggaggtggtcgccctgcagtgcaagctgctgctccagagcgtaccgtggcccagactgatcctcga

SEQ ID NO: 9684 - DNA, 120 bp, Artificial Sequence
  ENSG00000008256_13 (sequence is synthesized)
ggcctcctgccgtggctggggtcatggtcggctgcgcatgtccagaagcatttccttcctgcgaccatcccggcgcccctagggggagaagccaggacagcagcttccgctgtctccaca

SEQ ID NO: 9685 - DNA, 120 bp, Artificial Sequence
  ENSG00000008256_14 (sequence is synthesized)
gcagacacgggacggattccacagacgggagcctcattcgtaccatgccaaacgcattcactcggggcagtattaaccgttctagaaagccactgttttatagcaaaacaggaaaggaaa

SEQ ID NO: 9686 - DNA, 120 bp, Artificial Sequence
  ENSG00000008256_15 (sequence is synthesized)
agctaccagttttttattcagaatttttctcagatatataggattatagcttttatatgcctttttatattctgaaattataacaaaagatactttctaacagtagtatttttagaatgg

SEQ ID NO: 9687 - DNA, 120 bp, Artificial Sequence
  ENSG00000008256_16 (sequence is synthesized)
cagctataaagttaactcctggacacaagtatatactgtgcactgaaaaaatatccatctacacagcacccaaggggagggctgggggcaccggcacgggggcagcgtgcagccctgccc

SEQ ID NO: 9688 - DNA, 120 bp, Artificial Sequence
  ENSG00000008256_17 (sequence is synthesized)
tgtcaggctgtcagacaagccccggggggcagcaggtgggctcgggacgggctgggggagggacggccatggcacttgggggctccagggtgactcccatgaggcctcccttcaaccagg

SEQ ID NO: 9689 - DNA, 120 bp, Artificial Sequence
  ENSG00000008256_18 (sequence is synthesized)
taacagttaatggtttgggggtgtttaggctgtaactgctaactcctaggaaacagccttttccctggacacagatggtccatacgctgagccacgtgaaactgctgatgttttgtttag

SEQ ID NO: 9690 - DNA, 120 bp, Artificial Sequence
  ENSG00000008256_19 (sequence is synthesized)
atgcacacacatggcagcgtttcatacaggtcagcaggttagaccggcttttgaccatattcatcgctatttaaaacctgtggcaaaatgaacgcttattttacagactttctaatttga

SEQ ID NO: 9691 - DNA, 120 bp, Artificial Sequence
  ENSG00000008256_20 (sequence is synthesized)
ccagatttcttaatgaatagacacagaattaactaaaaacagtctcaccccatgtagtgcgccgtgtcctgagagaggtgccctccctacgaggagggaagaacaggccctggggtgcag

SEQ ID NO: 9692 - DNA, 120 bp, Artificial Sequence
  ENSG00000008256_21 (sequence is synthesized)
aggcccggcacgtagagaacccagatagacgccggtggtggaactggtcaaactccacgcccgcctgggaggttgtcaggttgctgtggatgtaaggataggaggtgcccagtgctccgc

SEQ ID NO: 9693 - DNA, 120 bp, Artificial Sequence
  ENSG00000008256_22 (sequence is synthesized)
tcaaggaaggctggatctgggccccacctacagagagggctcagggctggaccgggggcattgtgtgcttgggccgacccgggccggtggcagacgctgttctctgtcgggagatttgcg

SEQ ID NO: 9694 - DNA, 120 bp, Artificial Sequence
  ENSG00000008256_23 (sequence is synthesized)
tccccaggaccctgttacacagtgggctgttgggttggtggctggcttttcctctatggacttcctcttcctgccccacctgcataggcacacacaccttgaatctgcaccctctggagg

SEQ ID NO: 9695 - DNA, 120 bp, Artificial Sequence
  ENSG00000008256_24 (sequence is synthesized)
gcatctgtactcctgtgcaaaatgcccagtccagagacaaaacctcagactttgtgcacctaggtttccttctcagcagcggagactgttctttgagttgccttgaagtggaggccgagc

SEQ ID NO: 9696 - DNA, 120 bp, Artificial Sequence
  ENSG00000008256_25 (sequence is synthesized)
ggctgcgggcccttcgcctccctgcggctgaccttgatgtagctttaagtcacactagactgcagaggggtccgaggccagaaacccctgtcctgcatcagactttcattcccacgttct

SEQ ID NO: 9697 - DNA, 120 bp, Artificial Sequence
  ENSG00000008256_26 (sequence is synthesized)
taggctttgttactgatacctcaaatcggaagttttagttctgagaaaggcaagtcagcgttcttgaaatgcctgactggtagatatgcaactctggcctccagtcttccatgaaaataa

SEQ ID NO: 9698 - DNA, 120 bp, Artificial Sequence
  ENSG00000008256_27 (sequence is synthesized)
atgctgcctggacccccacccagaccacacactgacggccggctccggcggtgcccacccctcaggctggcccggcacccaagactggccacagccagctctgtcagcatgttgtgctcg

SEQ ID NO: 9699 - DNA, 120 bp, Artificial Sequence
  ENSG00000008256_28 (sequence is synthesized)
gacaagctgtttccttcttctgaccaacccaggtgtgacctggggatgcagagctttctgttttgggtgttgggagaagcagcaggaaggagtcgccagatgatcaagctccccctttgc

SEQ ID NO: 9700 - DNA, 120 bp, Artificial Sequence
  ENSG00000008256_29 (sequence is synthesized)
tgtcatctgtgaatgagcttcgccaggtggtgggcacctgggagccatgcagaggctgtggtgctgagttagactccaggtactttgtggtcaaaggaaatcgcctagctccaggctgtg

SEQ ID NO: 9701 - DNA, 120 bp, Artificial Sequence
  ENSG00000008256_30 (sequence is synthesized)
ttaggacagtattagcatgaaggctgtgcgaccatcatgcctgctgatccttgaggcaggcctggtccagaaaactctgggtcagtgactgcgcagggccagccgctaccaggacggccc

SEQ ID NO: 9702 - DNA, 120 bp, Artificial Sequence
  ENSG00000008256_31 (sequence is synthesized)
tgaaacaggacacatctgttttttgtccctcaccctgggcaggccgcgtcacaatcacagtcctcctcctccccaccctgacgtctgagcgcagggcttgaattgttagtcccaactctg

SEQ ID NO: 9703 - DNA, 120 bp, Artificial Sequence
  ENSG00000008256_32 (sequence is synthesized)
gccaaagatacttttttccagagacagaggccaggaggcagtgaggggagccccgcggggaggcggcggcgactgccacagcccttccagcctgtcttgctggccgccctggttcatatt

SEQ ID NO: 9704 - DNA, 120 bp, Artificial Sequence
  ENSG00000008256_33 (sequence is synthesized)
tgagtttaattgtactgaccctggacccagataagcagcaactttgtgtctttggggtcacagaacattttggggcagtttaatgtggtaccaaactgaaaataggagctatttatagat

SEQ ID NO: 9705 - DNA, 120 bp, Artificial Sequence
  ENSG00000008256_34 (sequence is synthesized)
ggagcagcacttagtgcttcatagaaagcaatgcctatttttaaagttacaaacgcagatatctacatagatatgctttgctgagaagttaggtctgtggtagaccagaaaccacaaatt

SEQ ID NO: 9706 - DNA, 120 bp, Artificial Sequence
  ENSG00000008256_35 (sequence is synthesized)
gactttttttcttagaaaatatttctatttgcggtaaatatagtaatatgtaaataatgtacatctgttgatttctggagtgtctgttattcaatgatgtatatactcccacagctcgca

SEQ ID NO: 9707 - DNA, 120 bp, Artificial Sequence
  ENSG00000008256_36 (sequence is synthesized)
tgaaggaacagcctctattgatacttggttgtaaagtgaagtaagattggagggtggatggctgtcagagctcttgcagatactgtgttcactaaataaaaatcacatgtattgttaaaa

SEQ ID NO: 9708 - DNA, 120 bp, Artificial Sequence
  ENSG00000008256_37 (sequence is synthesized)
gcacagcccagcgtgtgttcctggggacctgccttccctgagcgaggacgacctgtgggccgggcacctcttgcaggcgggcccccagcacgcggggtcccactgtccactggaggttct

SEQ ID NO: 9709 - DNA, 120 bp, Artificial Sequence
  ENSG00000008256_38 (sequence is synthesized)
agcactcagcagcatccgggggagaggaggcagggcttctggtgggagtcgcctcagccggcccttggactaagaaaatcaggccgcacctcgtcatcttctcaaatcttcggcttcata

SEQ ID NO: 9710 - DNA, 120 bp, Artificial Sequence
  ENSG00000008256_39 (sequence is synthesized)
ccttgttctcgtttacgtggactgtttgctcatggccttacctcaactgcagactgcaatgttggcagcgtttttgtgggaccctcgtgatgttgtgctcacagcgcagcctggggctga

SEQ ID NO: 9711 - DNA, 120 bp, Artificial Sequence
  ENSG00000008256_40 (sequence is synthesized)
agagcctgtgtgcctctctcggtttggtgtggctgtgatttttgacgcgtggtttaaatgtgccttcttgttgttttccttctgcctgtggctcccacctttctgttctgtgacgggctg

SEQ ID NO: 9712 - DNA, 120 bp, Artificial Sequence
  ENSG00000008256_41 (sequence is synthesized)
gctaaatccacggcagcatcagacgttgctgaatagctggtgcgggaggctgcagctggccatggggactgcagcccctgcctccggggctcactcctgggcgggcagacggtggctaag

SEQ ID NO: 9713 - DNA, 120 bp, Artificial Sequence
  ENSG00000008256_42 (sequence is synthesized)
tgtatattatttggaccttagtaatcagcctgctggataaatgtggaatcgtaatctagctctaactacttcattttatcagtgagcacactgaggcccagggaagttggaggcttccag

SEQ ID NO: 9714 - DNA, 120 bp, Artificial Sequence
  ENSG00000008256_43 (sequence is synthesized)
gctgctgagggtgagctccccggcccgcggccgctgccgtctgcaggatctcttcgctgtgagcggccgcagcgcccgcggctctagacacgcctcccaagcctccttgccgccctggtc

SEQ ID NO: 9715 - DNA, 120 bp, Artificial Sequence
  ENSG00000008277_0 (sequence is synthesized)
catgaggagctgagcgtctcgggcgaggcgggctgacggcagcaccatgcaggcggcagtggctgtgtccgtgcccttcttgctgctctgtgtcctggggacctgccctccggcgcgctg

SEQ ID NO: 9716 - DNA, 120 bp, Artificial Sequence
  ENSG00000008277_1 (sequence is synthesized)
cggccaggcaggagacgcctcattgatggagctagagaagaggaaggaaaaccgcttcgtggagcgccagagcatcgtgccactgcgcctcatctaccgctcgggcggcgaagacgaaag

SEQ ID NO: 9717 - DNA, 120 bp, Artificial Sequence
  ENSG00000008277_2 (sequence is synthesized)
tcggcacgacgcgctcgacacgcgggtgcggggcgacctcggtggcccgcagttgactcatgttgaccaagcaagcttccaggttgatgcctttggaacgtcattcattctcgatgtcgt

SEQ ID NO: 9718 - DNA, 120 bp, Artificial Sequence
  ENSG00000008277_3 (sequence is synthesized)
gctaaatcatgatttgctgtcctctgaatacatagagagacacattgaacatggaggcaagactgtggaagttaaaggaggagagcactgttactaccagggccatatccgaggaaaccc

SEQ ID NO: 9719 - DNA, 120 bp, Artificial Sequence
  ENSG00000008277_4 (sequence is synthesized)
tgactcatttgttgcattgtcaacatgccacggacttcatgggatgttctatgacgggaaccacacatatctcattgagccagaagaaaatgacactactcaagaggatttccattttca

SEQ ID NO: 9720 - DNA, 120 bp, Artificial Sequence
  ENSG00000008277_5 (sequence is synthesized)
ttcagtttacaaatccagactgtttgaattttccttggatgatcttccatctgaatttcagcaagtaaacattactccatcaaaatttattttgaagccaagaccaaaaaggagtaaacg

SEQ ID NO: 9721 - DNA, 120 bp, Artificial Sequence
  ENSG00000008277_6 (sequence is synthesized)
gcagcttcgtcgatatcctcgtaatgtagaagaagaaaccaaatacattgaactgatgattgtgaatgatcaccttatgtttaaaaaacatcggctttccgttgtacataccaataccta

SEQ ID NO: 9722 - DNA, 120 bp, Artificial Sequence
  ENSG00000008277_7 (sequence is synthesized)
tgcgaaatctgtggtgaacatggcagatttaatatataaagaccaacttaagaccaggatagtattggttgctatggaaacctgggcgactgacaacaagtttgccatatctgaaaatcc

SEQ ID NO: 9723 - DNA, 120 bp, Artificial Sequence
  ENSG00000008277_8 (sequence is synthesized)
attgatcaccctacgtgagtttatgaaatacaggagggattttatcaaagagaaaagtgatgcagttcaccttttttcgggaagtcaatttgagagtagccggagcggggcagcttatat

SEQ ID NO: 9724 - DNA, 120 bp, Artificial Sequence
  ENSG00000008277_9 (sequence is synthesized)
tggtgggatttgctcgttgctgaaaggaggaggcgtgaatgaatttgggaaaactgatttaatggctgttacacttgcccagtcattagcccataatattggtattatctcagacaaaag

SEQ ID NO: 9725 - DNA, 120 bp, Artificial Sequence
  ENSG00000008277_10 (sequence is synthesized)
aaagttagcaagtggtgaatgtaaatgcgaggacacgtggtccgggtgcataatgggagacactggctattatcttcctaaaaagttcacccagtgtaatattgaagagtatcatgactt

SEQ ID NO: 9726 - DNA, 120 bp, Artificial Sequence
  ENSG00000008277_11 (sequence is synthesized)
cctgaatagtggaggtggtgcctgccttttcaacaaaccttctaagcttcttgatcctcctgagtgtggcaatggcttcattgaaactggagaggagtgtgattgtggaaccccggccga

SEQ ID NO: 9727 - DNA, 120 bp, Artificial Sequence
  ENSG00000008277_12 (sequence is synthesized)
atgtgtccttgaaggagcagagtgttgtaagaaatgcaccttgactcaagactctcaatgcagtgacggtctttgctgtaaaaagtgcaagtttcagcctatgggcactgtgtgccgaga

SEQ ID NO: 9728 - DNA, 120 bp, Artificial Sequence
  ENSG00000008277_13 (sequence is synthesized)
agcagtaaatgattgtgatattcgtgaaacgtgctcaggaaattcaagccagtgtgcccctaatattcataaaatggatggatattcatgtgatggtgttcagggaatttgctttggagg

SEQ ID NO: 9729 - DNA, 120 bp, Artificial Sequence
  ENSG00000008277_14 (sequence is synthesized)
aagatgcaaaaccagagatagacaatgcaaatacatttgggggcaaaaggtgacagcatcagacaaatattgctatgagaaactgaatattgaagggacggagaagggtaactgtgggaa

SEQ ID NO: 9730 - DNA, 120 bp, Artificial Sequence
  ENSG00000008277_15 (sequence is synthesized)
agacaaagacacatggatacagtgcaacaaacgggatgtgctttgtggttaccttttgtgtaccaatattggcaatatcccaaggcttggagaactcgatggtgaaatcacatctacttt

SEQ ID NO: 9731 - DNA, 120 bp, Artificial Sequence
  ENSG00000008277_16 (sequence is synthesized)
agttgtgcagcaaggaagaacattaaactgcagtggtgggcatgttaagcttgaagaagatgtagatcttggctatgtggaagatgggacaccttgtggtccccaaatgatgtgcttaga

SEQ ID NO: 9732 - DNA, 120 bp, Artificial Sequence
  ENSG00000008277_17 (sequence is synthesized)
acacaggtgtcttcctgtggcttctttcaactttagtacttgcttgagcagtaaagaaggcactatttgctcaggaaatggagtttgcagtaatgagctgaagtgtgtgtgtaacagaca

SEQ ID NO: 9733 - DNA, 120 bp, Artificial Sequence
  ENSG00000008277_18 (sequence is synthesized)
ctggataggttctgattgcaacacttacttccctcacaatgatgatgcaaagactggtatcactctgtctggcaatggtgttgctggcaccaatatcataataggcataattgctggcac

SEQ ID NO: 9734 - DNA, 120 bp, Artificial Sequence
  ENSG00000008277_19 (sequence is synthesized)
cattttagtgctggccctcatattaggaataactgcgtggggttataaaaactatcgagaacagaggtcaaatgggctctctcattcttggagtgaaaggattccagacacaaaacatat

SEQ ID NO: 9735 - DNA, 120 bp, Artificial Sequence
  ENSG00000008277_20 (sequence is synthesized)
ttcagacatctgtgaaaatgggcgacctcgaagtaactcttggcaaggtaacctgggaggcaacaaaaagaaaatcagaggcaaaagatttagacctcggtctaattcaactgagtattt

SEQ ID NO: 9736 - DNA, 120 bp, Artificial Sequence
  ENSG00000008277_21 (sequence is synthesized)
aaacccatggttcaaaagagactataatgtagctaagtgggtagaagatgtgaataaaaacactgaaggaccatactttaggactttatctcctgccaagtctccttcttcatcaactgg

SEQ ID NO: 9737 - DNA, 120 bp, Artificial Sequence
  ENSG00000008277_22 (sequence is synthesized)
gtctattgcctccagcagaaaatacccttacccaatgcctccacttcctgatgaggacaagaaagtgaaccgacaaagtgccaggctatgggagacatccatttaagatcaactgtttac

SEQ ID NO: 9738 - DNA, 120 bp, Artificial Sequence
  ENSG00000008277_23 (sequence is synthesized)
atgtgatacatcgaaaactgtttacttcaacttttatagaaacccaggctcatggaatcactgcaaatctatctgctcttcagacaatacgaagaccctctgagatgctacagaggagag

SEQ ID NO: 9739 - DNA, 120 bp, Artificial Sequence
  ENSG00000008277_24 (sequence is synthesized)
gaagcggagtttcacatctggttaccattttctttttgtcattggcttaggatttaactaaccatgaaaagaactactgaaatattacactataacatggaacaataaaggtactggtat

SEQ ID NO: 9740 - DNA, 120 bp, Artificial Sequence
  ENSG00000008277_25 (sequence is synthesized)
gttaatggataatccgcatgacagataatatgtagaaatattcataaagttaactcacatgacccaaatgtagcaagtttcctaaggtacaatagtggattcagaacttgacgttctgag

SEQ ID NO: 9741 - DNA, 120 bp, Artificial Sequence
  ENSG00000008277_26 (sequence is synthesized)
gcacatcctcactgtaaacagtaatgctatatgcatgaagcttctgtttattgttttccatatttaaggaaacaacatcccataatagaaatgagcatgcagggctaaggcatataggat

SEQ ID NO: 9742 - DNA, 120 bp, Artificial Sequence
  ENSG00000008277_27 (sequence is synthesized)
ttttctgcaggactttaaagctttgaaaggccaatatcccataggctaactttaaacatgtatttttatttttgttttgttttttacttttcatatttatattagcatacaaggacaatt

SEQ ID NO: 9743 - DNA, 120 bp, Artificial Sequence
  ENSG00000008277_28 (sequence is synthesized)
gtatatatgtaacatttttaaaattttaaaaaaatgcagctgttacacacaagtgtattttgccaaatgcctaaaaattccgtcacaatcacatcatcgtcatccatccagtgatcttca

SEQ ID NO: 9744 - DNA, 120 bp, Artificial Sequence
  ENSG00000008277_29 (sequence is synthesized)
aagactataagcaggtaatgtaaatatagtggtcaatgctgtaaatgtgtctctccataattcgtatttgtccaaaacatgtgatatccctttaacctgtgcacagtctggaggcagttt

SEQ ID NO: 9745 - DNA, 120 bp, Artificial Sequence
  ENSG00000008277_30 (sequence is synthesized)
tattgagtgagtagttgagtgagagaacaaaatgcccagcaaaacttctggcctccacagtttgctgatgcaggagcccactctgctgccgatgggctgctccctggaaatcatctatcc

SEQ ID NO: 9746 - DNA, 120 bp, Artificial Sequence
  ENSG00000008277_31 (sequence is synthesized)
catccgtccatcccatctcatcccagtgagccagcccctcagcagtgtgtgctgctgagattaagcaagtgcaccaaagacacatgagacaacgtactgccagtgagctggtagcttctg

SEQ ID NO: 9747 - DNA, 120 bp, Artificial Sequence
  ENSG00000008277_32 (sequence is synthesized)
gtttgccaatactctaaccctttgtggcctgaagttttgttccttggcaaaactttgtagtcacccttatctgtgaaatgaatgacttgttttaacaaaaacaactttgacactgttgat

SEQ ID NO: 9748 - DNA, 120 bp, Artificial Sequence
  ENSG00000008277_33 (sequence is synthesized)
taagaatatttgtcatcactgggatgtgaatcccaacaagtcattctgcactgactctgaagcaagatgacggaagattctactgtttgagttgagcagcttcaaccattcataaagggt

SEQ ID NO: 9749 - DNA, 120 bp, Artificial Sequence
  ENSG00000008277_34 (sequence is synthesized)
taagttagatctaaaccacagagatgcagcatctgcgaagttacactaacagctggtgggggaaagaatctgatgctttgaaacatatatttttaatccataggaaaataagattctatt

SEQ ID NO: 9750 - DNA, 120 bp, Artificial Sequence
  ENSG00000008277_35 (sequence is synthesized)
ttaaaagacccttctttaaaaccaaagtttgatagctgttataatggcagatctgtcattccaaaagaaagctagctaccctagtgaggctggagattgatgggctcaatcacatggtct

SEQ ID NO: 9751 - DNA, 120 bp, Artificial Sequence
  ENSG00000008277_36 (sequence is synthesized)
gctctgaagtatacttctgatttcctcatttgctgtgtgttcttaagaggaatggaatctgcagacaggttttcagatatactctcttaaatttgatcctctcccatagtatccatggac

SEQ ID NO: 9752 - DNA, 120 bp, Artificial Sequence
  ENSG00000008277_37 (sequence is synthesized)
aaaatccatatcatcttcatatgtaatcaatttgattacatatcatgcccaaactgaagggccgagttagaaggcagcattttatactgtgtgtttatgtcttctgtaatggacctctct

SEQ ID NO: 9753 - DNA, 120 bp, Artificial Sequence
  ENSG00000008277_38 (sequence is synthesized)
aaagcaatttaatgatccaaaattacataatgtaaaacagcatttttcatgacaggaagggatgtgattgttgatatgaccataaagcgatccatcaggccaaggtttgggtgagtgttg

SEQ ID NO: 9754 - DNA, 120 bp, Artificial Sequence
  ENSG00000008277_39 (sequence is synthesized)
ggcagtgttgccacatagctcaagccaagaacagaagggcagacagattgaaagatgtagcaaataaagtgactttttaccaagatcactgtaacgtgcactgaatgtttcctggtactg

SEQ ID NO: 9755 - DNA, 120 bp, Artificial Sequence
  ENSG00000008277_40 (sequence is synthesized)
agtgtacaaaaggctaatgctataaggtttattttgactataaaagagtttatagatttgaatataaggtgcctcatgtaaatatgcttcctagttacaggtacacaaactctaatttga

SEQ ID NO: 9756 - DNA, 120 bp, Artificial Sequence
  ENSG00000008277_41 (sequence is synthesized)
aagaatccacaaatggctagctgagaagttaacagatctctatcattcgtctgtgtgtctttcttccctcacctatttttacatgaaattattatttcaaatgaaaatcatgatcatgtg

SEQ ID NO: 9757 - DNA, 120 bp, Artificial Sequence
  ENSG00000008277_42 (sequence is synthesized)
ccttttgggagacatggtttctctagaggtatatagtttgtaattacccgccttggtaataaccttcctgtggaactgactaaaaatttttgttttatttgtagagattatgatttgagg

SEQ ID NO: 9758 - DNA, 120 bp, Artificial Sequence
  ENSG00000008277_43 (sequence is synthesized)
tatacagtaactttaatgttctattcttggaatctactctatctcccatgtttaaacattcttagagccatttgtgggattcattgacaaatttatagtctcaagggagagtttcaagaa

SEQ ID NO: 9759 - DNA, 120 bp, Artificial Sequence
  ENSG00000008277_44 (sequence is synthesized)
gtatctatatgtatactcatggttggggttctagaggcattacatctaaatatttatgacttttcatccaccgaggtaggtagcattaaatatacaagcacagcattatttctctttaaa

SEQ ID NO: 9760 - DNA, 120 bp, Artificial Sequence
  ENSG00000008277_45 (sequence is synthesized)
tatctattttggagagaaactttgaggccgtatcacagtttatatcatgcaactaatatttatatttcccaatccactacaaaatcattgctaagcagaagagagcagttatttggcctt

SEQ ID NO: 9761 - DNA, 120 bp, Artificial Sequence
  ENSG00000008277_46 (sequence is synthesized)
tatgttccattgtatgcctttttcccctcttccagttttatgcattgataagactacagattggcaccctgctgcctgagaagttccatttatccatagtcattgcagtgcagtaaaccc

SEQ ID NO: 9762 - DNA, 120 bp, Artificial Sequence
  ENSG00000008277_47 (sequence is synthesized)
tgatttaaaggaacatttaagtctctccagtaagtgtgaacaggaaggcatgggatagaagagagtccttatggagtggactggccacatgaactgtcctccagccactctttatttaga

SEQ ID NO: 9763 - DNA, 120 bp, Artificial Sequence
  ENSG00000008277_48 (sequence is synthesized)
tgggaagtggcatggtcctctgaacgctgcaggctggaaatgatccccagggcacatgcaatctgtggaaaggaatacatcggacagtgcaacatggtgagggctttcaatttgctgtgg

SEQ ID NO: 9764 - DNA, 120 bp, Artificial Sequence
  ENSG00000008277_49 (sequence is synthesized)
ttgctgtatttttaacaagacacccggagcttcgattaggaataacctatcattagagttgttcctttaaaaaatgttgatgaataaagcaaatgtgggtttaaaatgccaacttatttt

SEQ ID NO: 9765 - DNA, 120 bp, Artificial Sequence
  ENSG00000008277_50 (sequence is synthesized)
tcactttgatattggtgctttattaagtgataccatagtttctctctcttttccctgttactttaaaaagaattttaaaattgtgtttgtatataaggtcagtctggcatagaatttctg

SEQ ID NO: 9766 - DNA, 120 bp, Artificial Sequence
  ENSG00000008277_51 (sequence is synthesized)
aaagtaacattaataggatttctaaagaagttgtcagaaagacaaaattggatattctctgcactttcagagaaggactatttatgtttgaatttcataacaggcttacatttcttttct

SEQ ID NO: 9767 - DNA, 120 bp, Artificial Sequence
  ENSG00000008277_52 (sequence is synthesized)
attgattcccttgcatatctacataatttaatcctgtctattgtcccagatctcttgtggctactttacctgttaccttttttgggattttgttctttatgttttacagttaccttcgga

SEQ ID NO: 9768 - DNA, 120 bp, Artificial Sequence
  ENSG00000008277_53 (sequence is synthesized)
ccagaagatatatggtatttttattcacttttttcagtgttttaaaataaggtttgttcatttattcattttatccattcatttcctattgtcgtatagttctaaccatatatatagtac

SEQ ID NO: 9769 - DNA, 120 bp, Artificial Sequence
  ENSG00000008277_54 (sequence is synthesized)
tgttattatttaacacaataataaattcttatctaaagaaaagattattttactttattttacttaaaggaaagagaatttattggcaggatattgagtagcttgtagagtatatggaag

SEQ ID NO: 9770 - DNA, 120 bp, Artificial Sequence
  ENSG00000008277_55 (sequence is synthesized)
gtagagtatatggaaggggagagccaagttaggaactggcaggagcgaggagggacaagacagctgcctgcacagtctgataggacacatctggctgctgccactggatgcccacatggg

SEQ ID NO: 9771 - DNA, 120 bp, Artificial Sequence
  ENSG00000008277_56 (sequence is synthesized)
cagcgtgttgtaaatatcaccctaccagttggtaagttggcatgaattttccatgaaacacttgactgccatttgcagcatcatatctactttttatgcacctaattatatttttccttt

SEQ ID NO: 9772 - DNA, 120 bp, Artificial Sequence
  ENSG00000008277_57 (sequence is synthesized)
cacttttatgtttttttctaaaactgccacctaaatacctttccactccgttaaatgtatggagtcaagataaatttctcattcttgctctacagtttaagatgtataagaagtaaacac

SEQ ID NO: 9773 - DNA, 120 bp, Artificial Sequence
  ENSG00000008277_58 (sequence is synthesized)
ttccgtggaatagggcttaatttggggctcaaatgttttgttttcctcctgagatgtttttgaatggataagactactctggttttggatgcagcaacttttctcctggcatggaagaac

SEQ ID NO: 9774 - DNA, 120 bp, Artificial Sequence
  ENSG00000008277_59 (sequence is synthesized)
taaggactttgataaacagtttcccattgatagtataatataatgaggggcccagtctgctcttgtgaaaattggctgagcggcagcagcccatcccagctgtgtgtgagtagccccgct

SEQ ID NO: 9775 - DNA, 120 bp, Artificial Sequence
  ENSG00000008277_60 (sequence is synthesized)
gttaaaagtacacctgctgggaattgttggcacatgctcatagcatatgctctgtgggggaggtgcttttaattccaagaggagcttttctcccacatctgcggatgcagaacaaagatg

SEQ ID NO: 9776 - DNA, 120 bp, Artificial Sequence
  ENSG00000008277_61 (sequence is synthesized)
cagcaggactttagaaaacaggagtgtttctactgacattttattcattgctttgttagtcccgcaaatggagcaacttctggttgtttgtaagcagaaaaacaaaacattcaaaaccaa

SEQ ID NO: 9777 - DNA, 120 bp, Artificial Sequence
  ENSG00000008277_62 (sequence is synthesized)
aaacctaattagtacttttgtcctttatatccctaggatgctctagggagtagaggtggcaggcatctttatcttcacccactggcacattagcagcttatgcaacttaggaagtcactg

SEQ ID NO: 9778 - DNA, 120 bp, Artificial Sequence
  ENSG00000008277_63 (sequence is synthesized)
ggagatgagtcctaaaagcctgaatttcaggatggggaggagataagaagcagagaactttgggagaccatggggcatttagtcctggcatagacacagaatggatattcacaggaagat

SEQ ID NO: 9779 - DNA, 120 bp, Artificial Sequence
  ENSG00000008277_64 (sequence is synthesized)
tcctgaggccagatatgcaggagagcacacattgtcacaaggggtgtggtgggaagagaggtgctggatgcctaagacagacttctgtgcttggcagattgactgagtgttgactctgaa

SEQ ID NO: 9780 - DNA, 120 bp, Artificial Sequence
  ENSG00000008277_65 (sequence is synthesized)
tactttgtggtccagtccataataggccagtcactcctgcctgatgcatccctgttgcactgttcataaaacctgtatcatatggggaagcttcaaggctggcaggcttttcatcaagta

SEQ ID NO: 9781 - DNA, 120 bp, Artificial Sequence
  ENSG00000008277_66 (sequence is synthesized)
atcatcattccatgttcctacgtatccttgaaatcaaaaccaggcaatatgtgtgtttttggttttgttttacaaaaaggcatacaatgagacgaattcttaagataatgcacatacaga

SEQ ID NO: 9782 - DNA, 120 bp, Artificial Sequence
  ENSG00000008277_67 (sequence is synthesized)
atcatcaataaagtttcaaagagtttatgaagaaaaggtattttcctttcttgtaaaaaatgttatatatatataatattctgatctgcattcaccttagggcttagcctcttattttat

SEQ ID NO: 9783 - DNA, 120 bp, Artificial Sequence
  ENSG00000008277_68 (sequence is synthesized)
gaattttcaggctgtgatttgtgttggatggctaagctctaaaataatgcaaatagccccaatctttaaatatagcggtgctaagttgaacaagtaacacaatacagaaaatgctgatat

SEQ ID NO: 9784 - DNA, 120 bp, Artificial Sequence
  ENSG00000008277_69 (sequence is synthesized)
gaatacttagtaataatacaaaagttcctgctaaattatatatgtgtatcactgcctgactagaaaccccacttttcttttctaatccagcacaaaatcaaactctgattctacaaccag

SEQ ID NO: 9785 - DNA, 120 bp, Artificial Sequence
  ENSG00000008277_70 (sequence is synthesized)
tctttttaaagggcaaaaatgactcaacacctttgttttgtatggaaaacttttttttttacactaactgcaaaactgctttaaaaaaaggcttattcaggatagataagcatgtactcc

SEQ ID NO: 9786 - DNA, 120 bp, Artificial Sequence
  ENSG00000008277_71 (sequence is synthesized)
ttttttaacttgctggaagacttgcccctccaaactagcacccccaaaagacaacttctttcagaaacggggtgttttacctaaacatagtagcttacatgttagccagcagtaggtcgg

SEQ ID NO: 9787 - DNA, 120 bp, Artificial Sequence
  ENSG00000008277_72 (sequence is synthesized)
cactagtgttttccacggttatcacctttgacaggtgatgtgcatctatagatagtggaagccaccccatgaggaggtgttaatagcagcatggtttcacttttggtaatcaggtaatca

SEQ ID NO: 9788 - DNA, 120 bp, Artificial Sequence
  ENSG00000008277_73 (sequence is synthesized)
tgtgtatatacttagattcgcattattttaacatttctctgctactctgcacttcaggttcgttaagctattttaataattactggggttatggcaaacaccaatggaaatgtatatggc

SEQ ID NO: 9789 - DNA, 120 bp, Artificial Sequence
  ENSG00000008277_74 (sequence is synthesized)
aactgctttcctgagcaagtgtgatttgttttatggctgttcaagttataaaattgttcttacattgtaggtaaacaaaatcttgatgtttttaaaggtcactgtaacttaaggttcaaa

SEQ ID NO: 9790 - DNA, 120 bp, Artificial Sequence
  ENSG00000008277_75 (sequence is synthesized)
tttctggcacagttttattagtattcacttcggaagctaataagataccatggttttctatgttactcccattgtaacattagtaaagtgactttcaataaaagatttatgttattttga

SEQ ID NO: 9791 - DNA, 120 bp, Artificial Sequence
  ENSG00000008277_76 (sequence is synthesized)
ctggagatggtgactctttttatagcgacattcctcccggagtcagcacaaactcagcatctagttctaagaagaggtcaaatgggctctctcattcttggagtgaaaggattccagaca

SEQ ID NO: 9792 - DNA, 120 bp, Artificial Sequence
  ENSG00000008277_77 (sequence is synthesized)
cgggcgctcgctccctgccgagctcttgtcgcccgcccgagcctttgccaggggatgaggtgggaggcgctagaaaccacttagctacagccaaccgcccaatgcagcactcgctcgctc

SEQ ID NO: 9793 - DNA, 120 bp, Artificial Sequence
  ENSG00000008277_78 (sequence is synthesized)
gctccccccgccagcggaagcgtccgcgaagcacaatgcagcactgagccgcggtggaggttgcagcgccacggccgccgcagcaccggccggggctgggtggaggtggccgcggggacc

SEQ ID NO: 9794 - DNA, 120 bp, Artificial Sequence
  ENSG00000008277_79 (sequence is synthesized)
tgctttattgtgactgaaatgtatcctttctgctacataacacaattaggatttgacatggcagatggcagatagatttggaaaaagttttcaagtatagattgcttaaaattgccatga

SEQ ID NO: 9795 - DNA, 120 bp, Artificial Sequence
  ENSG00000008277_80 (sequence is synthesized)
acagataaattatattctttaaagttactgtcttttaaatgttaatgttttctctgtttttggttctaagatgagagcttagtatttctggaatttatttttaattttttctcactctta

SEQ ID NO: 9796 - DNA, 120 bp, Artificial Sequence
  ENSG00000008277_81 (sequence is synthesized)
tgttctttttttgatagcatgcatatttgacgtaatagcaaattatatatagtagaattttaaaaatctatcatctaaagtcagagctgttgaagaaagttataaaaggaagaaaagatg

SEQ ID NO: 9797 - DNA, 120 bp, Artificial Sequence
  ENSG00000008277_82 (sequence is synthesized)
tattttggggtaactttatatataattccaaatttagagaaaagttgcaagaatactacaaggaaattgcatatgccctctattcagattcatcaattattcacattttccccatttgtt

SEQ ID NO: 9798 - DNA, 87 bp, Artificial Sequence
  ENSG00000008277_83 (sequence is synthesized)
tattcagattcatcaattattcacattttccccatttgtttcataattttcttccattctccctcccttccttccattcatccatcc

SEQ ID NO: 9799 - DNA, 120 bp, Artificial Sequence
  ENSG00000008277_84 (sequence is synthesized)
tggggatttattattaaatagtatatattctctaagagtaaaaagacattctcttatataaccacagtaaattattaaaaccagaaaatttaacacaaacataatacttttatgtaaccc

SEQ ID NO: 9800 - DNA, 120 bp, Artificial Sequence
  ENSG00000008277_85 (sequence is synthesized)
tctatattcaaatttcaccaattacctcaataatgtcttttaaagctaattttccccatccaaatccaatccaggatcacacattgcatttaatcatcatgtctctttagtctcctttaa

SEQ ID NO: 9801 - DNA, 120 bp, Artificial Sequence
  ENSG00000008277_86 (sequence is synthesized)
tctgaaagatttcctcagctttcctttgtctattttgagtttaatacttttgaagagtataggccaattattttattgactgttcctcattatgggaatgcctgatgttaagatatgtat

SEQ ID NO: 9802 - DNA, 120 bp, Artificial Sequence
  ENSG00000008277_87 (sequence is synthesized)
ttttggcagaaataccagagaagtgattttgtgtctgtctcagagtacatcatatcaaccaattattttttaatagatatacttcaatttaagatatttattaatcttgcaagaaaacat

SEQ ID NO: 9803 - DNA, 120 bp, Artificial Sequence
  ENSG00000008277_88 (sequence is synthesized)
ccctcataaacctttttctttggttacatgtataaacaattttcacattcttcccttgcaatgtgaatatattgtatagaaatcttatgtatagagaaaataaatgtagtaaactaataa

SEQ ID NO: 9804 - DNA, 120 bp, Artificial Sequence
  ENSG00000008277_89 (sequence is synthesized)
agtcattggaggtctcctgctgccatggtaattggaatttcttttttctaaaaagaacagctatattgaggtatagttcacatagcataaactgagggaggagagcactgttactaccag

SEQ ID NO: 9805 - DNA, 120 bp, Artificial Sequence
  ENSG00000008277_90 (sequence is synthesized)
cctcggtctaattcaactgatcattcacacaattcatggtcagacacttggaaggcaacctctgagggttggttcctaatggaaacatgagcactttattctggagtgcacaaagaagag

SEQ ID NO: 9806 - DNA, 120 bp, Artificial Sequence
  ENSG00000008277_91 (sequence is synthesized)
gaaggaacactgcagctgcaactaaattactaaacccagcttcaagatcatggaggcctatttagaccacacaatgtgcattgaggctccaggatcagaagagtgggaccctatctgctc

SEQ ID NO: 9807 - DNA, 120 bp, Artificial Sequence
  ENSG00000008277_92 (sequence is synthesized)
ctggaacatactttcatgttgactccagcttgagaccctctatagagagtaagacagtggtcacgtaaaagccttcttatattggaaagagaactttgttccttttaattgttcttaggg

SEQ ID NO: 9808 - DNA, 120 bp, Artificial Sequence
  ENSG00000008277_93 (sequence is synthesized)
tgttgtatgcccaaatgccagattggaattgcagccatctgagtattttcaaaaagcatcattatcatttaaaaaccaaagagccaaatgagaggtggcctggaaaaagccactttagag

SEQ ID NO: 9809 - DNA, 120 bp, Artificial Sequence
  ENSG00000008277_94 (sequence is synthesized)
gtgggtgaatgggactgctgactgtactgtgattgaaagggagcttctaattcactttgggaagccactggaaaaggctttcccagaaatgttgaatatattgtagaatgccttgattga

SEQ ID NO: 9810 - DNA, 120 bp, Artificial Sequence
  ENSG00000008277_95 (sequence is synthesized)
aaagcctgtttttctccttctgaagaggaatggggagaatgggaaaggggtgccctgcttctgggccccgctcctggttgctctcggatgagctggtccaaggctctcgggctggtgtct

SEQ ID NO: 9811 - DNA, 120 bp, Artificial Sequence
  ENSG00000008277_96 (sequence is synthesized)
ctgcgtccttcccagttgggttccgagagggagggggcggtggggattttcgtaggggagacgtaggactgcaggatggaggagtgagggtcagggtcattattttcgccttttctctcc

SEQ ID NO: 9812 - DNA, 120 bp, Artificial Sequence
  ENSG00000008282_0 (sequence is synthesized)
gagtgccaggggctgaaccgcagggaagggggcgcggcgcacgcagtatggcgcccaacatctacttggttcgccagcggatcagtcgactcggccagaggatgtccggcttccagatca

SEQ ID NO: 9813 - DNA, 120 bp, Artificial Sequence
  ENSG00000008282_1 (sequence is synthesized)
acctcaacccgctcaaggagccactcggcttcatcaaggtcctcgagtggattgcttctatctttgcttttgccacctgtggaggttttaagggccaaacagaaattcaagtgaattgtc

SEQ ID NO: 9814 - DNA, 120 bp, Artificial Sequence
  ENSG00000008282_2 (sequence is synthesized)
ctcctgcagttactgagaataaaactgttacagctacttttggttatccattcaggttgaatgaggcatcatttcagccacctccaggtgtaaacatatgtgatgtaaattggaaagatt

SEQ ID NO: 9815 - DNA, 120 bp, Artificial Sequence
  ENSG00000008282_3 (sequence is synthesized)
acgtcctcataggcgattactcttcttctgcacaattctatgttacctttgcagtctttgtgttcctgtactgcattgctgcccttctgctttatgttggctacacgagtctgtatctgg

SEQ ID NO: 9816 - DNA, 120 bp, Artificial Sequence
  ENSG00000008282_4 (sequence is synthesized)
atagtcgtaaacttcctatgatagactttgttgttacacttgttgccacttttttgtggttggtgagcacttcagcctgggctaaagctctgacagatattaaaatagctactggtcaca

SEQ ID NO: 9817 - DNA, 120 bp, Artificial Sequence
  ENSG00000008282_5 (sequence is synthesized)
atattattgatgaacttccgccttgtaagaagaaagcagtactgtgttactttggctctgtgaccagtatgggatccctaaatgtatctgtgatatttggctttctaaatatgatactct

SEQ ID NO: 9818 - DNA, 120 bp, Artificial Sequence
  ENSG00000008282_6 (sequence is synthesized)
ggggaggaaatgcttggtttgtgtacaaggagaccagcctacacagtccatcaaatacatctgcccctcatagccaaggaggtattccacctcctaccggaatataattaaagggagaaa

SEQ ID NO: 9819 - DNA, 120 bp, Artificial Sequence
  ENSG00000008282_7 (sequence is synthesized)
tacactgtatgaagtatatgttgatactatgacatgttgccaacaccttgagaagcattatttgtttctaataaaagtaatggctttgtcaatatattggtgggtttaaaactttgctgc

SEQ ID NO: 9820 - DNA, 120 bp, Artificial Sequence
  ENSG00000008282_8 (sequence is synthesized)
tgaaatgatacacatttttaaatgaaccataatttttttcactaagctgtttgccttccaaagtgtttacaccttaagccttaacatgtatcttcattcagaaaacagttatattgtcat

SEQ ID NO: 9821 - DNA, 120 bp, Artificial Sequence
  ENSG00000008282_9 (sequence is synthesized)
accatagtaggaagaaaaacctttatttggaatatacactactgtaagtttgtacagatcatatacctaccacctgtctttgcttaaagagccttgattacataaatatgtaggaaaaaa

SEQ ID NO: 9822 - DNA, 120 bp, Artificial Sequence
  ENSG00000008282_10 (sequence is synthesized)
catattgagttcaaaatttatatctaacattgtttatgttatgatttttttttaattgcaaagactaggtgtatatttttttctgtttttctaaatgacccgtggtacttaataggtgta

SEQ ID NO: 9823 - DNA, 120 bp, Artificial Sequence
  ENSG00000008282_11 (sequence is synthesized)
ctaaaattgtgttgggagcagggatttggaaatttctgagagatgtgtagttaatttagtaattctgtttcatgagatatgatctgttatgctagtggtttaataggcttgctatgtaag

SEQ ID NO: 9824 - DNA, 120 bp, Artificial Sequence
  ENSG00000008282_12 (sequence is synthesized)
tagaacgtggctcaactagatatctttatatgtatgggcattactcttagtgatatttgtttcctgtcctttgttgctcatgctgtttaagtgcaggctgagacccagcctctttgtaag

SEQ ID NO: 9825 - DNA, 120 bp, Artificial Sequence
  ENSG00000008282_13 (sequence is synthesized)
tacagtaaaataatccaccgttttttacagaccctagtcaaagggttaaaaaaattaagattgctttccatgtttgaaatttaccattgagagtcaatgaagttgctattttgagtttag

SEQ ID NO: 9826 - DNA, 120 bp, Artificial Sequence
  ENSG00000008282_14 (sequence is synthesized)
cattgatattgtgaaaataagtgcaatttggatttcatgtttcttaatattcattcttgtttcacaaatgaatgattaaggaattatgcatcataaaggaacctaagtgaggtatatgat

SEQ ID NO: 9827 - DNA, 120 bp, Artificial Sequence
  ENSG00000008282_15 (sequence is synthesized)
gagtgtattgtctttgcacacacatataggtatattctgaatacaagcttattcacattttgcttcctaatctttttgttgtacagggattcaggtttcttattcttacaacatgattgt

SEQ ID NO: 9828 - DNA, 120 bp, Artificial Sequence
  ENSG00000008282_16 (sequence is synthesized)
ttatatgtgaagcacatcttgctgttgccttatttttgatgcttttattcatgacaagaattgtcaatataagaatgtatatcttttttgcaaccaatttaataaaggagttgaaagaaa

SEQ ID NO: 9829 - DNA, 120 bp, Artificial Sequence
  ENSG00000008282_17 (sequence is synthesized)
gcctccgagcccggccagcgcgccagccccgcctgcccttcctcgccaccgggctgctctggtctcgtcggtcccctcctccgccccgtcgtcctgactctctctccctcctttcctcag

SEQ ID NO: 9830 - DNA, 120 bp, Artificial Sequence
  ENSG00000008282_18 (sequence is synthesized)
aggccatttctcagcaccataaggttgaatgtaatctcagtttcttcatcatggatttgaaatttagtattaaaattaactgttcattattaactcttactgatttttgctttaggactt

SEQ ID NO: 9831 - DNA, 80 bp, Artificial Sequence
  ENSG00000008282_19 (sequence is synthesized)
acctgcgagccgggacgcagccctgccgcgcgggctttgaggccgccgccccgggactgggagtggacggcagggagggc

SEQ ID NO: 9832 - DNA, 120 bp, Artificial Sequence
  ENSG00000008282_20 (sequence is synthesized)
cggcgggcgtcgaatcacgagctcctcggccgcctggctcccaggggagccaccctcccacaccggagctcccctctgggtgtccccgtggagtgggagttcaaatttccccttggctcc

SEQ ID NO: 9833 - DNA, 77 bp, Artificial Sequence
  ENSG00000008282_21 (sequence is synthesized)
ctgtgttactttggctctgtgaccagtatgggatccctaaatgtatctgtgatggagtttcgctatgtcgctcgcct

SEQ ID NO: 9834 - DNA, 120 bp, Artificial Sequence
  ENSG00000008283_0 (sequence is synthesized)
agaaccggccaagcgacccgggcgcggcgcggggaggctgaagggacgctcgggtaggcaagcgtttgcctcagcatggagggcggggccgcggcagccacccccacagcactgccttac

SEQ ID NO: 9835 - DNA, 120 bp, Artificial Sequence
  ENSG00000008283_1 (sequence is synthesized)
tacgtggccttctcccagctgctgggcctgaccttggtggccatgaccggcgcgtggctcgggctgtaccgaggcggcattgcctgggagagcgacctgcagttcaacgcgcaccccctc

SEQ ID NO: 9836 - DNA, 120 bp, Artificial Sequence
  ENSG00000008283_2 (sequence is synthesized)
tgcatggtcataggcctgatcttcctgcagggaaatgccctgctggtttaccgtgtcttcaggaacgaagctaaacgcaccaccaaggtcctgcacgggctgctgcacatctttgcgctc

SEQ ID NO: 9837 - DNA, 120 bp, Artificial Sequence
  ENSG00000008283_3 (sequence is synthesized)
gtcatcgccctggttggcttggtggcggtgttcgactaccacaggaagaagggctacgctgacctgtacagcctacacagctggtgcgggatccttgtctttgtcctgtactttgtgcag

SEQ ID NO: 9838 - DNA, 120 bp, Artificial Sequence
  ENSG00000008283_4 (sequence is synthesized)
tggctggtgggcttcagcttcttcctgttccccggagcttcattctccctgcggagccgctaccgcccacagcacatcttctttggtgctaccatcttcctcctttccgtgggcaccgcc

SEQ ID NO: 9839 - DNA, 120 bp, Artificial Sequence
  ENSG00000008283_5 (sequence is synthesized)
ctgctgggcctgaaggaggcactgctgttcaacctcgggggcaagtatagcgcatttgagcccgagggtgtcctggccaacgtgctgggcctgctgctggcctgcttcggtggggcggtg

SEQ ID NO: 9840 - DNA, 120 bp, Artificial Sequence
  ENSG00000008283_6 (sequence is synthesized)
ctctacatcttgacccgggccgactggaagcggccttcccaggcggaagagcaggccctctccatggacttcaagacgctgacggagggagatagccccggctcccagtgatgcgcccgg

SEQ ID NO: 9841 - DNA, 120 bp, Artificial Sequence
  ENSG00000008283_7 (sequence is synthesized)
ccggccctgggggttcgcggggtgtcttcttgcctgcccctgctgaggcgtcttcaggactgcaggctccggagagtggctctggcagcaggcgggcgcgtgggtgcagctgcatctgtt

SEQ ID NO: 9842 - DNA, 120 bp, Artificial Sequence
  ENSG00000008283_8 (sequence is synthesized)
tgagtgctgctttctggggtcaggtctccgcctcctctgcttctcctttctccgctgctatagaccagttcattgtgtgtggctcccgtgtctctgttgcccccttcagtgcagaaggct

SEQ ID NO: 9843 - DNA, 120 bp, Artificial Sequence
  ENSG00000008283_9 (sequence is synthesized)
ttgggtaggacttcgggtgttcggtcctggtcgcagagcacagatctttaaagaagcgagagaggaggccccaccctcctggcagcagatgcctggggcaaggccaggggaaactggggg

SEQ ID NO: 9844 - DNA, 120 bp, Artificial Sequence
  ENSG00000008283_10 (sequence is synthesized)
ggcctcagggacaggcctggaaaggccacgatggctgctgaattcaaacaaggagtccctccagcctgaataacacgtggcacaaatgggcccggcctttggcagaggagcaagtgatat

SEQ ID NO: 9845 - DNA, 120 bp, Artificial Sequence
  ENSG00000008283_11 (sequence is synthesized)
gatgtgtaaagtatgttggtggtgaaagcaaggttccccaggagaggggagggactggcccctgggaagctctgagatgaggctgtggcccagctgtagtcctgaccttcctcttcttta

SEQ ID NO: 9846 - DNA, 120 bp, Artificial Sequence
  ENSG00000008283_12 (sequence is synthesized)
gacttcagacagactttctcttggcagatgcaggcgggcctcctcccaggctgctccagacatgggggttggggatggggggcaccttgcagccccttcctgctggggctccctccttgt

SEQ ID NO: 9847 - DNA, 120 bp, Artificial Sequence
  ENSG00000008283_13 (sequence is synthesized)
agcaccccccttgcggctcagctctggtttcctctcccaggctcacccaggctctgctcaggctgggaggcagagggcacaaaccttataattttttaaatgaaaaaccgctgctgctgg

SEQ ID NO: 9848 - DNA, 120 bp, Artificial Sequence
  ENSG00000008283_14 (sequence is synthesized)
ctgtggctagagccccctggggctgctggagctgctgcctctgttctggaggacgagccttctccttatctgctgcccatctttccaggaagtcaggatggagtcagaacaactacagtc

SEQ ID NO: 9849 - DNA, 120 bp, Artificial Sequence
  ENSG00000008283_15 (sequence is synthesized)
atcccccgtggtgtctgcacatcactccagccccataaagagtgtcatgttagctgagtcaccatttggcttcggcctggaaatagtgtgattagaacactgatcgtgtgcgaggccagg

SEQ ID NO: 9850 - DNA, 61 bp, Artificial Sequence
  ENSG00000008283_16 (sequence is synthesized)
aaatagtgtgattagaacactgatcgtgtgcgaggccaggagatcaagaccatcctgacta

SEQ ID NO: 9851 - DNA, 120 bp, Artificial Sequence
  ENSG00000008283_17 (sequence is synthesized)
ggagaatggtgtgaacccgggagatggcgcttgcagtgagctgagattgcactccagcctgggcgacaggctcaaaaaagaaaaaaaaaagaacaccgatcatgtgcttcttggatctgg

SEQ ID NO: 9852 - DNA, 120 bp, Artificial Sequence
  ENSG00000008283_18 (sequence is synthesized)
tgactgttctctccctgttttcctttctttttgggtgtttgaggagcatggcttagcttgagacacacacagacactgtgtacttcagtgaagggcttaatatacagtttccaaacctga

SEQ ID NO: 9853 - DNA, 120 bp, Artificial Sequence
  ENSG00000008283_19 (sequence is synthesized)
cgactcttcttcttgtaatggctgcccttttcctacctgaggccgtcttagagaaaggggccagtctcctctaatgctcagatttcccatagttggcttttgctgtgtctcctgcctcag

SEQ ID NO: 9854 - DNA, 120 bp, Artificial Sequence
  ENSG00000008283_20 (sequence is synthesized)
gcagtgtcatttctgggagcaggtggttgtagtccaggcccctccccagcagggtctgcccaggctccttcgagcccctttccccgcctcctctcagcctgtccggatgacagtgttcgc

SEQ ID NO: 9855 - DNA, 120 bp, Artificial Sequence
  ENSG00000008283_21 (sequence is synthesized)
ctcctgtttagactgtacactcttcaggggtaggggtgccgtcagttcttcaatcagctggcacacacttgtatagtgaaatgtttacatgtgggaaaactccgccttagacaaactacc

SEQ ID NO: 9856 - DNA, 120 bp, Artificial Sequence
  ENSG00000008283_22 (sequence is synthesized)
aaagtacaatcgtgtctctctctagccggaatgctacagagagaaatggaaccttagatttgcaacaaaagtctgtaaactggtctgtttgccaaagtgaacactggatgactaaggagc

SEQ ID NO: 9857 - DNA, 120 bp, Artificial Sequence
  ENSG00000008283_23 (sequence is synthesized)
tgaagaaggcccccagaagcggatttgtggtgggttattttattttgcctgtggccaatcttctgtgaaatacaatgtgctgttggtgcaacagatgattcaataaatgtctacagcaga

SEQ ID NO: 9858 - DNA, 120 bp, Artificial Sequence
  ENSG00000008283_24 (sequence is synthesized)
gacagacaacaagtgaccaggggggacagcacttctttcagtacattttcctgttagactcggggtattagagacccaaagatacccaaggaggagtgagagcgtccctgccttcgagga

SEQ ID NO: 9859 - DNA, 120 bp, Artificial Sequence
  ENSG00000008283_25 (sequence is synthesized)
aggtgagccctgactgcgcagggagggacagcgcggggctcccgagtagcagccggcctcgcacctgccccttgcggccgcgcactggactgcggcgccgacccgcaccctgggcccgag

SEQ ID NO: 9860 - DNA, 120 bp, Artificial Sequence
  ENSG00000008283_26 (sequence is synthesized)
ggctgcagggctcgcccgccctctcggagccgagcctctcccggtccaggcggcccctgccctggcctgcccgggtgccgggtctctgctgaagttagaaccgagacccccgcttgctgg

SEQ ID NO: 9861 - DNA, 120 bp, Artificial Sequence
  ENSG00000008283_27 (sequence is synthesized)
cgcatctcaggcgcagtctctaggggctgtgcgcatccgtgggggggacatgcgcatctcaggggggctgctcgcatctgggggtgctgtgtgcatctcgggggggctgtgcccatctag

SEQ ID NO: 9862 - DNA, 120 bp, Artificial Sequence
  ENSG00000008283_28 (sequence is synthesized)
cggggtggctgtgcgcatctggagggggctgtgcgcaacccggggggggtgttgcgcgcatctagcaggggcggctgtgcgcatttcggggggggctgtgcatatctggggggaccgtgc

SEQ ID NO: 9863 - DNA, 120 bp, Artificial Sequence
  ENSG00000008283_29 (sequence is synthesized)
ttatctccgggggcggctgtgcgcatcttgaggggtgtgtacatctcggggggcctgtgcgcatcttggggggctgtgtgcatccgcgggggctgtgcgcatctcggggtgctgtgcgct

SEQ ID NO: 9864 - DNA, 120 bp, Artificial Sequence
  ENSG00000008283_30 (sequence is synthesized)
cctcttttcccgggcttgtgggggtccctgagaggcagtttgcaggggtcttgtcacccctgcggtctcttctggttggacaaatctaagattctagaaaagacagagacagaagctggt

SEQ ID NO: 9865 - DNA, 120 bp, Artificial Sequence
  ENSG00000008283_31 (sequence is synthesized)
tcagagcctggggagatggaatccaaacccaggctctgaggttggtgagtggcagctcctctccagcctggtccagcattttcacctcgtttccacacacagcatccaaggcgggcactt

SEQ ID NO: 9866 - DNA, 120 bp, Artificial Sequence
  ENSG00000008283_32 (sequence is synthesized)
agcacttctttcagtacattttcctgttagactcggggtattagagacccaaagatacccaaggaggagtgagagcgtccctgccttcgaggagcagacagggcaccgcgagggtgctgg

SEQ ID NO: 9867 - DNA, 120 bp, Artificial Sequence
  ENSG00000008283_33 (sequence is synthesized)
gattataggtgtgagccatcgcacccggcccacacacacaccccccctttaatggtggagttgccaacagttgtccgatgtggcagagagaactggggagcagagaaggagcccatcact

SEQ ID NO: 9868 - DNA, 120 bp, Artificial Sequence
  ENSG00000008283_34 (sequence is synthesized)
ctttccttgcaccctcaccgcatatggaactcctggcgtcgtgtcccaggtcacgcctgtccccgtggggaggctgggcccctccccccagccactcccgagacttgagacctctgcctc

SEQ ID NO: 9869 - DNA, 120 bp, Artificial Sequence
  ENSG00000008283_35 (sequence is synthesized)
agtgctcctcccaccactgtgctgaggaggaaggaaaccaggcagggctgaggggctcacagtcgccacgtgggcacgtgggtgtgggcctggccgacctcggctgctggggtgtccggc

SEQ ID NO: 9870 - DNA, 120 bp, Artificial Sequence
  ENSG00000008283_36 (sequence is synthesized)
ttgggagccaggcgcctgcttgctaggagtaggaccatctgcccaggcttaggtgggggcctgtgtgaggagccacgtggctaacaggtgaactcagaggctgcttgttgcctcagtgtg

SEQ ID NO: 9871 - DNA, 120 bp, Artificial Sequence
  ENSG00000008283_37 (sequence is synthesized)
agcgatgcttggctcagtgaagatctgcgggtcatgctgtccctaatgcgctgattgcattaagtggattctggctgcagcgtttgcctcagcatggagggcggggccgcggcagccacc

SEQ ID NO: 9872 - DNA, 120 bp, Artificial Sequence
  ENSG00000008283_38 (sequence is synthesized)
ctaccgcccacagcacatcttctttggtgctaccatcttcctcctttccgtgggcaccgccctgctgggcctgaaggaggcactgctgttcaacctcggcttctcccttcctctcacccc

SEQ ID NO: 9873 - DNA, 120 bp, Artificial Sequence
  ENSG00000008283_39 (sequence is synthesized)
gaccagccccttccttcccgtcaaggagcgcgcttgcctgtgtaactcacctgtaaagcccacccagggaaggccagggcctcatgaaacagaaaacaaagccgggcactgggcccttga

SEQ ID NO: 9874 - DNA, 120 bp, Artificial Sequence
  ENSG00000008283_40 (sequence is synthesized)
cctaccagggaggtgggaggaggaggggagctgggctgaaatgtacctcatggaagggcctgatttctggggtgtgtgcaggtgagagagctgccttcccaggcctgtgcgggtgcaaag

SEQ ID NO: 9875 - DNA, 120 bp, Artificial Sequence
  ENSG00000008283_41 (sequence is synthesized)
ctaggattggcggccaagggtgcccagctcccaggcgccccatggctgactcagcacttttggccacaagcccagctttctgagtgtgccaaggcctcaagcgttgggggaccggtccct

SEQ ID NO: 9876 - DNA, 80 bp, Artificial Sequence
  ENSG00000008294_0 (sequence is synthesized)
agttggtgcagcggcggttggggtgagagcgcctacgccacccctcccctcctccggccccggcccccaccccgccgggc

SEQ ID NO: 9877 - DNA, 120 bp, Artificial Sequence
  ENSG00000008294_1 (sequence is synthesized)
tcccagcccgagtcgggtccgtcccgtgcgggcaggtgccgcccctctgccggcgacgccccgggccgcccgcccgtccgcttgccaccatggagctggaggacggtgtggtgtatcagg

SEQ ID NO: 9878 - DNA, 120 bp, Artificial Sequence
  ENSG00000008294_2 (sequence is synthesized)
aggagcccggcggctccggggccgtgatgtcggagcgggtgtccggcctggccggctccatctaccgcgagttcgagcggcttatcgggcgctatgacgaggaggtggtcaaagagctga

SEQ ID NO: 9879 - DNA, 120 bp, Artificial Sequence
  ENSG00000008294_3 (sequence is synthesized)
tgccgctggtggtggctgtgctggagaacctggactcggtgttcgcgcaggaccaggagcaccaggtggagctggagctgctgcgggacgacaacgagcagctcatcacccagtacgagc

SEQ ID NO: 9880 - DNA, 120 bp, Artificial Sequence
  ENSG00000008294_4 (sequence is synthesized)
gggagaaggcgctgcgcaagcacgctgaggagaaattcattgaatttgaagactctcaagaacaggaaaaaaaggacttacagacccgagtggaatctttagaatctcaaacaagacaac

SEQ ID NO: 9881 - DNA, 120 bp, Artificial Sequence
  ENSG00000008294_5 (sequence is synthesized)
ttgagctgaaagcgaaaaactatgctgaccagattagcagacttgaagaaagagaagcagaactgaagaaggaatataatgcattacatcaaagacacactgagatgatccataattata

SEQ ID NO: 9882 - DNA, 120 bp, Artificial Sequence
  ENSG00000008294_6 (sequence is synthesized)
tggaacatttagaaagaacaaaacttcatcagctctcagggagtgatcaactagaatccacagctcatagtagaattagaaaagaacgccctatatcattaggaattttcccattacctg

SEQ ID NO: 9883 - DNA, 120 bp, Artificial Sequence
  ENSG00000008294_7 (sequence is synthesized)
ctggagatggattgcttacacctgatgctcagaaaggaggagagacccctggatctgagcaatggaaatttcaggaattaagtcaaccacgttctcataccagcctgaaggatgagcttt

SEQ ID NO: 9884 - DNA, 120 bp, Artificial Sequence
  ENSG00000008294_8 (sequence is synthesized)
ctgatgttagccaaggcggatctaaagctaccactccagcatcaacagctaattcagatgtggcaacaattcctactgatactcccttaaaggaagaaaacgaaggatttgtgaaggtta

SEQ ID NO: 9885 - DNA, 120 bp, Artificial Sequence
  ENSG00000008294_9 (sequence is synthesized)
cagatgcgccaaataaatcagagataagcaaacacattgaagtacaggtagcccaggaaactagaaatgtatctactggctctgctgaaaatgaagaaaagtcagaagttcaagcaatca

SEQ ID NO: 9886 - DNA, 120 bp, Artificial Sequence
  ENSG00000008294_10 (sequence is synthesized)
tcgaatctactcctgagctggatatggacaaagatctcagtggatataaaggttcaagcactcccaccaaaggcatagagaacaaagcttttgatcgcaatacagaatctctctttgaag

SEQ ID NO: 9887 - DNA, 120 bp, Artificial Sequence
  ENSG00000008294_11 (sequence is synthesized)
aactgtcttcagctggctcaggcctaataggagatgtggatgaaggagcagatttactaggaatgggtcgggaagttgagaatcttatattagaaaatacacaactgttggaaaccaaaa

SEQ ID NO: 9888 - DNA, 120 bp, Artificial Sequence
  ENSG00000008294_12 (sequence is synthesized)
atgctttgaacatagtgaagaatgatttgatagcaaaagtggatgaactgacctgtgagaaagatgtgctgcaaggggaattggaggctgtgaagcaagccaaactgaaactagaggaaa

SEQ ID NO: 9889 - DNA, 120 bp, Artificial Sequence
  ENSG00000008294_13 (sequence is synthesized)
agaacagagaattggaggaagagcttaggaaagctcgggcagaagctgaagatgcaaggcaaaaagcaaaagatgacgatgatagtgatattcccacagcccagaggaaacggtttacta

SEQ ID NO: 9890 - DNA, 120 bp, Artificial Sequence
  ENSG00000008294_14 (sequence is synthesized)
gagtagaaatggcccgtgttctcatggagcgaaaccagtataaagagagattgatggagcttcaggaagctgttcgatggacagagatgattcgggcatcacgagaaaatccagccatgc

SEQ ID NO: 9891 - DNA, 120 bp, Artificial Sequence
  ENSG00000008294_15 (sequence is synthesized)
aggaaaaaaaaaggtcaagcatttggcagtttttcagccgacttttcagctcctcaagtaacacgactaagaagcctgaaccacctgttaatctgaagtacaatgcacccacgtctcatg

SEQ ID NO: 9892 - DNA, 120 bp, Artificial Sequence
  ENSG00000008294_16 (sequence is synthesized)
ttactccgtccgtcaagaaaagaagcagcaccttatctcagctccctggggataagtccaaagcctttgatttccttagtgaagaaactgaagctagtttagcctcacgcagagaacaaa

SEQ ID NO: 9893 - DNA, 120 bp, Artificial Sequence
  ENSG00000008294_17 (sequence is synthesized)
agagagagcagtatcgtcaggtaaaagcacatgttcagaaggaagacggtagagtgcaggcttttggctggagtctgcctcagaagtacaaacaggtaaccaatggtcaaggtgaaaata

SEQ ID NO: 9894 - DNA, 120 bp, Artificial Sequence
  ENSG00000008294_18 (sequence is synthesized)
agatgaaaaatttacctgtgcctgtctatctcagacctctggatgaaaaagatacatcaatgaagctgtggtgtgctgttggagtcaatttatctggtgggaagaccagagatggtggtt

SEQ ID NO: 9895 - DNA, 120 bp, Artificial Sequence
  ENSG00000008294_19 (sequence is synthesized)
gtagtttagataagttagatcaggaacttaaggaacagcagaaggagttaaaaaatcaagaagaattatccagtctagtttggatctgtaccagcactcattcggctacaaaagttctta

SEQ ID NO: 9896 - DNA, 120 bp, Artificial Sequence
  ENSG00000008294_20 (sequence is synthesized)
ttattgatgctgttcaacctggcaacatcctagacagtttcactgtttgcaactctcatgttctgtgcattgcaagtgtgccaggtgcacgagaaacagactaccctgcaggagaagatc

SEQ ID NO: 9897 - DNA, 120 bp, Artificial Sequence
  ENSG00000008294_21 (sequence is synthesized)
tttcagaatctggtcaggtagacaaagcatctttatgtggaagtatgacaagcaacagctcagcagagacagacagcctgttaggaggcatcacagtggttggttgttctgcagaaggtg

SEQ ID NO: 9898 - DNA, 120 bp, Artificial Sequence
  ENSG00000008294_22 (sequence is synthesized)
tgacgggagctgccacttcccctagtacaaatggtgcttctccagtgatggataaaccaccagaaatggaagcagaaaatagtgaggttgatgaaaatgttccaacagcagaagaagcaa

SEQ ID NO: 9899 - DNA, 120 bp, Artificial Sequence
  ENSG00000008294_23 (sequence is synthesized)
ctgaagctacagaagggaatgcggggtcagctgaagacacagtggacatctcccaaactggcgtctacacagagcatgtctttacagatcctttgggagttcagatcccagaagacctct

SEQ ID NO: 9900 - DNA, 120 bp, Artificial Sequence
  ENSG00000008294_24 (sequence is synthesized)
ccccagtgtatcagtcgagcaatgactcagatgcatataaagatcaaatatcagtactgccaaatgaacaagacttggtgagagaagaagcccagaaaatgagtagtcttttaccaacta

SEQ ID NO: 9901 - DNA, 120 bp, Artificial Sequence
  ENSG00000008294_25 (sequence is synthesized)
tgtggcttggagctcaaaatggctgtttgtatgtccattcatctgtagcccagtggaggaaatgtctccattccattaaacttaaagattcgattctcagtattgtacacgtgaagggaa

SEQ ID NO: 9902 - DNA, 120 bp, Artificial Sequence
  ENSG00000008294_26 (sequence is synthesized)
tcgtgttagtagccctggctgacggcacccttgcaatctttcacagaggagtggatgggcagtgggatttgtcaaactatcacctcttagaccttggacggcctcatcattccatccgtt

SEQ ID NO: 9903 - DNA, 120 bp, Artificial Sequence
  ENSG00000008294_27 (sequence is synthesized)
gcatgactgtggtacatgacaaagtctggtgtggctataggaacaaaatctatgtggtgcagccaaaggccatgaaaatagagaaatcttttgatgcacatcccaggaaggagagccaag

SEQ ID NO: 9904 - DNA, 120 bp, Artificial Sequence
  ENSG00000008294_28 (sequence is synthesized)
tgcgacagcttgcgtgggtgggggatggcgtgtgggtctccattcgcttggattctacgctccgtctctatcatgcacacacttatcaacatctacaggatgtggacattgagccttatg

SEQ ID NO: 9905 - DNA, 120 bp, Artificial Sequence
  ENSG00000008294_29 (sequence is synthesized)
taagcaaaatgttaggtactggaaaactgggcttctcttttgtgagaattacagctcttatggtgtcttgtaatcgtttgtgggtggggacaggaaatggtgtcattatctccatcccat

SEQ ID NO: 9906 - DNA, 120 bp, Artificial Sequence
  ENSG00000008294_30 (sequence is synthesized)
tgacagaaacaaataaaacctcaggtgtaccaggaaatcgtcctggaagtgtaatccgtgtatatggtgatgaaaacagtgataaagtgactccagggacatttataccctattgttcaa

SEQ ID NO: 9907 - DNA, 120 bp, Artificial Sequence
  ENSG00000008294_31 (sequence is synthesized)
tggcacatgcacagctttgcttccatgggcaccgggatgctgtgaaattctttgtggcagtcccaggtcaagtcatcagcccacaaagtagcagtagtggcacggatctgacgggtgaca

SEQ ID NO: 9908 - DNA, 120 bp, Artificial Sequence
  ENSG00000008294_32 (sequence is synthesized)
aagcagggccatctgcacaggagcctggtagtcagacgcccttgaagtctatgcttgtcatcagtggaggagagggctacatcgacttccgaatgggtgatgaaggtggagaatcagaac

SEQ ID NO: 9909 - DNA, 120 bp, Artificial Sequence
  ENSG00000008294_33 (sequence is synthesized)
ttcttggagaggatcttccacttgaaccttctgtcaccaaagcagaaaggagtcacttgatagtgtggcaagtgatgtatggcaatgagtgagcccatgggaaacaggtggagatgggga

SEQ ID NO: 9910 - DNA, 120 bp, Artificial Sequence
  ENSG00000008294_34 (sequence is synthesized)
agccgtctcttctgcatggtttattttccctctatccttttatttaatgctcttttgtgagataagtttcaccacataatgtgtgagcattttttcctgttaactttatattacaaaatc

SEQ ID NO: 9911 - DNA, 120 bp, Artificial Sequence
  ENSG00000008294_35 (sequence is synthesized)
cgttctaccataacaatacagaggaactagctgtgttactgcaccagtgttataggtaacttcagtatattatgaacaaatcaaagaatgtttacttcctgcaaactggtgaattataga

SEQ ID NO: 9912 - DNA, 120 bp, Artificial Sequence
  ENSG00000008294_36 (sequence is synthesized)
aagcaatccagatgtggtttactctgccacagtctaatgtcattcacttcatttgatggggtcacttgttagctgtcactaataatggaattaatgggaaacacttgataaatgaaactg

SEQ ID NO: 9913 - DNA, 120 bp, Artificial Sequence
  ENSG00000008294_37 (sequence is synthesized)
taccgttaaatacaatagctgagttttccccagtgtattgtaaaattgacacacactaatacaagatggattatcaggatgtatctaaatgtcccgagagggttaaaagctaactgtaaa

SEQ ID NO: 9914 - DNA, 120 bp, Artificial Sequence
  ENSG00000008294_38 (sequence is synthesized)
ttactttaactttcactttcaaatctgacaaatcttgtttatatggtatataaaactttgttttcatcagatttgggggggttttatattaaagaaattaagactacactatttaaataa

SEQ ID NO: 9915 - DNA, 120 bp, Artificial Sequence
  ENSG00000008294_39 (sequence is synthesized)
gaaagatttattatttataaagcttaggacatactctgggaagcttagaagatacttcagcactgggaggattttttaaaggaaatgtgttttgtatttcttgtaccagagaatggtgat

SEQ ID NO: 9916 - DNA, 120 bp, Artificial Sequence
  ENSG00000008294_40 (sequence is synthesized)
gttgattgagttttttccatgtaaaaaatgtacttgtttgccaaatgttcctagattgctcttaacctgttaatacaagtaaaactgtagtggggatggagtctggcctaagtacagaat

SEQ ID NO: 9917 - DNA, 120 bp, Artificial Sequence
  ENSG00000008294_41 (sequence is synthesized)
gagggatttaattagaaaagttattttcttttgttctgtatcaaactgcagaacagctatatacttggtattttgtacgtgaataacgttttagcttttgtgcccttttgagcttgaagg

SEQ ID NO: 9918 - DNA, 120 bp, Artificial Sequence
  ENSG00000008294_42 (sequence is synthesized)
gttatcctcaaaggggaaaactatgaaggggaagaagacaaacctaagataccataaagtaaaggttgacattacatattttcattcacaatgcccattaaaaaaaaaaaataggttggg

SEQ ID NO: 9919 - DNA, 60 bp, Artificial Sequence
  ENSG00000008294_43 (sequence is synthesized)
ctgggcccaggaggtggaggttgcagtgagccttgatagcaccactgcactccagcctgg

SEQ ID NO: 9920 - DNA, 120 bp, Artificial Sequence
  ENSG00000008294_44 (sequence is synthesized)
ctgggtgacggagcaagaccctgtctcaaaacagacaaacaagcaaaaaatagattaaagtctggatttcactgattttcttgcttaataagttttttaaaaccacgatgctgcaatttt

SEQ ID NO: 9921 - DNA, 120 bp, Artificial Sequence
  ENSG00000008294_45 (sequence is synthesized)
aaccacgatgctgcaattttttccctctcaagcttcttgaaaatgtgtgatttacccttttttatctattactctaggcaaagctaaatatgatttttttttttttttttgagacggagt

SEQ ID NO: 9922 - DNA, 65 bp, Artificial Sequence
  ENSG00000008294_46 (sequence is synthesized)
gccttggcctcccgaagtgcttgaattacaggcgtgagcccccgcgccggtccgaagcaaagcta

SEQ ID NO: 9923 - DNA, 120 bp, Artificial Sequence
  ENSG00000008294_47 (sequence is synthesized)
ttacaggcgtgagcccccgcgccggtccgaagcaaagctaaatgtaattttatgtactgttttaacagtataaacctatgggataaaggcccccaatcatcagaaggactactgaaaaga

SEQ ID NO: 9924 - DNA, 120 bp, Artificial Sequence
  ENSG00000008294_48 (sequence is synthesized)
aaagaaagcaaacgtagatgtcaaattgtctaaacattcttaagtaccactgattttttttttctggactattatacaaagatgtctgtaaaaagtataccagtggcttttatgcatata

SEQ ID NO: 9925 - DNA, 120 bp, Artificial Sequence
  ENSG00000008294_49 (sequence is synthesized)
cacgattaggctagattgtgaagtacatgggatttcatgagccagaggaggcatttggatccattgggccacatgtgactataagcacattgtgtacacaataaaattgtagccactcat

SEQ ID NO: 9926 - DNA, 120 bp, Artificial Sequence
  ENSG00000008294_50 (sequence is synthesized)
gtattaaaactgttttggtaaaagctgtattaaaagaataattttttgcttgagctacttagtcacttttttgcagggcaccaaaatgtaggctacttttccatagcttgtttgctatgt

SEQ ID NO: 9927 - DNA, 120 bp, Artificial Sequence
  ENSG00000008294_51 (sequence is synthesized)
ttttatttcatcttaaatctgagccatttttggcaatatcttttaaaaaatcattattaaacatttattggaaatgttgtatagattcacaagaaagagacaccaaagtgtttgggaatt

SEQ ID NO: 9928 - DNA, 120 bp, Artificial Sequence
  ENSG00000008294_52 (sequence is synthesized)
ttaatcccaagaagtaaacatcccagagtcagatcccatttgctgttgttcagccatgtttgtatgactgaatgtaatttaggaaatcaggagttagagatgaaaaatacaaacatgtca

SEQ ID NO: 9929 - DNA, 120 bp, Artificial Sequence
  ENSG00000008294_53 (sequence is synthesized)
aatggttgtaattgctttttttgaacttactggctttaacttaagtaatataggtgtgtagttgttttatctaaagatgtcagattatctgtggccctgttaattaactgcagggaccag

SEQ ID NO: 9930 - DNA, 120 bp, Artificial Sequence
  ENSG00000008294_54 (sequence is synthesized)
agagaggacaaaaatgcctgtataatttgctttaaaggcttgtccttatgtttgtaatttcagttaaatattttctacagattgcttcacttcccctttcccccaataacaagttcatat

SEQ ID NO: 9931 - DNA, 120 bp, Artificial Sequence
  ENSG00000008294_55 (sequence is synthesized)
tcttgtaatgtttactttggtcaacgtggtaatttttggaagaaaatgccaaaatgtaagcttctcacaagcagcaaaggaatgtaactgcctgtagctaccacatcaagggagagaaga

SEQ ID NO: 9932 - DNA, 120 bp, Artificial Sequence
  ENSG00000008294_56 (sequence is synthesized)
ggcttgcgtactttgggttgatctcactgtacaaaaaaagtgtacccctattggaagaaataaggaatacttgaaggtttctcctttttttacacttgagtcatgtgcaaggttgaacca

SEQ ID NO: 9933 - DNA, 120 bp, Artificial Sequence
  ENSG00000008294_57 (sequence is synthesized)
tatgaaattgccagtgttcaaccattgctgatctgcaaaagcgacaatatcatatgcctcaacctaacacttactcttaaatgcaggttaaaatctctgtgaggcaaagggataatattc

SEQ ID NO: 9934 - DNA, 120 bp, Artificial Sequence
  ENSG00000008294_58 (sequence is synthesized)
tctaggaactcacttttgagagtatttttctctaacccatgtggatctaaattttaaaaataggaatgaatctcttaattgcagcttgtggagagtataaaacattttgagcacaatatg

SEQ ID NO: 9935 - DNA, 120 bp, Artificial Sequence
  ENSG00000008294_59 (sequence is synthesized)
cagcacataacttttcagattgtgtttgcatagaaaaggttaaaatcaattctttcagttactgtattgttcatttcttgtaaaggtcttcctacatttgagacgagaccctttaacata

SEQ ID NO: 9936 - DNA, 120 bp, Artificial Sequence
  ENSG00000008294_60 (sequence is synthesized)
ggctgccttagtaacaaaataaaacagatgtgtcataatattaactgtcctaaagaacatgtgtcttgcaaatgccatggaactgaatatttatttccttgtgagtattatgaccgttac

SEQ ID NO: 9937 - DNA, 120 bp, Artificial Sequence
  ENSG00000008294_61 (sequence is synthesized)
caaaggactcaaccagatttagggctcttcttaattgatcatgttcagaaagggactcatttggtcccactttgtaacatgggaagagtagaagagaaaattaaatgtggaaatcataaa

SEQ ID NO: 9938 - DNA, 120 bp, Artificial Sequence
  ENSG00000008294_62 (sequence is synthesized)
tgcttttctaacagggttatgctattctgtaacactaaatgtctgtcttttctcttaaaagattaagttttattaattttgtcatacatttctctatttgaatatatcttaaccatttta

SEQ ID NO: 9939 - DNA, 120 bp, Artificial Sequence
  ENSG00000008294_63 (sequence is synthesized)
tgttccaaattcgttttttgtccaagacattctatcagaattttacttgcctctataatctgaaaaatgggttctagaatgtcccacttgctgtctcttagaggctgagcttcatttcta

SEQ ID NO: 9940 - DNA, 120 bp, Artificial Sequence
  ENSG00000008294_64 (sequence is synthesized)
tgagcaaagagctcatttagcaatgtagttatttcagtatttatttctattatggaatccctggggttcagaatgtaactttgtacatgagatatatataaatatgtatatgaacatgta

SEQ ID NO: 9941 - DNA, 120 bp, Artificial Sequence
  ENSG00000008294_65 (sequence is synthesized)
gaagataaactataaagaaagactttatttgcaaatatacccatttactttaaactgtataatggttagttttctaacatgtgcattaaaaacaaaacaagaaacaactaagattcaaat

SEQ ID NO: 9942 - DNA, 120 bp, Artificial Sequence
  ENSG00000008294_66 (sequence is synthesized)
ttgttttttttttaactaaaattattttttaaatgaatagatgtgtttaaaaaataagcttacttattgctagactggcaaaatcccctactccatttactgaggtacttaaaaataact

SEQ ID NO: 9943 - DNA, 120 bp, Artificial Sequence
  ENSG00000008294_67 (sequence is synthesized)
agcatgctgtatctctttttttcccagctttgtcttgaattggcattgccatccttgttttatctcaactggctgtagcttttagataatatcataaggattaaccagtaacctcttaca

SEQ ID NO: 9944 - DNA, 120 bp, Artificial Sequence
  ENSG00000008294_68 (sequence is synthesized)
gcataaatgctaggagcagcagctctatggttatgaggtggggagaacggaatgacgtcatcgcttgggagctgctgcaggatggagtggaaagctgctgctgatggcattgtttttgtg

SEQ ID NO: 9945 - DNA, 120 bp, Artificial Sequence
  ENSG00000008294_69 (sequence is synthesized)
gcagcaagctgaatgacagatcctcactacaaagatacccctttggcccccgtgtaggcctccttggttcgggtgtttcaccatgccagcacagcgccatgagtcctggatgcatgctgc

SEQ ID NO: 9946 - DNA, 120 bp, Artificial Sequence
  ENSG00000008294_70 (sequence is synthesized)
caacttaggcaactgggtgaagtgcacaaataaaaggaaccaaaataatctcaaacagtcaaaagatttccactaattagtgtcactgtggtggattaaaagatacctattcttgtgata

SEQ ID NO: 9947 - DNA, 120 bp, Artificial Sequence
  ENSG00000008294_71 (sequence is synthesized)
tgtttgtgtttggctttgttggcggggcggtggtcattaattctgctatcttagtatctctctctgttttgctgcttgtgcacttttctatttctaccggtgtgccagctctgacgcaga

SEQ ID NO: 9948 - DNA, 120 bp, Artificial Sequence
  ENSG00000008294_72 (sequence is synthesized)
actaggtttcctggcaaagggtgcatgacaagtaatctatgggaagcactgagaccagcacctggtatagagcagaggagctgccattattgcttgtgtttgctgggatcacacaacaaa

SEQ ID NO: 9949 - DNA, 120 bp, Artificial Sequence
  ENSG00000008294_73 (sequence is synthesized)
aacattctataatttcttcaccagctatttccatggagcttagtgagaatttcttaggaagcctttgagaaatctttttaagttatattttctagtaaacgtaaattatagcactcccac

SEQ ID NO: 9950 - DNA, 120 bp, Artificial Sequence
  ENSG00000008294_74 (sequence is synthesized)
aggtgagaatggtgcttcttaacattttgcaaaaagtatactaaagtgattaactattgattacttcctcaactgctattctcaagacatcagatgctcagcttggaagactattgttgt

SEQ ID NO: 9951 - DNA, 120 bp, Artificial Sequence
  ENSG00000008294_75 (sequence is synthesized)
aattcactgaaatataaaagaaaattatttccactgtagtggttgtcagggctttactgcaatctgtaatttattccttccccaaagtaagcatttttaaataaaggaaagaaaatataa

SEQ ID NO: 9952 - DNA, 120 bp, Artificial Sequence
  ENSG00000008294_76 (sequence is synthesized)
gctcatctcagccgcatggactgggcacacatttaagcatggagggtggtggttttcaggctgttttctagagctgtagaactcaaatgaaatgctctgagtctgtgagggggggaggag

SEQ ID NO: 9953 - DNA, 120 bp, Artificial Sequence
  ENSG00000008294_77 (sequence is synthesized)
tcaataaagggtggctaagtgcatggagtttgaggtacccgctctgctgtaaccagagcaattctggtttaatatttgaagatttcattttttaaaaaaccagcatcattgttgaaaaaa

SEQ ID NO: 9954 - DNA, 120 bp, Artificial Sequence
  ENSG00000008294_78 (sequence is synthesized)
tctgtatagagtctaaggctacactcagatgcctcattatggacttaatttagatcttaagtaacaaggttgaaagaacttgaaagaagatactgtagtcccagctactcgggaggctga

SEQ ID NO: 9955 - DNA, 120 bp, Artificial Sequence
  ENSG00000008294_79 (sequence is synthesized)
tggtatactttccagaaataccttcttcagggcataatgtatgtaacttgtatttgtcctgaatgtggcctagtgtgtcatcttacagtggactgcttccttagtttaatagagttcttc

SEQ ID NO: 9956 - DNA, 120 bp, Artificial Sequence
  ENSG00000008294_80 (sequence is synthesized)
ttccttagtttaatagagttcttcatctccagtcagggcaccatccagctttattcatcaaacatctgttaagagcctactacaggccaggtgtggtggctcatgcctgaaatcccagca

SEQ ID NO: 9957 - DNA, 77 bp, Artificial Sequence
  ENSG00000008294_81 (sequence is synthesized)
gcctgaaatcccagcactctgcccaggcaggcggatcacttggtcaggagtaggagttcaagaccagcatggccagt

SEQ ID NO: 9958 - DNA, 89 bp, Artificial Sequence
  ENSG00000008294_82 (sequence is synthesized)
ggccaaggtggaggatggcttgagctcagtgacctcatctctacaaaaaatttaaaaaattagctgggtgtggtggcctgtgcctgtag

SEQ ID NO: 9959 - DNA, 120 bp, Artificial Sequence
  ENSG00000008294_83 (sequence is synthesized)
atttaaaaaattagctgggtgtggtggcctgtgcctgtagtcccagctaccttggaggctgaggtgggaggggaccgcttaagcctgacagattgaggctgcagtgagccatgatcaagc

SEQ ID NO: 9960 - DNA, 120 bp, Artificial Sequence
  ENSG00000008294_84 (sequence is synthesized)
cactgcactctagcctgggcagtagagcgaccctgtctcaaaaaaacaaaaaaacaaaaaacctgaacttgatttcaaggagtaaataacagcagtgcttgctcatgtctcagtggatct

SEQ ID NO: 9961 - DNA, 120 bp, Artificial Sequence
  ENSG00000008294_85 (sequence is synthesized)
gaacaaataggagaattataggaaatagttatgtctgaaattcaaatctgtgttagctcagaaaatcagtgatggcaaagatctagctatagttacttcactcaatgaaacttataaatt

SEQ ID NO: 9962 - DNA, 120 bp, Artificial Sequence
  ENSG00000008294_86 (sequence is synthesized)
ctaggaaaataagttttcatgtatcaagaccaatactcataattaaaagtttttcgttgtcaaaacattttcacagttcaggaatcacagtcctatttcatcttttgaaataaaagttaa

SEQ ID NO: 9963 - DNA, 120 bp, Artificial Sequence
  ENSG00000008294_87 (sequence is synthesized)
agtccatttttcttaagccttattataccattatccaaaaacactacctagcattcatcttagtttttcatatctccttagcagatagtttagtatattccatttgtcttatttgaggtt

SEQ ID NO: 9964 - DNA, 120 bp, Artificial Sequence
  ENSG00000008294_88 (sequence is synthesized)
taaaaaaagttgtggaagaagtttctcaggagttcagcaagcctttccatctatcttctattttaaaagaatgtgatttattgtttttatgaataaaatatacctcgtgtgtttctcata

SEQ ID NO: 9965 - DNA, 120 bp, Artificial Sequence
  ENSG00000008300_0 (sequence is synthesized)
gttggagcggcgggaggcggcagcagcgtcggggatgctgtggtgggggcggaaaaagccagggccgcacgccggaggggctccggccgcggagtagatggtgcccagagggcggcgggg

SEQ ID NO: 9966 - DNA, 80 bp, Artificial Sequence
  ENSG00000008300_1 (sequence is synthesized)
gcggagtagatggtgcccagagggcggcgggggtgcggagagacaggcggaggggcgggggcccggggcggcggcagggg

SEQ ID NO: 9967 - DNA, 120 bp, Artificial Sequence
  ENSG00000008300_2 (sequence is synthesized)
gggaggcgggggatgatggcgaggcggccgccgtggcggggcctcgggggacggtcgacccccatactcctgctccttctcctctctttgttccccctcagccaggaggagctggggggc

SEQ ID NO: 9968 - DNA, 120 bp, Artificial Sequence
  ENSG00000008300_3 (sequence is synthesized)
ggtgggcaccagggctgggacccaggcttagctgccactacggggccaagggcgcatatcggtggcggagccttagctctttgtccggagtcttccggggtccgggaggatggggggcct

SEQ ID NO: 9969 - DNA, 120 bp, Artificial Sequence
  ENSG00000008300_4 (sequence is synthesized)
ggcctgggggtcagggagcctatcttcgtggggctccgagggagaaggcaaagcgcccggaatagtcgagggccccctgagcagccgaatgaggagctggggattgaacacggcgtccag

SEQ ID NO: 9970 - DNA, 120 bp, Artificial Sequence
  ENSG00000008300_5 (sequence is synthesized)
ccattgggcagccgcgaacgagagacaggacagggaccagggtctgtgttatactggcgcccagaggtctcctcttgcgggcggacaggacctttgcaaagaggtagtctgtcaccaggg

SEQ ID NO: 9971 - DNA, 120 bp, Artificial Sequence
  ENSG00000008300_6 (sequence is synthesized)
gctctgtcctcaggggtcccgggctcggggaacagctcgcccctcccttcagactttttgattcggcaccacggtcccaagccggtgtcctcccagcggaacgctgggacaggctcccgc

SEQ ID NO: 9972 - DNA, 120 bp, Artificial Sequence
  ENSG00000008300_7 (sequence is synthesized)
aaaagagtgggcaccgcgcgctgctgtggggaattatgggcaacagggagcaagggtcagggcgagagagccacgacatccggagcagaaaggacagccccccggcggaactgtcttcca

SEQ ID NO: 9973 - DNA, 120 bp, Artificial Sequence
  ENSG00000008300_8 (sequence is synthesized)
ggggcctcgggatctggccccgagctggattcagcaccacgcacggcgaggacagctcctgcatcaggttcagcaccccgcgagtctcggacagctcccgagccggcgcccaagcgcatg

SEQ ID NO: 9974 - DNA, 120 bp, Artificial Sequence
  ENSG00000008300_9 (sequence is synthesized)
cgctcccggggtctcttccgctgccgcttcctcccgcagcgccccgggccgcgtcccccgggactcccggcccgtcctgaagccaggaaagtaacctcggcgaaccgggcacgctttcgt

SEQ ID NO: 9975 - DNA, 120 bp, Artificial Sequence
  ENSG00000008300_10 (sequence is synthesized)
cgcgccgcaaaccgccacccgcagtttccgcagtacaactaccagacgctggtgccggagaatgaggcagcaggcaccgcggtgctacgcgtggttgctcaggacccggacgccggcgag

SEQ ID NO: 9976 - DNA, 120 bp, Artificial Sequence
  ENSG00000008300_11 (sequence is synthesized)
gccgggcgcctagtctactcgctggcggcactcatgaacagccgctcgctggagctgttcagcatcgacccgcagagcggccttatccgtacggcggcagctctggaccgcgagagcatg

SEQ ID NO: 9977 - DNA, 120 bp, Artificial Sequence
  ENSG00000008300_12 (sequence is synthesized)
gagcgtcactacctgcgtgtgaccgcgcaggaccacgggtcgccgcgcctctcggccaccacgatggtggccgtgacagtagccgaccgcaacgaccactcgccggtttttgagcaagcg

SEQ ID NO: 9978 - DNA, 120 bp, Artificial Sequence
  ENSG00000008300_13 (sequence is synthesized)
cagtaccgggagacccttcgcgagaatgtggaggagggctaccctatcctgcagctgcgtgccactgacggcgacgcgccccccaacgccaacctgcgctaccgcttcgtggggccgcca

SEQ ID NO: 9979 - DNA, 120 bp, Artificial Sequence
  ENSG00000008300_14 (sequence is synthesized)
gctgcgcgcgctgcagctgccgccgccttcgagattgatccacgctccggcctcatcagcaccagcggccgagtggaccgcgagcacatggaaagctatgagctggtggtggaagccagc

SEQ ID NO: 9980 - DNA, 120 bp, Artificial Sequence
  ENSG00000008300_15 (sequence is synthesized)
gaccagggccaggaacccgggccgcgctcggccactgtgcgcgtacacataactgtgctagacgagaacgacaatgctcctcagttcagcgagaagcgctacgtggcgcaggtgcgcgag

SEQ ID NO: 9981 - DNA, 120 bp, Artificial Sequence
  ENSG00000008300_16 (sequence is synthesized)
gatgtgcgcccccacacagtcgtgctgcgcgtcacggccactgaccgggacaaggacgccaacggattggtgcactacaacatcatcagtggcaatagccgtggacactttgccatcgac

SEQ ID NO: 9982 - DNA, 120 bp, Artificial Sequence
  ENSG00000008300_17 (sequence is synthesized)
agcctcactggcgagatccaggtggtggcacctctggacttcgaggcagagagagagtatgccttgcgcatcagggcgcaggatgctggccggccaccgctgtccaacaacacgggcctg

SEQ ID NO: 9983 - DNA, 120 bp, Artificial Sequence
  ENSG00000008300_18 (sequence is synthesized)
gccagcatccaggtggtggacatcaatgaccacattcctatttttgtcagcacgcccttccaagtttctgtcttggaaaatgctcccttgggtcactcagtcatccacattcaggcagtc

SEQ ID NO: 9984 - DNA, 120 bp, Artificial Sequence
  ENSG00000008300_19 (sequence is synthesized)
gatgcagaccatggggagaatgccagattggagtactccctaactggtgtggcacctgatactccttttgtgataaacagcgccactggctgggtctctgtgagtggtcccctggaccgt

SEQ ID NO: 9985 - DNA, 120 bp, Artificial Sequence
  ENSG00000008300_20 (sequence is synthesized)
gagtctgtggagcattacttctttggtgtggaggctcgagaccatggctcacccccactctctgcctcagccagtgtcaccgtgactgtgctggacgttaatgacaatcggcctgagttc

SEQ ID NO: 9986 - DNA, 120 bp, Artificial Sequence
  ENSG00000008300_21 (sequence is synthesized)
acaatgaaggagtaccacctacgactgaatgaggatgcagctgtgggcaccagtgtggtcagcgtgaccgcagtagaccgtgatgccaacagtgccatcagctaccagatcacaggcggc

SEQ ID NO: 9987 - DNA, 120 bp, Artificial Sequence
  ENSG00000008300_22 (sequence is synthesized)
aacacccggaatcgctttgccatcagcacccaggggggtgtgggtctggtgactctggctctgccactggactacaagcaggaacgctacttcaagctggtactaactgcatctgaccgt

SEQ ID NO: 9988 - DNA, 120 bp, Artificial Sequence
  ENSG00000008300_23 (sequence is synthesized)
gcccttcatgatcactgctatgtgcacatcaacatcacagatgccaacactcatcggccggtctttcaaagtgcccactactcagtgagtgtgaatgaagatcggccaatgggtagcacc

SEQ ID NO: 9989 - DNA, 120 bp, Artificial Sequence
  ENSG00000008300_24 (sequence is synthesized)
atagtggtcatcagtgcctctgatgatgacgtgggtgagaatgctcgtatcacctatctcctggaggacaacctgccccagttccgcattgatgcagactcaggagccattacattacag

SEQ ID NO: 9990 - DNA, 120 bp, Artificial Sequence
  ENSG00000008300_25 (sequence is synthesized)
gccccattagactatgaggaccaggtgacctacaccctggctatcacagctcgggacaatggcatcccacagaaggcagacactacttatgtggaggtgatggtcaatgacgtgaatgac

SEQ ID NO: 9991 - DNA, 120 bp, Artificial Sequence
  ENSG00000008300_26 (sequence is synthesized)
aatgctccacaatttgtggcctcccactatacagggctggtctctgaggatgccccacctttcaccagtgtcctgcagatctcagccactgaccgggatgctcatgccaatggccgggtc

SEQ ID NO: 9992 - DNA, 120 bp, Artificial Sequence
  ENSG00000008300_27 (sequence is synthesized)
cagtacactttccagaatggtgaagatggggatggagattttaccattgagcccacctctggaattgtccgtacagtaaggcggctagaccgggaggcagtatcagtgtatgagttgact

SEQ ID NO: 9993 - DNA, 120 bp, Artificial Sequence
  ENSG00000008300_28 (sequence is synthesized)
gcctacgcagtggacagaggtgtgcccccactccggactccagtcagtatccaggtgatggtgcaggatgtgaacgacaatgcacctgtcttcccagctgaggagtttgaggtgcgggtg

SEQ ID NO: 9994 - DNA, 120 bp, Artificial Sequence
  ENSG00000008300_29 (sequence is synthesized)
aaagagaatagcattgtgggctcagtggtggcccagatcactgcagtggaccctgacgaaggccccaatgcccatataatgtaccagatcgtggaggggaacatccctgagctgttccaa

SEQ ID NO: 9995 - DNA, 120 bp, Artificial Sequence
  ENSG00000008300_30 (sequence is synthesized)
atggacatcttctctggagaactgacggcactcattgacctagactatgaggctcgccaagaatatgtgattgtggtgcaggccacatctgctcctttggtcagccgggccactgtgcac

SEQ ID NO: 9996 - DNA, 120 bp, Artificial Sequence
  ENSG00000008300_31 (sequence is synthesized)
gtccgcctggttgaccagaatgacaacagccctgtgctcaacaacttccagatcctcttcaacaactatgtatccaaccgttcagacaccttcccgtcgggcattattgggcgcatccca

SEQ ID NO: 9997 - DNA, 120 bp, Artificial Sequence
  ENSG00000008300_32 (sequence is synthesized)
gcttatgaccccgatgtctccgaccacctcttctactcctttgagcgtggcaatgagctgcagctgctggtagtcaaccagaccagtggggagctgcgactcagccgaaagctagacaat

SEQ ID NO: 9998 - DNA, 120 bp, Artificial Sequence
  ENSG00000008300_33 (sequence is synthesized)
aaccgcccactggtggcctccatgttggtgactgtcacagatggcctgcacagcgtgacggcgcagtgtgtgctgcgcgtggtcatcatcacggaggagttgctggccaacagcctgacc

SEQ ID NO: 9999 - DNA, 120 bp, Artificial Sequence
  ENSG00000008300_34 (sequence is synthesized)
gtgcgccttgagaacatgtggcaggagcgcttcctgtcaccgctgctgggccgcttcctcgagggcgtggctgcggtgctcgctacgcccgctgaggacgtcttcatcttcaacatccag

SEQ ID NO: 10000 - DNA, 120 bp, Artificial Sequence
  ENSG00000008300_35 (sequence is synthesized)
aacgacacagacgtagggggcaccgtgctcaatgtgagtttctcggcgctagctccacgtggggccggggcgggcgctgcagggccctggttcagctccgaggagctgcaggagcagttg

SEQ ID NO: 10001 - DNA, 120 bp, Artificial Sequence
  ENSG00000008300_36 (sequence is synthesized)
tacgtgcgccgggcggcgctggcggctcgctccctgctcgacgtactgcccttcgacgacaacgtgtgcctgcgagagccctgtgagaactacatgaaatgcgtgtccgtgctccgcttt

SEQ ID NO: 10002 - DNA, 120 bp, Artificial Sequence
  ENSG00000008300_37 (sequence is synthesized)
gactcgtccgcgcccttcctggcctcggcctccacgctgttccgacccatccagcccatcgctggcctgcgctgccgctgcccgcccggattcacgggagacttttgcgagaccgagctc

SEQ ID NO: 10003 - DNA, 120 bp, Artificial Sequence
  ENSG00000008300_38 (sequence is synthesized)
gacctctgctactccaacccatgtcgcaacggcggagcctgcgcgcggcgcgagggaggctacacgtgcgtctgccgcccgcgcttcaccggagaggactgcgagctggacaccgaggcc

SEQ ID NO: 10004 - DNA, 120 bp, Artificial Sequence
  ENSG00000008300_39 (sequence is synthesized)
ccgggcgtctgccgcaacgggggcacctgcaccgacgcgcccaacggcggctttcgctgccagtgcccggcaggcggcgccttcgagggcccgcgctgcgaggtggctgcgcgctccttc

SEQ ID NO: 10005 - DNA, 120 bp, Artificial Sequence
  ENSG00000008300_40 (sequence is synthesized)
gcgcgctccttcccgcccagttcgttcgtcatgtttcgcggcctgcggcagcgattccaccttacgctgtccctctcgttcgcgacagtgcagcagagcgggctgctcttctacaacggg

SEQ ID NO: 10006 - DNA, 120 bp, Artificial Sequence
  ENSG00000008300_41 (sequence is synthesized)
cgcctgaacgagaagcacgacttcctggccctggaactcgtggctggccaagtgcggctcacatattccacgggtgaatccaacaccgtggtcagccccacagttccagggggcttgagt

SEQ ID NO: 10007 - DNA, 120 bp, Artificial Sequence
  ENSG00000008300_42 (sequence is synthesized)
gacgggcaatggcatacagtgcatctgagatactacaacaagccccggacagatgccctagggggtgcacagggcccctccaaggacaaggtggctgtgctaagcgtggatgattgtgat

SEQ ID NO: 10008 - DNA, 120 bp, Artificial Sequence
  ENSG00000008300_43 (sequence is synthesized)
gtggccgtggctctgcagtttggtgctgagattggcaactactcatgcgcggctgctggtgtgcaaacaagctccaagaagtccctggacctgacgggccctcttcttctgggaggtgtc

SEQ ID NO: 10009 - DNA, 120 bp, Artificial Sequence
  ENSG00000008300_44 (sequence is synthesized)
cccaacctccccgagaacttccccgtatcccataaggacttcatcggctgtatgcgggacctgcacattgatggccgccgagtggacatggcggcttttgtcgcaaataatggcaccatg

SEQ ID NO: 10010 - DNA, 120 bp, Artificial Sequence
  ENSG00000008300_45 (sequence is synthesized)
gcaggctgccaagccaagctacacttttgtgactcaggcccctgcaagaacagtggcttctgctcggagcgctggggcagcttcagctgcgactgccctgtgggcttcggcggcaaagac

SEQ ID NO: 10011 - DNA, 120 bp, Artificial Sequence
  ENSG00000008300_46 (sequence is synthesized)
tgtcagcttactatggcccatccccaccatttccgtggcaacggcacactgagctggaactttggaagtgacatggctgtgtctgtgccatggtacctggggctggcatttcggacacgg

SEQ ID NO: 10012 - DNA, 120 bp, Artificial Sequence
  ENSG00000008300_47 (sequence is synthesized)
gcaacgcagggggtcctgatgcaagtgcaggctgggccacacagcacgctcctttgccagctagatcgggggttactgtctgtgacagtgaccaggggctcgggccgtgcttcccatctc

SEQ ID NO: 10013 - DNA, 120 bp, Artificial Sequence
  ENSG00000008300_48 (sequence is synthesized)
cttctggaccaggtgactgtcagtgatggccggtggcacgatctgcggctggagttgcaggaggaaccaggtggccggcggggccaccatgtccttatggtctcactggactttagcctc

SEQ ID NO: 10014 - DNA, 120 bp, Artificial Sequence
  ENSG00000008300_49 (sequence is synthesized)
gctccacgtgggaggcctgccccccggcagtgcagaggaggctcctcagggtctggttggctgcatccagggggtgtggctcggctccacaccctctggctccccggccctgctaccccc

SEQ ID NO: 10015 - DNA, 120 bp, Artificial Sequence
  ENSG00000008300_50 (sequence is synthesized)
cagccaccgagtgaatgcggagcctggctgtgttgtgaccaacgcctgtgcctctgggccctgcccacctcacgcagactgccgggacctctggcagaccttttcttgcacctgccagcc

SEQ ID NO: 10016 - DNA, 120 bp, Artificial Sequence
  ENSG00000008300_51 (sequence is synthesized)
aggttactacggcccaggctgtgtggatgcctgcctcctgaacccctgtcagaaccagggatcatgccggcacctgccaggagccccccatggctatacctgtgactgtgtgggtggcta

SEQ ID NO: 10017 - DNA, 120 bp, Artificial Sequence
  ENSG00000008300_52 (sequence is synthesized)
tttcgggcaccactgtgagcacaggatggaccagcagtgcccacggggctggtgggggagcccaacctgtggcccctgcaactgtgatgttcacaaaggttttgatcccaactgcaacaa

SEQ ID NO: 10018 - DNA, 120 bp, Artificial Sequence
  ENSG00000008300_53 (sequence is synthesized)
gacaaatgggcagtgtcactgcaaggagttccactaccgaccgcggggcagtgactcttgcctcccatgtgactgctaccctgtgggctccacctcgcgctcatgtgcaccccacagcgg

SEQ ID NO: 10019 - DNA, 120 bp, Artificial Sequence
  ENSG00000008300_54 (sequence is synthesized)
gcagtgcccctgtcgcccaggagcccttggccgccagtgcaacagctgtgacagtcccttcgcagaggtgacagccagcggctgccgggtgctctatgatgcctgccctaagtccctgag

SEQ ID NO: 10020 - DNA, 120 bp, Artificial Sequence
  ENSG00000008300_55 (sequence is synthesized)
atctggtgtgtggtggccccagacaaagtttggcgtcctggccacagtgccctgtccccggggggccctgggtgctgctgtgcggctgtgtgatgaggcccagggttggctggagcccga

SEQ ID NO: 10021 - DNA, 120 bp, Artificial Sequence
  ENSG00000008300_56 (sequence is synthesized)
cctcttcaactgtacctcccctgcctttcgagagctcagtctgctgctggatggcctagagctgaacaagacggcactggataccatggaggccaagaagctggctcagcggctacggga

SEQ ID NO: 10022 - DNA, 120 bp, Artificial Sequence
  ENSG00000008300_57 (sequence is synthesized)
ggtgactggccacactgaccactattttagccaagatgttcgagtcactgcccgcctgctggcccacctgctggccttcgagagccatcagcagggcttcgggctgacagccacacagga

SEQ ID NO: 10023 - DNA, 120 bp, Artificial Sequence
  ENSG00000008300_58 (sequence is synthesized)
tgcccacttcaatgagaatctgctgtgggccggctctgcactgcttgccccagagacaggggacttgtgggcggcgctggggcagcgggcccctgggggctccccaggcagcgcgggact

SEQ ID NO: 10024 - DNA, 120 bp, Artificial Sequence
  ENSG00000008300_59 (sequence is synthesized)
ggtgaggcacctggaggagtatgcagccacactcgcaaggaatatggaactcacatacctgaatcccatggggctggtgacgcctaatatcatgctcagcattgaccgcatggagcaccc

SEQ ID NO: 10025 - DNA, 120 bp, Artificial Sequence
  ENSG00000008300_60 (sequence is synthesized)
cagttctccccggggggcccgtcgctaccctcgctaccatagcaacctctttcgaggccaggatgcctgggatcctcacacccatgtgctgctgccttcccagtccccacggccatcccc

SEQ ID NO: 10026 - DNA, 120 bp, Artificial Sequence
  ENSG00000008300_61 (sequence is synthesized)
atctgaagttctgcccacaagcagcagcatagaaaactccaccacctcaagtgtggtccccccaccagccccgccagagccagagcctgggatctccattatcattctcctcgtttaccg

SEQ ID NO: 10027 - DNA, 120 bp, Artificial Sequence
  ENSG00000008300_62 (sequence is synthesized)
caccttagggggactgctccctgcccagttccaggcagaacgccgaggtgccaggcttcctcagaaccccgtcatgaactccccggtggtcagcgtggctgtgttccacggacgcaactt

SEQ ID NO: 10028 - DNA, 120 bp, Artificial Sequence
  ENSG00000008300_63 (sequence is synthesized)
cctaaggggaatcctggagtcccccatcagcctagagtttcgcctgctacagacagcgaatcggagcaaggcgatctgtgtgcagtgggacccacctggcctggcggagcagcatggtgt

SEQ ID NO: 10029 - DNA, 120 bp, Artificial Sequence
  ENSG00000008300_64 (sequence is synthesized)
gtggacagcacgggactgcgagctggtgcacaggaatgggtcccacgcacggtgtcgctgcagccggacagggacctttggggtcctcatggatgcctctccccgtgagaggctggaggg

SEQ ID NO: 10030 - DNA, 120 bp, Artificial Sequence
  ENSG00000008300_65 (sequence is synthesized)
cgacctggagctgctggctgtgttcacccacgtggtcgtggctgtgtctgtggctgcgctggtgctgactgcagccatcctgctgagcctgcgcagcctcaagtccaatgtgcgtgggat

SEQ ID NO: 10031 - DNA, 120 bp, Artificial Sequence
  ENSG00000008300_66 (sequence is synthesized)
ccatgccaatgtggcagccgccctgggggtggcagagctcctcttcctgctggggattcacaggacccacaatcagctggtgtgcactgcagtcgccatcctcctgcactacttcttcct

SEQ ID NO: 10032 - DNA, 120 bp, Artificial Sequence
  ENSG00000008300_67 (sequence is synthesized)
cagcaccttcgcgtggctcttcgtgcaggggctgcacctctaccgcatgcaggttgagccacgcaacgtggaccgcggcgccatgcgcttctaccatgccctgggctggggcgtccctgc

SEQ ID NO: 10033 - DNA, 120 bp, Artificial Sequence
  ENSG00000008300_68 (sequence is synthesized)
tgtgctgctgggccttgctgtgggcctggaccctgagggctatgggaaccctgacttctgctggatctcagtccacgagcccctcatctggagctttgctggccctgttgtcctggtcat

SEQ ID NO: 10034 - DNA, 120 bp, Artificial Sequence
  ENSG00000008300_69 (sequence is synthesized)
agtgatgaacgggaccatgtttctcctcgctgcccgcacatcctgctccacagggcagagggaggccaagaagacctctgcactgacccttcgcagctccttcctgctgcttctgctggt

SEQ ID NO: 10035 - DNA, 120 bp, Artificial Sequence
  ENSG00000008300_70 (sequence is synthesized)
cagtgcctcctggctctttgggctcctggcagtcaaccacagcatcctagccttccactacctccatgctggactctgcggcctccagggcctggcggtgctgctgctcttctgtgtcct

SEQ ID NO: 10036 - DNA, 120 bp, Artificial Sequence
  ENSG00000008300_71 (sequence is synthesized)
aaatgcagatgctcgggctgcctggatgccagcctgtctgggcaggaaggcagcgcctgaggaggcaaggccagcacctgggctgggacctggggcctacaacaacacggctctctttga

SEQ ID NO: 10037 - DNA, 120 bp, Artificial Sequence
  ENSG00000008300_72 (sequence is synthesized)
ggagagtggcctcatccgcatcactctgggcgcctccaccgtctcctctgtgagcagtgcccgctccggccggacccaggaccaggacagccagcggggccgcagctacctcagggacaa

SEQ ID NO: 10038 - DNA, 120 bp, Artificial Sequence
  ENSG00000008300_73 (sequence is synthesized)
tgtcctggttcgacatggctcagccgctgaccacactgaccacagcctccaggctcatgctggccccactgacctggacgtggccatgttccatcgagatgctggcgcagactccgactc

SEQ ID NO: 10039 - DNA, 120 bp, Artificial Sequence
  ENSG00000008300_74 (sequence is synthesized)
tgacagtgacctgtccttggaggaggagaggagtctctccattccatcttcagaaagcgaggacaatggccggacgcgggggcgcttccaacggccactctgccgagcagcccagagtga

SEQ ID NO: 10040 - DNA, 120 bp, Artificial Sequence
  ENSG00000008300_75 (sequence is synthesized)
gaggctcctcacccaccccaaagatgtggatggcaatgacctcctgtcctactggccagccctgggggagtgcgaggcagccccctgtgctctgcagacttggggctctgaaaggcgcct

SEQ ID NO: 10041 - DNA, 120 bp, Artificial Sequence
  ENSG00000008300_76 (sequence is synthesized)
ggggctggacaccagcaaggatgcagctaacaacaaccagccagacccggccctgaccagtggggatgagacttctctgggccgggcccagcgccagaggaaaggcatcctgaagaaccg

SEQ ID NO: 10042 - DNA, 120 bp, Artificial Sequence
  ENSG00000008300_77 (sequence is synthesized)
gttgcaatacccactggtgccacagacccgaggtgcccctgagctgtcctggtgccgtgcagccaccttgggccaccgtgctgtgccagctgcctcttacggtcgcatctatgctggcgg

SEQ ID NO: 10043 - DNA, 120 bp, Artificial Sequence
  ENSG00000008300_78 (sequence is synthesized)
gggcacgggcagcctttcacagccagccagccgctactcttctagagaacagctggacctgctcctccggcggcaactgagccgtgagcgactagaggaagcccctgcccctgttctacg

SEQ ID NO: 10044 - DNA, 120 bp, Artificial Sequence
  ENSG00000008300_79 (sequence is synthesized)
tcccctgagccggccagggtcccaggaatgcatggatgctgcaccaggccgactggagcccaaagatcggggcagcaccctgccacggaggcagccacctcgggactaccctggcgccat

SEQ ID NO: 10045 - DNA, 120 bp, Artificial Sequence
  ENSG00000008300_80 (sequence is synthesized)
ggctggccgcttcgggtcacgggatgcgctcgacttaggggcacctcgagagtggttgagcacgctgcctccgccccgccgcacccgggaccttgacccacagcccccacctctgcccct

SEQ ID NO: 10046 - DNA, 120 bp, Artificial Sequence
  ENSG00000008300_81 (sequence is synthesized)
gtctccccagcggcaactctcaagggaccccctcttgccatcccggccgctggactctctgtctaggagctcgaactctcgggagcagctggaccaggtgcctagccggcacccctcacg

SEQ ID NO: 10047 - DNA, 120 bp, Artificial Sequence
  ENSG00000008300_82 (sequence is synthesized)
agaagcccttgggccactcccgcagctgctcagagctagggaggactcggtcagtggccccagccatggcccctccacagaacagttggacattctttcctccatccttgcctctttcaa

SEQ ID NO: 10048 - DNA, 120 bp, Artificial Sequence
  ENSG00000008300_83 (sequence is synthesized)
ctcctcggccctctcctctgtgcaatcttcaagcacacccttgggccctcacaccactgccacaccttctgccacagcctctgtgcttgggccctccacgccacgttctgccacgtctca

SEQ ID NO: 10049 - DNA, 120 bp, Artificial Sequence
  ENSG00000008300_84 (sequence is synthesized)
cagcatctcggagctgtcgccagactcagaagttcccagaagtgagggtcactcctgaggggatgacggcgtggacgaggaacagctgagggcgacagaggatctaggctaacaggagag

SEQ ID NO: 10050 - DNA, 120 bp, Artificial Sequence
  ENSG00000008300_85 (sequence is synthesized)
actccaggagtgggggcagatcccaaggcagcctcctgctccccagtggtgggtgccccagctctacctggtgtggcagggctgaggctccatgtgcatctgtgagcatgcgtgtgacag

SEQ ID NO: 10051 - DNA, 120 bp, Artificial Sequence
  ENSG00000008300_86 (sequence is synthesized)
gtgcagagacgggggactggagggagacttttatacgttttgtacctttgtaaccagagagatgcttatgttatttttcagcttttctgtctcctggggggtttgaggctgggctgggag

SEQ ID NO: 10052 - DNA, 120 bp, Artificial Sequence
  ENSG00000008300_87 (sequence is synthesized)
ggggagggagatagagggagagatgcagtttgaccccatttgggtcctgagcaaaccctatgctcatctctctctccttcctggggtggactcagatgggtgggacacatgccttcctcc

SEQ ID NO: 10053 - DNA, 120 bp, Artificial Sequence
  ENSG00000008300_88 (sequence is synthesized)
ccctattccacccccaagttgatctgagtatcgtcaggggcccaaagtacagaattgttctttgctttttattgaatgctccaaaggccaaacttctggggctgggggttggtcttggaa

SEQ ID NO: 10054 - DNA, 120 bp, Artificial Sequence
  ENSG00000008300_89 (sequence is synthesized)
acaggggtcctctgacttcctcatgggggcttgctcataccgcccctcctggtggatgtgtgtgtttattatgtggagtccctgccacttactgccttatgacctaggactgatgctgtg

SEQ ID NO: 10055 - DNA, 120 bp, Artificial Sequence
  ENSG00000008300_90 (sequence is synthesized)
gggtgctggtggagcagctgatgtcgtgtttacagagcaaggcttccctgtctcccacggggaggggctcgggcctctagtcagacattcctgcagagggtcggtggaggggtcattcac

SEQ ID NO: 10056 - DNA, 120 bp, Artificial Sequence
  ENSG00000008300_91 (sequence is synthesized)
ctgcccctgcagcaagcaaaagttgtctgtggtgccatttgattccctgacactgccccctgcttgaattgattccgaagggtagggtgggaaggtgagcaaagggagcagaaacaaggg

SEQ ID NO: 10057 - DNA, 120 bp, Artificial Sequence
  ENSG00000008300_92 (sequence is synthesized)
aattcaagacccagaatgtaggtgccactgcctcctatgtttacaggatcctccgtggccctaggcacctgggctgcaggaagtgactccgttccactcctcctttattcccttaaaaag

SEQ ID NO: 10058 - DNA, 120 bp, Artificial Sequence
  ENSG00000008300_93 (sequence is synthesized)
ggaaaaatgactgttacgaccctgttcacaaaactcttacttttgctattttgtctgctgtccagaactgaagactttaaaattttgttactgtttacaagtccagattcaaaaaatgtt

SEQ ID NO: 10059 - DNA, 120 bp, Artificial Sequence
  ENSG00000008300_94 (sequence is synthesized)
tttactttgtttacaactcaaaactttgagttttacactttgtttacagtagataattttttttcctttgtttccaagtgaaaggtagggaaagtgggagagggacttggaggacccacc

SEQ ID NO: 10060 - DNA, 120 bp, Artificial Sequence
  ENSG00000008300_95 (sequence is synthesized)
tgtgaggaccctgacctggccatcttgaggggttttctaacccccaggtctcccaggccgaaggtcagccttgagtcccgtttaacagcagatccagaagaccttgagagtaggcgtcct

SEQ ID NO: 10061 - DNA, 120 bp, Artificial Sequence
  ENSG00000008300_96 (sequence is synthesized)
ctaaccacgggggagagtggctgtgcagggctggggggtggtctgtgcagacacctcctcacccaccaccccatgcatactcttgggaagcagcttcctgggagattagaaattctactt

SEQ ID NO: 10062 - DNA, 120 bp, Artificial Sequence
  ENSG00000008300_97 (sequence is synthesized)
ccctgactggagctaaatcccaccagccaggacccaaactctccttaccgagaaggaccccagctcttgaagggctgagtggcctgctgggggtgggagggtgtctttactatgtcctag

SEQ ID NO: 10063 - DNA, 120 bp, Artificial Sequence
  ENSG00000008300_98 (sequence is synthesized)
gtttcgtagatgcccctctctggggttcccctcctccagcccagcggccctctttcctgtctgtgtaaattgttccgtgaagccgcgctctgttttgggaataaacttctatagaaaaca

SEQ ID NO: 10064 - DNA, 120 bp, Artificial Sequence
  ENSG00000008300_99 (sequence is synthesized)
cttccgtgccctcccttgtggctcccatacccctgtgttttccccacgtgtcctcatggctctttgactgctctcctgtttctttgtgggacctcccatctcccccagtgtcctccagag

SEQ ID NO: 10065 - DNA, 120 bp, Artificial Sequence
  ENSG00000008300_100 (sequence is synthesized)
acctccatgttcccgtgtgagttcctttttttcacgtttcgtgtgtggcccctgtgtgtcctcccgtgttccctgcatgagtcctacatgagccttgcatgtcctcctgtgtcttcccat

SEQ ID NO: 10066 - DNA, 120 bp, Artificial Sequence
  ENSG00000008300_101 (sequence is synthesized)
gactctgcggcctccaggtgactctggtgcccctcccttgccccagaaccaggtgggccttcagtaggctggggccatccctaggcagacgttgaccctaggcctggagctgactcttac

SEQ ID NO: 10067 - DNA, 120 bp, Artificial Sequence
  ENSG00000008300_102 (sequence is synthesized)
tggataactttgccaggctgggtactaccccagaccagacactggccctagctgctgcccccaggcctggagctgactctaacttaggcactgatcccagactgagtgctgatcttggat

SEQ ID NO: 10068 - DNA, 120 bp, Artificial Sequence
  ENSG00000008300_103 (sequence is synthesized)
cgaccttcaccaacaccaaggctcccgaccccttgctgatccacaccgaccttacagactccagccactcctgctgctccatcctctcccctgctgaccttccccaactcccttactgag

SEQ ID NO: 10069 - DNA, 120 bp, Artificial Sequence
  ENSG00000008300_104 (sequence is synthesized)
tcccgcatgggctcctcactgacccacactagcctacagtgactgaccccattgctgacccacagtgacttatactggtccctgattgatccctgccgactctgctttgaccctcgctga

SEQ ID NO: 10070 - DNA, 120 bp, Artificial Sequence
  ENSG00000008300_105 (sequence is synthesized)
gctggtgagtcgggatgggggccctgagaagccagagttttaggctgcttcagggttagctcacactctgtccctaccacccccagggacctggggcctacaacaacacggctctctttg

SEQ ID NO: 10071 - DNA, 120 bp, Artificial Sequence
  ENSG00000008300_106 (sequence is synthesized)
ggggcagggaggagggaggcagaggatctctccccatccccttttcttctaccccatactgggagcagtggctgactggggtgggacgatctcccccagggtccctgcctcaggaggcac

SEQ ID NO: 10072 - DNA, 120 bp, Artificial Sequence
  ENSG00000008300_107 (sequence is synthesized)
ctacctctccagccctggttctcccagtccactcctgattcgtccttccctctgataagtcccagcccttctgctgctacctccacttcaagccccggttcctgtccccaaccctaaccc

SEQ ID NO: 10073 - DNA, 120 bp, Artificial Sequence
  ENSG00000008300_108 (sequence is synthesized)
cgcagacacgctgggggctgctcatgccctgagccaagggattgcagcttcctcatcccaaactgagagctcttcttactctgacctagggcgcttctgcttctctagcctgcttcacgg

SEQ ID NO: 10074 - DNA, 120 bp, Artificial Sequence
  ENSG00000008300_109 (sequence is synthesized)
tcctcagggactgctcctgtcctgacctgggaattctctgtccccctctaccctggccagcaccacagggggaccacaggcgaccactcctgccccagcccatctgtttttcagagaccc

SEQ ID NO: 10075 - DNA, 120 bp, Artificial Sequence
  ENSG00000008300_110 (sequence is synthesized)
taggagctgcttccccctgccccccacccagatcccagagcccgtgctctgatctggaagatttctgccccctactctgcttttatggggacccggagaagaggtttctgccctcaccct

SEQ ID NO: 10076 - DNA, 120 bp, Artificial Sequence
  ENSG00000008300_111 (sequence is synthesized)
tgcatcacagggacctggggactgctcctgtccaacccggggggttcctgcatttcagccaggcctgcattgtcaggacctgagggctgcccctcttctgacctcagggagtttgcccca

SEQ ID NO: 10077 - DNA, 120 bp, Artificial Sequence
  ENSG00000008300_112 (sequence is synthesized)
tcccctgcaccatgagacctgcccgccctccccctgccccgggaccacaactggaagatgactgcccttccactctgacccctgtcctgctgcctctctgggaccaccagggttgcctct

SEQ ID NO: 10078 - DNA, 120 bp, Artificial Sequence
  ENSG00000008300_113 (sequence is synthesized)
tcctgctcccatccctgtgttggaaggatcccaagggctgccacacccctagactcagcaattcctgcctgccctccccctcccacacaaaccctgccccccattttcttcctctcacag

SEQ ID NO: 10079 - DNA, 120 bp, Artificial Sequence
  ENSG00000008311_0 (sequence is synthesized)
cctcagatttctcaggagaccagaactgatctgccagccttgctgccttttgttgctctgctctttacattgtctttacagtcaccaggtgtcaagatgctgcaagtacataggactgga

SEQ ID NO: 10080 - DNA, 120 bp, Artificial Sequence
  ENSG00000008311_1 (sequence is synthesized)
ctgggcaggctgggggtcagcctctccaagggtcttcaccacaaagctgtgttggccgtccggagggaggatgtgaacgcctgggagagaagggccccgctagctcccaagcacatcaaa

SEQ ID NO: 10081 - DNA, 120 bp, Artificial Sequence
  ENSG00000008311_2 (sequence is synthesized)
ggcatcaccaatctgggatacaaggtcttgatacagccttcgaatcggcgggccattcatgataaggactatgtcaaagctggtggcattcttcaggaggatatttctgaagcttgtcta

SEQ ID NO: 10082 - DNA, 120 bp, Artificial Sequence
  ENSG00000008311_3 (sequence is synthesized)
attttaggagttaaaagacctccagaggaaaaattaatgtccaggaagacttatgcatttttctcccacacaataaaagctcaggaggccaatatgggcttgttggatgagattctaaaa

SEQ ID NO: 10083 - DNA, 120 bp, Artificial Sequence
  ENSG00000008311_4 (sequence is synthesized)
caggaaattcgccttattgattatgagaaaatggtggatcatagaggagtacgggtagtggcatttggacagtgggctggtgtggcaggaatgatcaacattttacatggaatgggttta

SEQ ID NO: 10084 - DNA, 120 bp, Artificial Sequence
  ENSG00000008311_5 (sequence is synthesized)
aggctccttgctttgggacatcacacaccttttatgcacattggcatggctcataactacaggaatagcagtcaggctgtgcaagctgtccgtgatgctggctatgaaatatctttgggt

SEQ ID NO: 10085 - DNA, 120 bp, Artificial Sequence
  ENSG00000008311_6 (sequence is synthesized)
ttgatgcctaagtcaataggacccttaacatttgtgttcacaggaactggtaatgtttctaagggagcccaagcaatctttaatgagctaccttgtgaatatgtggagccccatgaatta

SEQ ID NO: 10086 - DNA, 120 bp, Artificial Sequence
  ENSG00000008311_7 (sequence is synthesized)
aaagaagtttcccaaactggagacctcagaaaagtgtatgggacggtgttaagtcgtcatcatcatcttgtcaggaaaacagatgctgtgtatgatcctgcagagtatgacaaacatccg

SEQ ID NO: 10087 - DNA, 120 bp, Artificial Sequence
  ENSG00000008311_8 (sequence is synthesized)
gagcgctacataagtcgttttaatactgatattgcaccctatacaacttgcttaattaatggaatctactgggaacaaaacactcctcgcctcctaacccgccaagatgctcagagtctc

SEQ ID NO: 10088 - DNA, 120 bp, Artificial Sequence
  ENSG00000008311_9 (sequence is synthesized)
ctggctccgggcaagttctcacctgctggtgtggaaggctgccctgcattaccacacaaactcgtggcaatatgtgacatttcagctgacacaggagggtctatagagtttatgactgag

SEQ ID NO: 10089 - DNA, 120 bp, Artificial Sequence
  ENSG00000008311_10 (sequence is synthesized)
tgtacaacaatagagcatcccttttgcatgtatgatgcagaccagcatattattcatgacagtgttgaaggctcggggatcctgatgtgttccattgacaatttgccggcacagctccca

SEQ ID NO: 10090 - DNA, 120 bp, Artificial Sequence
  ENSG00000008311_11 (sequence is synthesized)
attgaagctacagaatgctttggagacatgctttacccttatgttgaagaaatgatattatcagacgcgacacagcctcttgaaagtcagaatttttctcctgtggtgagagatgcagtg

SEQ ID NO: 10091 - DNA, 120 bp, Artificial Sequence
  ENSG00000008311_12 (sequence is synthesized)
attacatccaacggtacattacctgataaatataaatatatccagacactccgggagagcagggaacgtgctcagtcactttcaatgggcaccaggagaaaggttttggttcttggatct

SEQ ID NO: 10092 - DNA, 120 bp, Artificial Sequence
  ENSG00000008311_13 (sequence is synthesized)
taatcctgttagcatggacatttgtaaacaagaagagaagctgggcttcttggtggcaaaacaggatcttgtcatcagcttgttgccttatgtattgcaccctcttgtggccaaggcctg

SEQ ID NO: 10093 - DNA, 120 bp, Artificial Sequence
  ENSG00000008311_14 (sequence is synthesized)
catcacaaacaaagttaacatggtcactgcaagctacatcacaccagcactaaaagaattggaaaagagtgtggaagatgctggcatcacaatcattggtgaattgggattggaccctgg

SEQ ID NO: 10094 - DNA, 120 bp, Artificial Sequence
  ENSG00000008311_15 (sequence is synthesized)
tctggatcacatgttagcaatggaaacaatagataaagccaaggaagtgggagccacgattgaatcatatatttcctactgtggtgggcttccagcccctgaacattcaaacaatccatt

SEQ ID NO: 10095 - DNA, 120 bp, Artificial Sequence
  ENSG00000008311_16 (sequence is synthesized)
gagatataaatttagctggagtccagtgggagttttgatgaatgtaatgcagtctgccacctatctgctcgatggaaaggttgtgaatgttgcaggaggcatctcctttcttgatgccgt

SEQ ID NO: 10096 - DNA, 120 bp, Artificial Sequence
  ENSG00000008311_17 (sequence is synthesized)
tacgtccatggatttttttccaggattaaatttggaaggctatcctaacagagacagtacgaaatatgctgagatttatggcatttcttctgctcacactttgttgcgggggacactgag

SEQ ID NO: 10097 - DNA, 120 bp, Artificial Sequence
  ENSG00000008311_18 (sequence is synthesized)
atataagggatatatgaaagctttgaatggatttgtaaaattaggtcttataaacagagaagcgcttcctgcctttagacctgaggccaaccctctcacctggaaacaactcctctgtga

SEQ ID NO: 10098 - DNA, 120 bp, Artificial Sequence
  ENSG00000008311_19 (sequence is synthesized)
cctagttgggatttcaccctcctctgagcatgatgtgttgaaggaagctgttcttaagaaactaggaggagacaatacccagttggaggctgctgaatggttgggcttacttggggatga

SEQ ID NO: 10099 - DNA, 120 bp, Artificial Sequence
  ENSG00000008311_20 (sequence is synthesized)
acaagttcctcaggcagagtccattctggatgccctctccaagcatttggtcatgaagctttcctatggtcctgaagaaaaagatatgattgtgatgagagacagctttggaatcagaca

SEQ ID NO: 10100 - DNA, 120 bp, Artificial Sequence
  ENSG00000008311_21 (sequence is synthesized)
tccttctggacatttagaacataaaacgattgatcttgtggcttatggggacatcaatggcttttcagccatggctaaaaccgtggggttacccaccgccatggcagccaaaatgttgct

SEQ ID NO: 10101 - DNA, 120 bp, Artificial Sequence
  ENSG00000008311_22 (sequence is synthesized)
tgatggtgaaattggagccaaaggcctaatggggcccttttcaaaggagatctatggaccaatattggagcgaattaaagcagaaggcattatatatactacacagagtacaattaaacc

SEQ ID NO: 10102 - DNA, 120 bp, Artificial Sequence
  ENSG00000008311_23 (sequence is synthesized)
ataattgggaattatattttgtttttttcttcccaggcaatacacctctgaacatgtgtgtgataaatgggtttgctaatgtgctgttttaaagtataaagcataatatgttttggttaa

SEQ ID NO: 10103 - DNA, 120 bp, Artificial Sequence
  ENSG00000008311_24 (sequence is synthesized)
cacaatgtactttttgaactataaatctttattttaatatggaaatgtttggaacaggagatgcaagccactaacagagaactttaataattctaccctgtattttataaatacgtatgt

SEQ ID NO: 10104 - DNA, 80 bp, Artificial Sequence
  ENSG00000008311_25 (sequence is synthesized)
actttaataattctaccctgtattttataaatacgtatgtgaaagtgatgatcatgctatttgttaatttattgtgccag

SEQ ID NO: 10105 - DNA, 120 bp, Artificial Sequence
  ENSG00000008311_26 (sequence is synthesized)
agtttcttctaggaattcggagcctcccctgcagcgactcggaagattcgaggcggcgggggacaagtcggcgccccagagcggacgagtcaccaggtgtcaagatgctgcaagtacata

SEQ ID NO: 10106 - DNA, 67 bp, Artificial Sequence
  ENSG00000008311_27 (sequence is synthesized)
ccggctaccacttttttcttaaatgaacatattgtcttataaccagcaaatgaagttttactttttt

SEQ ID NO: 10107 - DNA, 120 bp, Artificial Sequence
  ENSG00000008311_28 (sequence is synthesized)
ttgtcttataaccagcaaatgaagttttacttttttagtcagaaaaaatttcgtcataaagctatatttttatatttttaaaattgatacagttagataccttcagattacctaagttaa

SEQ ID NO: 10108 - DNA, 120 bp, Artificial Sequence
  ENSG00000008311_29 (sequence is synthesized)
gtttttgccaaaatgctattttatgccctttttgtaaagttatgatttattttgtaaatatagttccttatagttttctcttgagtgtttggacatgagaatagataagattaaattaca

SEQ ID NO: 10109 - DNA, 120 bp, Artificial Sequence
  ENSG00000008311_30 (sequence is synthesized)
atttacaagatcacttcattaggcacaggaaaagtatttaacaaaattcaacaccctttcacaataaaaaataaaaaataaaaaaccctcaacaaactaggaatagaaggaaacttcctc

SEQ ID NO: 10110 - DNA, 120 bp, Artificial Sequence
  ENSG00000008311_31 (sequence is synthesized)
aacctgataaagggcatctatgaagaacccatggttagcatcatacttaatggtgaaggactggattatttccccctgagatcagaaacaagacaaggatgtctgctttggccatttcta

SEQ ID NO: 10111 - DNA, 120 bp, Artificial Sequence
  ENSG00000008311_32 (sequence is synthesized)
ttcaacttgtactggacagtcaagaaagggcaattaggcaagaaaataaaataaaagtcatctaggttggaaaggaagaagtataactaaatagagatgggagacgatatggtggttttg

SEQ ID NO: 10112 - DNA, 120 bp, Artificial Sequence
  ENSG00000008311_33 (sequence is synthesized)
tgcatagtaatccaagggaaaactatagaaaatccaaaggcatgatttattaataaataaattcagcaaagttacaggatacaggattaaatatgcagaaattggttatctttcaatata

SEQ ID NO: 10113 - DNA, 120 bp, Artificial Sequence
  ENSG00000008311_34 (sequence is synthesized)
gttatctttcaatatagtatcaatgaataaatcaaaaatgatgttaagaaaacaatttaattttcaacaatggtcaagcttggtggcttgtgcctgtaatcccaacactttgggagtctg

SEQ ID NO: 10114 - DNA, 120 bp, Artificial Sequence
  ENSG00000008311_35 (sequence is synthesized)
agaggccaggagaccagcctgggaaacagtgagatcccatctctacaaaaacaaacaaacaaaaaacaacaagcaaacaaaaaacagctggatgtgatgacactcatctgtcgtctcagc

SEQ ID NO: 10115 - DNA, 120 bp, Artificial Sequence
  ENSG00000008311_36 (sequence is synthesized)
tactcagaggctgaggtgtaaggatggcttgagccccaaagttcgaagctgcaatgagctataactgggtcactgcaatccagcctggatgacagagttagaccttgactcaaaaaaaac

SEQ ID NO: 10116 - DNA, 120 bp, Artificial Sequence
  ENSG00000008311_37 (sequence is synthesized)
aaaaaagaaaagaaaaaaattgacagcatcagaaagagtaaaataccaatataattgagggtccagaaatattgatcacatttatcatcaactgacttttgaaaatagtgctaagacaat

SEQ ID NO: 10117 - DNA, 120 bp, Artificial Sequence
  ENSG00000008311_38 (sequence is synthesized)
tcaatgggggcaaaatagtctttttcattaaatgatgcttggaaacatggatatccacatgcaaaataatgaaattggactcctacctcatattgcatataaaaattaactcaaagttga

SEQ ID NO: 10118 - DNA, 120 bp, Artificial Sequence
  ENSG00000008311_39 (sequence is synthesized)
cctaagatctaaatgtaagagctaatattgtaagtatcttcaaagaaaacatggcgtaaatctttctgactttgaattaggcaatgatttcttaaataaatgacactaaaaacacaagca

SEQ ID NO: 10119 - DNA, 120 bp, Artificial Sequence
  ENSG00000008311_40 (sequence is synthesized)
acaaaagaagaaaataggtaaattaaaattaaaaccatttgtgtttccaaggacaatatcaagaaagcaaaaatacaacccacagaatgagataattttttttaaaatcatgtattagtt

SEQ ID NO: 10120 - DNA, 120 bp, Artificial Sequence
  ENSG00000008311_41 (sequence is synthesized)
aagggaggaatttgtatttagaatatgtaaagaactgttacaataataattaaaaggcatataattcaatttttaaaaatcaacaagagatctgaattaacagttctccaaagaagatac

SEQ ID NO: 10121 - DNA, 120 bp, Artificial Sequence
  ENSG00000008311_42 (sequence is synthesized)
acaaaaggccaataagcacatgaaaaggttctcaacatcactagccatcagggaaatgcaaatgagatctacaatgagatatcacttaacactcactggaatagatatataatcaaagtg

SEQ ID NO: 10122 - DNA, 120 bp, Artificial Sequence
  ENSG00000008311_43 (sequence is synthesized)
ataatatcaagtgttggtgaggatgcagagaaattggaaccctcatgcactgttggtggatacccacgtgatataaaaacaaatgtctacacaaaaacttgtgcacagatgttctttgca

SEQ ID NO: 10123 - DNA, 120 bp, Artificial Sequence
  ENSG00000008311_44 (sequence is synthesized)
gcattatttataatagcccaaaattgaaacagccctaatttctatcaactaacaagtgaataaacaaaacgtggcatatccatacaaggaatattattcagcaataaaaaaagagatgaa

SEQ ID NO: 10124 - DNA, 120 bp, Artificial Sequence
  ENSG00000008311_45 (sequence is synthesized)
gtactgatatgcaccacaacatggaaaaaccttgaaaacatatcaagtgaagaatgccagacatgaaaggccacatattatatgatttcatttatatgaaatgtccagaacaggcgaata

SEQ ID NO: 10125 - DNA, 120 bp, Artificial Sequence
  ENSG00000008311_46 (sequence is synthesized)
tatatagagagaaggcagattagtggttgcttaggctgaagggttggggaggacaaaggggtgactgctaattagtatggggtttcttttttggggtgatgtaaacgttgtaaagttgat

SEQ ID NO: 10126 - DNA, 120 bp, Artificial Sequence
  ENSG00000008311_47 (sequence is synthesized)
tgtggtaatggtggcacaactctgaatatactaaaaaccactgaattgtatactttgaatgtttgaactgtgtggtatgtagattttatctcaagttgttataaaaaattaaattacaaa

SEQ ID NO: 10127 - DNA, 120 bp, Artificial Sequence
  ENSG00000008311_48 (sequence is synthesized)
catcccagtttcttctaggaattcggagcctcccctgcagcgactcggaagattcgaggcggcgggggacaagtcggcgccccagagcggacgagatattatcagacgcgacacagcctc

SEQ ID NO: 10128 - DNA, 120 bp, Artificial Sequence
  ENSG00000008311_49 (sequence is synthesized)
agagcaaaatatactggatcaatgattgctaatttctactcagaaaaagttaaatattttacatttgtctttgattaattcgttgctctaatgtgggtagagagattaccatgtgccatg

SEQ ID NO: 10129 - DNA, 120 bp, Artificial Sequence
  ENSG00000008311_50 (sequence is synthesized)
ttcatgtgggcataaagagtagataaagagaggagctcaatggcaattagaatttgagaaatgcttatctcgaaacactttaccactcagttcccaagcatagtggggtatttttgcttt

SEQ ID NO: 10130 - DNA, 120 bp, Artificial Sequence
  ENSG00000008311_51 (sequence is synthesized)
cctgtaggagatttggagtagtcatagaatattacatgaaaacattctttcatatgaccgctgtggcatcctgctggtatacctaatgttggagaactaacctataaattaatctcataa

SEQ ID NO: 10131 - DNA, 120 bp, Artificial Sequence
  ENSG00000008311_52 (sequence is synthesized)
agatctttgtaagaacatgggattacaatccatcatctctgccctgctccagggagcagtgcctgggtgagtctggagaagattctgaaggttaaaacattgctattgttattgttattt

SEQ ID NO: 10132 - DNA, 120 bp, Artificial Sequence
  ENSG00000008311_53 (sequence is synthesized)
tacattttaggagaatcctacaacttgagttaccaccttgtaattctgccctttcaagattaaattcaaggagctcccttttgcttcccaaatgagaacatgtataggacttgaactaat

SEQ ID NO: 10133 - DNA, 120 bp, Artificial Sequence
  ENSG00000008323_0 (sequence is synthesized)
agcgcctcgcgggggtctggcccggagtggagggcgcgcggtcccagccctcccgctcggccggcgggtgtcgagttcagccctaggggacctctttctcctggacattgaagatatggc

SEQ ID NO: 10134 - DNA, 120 bp, Artificial Sequence
  ENSG00000008323_1 (sequence is synthesized)
cctttggaggtgacccaggagagaagggatgaaggcctttggtcctccacatgagggccccctccaaggactcgtggcctcccgcattgagacttatgggggccggcatcgagcctctgc

SEQ ID NO: 10135 - DNA, 120 bp, Artificial Sequence
  ENSG00000008323_2 (sequence is synthesized)
tcagagcactgctggcagactctatccccgaggataccctgtgctggatcccagtcgccgacgcctccagcagtatgtcccctttgccaggggttctggccaggcccgaggcctgtcacc

SEQ ID NO: 10136 - DNA, 120 bp, Artificial Sequence
  ENSG00000008323_3 (sequence is synthesized)
catgagactgcgagatccagagcccgagaagaggcacgggggccatgtgggggctggcctgcttcactcccccaaactcaaggaactcaccaaggcccatgagctggaggtgaggctgca

SEQ ID NO: 10137 - DNA, 120 bp, Artificial Sequence
  ENSG00000008323_4 (sequence is synthesized)
cactttcagcatgtttgggatgccccggctgccccctgaggaccggcggcactgggagataggagagggtggcgacagtggcctgaccatcgagaagtcctggagggagctggtgcctgg

SEQ ID NO: 10138 - DNA, 120 bp, Artificial Sequence
  ENSG00000008323_5 (sequence is synthesized)
gcacaaggagatgagccaggagctctgccaccaacaggaggccctgtgggagctcctgaccaccgagctgatctacgtgagaaagctcaagatcatgactgatctgctagccgccggcct

SEQ ID NO: 10139 - DNA, 120 bp, Artificial Sequence
  ENSG00000008323_6 (sequence is synthesized)
gctgaacctgcagcgagtgggactgctgatggaagtgtcagctgagaccctgtttggaaatgtccccagcctgattcgaacccaccggagcttttgggatgaggtgctggggcccaccct

SEQ ID NO: 10140 - DNA, 120 bp, Artificial Sequence
  ENSG00000008323_7 (sequence is synthesized)
ggaggagactcgggcctcgggccagcctctggaccccattggtctgcaaagtggcttcctgacgtttggccagcggttccacccctatgtccagtactgcctccgagtgaagcagaccat

SEQ ID NO: 10141 - DNA, 120 bp, Artificial Sequence
  ENSG00000008323_8 (sequence is synthesized)
ggcttacgcccgagaacagcaagaaactaaccctctcttccatgccttcgtgcagtggtgtgagaagcacaagcgctctgggaggcagatgctctgtgacttgcttatcaagccccacca

SEQ ID NO: 10142 - DNA, 120 bp, Artificial Sequence
  ENSG00000008323_9 (sequence is synthesized)
gcgcatcaccaagtacccactgctgctccatgctgtgctcaagaggagccccgaggcacgagcccaagaggccctgaatgccatgattgaagccgtggagtcattcctgcgacacatcaa

SEQ ID NO: 10143 - DNA, 120 bp, Artificial Sequence
  ENSG00000008323_10 (sequence is synthesized)
tgggcaggtccgccagggcgaagagcaagagagcttggcggctgcagcacaacgcatcgggccctacgaggtgctggagccacccagtgatgaggtggagaagaacctgcgcccattctc

SEQ ID NO: 10144 - DNA, 120 bp, Artificial Sequence
  ENSG00000008323_11 (sequence is synthesized)
caccctggacctgacgtcccccatgctgggggttgcatctgagcacaccagacagctgctgctggaggggcctgtgcgagtgaaggagggacgagaagggaagctggacgtgtacctgtt

SEQ ID NO: 10145 - DNA, 120 bp, Artificial Sequence
  ENSG00000008323_12 (sequence is synthesized)
ctcttctctgatgtgctccttgtgaccaagccccagcgcaaggcggacaaagccaaggtcatccgaccccctctcatgctggagaagctcgtgtgccaacccctgcgagaccccaacagc

SEQ ID NO: 10146 - DNA, 120 bp, Artificial Sequence
  ENSG00000008323_13 (sequence is synthesized)
ttcctgctgatccacctcactgaattccagtgtgtctccagcgccctccttgtgcactgtcccagtcctacagaccgtgcccagtggctggagaagacccagcaggcccaggccgcccta

SEQ ID NO: 10147 - DNA, 120 bp, Artificial Sequence
  ENSG00000008323_14 (sequence is synthesized)
cagaagctgaaggcagaggagtatgttcaacagaagagggagctcctgaccctctatcgggaccaggacagggagtcccccagcaccaggccctccacgccttccctggagggctctcag

SEQ ID NO: 10148 - DNA, 120 bp, Artificial Sequence
  ENSG00000008323_15 (sequence is synthesized)
agcagcgcagaggggaggactcctgagttctcgaccattatcccccacctggtggtgacagaagacacagatgaagatgctccccttgtgccagatgatacctcagactctggctacggc

SEQ ID NO: 10149 - DNA, 120 bp, Artificial Sequence
  ENSG00000008323_16 (sequence is synthesized)
actttgatcccaggcacccccacggggtcccgctccccactgagccgtctacgccaaagagcccttcggcgggaccctcgcctcaccttctccaccctggaactccgggacatccctctg

SEQ ID NO: 10150 - DNA, 120 bp, Artificial Sequence
  ENSG00000008323_17 (sequence is synthesized)
cgtccccaccctcccgacccccaagctcctcaacgccgaagcgcccccgaactgccggaaggaatcctaaaaggaggcagtcttccccaggaagacccaccaacctggtctgaggaagaa

SEQ ID NO: 10151 - DNA, 120 bp, Artificial Sequence
  ENSG00000008323_18 (sequence is synthesized)
gatggggcctccgagcgagggaatgtggtggtggaaacactccacagggcccggcttcggggccagcttccctcctccccaacccatgctgactctgccggggaaagcccctgggagtcc

SEQ ID NO: 10152 - DNA, 120 bp, Artificial Sequence
  ENSG00000008323_19 (sequence is synthesized)
tcaggggaggaggaagaagaggggcctctgttcctgaaagctggccacacatccctgcgcccaatgcgggctgaggacatgctcagagagatccgggaggagctggccagccaaaggatt

SEQ ID NO: 10153 - DNA, 120 bp, Artificial Sequence
  ENSG00000008323_20 (sequence is synthesized)
gagggggccgaggagccccgggacagcaggccacggaagctgactcgggcccagctgcagaggatgcgggggccccacatcattcagctggacacccctctgtccgcatcagaggtatga

SEQ ID NO: 10154 - DNA, 120 bp, Artificial Sequence
  ENSG00000008323_21 (sequence is synthesized)
ggaatgcagaggacctttggcatgcatctctcccagaggagatctctccccagtagtgctggtcaccctccggcatctgtgactctacctcaaggaccacatttcccaaaggaagcctgg

SEQ ID NO: 10155 - DNA, 120 bp, Artificial Sequence
  ENSG00000008323_22 (sequence is synthesized)
cccaggcaccctgcctcctgctctgtttggggatcaagaactgtaaatttatgtatcataggtgcacctgagccccacagaaagttgtgcataaaaatgactgccctggctgggcatggc

SEQ ID NO: 10156 - DNA, 120 bp, Artificial Sequence
  ENSG00000008323_23 (sequence is synthesized)
ctggcctcccgaaggcgggaggaggggagccgggggctgggctgagacaggaccctgggtagggagcagtgcgagggagacagcgccctcagagggaggactattgggaggcggcaggag

SEQ ID NO: 10157 - DNA, 120 bp, Artificial Sequence
  ENSG00000008323_24 (sequence is synthesized)
atcaaaccccagagctggcgcctcccaggctcccgcctctgcttggcaggagtttgaggccttcctgagatctgcctctccctgagtcaggatgaagatgagcaaaggttcagggtgtcc

SEQ ID NO: 10158 - DNA, 120 bp, Artificial Sequence
  ENSG00000008323_25 (sequence is synthesized)
ctactcctccagtggtgggtagggacaggagggtgcctgccttggctccacccctggctccacctgcctggctctcctccagtcctaaccaagcagaggggtgtggaagccaggtctgtc

SEQ ID NO: 10159 - DNA, 120 bp, Artificial Sequence
  ENSG00000008323_26 (sequence is synthesized)
cctcagcctgcaggtttcccctccaccttgaggacagttctgcttgtggctgggacatcccctgcctcaatgcacgataattttgcctttggagatgggactttcctaggctgtgggtga

SEQ ID NO: 10160 - DNA, 120 bp, Artificial Sequence
  ENSG00000008323_27 (sequence is synthesized)
gaagggagactagaaagtatgtggggtaattcaggccacaggcaaatgaaggaatgtgaccaggcctgccctgggaggagctgtgtggctgtggcttcagcctttcacacagaagggcag

SEQ ID NO: 10161 - DNA, 120 bp, Artificial Sequence
  ENSG00000008323_28 (sequence is synthesized)
gggctggctggcatcgccggggagccgacggcgacggggagccccgcgggcggggagggcggcgcagggcagcgggtgcggtgacacctgtgggcacagccctaggggacctctttctcc

SEQ ID NO: 10162 - DNA, 120 bp, Artificial Sequence
  ENSG00000008323_29 (sequence is synthesized)
aaaagaatgtaggaaggaaggaaggaacgaatgaacatgggagcgcagaggggaggaggagagaggctggggtggattcagtttcagactggacaatctgatgtgccccagagagggagg

SEQ ID NO: 10163 - DNA, 120 bp, Artificial Sequence
  ENSG00000008323_30 (sequence is synthesized)
aggagggaagacacctaggctgtggagtctctgtccccttacaggttcagaggttgagctattcctgccccttaccctactcttctttcctgggttgcgggaaagaggagggcagtgaca

SEQ ID NO: 10164 - DNA, 120 bp, Artificial Sequence
  ENSG00000008324_0 (sequence is synthesized)
taggccccacctatcgtgggtcgagttgcttggcggtcgtggttccggaggttcctcgggatgtcggtggccttcgtaccggactggctgaggggcaaggcggaagtcaatcaagagact

SEQ ID NO: 10165 - DNA, 120 bp, Artificial Sequence
  ENSG00000008324_1 (sequence is synthesized)
atccagcggctccttgaggagaatgaccagctgatccgctgtattgtggagtatcagaacaagggccgcgggaacgagtgcgtgcagtaccagcatgtgttacatagaaatctcatttat

SEQ ID NO: 10166 - DNA, 120 bp, Artificial Sequence
  ENSG00000008324_2 (sequence is synthesized)
ttggctaccattgcagatgccagtccaaccagcacttcaaaagcaatggaataatctttcaaaagcaatagaataatcttccatttggctgtcgtgaggagtaattgaatgtaatccatc

SEQ ID NO: 10167 - DNA, 120 bp, Artificial Sequence
  ENSG00000008324_3 (sequence is synthesized)
tgtggctctttcgaaacgtgaaaatgtgaagaaagctactaacttagctgtattctcatgtaaatattttttaaataattaagcaaatccctcaataagttgagcccaggtgtcctcttt

SEQ ID NO: 10168 - DNA, 120 bp, Artificial Sequence
  ENSG00000008324_4 (sequence is synthesized)
cctgaacttggagcatgtttggataacaaagacatcactgggatgttcaagtctactttttagtttcaacctgaagaggaaactcagtaggtgttgggcaggaattggtgagattcctga

SEQ ID NO: 10169 - DNA, 120 bp, Artificial Sequence
  ENSG00000008324_5 (sequence is synthesized)
cttgataccttgctaaatggacatgtaactgtgtgctccttcctatcagtttgtaaatgtggtccccctgactgctgttttcagattgctttgaaataaagcttatttttctataaaata

SEQ ID NO: 10170 - DNA, 120 bp, Artificial Sequence
  ENSG00000008324_6 (sequence is synthesized)
cctcacctcgcccggacggcggccttcggaagtcggcgcctgccagctacccgccgcctcctcagcaatcttagccgaccgggagggctcggcccaggtcaccggcagcccaggcgcagg

SEQ ID NO: 10171 - DNA, 90 bp, Artificial Sequence
  ENSG00000008324_7 (sequence is synthesized)
ccgcctagatcggcctcccaaagggccggggcactgaccctttctttctctgatctttcagctccttgaggagaatgaccagctgatccg

SEQ ID NO: 10172 - DNA, 120 bp, Artificial Sequence
  ENSG00000008382_0 (sequence is synthesized)
gcgtgacgtgccgggaagccggagtctagagctccgggcgcggggaggcgcggccatggcagctccggagccgctgtccccggcgggcggtgcgggcgaggaggcgccggaggaggacga

SEQ ID NO: 10173 - DNA, 120 bp, Artificial Sequence
  ENSG00000008382_1 (sequence is synthesized)
ggaggaggacgaggacgaagcggaggccgaggaccctgagcggccgaatgcgggagcgggcggtggacgcagtggcggcggcggcagtagcgtcagcggaggaggcggcggcggcggggc

SEQ ID NO: 10174 - DNA, 120 bp, Artificial Sequence
  ENSG00000008382_2 (sequence is synthesized)
cggggcggggggctgcggcgggcccgggggcgcgctcaccaggcgcgcggtcacactgcgggtgctcctcaaagacgcgctgctggagcctggcgccggggtgctgtccatctactacct

SEQ ID NO: 10175 - DNA, 120 bp, Artificial Sequence
  ENSG00000008382_3 (sequence is synthesized)
ggggaagaagttcctgggcgacctgcagccagacggaaggatcatgtggcaggagaccgggcagaccttcaactcacccagcgcctgggccacccactgcaagaagctggtgaaccctgc

SEQ ID NO: 10176 - DNA, 120 bp, Artificial Sequence
  ENSG00000008382_4 (sequence is synthesized)
caagaagtcgggctgtggctgggcctctgtcaagtacaaaggccagaaactggacaagtacaaggccacctggctccggctgcaccagctgcacacgcctgccacggctgctgatgagag

SEQ ID NO: 10177 - DNA, 120 bp, Artificial Sequence
  ENSG00000008382_5 (sequence is synthesized)
cccagccagtgaaggggaggaggaggagttgctgatggaagaggaggaggaggacgttctggcaggggtctcagcagaggacaagagtcggagaccactggggaagagcccttcagagcc

SEQ ID NO: 10178 - DNA, 120 bp, Artificial Sequence
  ENSG00000008382_6 (sequence is synthesized)
ccggaggccacaaccccagggaagcgggtggacagcaagatccgggttccggtccgctactgcatgctgggcagccgcgacttggccaggaacccccacaccctggtggaagtaacatcc

SEQ ID NO: 10179 - DNA, 120 bp, Artificial Sequence
  ENSG00000008382_7 (sequence is synthesized)
tttgcagccatcaacaagttccagccgttcaacgtggctgtttctagcaacgtgctgttcctgctggacttccacagtcacctgacacggagtgaggtcgtgggttacctggggggccgc

SEQ ID NO: 10180 - DNA, 120 bp, Artificial Sequence
  ENSG00000008382_8 (sequence is synthesized)
tgggacgtcaacagccagatgctgacggtgctcagagccttcccttgtcggagccggctcggggacgcagagactgcagctgccatcgaagaggagatctaccagagcctgttcctgcgg

SEQ ID NO: 10181 - DNA, 120 bp, Artificial Sequence
  ENSG00000008382_9 (sequence is synthesized)
ggcctgtccctggtgggctggtaccacagccacccacacagcccggcgctgccatctctgcaggacatcgacgcacagatggactaccagctgcggctgcagggctccagcaatggcttc

SEQ ID NO: 10182 - DNA, 120 bp, Artificial Sequence
  ENSG00000008382_10 (sequence is synthesized)
cagccctgcctcgccctgctctgctccccttactattctggcaacccaggccccgagtccaagatctcacctttctgggtgatgcctcctcccgagatgctgctggtggagttctacaag

SEQ ID NO: 10183 - DNA, 120 bp, Artificial Sequence
  ENSG00000008382_11 (sequence is synthesized)
ggttcccctgacctcgtgaggctccaggaaccctggagccaggagcacacctacctcgacaagcttaagatctccttggccagcaggacgcccaaggaccagagcctgtgtcacgtcctg

SEQ ID NO: 10184 - DNA, 120 bp, Artificial Sequence
  ENSG00000008382_12 (sequence is synthesized)
gaacaggtgtgcggcgtcctcaagcaggggagctgagccttccagggcagggtgggctccagttgtcttgagggtccggatgggctcaggtaataaagaaacggaagcagcagccagcca

SEQ ID NO: 10185 - DNA, 120 bp, Artificial Sequence
  ENSG00000008382_13 (sequence is synthesized)
gggtgatgcctcctcccgagcaaaggcccagtgactatggcatccccatggatgtggagatggcctacgtccaggacagcttcctgaccaatgacatccttcacgagatgatgctgctgg

SEQ ID NO: 10186 - DNA, 80 bp, Artificial Sequence
  ENSG00000008382_14 (sequence is synthesized)
aggggcgcggggctgcagagccgtggggcgagcggcctccctgcagcctctcgctgtccgcagctccggagccgctgtcc

SEQ ID NO: 10187 - DNA, 120 bp, Artificial Sequence
  ENSG00000008382_15 (sequence is synthesized)
gagcccagtcggtgggcagcgggcggggctcccctgcgtatcagctccatgagagctggggccttgtctgctttgtttgctactggtacactgtgggtgctcaataaatgtatgaaggag

SEQ ID NO: 10188 - DNA, 120 bp, Artificial Sequence
  ENSG00000008394_0 (sequence is synthesized)
tcgtgacaaagcaaattgtctggtatcatgaatttggaacaccattccagaccaaaattgaaaaaatggttgacctcacccaggtaatggatgatgaagtattcatggcttttgcatcct

SEQ ID NO: 10189 - DNA, 120 bp, Artificial Sequence
  ENSG00000008394_1 (sequence is synthesized)
atgcaacaattattctttcaaaaatgatgcttatgagtactgcaactgcattctatagattgacaagaaaggtttttgccaatccagaagactgtgtagcatttggcaaaggagaaaatg

SEQ ID NO: 10190 - DNA, 120 bp, Artificial Sequence
  ENSG00000008394_2 (sequence is synthesized)
ccaagaagtatcttcgaacagatgacagagtagaacgtgtacgcagagcccacctgaatgaccttgaaaatattattccatttcttggaattggcctcctgtattccttgagtggtcccg

SEQ ID NO: 10191 - DNA, 120 bp, Artificial Sequence
  ENSG00000008394_3 (sequence is synthesized)
tgcatatttgacaccccttccccagccaaatagagctttgagtttttttgttggatatggagttactctttccatggcttacaggttgctgaaaagtaaattgtacctgtaaagaaaatc

SEQ ID NO: 10192 - DNA, 120 bp, Artificial Sequence
  ENSG00000008394_4 (sequence is synthesized)
atacaactcagcatccagttggctttttaagaattctgtacttccaatttataatgaatactttcttagattttaggtaggaggggagcagaggaattatgaactggggtaaacccattt

SEQ ID NO: 10193 - DNA, 120 bp, Artificial Sequence
  ENSG00000008394_5 (sequence is synthesized)
tgaatattagcattgccaatatcctgtattcttgttttacatttggattagaaatttaacatagtaattcttaagtcttttgtctgatttttaaagtactttcttataaatttggatcat

SEQ ID NO: 10194 - DNA, 120 bp, Artificial Sequence
  ENSG00000008394_6 (sequence is synthesized)
gttatgatttgtaacattcacacaacacctcacttttgaatctataaaagaattgcacgtatgagaaacctatatttcaatactgctgaaacagacatgaaataaagaatttaaagaatg

SEQ ID NO: 10195 - DNA, 120 bp, Artificial Sequence
  ENSG00000008394_7 (sequence is synthesized)
ggcagatggaagacttgggggggtctctgccagctggaagtgcttggctccacttagcagctaaacttagcttttcaatcgatcgcttttgaaagggaattgtatttctgtccccgtgcg

SEQ ID NO: 10196 - DNA, 120 bp, Artificial Sequence
  ENSG00000008394_8 (sequence is synthesized)
gggctacaaatgaagtgaaaagtatgctttaccgtgtgcaacaattgtgaaagttaatacatacacatatggaacaattaactaaaaacttaagagcccacctgaatgaccttgaaaata

SEQ ID NO: 10197 - DNA, 120 bp, Artificial Sequence
  ENSG00000008394_9 (sequence is synthesized)
gttttatgctgtaagtgaagtatgccatcgtttggcacagatggatctgatgtatttatggaacagttgctttctcctagaaactagtaaatggttttttcattatggcttttacctttt

SEQ ID NO: 10198 - DNA, 120 bp, Artificial Sequence
  ENSG00000008394_10 (sequence is synthesized)
tatcattctgctaagcagatgagatattctggaatatcaaagttttcacggaaactttctttcattttggaattaattttgccaatgagggtttagaaaacaatcattttctagacagtt

SEQ ID NO: 10199 - DNA, 120 bp, Artificial Sequence
  ENSG00000008394_11 (sequence is synthesized)
attgcgcgcgacccggcggcgggacaggcttgctgcttcctcctcctcggcctcaccgtttttgccaatccagaagactgtgtagcatttggcaaaggagaaaatgccaagaagtatctt

SEQ ID NO: 10200 - DNA, 120 bp, Artificial Sequence
  ENSG00000008394_12 (sequence is synthesized)
cgaacagatgacagagtagaacgtgtacgcagggcacaggagatcttaggcccagaaaggcagattcagaagaacctacatgtaaatgagactggagtggaaatgagaatggcaggaaat

SEQ ID NO: 10201 - DNA, 120 bp, Artificial Sequence
  ENSG00000008394_13 (sequence is synthesized)
gcatggaaacagacttgtaactgtctcatggcctggtcgtccaaatcccagagtaggttagcctgactgtgctatcacagcataggagcaagacaggaaatggaactgcataaatctcct

SEQ ID NO: 10202 - DNA, 120 bp, Artificial Sequence
  ENSG00000008394_14 (sequence is synthesized)
tcaaccccctcagggagatgaaccgcaaagtcacatggcacaggggcatggatgcacagagggatgaagatttaggccacttatacagtcaatctattgcacttgtccgctttgttatgc

SEQ ID NO: 10203 - DNA, 120 bp, Artificial Sequence
  ENSG00000008394_15 (sequence is synthesized)
tagtatgagtttcaattcagacacatgtaaaagcattttataaactttatgacattatgcaattaaaacagcatttattctaatgtgtcataattttatcagattagtggtaatctgtga

SEQ ID NO: 10204 - DNA, 120 bp, Artificial Sequence
  ENSG00000008394_16 (sequence is synthesized)
tatgctcagtatgagagcaatagttacaaactaagtaaaaaacacaatacagggtttgtgaacttggccttctccctctcatttgcaatgtgctgccttaggaagacagatgggacaagg

SEQ ID NO: 10205 - DNA, 120 bp, Artificial Sequence
  ENSG00000008394_17 (sequence is synthesized)
aacaaatatttggacagccttatcgcctctataactaagttggttcccaaactgtgcccagtctgttctcttgaaattataatatgcaccctgctcccaaccaagtgtttcatcaaattt

SEQ ID NO: 10206 - DNA, 120 bp, Artificial Sequence
  ENSG00000008394_18 (sequence is synthesized)
agtccctgcattgcgcgcgacccggcggcgggacaggcttgctgcttcctcctcctcggcctcaccagtggtgtctatgaatccctgagattggaaaaggaggtcaggtcagcacagaga

SEQ ID NO: 10207 - DNA, 120 bp, Artificial Sequence
  ENSG00000008394_19 (sequence is synthesized)
ttcacctgcagcctctgggctctgaaccccactttgcatgagaccacatagtgggctgagtctgcagccaccacgatgccttcaggaaatgctagaattcatctagagttccagattaac

SEQ ID NO: 10208 - DNA, 64 bp, Artificial Sequence
  ENSG00000008394_20 (sequence is synthesized)
ctgggcatgggaccctccgagccaggtgcgagatataatctcctggtgtgccttgttttaagcc

SEQ ID NO: 10209 - DNA, 120 bp, Artificial Sequence
  ENSG00000008394_21 (sequence is synthesized)
ggtgcgagatataatctcctggtgtgccttgttttaagcccattggaaaagcacagtattagagtgggagagacctgattttccaggtgccgtctctcacccctttctttgactaggaaa

SEQ ID NO: 10210 - DNA, 120 bp, Artificial Sequence
  ENSG00000008394_22 (sequence is synthesized)
cacttcctgggtgaggcgatgcctcgccttgctttggctcgtgcacggtgcactgcacccactgacctgcgcctactgtctggcactccccagcgagatgaacctggtacctcagttgga

SEQ ID NO: 10211 - DNA, 61 bp, Artificial Sequence
  ENSG00000008394_23 (sequence is synthesized)
tctgctctgagctaatacttttaaaatattttgcactccacagaggaaggttttatatgta

SEQ ID NO: 10212 - DNA, 120 bp, Artificial Sequence
  ENSG00000008394_24 (sequence is synthesized)
taaaatattttgcactccacagaggaaggttttatatgtaagtctgagttttgtttttctgagttgttttcagttggtccatgtgattacatttttatacatggtaaaaatttatatatt

SEQ ID NO: 10213 - DNA, 78 bp, Artificial Sequence
  ENSG00000008394_25 (sequence is synthesized)
aatttatatatttttttccaaggagacggagttttgttcttgttgtccaggatggagtgcaatggcatgatctcagct

SEQ ID NO: 10214 - DNA, 120 bp, Artificial Sequence
  ENSG00000008394_26 (sequence is synthesized)
agcctcttgagtagctgggattacaggtctagtggcacttgaatctttagcacaacagggagcctctgtgcccagggttcagtggcttccaggaattcttcccagaataaacctcaacat

SEQ ID NO: 10215 - DNA, 120 bp, Artificial Sequence
  ENSG00000008394_27 (sequence is synthesized)
ccaggaattcttcccagaataaacctcaacattctgcagtcttcatgggtgctggcgcaagttgcttttcaagttcttcatactctactgacctcagacttcttctcagcccgaggaaaa

SEQ ID NO: 10216 - DNA, 120 bp, Artificial Sequence
  ENSG00000008394_28 (sequence is synthesized)
agacatccttccatgctgttgcaaacatgccctgaggcaagaaatcacaaaggctctttggaaaacaggaataagtgactgcaggtatgacagaaagtgaaacagaataaatgaaaatta

SEQ ID NO: 10217 - DNA, 120 bp, Artificial Sequence
  ENSG00000008394_29 (sequence is synthesized)
acgccccacagatgtatttatccacaaattttatcataaggtgacttgttggtagtcacataaaaagtagaaaaaaacccctctgaatcaagtattttaaagtattcctgggtatctttc

SEQ ID NO: 10218 - DNA, 120 bp, Artificial Sequence
  ENSG00000008394_30 (sequence is synthesized)
ctctaagtctcagattatccacacagggtccacatagttttaagaatagttggcatgcctaggcttaactctgtgggacagtaaatttttttaaaaaaaagcttttgcctgctcttggaa

SEQ ID NO: 10219 - DNA, 120 bp, Artificial Sequence
  ENSG00000008394_31 (sequence is synthesized)
gacaatattgtgttcaatatagtgcagtgctccacagcttgtaaaatcaactatgtggcacaaatctgaagacgtcttcaaaagatatatggcaagaaagatatgttgccggctttagtc

SEQ ID NO: 10220 - DNA, 120 bp, Artificial Sequence
  ENSG00000008394_32 (sequence is synthesized)
atctttgccatttctcttatggaatttcactatagtggctggacatgtgcaacccacatcctgtctggccttaatgtgatttttctacaaaaggagaggaggacaaaagtaaaagcaaaa

SEQ ID NO: 10221 - DNA, 120 bp, Artificial Sequence
  ENSG00000008394_33 (sequence is synthesized)
tatgctttacaatgaaaaatgcaaccctcagccactgggataaaattacattgacagtgggggagttattttcttccttcaaagaacgatgtttgatgttccaactagactctatggtga

SEQ ID NO: 10222 - DNA, 120 bp, Artificial Sequence
  ENSG00000008394_34 (sequence is synthesized)
tgaagctcataatttgggagctgaatcagattcgaatttagaaaaggggtttcagacgttgcttagcagggtgattttaggggttaacatatgaatagagattacattataactcatctg

SEQ ID NO: 10223 - DNA, 120 bp, Artificial Sequence
  ENSG00000008394_35 (sequence is synthesized)
ccctgtgtttgttggacacagcttatatgacctattcctgatggttgctcatagaaggatatttaaattctgttgtaattcttccttataaaatctgtgacattctaatagatagaaaat

SEQ ID NO: 10224 - DNA, 120 bp, Artificial Sequence
  ENSG00000008394_36 (sequence is synthesized)
gtttaaatcttgtctagtttctgcttcgtttccttctttatgttgatttcttcctatttatctcttttgtgcatcacacatatttcactataaactcgatttttgtgggtgaaaggccac

SEQ ID NO: 10225 - DNA, 85 bp, Artificial Sequence
  ENSG00000008394_37 (sequence is synthesized)
aaaaatcatcagaaaaaccccgtgcagatgaagaggcttgccacttaatgtactgcacagatgtgatcatcagcggttgccgaca

SEQ ID NO: 10226 - DNA, 120 bp, Artificial Sequence
  ENSG00000008394_38 (sequence is synthesized)
taatgtactgcacagatgtgatcatcagcggttgccgacaatgaaatatacaagtgcacacaaagtgatctggtgaacaagaggtggaatttaatcatcttctgctgacactttgcgaaa

SEQ ID NO: 10227 - DNA, 120 bp, Artificial Sequence
  ENSG00000008394_39 (sequence is synthesized)
ctgcctcagcctcacaaagcgctggaattacaggtgtgagctattgctcctggccagtatttgaaataagttttttttcttggtatttggataggtttttgccaatccagaagactgtgt

SEQ ID NO: 10228 - DNA, 120 bp, Artificial Sequence
  ENSG00000008394_40 (sequence is synthesized)
tatcaaattctccatttctagcctagattctaaagcaatttctaattctgtagacttaagggaggtgacattttaaaattaagtatttttaaaaatgttgctgggcatgatggcttgcac

SEQ ID NO: 10229 - DNA, 120 bp, Artificial Sequence
  ENSG00000008394_41 (sequence is synthesized)
aagtatttttaaaaatgttgctgggcatgatggcttgcacctataaacccagtgttttgggaggctgaggctggaggactgcttgagaccaggtgttcaagaccagcctgggcaacatag

SEQ ID NO: 10230 - DNA, 89 bp, Artificial Sequence
  ENSG00000008394_42 (sequence is synthesized)
caagaccccatctctaaaaagaaaatttaaaaaattagccaggcatggtggtgaggcctgtagtcccagctactcatgatgctgagact

SEQ ID NO: 10231 - DNA, 120 bp, Artificial Sequence
  ENSG00000008394_43 (sequence is synthesized)
ctctctaaaaacaacaatagcaatgacaacaataataataaaaatgtcaagtccatagtagatgtgttttgtattcggtcttagccagagaaacccaagatgccacggtttggagcaaaa

SEQ ID NO: 10232 - DNA, 120 bp, Artificial Sequence
  ENSG00000008394_44 (sequence is synthesized)
ctgtggctaaaacatgctttttgttttcttctagctctgttataaagaaaacatttaggaaattctctctttctctctttcacctatcctactttttgtgtgtcctttgtagttttgcac

SEQ ID NO: 10233 - DNA, 120 bp, Artificial Sequence
  ENSG00000008394_45 (sequence is synthesized)
catcattcctaacgaatttatttggcatttggaagataggttagcaaaaattttactatatttgaaaggctagttatgtattctgttatttagatataagagcatgagagtcttgatatt

SEQ ID NO: 10234 - DNA, 120 bp, Artificial Sequence
  ENSG00000008394_46 (sequence is synthesized)
aaattggtaaattaattattggcaacctagtggtttgggttggcaaggattctgtcaataatcatttggtagagtagcagaagcaaaggaggtgtcttaagaaaaatcaacaccaaaagg

SEQ ID NO: 10235 - DNA, 120 bp, Artificial Sequence
  ENSG00000008394_47 (sequence is synthesized)
tgaattgctaattgttatgaacctcataagaaaaaagtatttttatttacaaaaatgaaatgagttctattagatagatgtcgttttgatattctaggaactacaaaatgccttctgtga

SEQ ID NO: 10236 - DNA, 120 bp, Artificial Sequence
  ENSG00000008394_48 (sequence is synthesized)
tatttaaagatacactaaaaataaaaagaaacagaaataatgagagattctaaataaaagtcaagtgggcaaggaagcaagacaatttgagagaaaaaaaataaatcttactttgaaatt

SEQ ID NO: 10237 - DNA, 120 bp, Artificial Sequence
  ENSG00000008394_49 (sequence is synthesized)
taaggatccattagtgctcagatttagtttttagaagagagagaaaaaaggatacatatctagtattttgaaattagtgtctttaatagttatctttttccacagagcccacctgaatga

SEQ ID NO: 10238 - DNA, 120 bp, Artificial Sequence
  ENSG00000008394_50 (sequence is synthesized)
agagtagaacgtgtacgcagaatcaaacaaaccctgagcatttatcttgcctcttctatataaagtttaactcggcataaccaattgctgatgaagaagaaatgtttccttgtagaagca

SEQ ID NO: 10239 - DNA, 120 bp, Artificial Sequence
  ENSG00000008394_51 (sequence is synthesized)
aaccagtgaataattgaagaaaaaatttatcttttcaacatctaatgagttaatggattcaagcaaagattatccacggctgttaacaacacaaaaagacaatcggaaattagctattac

SEQ ID NO: 10240 - DNA, 120 bp, Artificial Sequence
  ENSG00000008394_52 (sequence is synthesized)
tgcgggaagtacccaataccatctatgaaactgtgtggacaaaaacactgacaaaaatctccacgaatctctaattttgaatacaaatttaaagaaaatgcaaaggattaaaatagacca

SEQ ID NO: 10241 - DNA, 120 bp, Artificial Sequence
  ENSG00000008394_53 (sequence is synthesized)
gaaaaattcagacagagaaaaatgctccaggaccagaaacccatttcttccgcaaaagcttccaggtagagattgactgaccgagagaacagagacatagagagaacctagagattaaaa

SEQ ID NO: 10242 - DNA, 120 bp, Artificial Sequence
  ENSG00000008394_54 (sequence is synthesized)
gaaacttgagcgatttgtcagcattcagttgcaacgtatggatgtgatttgaattctaatttaaaaaccaaagtagaaagtggtaaacaattggggaaatgtgaacaatgatagaatatt

SEQ ID NO: 10243 - DNA, 120 bp, Artificial Sequence
  ENSG00000008394_55 (sequence is synthesized)
taatattaatgaaatatgttaaatattttcagatatgataatggcattgagtatgtaaaaaagagcctgtttttaaagaaatacctctgaaatacagatgatataatatcatctgtatat

SEQ ID NO: 10244 - DNA, 120 bp, Artificial Sequence
  ENSG00000008394_56 (sequence is synthesized)
tagatgatattatatatatcagtatcatcagaataaagtaaggttagcatgaattgttaattgttgacactgtgcaataggtacgtggataattactatactgttctcattccttttatt

SEQ ID NO: 10245 - DNA, 120 bp, Artificial Sequence
  ENSG00000008394_57 (sequence is synthesized)
tatgtttgaaatgttctaaaattaaaagttaaagcatagagtgtaaagttgagcaaattcctccaagacctaaatatagcttatcaaaacttacattaattagatgctgactgttgagct

SEQ ID NO: 10246 - DNA, 120 bp, Artificial Sequence
  ENSG00000008394_58 (sequence is synthesized)
aatacttttttttaatgatgtgtgcttcagtttattgcacttttcaaatactccagttttttgtgtgcgtgtgttttttaaattttattattattaaagttttagggtacatgtgcacaa

SEQ ID NO: 10247 - DNA, 120 bp, Artificial Sequence
  ENSG00000008394_59 (sequence is synthesized)
agtccctgcattgcgcgcgacccggcggcgggacaggcttgctgcttcctcctcctcggcctcaccattccagaccaaaattgaaaaaatggttgacctcacccaggtttttgccaatcc

SEQ ID NO: 10248 - DNA, 120 bp, Artificial Sequence
  ENSG00000008405_0 (sequence is synthesized)
agagtcacccgggcagcctcgggaccggtcaccggccggcaaccgtccagcggcctcgaccaccgcctctagcctccgttcccggtcctttctcccgggccgagagacagcgtcgccgac

SEQ ID NO: 10249 - DNA, 120 bp, Artificial Sequence
  ENSG00000008405_1 (sequence is synthesized)
aggggctcattcccctccggttctcctcggtgactcacctcgggcgggccgttttgtctttaggggccgccttggtggggcgaggtttccgtgacgaatctcctggggccgtccgtgccg

SEQ ID NO: 10250 - DNA, 120 bp, Artificial Sequence
  ENSG00000008405_2 (sequence is synthesized)
gctcgggccgtcgtggcggctcgagctcctggaacttgctcaggctccggaggtccgaggccctcgaagttatgcgtcgcctccaggcggttgcggcgggcgcgggctcctaaagggcgt

SEQ ID NO: 10251 - DNA, 120 bp, Artificial Sequence
  ENSG00000008405_3 (sequence is synthesized)
cacacccggactccgccgactaggcaacctccattcatctttccactgcgcctccggcgcccccgccttctccggtcccctcctcggagtcattttttcctgttccccctctgccgccct

SEQ ID NO: 10252 - DNA, 120 bp, Artificial Sequence
  ENSG00000008405_4 (sequence is synthesized)
ttcctcacgccccgggtgaggcaattctcttggaagcgaaggtgtcggctatgagccggagcctccttccttgaatttctccgtggaggacccgccgcgccccccggcatgggggtgaac

SEQ ID NO: 10253 - DNA, 120 bp, Artificial Sequence
  ENSG00000008405_5 (sequence is synthesized)
gccgtgcactggttccgaaaggggctccggctccacgacaaccccgccctgaaggagtgcattcagggcgccgacaccatccgctgcgtctacatcctggacccctggttcgccggctcc

SEQ ID NO: 10254 - DNA, 120 bp, Artificial Sequence
  ENSG00000008405_6 (sequence is synthesized)
tccaatgtgggcatcaacaggtggcgatttttgcttcagtgtcttgaggatcttgatgccaatctacgaaaattaaactcccgtctgtttgtgattcgtggacaaccagcagatgtgttt

SEQ ID NO: 10255 - DNA, 120 bp, Artificial Sequence
  ENSG00000008405_7 (sequence is synthesized)
cccaggcttttcaaggaatggaacattactaaactttcaattgagtatgattctgagccctttggaaaggaacgagacgcagctattaagaaactggcaactgaagctggagtagaagtc

SEQ ID NO: 10256 - DNA, 120 bp, Artificial Sequence
  ENSG00000008405_8 (sequence is synthesized)
attgtaagaatttcacatacattatatgacctagacaagatcatagaactcaatggtggacaaccgcctctaacttataaaagattccagactctcatcagcaaaatggaaccactagag

SEQ ID NO: 10257 - DNA, 120 bp, Artificial Sequence
  ENSG00000008405_9 (sequence is synthesized)
ataccagtagagacaattacttcagaagtgatagaaaagtgcacaactcctctgtctgatgaccatgatgagaaatatggagtcccttcactggaagagctaggttttgatacagatggc

SEQ ID NO: 10258 - DNA, 120 bp, Artificial Sequence
  ENSG00000008405_10 (sequence is synthesized)
ttatcctctgcagtgtggccaggtggagaaactgaagcacttactcgtttggaaaggcatttggaaagaaaagcttgggtggcaaattttgaaagacctcgaatgaatgcgaattctctg

SEQ ID NO: 10259 - DNA, 120 bp, Artificial Sequence
  ENSG00000008405_11 (sequence is synthesized)
cttgcaagccctactggacttagtccttatctccgatttggttgtttgtcatgtcgactgttttacttcaaactaacagatctctacaaaaaggtaaagaagaacagttcccctcccctt

SEQ ID NO: 10260 - DNA, 120 bp, Artificial Sequence
  ENSG00000008405_12 (sequence is synthesized)
ggataaaaatcctgaggctttagccaaatgggcggaaggccggacaggctttccatggattgatgccatcatgacacagcttcgtcaggagggttggattcatcatctagccaggcatgc

SEQ ID NO: 10261 - DNA, 120 bp, Artificial Sequence
  ENSG00000008405_13 (sequence is synthesized)
agttgcttgcttcctgacacgaggggacctgtggattagttgggaagaaggaatgaaggtatttgaagaattattgcttgatgcagattggagcataaatgctggaagttggatgtggct

SEQ ID NO: 10262 - DNA, 120 bp, Artificial Sequence
  ENSG00000008405_14 (sequence is synthesized)
gtcttgtagttccttttttcaacagttttttcactgctattgccctgttggttttggtaggagaacagatcccaatggagactatatcaggcgttatttgcctgtcctaagaggcttccc

SEQ ID NO: 10263 - DNA, 120 bp, Artificial Sequence
  ENSG00000008405_15 (sequence is synthesized)
tgcaaaatatatctatgatccctggaatgcaccagaaggtatccaaaaggtagccaaatgtttgataggagttaattatcctaaaccaatggtgaaccatgctgaggcaagccgtttgaa

SEQ ID NO: 10264 - DNA, 120 bp, Artificial Sequence
  ENSG00000008405_16 (sequence is synthesized)
tatcgaaaggatgaaacagatctatcagcagctttcacgatatagaggactaggtcttctggcatcagtaccttctaatcctaatgggaatggaggcttcatgggatattctgcagaaaa

SEQ ID NO: 10265 - DNA, 120 bp, Artificial Sequence
  ENSG00000008405_17 (sequence is synthesized)
tatcccaggttgtagcagcagtggaagttgctctcaagggagtggtattttacactatgctcatggcgacagtcagcaaactcacctgttgaagcaaggaagaagctccatgggcactgg

SEQ ID NO: 10266 - DNA, 120 bp, Artificial Sequence
  ENSG00000008405_18 (sequence is synthesized)
tctcagtggtgggaaacgtcctagtcaggaagaggacacacagagtattggtcctaaagtccagagacagagcactaattagaaaacattcaggaggaatactgttgcagctgaaattgg

SEQ ID NO: 10267 - DNA, 120 bp, Artificial Sequence
  ENSG00000008405_19 (sequence is synthesized)
tggggagttcaatacttttcaattaagttatttaaaaatattcttcattgatggaaagcagttacatattgaaatatgttgtttctaatgacatttctgtggtttttaactttttaatga

SEQ ID NO: 10268 - DNA, 120 bp, Artificial Sequence
  ENSG00000008405_20 (sequence is synthesized)
atttcacagaggacaattggtaatttgtatataaagaacttggcaagagaatttgcttaatgtaaatataaacagtcacaattagtatagacccatcgatatatttttgataatttttca

SEQ ID NO: 10269 - DNA, 120 bp, Artificial Sequence
  ENSG00000008405_21 (sequence is synthesized)
tgtatggtaaagttaaaatgacaaattgatattctgatataaaactcaaagttttgaagtcagtgggaaaaaaggaggtttttagactttcttaaaagacgttaaaattttaggacagaa

SEQ ID NO: 10270 - DNA, 120 bp, Artificial Sequence
  ENSG00000008405_22 (sequence is synthesized)
ttttcttgatgttgtttgatctaactttgcactctttgataataatgttttagataatgtgcgtaatccaaattggtattgtagcctctgttaacacagacagtatatgttttaaacttt

SEQ ID NO: 10271 - DNA, 120 bp, Artificial Sequence
  ENSG00000008405_23 (sequence is synthesized)
gatgtaaacctttttagacccaaacttgtggaagtatcatgtgttaagttctctgtctctgtttctttgttcatttattactaaaatgaacttgttattaaagtatatgcaaatatgaaa

SEQ ID NO: 10272 - DNA, 120 bp, Artificial Sequence
  ENSG00000008405_24 (sequence is synthesized)
ataatttcaaaaatggagcaaatctctattttcaaaccagaaaatcttgaggcattaatttttaagcaatttttacaaactcagttaatttttggtcaagagacatgcatctgtactgga

SEQ ID NO: 10273 - DNA, 120 bp, Artificial Sequence
  ENSG00000008405_25 (sequence is synthesized)
gaaattgttgcaccagttttatattcatctgaaccaatgctctttaaattagagatgtttatgattttgtggtcaagttttttcttagaaaaagacaacttttttatttccttactatgt

SEQ ID NO: 10274 - DNA, 120 bp, Artificial Sequence
  ENSG00000008405_26 (sequence is synthesized)
aatactggaggtcacatttcaacatgagctttgtaggggacacaatgtccaaatcatatcacttattctgtctctcccttccttttttggtgctacctgcctatcctaccttccttcttc

SEQ ID NO: 10275 - DNA, 120 bp, Artificial Sequence
  ENSG00000008405_27 (sequence is synthesized)
caaacttccctccccttgccatctttcttcccagccctcctcattgtttttctctctacctttccattttttctagctttttcttcttctctttccattattcctattttcttatggaaa

SEQ ID NO: 10276 - DNA, 120 bp, Artificial Sequence
  ENSG00000008405_28 (sequence is synthesized)
gatgctctcttgcttttactttccccttgtgtctcccccactttgtcttttgtaaccactccattttctttatctccttacttccttgaatgccttagtttttcttccttccaactgttc

SEQ ID NO: 10277 - DNA, 120 bp, Artificial Sequence
  ENSG00000008405_29 (sequence is synthesized)
ttccacttgtatatctagttttatagcaattagggccatttctacagcacttcaaactaaatacatgttaaactgggcatttctacttctggaagtggctgatttggttgtcctagacca

SEQ ID NO: 10278 - DNA, 120 bp, Artificial Sequence
  ENSG00000008405_30 (sequence is synthesized)
aacaccaggaaaggaagcttggcttggggatgttggaccacttggctggggcggtggttcagttgcatcttagtctcagagatgaaggagagtcacggctactcaccgccagagcaagac

SEQ ID NO: 10279 - DNA, 120 bp, Artificial Sequence
  ENSG00000008405_31 (sequence is synthesized)
accctccagccatagttccaattctacgatggcatagcgtagtagccctgtagctgcagggtgtggagcctagtgtttgctttttctctacggtgagcacagttacgtggactccagatt

SEQ ID NO: 10280 - DNA, 120 bp, Artificial Sequence
  ENSG00000008405_32 (sequence is synthesized)
agtgacattaatataatctttttatgaactttcccctaaatctttgcctcttaaatgttgataaatttcttttatctgttatgatgcttctaaaatctaaattatttccaatttgggaat

SEQ ID NO: 10281 - DNA, 120 bp, Artificial Sequence
  ENSG00000008405_33 (sequence is synthesized)
agttcaaaattttttaaaatgctggcccttattagaagtatcagaaagccttgcctgcattcaatttaattggatttgggatgtcattttgtgatttaaattaatatgaaaaatatttat

SEQ ID NO: 10282 - DNA, 120 bp, Artificial Sequence
  ENSG00000008405_34 (sequence is synthesized)
acgttggatttgccagtttttaaaaattttctgtttcttcagtttctaacactgtttacattttttattgcttagtttttttatgtcaacctaattagactataagtatcttgaagataa

SEQ ID NO: 10283 - DNA, 120 bp, Artificial Sequence
  ENSG00000008405_35 (sequence is synthesized)
ggtcaataaacactcatcacatttttgtcattgaattatttgcaatcaagctttacctagtttttttttcccccttaaatcacagaaaacattcaggaggaatactgttgcagctgaaat

SEQ ID NO: 10284 - DNA, 120 bp, Artificial Sequence
  ENSG00000008405_36 (sequence is synthesized)
aatttacattgacactgaggttacactctaacttctttttccccaaatgatgatcattttccacaaaatgatggccagttattccaacactacttattggatcatttccaattcagtgag

SEQ ID NO: 10285 - DNA, 120 bp, Artificial Sequence
  ENSG00000008405_37 (sequence is synthesized)
ctttaaaaaaaaattctgataatacttctttgctttttaaccataggtaaagaagaacagttcccctcccctttccctttatgggcaactgttatggcgtgaatttttctatacagcagc

SEQ ID NO: 10286 - DNA, 120 bp, Artificial Sequence
  ENSG00000008438_0 (sequence is synthesized)
agcggtctcccggaccctgccgccctgccactatgtcccgccgctctatgctgcttgcctgggctctccccagcctccttcgactcggagcggctcaggagacagaagacccggcctgct

SEQ ID NO: 10287 - DNA, 120 bp, Artificial Sequence
  ENSG00000008438_1 (sequence is synthesized)
gcagccccatagtgccccggaacgagtggaaggccctggcatcagagtgcgcccagcacctgagcctgcccttacgctatgtggtggtatcgcacacggcgggcagcagctgcaacaccc

SEQ ID NO: 10288 - DNA, 120 bp, Artificial Sequence
  ENSG00000008438_2 (sequence is synthesized)
acgagggccgtggctggaacttcacgggtgcccactcaggtcacttatggaaccccatgtccattggcatcagcttcatgggcaactacatggatcgggtgcccacaccccaggccatcc

SEQ ID NO: 10289 - DNA, 120 bp, Artificial Sequence
  ENSG00000008438_3 (sequence is synthesized)
gggcagcccagggtctactggcctgcggtgtggctcagggagccctgaggtccaactatgtgctcaaaggacaccgggatgtgcagcgtacactctctccaggcaaccagctctaccacc

SEQ ID NO: 10290 - DNA, 120 bp, Artificial Sequence
  ENSG00000008438_4 (sequence is synthesized)
tcatccagaattggccacactaccgctccccctgaggccctgctgatccgcaccccattcctcccctcccatggccaaaaaccccactgtctccttctccaataaagatgtagctcaaaa

SEQ ID NO: 10291 - DNA, 120 bp, Artificial Sequence
  ENSG00000008441_0 (sequence is synthesized)
atgtactccccgtactgcctcacccaggatgagttccacccgttcatcgaggcactgctgcctcacgtccgcgctttctcctacacctggttcaacctgcaggcgcggaagcgcaagtac

SEQ ID NO: 10292 - DNA, 120 bp, Artificial Sequence
  ENSG00000008441_1 (sequence is synthesized)
ttcaagaagcatgaaaagcggatgtcgaaggacgaggagcgggcggtgaaggacgagctgctgggcgagaagcccgagatcaagcagaagtgggcatcccggctgctggccaagctgcgc

SEQ ID NO: 10293 - DNA, 120 bp, Artificial Sequence
  ENSG00000008441_2 (sequence is synthesized)
aaggacatccggcccgagttccgcgaggacttcgtgctgaccatcacgggcaagaagcccccctgctgcgtgctctccaaccccgaccagaagggcaagatccggcggattgactgcctg

SEQ ID NO: 10294 - DNA, 120 bp, Artificial Sequence
  ENSG00000008441_3 (sequence is synthesized)
cgccaggctgacaaggtgtggcggctggacctggtcatggtgattttgtttaaggggatccccctggaaagtactgatggggagcggctctacaagtcgcctcagtgctcgaaccccggc

SEQ ID NO: 10295 - DNA, 120 bp, Artificial Sequence
  ENSG00000008441_4 (sequence is synthesized)
ctgtgcgtccagccacatcacattggagtcacaatcaaagaactggatctttatctggcttactttgtccacactccggaatccggacaatcagatagttcaaaccagcaaggagatgcg

SEQ ID NO: 10296 - DNA, 120 bp, Artificial Sequence
  ENSG00000008441_5 (sequence is synthesized)
gacatcaaaccactgcccaacgggcacttaagtttccaggactgttttgtgacttccggggtctggaatgtgacggagctggtgagagtatcacagactcctgttgcaacagcatcaggg

SEQ ID NO: 10297 - DNA, 120 bp, Artificial Sequence
  ENSG00000008441_6 (sequence is synthesized)
cggtccatcacctcccctccttccaccagcaccaccaagcgccccaagtccatcgatgacagtgagatggagagccctgttgatgacgtgttctatcccgggacaggccgttccccagca

SEQ ID NO: 10298 - DNA, 120 bp, Artificial Sequence
  ENSG00000008441_7 (sequence is synthesized)
gctggcagcagccagtccagcgggtggcccaacgatgtggatgcaggcccggcttctctaaagaagtcaggaaagctggacttctgcagtgccctctcctctcagggcagctccccgcgc

SEQ ID NO: 10299 - DNA, 120 bp, Artificial Sequence
  ENSG00000008441_8 (sequence is synthesized)
atggctttcacccaccacccgctgcctgtgcttgctggagtcagaccagggagcccccgggccacagcatcagccctgcacttcccctccacgtccatcatccagcagtcgagcccgtat

SEQ ID NO: 10300 - DNA, 120 bp, Artificial Sequence
  ENSG00000008441_9 (sequence is synthesized)
ttcacgcacccgaccatccgctaccaccaccaccacgggcaggactcactgaaggagtttgtgcagtttgtgtgctcggatggctcgggccaggccaccggacagcccaacggtagcggc

SEQ ID NO: 10301 - DNA, 120 bp, Artificial Sequence
  ENSG00000008441_10 (sequence is synthesized)
cagggcaaagtcccggggtcatttttgctaccgccgccgcctccagtggccagacctgtgccccttcctatgcctgattccaaatccaccagcactgccccagacggcgccgccttgact

SEQ ID NO: 10302 - DNA, 120 bp, Artificial Sequence
  ENSG00000008441_11 (sequence is synthesized)
cctccatcaccttcattcgcaacgacaggcgcctcctctgccaaccggtttgtcagcatcggaccccgggacggcaactttctgaacatcccacagcagtctcagtcctggttcctctga

SEQ ID NO: 10303 - DNA, 120 bp, Artificial Sequence
  ENSG00000008441_12 (sequence is synthesized)
cagacggacactgtgccggggcgagctgacaggagttcacggctgcgatagaacatggagatgtcatgggcgcgacagagcctggcggggataccagcagcgatgagttccacccgttca

SEQ ID NO: 10304 - DNA, 120 bp, Artificial Sequence
  ENSG00000008441_13 (sequence is synthesized)
acaaaagaaacaacaaaatgagaagaagaggttcctcgaaaggggggagaagaaattttgagaatggaaaaatcccccagcccagcccagccccaccgaaaagcaaaaattacacgtcgt

SEQ ID NO: 10305 - DNA, 120 bp, Artificial Sequence
  ENSG00000008441_14 (sequence is synthesized)
cagccactcagcccttctctcctccagcccggggacccccgcgggccccagaagcagcccagttctcagagagcccttggaaggggtctcggtggagctgtgcaccagcagccaagcaga

SEQ ID NO: 10306 - DNA, 120 bp, Artificial Sequence
  ENSG00000008441_15 (sequence is synthesized)
aagaaacacgcgacatggactctgtcaagtagaggacagaaagcaagaaaggatgcagaactgccttcctccccctgaccccgccccggccttctggggaaggaacaaagtccccaaaca

SEQ ID NO: 10307 - DNA, 120 bp, Artificial Sequence
  ENSG00000008441_16 (sequence is synthesized)
aagcaaccagcacaattctgaaggggcctggcctccaccctcaccccttcctaggggaaccccaccctccacacagccggagctgccctagggagcctggagggccagcttgtaaagatg

SEQ ID NO: 10308 - DNA, 120 bp, Artificial Sequence
  ENSG00000008441_17 (sequence is synthesized)
atggggtttagatccctcaggctctcccctccagactccgcccttccctccctccctccctccctccctctctgccaaggctccagcttcttcccccagctgctcccgaccaggaggggg

SEQ ID NO: 10309 - DNA, 120 bp, Artificial Sequence
  ENSG00000008441_18 (sequence is synthesized)
agagcagcctccacttaccccaccccacccttgggctaaaagcccccaggcgggcagggggtgacccctggagctagttgcgtgtcccagaatggagggtgttctgacaccccaccctga

SEQ ID NO: 10310 - DNA, 120 bp, Artificial Sequence
  ENSG00000008441_19 (sequence is synthesized)
gccgcaagagcagtcctggggccctggacccctctgtacagtccgtaggaaaaagtcggaatgctctcgacggcctcgtcccagcctgggacaggccccctttcccctctctctgcaggc

SEQ ID NO: 10311 - DNA, 120 bp, Artificial Sequence
  ENSG00000008441_20 (sequence is synthesized)
caggagggcctccttcctgccacgagggaggggagtcgggccccaggtcgcccccgcccccagccctgcatgcaggtgccctcgctccgccccatcagttcctgcccctgcccctcatgc

SEQ ID NO: 10312 - DNA, 120 bp, Artificial Sequence
  ENSG00000008441_21 (sequence is synthesized)
agactgccctgctggggccgggccggagggtggagcagaaaggggaccccggagccgagcgaggaggaccaggcagccgccgctgccgcgctaagccaccacctgcgcttaggtaggcgt

SEQ ID NO: 10313 - DNA, 120 bp, Artificial Sequence
  ENSG00000008441_22 (sequence is synthesized)
cctgctcgccgactttcagttccttgggagggtgttgggtgtcgtccttttcaaaagtgttttggagctttctgtgccccccgactttcccccgcctccccgccccccacgtggccactt

SEQ ID NO: 10314 - DNA, 120 bp, Artificial Sequence
  ENSG00000008441_23 (sequence is synthesized)
ttctctggattttagctgtaatgtctttactctttatttaggggtggggcattcattgtttgggtcttttgctgttggaatgggaactcctcctccatttgagcaacttgggaacaattt

SEQ ID NO: 10315 - DNA, 120 bp, Artificial Sequence
  ENSG00000008441_24 (sequence is synthesized)
tggggggcctgtccagagggtcttcagaagcccccctgggagggaggggaggatgagcacgcccagctcccctccagggtgtgacttggcccctctggcttgtctttctgtgccttactc

SEQ ID NO: 10316 - DNA, 120 bp, Artificial Sequence
  ENSG00000008441_25 (sequence is synthesized)
ctcctcctgcgtctcccgttcctggccccttcttgagtccttgtgcctctctctttctctctctttcttaattgtatgaaaacacaaagcacaggtcaggatcctctgagagaaaatcaa

SEQ ID NO: 10317 - DNA, 120 bp, Artificial Sequence
  ENSG00000008441_26 (sequence is synthesized)
cattgcaccacgtaggggtgggctatgggctgtatttattgtgaatctagtttgtgaggctgtggccccgagctggcggagggagggaagaggagggagtgacgggaggggaggaggtca

SEQ ID NO: 10318 - DNA, 120 bp, Artificial Sequence
  ENSG00000008441_27 (sequence is synthesized)
gcgacctggggccgtagcggcaggcgaacggtgcctgctacccagctggaagccacaaggtggctggctccaggggcggcttttgttggaagttgagtgaagccctccccctgtcctcag

SEQ ID NO: 10319 - DNA, 120 bp, Artificial Sequence
  ENSG00000008441_28 (sequence is synthesized)
cgtgcagccctagaggaccccagggctgaggggcagtggatcctgcgggagtctcccggggcgtggggagtaaggccccgggggtggggggccgggtgggccgggcgtgacgcgcggtca

SEQ ID NO: 10320 - DNA, 120 bp, Artificial Sequence
  ENSG00000008441_29 (sequence is synthesized)
aagtgcaatgatttttcagttcggttggctaaacagggtcagagctgagagcgaagcagaaggggctccctgtccggcccacgtgccctttccctcgacgacagtcgagggctcgggctc

SEQ ID NO: 10321 - DNA, 120 bp, Artificial Sequence
  ENSG00000008441_30 (sequence is synthesized)
acagtcgagggctcgggctctgtgggactgtgggagctagggtctgcggggcgcctgcccgggcgaggtcggaagctgcaggccagctgggcccgggccggagcgtgcccggcggggctg

SEQ ID NO: 10322 - DNA, 120 bp, Artificial Sequence
  ENSG00000008441_31 (sequence is synthesized)
gggctgctcctttcccaagtggtgttgtgaggggcaatgagggcaacaggagatgtggggacgtgttaggagagaaaaaaaaaaaaacaaaaatatatatgggggaaattaacttttttt

SEQ ID NO: 10323 - DNA, 120 bp, Artificial Sequence
  ENSG00000008441_32 (sequence is synthesized)
tttcattgaaccaagtgcaatgcatcagagagttttcctatctttgtatgttaagagattaagaaaaaaaaattctatttttgttgtaatgtcctcgcggctctggggacgctaaaagaa

SEQ ID NO: 10324 - DNA, 120 bp, Artificial Sequence
  ENSG00000008441_33 (sequence is synthesized)
ttgttgtaatgtcctcgcggctctggggacgctaaaagaaccgggcctgccccgccctgcgcggggataacgaaagctgagtgtttttcccttttttttgttcgtttttagttttttttt

SEQ ID NO: 10325 - DNA, 120 bp, Artificial Sequence
  ENSG00000008441_34 (sequence is synthesized)
tttttatttgtttcgtcgttcgttctgtttcggtgggagggctgaaggaaacgttcacattttagagtttaaaaaaaacacctcgacatttaaaaaatcaaccaacacaagatcaaaaag

SEQ ID NO: 10326 - DNA, 120 bp, Artificial Sequence
  ENSG00000008441_35 (sequence is synthesized)
gaaaaggacgagagaaaaattatttttaagataattaaacataaaaccctggtgcttcttacattataaagtacgttttaaagaacccacaaactattatacataagtttatgaatcaat

SEQ ID NO: 10327 - DNA, 120 bp, Artificial Sequence
  ENSG00000008441_36 (sequence is synthesized)
taaatatcctgcacttgttaggaatacgcatatcccttctttgttgagtttaacggaacgggacagcggcgtgcccccggcggctggactgctccggccgcgggtctccccgggcgcccc

SEQ ID NO: 10328 - DNA, 120 bp, Artificial Sequence
  ENSG00000008441_37 (sequence is synthesized)
tccctggggcccagcacccctcctcgccccatccccgtccgggtacgggggcgcggcaggggtccccggcccctcccccgcagaggtcaatgccaacgaacaaacgtcccctccctccct

SEQ ID NO: 10329 - DNA, 120 bp, Artificial Sequence
  ENSG00000008441_38 (sequence is synthesized)
ccctctccgccccgagcgcccttctttgagccagacgccaacttgaccctcaccagcattatcaggagcgcgctcagcaagttggtagtttcctcccccctttcccggcgcccctcccgc

SEQ ID NO: 10330 - DNA, 120 bp, Artificial Sequence
  ENSG00000008441_39 (sequence is synthesized)
ccccattcaacatctctcatcctatccccgaccccctccggggaacaccgggaaggctcgacgctccaggacaggaccagccacgctgacaggtcgatttgcccaggcccgcgcccgcac

SEQ ID NO: 10331 - DNA, 120 bp, Artificial Sequence
  ENSG00000008441_40 (sequence is synthesized)
gcacgcacgcacacggccccgcacacagccccgccccaccccgcaaccagccctgtcgactgccttatacacccgcccccgcgctggccggccgacctagtgccttgttctcacccccgt

SEQ ID NO: 10332 - DNA, 120 bp, Artificial Sequence
  ENSG00000008441_41 (sequence is synthesized)
gctggcggagcggacgccgcgctctgggtcccagaggggccgggtggctcagacgacccaccactcccccaccctgaccgtgctgaacagacccccccacacgagagaaaataaaggagc

SEQ ID NO: 10333 - DNA, 120 bp, Artificial Sequence
  ENSG00000008441_42 (sequence is synthesized)
aataaagtcacgagaactttcgtcccccaatcgagagcccgaggggcaccccagccccgcctctgctcccccccaccccacccaccctcggggcgcccccctccccccgcaagccagcct

SEQ ID NO: 10334 - DNA, 120 bp, Artificial Sequence
  ENSG00000008441_43 (sequence is synthesized)
gggccagccccgcttcggcccctcccgggagatccgtgcgcccgaccagcaccagcatcgcggaccgcaaaggccgcccgtcccgtcaaacaagtttcttcttaggctaagaaacgcagt

SEQ ID NO: 10335 - DNA, 120 bp, Artificial Sequence
  ENSG00000008441_44 (sequence is synthesized)
atatacgagtatctctatatatagtactaatggatttggtgtgcttcccccttagcgtccccctccctctgctcctcctccttcagcctggtctccccctcttctctgccctccaccccc

SEQ ID NO: 10336 - DNA, 120 bp, Artificial Sequence
  ENSG00000008441_45 (sequence is synthesized)
gtctctgcactgagatacataagaaacaagggtagtttactgtctgttttgttttctgggttttcagtgtcctagcggaatgcaagtaggcagccagcccgtctgttccctctccgcccc

SEQ ID NO: 10337 - DNA, 120 bp, Artificial Sequence
  ENSG00000008441_46 (sequence is synthesized)
gccccgccccgcccccgtcactgcgcttctgttataccatctttgcctgactctctccggcttctccattgaatggctaatgtgtatgtgaaataaagaaataaagaaaaacaaacgcga

SEQ ID NO: 10338 - DNA, 120 bp, Artificial Sequence
  ENSG00000008441_47 (sequence is synthesized)
ggacactgtgccggggcgagctgacaggagttcacggctgcgatagaacatggagatgtcatgggcgcgacagagcctggcggggataccagcagcgtgatgagttccacccgttcatcg

SEQ ID NO: 10339 - DNA, 120 bp, Artificial Sequence
  ENSG00000008441_48 (sequence is synthesized)
agttcacggctgcgatagaacatggagatgtcatgggcgcgacagagcctggcggggataccagcagcgtgtgtgtgtggacggcaacgttgtctgtgcgcgtgtgtgatgagttccacc

SEQ ID NO: 10340 - DNA, 120 bp, Artificial Sequence
  ENSG00000008441_49 (sequence is synthesized)
atagaacatggagatgtcatgggcgcgacagagcctggcggggataccagcagcgtgtgtgtgtggacggcaacgttgtctgtgcgcgtgtgtgtgagatgagttccacccgttcatcga

SEQ ID NO: 10341 - DNA, 120 bp, Artificial Sequence
  ENSG00000008441_50 (sequence is synthesized)
agacggacactgtgccggggcgagctgacaggagttcacggctgcgatagaacatggagatgtcatgggcgcgacagagcctggcggggataccagcagcgtgtgatgagttccacccgt

SEQ ID NO: 10342 - DNA, 120 bp, Artificial Sequence
  ENSG00000008513_0 (sequence is synthesized)
cccgcctcctcgcttcctcggctccagcctccgccggcggagcccactatgccagacagtttcgacactttgcaaagacaaagagccctagaccggagggaggaggaggaggaagaagag

SEQ ID NO: 10343 - DNA, 120 bp, Artificial Sequence
  ENSG00000008513_1 (sequence is synthesized)
cggagagagaaggaagaggcgatgtgagctgggaagggggcaagtgtccgggacacccacacccctgtattctcctccgaaccccttcatgcccaaatcccggaaactccagcgtgtctc

SEQ ID NO: 10344 - DNA, 120 bp, Artificial Sequence
  ENSG00000008513_2 (sequence is synthesized)
cagccgtgttggtaccattttcagatttcatcttcctaaactggaaatgtcaatgagaggaaattaacacccccaagagctgcagtgagcaaatgcattgagcttgggtcaggacaattc

SEQ ID NO: 10345 - DNA, 120 bp, Artificial Sequence
  ENSG00000008513_3 (sequence is synthesized)
catttggggaccagagatggacggtcactcagcctatggaggtaaagtgactaatctgaacaaagcagagactccactgatgagaaaagcagatgacagacaaccttctgtgccttcatc

SEQ ID NO: 10346 - DNA, 120 bp, Artificial Sequence
  ENSG00000008513_4 (sequence is synthesized)
aagctggttgtgtacccaccatgtccctggcgacaggatgggaaagaaaaagccctaattaaggatcgtcagaaaccacagttggaggaggacggcagagacagtttccctccccgctat

SEQ ID NO: 10347 - DNA, 120 bp, Artificial Sequence
  ENSG00000008513_5 (sequence is synthesized)
accaacacccttccttcgaggtcctcgctcctgagggaccctggactgtcacagagattaatgaccccttatcttctttggatgtgaaaggaaatcactggttaaagcttgatcgagaga

SEQ ID NO: 10348 - DNA, 120 bp, Artificial Sequence
  ENSG00000008513_6 (sequence is synthesized)
cattatcagctctttaaggattgcagaagaataggctactttattttctgaaaaggagggagttcctgctacccatcgtgggaggccaccatcaggactgcgaagatggtgaccctgcgg

SEQ ID NO: 10349 - DNA, 120 bp, Artificial Sequence
  ENSG00000008513_7 (sequence is synthesized)
aagaggaccctgaaagtgctcaccttcctcgtgctcttcatcttcctcacctccttcttcctgaactactcccacaccatggtggccaccacctggttccccaagcagatggtcctggag

SEQ ID NO: 10350 - DNA, 120 bp, Artificial Sequence
  ENSG00000008513_8 (sequence is synthesized)
ctctccgagaacctgaagagactgatcaagcacaggccttgcacctgcacccactgcatcgggcagcgcaagctctcggcctggttcgatgagaggttcaaccagaccatgcagccgctg

SEQ ID NO: 10351 - DNA, 120 bp, Artificial Sequence
  ENSG00000008513_9 (sequence is synthesized)
ctgaccgcccagaacgcgctcttggaggacgacacctaccgatggtggctgaggctccagcgggagaagaagcccaataacttgaatgacaccatcaaggagctgttcagagtggtgcct

SEQ ID NO: 10352 - DNA, 120 bp, Artificial Sequence
  ENSG00000008513_10 (sequence is synthesized)
gggaatgtggaccctatgctggagaagaggtcggtgggctgccggcgctgcgccgttgtgggcaactcgggcaacctgagggagtcttcttatgggcctgagatagacagtcacgacttt

SEQ ID NO: 10353 - DNA, 120 bp, Artificial Sequence
  ENSG00000008513_11 (sequence is synthesized)
gtcctcaggatgaacaaggcgcccacggcagggtttgaagctgatgttgggaccaagaccacccaccatctggtgtaccctgagagcttccgggagctgggagataatgtcagcatgatc

SEQ ID NO: 10354 - DNA, 120 bp, Artificial Sequence
  ENSG00000008513_12 (sequence is synthesized)
ctggtgcccttcaagaccatcgacttggagtgggtggtgagcgccatcaccacgggcaccatttcccacacctacatcccggttcctgcaaagatcagagtgaaacaggataagatcctg

SEQ ID NO: 10355 - DNA, 120 bp, Artificial Sequence
  ENSG00000008513_13 (sequence is synthesized)
atctaccacccagccttcatcaagtatgtctttgacaactggctgcaagggcacgggcgatacccatctaccggcatcctctcggtcatcttctcaatgcatgtctgcgatgaggtggac

SEQ ID NO: 10356 - DNA, 120 bp, Artificial Sequence
  ENSG00000008513_14 (sequence is synthesized)
ttgtacggcttcggggcagacagcaaagggaactggcaccactactgggagaacaacccatccgcgggggcttttcgcaagacgggggtgcacgatgcagactttgagtctaacgtgacg

SEQ ID NO: 10357 - DNA, 120 bp, Artificial Sequence
  ENSG00000008513_15 (sequence is synthesized)
gccaccttggcctccatcaataaaatccggatcttcaaggggagatgacgcagtgaagggctgaggatggacgcactgtcacacctctgcatttccagccccagcatcttgctggagccg

SEQ ID NO: 10358 - DNA, 120 bp, Artificial Sequence
  ENSG00000008513_16 (sequence is synthesized)
ttccatcccggagcttggaggggcagcctcaggtgtgtgcctgggcaccgctcacagcctcttgcacccagccgttggcagcatctactcagcaaggtcactaagctctgccagcgtggc

SEQ ID NO: 10359 - DNA, 120 bp, Artificial Sequence
  ENSG00000008513_17 (sequence is synthesized)
agagcatgtcttggaacctgtcttgagtggggacaacgtccccccactgctgccctagagctggggagacgctgggaaaggttcaacctccacacactaaaatcattttggctcctgggg

SEQ ID NO: 10360 - DNA, 120 bp, Artificial Sequence
  ENSG00000008513_18 (sequence is synthesized)
caagcttggggaatgaatgtggaagatgcctatattctgagagacaggacagtttcccaggaagatgggcagagacttgagtggcgattacctccagcacagagacgtgccaggcggtgt

SEQ ID NO: 10361 - DNA, 120 bp, Artificial Sequence
  ENSG00000008513_19 (sequence is synthesized)
tggcgctcggggcgagatgctgcccttctttgcacgaagcctggcctcttgcttggcgtgataaccctgtcatcttcccaaagctcatttatgagccaccagaggctcctaccccaaaga

SEQ ID NO: 10362 - DNA, 120 bp, Artificial Sequence
  ENSG00000008513_20 (sequence is synthesized)
gagactcctgtctctacaaaaataaaagatttaaaaaaattagccaggcacggtggcacacacttgtagccccagctactagggaggctgaggagggaggatctcttgtgcctaggagtt

SEQ ID NO: 10363 - DNA, 63 bp, Artificial Sequence
  ENSG00000008513_21 (sequence is synthesized)
agggaggctgaggagggaggatctcttgtgcctaggagttcgaggctgcagtgaaaaaaaaaa

SEQ ID NO: 10364 - DNA, 120 bp, Artificial Sequence
  ENSG00000008513_22 (sequence is synthesized)
tctgactcctgcagatgcctcttcccaagcagttgttcctttgagtagtcagtctcatggttctaatcgtggcgagagcggatctgaccacttccatgtgcctttgtatttgggaaagaa

SEQ ID NO: 10365 - DNA, 120 bp, Artificial Sequence
  ENSG00000008513_23 (sequence is synthesized)
aagcatgcattggctgaaatgaaacaaaagcccttacttgggaaaagggacccccaccagcggccctgcttgctccgtagctgggaacatcttttctggtttcctgagccagcacctgaa

SEQ ID NO: 10366 - DNA, 120 bp, Artificial Sequence
  ENSG00000008513_24 (sequence is synthesized)
ttgcaacgaagctctgaggatactcaacaccacccagcagtgcgtcagaatggaacgtacattctcattctcagactgttcaatatggtgcccgtaacctccaaagccacacaggaggct

SEQ ID NO: 10367 - DNA, 120 bp, Artificial Sequence
  ENSG00000008513_25 (sequence is synthesized)
gccagcagcattttccccaagggcctgagctcagggtcaagtccctgctggccatcttggggctgtcactgggggtctgggtcaaggacatcccaggaatggtaactgccacatacctca

SEQ ID NO: 10368 - DNA, 120 bp, Artificial Sequence
  ENSG00000008513_26 (sequence is synthesized)
tcttcttactccccagctactctcttttcctcattagccttcctgattatttattgatttcttttttttattcaactgacattgtttgcaccctggctctgttggtggtcctggtgtttt

SEQ ID NO: 10369 - DNA, 120 bp, Artificial Sequence
  ENSG00000008513_27 (sequence is synthesized)
gcttaagggaggtttgtaggagtcctcggacgtgggatattgggggtatctagggcttggatggtttgtggaatgtcctcagcatcctcccgtcccaacccaaccttccttcttcctcat

SEQ ID NO: 10370 - DNA, 120 bp, Artificial Sequence
  ENSG00000008513_28 (sequence is synthesized)
tgtggacttggatttattctcaggctaggagtctccaaaactccgtgaaaccttattgctgctgggtgtggagtggagagtgacaggaatgtgggggacggtgattgttggctccagtta

SEQ ID NO: 10371 - DNA, 120 bp, Artificial Sequence
  ENSG00000008513_29 (sequence is synthesized)
ctaatgtttaagcagaaaaaccactttcttgttgaaaatatccctgaaaaggtcgctgctgctttgaggaggcgtgactttttcctggtggagtgtgacggaggcatggggcctgtgctc

SEQ ID NO: 10372 - DNA, 120 bp, Artificial Sequence
  ENSG00000008513_30 (sequence is synthesized)
ccaggctcgggggagccccctctgcacacggggagggaggaacttggggacatcagtcatgggtcacaggtggcttcaggccattcacaagagtccccggaagttgcgtgccaagtttgg

SEQ ID NO: 10373 - DNA, 120 bp, Artificial Sequence
  ENSG00000008513_31 (sequence is synthesized)
ttttttccctgaatctctgcatatgagcatttttctggagaaaggaccatagcttttattagattctcaaaggttcagaatggggaatgtgttaaacaaaccgaaaacctgtttcagctt

SEQ ID NO: 10374 - DNA, 120 bp, Artificial Sequence
  ENSG00000008513_32 (sequence is synthesized)
taaaatcctccaaaactttaaagacttttcttttttctgagaaaggctggtaaatcactgagtcatcattcagaacatacagcctcgaagggcagagctcacacccatatatgacgttaa

SEQ ID NO: 10375 - DNA, 120 bp, Artificial Sequence
  ENSG00000008513_33 (sequence is synthesized)
gagctcaacaaatgtttgttgagtgactgagtgaccccaggggcagactccagatcatcagacactgatacagagagcgatgctatctcctcaactctccctcttctcctaaaagctgag

SEQ ID NO: 10376 - DNA, 120 bp, Artificial Sequence
  ENSG00000008513_34 (sequence is synthesized)
tctatatagggatgacaggctcaggctgagcagtcgacttctctgggttttgctgtgtaagaataggtccctcaacatgaagatgtgtctgcgtctgagccagatgctgcctgggtcggt

SEQ ID NO: 10377 - DNA, 120 bp, Artificial Sequence
  ENSG00000008513_35 (sequence is synthesized)
tgcctggcctccgtctggtctccctccctcctactagggtggtcaagctgtgagatctcttccagcctccaaatccagctttcccattttactgatgagaaaatcaaggccacattgcag

SEQ ID NO: 10378 - DNA, 120 bp, Artificial Sequence
  ENSG00000008513_36 (sequence is synthesized)
ctgggtggggagtggagcgtgacaggcacgggagaggacagcgattgttgactctagttcctgatgtttaatcagaaaaaccacttttcctgtagagcacatttcctaaaaggctgctgc

SEQ ID NO: 10379 - DNA, 120 bp, Artificial Sequence
  ENSG00000008513_37 (sequence is synthesized)
tgtgtagggaggtgtggccttttcctggtgcagtgtgaaggagggaagtgacgggcagtcgtgaactgtctgggacagatagcacaagtcagagtttgagcaaaactagggtgttaccgg

SEQ ID NO: 10380 - DNA, 120 bp, Artificial Sequence
  ENSG00000008513_38 (sequence is synthesized)
cgctatgttgaaattgtctggaggcgggctttcccagcgagtctccattcagcatctggaaaaagtgtaaccagaatggaggtgtctgactctcctgtgctctctcagcgccgagctcta

SEQ ID NO: 10381 - DNA, 120 bp, Artificial Sequence
  ENSG00000008513_39 (sequence is synthesized)
gctgcaggctgcctgggtggccttctcacaccctcccgtgcaggagactgcatttctctttcccacagcccagcagatagctcattggcttagcaatgggcacttaacagaatccagttg

SEQ ID NO: 10382 - DNA, 120 bp, Artificial Sequence
  ENSG00000008513_40 (sequence is synthesized)
ttgcagccagaattaaatgcaccagtctggcttaaaccaactggaactcatccctggggtgaaggtggctgggaattagacaagagtgtgtgttagccaaaaggcacatgcatgctgtca

SEQ ID NO: 10383 - DNA, 120 bp, Artificial Sequence
  ENSG00000008513_41 (sequence is synthesized)
gcaggagaatgaggagcactggttctgggcaggcagtggcaggggctccctcaggcccctgattcccagcccacagctctttctactctgcagacagagttccttggagactggccctgc

SEQ ID NO: 10384 - DNA, 120 bp, Artificial Sequence
  ENSG00000008513_42 (sequence is synthesized)
attcaggcagggagcagaggggtccctgcctgcagcacccagagctgaacctgaagctacaaagatgggctgatgaggtggcccatgaggtgtcagcaacatcccaaccccctgggtctc

SEQ ID NO: 10385 - DNA, 120 bp, Artificial Sequence
  ENSG00000008513_43 (sequence is synthesized)
cccagtgagtcagggcactgatttgctatagctggagctacatgcacctctcctcccctcagccaccttttaggggagaaaggagggcagatttgtaacctctggttctctgcagggatc

SEQ ID NO: 10386 - DNA, 120 bp, Artificial Sequence
  ENSG00000008513_44 (sequence is synthesized)
ctgggctggaagaaagttcataaatggatgaatgccttttaaaactccagcttttccaagcatcattcaccaaagcatttggttaggcttagagagaaaagctggatatgagaaaataga

SEQ ID NO: 10387 - DNA, 120 bp, Artificial Sequence
  ENSG00000008513_45 (sequence is synthesized)
atgtaaaataggagggaaaaaaaaaaagaaggtggagagggcagttaagatctgggtgattctttagggaaacggctggttgagaggctttgatggaatcccattctctgctgtggccag

SEQ ID NO: 10388 - DNA, 120 bp, Artificial Sequence
  ENSG00000008513_46 (sequence is synthesized)
aaggtggtgctagaggccagtcccacttggatgtgaccctggcctctgccaggattcaaaccacaaagaacatttggaactgggatgtttgctttgaagcagcccgaaaacaagtgaaag

SEQ ID NO: 10389 - DNA, 120 bp, Artificial Sequence
  ENSG00000008513_47 (sequence is synthesized)
gaaaccaagataactctctctccctccgctggcaaggatcaaaaataccttgtgcagggaagcccgagcctcgaggggccactgcccagctaaagatgactggacaccagccatgcacca

SEQ ID NO: 10390 - DNA, 120 bp, Artificial Sequence
  ENSG00000008513_48 (sequence is synthesized)
tcaggaaccagcacctgtcctcacccctgagaagagccccgggggtatcattatatccatcgcagacatctggtttgcagcaaatgtggctacacgccatcaggattatcctgccctgtg

SEQ ID NO: 10391 - DNA, 120 bp, Artificial Sequence
  ENSG00000008513_49 (sequence is synthesized)
gactgggctagctagttttgagatagagtcaacctccccatttttgtttgtcatgaaaacaccagctcctgcacccctggggtgctacctgacacctgtgcaaagaaaaggaggaaaact

SEQ ID NO: 10392 - DNA, 120 bp, Artificial Sequence
  ENSG00000008513_50 (sequence is synthesized)
tagaagaaaaggcagagacaggcaagacagcatctcacagcttgtcaggatcagggcattaccgactattttttcttaccaaaagagcactgaatttcctaggggaaggtgagccacctt

SEQ ID NO: 10393 - DNA, 120 bp, Artificial Sequence
  ENSG00000008513_51 (sequence is synthesized)
tacacctcctgtcctccctcccagcccgtcaagcgatcccatcacccagcctcatcactcagcttcttcctagtacaaaactgccatcggttgtacgtcctgagctgtgggacgtcagct

SEQ ID NO: 10394 - DNA, 120 bp, Artificial Sequence
  ENSG00000008513_52 (sequence is synthesized)
ttaaccctagcctgtctcagggcctcgccctccagccccccgccccttagggtgatcgtgggtttcttcccttcctcctgcacaatcgcttcccttcactgaattcccttcaaagccaaa

SEQ ID NO: 10395 - DNA, 120 bp, Artificial Sequence
  ENSG00000008513_53 (sequence is synthesized)
gtttcttgagcactttttcttgtgtgcagtcttgtgtgtttgggtgttggtgtttttaaatttgctttctattcccccctgcctctctccatgtcgttacgcagctgagcactggttggg

SEQ ID NO: 10396 - DNA, 120 bp, Artificial Sequence
  ENSG00000008513_54 (sequence is synthesized)
atgcattcgaatgacttcagcaagatcctgctttcctcagcccccgctctgttttatttattgtttaatatttccaatgatccaaatcaaagtgaataaacaaagagctattttattgtt

SEQ ID NO: 10397 - DNA, 120 bp, Artificial Sequence
  ENSG00000008513_55 (sequence is synthesized)
ctttaaggattgcagaagaataggctactttattttctgaaaaggtaaatatatgcaagcaaagccaacatgccacgaatggcgttggtctaccacacagccgtgtctgggacacagttg

SEQ ID NO: 10398 - DNA, 120 bp, Artificial Sequence
  ENSG00000008513_56 (sequence is synthesized)
ggggtcatcccccagcaggagtgaagtcgagcttagcggcccttgtgtcctcccttggaattcctgccatcccttttgattgagcctccacctctgggatttttcttccatttttctcct

SEQ ID NO: 10399 - DNA, 120 bp, Artificial Sequence
  ENSG00000008513_57 (sequence is synthesized)
gctgtgccactcaggctggtctggaactactgggctcaagcaattccccagcctcagcctcctaaagcgttgggatttcaggcagacccagaaggcactgcaggacttcagagagcaaag

SEQ ID NO: 10400 - DNA, 120 bp, Artificial Sequence
  ENSG00000008513_58 (sequence is synthesized)
agggaagtcaaggaaccttatcctgtggtttcctctactgatgagtggtggagttgagaatgtccatctttccccaacagcatgatgaagaaactgaggttcagagaggttaagagactc

SEQ ID NO: 10401 - DNA, 120 bp, Artificial Sequence
  ENSG00000008513_59 (sequence is synthesized)
ggaatgtgttgaacttggctgagtggtgcaagggatcccctggtgccatccctgccaaagaccctatcagtgtcatgagcctgaggatgaaatctcccgatggatgacagacaaccttct

SEQ ID NO: 10402 - DNA, 120 bp, Artificial Sequence
  ENSG00000008513_60 (sequence is synthesized)
ggctcccatccagtgctctttaggtgactctcttctctccccacactgagtggcttgaaagggctcagaggcttcacatgagcacttaacatttactgtgtatatctgagccaagtaggg

SEQ ID NO: 10403 - DNA, 120 bp, Artificial Sequence
  ENSG00000008513_61 (sequence is synthesized)
aaagaaactgtctcaccaatcctcacgccctctccccatgctaagtctcccgagtattttcttctgtttttcagatgaagaaactgaggttcagagaggttaagagactccactgaggtc

SEQ ID NO: 10404 - DNA, 120 bp, Artificial Sequence
  ENSG00000008513_62 (sequence is synthesized)
ccctctcccaagcctaccgtgctgcacccaggggccccttggagctgtaggaagcatcttggctcaggctcaggaaggcaaggttcagtcctgggactgaacttacccagggaccccagg

SEQ ID NO: 10405 - DNA, 120 bp, Artificial Sequence
  ENSG00000008513_63 (sequence is synthesized)
ctccacactgcaccccctgggcctcagcttccccatctctgcatcattgcaggattggaatggactagaagggcctctgcgtgcagagaggaagccatacacgggaggtcccccgttgtt

SEQ ID NO: 10406 - DNA, 120 bp, Artificial Sequence
  ENSG00000008513_64 (sequence is synthesized)
gcagtttgggacaggaagcttctgcacgtaggtcccctggctcccatccagtgctctttagatgaagaaactgaggttcagagaggttaagagactccactgaggtcacacagccgatga

SEQ ID NO: 10407 - DNA, 120 bp, Artificial Sequence
  ENSG00000008513_65 (sequence is synthesized)
agagggagtcagccgtgaccctgagggcagtgactggctcgccgcgtccctgcatcaggcattcgcccggctttctcgtgattgtttccgggcacccctggcctctcccgacttctcccc

SEQ ID NO: 10408 - DNA, 120 bp, Artificial Sequence
  ENSG00000008513_66 (sequence is synthesized)
ctcgcgggtccccaagccccgcaagtttgcgacgagctggttctccagggagacagcgagcgcccacccccgctctgcggctgggtgtgtgtggtgagaggaagagacgggaggaggagg

SEQ ID NO: 10409 - DNA, 120 bp, Artificial Sequence
  ENSG00000008513_67 (sequence is synthesized)
ctccgaaccccttcatgcccaaatcccggaaactccagcgtgtctccagccgtggagcaccatgcaaagtgcggagatgcagagaggaaagactactcggtccttgttccttgctgtccc

SEQ ID NO: 10410 - DNA, 120 bp, Artificial Sequence
  ENSG00000008513_68 (sequence is synthesized)
acataccctgtcaggctgcgtatataaatacacaggtgctaagcaaaatgggaacggagaagggaaaggttccctccaccttgagagacccacagaagggtgttctagagatggatgagt

SEQ ID NO: 10411 - DNA, 120 bp, Artificial Sequence
  ENSG00000008513_69 (sequence is synthesized)
cagactgcaagagagcaaagatatcttcctgaatacattcaatatcaaagcatcatgtgccctgtgtgtgcaaaataataataatcataataataaagtaaaataaaagattggctgtaa

SEQ ID NO: 10412 - DNA, 120 bp, Artificial Sequence
  ENSG00000008513_70 (sequence is synthesized)
gttgaacttggctgagtggtgcaagggatcccctggtgccatccctgccaaagaccctatcagtgtcatgagcctgaggatgaaatctcccgatggggaacctcagtttttgcccttaag

SEQ ID NO: 10413 - DNA, 120 bp, Artificial Sequence
  ENSG00000008513_71 (sequence is synthesized)
cctgaaatacctagacgagtgtctgaccaaactactggactccatggcctagccaagctggctcattacatttatttatttacttagagataagtctcgctcccccaggctggagtatga

SEQ ID NO: 10414 - DNA, 85 bp, Artificial Sequence
  ENSG00000008513_72 (sequence is synthesized)
tacttagagataagtctcgctcccccaggctggagtatgatcatagctcattgcagccttgaatacatagctgggatgacagggg

SEQ ID NO: 10415 - DNA, 120 bp, Artificial Sequence
  ENSG00000008516_0 (sequence is synthesized)
agccctccgctcgcgcccggagaggaggggccgctggcgcagcgccccgggaccccgagaggccgccgcggcacatccagacctccgccgctcccgcgccctctcaaccatcctgggatt

SEQ ID NO: 10416 - DNA, 120 bp, Artificial Sequence
  ENSG00000008516_1 (sequence is synthesized)
gattcccgggcccacccgacccagcggcgcgaccctggccctccgggaccctccgctgactccaccgcgcacttcccgggacccccacacacatcccagccctccggccgatccctccct

SEQ ID NO: 10417 - DNA, 120 bp, Artificial Sequence
  ENSG00000008516_2 (sequence is synthesized)
acacatcccagccctccggccgatccctccctactcggtgccgggtgccccccgccctctccaggcccggatctcctcccccaggtccccggggcggccccagccaggcccccttcgaac

SEQ ID NO: 10418 - DNA, 120 bp, Artificial Sequence
  ENSG00000008516_3 (sequence is synthesized)
cggctgcggctccggcttctggcgctgctgcttctgctgctggcaccgcccgcgcgcgccccgaagccctcggcgcaggacgtgagcctgggcgtggactggctgactcgctatggttac

SEQ ID NO: 10419 - DNA, 120 bp, Artificial Sequence
  ENSG00000008516_4 (sequence is synthesized)
ctgccgccaccccaccctgcccaggcccagctgcagagccctgagaagttgcgcgatgccatcaaagtcatgcagaggttcgcggggctgccggagaccggccgcatggacccagggaca

SEQ ID NO: 10420 - DNA, 120 bp, Artificial Sequence
  ENSG00000008516_5 (sequence is synthesized)
gtggccaccatgcgtaagccccgctgctccctgcctgacgtgctgggggtggcggggctggtcaggcggcgtcgccggtacgctctgagcggcagcgtgtggaagaagcgaaccctgaca

SEQ ID NO: 10421 - DNA, 120 bp, Artificial Sequence
  ENSG00000008516_6 (sequence is synthesized)
tggagggtacgttccttcccccagagctcccagctgagccaggagaccgtgcgggtcctcatgagctatgccctgatggcctggggcatggagtcaggcctcacatttcatgaggtggat

SEQ ID NO: 10422 - DNA, 120 bp, Artificial Sequence
  ENSG00000008516_7 (sequence is synthesized)
tccccccagggccaggagcccgacatcctcatcgactttgcccgcgccttccaccaggacagctaccccttcgacgggttggggggcaccctagcccatgccttcttccctggggagcac

SEQ ID NO: 10423 - DNA, 120 bp, Artificial Sequence
  ENSG00000008516_8 (sequence is synthesized)
cccatctccggggacactcactttgacgatgaggagacctggacttttgggtcaaaagacggcgaggggaccgacctgtttgccgtggctgtccatgagtttggccacgccctgggcctg

SEQ ID NO: 10424 - DNA, 120 bp, Artificial Sequence
  ENSG00000008516_9 (sequence is synthesized)
ggccactcctcagcccccaactccattatgaggcccttctaccagggtccggtgggcgaccctgacaagtaccgcctgtctcaggatgaccgcgatggcctgcagcaactctatgggaag

SEQ ID NO: 10425 - DNA, 120 bp, Artificial Sequence
  ENSG00000008516_10 (sequence is synthesized)
gcgccccaaaccccatatgacaagcccacaaggaaacccctggctcctccgccccagcccccggcctcgcccacacacagcccatccttccccatccctgatcgatgtgagggcaatttt

SEQ ID NO: 10426 - DNA, 120 bp, Artificial Sequence
  ENSG00000008516_11 (sequence is synthesized)
gacgccatcgccaacatccgaggggaaactttcttcttcaaaggcccctggttctggcgcctccagccctccggacagctggtgtccccgcgacccgcacggctgcaccgcttctgggag

SEQ ID NO: 10427 - DNA, 120 bp, Artificial Sequence
  ENSG00000008516_12 (sequence is synthesized)
gggctgcccgcccaggtgagggtggtgcaggccgcctatgctcggcaccgagacggccgaatcctcctctttagcgggccccagttctgggtgttccaggaccggcagctggagggcggg

SEQ ID NO: 10428 - DNA, 120 bp, Artificial Sequence
  ENSG00000008516_13 (sequence is synthesized)
gcgcggccgctcacggagctggggctgcccccgggagaggaggtggacgccgtgttctcgtggccacagaacgggaagacctacctggtccgcggccggcagtactggcgctacgacgag

SEQ ID NO: 10429 - DNA, 120 bp, Artificial Sequence
  ENSG00000008516_14 (sequence is synthesized)
gcggcggcgcgcccggaccccggctaccctcgcgacctgagcctctgggaaggcgcgcccccctcccctgacgatgtcaccgtcagcaacgcaggtgacacctacttcttcaagggcgcc

SEQ ID NO: 10430 - DNA, 120 bp, Artificial Sequence
  ENSG00000008516_15 (sequence is synthesized)
ggactgccccgccccgagctctggtccccgcgcccccaggccccccaaagcgacccccgtgtccgaaacctgcgattgtcagtgcgagctcaaccaggccgcaggacgttggcctgctcc

SEQ ID NO: 10431 - DNA, 120 bp, Artificial Sequence
  ENSG00000008516_16 (sequence is synthesized)
catcccgctgctcctcttgcccctgctggtggggggtgtagcctcccgctgatggggggagccatccagaccgaacagcgccctccacggccgagtcccccgccgctggacctggtcggg

SEQ ID NO: 10432 - DNA, 120 bp, Artificial Sequence
  ENSG00000008516_17 (sequence is synthesized)
ggttgtgaggcgctgcggaggccccttgtctgttcccacggacgggggctcgggcgcggactaagcaggggggatctcccgcgcaggggcggcggcggcggggaccggtcgcctggcgct

SEQ ID NO: 10433 - DNA, 120 bp, Artificial Sequence
  ENSG00000008516_18 (sequence is synthesized)
gggctcagtctcctcagggtctgagaccccggcgctgccaccggaacccgccttcaggggcgcacgcgcgctgggaccatgcgtcggtcgtcgcccccgtcgttccctcccggctgccgc

SEQ ID NO: 10434 - DNA, 120 bp, Artificial Sequence
  ENSG00000008516_19 (sequence is synthesized)
cctcccgagcccggggaggggcggggaggacaaggggcgggcccgcggcctcacccggagggacggcagccccggtcgcgcgctggccccgcaggaccttccttttccaggaagagccag

SEQ ID NO: 10435 - DNA, 120 bp, Artificial Sequence
  ENSG00000008516_20 (sequence is synthesized)
ccttttccaggaagagccagcttttctcggagcgcagtcctgggactctccgcagccccgccccgcctggccactgcgtctggcattcctgggtcgttagaggacaggcctgactgcgaa

SEQ ID NO: 10436 - DNA, 120 bp, Artificial Sequence
  ENSG00000008516_21 (sequence is synthesized)
gctgtgccttgcccctctcccacccgcagtttctcaccccgttctgctcccacaaggcccccctacagtcactgccacactggtggggacctgggacccagacccggaaccagcccagat

SEQ ID NO: 10437 - DNA, 120 bp, Artificial Sequence
  ENSG00000008516_22 (sequence is synthesized)
atcacccctgaggacccatgcgccacgtcctgggtggtggaatcagtggctggagggacgacccttgctctccaggctgttaaccttttccgttgctcccccgccacccacctcctcctc

SEQ ID NO: 10438 - DNA, 120 bp, Artificial Sequence
  ENSG00000008516_23 (sequence is synthesized)
cccaggccacccaacttgggcacctccctgggcccagaactgccttccattcaatggggaacccttctatccccaagaaccccttccctgcttgcaccctggagagaacagcttgactcc

SEQ ID NO: 10439 - DNA, 120 bp, Artificial Sequence
  ENSG00000008516_24 (sequence is synthesized)
catcaactcaacgctggtggaaagacagggaccgaaccctggctcaggcctggtcattgcctcctcagcactccctcctgggaggccttagctctagagtgaggggtgggtggaacctgg

SEQ ID NO: 10440 - DNA, 120 bp, Artificial Sequence
  ENSG00000008516_25 (sequence is synthesized)
gggcacctcgttcaccctgtccccactccccacagttttaggatctaaatgattgcctctggaactattcttctagactatcccacatcagaatcactgggaaatttaagtttgcagatc

SEQ ID NO: 10441 - DNA, 120 bp, Artificial Sequence
  ENSG00000008516_26 (sequence is synthesized)
ccacactcaccctgaatcctcactcagggtggggtcaggaatctgcattttaactagtcgcggggattgtggggggcagtagctggctgtttcgtggcatttctgtggctctgcagtgtt

SEQ ID NO: 10442 - DNA, 120 bp, Artificial Sequence
  ENSG00000008516_27 (sequence is synthesized)
cctccaccccaggaccaatatgttcaggccacaccgatggcctgaaccccatgggtagagtcacttaggggccacttcctaagttgctgtccagcctcagtgaccccctagtgcttcctg

SEQ ID NO: 10443 - DNA, 120 bp, Artificial Sequence
  ENSG00000008516_28 (sequence is synthesized)
gagctgaggctgtgggcggctgtcccagcaaccatgcgaggggttgccccagttgctcatacaaacagatcagcatgaggacagaaggcaggagactttggtcagttacctgggaattct

SEQ ID NO: 10444 - DNA, 120 bp, Artificial Sequence
  ENSG00000008516_29 (sequence is synthesized)
gggctgccaggaaacgatttgggcctctgtcagtttcttttccatgtatgaggagggggaaatttgtatattagaaacttattcatcccactcaggacaataaaaacgaatgtacaaaaa

SEQ ID NO: 10445 - DNA, 120 bp, Artificial Sequence
  ENSG00000008516_30 (sequence is synthesized)
tctgtgtgttctctggatcttttcagccctgtggtccagtgtccatcacagccatgctgactgagtgactggagacagggatgatggagagttcaggaagggctgggcagaggaggctgg

SEQ ID NO: 10446 - DNA, 120 bp, Artificial Sequence
  ENSG00000008516_31 (sequence is synthesized)
ggccacctctggagggtgtcctgctgttcctgttggccccagctgcactcgcagggccttcctgtggcccctttccccaagcaggggcggccgcagctctcacccactttctcctgcaga

SEQ ID NO: 10447 - DNA, 120 bp, Artificial Sequence
  ENSG00000008516_32 (sequence is synthesized)
aggagacctggacttttgggtcaaaaggcctctcagcagctggagcaggagctggcaggcggctcaccggttgatgaggagctgggcttcagccggggctggcgtgtgaatcctctgggt

SEQ ID NO: 10448 - DNA, 120 bp, Artificial Sequence
  ENSG00000008516_33 (sequence is synthesized)
cctggcagtcctgagcgcctgagctgaatacagagggaagaggctgggagcaaggccgggtgctggggccggcaggctgtgttctgagagtgcctgctagaggagctctgtgttcccaag

SEQ ID NO: 10449 - DNA, 120 bp, Artificial Sequence
  ENSG00000008516_34 (sequence is synthesized)
gagatggaggaagacctggggtgggggtggtacagggtagggagaggaggggcagaggctgtgaacagggagatgggggaggggggatggaggactcaagggatgtaagggatatggctt

SEQ ID NO: 10450 - DNA, 120 bp, Artificial Sequence
  ENSG00000008517_0 (sequence is synthesized)
gtactcagggagtttccccagccagctgtcccgagtctggactttccctctgcccctccccactctcaggctggtggggtggggaaagcagcccattcctgggctcagagactcccaccc

SEQ ID NO: 10451 - DNA, 120 bp, Artificial Sequence
  ENSG00000008517_1 (sequence is synthesized)
cagctcagagggagcaggggcccagccagggacggaccctcattcctcccagggaccccagacctctgtctctctcgggccttggctccttgaacttttggccgccatgtgcttcccgaa

SEQ ID NO: 10452 - DNA, 120 bp, Artificial Sequence
  ENSG00000008517_2 (sequence is synthesized)
ggtcctctctgatgacatgaagaagctgaaggcccgaatgcaccaggccatagaaagattttatgataaaatgcaaaatgcagaatcaggacgtggacaggtgatgtcgagcctggcaga

SEQ ID NO: 10453 - DNA, 120 bp, Artificial Sequence
  ENSG00000008517_3 (sequence is synthesized)
gctggaggacgacttcaaagagggctacctggagacagtggcggcttattatgaggagcagcacccagagctcactcctctacttgaaaaagaaagagatggattacggtgccgaggcaa

SEQ ID NO: 10454 - DNA, 120 bp, Artificial Sequence
  ENSG00000008517_4 (sequence is synthesized)
gatcccgcaaccgaggagcctggggagagcttttgtgacaaggtcatgagatggttccaggccatgctgcagcggctgcagacctggtggcacggggttctggcctgggtgaaggagaag

SEQ ID NO: 10455 - DNA, 120 bp, Artificial Sequence
  ENSG00000008517_5 (sequence is synthesized)
gtggtggccctggtccatgcagtgcaggccctctggaaacagttccagagtttctgctgctctctgtcagagctcttcatgtcctctttccagtcctacggagccccacggggggacaag

SEQ ID NO: 10456 - DNA, 120 bp, Artificial Sequence
  ENSG00000008517_6 (sequence is synthesized)
gaggagctgacaccccagaagtgctctgaaccccaatcctcaaaatgaagatactgacaccacctttgccctccccgtcaccgcgcacccaccctgacccctccctcagctgtcctgtgc

SEQ ID NO: 10457 - DNA, 120 bp, Artificial Sequence
  ENSG00000008517_7 (sequence is synthesized)
cccgccctctcccgcacactcagtccccctgcctggcgttcctgccgcagctctgacctggtgctgtcgccctggcatcttaataaaacctgcttatacttccctggcaggggagatacc

SEQ ID NO: 10458 - DNA, 120 bp, Artificial Sequence
  ENSG00000008517_8 (sequence is synthesized)
atgatcgcggaggtgggtttcccagggcaaggctgatctgttgccgtattagtccgttttcacacagctataaagaatgcctgagactgggtgatgtataaagaaaagaagtttaactga

SEQ ID NO: 10459 - DNA, 120 bp, Artificial Sequence
  ENSG00000008517_9 (sequence is synthesized)
cataaaaccagctgagtatttgtgccaggaagactgcgtgcagaaggtgactgtctcagtggagctgggtcatctcaggtggggagttggggtccccgaaggccttggctccttgaactt

SEQ ID NO: 10460 - DNA, 120 bp, Artificial Sequence
  ENSG00000008517_10 (sequence is synthesized)
catctctgtctgtctctgtctctgtctctgtctctgtctgtttttcacgcactcagcaaggcctcctgccctgagagaggctccgcccactaccccccactttccccataaaaccagctg

SEQ ID NO: 10461 - DNA, 120 bp, Artificial Sequence
  ENSG00000008517_11 (sequence is synthesized)
gagactcccaccccagctcagagggagcaggggcccagccagggacggaccctcattcctcccagggaccccagacctctgtctctctcggctgagtatttgtgccaggaagactgcgtg

SEQ ID NO: 10462 - DNA, 120 bp, Artificial Sequence
  ENSG00000008517_12 (sequence is synthesized)
ggggaaagcagcccattcctgggctcagagactcccaccccagctcagagggagcaggggcccagccagggacggaccctcattcctcccagggaccccagacctctgtctctctcggac

SEQ ID NO: 10463 - DNA, 120 bp, Artificial Sequence
  ENSG00000008517_13 (sequence is synthesized)
aaaccagctgagtatttgtgccaggaagactgcgtgcagaaggccttggctccttgaacttttggccgccatgtgcttcccgaaggtcctctctgatgacatgaagaagctgaaggcccg

SEQ ID NO: 10464 - DNA, 120 bp, Artificial Sequence
  ENSG00000008517_14 (sequence is synthesized)
gaagcttacaatcatgggggaaggcggaagagaagcaaggcacgtcctacatggcagcaggagaagcagggtggggggaactaccaaacacttttgtccgcgtgtttgtgtgtttttttt

SEQ ID NO: 10465 - DNA, 120 bp, Artificial Sequence
  ENSG00000008517_15 (sequence is synthesized)
aggcccgaatggtaatgctcctccctacttctgctcaggggttgggggcctgggtctcagcgtgtgacactgaggacactgtgggacacctgggaccctggagggacaaggatccggccc

SEQ ID NO: 10466 - DNA, 120 bp, Artificial Sequence
  ENSG00000008517_16 (sequence is synthesized)
gagctgacaccccagaagtgctctgaaccccaatcctcaaaatgaagatactgacaccacctttgccctcccagtcaccgcgcacccaccctgacccctccctcagctgtcctgtgcccc

SEQ ID NO: 10467 - DNA, 120 bp, Artificial Sequence
  ENSG00000008517_17 (sequence is synthesized)
gccctctcccgcacactcagtccccctgcctggcattcctgccgcagctctgacctggcgctgtcgccctggcatcttaataaaacctgcttatacttccctggcaggggagataccatg

SEQ ID NO: 10468 - DNA, 120 bp, Artificial Sequence
  ENSG00000008517_18 (sequence is synthesized)
atgtgcttcccgaaggtcctctctgatgacatgaagaagctgaaggcccgaatggtgatgtcgagcctggcagagctggaggagctcactcctctacttgaaaaagaaagagatggatta

SEQ ID NO: 10469 - DNA, 120 bp, Artificial Sequence
  ENSG00000008517_19 (sequence is synthesized)
gtctcagtggagctgggtcatctcaggtggggagttggggtccccgaaggtgaggaccctctggggaggagggtgcttctctgagacactttcttttcctcacacctgttcctcgccagc

SEQ ID NO: 10470 - DNA, 120 bp, Artificial Sequence
  ENSG00000008517_20 (sequence is synthesized)
ggaggcatccaagccccagggctccttgaggaaacaacaggggtgccagacgtggcccgggcccctggctgggcccagttcggggtgtgtgggagctgaggactcactgggcttgaggac

SEQ ID NO: 10471 - DNA, 120 bp, Artificial Sequence
  ENSG00000008517_21 (sequence is synthesized)
tccccgcccccaggcactccaccctgtgtggggctcagggtgagaaggatgaagagggacccacaggctccctcaccccttaccgtgggcaaatgcttgcacctgggtggcagtgagtgg

SEQ ID NO: 10472 - DNA, 120 bp, Artificial Sequence
  ENSG00000008517_22 (sequence is synthesized)
tttggtgccaactctgcctctcttcacagcaccaggccatagaaagattttatgataaaatgcaaaatgcagaatcaggacgtggacaggtgggtggatttcccctcaggcaccaggtca

SEQ ID NO: 10473 - DNA, 120 bp, Artificial Sequence
  ENSG00000008517_23 (sequence is synthesized)
aggcttgggcctggaaccgagtgctttgttcctaacaggtgatgtcgagcctggcagagctggaggtgagccgtggcctccccctccaccaagcttagtccctgggtcttaggctccaca

SEQ ID NO: 10474 - DNA, 120 bp, Artificial Sequence
  ENSG00000008517_24 (sequence is synthesized)
ttcaaagagggctacctggagacagtggcggcttattatgaggagcagcacccagtgagtatgacacacccatctgggcaccttgccttccttcacctctgccctgtcttttctttcttt

SEQ ID NO: 10475 - DNA, 90 bp, Artificial Sequence
  ENSG00000008517_25 (sequence is synthesized)
tttaagtgattctcctgcctcagcctgacaagtagttgggactacaggcacccgccaccactccaggctgattttttttgtgtgtgtgcc

SEQ ID NO: 10476 - DNA, 62 bp, Artificial Sequence
  ENSG00000008517_26 (sequence is synthesized)
tgtgttccacccctgccctgtcttgatgtggtgtgggcagggtgtgcccagcccctgagctt

SEQ ID NO: 10477 - DNA, 80 bp, Artificial Sequence
  ENSG00000008710_0 (sequence is synthesized)
gcactgcagcgccagcgtccgagcgggcggccgagctcccggagcggcctggccccgagccccgagcgggcgtcgctcag

SEQ ID NO: 10478 - DNA, 120 bp, Artificial Sequence
  ENSG00000008710_1 (sequence is synthesized)
gctcgggccgcgggctgcggacgctcggtcccgcgctgcgcatccccgcggacgccacagcgctagacgtctcccacaacctgctccgggcgctggacgttgggctcctggcgaacctct

SEQ ID NO: 10479 - DNA, 120 bp, Artificial Sequence
  ENSG00000008710_2 (sequence is synthesized)
cggcgctggcagagctggatataagcaacaacaagatttctacgttagaagaaggaatatttgctaatttatttaatttaagtgaaataaacctgagtgggaacccgtttgagtgtgact

SEQ ID NO: 10480 - DNA, 120 bp, Artificial Sequence
  ENSG00000008710_3 (sequence is synthesized)
gtggcctggcgtggctgccgcgatgggcggaggagcagcaggtgcgggtggtgcagcccgaggcagccacgtgtgctgggcctggctccctggctggccagcctctgcttggcatcccct

SEQ ID NO: 10481 - DNA, 120 bp, Artificial Sequence
  ENSG00000008710_4 (sequence is synthesized)
tgctggacagtggctgtggtgaggagtatgtcgcctgcctccctgacaacagctcaggcaccgtggcagcagtgtccttttcagctgcccacgaaggcctgcttcagccagaggcctgca

SEQ ID NO: 10482 - DNA, 120 bp, Artificial Sequence
  ENSG00000008710_5 (sequence is synthesized)
gcgccttctgcttctccaccggccagggcctcgcagccctctcggagcagggctggtgcctgtgtggggcggcccagccctccagtgcctcctttgcctgcctgtccctctgctccggcc

SEQ ID NO: 10483 - DNA, 120 bp, Artificial Sequence
  ENSG00000008710_6 (sequence is synthesized)
ccccgccacctcctgcccccacctgtaggggccccaccctcctccagcacgtcttccctgcctccccaggggccaccctggtggggccccacggacctctggcctctggccagctagcag

SEQ ID NO: 10484 - DNA, 120 bp, Artificial Sequence
  ENSG00000008710_7 (sequence is synthesized)
ccttccacatcgctgccccgctccctgtcactgccacacgctgggacttcggagacggctccgccgaggtggatgccgctgggccggctgcctcgcatcgctatgtgctgcctgggcgct

SEQ ID NO: 10485 - DNA, 120 bp, Artificial Sequence
  ENSG00000008710_8 (sequence is synthesized)
atcacgtgacggccgtgctggccctgggggccggctcagccctgctggggacagacgtgcaggtggaagcggcacctgccgccctggagctcgtgtgcccgtcctcggtgcagagtgacg

SEQ ID NO: 10486 - DNA, 120 bp, Artificial Sequence
  ENSG00000008710_9 (sequence is synthesized)
agagcctcgacctcagcatccagaaccgcggtggttcaggcctggaggccgcctacagcatcgtggccctgggcgaggagccggcccgagcggtgcacccgctctgcccctcggacacgg

SEQ ID NO: 10487 - DNA, 120 bp, Artificial Sequence
  ENSG00000008710_10 (sequence is synthesized)
agatcttccctggcaacgggcactgctaccgcctggtggtggagaaggcggcctggctgcaggcgcaggagcagtgtcaggcctgggccggggccgccctggcaatggtggacagtcccg

SEQ ID NO: 10488 - DNA, 120 bp, Artificial Sequence
  ENSG00000008710_11 (sequence is synthesized)
ccgtgcagcgcttcctggtctcccgggtcaccaggagcctagacgtgtggatcggcttctcgactgtgcagggggtggaggtgggcccagcgccgcagggcgaggccttcagcctggaga

SEQ ID NO: 10489 - DNA, 120 bp, Artificial Sequence
  ENSG00000008710_12 (sequence is synthesized)
gctgccagaactggctgcccggggagccacacccagccacagccgagcactgcgtccggctcgggcccaccgggtggtgtaacaccgacctgtgctcagcgccgcacagctacgtctgcg

SEQ ID NO: 10490 - DNA, 120 bp, Artificial Sequence
  ENSG00000008710_13 (sequence is synthesized)
agctgcagcccggaggcccagtgcaggatgccgagaacctcctcgtgggagcgcccagtggggacctgcagggacccctgacgcctctggcacagcaggacggcctctcagccccgcacg

SEQ ID NO: 10491 - DNA, 120 bp, Artificial Sequence
  ENSG00000008710_14 (sequence is synthesized)
agcccgtggaggtcatggtattcccgggcctgcgtctgagccgtgaagccttcctcaccacggccgaatttgggacccaggagctccggcggcccgcccagctgcggctgcaggtgtacc

SEQ ID NO: 10492 - DNA, 120 bp, Artificial Sequence
  ENSG00000008710_15 (sequence is synthesized)
ggctcctcagcacagcagggaccccggagaacggcagcgagcctgagagcaggtccccggacaacaggacccagctggcccccgcgtgcatgccagggggacgctggtgccctggagcca

SEQ ID NO: 10493 - DNA, 120 bp, Artificial Sequence
  ENSG00000008710_16 (sequence is synthesized)
acatctgcttgccgctggacgcctcctgccacccccaggcctgcgccaatggctgcacgtcagggccagggctacccggggccccctatgcgctatggagagagttcctcttctccgttc

SEQ ID NO: 10494 - DNA, 120 bp, Artificial Sequence
  ENSG00000008710_17 (sequence is synthesized)
ccgcggggccccccgcgcagtactcggtcaccctccacggccaggatgtcctcatgctccctggtgacctcgttggcttgcagcacgacgctggccctggcgccctcctgcactgctcgc

SEQ ID NO: 10495 - DNA, 120 bp, Artificial Sequence
  ENSG00000008710_18 (sequence is synthesized)
cggctcccggccaccctggtccccgggccccgtacctctccgccaacgcctcgtcatggctgccccacttgccagcccagctggagggcacttgggcctgccctgcctgtgccctgcggc

SEQ ID NO: 10496 - DNA, 120 bp, Artificial Sequence
  ENSG00000008710_19 (sequence is synthesized)
tgcttgcagccacggaacagctcaccgtgctgctgggcttgaggcccaaccctggactgcggctgcctgggcgctatgaggtccgggcagaggtgggcaatggcgtgtccaggcacaacc

SEQ ID NO: 10497 - DNA, 120 bp, Artificial Sequence
  ENSG00000008710_20 (sequence is synthesized)
tctcctgcagctttgacgtggtctccccagtggctgggctgcgggtcatctaccctgccccccgcgacggccgcctctacgtgcccaccaacggctcagccttggtgctccaggtggact

SEQ ID NO: 10498 - DNA, 120 bp, Artificial Sequence
  ENSG00000008710_21 (sequence is synthesized)
ctggtgccaacgccacggccacggctcgctggcctgggggcagtgtcagcgcccgctttgagaatgtctgccctgccctggtggccaccttcgtgcccggctgcccctgggagaccaacg

SEQ ID NO: 10499 - DNA, 120 bp, Artificial Sequence
  ENSG00000008710_22 (sequence is synthesized)
ataccctgttctcagtggtagcactgccgtggctcagtgagggggagcacgtggtggacgtggtggtggaaaacagcgccagccgggccaacctcagcctgcgggtgacggcggaggagc

SEQ ID NO: 10500 - DNA, 120 bp, Artificial Sequence
  ENSG00000008710_23 (sequence is synthesized)
ccatctgtggcctccgcgccacgcccagccccgaggcccgtgtactgcagggagtcctagtgaggtacagccccgtggtggaggccggctcggacatggtcttccggtggaccatcaacg

SEQ ID NO: 10501 - DNA, 120 bp, Artificial Sequence
  ENSG00000008710_24 (sequence is synthesized)
acaagcagtccctgaccttccagaacgtggtcttcaatgtcatttatcagagcgcggcggtcttcaagctctcactgacggcctccaaccacgtgagcaacgtcaccgtgaactacaacg

SEQ ID NO: 10502 - DNA, 120 bp, Artificial Sequence
  ENSG00000008710_25 (sequence is synthesized)
taaccgtggagcggatgaacaggatgcagggtctgcaggtctccacagtgccggccgtgctgtcccccaatgccacgctagcactgacggcgggcgtgctggtggactcggccgtggagg

SEQ ID NO: 10503 - DNA, 120 bp, Artificial Sequence
  ENSG00000008710_26 (sequence is synthesized)
tggccttcctgtggacctttggggatggggagcaggccctccaccagttccagcctccgtacaacgagtccttcccggttccagacccctcggtggcccaggtgctggtggagcacaatg

SEQ ID NO: 10504 - DNA, 120 bp, Artificial Sequence
  ENSG00000008710_27 (sequence is synthesized)
tcatgcacacctacgctgccccaggtgagtacctcctgaccgtgctggcatctaatgccttcgagaacctgacgcagcaggtgcctgtgagcgtgcgcgcctccctgccctccgtggctg

SEQ ID NO: 10505 - DNA, 120 bp, Artificial Sequence
  ENSG00000008710_28 (sequence is synthesized)
tgggtgtgagtgacggcgtcctggtggccggccggcccgtcaccttctacccgcacccgctgccctcgcctgggggtgttctttacacgtgggacttcggggacggctcccctgtcctga

SEQ ID NO: 10506 - DNA, 120 bp, Artificial Sequence
  ENSG00000008710_29 (sequence is synthesized)
cccagagccagccggctgccaaccacacctatgcctcgaggggcacctaccacgtgcgcctggaggtcaacaacacggtgagcggtgcggcggcccaggcggatgtgcgcgtctttgagg

SEQ ID NO: 10507 - DNA, 120 bp, Artificial Sequence
  ENSG00000008710_30 (sequence is synthesized)
agctccgcggactcagcgtggacatgagcctggccgtggagcagggcgcccccgtggtggtcagcgccgcggtgcagacgggcgacaacatcacgtggaccttcgacatgggggacggca

SEQ ID NO: 10508 - DNA, 120 bp, Artificial Sequence
  ENSG00000008710_31 (sequence is synthesized)
ccgtgctgtcgggcccggaggcaacagtggagcatgtgtacctgcgggcacagaactgcacagtgaccgtgggtgcggccagccccgccggccacctggcccggagcctgcacgtgctgg

SEQ ID NO: 10509 - DNA, 120 bp, Artificial Sequence
  ENSG00000008710_32 (sequence is synthesized)
tcttcgtcctggaggtgctgcgcgttgaacccgccgcctgcatccccacgcagcctgacgcgcggctcacggcctacgtcaccgggaacccggcccactacctcttcgactggaccttcg

SEQ ID NO: 10510 - DNA, 120 bp, Artificial Sequence
  ENSG00000008710_33 (sequence is synthesized)
gggatggctcctccaacacgaccgtgcgggggtgcccgacggtgacacacaacttcacgcggagcggcacgttccccctggcgctggtgctgtccagccgcgtgaacagggcgcattact

SEQ ID NO: 10511 - DNA, 120 bp, Artificial Sequence
  ENSG00000008710_34 (sequence is synthesized)
tcaccagcatctgcgtggagccagaggtgggcaacgtcaccctgcagccagagaggcagtttgtgcagctcggggacgaggcctggctggtggcatgtgcctggcccccgttcccctacc

SEQ ID NO: 10512 - DNA, 120 bp, Artificial Sequence
  ENSG00000008710_35 (sequence is synthesized)
gctacacctgggactttggcaccgaggaagccgcccccacccgtgccaggggccctgaggtgacgttcatctaccgagacccaggctcctatcttgtgacagtcaccgcgtccaacaaca

SEQ ID NO: 10513 - DNA, 120 bp, Artificial Sequence
  ENSG00000008710_36 (sequence is synthesized)
tctctgctgccaatgactcagccctggtggaggtgcaggagcccgtgctggtcaccagcatcaaggtcaatggctcccttgggctggagctgcagcagccgtacctgttctctgctgtgg

SEQ ID NO: 10514 - DNA, 120 bp, Artificial Sequence
  ENSG00000008710_37 (sequence is synthesized)
gccgtgggcgccccgccagctacctgtgggatctgggggacggtgggtggctcgagggtccggaggtcacccacgcttacaacagcacaggtgacttcaccgttagggtggccggctgga

SEQ ID NO: 10515 - DNA, 120 bp, Artificial Sequence
  ENSG00000008710_38 (sequence is synthesized)
atgaggtgagccgcagcgaggcctggctcaatgtgacggtgaagcggcgcgtgcgggggctcgtcgtcaatgcaagccgcacggtggtgcccctgaatgggagcgtgagcttcagcacgt

SEQ ID NO: 10516 - DNA, 120 bp, Artificial Sequence
  ENSG00000008710_39 (sequence is synthesized)
cgctggaggccggcagtgatgtgcgctattcctgggtgctctgtgaccgctgcacgcccatccctgggggtcctaccatctcttacaccttccgctccgtgggcaccttcaatatcatcg

SEQ ID NO: 10517 - DNA, 120 bp, Artificial Sequence
  ENSG00000008710_40 (sequence is synthesized)
tcacggctgagaacgaggtgggctccgcccaggacagcatcttcgtctatgtcctgcagctcatagaggggctgcaggtggtgggcggtggccgctacttccccaccaaccacacggtac

SEQ ID NO: 10518 - DNA, 120 bp, Artificial Sequence
  ENSG00000008710_41 (sequence is synthesized)
agctgcaggccgtggttagggatggcaccaacgtctcctacagctggactgcctggagggacaggggcccggccctggccggcagcggcaaaggcttctcgctcaccgtgctcgaggccg

SEQ ID NO: 10519 - DNA, 120 bp, Artificial Sequence
  ENSG00000008710_42 (sequence is synthesized)
gcacctaccatgtgcagctgcgggccaccaacatgctgggcagcgcctgggccgactgcaccatggacttcgtggagcctgtggggtggctgatggtggccgcctccccgaacccagctg

SEQ ID NO: 10520 - DNA, 120 bp, Artificial Sequence
  ENSG00000008710_43 (sequence is synthesized)
ccgtcaacacaagcgtcaccctcagtgccgagctggctggtggcagtggtgtcgtatacacttggtccttggaggaggggctgagctgggagacctccgagccatttaccacccatagct

SEQ ID NO: 10521 - DNA, 120 bp, Artificial Sequence
  ENSG00000008710_44 (sequence is synthesized)
tccccacacccggcctgcacttggtcaccatgacggcagggaacccgctgggctcagccaacgccaccgtggaagtggatgtgcaggtgcctgtgagtggcctcagcatcagggccagcg

SEQ ID NO: 10522 - DNA, 120 bp, Artificial Sequence
  ENSG00000008710_45 (sequence is synthesized)
agcccggaggcagcttcgtggcggccgggtcctctgtgcccttttgggggcagctggccacgggcaccaatgtgagctggtgctgggctgtgcccggcggcagcagcaagcgtggccctc

SEQ ID NO: 10523 - DNA, 120 bp, Artificial Sequence
  ENSG00000008710_46 (sequence is synthesized)
atgtcaccatggtcttcccggatgctggcaccttctccatccggctcaatgcctccaacgcagtcagctgggtctcagccacgtacaacctcacggcggaggagcccatcgtgggcctgg

SEQ ID NO: 10524 - DNA, 120 bp, Artificial Sequence
  ENSG00000008710_47 (sequence is synthesized)
tgctgtgggccagcagcaaggtggtggcgcccgggcagctggtccattttcagatcctgctggctgccggctcagctgtcaccttccgcctgcaggtcggcggggccaaccccgaggtgc

SEQ ID NO: 10525 - DNA, 120 bp, Artificial Sequence
  ENSG00000008710_48 (sequence is synthesized)
tccccgggccccgtttctcccacagcttcccccgcgtcggagaccacgtggtgagcgtgcggggcaaaaaccacgtgagctgggcccaggcgcaggtgcgcatcgtggtgctggaggccg

SEQ ID NO: 10526 - DNA, 120 bp, Artificial Sequence
  ENSG00000008710_49 (sequence is synthesized)
tgagtgggctgcaggtgcccaactgctgcgagcctggcatcgccacgggcactgagaggaacttcacagcccgcgtgcagcgcggctctcgggtcgcctacgcctggtacttctcgctgc

SEQ ID NO: 10527 - DNA, 120 bp, Artificial Sequence
  ENSG00000008710_50 (sequence is synthesized)
agaaggtccagggcgactcgctggtcatcctgtcgggccgcgacgtcacctacacgcccgtggccgcggggctgttggagatccaggtgcgcgccttcaacgccctgggcagtgagaacc

SEQ ID NO: 10528 - DNA, 120 bp, Artificial Sequence
  ENSG00000008710_51 (sequence is synthesized)
gcacgctggtgctggaggttcaggacgccgtccagtatgtggccctgcagagcggcccctgcttcaccaaccgctcggcgcagtttgaggccgccaccagccccagcccccggcgtgtgg

SEQ ID NO: 10529 - DNA, 120 bp, Artificial Sequence
  ENSG00000008710_52 (sequence is synthesized)
cctaccactgggactttggggatgggtcgccagggcaggacacagatgagcccagggccgagcactcctacctgaggcctggggactaccgcgtgcaggtgaacgcctccaacctggtga

SEQ ID NO: 10530 - DNA, 120 bp, Artificial Sequence
  ENSG00000008710_53 (sequence is synthesized)
gcttcttcgtggcgcaggccacggtgaccgtccaggtgctggcctgccgggagccggaggtggacgtggtcctgcccctgcaggtgctgatgcggcgatcacagcgcaactacttggagg

SEQ ID NO: 10531 - DNA, 120 bp, Artificial Sequence
  ENSG00000008710_54 (sequence is synthesized)
cccacgttgacctgcgcgactgcgtcacctaccagactgagtaccgctgggaggtgtatcgcaccgccagctgccagcggccggggcgcccagcgcgtgtggccctgcccggcgtggacg

SEQ ID NO: 10532 - DNA, 120 bp, Artificial Sequence
  ENSG00000008710_55 (sequence is synthesized)
tgagccggcctcggctggtgctgccgcggctggcgctgcctgtggggcactactgctttgtgtttgtcgtgtcatttggggacacgccactgacacagagcatccaggccaatgtgacgg

SEQ ID NO: 10533 - DNA, 120 bp, Artificial Sequence
  ENSG00000008710_56 (sequence is synthesized)
cccaacctggaggacggcgaccagacgccgctcagtttccactgggcctgtgtggcttcgacacagagggaggctggcgggtgtgcgctgaactttgggccccgcgggagcagcacggtc

SEQ ID NO: 10534 - DNA, 120 bp, Artificial Sequence
  ENSG00000008710_57 (sequence is synthesized)
accattccacgggagcggctggcggctggcgtggagtacaccttcagcctgaccgtgtggaaggccggccgcaaggaggaggccaccaaccagacggtgctgatccggagtggccgggtg

SEQ ID NO: 10535 - DNA, 120 bp, Artificial Sequence
  ENSG00000008710_58 (sequence is synthesized)
cccattgtgtccttggagtgtgtgtcctgcaaggcacaggccgtgtacgaagtgagccgcagctcctacgtgtacttggagggccgctgcctcaattgcagcagcggctccaagcgaggg

SEQ ID NO: 10536 - DNA, 120 bp, Artificial Sequence
  ENSG00000008710_59 (sequence is synthesized)
cggtgggctgcacgtacgttcagcaacaagacgctggtgctggatgagaccaccacatccacgggcagtgcaggcatgcgactggtgctgcggcggggcgtgctgcgggacggcgaggga

SEQ ID NO: 10537 - DNA, 120 bp, Artificial Sequence
  ENSG00000008710_60 (sequence is synthesized)
tacaccttcacgctcacggtgctgggccgctctggcgaggaggagggctgcgcctccatccgcctgtcccccaaccgcccgccgctggggggctcttgccgcctcttcccactgggcgct

SEQ ID NO: 10538 - DNA, 120 bp, Artificial Sequence
  ENSG00000008710_61 (sequence is synthesized)
gtgcacgccctcaccaccaaggtgcacttcgaatgcacgggctggcatgacgcggaggatgctggcgccccgctggtgtacgccctgctgctgcggcgctgtcgccagggccactgcgag

SEQ ID NO: 10539 - DNA, 120 bp, Artificial Sequence
  ENSG00000008710_62 (sequence is synthesized)
gagttctgtgtctacaagggcagcctctccagctacggagccgtgctgcccccgggtttcaggccacacttcgaggtgggcctggccgtggtggtgcaggaccagctgggagccgctgtg

SEQ ID NO: 10540 - DNA, 120 bp, Artificial Sequence
  ENSG00000008710_63 (sequence is synthesized)
gtcgccctcaacaggtctttggccatcaccctcccagagcccaacggcagcgcaacggggctcacagtctggctgcacgggctcaccgctagtgtgctcccagggctgctgcggcaggcc

SEQ ID NO: 10541 - DNA, 120 bp, Artificial Sequence
  ENSG00000008710_64 (sequence is synthesized)
gatccccagcacgtcatcgagtactcgttggccctggtcaccgtgctgaacgagtacgagcgggccctggacgtggcggcagagcccaagcacgagcggcagcaccgagcccagatacgc

SEQ ID NO: 10542 - DNA, 120 bp, Artificial Sequence
  ENSG00000008710_65 (sequence is synthesized)
aagaacatcacggagactctggtgtccctgagggtccacactgtggatgacatccagcagatcgctgctgcgctggcccagtgcatggggcccagcagggagctcgtatgccgctcgtgc

SEQ ID NO: 10543 - DNA, 120 bp, Artificial Sequence
  ENSG00000008710_66 (sequence is synthesized)
ctgaagcagacgctgcacaagctggaggccatgatgctcatcctgcaggcagagaccaccgcgggcaccgtgacgcccaccgccatcggagacagcatcctcaacatcacaggagacctc

SEQ ID NO: 10544 - DNA, 120 bp, Artificial Sequence
  ENSG00000008710_67 (sequence is synthesized)
atccacctggccagctcggacgtgcgggcaccacagccctcagagctgggagccgagtcaccatctcggatggtggcgtcccaggcctacaacctgacctctgccctcatgcgcatcctc

SEQ ID NO: 10545 - DNA, 120 bp, Artificial Sequence
  ENSG00000008710_68 (sequence is synthesized)
atgcgctcccgcgtgctcaacgaggagcccctgacgctggcgggcgaggagatcgtggcccagggcaagcgctcggacccgcggagcctgctgtgctatggcggcgccccagggcctggc

SEQ ID NO: 10546 - DNA, 120 bp, Artificial Sequence
  ENSG00000008710_69 (sequence is synthesized)
tgccacttctccatccccgaggctttcagcggggccctggccaacctcagtgacgtggtgcagctcatctttctggtggactccaatccctttccctttggctatatcagcaactacacc

SEQ ID NO: 10547 - DNA, 120 bp, Artificial Sequence
  ENSG00000008710_70 (sequence is synthesized)
gtctccaccaaggtggcctcgatggcattccagacacaggccggcgcccagatccccatcgagcggctggcctcagagcgcgccatcaccgtgaaggtgcccaacaactcggactgggct

SEQ ID NO: 10548 - DNA, 120 bp, Artificial Sequence
  ENSG00000008710_71 (sequence is synthesized)
gcccggggccaccgcagctccgccaactccgccaactccgttgtggtccagccccaggcctccgtcggtgctgtggtcaccctggacagcagcaaccctgcggccgggctgcatctgcag

SEQ ID NO: 10549 - DNA, 120 bp, Artificial Sequence
  ENSG00000008710_72 (sequence is synthesized)
ctcaactatacgctgctggacggccactacctgtctgaggaacctgagccctacctggcagtctacctacactcggagccccggcccaatgagcacaactgctcggctagcaggaggatc

SEQ ID NO: 10550 - DNA, 120 bp, Artificial Sequence
  ENSG00000008710_73 (sequence is synthesized)
cgcccagagtcactccagggtgctgaccaccggccctacaccttcttcatttccccggggagcagagacccagcggggagttaccatctgaacctctccagccacttccgctggtcggcg

SEQ ID NO: 10551 - DNA, 120 bp, Artificial Sequence
  ENSG00000008710_74 (sequence is synthesized)
ctgcaggtgtccgtgggcctgtacacgtccctgtgccagtacttcagcgaggaggacatggtgtggcggacagaggggctgctgcccctggaggagacctcgccccgccaggccgtctgc

SEQ ID NO: 10552 - DNA, 120 bp, Artificial Sequence
  ENSG00000008710_75 (sequence is synthesized)
ctcacccgccacctcaccgccttcggcgccagcctcttcgtgcccccaagccatgtccgctttgtgtttcctgagccgacagcggatgtaaactacatcgtcatgctgacatgtgctgtg

SEQ ID NO: 10553 - DNA, 120 bp, Artificial Sequence
  ENSG00000008710_76 (sequence is synthesized)
tgcctggtgacctacatggtcatggccgccatcctgcacaagctggaccagttggatgccagccggggccgcgccatccctttctgtgggcagcggggccgcttcaagtacgagatcctc

SEQ ID NO: 10554 - DNA, 120 bp, Artificial Sequence
  ENSG00000008710_77 (sequence is synthesized)
gcccacgtgggcatcatgctgtatggggtggacagccggagcggccaccggcacctggacggcgacagagccttccaccgcaacagcctggacatcttccggatcgccaccccgcacagc

SEQ ID NO: 10555 - DNA, 120 bp, Artificial Sequence
  ENSG00000008710_78 (sequence is synthesized)
agcctggacatcttccggatcgccaccccgcacagcctgggtagcgtgtggaagatccgagtgtggcacgacaacaaagggctcagccctgcctggttcctgcagcacgtcatcgtcagg

SEQ ID NO: 10556 - DNA, 120 bp, Artificial Sequence
  ENSG00000008710_79 (sequence is synthesized)
gacctgcagacggcacgcagcgccttcttcctggtcaatgactggctttcggtggagacggaggccaacgggggcctggtggagaaggaggtgctggccgcgagcgacgcagcccttttg

SEQ ID NO: 10557 - DNA, 120 bp, Artificial Sequence
  ENSG00000008710_80 (sequence is synthesized)
cgcttccggcgcctgctggtggctgagctgcagcgtggcttctttgacaagcacatctggctctccatatgggaccggccgcctcgtagccgtttcactcgcatccagagggccacctgc

SEQ ID NO: 10558 - DNA, 120 bp, Artificial Sequence
  ENSG00000008710_81 (sequence is synthesized)
tgcgttctcctcatctgcctcttcctgggcgccaacgccgtgtggtacggggctgttggcgactctgcctacagcacggggcatgtgtccaggctgagcccgctgagcgtcgacacagtc

SEQ ID NO: 10559 - DNA, 120 bp, Artificial Sequence
  ENSG00000008710_82 (sequence is synthesized)
gctgttggcctggtgtccagcgtggttgtctatcccgtctacctggccatcctttttctcttccggatgtcccggagcaaggtggctgggagcccgagccccacacctgccgggcagcag

SEQ ID NO: 10560 - DNA, 120 bp, Artificial Sequence
  ENSG00000008710_83 (sequence is synthesized)
gtgctggacatcgacagctgcctggactcgtccgtgctggacagctccttcctcacgttctcaggcctccacgctgagcaggcctttgttggacagatgaagagtgacttgtttctggat

SEQ ID NO: 10561 - DNA, 120 bp, Artificial Sequence
  ENSG00000008710_84 (sequence is synthesized)
gattctaagagtctggtgtgctggccctccggcgagggaacgctcagttggccggacctgctcagtgacccgtccattgtgggtagcaatctgcggcagctggcacggggccaggcgggc

SEQ ID NO: 10562 - DNA, 120 bp, Artificial Sequence
  ENSG00000008710_85 (sequence is synthesized)
catgggctgggcccagaggaggacggcttctccctggccagcccctactcgcctgccaaatccttctcagcatcagatgaagacctgatccagcaggtccttgccgagggggtcagcagc

SEQ ID NO: 10563 - DNA, 120 bp, Artificial Sequence
  ENSG00000008710_86 (sequence is synthesized)
ccagcccctacccaagacacccacatggaaacggacctgctcagcagcctgtccagcactcctggggagaagacagagacgctggcgctgcagaggctgggggagctggggccacccagc

SEQ ID NO: 10564 - DNA, 120 bp, Artificial Sequence
  ENSG00000008710_87 (sequence is synthesized)
ccaggcctgaactgggaacagccccaggcagcgaggctgtccaggacaggactggtggagggtctgcggaagcgcctgctgccggcctggtgtgcctccctggcccacgggctcagcctg

SEQ ID NO: 10565 - DNA, 120 bp, Artificial Sequence
  ENSG00000008710_88 (sequence is synthesized)
ctcctggtggctgtggctgtggctgtctcagggtgggtgggtgcgagcttccccccgggcgtgagtgttgcgtggctcctgtccagcagcgccagcttcctggcctcattcctcggctgg

SEQ ID NO: 10566 - DNA, 120 bp, Artificial Sequence
  ENSG00000008710_89 (sequence is synthesized)
gagccactgaaggtcttgctggaagccctgtacttctcactggtggccaagcggctgcacccggatgaagatgacaccctggtagagagcccggctgtgacgcctgtgagcgcacgtgtg

SEQ ID NO: 10567 - DNA, 120 bp, Artificial Sequence
  ENSG00000008710_90 (sequence is synthesized)
ccccgcgtacggccaccccacggctttgcactcttcctggccaaggaagaagcccgcaaggtcaagaggctacatggcatgctgcggagcctcctggtgtacatgctttttctgctggtg

SEQ ID NO: 10568 - DNA, 120 bp, Artificial Sequence
  ENSG00000008710_91 (sequence is synthesized)
accctgctggccagctatggggatgcctcatgccatgggcacgcctaccgtctgcaaagcgccatcaagcaggagctgcacagccgggccttcctggccatcacgcggtctgaggagctc

SEQ ID NO: 10569 - DNA, 120 bp, Artificial Sequence
  ENSG00000008710_92 (sequence is synthesized)
tggccatggatggcccacgtgctgctgccctacgtccacgggaaccagtccagcccagagctggggcccccacggctgcggcaggtgcggctgcaggaagcactctacccagaccctccc

SEQ ID NO: 10570 - DNA, 120 bp, Artificial Sequence
  ENSG00000008710_93 (sequence is synthesized)
ggccccagggtccacacgtgctcggccgcaggaggcttcagcaccagcgattacgacgttggctgggagagtcctcacaatggctcggggacgtgggcctattcagcgccggatctgctg

SEQ ID NO: 10571 - DNA, 120 bp, Artificial Sequence
  ENSG00000008710_94 (sequence is synthesized)
ggggcatggtcctggggctcctgtgccgtgtatgacagcgggggctacgtgcaggagctgggcctgagcctggaggagagccgcgaccggctgcgcttcctgcagctgcacaactggctg

SEQ ID NO: 10572 - DNA, 120 bp, Artificial Sequence
  ENSG00000008710_95 (sequence is synthesized)
gacaacaggagccgcgctgtgttcctggagctcacgcgctacagcccggccgtggggctgcacgccgccgtcacgctgcgcctcgagttcccggcggccggccgcgccctggccgccctc

SEQ ID NO: 10573 - DNA, 120 bp, Artificial Sequence
  ENSG00000008710_96 (sequence is synthesized)
agcgtccgcccctttgcgctgcgccgcctcagcgcgggcctctcgctgcctctgctcacctcggtgtgcctgctgctgttcgccgtgcacttcgccgtggccgaggcccgtacttggcac

SEQ ID NO: 10574 - DNA, 120 bp, Artificial Sequence
  ENSG00000008710_97 (sequence is synthesized)
agggaagggcgctggcgcgtgctgcggctcggagcctgggcgcggtggctgctggtggcgctgacggcggccacggcactggtacgcctcgcccagctgggtgccgctgaccgccagtgg

SEQ ID NO: 10575 - DNA, 120 bp, Artificial Sequence
  ENSG00000008710_98 (sequence is synthesized)
acccgtttcgtgcgcggccgcccgcgccgcttcactagcttcgaccaggtggcgcagctgagctccgcagcccgtggcctggcggcctcgctgctcttcctgcttttggtcaaggctgcc

SEQ ID NO: 10576 - DNA, 120 bp, Artificial Sequence
  ENSG00000008710_99 (sequence is synthesized)
cagcagctacgcttcgtgcgccagtggtccgtctttggcaagacattatgccgagctctgccagagctcctgggggtcaccttgggcctggtggtgctcggggtagcctacgcccagctg

SEQ ID NO: 10577 - DNA, 120 bp, Artificial Sequence
  ENSG00000008710_100 (sequence is synthesized)
gccatcctgctcgtgtcttcctgtgtggactccctctggagcgtggcccaggccctgttggtgctgtgccctgggactgggctctctaccctgtgtcctgccgagtcctggcacctgtca

SEQ ID NO: 10578 - DNA, 120 bp, Artificial Sequence
  ENSG00000008710_101 (sequence is synthesized)
cccctgctgtgtgtggggctctgggcactgcggctgtggggcgccctacggctgggggctgttattctccgctggcgctaccacgccttgcgtggagagctgtaccggccggcctgggag

SEQ ID NO: 10579 - DNA, 120 bp, Artificial Sequence
  ENSG00000008710_102 (sequence is synthesized)
ccccaggactacgagatggtggagttgttcctgcgcaggctgcgcctctggatgggcctcagcaaggtcaaggagttccgccacaaagtccgctttgaagggatggagccgctgccctct

SEQ ID NO: 10580 - DNA, 120 bp, Artificial Sequence
  ENSG00000008710_103 (sequence is synthesized)
cgctcctccaggggctccaaggtatccccggatgtgcccccacccagcgctggctccgatgcctcgcacccctccacctcctccagccagctggatgggctgagcgtgagcctgggccgg

SEQ ID NO: 10581 - DNA, 120 bp, Artificial Sequence
  ENSG00000008710_104 (sequence is synthesized)
ctggggacaaggtgtgagcctgagccctcccgcctccaagccgtgttcgaggccctgctcacccagtttgaccgactcaaccaggccacagaggacgtctaccagctggagcagcagctg

SEQ ID NO: 10582 - DNA, 120 bp, Artificial Sequence
  ENSG00000008710_105 (sequence is synthesized)
cacagcctgcaaggccgcaggagcagccgggcgcccgccggatcttcccgtggcccatccccgggcctgcggccagcactgcccagccgccttgcccgggccagtcggggtgtggacctg

SEQ ID NO: 10583 - DNA, 120 bp, Artificial Sequence
  ENSG00000008710_106 (sequence is synthesized)
gccactggccccagcaggacaccccttcgggccaagaacaaggtccaccccagcagcacttagtcctccttcctggcgggggtgggccgtggagtcggagtggacaccgctcagtattac

SEQ ID NO: 10584 - DNA, 120 bp, Artificial Sequence
  ENSG00000008710_107 (sequence is synthesized)
tttctgccgctgtcaaggccgagggccaggcagaatggctgcacgtaggttccccagagagcaggcaggggcatctgtctgtctgtgggcttcagcactttaaagaggctgtgtggccaa

SEQ ID NO: 10585 - DNA, 120 bp, Artificial Sequence
  ENSG00000008710_108 (sequence is synthesized)
ccaggacccagggtcccctccccagctcccttgggaaggacacagcagtattggacggtttctagcctctgagatgctaatttatttccccgagtcctcaggtacagcgggctgtgcccg

SEQ ID NO: 10586 - DNA, 120 bp, Artificial Sequence
  ENSG00000008710_109 (sequence is synthesized)
gccccaccccctgggcagatgtcccccactgctaaggctgctggcttcagggagggttagcctgcaccgccgccaccctgcccctaagttattacctctccagttcctaccgtactccct

SEQ ID NO: 10587 - DNA, 120 bp, Artificial Sequence
  ENSG00000008710_110 (sequence is synthesized)
gcaccgtctcactgtgtgtctcgtgtcagtaatttatatggtgttaaaatgtgtatatttttgtatgtcactattttcactagggctgaggggcctgcgcccagagctggcctcccccaa

SEQ ID NO: 10588 - DNA, 120 bp, Artificial Sequence
  ENSG00000008710_111 (sequence is synthesized)
cacctgctgcgcttggtaggtgtggtggcgttatggcagcccggctgctgcttggatgcgagcttggccttgggccggtgctgggggcacagctgtctgccaggcactctcatcacccca

SEQ ID NO: 10589 - DNA, 120 bp, Artificial Sequence
  ENSG00000008710_112 (sequence is synthesized)
gaggccttgtcatcctcccttgccccaggccaggtagcaagagagcagcgcccaggcctgctggcatcaggtctgggcaagtagcaggactaggcatgtcagaggaccccagggtggtta

SEQ ID NO: 10590 - DNA, 90 bp, Artificial Sequence
  ENSG00000008710_113 (sequence is synthesized)
gtagcaggactaggcatgtcagaggaccccagggtggttagaggaaaagactcctcctgggggctggctcccagggtggaggaaggtgac

SEQ ID NO: 10591 - DNA, 120 bp, Artificial Sequence
  ENSG00000008710_114 (sequence is synthesized)
ggagctggctgtgcctgcttctgtgtaccacttctgtgggcatggccgcttctagagcctcgacacccccccaacccccgcaccaagcagacaaagtcaataaaagagctgtctgactgc

SEQ ID NO: 10592 - DNA, 120 bp, Artificial Sequence
  ENSG00000008710_115 (sequence is synthesized)
attctatgtaacacgacagcctgcttcagctttgcttccttccaaacctgccacagttccacgtacagtcttcaagccacatatgctctagtggcaaaagctacacagtcccctagcaat

SEQ ID NO: 10593 - DNA, 120 bp, Artificial Sequence
  ENSG00000008710_116 (sequence is synthesized)
accaacagtgaggaagagccccttcccaccccagaggtagccactgtccccagcccatgtccctgttgctggatgtggtgggccggttctcaccctcacgctcccctctctggaccggcc

SEQ ID NO: 10594 - DNA, 120 bp, Artificial Sequence
  ENSG00000008710_117 (sequence is synthesized)
aggaggcttggtgaccctgagcccgtggtggctgctcctgctgctgtcaggcggggcctgctggtgccccagagtgggcgtctgttccccagtccctgctttcctcagctggcctgattg

SEQ ID NO: 10595 - DNA, 120 bp, Artificial Sequence
  ENSG00000008710_118 (sequence is synthesized)
ggggtcttcccagaggggtcgtctgaggggagggtgtgggagcaggttccatcccagctcagcctcctgacccaggccctggctaagggctgcaggagtctgtgagtcaggcctacgtgg

SEQ ID NO: 10596 - DNA, 120 bp, Artificial Sequence
  ENSG00000008710_119 (sequence is synthesized)
cagctgcggtcctcacacccacacatacgtctcttctcacacgcatccccccaggggccctcagtgagcattgcctgcctcctgctagggtccagctgggtccagtacaccagaacgcac

SEQ ID NO: 10597 - DNA, 120 bp, Artificial Sequence
  ENSG00000008710_120 (sequence is synthesized)
actccagtgtcctctgccctgtgtatgcccttccgccgtccaagttggaaggtggcaaaccggatgagtatcctgggagggagtgagctcaccggcagtggccaggcccctgggaaacct

SEQ ID NO: 10598 - DNA, 120 bp, Artificial Sequence
  ENSG00000008710_121 (sequence is synthesized)
ccagcacgtcatcgagtactcgttggccctggtcaccgtgctgaacgaggtgagtgcagcctgggaggggacgtcacatctgctgcatgcgtgcttgggaccaagacctgtacccctgcc

SEQ ID NO: 10599 - DNA, 120 bp, Artificial Sequence
  ENSG00000008710_122 (sequence is synthesized)
tggagctttgcagagggctcatcccgggccccagagataaatcccagtgaccctgaagcagcaccccgaccttccgctcccagcagccacacccaccgggccctctccggcgtctgcttt

SEQ ID NO: 10600 - DNA, 120 bp, Artificial Sequence
  ENSG00000008710_123 (sequence is synthesized)
ccacaatgcagcccccgcccaggagggcccatgtgcttaccctgttttgcccatgaagaaacagctcagtgttgtgggtcagtgcccgcatcacacagcgtctagcacgtaactgcaccc

SEQ ID NO: 10601 - DNA, 120 bp, Artificial Sequence
  ENSG00000008710_124 (sequence is synthesized)
cgggagtcgtgggcatctgctggcctcctgccggcctcctgcgctgctgacagcttgctgtgccccctgcctgccccagtacgagcgggccctggacgtggcggcagagcccaagcacga

SEQ ID NO: 10602 - DNA, 120 bp, Artificial Sequence
  ENSG00000008710_125 (sequence is synthesized)
cctgggctgggctgggggtcctgccgccttggcgcagcttggactcaagacactgtgcacctctcagcaggcctttgttggacagatgaagagtgacttgtttctggatgattctaagag

SEQ ID NO: 10603 - DNA, 120 bp, Artificial Sequence
  ENSG00000008710_126 (sequence is synthesized)
gacattctgtcagatggcaccgggctctgtcctgtctgctgaggaggtggcttctcatccctgtcctgagcaggtctgagctgccgcccgctgaccactgccctcgtcctgcaggtggct

SEQ ID NO: 10604 - DNA, 120 bp, Artificial Sequence
  ENSG00000008710_127 (sequence is synthesized)
tttttctcttccggatgtcccggagcaaggtgggctggggctggggacccgggagtactgggaatggagcctgggcctcggcaccatgcctagggccgccactttccagtgctgcagcca

SEQ ID NO: 10605 - DNA, 120 bp, Artificial Sequence
  ENSG00000008710_128 (sequence is synthesized)
gagggaaaggcgtccaccaaaggctgctcgggaagggtcaacacacttgagcagccttagctagactgaccagggagaaagagagaagactcagaagccagaatggtgaaagaacgaggg

SEQ ID NO: 10606 - DNA, 120 bp, Artificial Sequence
  ENSG00000008710_129 (sequence is synthesized)
cactttgctaagcagacgccacggacgactgcacagcagcacgccagataactcagaagaagcaagcacgcggctgtgcacgcttccgaaatgcactccagaagaaaatctcagtacatc

SEQ ID NO: 10607 - DNA, 89 bp, Artificial Sequence
  ENSG00000008710_130 (sequence is synthesized)
cgcttccgaaatgcactccagaagaaaatctcagtacatctataggaagtgaagaggctgagttagtcccttagaaacgtcccagtggc

SEQ ID NO: 10608 - DNA, 69 bp, Artificial Sequence
  ENSG00000008710_131 (sequence is synthesized)
cccaacacttcaggtggccgaggtgggcggatatataaaacattaaaaagggccaggcgcggtggctca

SEQ ID NO: 10609 - DNA, 120 bp, Artificial Sequence
  ENSG00000008710_132 (sequence is synthesized)
tttgcctttagtccagccagaccctaggggacatgtggacatgtgtagatacctttgtggctgctagaactggaggtaggtgctgctggcatcagtaggcagaggggagggacacaggtc

SEQ ID NO: 10610 - DNA, 120 bp, Artificial Sequence
  ENSG00000008710_133 (sequence is synthesized)
cgtgtcttgcagtgcacaggacgggcccatgacagacaactgtctgccccagaacatccccaggataaggctgagaagcccaggtctagccgtggccagcagggcagtgggagccatgtt

SEQ ID NO: 10611 - DNA, 120 bp, Artificial Sequence
  ENSG00000008710_134 (sequence is synthesized)
gaatgcacgggtgagtgcaggcctgcgtggggggagcagcgggatcccccgactctgtgacgtcacggagccctcccgtgatgccgtggggaccgtccctcaggctggcatgacgcggag

SEQ ID NO: 10612 - DNA, 120 bp, Artificial Sequence
  ENSG00000008710_135 (sequence is synthesized)
gccgggactgcctgtgtggctccttgagtgcgcacaggccaaagctgagatgacttgcctgggatgccacacgtgttgggcagcagaccgagcctcccacccctccctcttgcctcccag

SEQ ID NO: 10613 - DNA, 120 bp, Artificial Sequence
  ENSG00000008710_136 (sequence is synthesized)
acgctggcgggctttcagcggggccctggccaacctcagtgacgtggtgcagctcatctttctggtggactccaatccctttccctttggctatatcagcaactacaccgtctccaccaa

SEQ ID NO: 10614 - DNA, 120 bp, Artificial Sequence
  ENSG00000008710_137 (sequence is synthesized)
gtgaaatttgctttctgtttcatgggctgctgggggcctggccagagaggagctgggggccacggagaagcaggtgccagctctggtgcagaggctcctatggcctttcaggcccgtggc

SEQ ID NO: 10615 - DNA, 120 bp, Artificial Sequence
  ENSG00000008710_138 (sequence is synthesized)
cggggctcaggtgaggggcgcagcggggtggcagggcctcccctgctctcactggctgtgctggttgcaccctctgggagtgagtctcgtcgcaggcgtcagaacaaggcagtttttgca

SEQ ID NO: 10616 - DNA, 120 bp, Artificial Sequence
  ENSG00000008710_139 (sequence is synthesized)
ttcatgctgcccgaggacgctgccatggctgtgggtgagtggagggagggacgccaatcagggccaggcctctcacctgccacctgggctcactgacgcctgtccctgcagctgacggcc

SEQ ID NO: 10617 - DNA, 120 bp, Artificial Sequence
  ENSG00000008710_140 (sequence is synthesized)
gcagacagggtgctcacacagggcgtgaggcctggcttcccagtgagggcagcagcccagttactggggacgtcggccccgggcaggtcctgctggctggctcctcgggctacctggtgg

SEQ ID NO: 10618 - DNA, 120 bp, Artificial Sequence
  ENSG00000008710_141 (sequence is synthesized)
gctttaaattcctggaaagtcacggctctgacagtggctccgctaactcattccactgtctcatttcacaaaatgaatttaaaactctgctccctgacctcacacgagcccccgtgagtc

SEQ ID NO: 10619 - DNA, 120 bp, Artificial Sequence
  ENSG00000008710_142 (sequence is synthesized)
tctcacgccctctgctgtgttctcgcctggctaaagcgagtggcttttgaggtggagtctgaacccctgatgggaaactgcgggctgcccgcggtgccaccatgctggaggtacagcccc

SEQ ID NO: 10620 - DNA, 120 bp, Artificial Sequence
  ENSG00000008710_143 (sequence is synthesized)
acggtgcgtgcagcgggtggggcacacgcggccccctggccttgttcttggggggaaggcgtttctcgtagggcttccatgggtgtctctggtgaaatttgctttctgtttcatgggctg

SEQ ID NO: 10621 - DNA, 120 bp, Artificial Sequence
  ENSG00000008710_144 (sequence is synthesized)
aggacactcctgtccccctttcctcacctcagaaggcccttaggggttcaatgctctgcagcctttgcccggtctccctcctaccccacgccccccacttgctgccccagtccctgccag

SEQ ID NO: 10622 - DNA, 120 bp, Artificial Sequence
  ENSG00000008710_145 (sequence is synthesized)
ccaccaaccagacggtgggtgccgcccgcccctcggccacttgccttggacagcccagcctccctggtcatctactgttttccgtgttttagtgctggtggaggccgcacgctctcccct

SEQ ID NO: 10623 - DNA, 120 bp, Artificial Sequence
  ENSG00000008710_146 (sequence is synthesized)
cggatgtcccggagcaagtgctgcagccagagggaaaggcgtccaccaaaggctgctcgggaagggtcaacacacttgagcagccttagctagactgaccagggagaaagagagaagact

SEQ ID NO: 10624 - DNA, 120 bp, Artificial Sequence
  ENSG00000008735_0 (sequence is synthesized)
gcagtcgcgggcctctcccggagaagatggcggatcgcgcggagatgttttctctctccaccttccactcgctgtcgccgccgggctgcaggcctccccaggacataagcctggaagaat

SEQ ID NO: 10625 - DNA, 120 bp, Artificial Sequence
  ENSG00000008735_1 (sequence is synthesized)
ttgacgacgaagatctgtctgagatcactgatgactgtggcctgggcctcagctacgactcagaccactgtgagaaggacagcctctccctggggcgctcggagcagccgcaccccatct

SEQ ID NO: 10626 - DNA, 120 bp, Artificial Sequence
  ENSG00000008735_2 (sequence is synthesized)
gctccttccaggatgacttccaggagtttgagatgatcgatgacaatgaagaggaggacgatgaggacgaggaagaggaggaggaggaggaggagggagatggggaaggccaggagggag

SEQ ID NO: 10627 - DNA, 120 bp, Artificial Sequence
  ENSG00000008735_3 (sequence is synthesized)
gagaccctggctcagaggcacctgcccccgggccccttatcccctccccttccgtggaggagccccacaagcaccggcccaccaccctccgtctgaccacactgggggcccaggactccc

SEQ ID NO: 10628 - DNA, 120 bp, Artificial Sequence
  ENSG00000008735_4 (sequence is synthesized)
taaacaacaacggaggctttgacctggtgcgtccggcctcctggcaggagacagcgctatgctcacccgccccggaggccctcagagagctcccgggccccctccctgccacggacaccg

SEQ ID NO: 10629 - DNA, 120 bp, Artificial Sequence
  ENSG00000008735_5 (sequence is synthesized)
ggcccggcggggcgcagtcgccagtgcgcccgggttgcgactgcgaagggaaccggcctgcggaaccccctgcgccaggggggacttcgccctcctcagatcccggcatcgaggctgacc

SEQ ID NO: 10630 - DNA, 120 bp, Artificial Sequence
  ENSG00000008735_6 (sequence is synthesized)
tgagaagccgctcgagcggcggccgcgggggacgtcgcagcagccaggagctgtcctcgcccggctccgactcggaggacgcgggcggcgcgcgcctggggcgcatgatctcgtccatct

SEQ ID NO: 10631 - DNA, 120 bp, Artificial Sequence
  ENSG00000008735_7 (sequence is synthesized)
cggagacggagctggagctgagcagcgatggcggaagcagcagcagcggccgctcctcgcacctcaccaactccatcgaggaggcctcgtcgcccgcctcggagccggagcccccgcgcg

SEQ ID NO: 10632 - DNA, 120 bp, Artificial Sequence
  ENSG00000008735_8 (sequence is synthesized)
aacccccgcgccgccccgccttcctgcccgtgggccccgacgacaccaacagcgagtacgagtcggggtcggagtcggagccggacctcagcgaggacgcggactcgccctggctgctca

SEQ ID NO: 10633 - DNA, 120 bp, Artificial Sequence
  ENSG00000008735_9 (sequence is synthesized)
ctcagcaacctggtgagccgcatgatctccgagggctcctcgcccatccgctgccccggccagtgcctgtctcctgcgccgcgcccgcccggggagcccgtgtcgccggccggcggggcc

SEQ ID NO: 10634 - DNA, 120 bp, Artificial Sequence
  ENSG00000008735_10 (sequence is synthesized)
cgtggagctggtggacatggagacgctgtgcgcgccgccgccgcccgcgcccgccgcgcctcgacccggccccgcgcagcccgggccctgcctattcctcagcaaccccacgcgtgacac

SEQ ID NO: 10635 - DNA, 120 bp, Artificial Sequence
  ENSG00000008735_11 (sequence is synthesized)
ccgggccctgcctattcctcagcaaccccacgcgtgacaccatcacgccgctgtgggccgcgcccggccgcgccgcccgcccgggacgagcctgctccgccgcctgctccgaggaggagg

SEQ ID NO: 10636 - DNA, 120 bp, Artificial Sequence
  ENSG00000008735_12 (sequence is synthesized)
acgaagaggacgacgaggaagaggaggatgccgaggacagtgcggggtcccccgggggcaggggcacgggcccctcggcgccgcgggacgcgtcgctggtgtacgacgcggtcaagtaca

SEQ ID NO: 10637 - DNA, 120 bp, Artificial Sequence
  ENSG00000008735_13 (sequence is synthesized)
cgctggtggtggatgagcacacgcagctggagctggtgagcctgcggcgctgtgctgggctgggccacgacagcgaagaggacagcggcggggaggccagcgaggaggaggcgggcgcgg

SEQ ID NO: 10638 - DNA, 120 bp, Artificial Sequence
  ENSG00000008735_14 (sequence is synthesized)
cgctgctaggcggcggtcaggtctcgggggacacctcgccggacagccctgacctcactttctccaagaagttcctcaatgtcttcgtcaacagcacatctcggtcctccagcaccgagt

SEQ ID NO: 10639 - DNA, 120 bp, Artificial Sequence
  ENSG00000008735_15 (sequence is synthesized)
cctttggccttttctcctgtctggtcaacggcgaggagcgagagcagactcaccgggctgtgttcaggttcatcccgcggcatccagacgagctggagctggatgtggatgaccctgtgt

SEQ ID NO: 10640 - DNA, 120 bp, Artificial Sequence
  ENSG00000008735_16 (sequence is synthesized)
tggtggaggccgaggaggacgacttctggttccgtggcttcaacatgcgcacgggggagcgcggtgtgtttcctgccttctacgcccatgcggtgcccggccctgccaaggacctgctgg

SEQ ID NO: 10641 - DNA, 120 bp, Artificial Sequence
  ENSG00000008735_17 (sequence is synthesized)
ggagtaagcggagcccctgctgggtggagcgctttgacgtgcagttcctgggctccgtggaggtgccctgccaccagggcaacggcatcctgtgtgcagccatgcagaagattgccactg

SEQ ID NO: 10642 - DNA, 120 bp, Artificial Sequence
  ENSG00000008735_18 (sequence is synthesized)
cccggaaactgaccgtccacctgcgccctcctgcctcctgtgacctcgagatctctcttcggggggtcaagctgagtctgagcggaggagggcccgagttccagcgctgcagccatttct

SEQ ID NO: 10643 - DNA, 120 bp, Artificial Sequence
  ENSG00000008735_19 (sequence is synthesized)
tccagatgaagaacatctccttctgcggctgccatccccgcaacagctgctatttcggcttcatcaccaaacaccccctgctgagccgcttcgcctgccacgtctttgtctcccaggagt

SEQ ID NO: 10644 - DNA, 120 bp, Artificial Sequence
  ENSG00000008735_20 (sequence is synthesized)
ccatgaggccggtggcgcagagtgtgggccgcgccttcctggagtactaccaagagcacctggcgtacgcctgccccacggaggacatctacctggagtagcctgcccaccgctctgtct

SEQ ID NO: 10645 - DNA, 120 bp, Artificial Sequence
  ENSG00000008735_21 (sequence is synthesized)
cctggccgtctgctccaggcgcagctggggctgaggatgtctcaagaggccaccatggctttggcaaggactggattggggggacatgggaccttacgcttgtgggggtctgcgggctgg

SEQ ID NO: 10646 - DNA, 120 bp, Artificial Sequence
  ENSG00000008735_22 (sequence is synthesized)
gaactctcgtcctcggtccccagggcgcagctgttggggctgcgggggagtggagcccccgtgcccctgcttttcctcagatccgttctttctctgtgttgtcctcctccttcccttccc

SEQ ID NO: 10647 - DNA, 120 bp, Artificial Sequence
  ENSG00000008735_23 (sequence is synthesized)
ctattcttcactttggggtcagaacttcgggggtgtggaggaggtgcggctctagggacaggtaatgtcggcttccaagtgatgccctcctgccactcccctgcgatttataagggaatt

SEQ ID NO: 10648 - DNA, 120 bp, Artificial Sequence
  ENSG00000008735_24 (sequence is synthesized)
ttaatttttatagtgaatctcaagggatcatcccatccttgaccacagggacaagaggggccccctcgccccagccccaccccacatggagctcagggggaagcagggaggggttcccaa

SEQ ID NO: 10649 - DNA, 120 bp, Artificial Sequence
  ENSG00000008735_25 (sequence is synthesized)
aagagccctgcggaggctaggagtggttcttgatgctcacctgaagcccctagacgctgctaggagggggggccctcctgggcccccaatacccctccgcttgccgctgctagcgcaccc

SEQ ID NO: 10650 - DNA, 120 bp, Artificial Sequence
  ENSG00000008735_26 (sequence is synthesized)
ctgcagtccagcgtgcatccaccccacgcacgccccgtgctgtgttcctgggccctgcccatggcctcaataaactctctgcttggtgtgacattggctgtttctagagggtgctaagac

SEQ ID NO: 10651 - DNA, 120 bp, Artificial Sequence
  ENSG00000008735_27 (sequence is synthesized)
atggggccaggtgcccaggggctgcccattgtggtagggacagagtccccagtggcgggagtgttgtggcaatctcacccttttagctctttccgaaattgtgccgggggtccctgcggt

SEQ ID NO: 10652 - DNA, 120 bp, Artificial Sequence
  ENSG00000008735_28 (sequence is synthesized)
gctgctctggggccttatctgaggtgccgtatctagaagcacccttgggaattctccctagatacactcgattggccacagaggaatccgaggctgtgcaatggggtgtcctttccacgt

SEQ ID NO: 10653 - DNA, 120 bp, Artificial Sequence
  ENSG00000008735_29 (sequence is synthesized)
tgcaatggggtgtcctttccacgtgcacggactgggggccagcacggctcaggtcagtgtgtagtgggggcatgaactccttgaagaacaatctggccgggcacggtggctcacgcttgt

SEQ ID NO: 10654 - DNA, 120 bp, Artificial Sequence
  ENSG00000008735_30 (sequence is synthesized)
ggaaaagaaaaacaatctacttagatcttaaaatggatatttaaaaaattctccagagaaagccagaagaaaataggtgactttttcactatgtgcttaggtgactgcagatgcccggca

SEQ ID NO: 10655 - DNA, 120 bp, Artificial Sequence
  ENSG00000008735_31 (sequence is synthesized)
atgttccctcccaggccctcctgggtgagcccgcctcccaggcaggggtcagcatggccggggtccctctgtctgagcccaggattcgtgcaacaccaggaagacaacagttgaaggttc

SEQ ID NO: 10656 - DNA, 120 bp, Artificial Sequence
  ENSG00000008735_32 (sequence is synthesized)
cttagtgagctaagggaagtatacacaaacttactacataaacattagaaagtgctgtccgtaaaaaacacgtcttcacagagccaacaagcagagaaatagctgcccagtgttaggaag

SEQ ID NO: 10657 - DNA, 120 bp, Artificial Sequence
  ENSG00000008735_33 (sequence is synthesized)
tgcatcatgatccagaggttcagcccgtgtgcagcgcacagacctgaggccccagagagaccgaggacgcagaccagtggcacgacggaaacgcagaacgtttatgagaaaactttccta

SEQ ID NO: 10658 - DNA, 120 bp, Artificial Sequence
  ENSG00000008735_34 (sequence is synthesized)
ctaattgagataaagctgtaaagaggcagatagccccactgggtgtgtacgtttgaaacttgtgccccctgggctagggcattcggggtgtggccctcagtcccctgtagctgctgcctg

SEQ ID NO: 10659 - DNA, 120 bp, Artificial Sequence
  ENSG00000008735_35 (sequence is synthesized)
gaaaccgctgccacccacccacctcctccctctgctcttccactcaggtgagaattctccaagccctgccctccggcgcccccgtcccgcccctgcccggcctggccccgcccctgcccg

SEQ ID NO: 10660 - DNA, 120 bp, Artificial Sequence
  ENSG00000008735_36 (sequence is synthesized)
gccccgccccccaacgtgtcttcaggtctctttccctccagccggcccttaggacggctgttggacgtgctcgtgagtccttcgcctgtctgccttccacctctctgcagctccttctcc

SEQ ID NO: 10661 - DNA, 120 bp, Artificial Sequence
  ENSG00000008735_37 (sequence is synthesized)
aatctcatggtcttcttgagcttggccgccctccacgccccatgctgggcttggtcggttctggggtctacctctctggcttcatccctcccacagtttcgagggtttccctgtgctcag

SEQ ID NO: 10662 - DNA, 120 bp, Artificial Sequence
  ENSG00000008735_38 (sequence is synthesized)
gcccctggcagccgccccctgtgcagaccactgggcagatccagctgacctccaggggcacttcctcggctcatcactgggccggtgctctgcagaatgagctgtgagagccactgtggc

SEQ ID NO: 10663 - DNA, 120 bp, Artificial Sequence
  ENSG00000008735_39 (sequence is synthesized)
tggccagagggtgccactcacagtcacttcagactcacaggagccttcgtcccgacccctgcattcatctgtgttctgttttatgttttttcccagtcacctgagctgcaggccttggtc

SEQ ID NO: 10664 - DNA, 120 bp, Artificial Sequence
  ENSG00000008735_40 (sequence is synthesized)
accccagactcctccctcctgtcacccttatcctcaccccagcacctttacgtctgccccaggctccatttccccctcttctgcctggatcaaaccaccctgactttcctgggtcttcgt

SEQ ID NO: 10665 - DNA, 120 bp, Artificial Sequence
  ENSG00000008735_41 (sequence is synthesized)
gcaacagcctgctccggccgctgcctcactgcacctgcaaatccacttgcacccacacccaggccagggtttttaaacagaagcctcagcagatccctctctctggccagctccctgttg

SEQ ID NO: 10666 - DNA, 120 bp, Artificial Sequence
  ENSG00000008735_42 (sequence is synthesized)
aaccaggaagcaggtccctgttgaacctcagcatgacccgcccccacccctgcatcccacttctgctctgggagcctctgggttcctgggcgcacctgctgcccttccctgtttgtcact

SEQ ID NO: 10667 - DNA, 120 bp, Artificial Sequence
  ENSG00000008735_43 (sequence is synthesized)
gggtgacctcccgtccttgtgggcgctcccgggccctggtctcgggccttctgaggacttgctctcctggtagcggctgctgactgtgagcccagagagcaggcgtggctgttgacctta

SEQ ID NO: 10668 - DNA, 120 bp, Artificial Sequence
  ENSG00000008735_44 (sequence is synthesized)
ggtcctcccagaacctggcggatcgcctggctcccaggcaggaggcgctgcatgacgcctccaacttccgccaatctagcccaaggatggcgttctaaataaaacgcgttctacagaaaa

SEQ ID NO: 10669 - DNA, 120 bp, Artificial Sequence
  ENSG00000008735_45 (sequence is synthesized)
atgctccccgatttcccttctcctagcacctgggcccctgggctactgctgccctctggcccagccctgctatctccctccgtcctgcaggacagcctctccctggggcgctcggagcag

SEQ ID NO: 10670 - DNA, 120 bp, Artificial Sequence
  ENSG00000008838_0 (sequence is synthesized)
gacaagtgccaaaatggcgatgcctaccacctagaactggattgtgcgctggccgccaccgctgccacctgctcagagtgaaataatgaaggtggtcaacctgaagcaagccattttgca

SEQ ID NO: 10671 - DNA, 120 bp, Artificial Sequence
  ENSG00000008838_1 (sequence is synthesized)
agcctggaaggagcgctggagtgactaccaatgggcaatcaacatgaagaaattctttcctaaaggagccacctgggatattctcaacctggcagatgcgttactagagcaggccatgat

SEQ ID NO: 10672 - DNA, 120 bp, Artificial Sequence
  ENSG00000008838_2 (sequence is synthesized)
tggaccatcccccaatcctctcatcttgtcctacctgaagtatgccattagttcccagatggtgtcctactcttctgtcctcacagccatcagtaagtttgatgacttttctcgggacct

SEQ ID NO: 10673 - DNA, 120 bp, Artificial Sequence
  ENSG00000008838_3 (sequence is synthesized)
gtgtgtccaggcattgctggacatcatggacatgttttgtgaccgtctgagctgtcacggcaaagcagaggaatgcatcggactgtgccgagcccttcttagcgccctccactggctgct

SEQ ID NO: 10674 - DNA, 120 bp, Artificial Sequence
  ENSG00000008838_4 (sequence is synthesized)
gcgctgcacggcagcctctgcagagcggctgcgggaggggctggaggccggcactccagccgctggggagaagcagcttgccatgtgccttcagcgcctggagaaaaccctcagcagcac

SEQ ID NO: 10675 - DNA, 120 bp, Artificial Sequence
  ENSG00000008838_5 (sequence is synthesized)
caagaaccgggccctgctgcacatcgccaaactagaggaggcctcttcttggactgccatcgagcattctctcttgaaacttggagagatcctggccaatctcagcaacccgcagctccg

SEQ ID NO: 10676 - DNA, 120 bp, Artificial Sequence
  ENSG00000008838_6 (sequence is synthesized)
gagtcaggccgagcagtgtggcaccctcattaggagcatccccacgatgctgtctgtgcatgcggagcagatgcacaagaccggcttccccactgtccacgccgtgatcctgctcgaggg

SEQ ID NO: 10677 - DNA, 120 bp, Artificial Sequence
  ENSG00000008838_7 (sequence is synthesized)
caccatgaacctgacaggcgagacgcagtccctggtggagcagctgacgatggtgaagcgcatgcagcatatccccaccccactttttgtcctggagatctggaaagcttgcttcgtggg

SEQ ID NO: 10678 - DNA, 120 bp, Artificial Sequence
  ENSG00000008838_8 (sequence is synthesized)
gctcattgagtctcccgagggtacggaggagctcaagtggacagctttcactttcctcaagattccacaggttttggtgaagttgaagaagtactctcatggagacaaggacttcactga

SEQ ID NO: 10679 - DNA, 120 bp, Artificial Sequence
  ENSG00000008838_9 (sequence is synthesized)
ggatgtcaactgtgcttttgagttcctgctgaagctcacccccttgttggacaaagctgaccagcgctgcaactgtgactgtacaaacttcctgctccaagaatgtggcaagcaggggct

SEQ ID NO: 10680 - DNA, 120 bp, Artificial Sequence
  ENSG00000008838_10 (sequence is synthesized)
tctgtctgaggccagcgtcaacaaccttatggctaagcgcaaagcggaccgagagcacgcaccccagcagaaatcgggagagaatgccaacatccagcccaacatccagctgatcctccg

SEQ ID NO: 10681 - DNA, 120 bp, Artificial Sequence
  ENSG00000008838_11 (sequence is synthesized)
ggcggagcccactgtcacaaacatcctcaagacgatggatgcagaccactctaagtcaccggagggactgctgggagtcctgggccacatgctgtccgggaagagtctggacttgctgct

SEQ ID NO: 10682 - DNA, 120 bp, Artificial Sequence
  ENSG00000008838_12 (sequence is synthesized)
ggctgccgccgccgccactggaaagctgaaatccttcgcccggaaattcatcaatttgaatgaattcacaacctatggcagcgaagaaagcaccaaaccggcctccgtccgggccctgct

SEQ ID NO: 10683 - DNA, 120 bp, Artificial Sequence
  ENSG00000008838_13 (sequence is synthesized)
gtttgacatctccttcctcatgctgtgccatgtggcccagacctatggttcagaggtgattctgtccgagtcgcgcacaggagctgaggtgcccttcttcgagacctggatgcagacctg

SEQ ID NO: 10684 - DNA, 120 bp, Artificial Sequence
  ENSG00000008838_14 (sequence is synthesized)
catgcctgaggagggcaagatcctgaaccctgaccacccctgcttccgccccgactccaccaaagtggagtccctggtggccctgctcaacaactcctcggagatgaagctagtgcagat

SEQ ID NO: 10685 - DNA, 120 bp, Artificial Sequence
  ENSG00000008838_15 (sequence is synthesized)
gaagtggcatgaggcctgtctcagcatctcagccgccatcttggaaatcctcaatgcctgggagaatggggtcctggccttcgagtccatccagaaaatcactgataacatcaaagggaa

SEQ ID NO: 10686 - DNA, 120 bp, Artificial Sequence
  ENSG00000008838_16 (sequence is synthesized)
ggtatgcagtctggcggtgtgtgctgtggcttggcttgtggcccacgtccggatgctggggctggatgagcgtgagaagtcgctgcagatgatccgccagctggcagggccactgtttag

SEQ ID NO: 10687 - DNA, 120 bp, Artificial Sequence
  ENSG00000008838_17 (sequence is synthesized)
tgagaacaccctgcagttctacaatgagagggtggtgatcatgaactcgatcctggagcgcatgtgtgccgacgtgctgcagcagacagccacgcagatcaagtttccctccaccggggt

SEQ ID NO: 10688 - DNA, 120 bp, Artificial Sequence
  ENSG00000008838_18 (sequence is synthesized)
ggacacaatgccctactggaacctgctgccccccaagcggcccatcaaagaggtgctgacggacatttttgccaaggtgctggagaagggctgggtggacagccgctccatccacatctt

SEQ ID NO: 10689 - DNA, 120 bp, Artificial Sequence
  ENSG00000008838_19 (sequence is synthesized)
tgacaccctgctgcacatgggcggcgtctactggttctgcaacaacctgattaaggagctgctgaaggagacgcggaaggagcacacgctgcgggcagtggagctgctctactccatctt

SEQ ID NO: 10690 - DNA, 120 bp, Artificial Sequence
  ENSG00000008838_20 (sequence is synthesized)
ctgcctggacatgcagcaagtgaccctggtcctgctgggccacatcctacctggcctgctcactgactcctccaagtggcacagcctcatggaccccccgggcactgctcttgccaagct

SEQ ID NO: 10691 - DNA, 120 bp, Artificial Sequence
  ENSG00000008838_21 (sequence is synthesized)
ggccgtgtggtgtgccctcagttcctactcctcccacaagggacaggcgtccacccgccagaagaagagacaccgcgaagacattgaggattatatcagcctcttccccctggacgatgt

SEQ ID NO: 10692 - DNA, 120 bp, Artificial Sequence
  ENSG00000008838_22 (sequence is synthesized)
gcagccttcgaagttgatgcgactgctgagctctaatgaggacgatgccaacatcctttcgagccccacagaccgatccatgagcagctccctctcagcctctcagctccacacggtcaa

SEQ ID NO: 10693 - DNA, 120 bp, Artificial Sequence
  ENSG00000008838_23 (sequence is synthesized)
catgcgggaccctctgaaccgagtcctggccaacctgttcctgctcatctcctccatcctggggtctcgcaccgctggcccccacacccagttcgtgcagtggttcatggaggagtgtgt

SEQ ID NO: 10694 - DNA, 120 bp, Artificial Sequence
  ENSG00000008838_24 (sequence is synthesized)
ggactgcctggagcagggtggccgtggcagcgtcctgcagttcatgcccttcaccaccgtgtcggaactggtgaaggtgtcagccatgtccagccccaaggtggttctggccatcacgga

SEQ ID NO: 10695 - DNA, 120 bp, Artificial Sequence
  ENSG00000008838_25 (sequence is synthesized)
cctcagcctgcccctgggccgccaggtggctgctaaagccattgctgcactctgaggggcttggcatggccgcagtgggggctggggactggcgcagccccaggcgcctccaagggaagc

SEQ ID NO: 10696 - DNA, 120 bp, Artificial Sequence
  ENSG00000008838_26 (sequence is synthesized)
agtgaggaaagatgaggcatcgtgcctcacatccgctccacatggtgcaagagcctctagcggcttccagttccccgctcctgactcctgacctccaggatgtctcccggtttcttcttt

SEQ ID NO: 10697 - DNA, 120 bp, Artificial Sequence
  ENSG00000008838_27 (sequence is synthesized)
caaaatttcctctccatctgctggcacctgaggagagtgagcagcctggaccacaagcccagtggtcacccctgtgtgcgcccgccccagcccaggagtagtcttacctctgaggaactt

SEQ ID NO: 10698 - DNA, 73 bp, Artificial Sequence
  ENSG00000008838_28 (sequence is synthesized)
tctagatgcaaattgtaatatgtgagggaaatctaccttcgttcatgtataaataaagctcctcgtggctccc

SEQ ID NO: 10699 - DNA, 120 bp, Artificial Sequence
  ENSG00000008838_29 (sequence is synthesized)
ctgtttccagagatttctcctgagcctgaacttttctctgaagccttttaggaactaggggaccaactatacacttgatcagaagaaagatgctaggtttgccagctacaagtgctgtga

SEQ ID NO: 10700 - DNA, 120 bp, Artificial Sequence
  ENSG00000008838_30 (sequence is synthesized)
cctttagctagcgactgagccagcccccgtctgggtctcctcatctgtaaatggggtgttgtgaggagtaagcagcttaggaagtaccaagatcggcccctggccctgtgtgctcaccac

SEQ ID NO: 10701 - DNA, 120 bp, Artificial Sequence
  ENSG00000008838_31 (sequence is synthesized)
aatggccagggggaggaaagtccctccccagtccctatttataggctttgtgtcctgcaggtgagagacctgccaggagcagagcaggggccaggtcaccccggggtataccgtccccca

SEQ ID NO: 10702 - DNA, 120 bp, Artificial Sequence
  ENSG00000008838_32 (sequence is synthesized)
gcgcaaaactgggttaatgcctcagggagatttccgtaacctaagtccaagggaaagtctggcatgggtgttccctcctctccctccccaccctacagtggcacctgagcctcaggttct

SEQ ID NO: 10703 - DNA, 120 bp, Artificial Sequence
  ENSG00000008838_33 (sequence is synthesized)
tgtggaatgtggcccgggactccacccgctgcacttagctgcccgcagaggctgagaaggtgatgttggctcaagaaagggagatagatggtagcccatcacctttccgtctcccctaga

SEQ ID NO: 10704 - DNA, 120 bp, Artificial Sequence
  ENSG00000008838_34 (sequence is synthesized)
cgttactagagcaggccatgattggaccatcccccaatcctctcatcttgtcctacctgaagtatgccattagttcccagatggtgtcctactcttctgtcctcacagccatcaattcca

SEQ ID NO: 10705 - DNA, 120 bp, Artificial Sequence
  ENSG00000008838_35 (sequence is synthesized)
caggtgcgagccactgcgctcggccgatactttcttagtgccccagtttaaggaagggcggttcaggaggagagagtctgacaggatcttactttatccctttagctctttttctttcaa

SEQ ID NO: 10706 - DNA, 120 bp, Artificial Sequence
  ENSG00000008838_36 (sequence is synthesized)
attcctctgtctcgcttaaatcttcccgcatcttctcctttctatttaattctgccttccccggttctccttagaacctcatgtccttttctttagctccatttctttcacctcaaagct

SEQ ID NO: 10707 - DNA, 120 bp, Artificial Sequence
  ENSG00000008838_37 (sequence is synthesized)
gtctttgggctgggctggagcagcagcctggcgggaaacagtgcagccccaggtccagcgctggcaggcgccgcgccctccccactcggctggtgccccccttcccctttcccaggtgat

SEQ ID NO: 10708 - DNA, 120 bp, Artificial Sequence
  ENSG00000008838_38 (sequence is synthesized)
tgggaatggtctctggggtttccagctctaggtgcccaccccccttctggaaacagtgcatgctgccctcaggcccctccctccctgttgtcctcaggggaagccttcctgtgtggtttc

SEQ ID NO: 10709 - DNA, 120 bp, Artificial Sequence
  ENSG00000008838_39 (sequence is synthesized)
gtgtgccggagggagtgccaaaatcgaggagttcagggccaggtgctccttctctcctgtttcccatcatgtttctgtacttccttccctctgccagcttcttggactgccatcgagcat

SEQ ID NO: 10710 - DNA, 120 bp, Artificial Sequence
  ENSG00000008838_40 (sequence is synthesized)
ttgcacacatcccagggacttgggcagggtggcacccgagccaatcaaccaacagccactggattctggcctccctctgcctctctctcctgagcctgtgtgatgccataccttctgaag

SEQ ID NO: 10711 - DNA, 120 bp, Artificial Sequence
  ENSG00000008838_41 (sequence is synthesized)
gcagcacatgatgcctctggctggcattgctggacttccatgggagggggatcctggcaagtaggggctggtgcttgggagccaatgtccagtgttgaggatgctgagtctggaacccag

SEQ ID NO: 10712 - DNA, 120 bp, Artificial Sequence
  ENSG00000008838_42 (sequence is synthesized)
gtctgccagtcgatgccacctcctcggtgatcaggtttggccggaaccctggggagcaaggctgcagtatgtagtgctcaggctggccgccaccgctgccacctgctcagagtgaaataa

SEQ ID NO: 10713 - DNA, 120 bp, Artificial Sequence
  ENSG00000008838_43 (sequence is synthesized)
agtttagcttggtcatcagacagataggtgcagggcagtaaagggagccagggaaaggggccccagtcctccttgaagctggggatccacttttgcttatggcatctttttctgttgagc

SEQ ID NO: 10714 - DNA, 120 bp, Artificial Sequence
  ENSG00000008838_44 (sequence is synthesized)
tagcggaggtgcagggtgcttgtgtcctgtgcctaggcctgggggcatcaggggcctgggcacctattggctttctcatttagcactaagtgtgctctcactcccagggtaggagtgttc

SEQ ID NO: 10715 - DNA, 120 bp, Artificial Sequence
  ENSG00000008838_45 (sequence is synthesized)
ttcttgacaagtgccaaaatggcgatgcctaccacctagaactggattgtgcgaacctcatgtccttttctttagctccatttctttcacctcaaagctggccgccaccgctgccacctg

SEQ ID NO: 10716 - DNA, 120 bp, Artificial Sequence
  ENSG00000008838_46 (sequence is synthesized)
agttgacagcttctctccaagagaggcagtttgggctctgaggtatgcgacaggggctccaggatgatccaggaatggctccaggtggagggccttaggctgtggctacaggcacagaat

SEQ ID NO: 10717 - DNA, 120 bp, Artificial Sequence
  ENSG00000008838_47 (sequence is synthesized)
tttaaccagtaactcagactctagctatcgctctctgaacatgtgtagccccagcgcccagctactgctcagctcatgccctggtcaatgcagcctgtctccattcctttcagtttgaat

SEQ ID NO: 10718 - DNA, 120 bp, Artificial Sequence
  ENSG00000008838_48 (sequence is synthesized)
acctactaactaggggctaacgaatgaaagggtgtcggaatatgatggagaagcccggtcgacagtgacgtcgtgggcgacgccgggttgtgagcggcctttcgagctccctcgagtccc

SEQ ID NO: 10719 - DNA, 120 bp, Artificial Sequence
  ENSG00000008838_49 (sequence is synthesized)
tgagtctctgtagtgcctcagctcctggatgtcctcccttaaaggagaagaacaatgcgggccgactagacgagtcccttagtttcctcgccggcgcagacaaatacggtttcagtccaa

SEQ ID NO: 10720 - DNA, 120 bp, Artificial Sequence
  ENSG00000008838_50 (sequence is synthesized)
ctaccattcccagaagacagcggggcgttccttgctgcatttctattggttggcgtttgttactcccagccaatagaaagtgagcttcttgacaagtgccaaaatggcgatgcctaccac

SEQ ID NO: 10721 - DNA, 120 bp, Artificial Sequence
  ENSG00000008838_51 (sequence is synthesized)
taccagttacctccgatgggtgaaggtcgggttggggcatccccggggagcaccacttttgcactcggcaggctgtttcccagcgctccatctgctccgtcccacagcagaccgatccat

SEQ ID NO: 10722 - DNA, 120 bp, Artificial Sequence
  ENSG00000008838_52 (sequence is synthesized)
ctgcagttcatgcccttcaccaccgtgagtaccaccttcccggctctcctgctggtgctggggcctcggggcagcccttagagcagggaggggcctccttccccctgggacagcacaccc

SEQ ID NO: 10723 - DNA, 120 bp, Artificial Sequence
  ENSG00000008853_0 (sequence is synthesized)
atttttttctcctcctttttttaccctcccgtttttttcttttcttttttttttccctatcctttttttgtgaatgaaaaaaggaggtcgcgagcggtacctgggactgcagcgccaggc

SEQ ID NO: 10724 - DNA, 80 bp, Artificial Sequence
  ENSG00000008853_1 (sequence is synthesized)
gactgcagcgccaggcgtcttcgcggcagcgccttcgccgcgggcccgggcgcgtagcggcggcggcctcgcccctctcc

SEQ ID NO: 10725 - DNA, 120 bp, Artificial Sequence
  ENSG00000008853_2 (sequence is synthesized)
acattgggcgcctggcgcgcggggcgatgctgatccggaaggggcagcggctgcagtgcagcgcgcgcgtccgctcctgggcccacgtccggcctgggctgccctgccggagtttctgag

SEQ ID NO: 10726 - DNA, 120 bp, Artificial Sequence
  ENSG00000008853_3 (sequence is synthesized)
tggccgcgagctggccgggaggctggagcccagcagcagcgcggcggcgccggcgtcgtcccaacttgcaggcgcggagggacccctgacatttcactaaaatgagcgtgctcagcagga

SEQ ID NO: 10727 - DNA, 120 bp, Artificial Sequence
  ENSG00000008853_4 (sequence is synthesized)
agagatgtgttcctcacgctagaagccaccccgtcacatgtagtggtgtcccgtttaatggattctgacatggattatgaaaggccaaacgtagagaccatcaagtgcgttgtggtgggg

SEQ ID NO: 10728 - DNA, 120 bp, Artificial Sequence
  ENSG00000008853_5 (sequence is synthesized)
gacaacgccgtgggtaagaccaggctcatctgtgcccgcgcttgcaatgccaccctcacccagtaccagctgctggccacgcatgtgcccacagtatgggccatcgaccaatatcgtgtg

SEQ ID NO: 10729 - DNA, 120 bp, Artificial Sequence
  ENSG00000008853_6 (sequence is synthesized)
tgccaggaggtgctggaacgctcccgagacgtggtagatgatgtcagcgtctctctgcgcctctgggacacctttggagaccaccacaaagaccgtcgctttgcttatgggagatctgat

SEQ ID NO: 10730 - DNA, 120 bp, Artificial Sequence
  ENSG00000008853_7 (sequence is synthesized)
gtggtggttctgtgcttctccattgccaaccccaattccctccaccatgtcaagaccatgtggtacccagaaatcaagcacttctgcccccgagcacctgtcatcttggtgggctgccag

SEQ ID NO: 10731 - DNA, 120 bp, Artificial Sequence
  ENSG00000008853_8 (sequence is synthesized)
ttggacctgcgctacgctgacctggaggctgtcaacagggctaggcgacccttggctaggcccatcaaacctaatgaaatcctgcccccagagaagggtcgggaggtggccaaggagctg

SEQ ID NO: 10732 - DNA, 120 bp, Artificial Sequence
  ENSG00000008853_9 (sequence is synthesized)
ggcatcccctactatgagaccagcgtggtggcccagttcggcatcaaggacgtctttgacaacgccatccgagctgcactcatctcccgccgccacctgcagttctggaagtcccacctc

SEQ ID NO: 10733 - DNA, 120 bp, Artificial Sequence
  ENSG00000008853_10 (sequence is synthesized)
cgcaatgtgcagcggcctctgctgcaggcacccttcctaccccccaagccaccgcccccgatcatcgtggtgcccgaccctccctccagcagcgaggagtgccccgcccacctcctggag

SEQ ID NO: 10734 - DNA, 120 bp, Artificial Sequence
  ENSG00000008853_11 (sequence is synthesized)
gacccgctctgcgcggacgtcatcctggtgctgcaggagcgggtgcgcatctttgcccacaagatctacctctccacctcttcctccaagttctatgacctgttcctcatggacctgagt

SEQ ID NO: 10735 - DNA, 120 bp, Artificial Sequence
  ENSG00000008853_12 (sequence is synthesized)
gagggggagctggggggcccctcggagccagggggcacccacccagaggaccaccagggccactctgatcaacaccaccaccatcaccaccaccaccatgggcgagacttcctgctccga

SEQ ID NO: 10736 - DNA, 120 bp, Artificial Sequence
  ENSG00000008853_13 (sequence is synthesized)
gcagccagctttgacgtgtgcgagagcgtggatgaggctgggggctccggtcctgctggcctccgtgcttccaccagcgacgggatcttacggggcaacggaacagggtacctaccgggc

SEQ ID NO: 10737 - DNA, 120 bp, Artificial Sequence
  ENSG00000008853_14 (sequence is synthesized)
aggggtcgtgtgctgtcttcctggagccgagcttttgtgagcatccaggaagagatggcagaagatcctctcacctacaaatcccggctgatggtggtggtgaagatggacagttccatc

SEQ ID NO: 10738 - DNA, 120 bp, Artificial Sequence
  ENSG00000008853_15 (sequence is synthesized)
cagccggggcccttccgggctgtcctcaagtacctgtacacgggggagctagatgagaacgagcgtgacctcatgcacattgcccacattgctgagctgctcgaggtctttgatctgcgc

SEQ ID NO: 10739 - DNA, 120 bp, Artificial Sequence
  ENSG00000008853_16 (sequence is synthesized)
atgatggtggccaacattctcaacaatgaggccttcatgaaccaggagatcaccaaggccttccacgtccgccggaccaaccgggttaaggagtgcttggcaaaaggcaccttctcagat

SEQ ID NO: 10740 - DNA, 120 bp, Artificial Sequence
  ENSG00000008853_17 (sequence is synthesized)
gtgaccttcatcctggatgatggcaccatcagcgcccacaagcccctgttgatttccagctgtgactggatggctgccatgtttggggggccatttgtggagagctccacccgggaggtg

SEQ ID NO: 10741 - DNA, 120 bp, Artificial Sequence
  ENSG00000008853_18 (sequence is synthesized)
gtgtttccctacacaagcaagagctgcatgcgggccgtgctggaatacctctacaccggcatgttcacctccagccccgacctggatgacatgaagctcatcattctagccaaccgcctc

SEQ ID NO: 10742 - DNA, 120 bp, Artificial Sequence
  ENSG00000008853_19 (sequence is synthesized)
tgcctgccacacctggttgccctcacagagcagtacacagtgaccgggctgatggaagcgacccagatgatggtggacatcgatggggacgtccttgtgttcctggaactggctcagttc

SEQ ID NO: 10743 - DNA, 120 bp, Artificial Sequence
  ENSG00000008853_20 (sequence is synthesized)
cactgtgcgtaccagctggccgactggtgtctccaccacatctgcaccaactacaacaacgtgtgccgcaagttcccccgagacatgaaggccatgtccccagaaaaccaggagtatttc

SEQ ID NO: 10744 - DNA, 120 bp, Artificial Sequence
  ENSG00000008853_21 (sequence is synthesized)
gagaagcatcggtggccacctgtgtggtacctgaaggaggaagatcattaccagcgggcacggaaggagcgtgagaaggaggactacctccacctcaagcggcagcccaaacggcgttgg

SEQ ID NO: 10745 - DNA, 120 bp, Artificial Sequence
  ENSG00000008853_22 (sequence is synthesized)
tccccatcttcctcctcggctgtggtctgagatgctgccaccctcttctgaccctgctgctgttgtccccatccgccttcacccctctgctcttccgcatcaccccatccaccttacagg

SEQ ID NO: 10746 - DNA, 120 bp, Artificial Sequence
  ENSG00000008853_23 (sequence is synthesized)
gaccagggggcccacgtaaccaggacccagagggtggagctcttcttaccagccaccgtggctcagccagagaggagctgagccctgtggagcagaacgggaaccacctgcagaggtccc

SEQ ID NO: 10747 - DNA, 120 bp, Artificial Sequence
  ENSG00000008853_24 (sequence is synthesized)
cagacccaaagcaggacgggagacaactgcttggaggagcgaagagccctggcattttatctctgggtttgagagccctagagtcaaagggaaagcctcccagcctccagggcttctctg

SEQ ID NO: 10748 - DNA, 120 bp, Artificial Sequence
  ENSG00000008853_25 (sequence is synthesized)
tgtgtcttggttgctgctctggccagggaggcagccccactcccagcaagcagaagtgatcctcgagggtcctgcccctgttggccatatctttccaccgacggacttgagtgttgcatt

SEQ ID NO: 10749 - DNA, 120 bp, Artificial Sequence
  ENSG00000008853_26 (sequence is synthesized)
tgttttgtgggcatttccacacgaagcctactcacaccctcactggagaagtcagggtagaaattgagccttcagagcccaactcaaggcttctacatcctggggtgcagctgcaaaagg

SEQ ID NO: 10750 - DNA, 120 bp, Artificial Sequence
  ENSG00000008853_27 (sequence is synthesized)
ccagacgtggaaaggcctgtatcctgccagtgtccctccgtcccagggggctgtgctagcacagacctgagaatggggacacaggtcattcagagctccaggcctggaagcagtgcctct

SEQ ID NO: 10751 - DNA, 120 bp, Artificial Sequence
  ENSG00000008853_28 (sequence is synthesized)
tggtgcaacaagaaacttctccctcaccccctcctttaccctcagatttggagatggtaaccaaaggaagcagctgggacaggtggagaaggaagtaggaatgagtgcacggcgaccccg

SEQ ID NO: 10752 - DNA, 120 bp, Artificial Sequence
  ENSG00000008853_29 (sequence is synthesized)
tgctcctcagggccctcccctgcctctgggtggcactgctttttatagggtggggcaaaattagcaaaaaacaaaaaccaatgacaaccaaactgaaaccgaaacgaaaaatcaacaaac

SEQ ID NO: 10753 - DNA, 120 bp, Artificial Sequence
  ENSG00000008853_30 (sequence is synthesized)
actctgtcctctatccctccaaagaatgaaaatcagaaaaagcccctgcctagctcacatttctataaacagaggcccccatgatgaggaggtgaagatttaggttgcagaatcgactcc

SEQ ID NO: 10754 - DNA, 120 bp, Artificial Sequence
  ENSG00000008853_31 (sequence is synthesized)
aatgcctttcaggaaaggactcggcacttctctgactgcggaggccctgaccctgccagctggctccgagggcaacacaggggcctggcctctagagggctggtgattgaggggcccggg

SEQ ID NO: 10755 - DNA, 120 bp, Artificial Sequence
  ENSG00000008853_32 (sequence is synthesized)
ctggcggcaaagaggggtttggtctcggggcttaaatggcaccagactcttgcttttgcccatctggagactgcaggctcccttccttaccctcagagagtgcttatggtgggtgttttt

SEQ ID NO: 10756 - DNA, 120 bp, Artificial Sequence
  ENSG00000008853_33 (sequence is synthesized)
gcggggctgcaataggggccaaaagtcagggaaaggggcactgacctgtagtgaaaggccacaggacacagccttattactgctggggtgggataaggggaaggagaagagggagaatgg

SEQ ID NO: 10757 - DNA, 120 bp, Artificial Sequence
  ENSG00000008853_34 (sequence is synthesized)
agcaggaggaaaagcagagttggtctagagaggaggagggcggggctggaggaatgtgggggattgaaactagctcccagcccccatggggcagcagctgggccacaattgcccctttcc

SEQ ID NO: 10758 - DNA, 120 bp, Artificial Sequence
  ENSG00000008853_35 (sequence is synthesized)
gttttctaaccccgactcagatttcaccacccacactctttttaggtgtaaaagatggagtcccacggaggaggggcagagccaggaggcagtggggctgtgggctcagagctcaggagt

SEQ ID NO: 10759 - DNA, 120 bp, Artificial Sequence
  ENSG00000008853_36 (sequence is synthesized)
cgccttacctgagagagatgttctagctgagagggcctggccctggggtgggctccaggaaaacgctggttaggcctgggattgagctaacctgaaacaaaggtagcaggcaggacctaa

SEQ ID NO: 10760 - DNA, 120 bp, Artificial Sequence
  ENSG00000008853_37 (sequence is synthesized)
tgaccagaggttaaatcctcatcaagagagaccaggcggctggaggacaagcggctctaaccctgggggcggccatgttgtccaggcccaggcccctccaggactgtggctgcctcccct

SEQ ID NO: 10761 - DNA, 120 bp, Artificial Sequence
  ENSG00000008853_38 (sequence is synthesized)
ccacggcctccagggcggctggctggaaagccacgcgtatgctgccctctacaggctgctcggcctccctgcagctcagcgcagcccagggctccaagtgaggcccagaagcccatgggc

SEQ ID NO: 10762 - DNA, 120 bp, Artificial Sequence
  ENSG00000008853_39 (sequence is synthesized)
agggctggggggacgaagggggaacccggagcacctccacttctagggaagatggacagcgtgggggcacacctgggcctcccggaagctgtggacgaaagggagagcgggtcctccagg

SEQ ID NO: 10763 - DNA, 120 bp, Artificial Sequence
  ENSG00000008853_40 (sequence is synthesized)
gcaaggggaacgggaaataggtctcctaggtgcctgaagcgctgagcaacctgggtaccctggtggggatgcagggaaggccggggcagagaaagtgaaggtcgacccagggctgtagga

SEQ ID NO: 10764 - DNA, 120 bp, Artificial Sequence
  ENSG00000008853_41 (sequence is synthesized)
agccataggagagtgaccacgggattccctgagaaacagggccggccccccaacttcagggacccaccgcccattccccgagagctgtcggaaccagatgcaacccggcagcccagagaa

SEQ ID NO: 10765 - DNA, 120 bp, Artificial Sequence
  ENSG00000008853_42 (sequence is synthesized)
ctctcctgggaggctgtgggtgagccaggccaacattggtgtccctgtccccagagggaggagcaggcaggagagagaggggaaggaggtatgaatcccagtccccaggaacctagctct

SEQ ID NO: 10766 - DNA, 120 bp, Artificial Sequence
  ENSG00000008853_43 (sequence is synthesized)
ttaaactctggggagtcggattcaggaaacacccccaggaggccaagcctgaaaacagaggggagggaggaaggaaggagtcccagcaggagcacagccctggtttcctgtcactcagag

SEQ ID NO: 10767 - DNA, 120 bp, Artificial Sequence
  ENSG00000008853_44 (sequence is synthesized)
ctgattcacaggaggaggggaggttggggggcgggagacaaaaaccacacctctttttatataaggtttcatatttaatttggtcatggattcataaatacataagtattttgtacacaa

SEQ ID NO: 10768 - DNA, 120 bp, Artificial Sequence
  ENSG00000008853_45 (sequence is synthesized)
gtccttcacctgccttcccataagctggactttggatcccagcccttaaaacccttgtgttgtttcttcctgcagacctggtcgagaacactacttcaggacagggaatagtgacaggcc

SEQ ID NO: 10769 - DNA, 120 bp, Artificial Sequence
  ENSG00000008853_46 (sequence is synthesized)
agcagagccccagaggcgaggtggcagtaaacaagaatatgcacgcgcagtggaccacttctgaaggtcaacatataactttctcatccctgacatcaactgtcatccctgtgagcagaa

SEQ ID NO: 10770 - DNA, 120 bp, Artificial Sequence
  ENSG00000008853_47 (sequence is synthesized)
ccaactaccaaaggagagaggagcctggagggaacacagagcgatgcaagcctggagaaaaggccccgatggcccccagaagacctcttcagacagcatgtcccgtttaatggattctga

SEQ ID NO: 10771 - DNA, 120 bp, Artificial Sequence
  ENSG00000008853_48 (sequence is synthesized)
cctctaggggtgggacaggatgggttgggggcagctgaagaggaaggagcccctggagagaggtttaagccaagtctgccccagggaagtgtctctggctggttgtgttttcagggactg

SEQ ID NO: 10772 - DNA, 120 bp, Artificial Sequence
  ENSG00000008853_49 (sequence is synthesized)
actgctctgccggggaaggaggaggagagcagatgagtgagctgccctctctggagaggggacagggcagggcctcggcaagctccactggtgatctcgcgtcccgtttaatggattctg

SEQ ID NO: 10773 - DNA, 120 bp, Artificial Sequence
  ENSG00000008853_50 (sequence is synthesized)
cttcctgcagacctggtcgagaacactacttcaggacagggaatagtgacaggccagcagagccccagaggcgaggtggcagcctgttctgttccacgcactcctttatctggaagcagt

SEQ ID NO: 10774 - DNA, 120 bp, Artificial Sequence
  ENSG00000008853_51 (sequence is synthesized)
tagattagcagctattactgaactccaggaggcaacaggagggggatgggatggaggtggggacccgctgaagaaggcctaggtgggagacaggtaacgtggtacaggtacccaccccac

SEQ ID NO: 10775 - DNA, 120 bp, Artificial Sequence
  ENSG00000008853_52 (sequence is synthesized)
aactcattaagggccatggagggaggaaggctctcaagtgccacgaaaattcccaaagcagcagagggcttgtatggaaacgccggttattcgtccctacccggcccccgccccccgccc

SEQ ID NO: 10776 - DNA, 120 bp, Artificial Sequence
  ENSG00000008853_53 (sequence is synthesized)
tgccatgctcttgaagcctggttttccccagctgggagcgggtttgttccgtgccccgaatcttctgggttcaggaggaggctccgtggctccccttggggcttgttctcccagcttctt

SEQ ID NO: 10777 - DNA, 120 bp, Artificial Sequence
  ENSG00000008869_0 (sequence is synthesized)
cccttgtttcctgcaggtaggagtgcgggaggtggggcatccgggtctcttggtggctgcttctacccccggagctcagctgatcttcccttccagactacgaggtgtgaatttcaaact

SEQ ID NO: 10778 - DNA, 120 bp, Artificial Sequence
  ENSG00000008869_1 (sequence is synthesized)
tccgtaatggagttagcccacagtttattgctaaatgaagaagctttggctcaaatcaccgaagcaaaaagaccagttttcatctttgaatggttgcgatttcttgataaagtcttggtt

SEQ ID NO: 10779 - DNA, 120 bp, Artificial Sequence
  ENSG00000008869_2 (sequence is synthesized)
gctgccaacaagaccgatgtaaaggaaaaacagaaaaaacttgttgaacaattaactggattaataagtagttcacctggaccacctacacgaaaattattagctaaaaatctcgcagcc

SEQ ID NO: 10780 - DNA, 120 bp, Artificial Sequence
  ENSG00000008869_3 (sequence is synthesized)
ctttatagcattggggatactttcacagtttttcagacacttgataaatgcaatgacattatcagaaataaagatgacactgcggcctacttaccaacaaaattggctgcggtggcttgt

SEQ ID NO: 10781 - DNA, 120 bp, Artificial Sequence
  ENSG00000008869_4 (sequence is synthesized)
gtcggagcattttatgaaaaaatggggagaatgttgggcagcgcatttccagaaacggtaaataatctattgaaatctctgaaaagtgcagagtctcaagggcgaagtgaaatcttaatg

SEQ ID NO: 10782 - DNA, 120 bp, Artificial Sequence
  ENSG00000008869_5 (sequence is synthesized)
agtctacagaaagttctaagtggactgggtggtgcagcagcttcctcccatcgtgatatttacaagaatgccaggtctctcttgactgataggtcaatggctgttcgatgtgcagtggcc

SEQ ID NO: 10783 - DNA, 120 bp, Artificial Sequence
  ENSG00000008869_6 (sequence is synthesized)
aagtgtctactagaactacagaatgaagctgtatttatgtggactgctgaactagaaaatatagccactctctgctttaaggctttggaaaactcaaattatggggtacgagtggcagtg

SEQ ID NO: 10784 - DNA, 120 bp, Artificial Sequence
  ENSG00000008869_7 (sequence is synthesized)
tctaaacttttaggaacagtcatggccacagcattaatgccaaaacaggcaacagtaatgcgtcagaatgtgaagcgagcaacatttgatgaagtcttagaactcatggccacaggattt

SEQ ID NO: 10785 - DNA, 120 bp, Artificial Sequence
  ENSG00000008869_8 (sequence is synthesized)
ctgcgtggagggtcaggtttcttaaagagcggtggagaaatgttaaaagttggagggtccgttaatcgtgaagtgagagttggagttacgcaggcgtatgttgtttttgtgacaacattg

SEQ ID NO: 10786 - DNA, 120 bp, Artificial Sequence
  ENSG00000008869_9 (sequence is synthesized)
ggtggtcagtggttggagcgcagctttgccacgttcctgtcccatgtacttgatctggtttcccatcctcgggcaacacaaacacatgtggaggctgtgtactccagacgatgtgtttcc

SEQ ID NO: 10787 - DNA, 120 bp, Artificial Sequence
  ENSG00000008869_10 (sequence is synthesized)
tttatcctaagagctactgtgggcagtttgctaggtgaaaaagcccagattgcagctgccaaagaaatctgccaagctattggaaaacaaatgaaagccgtagaagcagtagtgaatgac

SEQ ID NO: 10788 - DNA, 120 bp, Artificial Sequence
  ENSG00000008869_11 (sequence is synthesized)
acaagtggagaaaacaaatctggcgcagcagacattgcagcaagccagcatgtgatggtctgtgccctccaggaactcgggagcctggtgcagagcttgaatgccaccgcatcccctctt

SEQ ID NO: 10789 - DNA, 120 bp, Artificial Sequence
  ENSG00000008869_12 (sequence is synthesized)
attcaagaagcatctatagggcttttggagattgtgacttcagtgctgcttcatccaagcatggctgcccgacttgctgctgcatggtgtttgcgctgtgtggctgtggcattacctttc

SEQ ID NO: 10790 - DNA, 120 bp, Artificial Sequence
  ENSG00000008869_13 (sequence is synthesized)
cagctgacaccatttctagacaggtgtgcagaacggctcaacaacttgaagacctcaccagaagctgtcagtggatatagttttgcaatggctgctttgttaggtggagtacatcagtgt

SEQ ID NO: 10791 - DNA, 120 bp, Artificial Sequence
  ENSG00000008869_14 (sequence is synthesized)
cctttgggcattcctcatgccaaaggaaagatggtagttagtattgctgaagatcttttacgaactgctgcccaaaatagcaggctatctttacagcgcacccaagctggctggctttta

SEQ ID NO: 10792 - DNA, 120 bp, Artificial Sequence
  ENSG00000008869_15 (sequence is synthesized)
cttggagcacttatgactttaggaccatctgtcgttcgttaccatctgcccaagatgttgttattgtggcgaaatgttttcccacgttccttaaaggaattggaagctgagaaggcccga

SEQ ID NO: 10793 - DNA, 120 bp, Artificial Sequence
  ENSG00000008869_16 (sequence is synthesized)
ggcgattcttttacctggcaggtaactttggaaggtcgtgctggagctctatgtgccatgaggagcttcgttgcacattgtcctgagctactaactgaagatgtgattcgaaaattgatg

SEQ ID NO: 10794 - DNA, 120 bp, Artificial Sequence
  ENSG00000008869_17 (sequence is synthesized)
acccctattgaatgtgccatgactatgatgtcacacattccatctgtaatgaaagcccatggagctcatctgaaagctagtgctgcaatggtccgtttaagactttatgatatcttggct

SEQ ID NO: 10795 - DNA, 120 bp, Artificial Sequence
  ENSG00000008869_18 (sequence is synthesized)
ttgttacctccaaaaacttatgaaggatcttttaatgcacttcttagagaactggtagcggaattcactttgactgacaactcagccaacacaactacttccctcctcagatccctctgc

SEQ ID NO: 10796 - DNA, 120 bp, Artificial Sequence
  ENSG00000008869_19 (sequence is synthesized)
cattatgatgatagtgttcttcttggttcttggcttcaggaaactgatcataaatcaattgaagaccagctccagccaaacagtgcctctggaagtggggctctggagcatgatccttcc

SEQ ID NO: 10797 - DNA, 120 bp, Artificial Sequence
  ENSG00000008869_20 (sequence is synthesized)
tctatttatttacgcatacctgctggagaagcagtacctggtcccctccctctcggagtctcagtcattgatgcttctgtggccctttttggtgtagtgtttcctcatgtttcttataaa

SEQ ID NO: 10798 - DNA, 120 bp, Artificial Sequence
  ENSG00000008869_21 (sequence is synthesized)
caccgattacaaatgttggatcactttgctgaatgtgttaaacaagctaaaggtgtccgccagcaggctgtgcagcttaacatatttactgctgttcttagtgcactaaagggcttagct

SEQ ID NO: 10799 - DNA, 120 bp, Artificial Sequence
  ENSG00000008869_22 (sequence is synthesized)
gaaaacaaaagtactttaggacctgaggaagttcgtaaatctgccctgacactggttatgggtcctctggacaacccaaaccccatcttacgttgtgcagcgggggaagctcttggaaga

SEQ ID NO: 10800 - DNA, 120 bp, Artificial Sequence
  ENSG00000008869_23 (sequence is synthesized)
atggctcaggtggttggagaagcaacttttattgctagaatggcccaatatagctttgacaagttgaaatcggctcgagatgttgtatctaggactggtcattcattggctcttggttgt

SEQ ID NO: 10801 - DNA, 120 bp, Artificial Sequence
  ENSG00000008869_24 (sequence is synthesized)
ttgcatcgttatgttggtggaataggctcaggacaacatctgaagaccagtgtcagcattttattggctctagcacaagatgggacatcccctgaagtccagacttggtctcttcattca

SEQ ID NO: 10802 - DNA, 120 bp, Artificial Sequence
  ENSG00000008869_25 (sequence is synthesized)
cttgctttgatagtggattctagtggtccgatgtatcgtggctatgtggaaccaacattatctctagttcttaccttgctgttgacagttccgccttcacatacagaagttcatcagtgt

SEQ ID NO: 10803 - DNA, 120 bp, Artificial Sequence
  ENSG00000008869_26 (sequence is synthesized)
ttgggtcgatgcttgggtgctataataactactgttggccctgaactacaagggaatggagcaacaacttctacaattcgttcctcttgtttggtgggttgtgcaataacacaagaccat

SEQ ID NO: 10804 - DNA, 120 bp, Artificial Sequence
  ENSG00000008869_27 (sequence is synthesized)
tcagattctcttgttcaggcagctgccatatcttgccttcagcagcttcacatgtttgcaccacgacatgtcaatctatctagccttgttcctagcctttgtgttcacttatgtagttcc

SEQ ID NO: 10805 - DNA, 120 bp, Artificial Sequence
  ENSG00000008869_28 (sequence is synthesized)
atacaggggacaaagagagcagtagtgccaatgtcagtccttttgcccctggggttagttctcgaactgatatccattgccggcaccaaggtgttaatataacagaaactggtcttgagg

SEQ ID NO: 10806 - DNA, 120 bp, Artificial Sequence
  ENSG00000008869_29 (sequence is synthesized)
gacttctttttggaatgctagaccgggagacagatcgaaaattatgttctgatattcatgacactttgggacatatgctttcttcgctggcagtagaaaaactttctcattggctaatgc

SEQ ID NO: 10807 - DNA, 120 bp, Artificial Sequence
  ENSG00000008869_30 (sequence is synthesized)
tttgtaaagatgtcctggcagcttctagtgatatgagtactgcaactctcttaagtagtggaaaagatgaagaagctgaaaagaaagatgagatggatgatgataccatgtttaccacgt

SEQ ID NO: 10808 - DNA, 120 bp, Artificial Sequence
  ENSG00000008869_31 (sequence is synthesized)
taggtgaagaagataaatcaaagccctttgtggcccctcgctgggccactcgagtatttgctgccgattgcctgtgtcgaatcatcaatttgtgtgagaatgcagaccaggctcactttg

SEQ ID NO: 10809 - DNA, 120 bp, Artificial Sequence
  ENSG00000008869_32 (sequence is synthesized)
atcttgccttggcacgttctgctaaacttcgaaaccctacaaatgacctcttggtacttcatctctctgacctcattcgcatggcattcatggctgcaactgatcatagcaaccagctgc

SEQ ID NO: 10810 - DNA, 120 bp, Artificial Sequence
  ENSG00000008869_33 (sequence is synthesized)
gaatggctgggctccaggcgcttgaagacattatcaagaagtttgcgtctgtgcctgagccagaatttccaggtcatgtgatactggagcagtatcaggctaatgtgggagctgctctaa

SEQ ID NO: 10811 - DNA, 120 bp, Artificial Sequence
  ENSG00000008869_34 (sequence is synthesized)
gaccagccttttcacaagatacaccatcagatataatagcgaaagcttgccaggtatgtagtacatggataggaagtggagttgtcagtgatctcaatgatctccgtcgagtacacaatc

SEQ ID NO: 10812 - DNA, 120 bp, Artificial Sequence
  ENSG00000008869_35 (sequence is synthesized)
ttcttgtttcttctctggacaaagttcaggctggaaaaggatcttccagccagctgtaccgagagagtgccacgaccatggaaaaactggctgttctcaaagcttgggcagaggtatatg

SEQ ID NO: 10813 - DNA, 120 bp, Artificial Sequence
  ENSG00000008869_36 (sequence is synthesized)
tggtcgctatgaatattaaaaaggaagcagagtcaaaaccaaaaagagcaattaaaaatactgacgatgatgatgacgactgtggtaccatcgatgaactgccaccagatagtttaataa

SEQ ID NO: 10814 - DNA, 120 bp, Artificial Sequence
  ENSG00000008869_37 (sequence is synthesized)
cactggtacaacctgaactaccaacactcagtcgcctgtggttagcagcattaaaagattatgcactcttgactttaccagccgaattttctagtcagcttcctccagatggtggagcat

SEQ ID NO: 10815 - DNA, 120 bp, Artificial Sequence
  ENSG00000008869_38 (sequence is synthesized)
tttatacccctgaaactattgatacagctagacttcactatcggaattcctgggccccaattctccatgcggtggcactttggttaaatagcacaggatttacgtgctcagagtctacag

SEQ ID NO: 10816 - DNA, 120 bp, Artificial Sequence
  ENSG00000008869_39 (sequence is synthesized)
aagcagcagcaatatctggtttacaaaaacgttctacatctgtcaatttaaaccaggcatcaggagcagtgggtagtgctaaatctttgccagaaattaacaaagacagaatgcatctga

SEQ ID NO: 10817 - DNA, 120 bp, Artificial Sequence
  ENSG00000008869_40 (sequence is synthesized)
ttttaggtgtgagtatacagtttctttgttcccctagacctgaggagcccattgaacatgttacagcatgcctgcaggccttacataccttgctagactccccttatgctcgagtccata

SEQ ID NO: 10818 - DNA, 120 bp, Artificial Sequence
  ENSG00000008869_41 (sequence is synthesized)
ttgcagaagatcagctgataggtgttgagttgctgagtgttttgcaccgccttctattgacctggaatccatcatctgtccagctgttggttactggagttgtacaacagatagtaagag

SEQ ID NO: 10819 - DNA, 120 bp, Artificial Sequence
  ENSG00000008869_42 (sequence is synthesized)
ctgctcaggattatttgcaagagaaaagaaacactctaaatgaagatgatatggaaaaagaggcctgtaccgtattgggagaaggaggtgacagcggtggtctcattcctggaaaatctc

SEQ ID NO: 10820 - DNA, 120 bp, Artificial Sequence
  ENSG00000008869_43 (sequence is synthesized)
ttgtgtttgcaactatggagctgctgatgttcattttagtacggcatatgccacatctcagtaccaaggtgtcagactctccaagtcacatagccactaaaactcgactatcagaagaaa

SEQ ID NO: 10821 - DNA, 120 bp, Artificial Sequence
  ENSG00000008869_44 (sequence is synthesized)
gtgctcgtttggtggcagccacagttaccatactctctgatttaccatccctttgttcacccgctggatgtatgacaatcctgcccacaattctgttcttaattgcaagaatattgaaag

SEQ ID NO: 10822 - DNA, 120 bp, Artificial Sequence
  ENSG00000008869_45 (sequence is synthesized)
acacagcaataaagtctgcagataatcaggttcctccaccagtcagtgcagctcttcaagggattaaaagtattgtgacactttcaatggccaaaactgaggctggcgttcaaaaacagt

SEQ ID NO: 10823 - DNA, 120 bp, Artificial Sequence
  ENSG00000008869_46 (sequence is synthesized)
ggacagctctgattcgtagcacgcttgcttgcatcctggaatattctcaaccagaagactctgtacctacacctgatgaagtaagcatgctaacagcaattgcactcttcctgtggtctg

SEQ ID NO: 10824 - DNA, 120 bp, Artificial Sequence
  ENSG00000008869_47 (sequence is synthesized)
ctagtaatgaaataataggagtccagtcattacagaatggctgcatgaacagatttaaaaatgcattaaattcatgcgacccatgggttcaagccaaatgttaccagcttctcctctcag

SEQ ID NO: 10825 - DNA, 120 bp, Artificial Sequence
  ENSG00000008869_48 (sequence is synthesized)
tcttccagcattccaatcgtgccctttcaactccttatattcattcattagctccaatagtggttgaaaagctaaaagctgttgaaagaaacagaccagccagtaacatagagcttttag

SEQ ID NO: 10826 - DNA, 120 bp, Artificial Sequence
  ENSG00000008869_49 (sequence is synthesized)
cggttcaagaaggaataaaagttcttgaaacactggttgctcttggtgaagaacaaaacagagtccagctacttgctcttttagttcccactttgatatcttacctgctggatgaaaatt

SEQ ID NO: 10827 - DNA, 120 bp, Artificial Sequence
  ENSG00000008869_50 (sequence is synthesized)
cttttgcctcagcaagttcagcttccaaagatcttcatgagtttgcactccagaatttaatgcatattggacctctgtatccacatgctttcaagacagtaatgggggctgctcctgagt

SEQ ID NO: 10828 - DNA, 120 bp, Artificial Sequence
  ENSG00000008869_51 (sequence is synthesized)
tgaaagtgcgtctagaaactgccgttcgagcaagccaagcgagcaaagctaaagcggctgccagacaaccagcccccgccatacattctgcaccaacaattaagctaaaaacaagttttt

SEQ ID NO: 10829 - DNA, 120 bp, Artificial Sequence
  ENSG00000008869_52 (sequence is synthesized)
tttaatttgtaatttcatttatttgtatttatgttgtcaactagcccctaattagtgatggccactgtatcattccaggctacctatgggttctgttttatttgtatattggtattatag

SEQ ID NO: 10830 - DNA, 120 bp, Artificial Sequence
  ENSG00000008869_53 (sequence is synthesized)
tgcttccaagtaggttaagtgaaataatgctcacaccacttattgatttttaaggagtgattttttttatcatgtggtgaatatgttttcattttcctcctaataatgtttctcttttgt

SEQ ID NO: 10831 - DNA, 120 bp, Artificial Sequence
  ENSG00000008869_54 (sequence is synthesized)
taacttatttatttttcaaacactgagccatagtcttaaatttaaatgctaaaaacaattgtatcatgtagtcgggcagcctattgatactgtcaggggaaaaaaatgggtcagaactca

SEQ ID NO: 10832 - DNA, 120 bp, Artificial Sequence
  ENSG00000008869_55 (sequence is synthesized)
gcatctgtcatgaaaaaaatcaattgaaaaacaagcagattttaaattttgaagtaatcaaaataatggaaagtgtctgttttgtggtgtatatactatgaataaaatcacagcattttc

SEQ ID NO: 10833 - DNA, 120 bp, Artificial Sequence
  ENSG00000008869_56 (sequence is synthesized)
taagcatttcccaaaatgtccttatctttctgatggatcttttagctttcatatcaaattactaaattatgctatgtatattttagttggtaacaattaaaattctcatttaaaggttca

SEQ ID NO: 10834 - DNA, 120 bp, Artificial Sequence
  ENSG00000008869_57 (sequence is synthesized)
ctgaagtccaggtataatataattggtttttttattacaaaagtttagaaaattttttggaaaattatttgctctatgaaataaaaatgaccgtggtaagttgttaggacaaatatatta

SEQ ID NO: 10835 - DNA, 120 bp, Artificial Sequence
  ENSG00000008869_58 (sequence is synthesized)
cattgtgatacactgtgatgagtatactatcagaaataacaataagcactatgagaatatggatataacagtttgagttagtcacaagaagatgaaggtttgctgtatttctgacatgtt

SEQ ID NO: 10836 - DNA, 120 bp, Artificial Sequence
  ENSG00000008869_59 (sequence is synthesized)
taaatgtgttggatgttttctgcttccttttttggatcatttatatattatttctcaacttttttacttaatattttacgttctgaaatattttatatattgagatatgatattgaagct

SEQ ID NO: 10837 - DNA, 120 bp, Artificial Sequence
  ENSG00000008869_60 (sequence is synthesized)
attttattgtacttttcattatttaccgtttataatttggaggtaagaccattagacccaaagaacttttgtcttggtgtgttcttgtttaaatatggaatttattttacaaaatagttt

SEQ ID NO: 10838 - DNA, 120 bp, Artificial Sequence
  ENSG00000008869_61 (sequence is synthesized)
gcggttcaagaaggaataaaagttcttgaaacactggttgctcttggtgaagaacaaaacattctaggtagtcagcctgaatctactttacgttccctgcctccagaccctattctcctg

SEQ ID NO: 10839 - DNA, 68 bp, Artificial Sequence
  ENSG00000008869_62 (sequence is synthesized)
aaatgtaaatgagtcctcgtaaagcaaaaaaagtattgtgagtaataaagttgaactacgaattaaaa

SEQ ID NO: 10840 - DNA, 120 bp, Artificial Sequence
  ENSG00000008869_63 (sequence is synthesized)
cagttgctatagtaacagtttaaatttctgtggcttaagtttgatgttgtctcagttagaatatgtactctatattgaatttgtagatagaagatatagagcttttttgttggctgaagc

SEQ ID NO: 10841 - DNA, 120 bp, Artificial Sequence
  ENSG00000008869_64 (sequence is synthesized)
aaacatattagcaagcactgttacaataatagctgtatgagctagggtattctaaatagctatgggtaacaagtcattatgcataaccatagatgtatattgctgtactgttcaatgttt

SEQ ID NO: 10842 - DNA, 120 bp, Artificial Sequence
  ENSG00000008869_65 (sequence is synthesized)
gtattttcatattctatttcagattcctagtgtgccaataaattatgttcctaaagtgctttgcaaattgtactttagttttcttatcaaaatcagtgtagaaatcgtcaacattttttt

SEQ ID NO: 10843 - DNA, 120 bp, Artificial Sequence
  ENSG00000008952_0 (sequence is synthesized)
gggcggagcggccaacatggcggaacgcaggagacacaagaagcggatccaggaagttggtgaaccatctaaagaagagaaggctgtggccaagtatcttcgattcaactgtccaacaaa

SEQ ID NO: 10844 - DNA, 120 bp, Artificial Sequence
  ENSG00000008952_1 (sequence is synthesized)
gtccaccaatatgatgggtcaccgggttgattattttattgcttcaaaagcagtggactgtcttttggattcaaagtgggcaaaggccaagaaaggagaggaagctttatttacaaccag

SEQ ID NO: 10845 - DNA, 120 bp, Artificial Sequence
  ENSG00000008952_2 (sequence is synthesized)
ggagtctgtggttgactactgcaacaggcttttaaagaagcagttttttcaccgagccctaaaagtaatgaaaatgaaatatgataaagacataaagaaagaaaaagataaaggaaaagc

SEQ ID NO: 10846 - DNA, 120 bp, Artificial Sequence
  ENSG00000008952_3 (sequence is synthesized)
taaagacataaagaaagaaaaagataaaggaaaagctgaaagtggaaaagaagaagataaaaagagcaagaaagaaaatataaaggatgagaagacaaaaaaagaaaaagagaaaaaaaa

SEQ ID NO: 10847 - DNA, 120 bp, Artificial Sequence
  ENSG00000008952_4 (sequence is synthesized)
tccaggaactcctaaaaagaaggaaactaagaaaaaattcaaacttgagccacatgatgatcaggtttttctggatggaaatgaggtgtatgtatggatctatgacccagttcactttaa

SEQ ID NO: 10848 - DNA, 120 bp, Artificial Sequence
  ENSG00000008952_5 (sequence is synthesized)
aacatttgtcatgggattaattcttgtgattgcagtaatagcggccaccctcttccccctttggccagcagaaatgagagtaggtgtttattacctcagtgtgggtgcaggctgttttgt

SEQ ID NO: 10849 - DNA, 120 bp, Artificial Sequence
  ENSG00000008952_6 (sequence is synthesized)
agccagtattcttctccttgctgttgctcgatgcattctatttctcatcatttggctcataactggaggaaggcaccacttttggttcttgccaaatctgactgctgatgtgggcttcat

SEQ ID NO: 10850 - DNA, 120 bp, Artificial Sequence
  ENSG00000008952_7 (sequence is synthesized)
tgactccttcaggcctctgtacacacatgaatacaaaggaccaaaagcagacttaaagaaagatgagaagtctgaaaccaaaaagcaacagaagtccgacagtgaggaaaagtcagacag

SEQ ID NO: 10851 - DNA, 120 bp, Artificial Sequence
  ENSG00000008952_8 (sequence is synthesized)
tgagaaaaaggaagatgaggaggggaaagtaggaccaggaaatcatggaacagaaggctcggggggagaacggcattcagacacggacagtgacaggagggaagatgatcgatcccagca

SEQ ID NO: 10852 - DNA, 120 bp, Artificial Sequence
  ENSG00000008952_9 (sequence is synthesized)
cagtagtggaaatggaaatgattttgaaatgataacaaaagaggaactggaacagcaaacagatggggattgtgaagaggatgaggaagaggaaaatgatggagaaacacctaaatcttc

SEQ ID NO: 10853 - DNA, 120 bp, Artificial Sequence
  ENSG00000008952_10 (sequence is synthesized)
acatgaaaaatcataatctgactaattttgggactgaatgaataagtacaagaggttggattttctatgttggctgattaccatattgaacacatggcatttgtagcattctttaaatct

SEQ ID NO: 10854 - DNA, 120 bp, Artificial Sequence
  ENSG00000008952_11 (sequence is synthesized)
atctactgaaatgtatttgacattcaagcagttatattcggtccttcattttatagaatattggcactattattggtacagtttaaagccattaatatgttttatccatttgataatttt

SEQ ID NO: 10855 - DNA, 120 bp, Artificial Sequence
  ENSG00000008952_12 (sequence is synthesized)
acagtaagtaggtctcattcattttgacagttatcaaagatgtactttccacagttaaatttacattaatggcaatttttgatagttttatggctttttactgttagactaatcaaaaat

SEQ ID NO: 10856 - DNA, 120 bp, Artificial Sequence
  ENSG00000008952_13 (sequence is synthesized)
aactttaaaaggaacaaagaaactccaacatttcacattatgcatagttatgtagccatttcacagtttctttaagatgtgtaaactcattgtccttgatagtttttatttttcattata

SEQ ID NO: 10857 - DNA, 120 bp, Artificial Sequence
  ENSG00000008952_14 (sequence is synthesized)
aaattataccaggagatttcttttaagattctgagttagcagagttcaaaactattttgtggaaacaagccaactagtaacaatgcagcaacacttctggtttagctaaattatttttcc

SEQ ID NO: 10858 - DNA, 120 bp, Artificial Sequence
  ENSG00000008952_15 (sequence is synthesized)
aatgtaggaaatccacactgatttgtacgtctgactgagagaaagatggtcgtctccagcagagaaagtgaacagcatttgttggaaggtgatggctctccctcctccctccccatttca

SEQ ID NO: 10859 - DNA, 120 bp, Artificial Sequence
  ENSG00000008952_16 (sequence is synthesized)
ttggcgtaacgtaaagtgtattctgtacataatttacaaataaaacattttattttaattgttacttattatttagatatttctcaacacttaaattcataaaattaagaccatgtaagg

SEQ ID NO: 10860 - DNA, 120 bp, Artificial Sequence
  ENSG00000008952_17 (sequence is synthesized)
gtatgtttttagagaaatggaagtttgagtaacccacagaacatctgtgatctttctacagcagcttcagttttgtgccaacattccatgtattttgaatatgagcaaaaactgatctta

SEQ ID NO: 10861 - DNA, 120 bp, Artificial Sequence
  ENSG00000008952_18 (sequence is synthesized)
agagcagacttaaagtagctttgtacgccttaatgttcattttgatttattttaaatctttacattcagaaatgagatactgtattatcagaccaggaggcattgctgtgaaagataatt

SEQ ID NO: 10862 - DNA, 120 bp, Artificial Sequence
  ENSG00000008952_19 (sequence is synthesized)
tcctattctaaaatatcaaatttaaaataaagataatgaaagaaaacataagagaactattggactctaattgctttgaactagttttgcagtttgactttacgtcttatacatcttagt

SEQ ID NO: 10863 - DNA, 120 bp, Artificial Sequence
  ENSG00000008952_20 (sequence is synthesized)
tacaagtctttggaaactcttgtttacttatgagcataatcattccttggagttatactaactaataatgaatattaaatgatttttcttcagtcacagtgagagcatcttgctttgtgg

SEQ ID NO: 10864 - DNA, 120 bp, Artificial Sequence
  ENSG00000008952_21 (sequence is synthesized)
ttgaaataggtagtgtatgtcagtctttgctttaggctgtttctcatctaagtgtttgaattaaagatgttaaatttttctaattgtgaaaaatatgttttctgtatcgacacattttat

SEQ ID NO: 10865 - DNA, 120 bp, Artificial Sequence
  ENSG00000008952_22 (sequence is synthesized)
taaacttggcttgattgcttctttatagtagtccctgtaagtggacataaatgtggctatttgatgttaatgcaactatgtcaaggctgcaatcactttaatagtttctttttagcaaat

SEQ ID NO: 10866 - DNA, 120 bp, Artificial Sequence
  ENSG00000008952_23 (sequence is synthesized)
aaatgttcattgatgaagtgcctgggtattttcccgtcccatttgcagagctctactacttcatttccacagtaagcatatatataatgatcacttctgagtttatcaccagtaacattg

SEQ ID NO: 10867 - DNA, 120 bp, Artificial Sequence
  ENSG00000008952_24 (sequence is synthesized)
atacctattttggggtataaacatggtgtttttcagaaataaaaattatttcattaacctttactattactgtgataatacccaggcactcaatattcatcctgaaattttttataatat

SEQ ID NO: 10868 - DNA, 120 bp, Artificial Sequence
  ENSG00000008952_25 (sequence is synthesized)
atgtaatttgtctagtcttaaagacatttggagcatggccaacaggaaggtcagcttcttactgatgtgtgtggattcttacagaatgttagtacaaatttttataaatatttggtgatc

SEQ ID NO: 10869 - DNA, 120 bp, Artificial Sequence
  ENSG00000008952_26 (sequence is synthesized)
cctggggggaaatatcattcttactatggttagaaagtgaattagaaatttcagctcagtttctattttactattcaagttgtgtactttaaacaaatataaaaatcaaaaggctgcctc

SEQ ID NO: 10870 - DNA, 120 bp, Artificial Sequence
  ENSG00000008952_27 (sequence is synthesized)
ttaaatattcttgtaccagagcatggaaaatcgtttataattgttaatagaatggcgatttttttttaagaacttcagatttgctatgctgctgtaagtagaaagcatgaagctttttga

SEQ ID NO: 10871 - DNA, 120 bp, Artificial Sequence
  ENSG00000008952_28 (sequence is synthesized)
tcatgtagggcttattgtagagggtatcaattggcctaactaagcaggattgaatttaccagaggctaagttcagatagtaagaataatgcatatgtgattgttcttaaagtcaatgtat

SEQ ID NO: 10872 - DNA, 120 bp, Artificial Sequence
  ENSG00000008952_29 (sequence is synthesized)
taaataaggtatttttccttttccctcttactggatttttcaattttcaaaccatatggcctaggtaactttaattgaaataatatagatttagttgaatactattcaggaagtaataaa

SEQ ID NO: 10873 - DNA, 120 bp, Artificial Sequence
  ENSG00000008952_30 (sequence is synthesized)
ttttaatatatcacattgaaattatgcagtggtgatgaattttggtgtttcccccctctttctggttttacatcatgaggatcagttagctgctgacaagaaaagtcatcttgtgtcttt

SEQ ID NO: 10874 - DNA, 120 bp, Artificial Sequence
  ENSG00000008952_31 (sequence is synthesized)
tgtaaattgaattttttttttaaatctattaggaactggaaaacagcaagtatggttgattctcattattcaaggtagttacgttctataaagtcactgcgaacactgaattagcaaata

SEQ ID NO: 10875 - DNA, 120 bp, Artificial Sequence
  ENSG00000008952_32 (sequence is synthesized)
tagaacctaggggaaatacaaggctagatttctgcaagccactggtcacattttcatcaagcagtcaacatgtaaatttctgttgtaaagacaccttatttaatataatcgattcattaa

SEQ ID NO: 10876 - DNA, 120 bp, Artificial Sequence
  ENSG00000008952_33 (sequence is synthesized)
cattgaagtcatgaccaacaacactgtaactcatgcctgaatgaagcttatctgacacataagcttcataaggcacacaacagcctttttacccttaggaacagctttttgcccttagca

SEQ ID NO: 10877 - DNA, 120 bp, Artificial Sequence
  ENSG00000008952_34 (sequence is synthesized)
ctatgcttgggggccattttaaacagtgaaatcaaaaaaagaacagaaatgcaaaaaccatggcattagcgtaaaaaggacacgtttatagtatgaaagctggaacatggccttgttcaa

SEQ ID NO: 10878 - DNA, 120 bp, Artificial Sequence
  ENSG00000008952_35 (sequence is synthesized)
cctcagctcagaatatgtgtacagcaagttttttgctgtaccacaaaattttaggttaggcaaattcacaaatacggaatccatgaataacgaggatcaactgtacttaactatatttta

SEQ ID NO: 10879 - DNA, 120 bp, Artificial Sequence
  ENSG00000008952_36 (sequence is synthesized)
aagctgtgacatttatctacctggtttatggaatagaatttattgctgaatcatgctccagtatttgagtgatgttttaaatatcctatgtctgaaaataattcctcctaattgtgtggt

SEQ ID NO: 10880 - DNA, 120 bp, Artificial Sequence
  ENSG00000008952_37 (sequence is synthesized)
aatttgcttttactgtttccacagtatttcaggtctttgctcattcactcagtaatactgagcacttaccatgtaccagaattttactaggcacaaccatgaataaaaatacaattctct

SEQ ID NO: 10881 - DNA, 120 bp, Artificial Sequence
  ENSG00000008952_38 (sequence is synthesized)
tgcaccattaaatagtgtgttaagtgctacggcagcaaattgctacatgtgctggatatctcttgttttcccctccagctccactctgctcttgcccacaaagctgacccgaatggacca

SEQ ID NO: 10882 - DNA, 120 bp, Artificial Sequence
  ENSG00000008952_39 (sequence is synthesized)
cagcagtgggctcctatgcctcctggcttctgagtgggtttggccaaggagtgtcctggccagagatcagaggatggtagggtgcctattctcggctcttctcctggggttggggggctg

SEQ ID NO: 10883 - DNA, 120 bp, Artificial Sequence
  ENSG00000008952_40 (sequence is synthesized)
ccttagcagccaaaggtcacttctcccaaactccttccctgctttccaggttgccagtccctgcactcttcctttctggccaaggatgatgtcagttctgctgctactagcctggagttg

SEQ ID NO: 10884 - DNA, 120 bp, Artificial Sequence
  ENSG00000008952_41 (sequence is synthesized)
cagaagctactgtgcttcctctttgggtagcctatacctatacttatctcctcataatatcttcatgtaaagaaccatctgtttcttattggaatcaagaccaataccaaggagaaattc

SEQ ID NO: 10885 - DNA, 120 bp, Artificial Sequence
  ENSG00000008952_42 (sequence is synthesized)
ctagggaacaaaaattccaatgaggaattgacctctttgtcagatccttatcaccaaacattagaaaagatctcataactttatacagcatgttgtaagcattttgataactaaaatcct

SEQ ID NO: 10886 - DNA, 120 bp, Artificial Sequence
  ENSG00000008952_43 (sequence is synthesized)
gttctagtgaatgtcatgcagataactacacaaggagattaatttaaatttgccttctttggcaagcccttaaaccaatggctaaagcagttagttgtgagtttctgagtaggtcccaat

SEQ ID NO: 10887 - DNA, 120 bp, Artificial Sequence
  ENSG00000008952_44 (sequence is synthesized)
gcgtttatttcatttgtccaacctagcacagagatcctttgatactttaattgcatggcttttccaatcagacgaaatttcagtctgagagaggacatattttctgaggtttatagtttt

SEQ ID NO: 10888 - DNA, 120 bp, Artificial Sequence
  ENSG00000008952_45 (sequence is synthesized)
aggattgtccaaaaggcctatgatctcttcttagcatgacagaaagagggaaagataagttaaatttcaagggggtcatatcatcacactttggtcttatttcattttcaatgatttcct

SEQ ID NO: 10889 - DNA, 87 bp, Artificial Sequence
  ENSG00000008952_46 (sequence is synthesized)
tcatcacactttggtcttatttcattttcaatgatttcctagatcactttaacttttttgtgtcatggactcctcagaataatgggt

SEQ ID NO: 10890 - DNA, 120 bp, Artificial Sequence
  ENSG00000008952_47 (sequence is synthesized)
atgtttttaaatgcagaaaaggaaatgcatggggttacaagggaaacgaattacactgaagtgtaagctaccaaataatttatgatgtggtagttataggtgtgcatttaatagccagat

SEQ ID NO: 10891 - DNA, 120 bp, Artificial Sequence
  ENSG00000008952_48 (sequence is synthesized)
ctacgagtggatgtaataactgctatgatgttgaagtagcataaaacatatattagatatctgcaacaactgtgatgtaacatgaaaatacctgatttctgttgacaaagttactgctag

SEQ ID NO: 10892 - DNA, 120 bp, Artificial Sequence
  ENSG00000008952_49 (sequence is synthesized)
tacaactgtggattgttgtctgcactcgtcattgaaggaaatactaaattttagttttaggctagtgaaattaaagttaatttttcccatccaagttcatgtatcttctgaattctatcc

SEQ ID NO: 10893 - DNA, 120 bp, Artificial Sequence
  ENSG00000008952_50 (sequence is synthesized)
gtgaatcccttagaggtctgtgaattgtaggttaagaacccctgccctagctaatcagatccaccaatgtttcaaataggactataacttattcaaaggccaatgatacttcgcataatt

SEQ ID NO: 10894 - DNA, 120 bp, Artificial Sequence
  ENSG00000008952_51 (sequence is synthesized)
caattttaatattattcacatttcatgtcacaaatttagtaagttacatgtgttatgtgatgttttgttttgatagattatatcttactcctaaataaaaagtcaagatttttgtagcaa

SEQ ID NO: 10895 - DNA, 120 bp, Artificial Sequence
  ENSG00000008952_52 (sequence is synthesized)
agcaggagcggagggaagaggggagagaaggcaccgctaaggaccgctggccccgccaggcggccgacctccccattccaggggcgccagccggcggattacataacgggcctcggggcg

SEQ ID NO: 10896 - DNA, 120 bp, Artificial Sequence
  ENSG00000008952_53 (sequence is synthesized)
tctcgcgaggtttccaccgccccctcctcgctccacgtcagagggaaccgggcggagcggccaacatggcggaacgcaggagacacaagaagcggatccagaggctgtggagtaatgtga

SEQ ID NO: 10897 - DNA, 120 bp, Artificial Sequence
  ENSG00000008952_54 (sequence is synthesized)
cagtggcagagagctaaaacttgagccaaactgcctgtttgtaccccacctccaccaattattggctgagtaactttgagcaagttaatttttacctccctgtctgcatcggtaagaaaa

SEQ ID NO: 10898 - DNA, 120 bp, Artificial Sequence
  ENSG00000008952_55 (sequence is synthesized)
gtcttttgaatactttattaggtcgctccagagaaagcttgaaagcaaggcctgtactccacttgaaaagattcataaaatagatttgtaaattattattcagcgcatgaatttctcaag

SEQ ID NO: 10899 - DNA, 120 bp, Artificial Sequence
  ENSG00000008952_56 (sequence is synthesized)
tctggatggaaatgaggtgagagtaagcctataactagaagttcagttttctataggagtttttagaaagatgtttgatgccttcactaataaaaggaaaaattttgagaaatctaatta

SEQ ID NO: 10900 - DNA, 120 bp, Artificial Sequence
  ENSG00000008952_57 (sequence is synthesized)
tgctcttaaatgtataaaagctactccatttttaaaaatcaataatttctcttatttagatttttaaaagtcagatttgactgtgagtgataggaaacctgaaataaaagcatcttaata

SEQ ID NO: 10901 - DNA, 120 bp, Artificial Sequence
  ENSG00000008952_58 (sequence is synthesized)
tgaggcttctagctaaggttaccttatggtccagaatgactgccaatcttatatctgcatcgaaaagaggaaaggagagtgaagaatatgtctcctctttaaggagaccagtttaaggac

SEQ ID NO: 10902 - DNA, 120 bp, Artificial Sequence
  ENSG00000008952_59 (sequence is synthesized)
actgtccagaaagctggtaatttcatttctgcttgaattccattggccagaacatagtcacatggtcatgcatatgagaagtaaaatcttggaaatgcactttttatacaggatgattat

SEQ ID NO: 10903 - DNA, 120 bp, Artificial Sequence
  ENSG00000008952_60 (sequence is synthesized)
ttgcccagccgaaatgtagggtttccattattatcaaagaaaaaagagcagaataggagatagctacaagtctctatctcttacagaatgtaagtcagacacatcacttgaggggcttaa

SEQ ID NO: 10904 - DNA, 120 bp, Artificial Sequence
  ENSG00000008952_61 (sequence is synthesized)
gcggccaacatggcggaacgcaggagacacaagaagcggatccagtataatttcagattctcgtgtcccatcgaagtttctagcaagaggactgttgtcacatttccttcttggactcat

SEQ ID NO: 10905 - DNA, 120 bp, Artificial Sequence
  ENSG00000008988_0 (sequence is synthesized)
ctttttgaggaagacgcggtcgtaagggctgaggatttttggtccgcacgctcctgctcctgactcaccgctgttcgctctcgccgaggaacaagtcggtcaggaagcccgcgcgcaaca

SEQ ID NO: 10906 - DNA, 120 bp, Artificial Sequence
  ENSG00000008988_1 (sequence is synthesized)
gccatggcttttaaggataccggaaaaacacccgtggagccggaggtggcaattcaccgaattcgaatcaccctaacaagccgcaacgtaaaatccttggaaaaggtgtgtgctgacttg

SEQ ID NO: 10907 - DNA, 120 bp, Artificial Sequence
  ENSG00000008988_2 (sequence is synthesized)
caaagtgaaaggaccagttcgaatgcctaccaagactttgagaatcactacaagaaaaactccttgtggtgaaggttctaagacgtgggatcgtttccagatgagaattcacaagcgact

SEQ ID NO: 10908 - DNA, 120 bp, Artificial Sequence
  ENSG00000008988_3 (sequence is synthesized)
cattgacttgcacagtccttctgagattgttaagcagattacttccatcagtattgagccaggagttgaggtggaagtcaccattgcagatgcttaagtcaactattttaataaattgat

SEQ ID NO: 10909 - DNA, 120 bp, Artificial Sequence
  ENSG00000008988_4 (sequence is synthesized)
gaccagttgttaacttctgttggtttttattcagaatactggcagattttaggaatataaaggtgtactatgagacttccacttttcaggtggaatatatgggtatcttagagtggtcta

SEQ ID NO: 10910 - DNA, 120 bp, Artificial Sequence
  ENSG00000008988_5 (sequence is synthesized)
gccatggtgaggcggcagtcggcggcgggcggcgcaacgcagggctcgggcgccggggggaccccggtttcgagttcgtgctcctgagggcagatgccggggcgtgtaggggcggaaagg

SEQ ID NO: 10911 - DNA, 120 bp, Artificial Sequence
  ENSG00000008988_6 (sequence is synthesized)
tctcaaagtgaaaggaccagttcgaatgcctaccaaggtaaagtaaatcggaggggcaggaagtaggagttgcttccggatgttgcataaattcaggttctttaaggagttcggctgcca

SEQ ID NO: 10912 - DNA, 120 bp, Artificial Sequence
  ENSG00000008988_7 (sequence is synthesized)
tcctagtaagtagctaatgtttagatatgattgttgaattattgttgctgtgttcttggtgtgctttggtgcttaacaggcgcaagctctaagggtggtgtcctagcacagtgaaaacag

SEQ ID NO: 10913 - DNA, 120 bp, Artificial Sequence
  ENSG00000008988_8 (sequence is synthesized)
acctggcattttcaacccatggtacctgaaaatctattagtgtaaattggaatcataccaaagggaaactaatgaaatgattagaagtaatgattttccagatgttctagggataagtat

SEQ ID NO: 10914 - DNA, 120 bp, Artificial Sequence
  ENSG00000008988_9 (sequence is synthesized)
tatgcgggggggagggggaattgggcgaaaagcgacgagctttactcgttaatgttagtgtagaaggtggactgcaagaactaaagtgacaagttacttaaaaaagtaaagcgtggctta

SEQ ID NO: 10915 - DNA, 120 bp, Artificial Sequence
  ENSG00000008988_10 (sequence is synthesized)
gaacccatggatacagagggccagcagtacactttgagaagtgtattcgaatccccggggacatgtcctttttaactgcattctcctccgccaaaaaagtgaccaagcagagtctttctc

SEQ ID NO: 10916 - DNA, 120 bp, Artificial Sequence
  ENSG00000008988_11 (sequence is synthesized)
gttcccagctgatttttgtattttatgtagagatggggttatgccattttggccaggctagtctcgaactcctgagctcaggtgatacacacacctcagcaaatcttttaaattatacat

SEQ ID NO: 10917 - DNA, 120 bp, Artificial Sequence
  ENSG00000008988_12 (sequence is synthesized)
tccagcacttgtattgattatttttcattttgataatgttgggtttttaaaaactcctttatgatggaaaatttcaaacatacacaaaagtagagagagaatggtataataaacccactc

SEQ ID NO: 10918 - DNA, 120 bp, Artificial Sequence
  ENSG00000008988_13 (sequence is synthesized)
agttttaaggattgtcaactaataccagttttatttcatgtatgactccaacaacttccccaaccagccttcagattatttgaaagcaaatttcagacatcgtattttactcatacattt

SEQ ID NO: 10919 - DNA, 120 bp, Artificial Sequence
  ENSG00000008988_14 (sequence is synthesized)
tctagtatctaaatctgaaagagactcttttctaacagttctgtagcattaattatactcatactgttgtgcaacaaatatccagaaatcttttgtcttgcgaaactgaacctcttaccc

SEQ ID NO: 10920 - DNA, 120 bp, Artificial Sequence
  ENSG00000008988_15 (sequence is synthesized)
attaaacactaactcccttttttttcaccctgaaccattggcaaccacaattttactttctttttctgtgagtttgattacttgatacttcatgtgagtggaatcatataatatttgtct

SEQ ID NO: 10921 - DNA, 120 bp, Artificial Sequence
  ENSG00000008988_16 (sequence is synthesized)
catataatatttgtctttttgtgactgacattttatttagcttaatgtcttcaagtttgacccataccatatcatgtggcaggatttttccctttttttttttttcagacggagtctcgc

SEQ ID NO: 10922 - DNA, 120 bp, Artificial Sequence
  ENSG00000008988_17 (sequence is synthesized)
cgcgcccggccatgatttttcttcttttttaaggctgaataatatctcaatgtatgtatatataccactttttaaaaattcattcatctgttggacatttagattgttcccacctcttgg

SEQ ID NO: 10923 - DNA, 120 bp, Artificial Sequence
  ENSG00000008988_18 (sequence is synthesized)
atttttggtccgcacgctcctgctcctgactcaccgctgttcgctctcgccgaggaacaagtcggtcaggaagcccgcgcgcaacagccatggataccggaaaaacacccgtggagccgg

SEQ ID NO: 10924 - DNA, 120 bp, Artificial Sequence
  ENSG00000008988_19 (sequence is synthesized)
atacagctggcgatgaggaggtacctattgtgttgagtaacggtgataattttatacgctattctgagccagcagaagtgaaggccttaagccgattttaattgtttcgattatactgag

SEQ ID NO: 10925 - DNA, 120 bp, Artificial Sequence
  ENSG00000009307_0 (sequence is synthesized)
cctacgtaccgggccgtgctgcttatggcggcgctggagagggggcgctgagctgttgggtatgaagtgtaacagaacagactttaccacctgaaactgctgcttcaagttcagatcagg

SEQ ID NO: 10926 - DNA, 120 bp, Artificial Sequence
  ENSG00000009307_1 (sequence is synthesized)
caaggaacaaacctcgtaacaactaacaagaccaaagaagagtacacttaagttgaagacacaacacttgatctgaaacaagaagtttgtgcctactcaacagctttgaaagagcacttc

SEQ ID NO: 10927 - DNA, 120 bp, Artificial Sequence
  ENSG00000009307_2 (sequence is synthesized)
ccaacgctgctagtagtctttgttttcttcagtgctgtactgtgagattgcccggtacagcagcagttgtattctttattagcttggtagatcattttctctcgctcttttttttaatac

SEQ ID NO: 10928 - DNA, 120 bp, Artificial Sequence
  ENSG00000009307_3 (sequence is synthesized)
tagcaactttcatcctttgaaacgtgtgctgaaaaagaagaatcagcaaatactactgaaagtgcaatatttgagtatcactgcgagatgagctttgatccaaaccttctccacaacaat

SEQ ID NO: 10929 - DNA, 120 bp, Artificial Sequence
  ENSG00000009307_4 (sequence is synthesized)
ggacataatgggtaccctaatggtacttcagcagcactgcgtgaaactggggttattgaaaaactgttaacctcttacggatttattcagtgttcagaacgtcaagctagacttttcttc

SEQ ID NO: 10930 - DNA, 120 bp, Artificial Sequence
  ENSG00000009307_5 (sequence is synthesized)
cactgttcacagtataatggcaacctgcaagacttaaaagtaggagatgatgttgaatttgaagtatcatcggaccgacggactgggaaacccattgctgttaaactggtgaagataaaa

SEQ ID NO: 10931 - DNA, 120 bp, Artificial Sequence
  ENSG00000009307_6 (sequence is synthesized)
caagaaatcctccctgaagaacgaatgaatggacaagttgtgtgcgctgttcctcacaacttagagagtaaatctccagctgccccgggtcagagtccaacagggagtgtatgctacgaa

SEQ ID NO: 10932 - DNA, 120 bp, Artificial Sequence
  ENSG00000009307_7 (sequence is synthesized)
cgtaatggggaagtgttttatctgacttacacccctgaagatgtcgaagggaacgttcagctggaaactggagataaaataaactttgtaattgataacaataaacatactggtgctgta

SEQ ID NO: 10933 - DNA, 120 bp, Artificial Sequence
  ENSG00000009307_8 (sequence is synthesized)
agtgctcgcaacattatgctgttgaaaaagaaacaagcccgctgtcagggagtagtttgtgccatgaaggaggcatttggctttattgaaagaggtgatgttgtaaaagagatattcttt

SEQ ID NO: 10934 - DNA, 120 bp, Artificial Sequence
  ENSG00000009307_9 (sequence is synthesized)
cactatagtgaatttaagggtgacttagaaaccttacagcctggcgatgatgtggaattcacaatcaaggacagaaatggtaaagaagttgcaacagatgtcagactattgcctcaagga

SEQ ID NO: 10935 - DNA, 120 bp, Artificial Sequence
  ENSG00000009307_10 (sequence is synthesized)
acagtcatttttgaagatatcagcattgaacattttgaaggaactgtaaccaaagttatcccaaaagtacccagtaaaaaccagaatgacccattgccaggacgcatcaaagttgacttt

SEQ ID NO: 10936 - DNA, 120 bp, Artificial Sequence
  ENSG00000009307_11 (sequence is synthesized)
gtgatccctaaagaacttccctttggagacaaagatacgaaatccaaggtgaccctgctggaaggtgaccatgttaggtttaatatttcaacagaccgacgtgacaaattagagcgagca

SEQ ID NO: 10937 - DNA, 120 bp, Artificial Sequence
  ENSG00000009307_12 (sequence is synthesized)
accaatatagaagttctgtcaaatacatttcagttcactaatgaagcccgagaaatgggtgtgattgctgccatgagagatggttttggtttcatcaagtgtgtggatcgtgatgttcgt

SEQ ID NO: 10938 - DNA, 120 bp, Artificial Sequence
  ENSG00000009307_13 (sequence is synthesized)
atgttcttccacttcagtgaaattctggatgggaaccagctccatattgcagatgaagtagagtttactgtggttcctgatatgctctctgctcaaagaaatcatgctattaggattaaa

SEQ ID NO: 10939 - DNA, 120 bp, Artificial Sequence
  ENSG00000009307_14 (sequence is synthesized)
aaacttcccaagggcacggtttcatttcattcccattcagatcaccgttttctgggcacggtagaaaaagaagccactttttccaatcctaaaaccactagcccaaataaaggcaaagag

SEQ ID NO: 10940 - DNA, 120 bp, Artificial Sequence
  ENSG00000009307_15 (sequence is synthesized)
aaggaggctgaggatggcattattgcttatgatgactgtggggtgaaactgactattgcttttcaagccaaggatgtggaaggatctacttctcctcaaataggagataaggttgaattt

SEQ ID NO: 10941 - DNA, 120 bp, Artificial Sequence
  ENSG00000009307_16 (sequence is synthesized)
agtattagtgacaaacagaggcctggacagcaggttgcaacttgtgtgcgacttttaggtcgtaattctaactccaagaggctcttgggttatgtggcaactctgaaggataattttgga

SEQ ID NO: 10942 - DNA, 120 bp, Artificial Sequence
  ENSG00000009307_17 (sequence is synthesized)
tcatgataaggaaatctttttccattacagtgagttctctggtgatgttgatagcctggaactgggggacatggtcgagtatagcttgtccaaaggcaaaggcaacaaagtcagtgcaga

SEQ ID NO: 10943 - DNA, 120 bp, Artificial Sequence
  ENSG00000009307_18 (sequence is synthesized)
aaaagtgaacaaaacacactcagtgaatggcattactgaggaagctgatcccaccatttactctggcaaagtaattcgccccctgaggagtgttgatccaacacagactgagtaccaagg

SEQ ID NO: 10944 - DNA, 120 bp, Artificial Sequence
  ENSG00000009307_19 (sequence is synthesized)
aatgattgagattgtggaggagggcgatatgaaaggtgaggtctatccatttggcatcgttgggatggccaacaaaggggattgcctgcagaaaggggagagcgtcaagttccaattgtg

SEQ ID NO: 10945 - DNA, 120 bp, Artificial Sequence
  ENSG00000009307_20 (sequence is synthesized)
tgtcctgggccaaaatgcacaaactatggcttacaacatcacacccctgcgcagggccacagtggaatgtgtgaaagatcagtttggcttcattaactatgaagtaggagatagcaagaa

SEQ ID NO: 10946 - DNA, 120 bp, Artificial Sequence
  ENSG00000009307_21 (sequence is synthesized)
gctctttttccatgtgaaagaagttcaggatggcattgagctacaggcaggagatgaggtggagttctcagtgattcttaatcagcgcactggcaagtgcagcgcctgtaatgtttggcg

SEQ ID NO: 10947 - DNA, 120 bp, Artificial Sequence
  ENSG00000009307_22 (sequence is synthesized)
agtctgtgagggccccaaggctgttgcagctcctcgacctgatcggttggtcaatcgcttgaagaatatcactctggatgatgccagtgctcctcgcctaatggttcttcgtcagccaag

SEQ ID NO: 10948 - DNA, 120 bp, Artificial Sequence
  ENSG00000009307_23 (sequence is synthesized)
gggaccagataactcaatggggtttggtgcagaaagaaagatccgtcaagctggtgtcattgactaaccacatccacaaagcacaccattaatccactatgatcaagttggggggaatct

SEQ ID NO: 10949 - DNA, 120 bp, Artificial Sequence
  ENSG00000009307_24 (sequence is synthesized)
ggtgaagggttctgaatatctccctcttcatccctcccgaaatctggaatacttattctattgagctattacaccagttttaacaccttcctcgtgttatgtttaaaaaaataaataaat

SEQ ID NO: 10950 - DNA, 120 bp, Artificial Sequence
  ENSG00000009307_25 (sequence is synthesized)
ttaagaaaaccattttaaataatgcacagttgcagcctggaaaaacttaaggtggcgccttatagtatcaattttaggagctttatttggtgcatttaacgcaactggtaattgcagaat

SEQ ID NO: 10951 - DNA, 120 bp, Artificial Sequence
  ENSG00000009307_26 (sequence is synthesized)
ccactttgcctgtgtaagtgaaaaatatagactgttatcttgttggccctatgaaattctgcacttttcattatatactctaccttcattaattacttctggcaagatgttctgccttag

SEQ ID NO: 10952 - DNA, 120 bp, Artificial Sequence
  ENSG00000009307_27 (sequence is synthesized)
cactcagttgcattcttttcctttttcttcctgttcattatgctttaattctgaggaccatatgagggtagaatatattatcttttaaaaattacaaaaatttgtataggcaaaccattt

SEQ ID NO: 10953 - DNA, 120 bp, Artificial Sequence
  ENSG00000009307_28 (sequence is synthesized)
cttaaagttgatggccaaattttaaaatgttatttttcatatcatttataatcttgtcacaatccacttaaagaagtttggttatatttcagtgaaaattttcttccagagtaggttttt

SEQ ID NO: 10954 - DNA, 120 bp, Artificial Sequence
  ENSG00000009307_29 (sequence is synthesized)
tttcgtgggttggggggtaactttactacaattagtaagtatggtgcagaatttcatgcaaatgaggagtgccagcagtgtgataatttaaacatatttaaacaaaaacaaaaaaaatga

SEQ ID NO: 10955 - DNA, 120 bp, Artificial Sequence
  ENSG00000009307_30 (sequence is synthesized)
atgcacaaacttgctgctgcttagatcactgcagcttctaggacccggtttcttttactgatttaaaaacaaaacaaaaaaaaataaaaaagttgtgcctgaaatgaatcttgttttttt

SEQ ID NO: 10956 - DNA, 120 bp, Artificial Sequence
  ENSG00000009307_31 (sequence is synthesized)
ttataagtagccgcctggttactgtgtcctgtaaaatacagacacttgacccttggtgtagcttctgttcaactttatatcacgggaatggatgggtctgatttcttggccctcttcttg

SEQ ID NO: 10957 - DNA, 120 bp, Artificial Sequence
  ENSG00000009307_32 (sequence is synthesized)
aattggccatatacagggtccctggccagtggactgaaggctttgtctaagatgacaagggtcagctcaggggatgtgggggagggcggttttatcttcccccttgtcgtttgaggtttt

SEQ ID NO: 10958 - DNA, 120 bp, Artificial Sequence
  ENSG00000009307_33 (sequence is synthesized)
gatctctgggtaaagaggccgtttatctttgtaaacacgaaacatttttgctttctccagttttctgttaatggcgaaagaatggaagcgaataaagttttactgatttttgagacacta

SEQ ID NO: 10959 - DNA, 120 bp, Artificial Sequence
  ENSG00000009307_34 (sequence is synthesized)
gaacgtttttactgtgtcatcagatcctcatccctctcctgcagcccctccttcactttctttacccttatcttcatcttctacctcatctgggactaaaaaacaaaagaggaccccaac

SEQ ID NO: 10960 - DNA, 120 bp, Artificial Sequence
  ENSG00000009307_35 (sequence is synthesized)
gggaccttgagttggggataataatacataaacaaacttgtctgtcctgtctttctagctaggtatatgaggcaagagtcccatcataaaaagtgagtcatttgggcagttaggtggaaa

SEQ ID NO: 10961 - DNA, 120 bp, Artificial Sequence
  ENSG00000009307_36 (sequence is synthesized)
gtaagagatcaaggcatgttttatttatgaatacttattaattccttaaacaattttatttaaacaattctatttaggaaaagcaggcattttggtagtttagaagtatttaaagtccag

SEQ ID NO: 10962 - DNA, 120 bp, Artificial Sequence
  ENSG00000009307_37 (sequence is synthesized)
cagctgttctaaaaatagaacttggcttcaggttccctaccccatttcaatagcagccagccaacctaccctgttaacatttgtgctgttattttttgcttacttgtctttctatgtagt

SEQ ID NO: 10963 - DNA, 120 bp, Artificial Sequence
  ENSG00000009307_38 (sequence is synthesized)
cctgcgcagggccacagtggaatgtgtgaaagatcaggtaagtgccagcatctctgtatctgaatttgatccttctatgagttggtaaccaaaaccttcaaatattttcagccaagggga

SEQ ID NO: 10964 - DNA, 120 bp, Artificial Sequence
  ENSG00000009307_39 (sequence is synthesized)
aatcatcaacattcattcgtttttttatttctacttcaccttttttcagtcatttgaggtagcttaataaaaacagaaaactacacaaaaagtgactatattagcaatgagaaagtaaga

SEQ ID NO: 10965 - DNA, 120 bp, Artificial Sequence
  ENSG00000009307_40 (sequence is synthesized)
ttggtattagtaactaatattatgcaatggggaaaataagttaggggtgagatttccagaatagaaggactatatggttttgtacacttttgcttagagcttcttttgcatatcacacaa

SEQ ID NO: 10966 - DNA, 120 bp, Artificial Sequence
  ENSG00000009307_41 (sequence is synthesized)
attcctacgtaccgggccgtgctgcttatggcggcgctggagagggggcgctgagctgttggggttttcccttagaaacacccagatggcggccgtcttgcttaactcacaggtgaagca

SEQ ID NO: 10967 - DNA, 120 bp, Artificial Sequence
  ENSG00000009307_42 (sequence is synthesized)
tttgagtatcactgcgagtttccagattttctaaagttagacataaaggaattcagaaaggagtcatcagtgtataggtaataaaaggaagaagcaccaatgaagagagcaaagacatag

SEQ ID NO: 10968 - DNA, 120 bp, Artificial Sequence
  ENSG00000009307_43 (sequence is synthesized)
agatgtgggaactattgagcttacttttcatccctagcaaaaaccccagagccagtgaataaataacttggcagactagctcatgatagcataatggtcaatatggagaaatgttggatg

SEQ ID NO: 10969 - DNA, 120 bp, Artificial Sequence
  ENSG00000009307_44 (sequence is synthesized)
gatagcagttagtaagagactgattttagagaagtctccaggtgtatgctgccagatgctatcctcgccctgcttttttcagagacctaatgagtagttctgtgagtacctatgtgctac

SEQ ID NO: 10970 - DNA, 120 bp, Artificial Sequence
  ENSG00000009307_45 (sequence is synthesized)
attggatgaatcatctctttgctcttatttcaaccttttaattactgatccaccctctttgattacctgacacaacaggaatatctttcgtaacttgaaagtatgaagtgtaacagaaca

SEQ ID NO: 10971 - DNA, 120 bp, Artificial Sequence
  ENSG00000009335_0 (sequence is synthesized)
gcacgcactgacggctgaccgccatcttccctcccgaggcggcagttccaggtgcaagcgccgggtttgctgcccgctgggcgcccctgcagcggcccgagctgtggccggcgtggatga

SEQ ID NO: 10972 - DNA, 80 bp, Artificial Sequence
  ENSG00000009335_1 (sequence is synthesized)
ggggcaggcgaggcagggccgcccctccagtattgccgcccctcccgccccagggcagggctgggagggtacagcccggg

SEQ ID NO: 10973 - DNA, 120 bp, Artificial Sequence
  ENSG00000009335_2 (sequence is synthesized)
cgggcgggcgccgagagcctcccagcccgccccgtgccccgcccgcccggctgcttccgcggcggcgctgcccgcacatgggctaggctgccaggatgttcagcttcgaaggcgacttca

SEQ ID NO: 10974 - DNA, 120 bp, Artificial Sequence
  ENSG00000009335_3 (sequence is synthesized)
aaggcgacttcaagacgcggcccaaggtgtcccttggcggcgcgagcaggaaggaggaaaaggcttctcttttacatcgtactcaggaagaaagaagaaagagagaggaagaaaggcgaa

SEQ ID NO: 10975 - DNA, 120 bp, Artificial Sequence
  ENSG00000009335_4 (sequence is synthesized)
ggttgaaaaatgcaataattatccagtcatttattcgaggctatagagacagaaaacagcaatattccatccaaagaagtgcatttgatcgctgtgctaccttgtcacagtccgggggcg

SEQ ID NO: 10976 - DNA, 120 bp, Artificial Sequence
  ENSG00000009335_5 (sequence is synthesized)
cttttcccattgctaatggccccaaccttacccttttggtaaggcagcttctgtttttttacaaacaaaatgaagactcaaaacgtttgatatggctgtatcagaacttaattaaacaca

SEQ ID NO: 10977 - DNA, 120 bp, Artificial Sequence
  ENSG00000009335_6 (sequence is synthesized)
gctctctgtttgtcaagcagttggatggatctgagagacttacatgcttatttcagataaaaagattgatgagcctctgttgcaggttgctgcaaaactgtaatgatgacagtttgaatg

SEQ ID NO: 10978 - DNA, 120 bp, Artificial Sequence
  ENSG00000009335_7 (sequence is synthesized)
ttgcacttccaatgagaatgcttgaagtattttcgtctgagaatacttacttgcctgttttacaagatgctagctatgtggtgtcagtgattgaacaaattttgcactacatgattcaca

SEQ ID NO: 10979 - DNA, 120 bp, Artificial Sequence
  ENSG00000009335_8 (sequence is synthesized)
atgggtattataggtctctatatttgttgattaacagcaagcttccatcaagtattgaatattctgatttatctcgagttcctatagcaaaaattttgctagagaatgttctaaaaccat

SEQ ID NO: 10980 - DNA, 120 bp, Artificial Sequence
  ENSG00000009335_9 (sequence is synthesized)
tgcactttacttacaactcctgtccggaaggtgcgaggcaacaagtttttacagccttcacagaggagtttctggcagcaccttttacagatcagatttttcatttcatcattccggcgc

SEQ ID NO: 10981 - DNA, 120 bp, Artificial Sequence
  ENSG00000009335_10 (sequence is synthesized)
ttgcagatgcgcagaccgttttcccttacgagccctttctgaatgcactgttgttaatagagagtagatgttcaagaaagagtggtggagcaccctggcttttctatttcgttttaactg

SEQ ID NO: 10982 - DNA, 120 bp, Artificial Sequence
  ENSG00000009335_11 (sequence is synthesized)
ttggcgaaaattatttgggggccctctctgaggaagggctgctggtgtatttgcgggtgctgcagaccttcctctctcagttaccagtctctcctgccagcgcgagctgtcacgactcag

SEQ ID NO: 10983 - DNA, 120 bp, Artificial Sequence
  ENSG00000009335_12 (sequence is synthesized)
ccagtgactctgaggaggagagtgaagaagccgacaagccctcaagcccggaggatggcagactgtcagtatcatacataacagaggaatgcctgaagaagctggacacaaagcagcaga

SEQ ID NO: 10984 - DNA, 120 bp, Artificial Sequence
  ENSG00000009335_13 (sequence is synthesized)
ccaacaccctgctcaacctggtgtggagggactctgcgagcgaggaggtcttcaccaccatggcctccgtctgccacacgctgatggtgcagcaccgcatgatggtacccaaagtcaggc

SEQ ID NO: 10985 - DNA, 120 bp, Artificial Sequence
  ENSG00000009335_14 (sequence is synthesized)
ttctctacagtttagcctttaatgccaggtttctgagacatctttggtttctaatatcttccatgtcaacacggatgatcacagggtctatggtaccgttgcttcaggtgatatccaggg

SEQ ID NO: 10986 - DNA, 120 bp, Artificial Sequence
  ENSG00000009335_15 (sequence is synthesized)
gttctcctatgtcttttgaagattctagtcgaatcatcccactcttttatctttttagctccttgtttagtcattcactaatttccatacatgataacgaattcttcggtgatcccatag

SEQ ID NO: 10987 - DNA, 120 bp, Artificial Sequence
  ENSG00000009335_16 (sequence is synthesized)
aagttgtaggtcaaagacaatcatcaatgatgccttttactttagaagagctgataatgttgtctcgatgccttcgagatgcatgcctggggatcatcaagttggcttatccagaaacca

SEQ ID NO: 10988 - DNA, 120 bp, Artificial Sequence
  ENSG00000009335_17 (sequence is synthesized)
agccagaagttcgagaagaatatattacagcatttcagagtattggagttactactagctctgaaatgcaacaatgcatacagatggaacagaaaagatggattcagttatttaaggtta

SEQ ID NO: 10989 - DNA, 120 bp, Artificial Sequence
  ENSG00000009335_18 (sequence is synthesized)
tcaccaatctagtgaaaatgttgaagtccagagacacgaggagaaatttttgtcctccaaaccactggctgtcagaacaagaagatattaaagcagataaggtcactcagctctatgtgc

SEQ ID NO: 10990 - DNA, 120 bp, Artificial Sequence
  ENSG00000009335_19 (sequence is synthesized)
cagcatccagacatgtgtggaggttccggcggatggggaggataggcccgctgcagtccaccctggacgtgggtttggagtccccgccgctgtctgtgtctgaggaaagacagcttgctg

SEQ ID NO: 10991 - DNA, 120 bp, Artificial Sequence
  ENSG00000009335_20 (sequence is synthesized)
tcctgacagagttgccttttgtggttccatttgaggaacgagtaaagatctttcagaggttgatttatgcagataagcaagaagttcaaggagatggtccatttctggatggaattaatg

SEQ ID NO: 10992 - DNA, 120 bp, Artificial Sequence
  ENSG00000009335_21 (sequence is synthesized)
aaaatgagcctgatttgaaaaagcggatccgtgtgcacttgctcaatgcccatggcctggatgaagctggcattgatggtggtggtattttcagagagtttttaaatgaactactgaagt

SEQ ID NO: 10993 - DNA, 120 bp, Artificial Sequence
  ENSG00000009335_22 (sequence is synthesized)
caggatttaaccccaaccaggggttctttaagactactaatgaagggcttctgtaccccaacccggctgctcagatgcttgtgggagattcttttgccagacattactacttcctaggca

SEQ ID NO: 10994 - DNA, 120 bp, Artificial Sequence
  ENSG00000009335_23 (sequence is synthesized)
gaatgcttggaaaggctctctatgagaacatgctggtggagctgccctttgcaggcttctttctttccaagttgcttggaaccagtgccgacgtggacattcaccacctcgcctccctag

SEQ ID NO: 10995 - DNA, 120 bp, Artificial Sequence
  ENSG00000009335_24 (sequence is synthesized)
accctgaggtgtataagaatttgctctttctgaagagctacgaagacgatgtggaggagcttgggctgaacttcactgtggtgaacaatgacctgggagaggcgcaggtagttgaactaa

SEQ ID NO: 10996 - DNA, 120 bp, Artificial Sequence
  ENSG00000009335_25 (sequence is synthesized)
aattcggtgggaaagacatccctgtcaccagcgccaaccggattgcgtacatccacttggtggcagactacaggctgaacaggcagatccgccagcactgcctggctttccgccagggcc

SEQ ID NO: 10997 - DNA, 120 bp, Artificial Sequence
  ENSG00000009335_26 (sequence is synthesized)
ttgccaatgtcgtcagcctcgagtggctccgaatgtttgatcagcaagaaattcaggtattaatttctggtgcacaagttcccataagcctagaggacctaaaatcctttacaaactatt

SEQ ID NO: 10998 - DNA, 120 bp, Artificial Sequence
  ENSG00000009335_27 (sequence is synthesized)
caggaggctattctgcagaccatcctgttattaaggtcttctggagagttgtggaagggttcactgatgaagaaaagcgcaaactgctgaagtttgtaacaagctgctctcgaccccctc

SEQ ID NO: 10999 - DNA, 120 bp, Artificial Sequence
  ENSG00000009335_28 (sequence is synthesized)
tcttggggtttaaggagttgtatcccgcattttgtattcacaacggaggctccgaccttgagcggctccccacagccagcacctgcatgaacctgctgaagctccccgagttctatgacg

SEQ ID NO: 11000 - DNA, 120 bp, Artificial Sequence
  ENSG00000009335_29 (sequence is synthesized)
agacacttttgcgaagtaaacttctctatgcgattgaatgtgccgctggctttgagctgagctgaagctgatgctggggtcagacccctacagagaaccagtgcttccttcgtcagcagc

SEQ ID NO: 11001 - DNA, 120 bp, Artificial Sequence
  ENSG00000009335_30 (sequence is synthesized)
gcctccccagacccacgaggatactcacactgcacgcctgaggctctcctaagctccttctttcattctgccattcctccctcccttccttttttaaatgatttttattacggtgtggtc

SEQ ID NO: 11002 - DNA, 120 bp, Artificial Sequence
  ENSG00000009335_31 (sequence is synthesized)
acttatttagatggacattgcttttcaaataacttaaaataacacgttatgtgccatgtggctactttagtaatattgccaagaagagcacagtttttacactagtggcatctcagtgaa

SEQ ID NO: 11003 - DNA, 120 bp, Artificial Sequence
  ENSG00000009335_32 (sequence is synthesized)
attaaccaaagatgaagctttggctttgctggtgagatcagagccctcctgagcaggcagcgccactccagggttcagacagggctgcacaggcggcagagatacagggtctgagggctg

SEQ ID NO: 11004 - DNA, 120 bp, Artificial Sequence
  ENSG00000009335_33 (sequence is synthesized)
agacgccatggggccgctgctgcttatgtggttggattgtttacaagcctcattattaaaactgaaggcattttttttttctgctgcctttcccaaagtggttaggtttggaaaagagat

SEQ ID NO: 11005 - DNA, 120 bp, Artificial Sequence
  ENSG00000009335_34 (sequence is synthesized)
gatgatggtaatattttatttgtgctttttaagccatttccccaaatgggactagcatgcttgttttcagtataccgtggcctgcctcatgatggtttggagatactgtctgtggatgtg

SEQ ID NO: 11006 - DNA, 120 bp, Artificial Sequence
  ENSG00000009335_35 (sequence is synthesized)
aggtggggacttcattcattgtcctatttctatctccactttgtgcctggagagctttcaggggaggtggaggaggagggtctgccaagctactgcaacatctgtcacccactataccca

SEQ ID NO: 11007 - DNA, 120 bp, Artificial Sequence
  ENSG00000009335_36 (sequence is synthesized)
gttacttgggggaggacagacactgtggtgtcattaaagttgtttgaaccaaagtggcggctgcatctttgtcccgatgctagccgtgccggtctcccatcatccgctcgccctcctttc

SEQ ID NO: 11008 - DNA, 120 bp, Artificial Sequence
  ENSG00000009335_37 (sequence is synthesized)
ccctgggctgcgcccacttgtcttcctggatatttgggggtgactcgccatgcttggcaccctctgcttcctggtgctgctctgactcgaagacgggacagtccctggtgcacatccagg

SEQ ID NO: 11009 - DNA, 120 bp, Artificial Sequence
  ENSG00000009335_38 (sequence is synthesized)
gaagaggagtgtcggtagttcttgcagtaggcactttatcaggacctgacctgttgctgggtgattttagtctctacaaacagaaagcgtttcaaagcgtcagctgtgggagcagagtga

SEQ ID NO: 11010 - DNA, 120 bp, Artificial Sequence
  ENSG00000009335_39 (sequence is synthesized)
ccctttgctgatgctggggggaggggatctaaatcctcatttatctcttctatgtctcgtattttactgtcactggaggctctgtgggctgtcatagttaattgaccataattagcaata

SEQ ID NO: 11011 - DNA, 120 bp, Artificial Sequence
  ENSG00000009335_40 (sequence is synthesized)
tacttttaaagtgggaaagctgaatgacacttttaagacaatgaacattatcaaaacaaaatgtataatttcttaatttgaataataaattaagcgtttaaatgctatttgtagtcttga

SEQ ID NO: 11012 - DNA, 120 bp, Artificial Sequence
  ENSG00000009335_41 (sequence is synthesized)
aaataattagggttggtcttttttattttaggttgttttatgttgaatgttctatatcttattagttaatttgtatattttattagtattttggaaatagcatatctgagactgaagaga

SEQ ID NO: 11013 - DNA, 120 bp, Artificial Sequence
  ENSG00000009335_42 (sequence is synthesized)
agactgaagagaaattgacaattcacttatttgtggtttttttctcagctattctgagcttatttatttatttgtatgttctaatggctaaacatttacattaaatgttttttttcccaa

SEQ ID NO: 11014 - DNA, 120 bp, Artificial Sequence
  ENSG00000009335_43 (sequence is synthesized)
cttttcctataagaaggatggaaaaaataggaatatatattcatattgcataaagaaacttggaagcatatacaagaaactcatgaaagtgaacactcgtgtctgaatatgccgaggaag

SEQ ID NO: 11015 - DNA, 120 bp, Artificial Sequence
  ENSG00000009335_44 (sequence is synthesized)
ctggggctggagcagaagtgctcttctgagtacactatttttatatcacttttaagttttggattaggtgaatgacttaatattttaaaattggttaagtaataaatgaattgccagctc

SEQ ID NO: 11016 - DNA, 120 bp, Artificial Sequence
  ENSG00000009335_45 (sequence is synthesized)
aaccaggattgcccccgacaggtcactcagctctatgtgccagcatccagacatgtgtggaggttccggcggatggggaggataggcccgctgcagtccaccctggacggtgagttctct

SEQ ID NO: 11017 - DNA, 120 bp, Artificial Sequence
  ENSG00000009335_46 (sequence is synthesized)
aggacacagggttactgaggtatgaattacatgctgtcaaattcactcctttaatctacagatctgttatttttcataaacttatacagccatgtcactcccagcaggagctaccatgta

SEQ ID NO: 11018 - DNA, 120 bp, Artificial Sequence
  ENSG00000009335_47 (sequence is synthesized)
gaaaagtttcatcacccacaaaattgcctctagctccattgcggccacctcttcagcagccacccatttctgttttgtcctgtcactttgccttttgcaaaaggcctccaaagggaacca

SEQ ID NO: 11019 - DNA, 120 bp, Artificial Sequence
  ENSG00000009335_48 (sequence is synthesized)
tgctgtgtagtctgctcctggctccttttggtcagcacgctgcatttgagggtgctgtgtgggttgattgttccctctgttgctcagcagtattccagtgtggggatgcaccacagtttg

SEQ ID NO: 11020 - DNA, 120 bp, Artificial Sequence
  ENSG00000009335_49 (sequence is synthesized)
tgaatccattcattggttgaaagacatttggttattttttctgtctctgggaatacgagtacagctgctataaacatctatgtacaggtttttctgtgaacatacattttgtttgacatg

SEQ ID NO: 11021 - DNA, 120 bp, Artificial Sequence
  ENSG00000009335_50 (sequence is synthesized)
gagtaagtttcactgggagtaagaatcctgagacatttggcaagtttatgtttaacttgatgagaagctgcagaactgtgttccagggtggctgcacggctttgcattcagaccagcaat

SEQ ID NO: 11022 - DNA, 120 bp, Artificial Sequence
  ENSG00000009335_51 (sequence is synthesized)
gaatgagagcctctgttgttcccagtcctcatcagcacttacagttgtcatttaaaaaaaaaaaattctatgggccaggcgtggtggctctcgcctgtaatccccagcactttaggaggc

SEQ ID NO: 11023 - DNA, 61 bp, Artificial Sequence
  ENSG00000009335_52 (sequence is synthesized)
ataagactgtctaaaaaaaaaaaatttggccattgtaaaaggtgggaaatggtatcttctt

SEQ ID NO: 11024 - DNA, 120 bp, Artificial Sequence
  ENSG00000009335_53 (sequence is synthesized)
aaatttggccattgtaaaaggtgggaaatggtatcttcttgtggttttaatttgtgtctaccagccgactaatgatattcagcatctttttcatgaatttgtttttttgttgtgttttct

SEQ ID NO: 11025 - DNA, 120 bp, Artificial Sequence
  ENSG00000009335_54 (sequence is synthesized)
tggttgttttttgtttttttggagacagggtctcactgtgtgctcaggctggagtgcagaggcgcaatcacggctcactgcagccttgacttcctgggcttcagcgatcttcctgccgta

SEQ ID NO: 11026 - DNA, 120 bp, Artificial Sequence
  ENSG00000009335_55 (sequence is synthesized)
gcttccaaagtagttgtgaccacaggcgtgtgccaccacacctggccaattttttaatttttttgtagagatggaatctccatgtgttgcccaggctggcctttaactcctgggctcaag

SEQ ID NO: 11027 - DNA, 120 bp, Artificial Sequence
  ENSG00000009335_56 (sequence is synthesized)
ggatcttcccaccttggcctcccaaagtactacgattacaggtgtgagccactgcacactgcctgtgaacatgttttttagttattgaattttgagagttataaagctattctggatata

SEQ ID NO: 11028 - DNA, 120 bp, Artificial Sequence
  ENSG00000009335_57 (sequence is synthesized)
gtttatcagatatgtgatttgcaaatattttgtcccaatctgtggcttgtctttttcttttcttagcagtgtctttcaaggaggagaagttttaaattttgatagaatcccatttaccat

SEQ ID NO: 11029 - DNA, 120 bp, Artificial Sequence
  ENSG00000009335_58 (sequence is synthesized)
gttttaaattttgatagaatcccatttaccatttttttctttaatgaaattgtgcttttgatatgatgtctaagataccttcacctaacactttactttttttttttctttctttctttt

SEQ ID NO: 11030 - DNA, 73 bp, Artificial Sequence
  ENSG00000009335_59 (sequence is synthesized)
ttttttgaggcagggtctcagtgtgtcactctgcagtctcaggcagttctcccacctcagcctcctgagtagc

SEQ ID NO: 11031 - DNA, 120 bp, Artificial Sequence
  ENSG00000009335_60 (sequence is synthesized)
ttttaaaaaaattttcttcgtagaggcaaggtctctctgtgatgctcagtttctcaaactcctgagctcaagggatgctctcgcctcagcctgggattacaggcataagctgccatcccc

SEQ ID NO: 11032 - DNA, 120 bp, Artificial Sequence
  ENSG00000009335_61 (sequence is synthesized)
agctccttgaaatgagttttaagaggccaagttacgatttattgttggaaaggaatgggatatgtgtttattcatgaaatactgcctggggcctactgtgtatacagccttctcccaggc

SEQ ID NO: 11033 - DNA, 120 bp, Artificial Sequence
  ENSG00000009335_62 (sequence is synthesized)
accatctcatgcacacacgcctggtctgggaggaactttgttgccatagtaggagggaaagggcacgaaggtggtcgggggtggccagggcaccgcccactgctggatctggctgcattc

SEQ ID NO: 11034 - DNA, 120 bp, Artificial Sequence
  ENSG00000009335_63 (sequence is synthesized)
gggcctcaccgccagtgctagggctagctgtgcacttgagacgtgctagacagctggagtggaagtgtagtccttgattaggacatctttaatattcgatcaagttatgtgttcggggag

SEQ ID NO: 11035 - DNA, 120 bp, Artificial Sequence
  ENSG00000009335_64 (sequence is synthesized)
ctactgtgctgatcctgcactgtgcatggctcatgggtctgcctgaggcggggatgtgttcatggaactggatttagataaatgagttaatcaggatgatttcaagaatcttcaccttaa

SEQ ID NO: 11036 - DNA, 120 bp, Artificial Sequence
  ENSG00000009335_65 (sequence is synthesized)
acagccatttacacagcctcggcatgagatgggattgtaccagtgctctagagatcatggaagtgcacagcacgtacacaggtgatacacacatgccacgccgttttagagaagggactt

SEQ ID NO: 11037 - DNA, 120 bp, Artificial Sequence
  ENSG00000009335_66 (sequence is synthesized)
aaaaaatacattcagcttgtgtctttctggagagaagaattaagcactttaaaattatttattttatgactcatatgactaaatagtaatgataaaccttattactaactcttacgccaa

SEQ ID NO: 11038 - DNA, 120 bp, Artificial Sequence
  ENSG00000009335_67 (sequence is synthesized)
cttcttaatggaacatatagcagtatcattgacttaaaatgatattctgagttattaatcctcaattttcctttttaacctgagattatattaaagccttaatgattctttgtgaggttg

SEQ ID NO: 11039 - DNA, 120 bp, Artificial Sequence
  ENSG00000009335_68 (sequence is synthesized)
agcttcgaaggcgacttcaagacgcggcccaaggtgtcccttggcggcgcgagcaggaaggaggaaaaggcttctcttttacatcgtactcaggaagaaagaagaaagagagagtgttgg

SEQ ID NO: 11040 - DNA, 120 bp, Artificial Sequence
  ENSG00000009335_69 (sequence is synthesized)
aaagcactgcacgaaacaaatttgtatggttgtaagtaggtgctatggtttgaatgtcccctccaaactcatgttgaaacttgatccccagtgtgccagtattcagaggtggaatcttta

SEQ ID NO: 11041 - DNA, 120 bp, Artificial Sequence
  ENSG00000009335_70 (sequence is synthesized)
agaggtgattagatcatgtgagctcggccgtcatgaatggatgagtggtttattgtgggaagggccctggtgactttttacaggagggagcccctagctttgtgatgccctgtgccgcct

SEQ ID NO: 11042 - DNA, 120 bp, Artificial Sequence
  ENSG00000009335_71 (sequence is synthesized)
ccggactctgcagagtccccaccaatgagaagacctcaccaggggctgcctctggaccatgggctcctggccttccagctataagaaatggatttcagtttttattaattactcagtttc

SEQ ID NO: 11043 - DNA, 120 bp, Artificial Sequence
  ENSG00000009413_0 (sequence is synthesized)
gcacgagatctgcgcctcgcctccctcctcacgcgggcggattttcttaccttgtgaaaaaccgtctcagcggctgcccccgcctcctctgctggatgtgaaatggcggtcggcgagtgg

SEQ ID NO: 11044 - DNA, 120 bp, Artificial Sequence
  ENSG00000009413_1 (sequence is synthesized)
ttgcgtccgtgacatcatcatcatggcaacaagagctgcagcctgggaccgaggagcccgtgtgattcccggcggtggcggcagtggcggcagcaccagcaccgacgaaagctcgagggc

SEQ ID NO: 11045 - DNA, 120 bp, Artificial Sequence
  ENSG00000009413_2 (sequence is synthesized)
ttctctcctgcggccccttgccgggtgctcctgaggaggcggcggcagcagcgcctacaccgccccgcccgccgctcctcgaggtgcctctgtgtgaggggagggggccgtgccgagaag

SEQ ID NO: 11046 - DNA, 120 bp, Artificial Sequence
  ENSG00000009413_3 (sequence is synthesized)
gggagggggcgccgccgccgctgcggagggagccgccgccgctgctgctgccgctgccgggtcgccagtgaagggaggcagtggcggcggcggcgaacatgttttcagtaaggatagtga

SEQ ID NO: 11047 - DNA, 120 bp, Artificial Sequence
  ENSG00000009413_4 (sequence is synthesized)
ctgcagactactacatggccagcccgctgcaggggctggatacctgccaatcccccctcacccaggcccctgtcaagaaggtgccggtggtgcgagtcttcggagcgaccccggcaggtc

SEQ ID NO: 11048 - DNA, 120 bp, Artificial Sequence
  ENSG00000009413_5 (sequence is synthesized)
agaagacatgtcttcatctacatggcatctttccttacctctatgtgccatacgatggttatggacagcagccagaaagctatctttctcagatggcattcagtatcgacagagcactta

SEQ ID NO: 11049 - DNA, 120 bp, Artificial Sequence
  ENSG00000009413_6 (sequence is synthesized)
atgtggctttaggcaatccatcttccactgctcagcatgtgttcaaagtgtcattagtatcaggaatgcctttttatggttatcatgagaaggaaagacactttatgaagatctatcttt

SEQ ID NO: 11050 - DNA, 120 bp, Artificial Sequence
  ENSG00000009413_7 (sequence is synthesized)
acaatcctacaatggtgaaaaggatatgtgaacttttgcaaagcggagccataatgaataaattttaccagcctcatgaagcgcatattccctacctcctacagctcttcattgactaca

SEQ ID NO: 11051 - DNA, 120 bp, Artificial Sequence
  ENSG00000009413_8 (sequence is synthesized)
atctttatggcatgaatttaataaatctggctgctgtcaagttccgaaaagcaagaaggaaaagtaatacattgcatgcaactggatcctgcaagaatcatttatcaggaaattctcttg

SEQ ID NO: 11052 - DNA, 120 bp, Artificial Sequence
  ENSG00000009413_9 (sequence is synthesized)
ctgatactttatttcggtgggaacaagatgaaataccaagctctttaatattggaaggtgttgaaccacagagtacatgtgaattagaagtggatgctgtagctgctgatatcttaaatc

SEQ ID NO: 11053 - DNA, 120 bp, Artificial Sequence
  ENSG00000009413_10 (sequence is synthesized)
gtctggacattgaagctcaaattggtggaaaccctggtctacaggccatatgggaagatgaaaagcaacggcgaagaaacagaaatgaaacttctcaaatgagccaacctgagtcacaag

SEQ ID NO: 11054 - DNA, 120 bp, Artificial Sequence
  ENSG00000009413_11 (sequence is synthesized)
atcacaggtttgtgccagcaacagaaagtgaaaaaaaatttcagaagagacttcaggaaattctcaaacagaatgatttctctgtaacattatcaggatctgtggactacagcgatggat

SEQ ID NO: 11055 - DNA, 120 bp, Artificial Sequence
  ENSG00000009413_12 (sequence is synthesized)
cccaggagttctctgctgagttaacattgcactctgaggttctgtctcctgaaatgcttcagtgtacaccagccaatatggtagaagttcacaaagacaaagagtcaagcaaaggtcaca

SEQ ID NO: 11056 - DNA, 120 bp, Artificial Sequence
  ENSG00000009413_13 (sequence is synthesized)
ctagacacaaagtggaagaagctcttattaatgaagaagcaattttgaaccttatggaaaatagtcagacttttcagcctttgacccaaagactgagtgagtcacctgttttcatggaca

SEQ ID NO: 11057 - DNA, 120 bp, Artificial Sequence
  ENSG00000009413_14 (sequence is synthesized)
gtagtcctgatgaggctctggtacatcttcttgctggtttggaaagtgatggatatcggggggaaagaaataggatgccatcaccatgtcgctcctttggaaataataaatatccacaaa

SEQ ID NO: 11058 - DNA, 120 bp, Artificial Sequence
  ENSG00000009413_15 (sequence is synthesized)
atagtgatgatgaagaaaatgaaccacagattgaaaaagaggaaatggagcttagtttggtgatgtcccagagatgggacagcaatattgaagaacattgtgccaaaaagagatcactgt

SEQ ID NO: 11059 - DNA, 120 bp, Artificial Sequence
  ENSG00000009413_16 (sequence is synthesized)
gcagaaatacccacagaagttcaactgaagatgatgactcatcttcaggagaagaaatggaatggagtgataacagtttgcttctagccagtctttctatacctcagttagatggaactg

SEQ ID NO: 11060 - DNA, 120 bp, Artificial Sequence
  ENSG00000009413_17 (sequence is synthesized)
cagatgaaaatagtgacaatccattgaacaatgaaaattctagaacccactcttctgtaattgcaacaagcaagctttcagttaaaccctccatctttcacaaagatgctgctacattag

SEQ ID NO: 11061 - DNA, 120 bp, Artificial Sequence
  ENSG00000009413_18 (sequence is synthesized)
aaccctcatcttctgctaagattacctttcagtgtaaacacacaagtgccctttcttcccatgttttgaacaaggaagatttaattgaagacctttcacagacaaacaaaaatacagaaa

SEQ ID NO: 11062 - DNA, 120 bp, Artificial Sequence
  ENSG00000009413_19 (sequence is synthesized)
aaggtctagataactcagtcacttcttttacaaacgaaagcacttattctatgaaataccctggatctttaagcagtactgttcattcagaaaattctcataaagagaatagtaagaaag

SEQ ID NO: 11063 - DNA, 120 bp, Artificial Sequence
  ENSG00000009413_20 (sequence is synthesized)
agatcctcccagtatcttcctgtgaaagtagtatttttgattatgaagaagatattccatctgttacaagacaagtaccaagtagaaaatatacaaacattagaaaaatcgaaaaggatt

SEQ ID NO: 11064 - DNA, 120 bp, Artificial Sequence
  ENSG00000009413_21 (sequence is synthesized)
ccccttttatacatatgcaccgtcaccctaacgagaatacattgggcaaaaattctttcaacttttctgacttaaatcattcaaaaaataaagtatcctctgaaggaaatgaaaaaggaa

SEQ ID NO: 11065 - DNA, 120 bp, Artificial Sequence
  ENSG00000009413_22 (sequence is synthesized)
acagcacagctctgagtagtttattcccttcatcatttactgaaaattgtgaattactgtcatgctcaggggagaatagaactatggtgcattctcttaatagcactgctgatgaaagtg

SEQ ID NO: 11066 - DNA, 120 bp, Artificial Sequence
  ENSG00000009413_23 (sequence is synthesized)
gactaaataaacttaaaattaggtatgaagaatttcaagaacataaaacagaaaagccaagcctcagccagcaagcagcacactatatgttttttcccagtgttgttctttctaactgtc

SEQ ID NO: 11067 - DNA, 120 bp, Artificial Sequence
  ENSG00000009413_24 (sequence is synthesized)
ttactagaccacagaaactatctcctgtcacatataaattacaacctggcaataaaccatcccggttaaaattgaataaaaggaaacttgcaggtcatcaggagacttctaccaaaagta

SEQ ID NO: 11068 - DNA, 120 bp, Artificial Sequence
  ENSG00000009413_25 (sequence is synthesized)
gtgagactggatccacaaaagataattttatacaaaataatccttgtaatagtaatcctgagaaggataatgcattggctagtgatttaactaaaaccactcgtggagcttttgaaaata

SEQ ID NO: 11069 - DNA, 120 bp, Artificial Sequence
  ENSG00000009413_26 (sequence is synthesized)
aaacacccacagatggttttatagactgtcactttggagatggaacgttagaaactgagcagtcctttggactatatggaaataaatacacacttagagccaaacgcaaggtaaattatg

SEQ ID NO: 11070 - DNA, 120 bp, Artificial Sequence
  ENSG00000009413_27 (sequence is synthesized)
agactgaagacagtgagtcaagttttgtaactcacaactcaaaaattagtctacctcatcccatggaaattggtgaaagtttagatggaactctcaaatcccgaaaacgaagaaaaatgt

SEQ ID NO: 11071 - DNA, 120 bp, Artificial Sequence
  ENSG00000009413_28 (sequence is synthesized)
ctaaaaagctgccccctgtcatcataaagtatattattattaatagatttagagggagaaaaaatatgcttgtgaagctaggaaaaatagactctaaagaaaaacaagtaatattaacag

SEQ ID NO: 11072 - DNA, 120 bp, Artificial Sequence
  ENSG00000009413_29 (sequence is synthesized)
aagaaaaaatggaactatataaaaagcttgcacctttgaaggacttttggccaaaagttcccgactcccctgcaaccaaatatcccatttatccactaacaccaaagaaaagtcacagaa

SEQ ID NO: 11073 - DNA, 120 bp, Artificial Sequence
  ENSG00000009413_30 (sequence is synthesized)
gaaagtcaaaacataaatctgctaagaaaaaaactggtaaacaacaaaggacaaataatgaaaatattaaaagaactttgtctttcaggaaaaaacggtcacatgctattctttctcctc

SEQ ID NO: 11074 - DNA, 120 bp, Artificial Sequence
  ENSG00000009413_31 (sequence is synthesized)
cctcaccatcttacaatgctgaaaccgaagattgtgacctgaattatagtgatgttatgtctaaactaggttttctttctgagagaagcacaagtcccataaattcttctccacctcgct

SEQ ID NO: 11075 - DNA, 120 bp, Artificial Sequence
  ENSG00000009413_32 (sequence is synthesized)
gctggtctcccacagatccaagagctgaagaaatcatggctgctgcagaaaaagaggcaatgctttttaagggtcctaatgtatataagaagactgttaattctcgtataggaaaaacta

SEQ ID NO: 11076 - DNA, 120 bp, Artificial Sequence
  ENSG00000009413_33 (sequence is synthesized)
gtcgcgcaagagcacagattaagaaatcaaaagcaaagcttgctaatccctctatagttactaagaaaaggaacaaacgaaatcagacaaataaactagtagatgatggaaaaaagaaac

SEQ ID NO: 11077 - DNA, 120 bp, Artificial Sequence
  ENSG00000009413_34 (sequence is synthesized)
caagagcaaaacaaaaaacaaatgagaaaggtacatcgagaaagcatacaacacttaaggatgaaaaaataaaatctcagtctggtgctgaggttaagtttgtactgaaacaccagaatg

SEQ ID NO: 11078 - DNA, 120 bp, Artificial Sequence
  ENSG00000009413_35 (sequence is synthesized)
tgtctgaatttgcaagtagttctggaggctctcaactactttttaaacagaaagatatgccactaatgggctctgctgtagatcatcccctttctgcttccctacccactggaattaatg

SEQ ID NO: 11079 - DNA, 120 bp, Artificial Sequence
  ENSG00000009413_36 (sequence is synthesized)
cacaacagaagttatctggctgcttttcttctttcttagaaagcaagaagtctgtagatttgcagacattccccagttcacgagatgatttgcatccatcagttgtttgtaattctatag

SEQ ID NO: 11080 - DNA, 120 bp, Artificial Sequence
  ENSG00000009413_37 (sequence is synthesized)
gacctggagtctcaaaaattaatgttcaaaggcctcataatcaaagtgctatgtttactctaaaggaatcaacgttaattcaaaaaaatatatttgacctttccaatcatttatctcagg

SEQ ID NO: 11081 - DNA, 120 bp, Artificial Sequence
  ENSG00000009413_38 (sequence is synthesized)
tagcacagaatacacagatatcttctggtatgtcctcaaagatagaagataatgcaaataatatacaaagaaactatttgtcatcaatcggaaagttaagtgaatatcgcaattccctag

SEQ ID NO: 11082 - DNA, 120 bp, Artificial Sequence
  ENSG00000009413_39 (sequence is synthesized)
aatcaaagctggaccaagcatatacccctaattttttgcattgcaaagacagtcagcagcagattgtgtgcatagcggaacagtcaaagcacagtgaaacttgttctccgggaaatacag

SEQ ID NO: 11083 - DNA, 120 bp, Artificial Sequence
  ENSG00000009413_40 (sequence is synthesized)
cttcagaggaaagccaaatgcctaataattgctttgtaacttccttgagaagtccaatcaaacaaatagcatgggagcaaaagcaaaggggctttattttagatatgtcaaattttaaac

SEQ ID NO: 11084 - DNA, 120 bp, Artificial Sequence
  ENSG00000009413_41 (sequence is synthesized)
ctgaaagagtaaaaccgaggtcgttatcagaagcaatttcacaaaccaaagcactttctcagtgtaaaaatcgaaatgtgtcaacaccttcagcatttggtgaaggacagtctggactgg

SEQ ID NO: 11085 - DNA, 120 bp, Artificial Sequence
  ENSG00000009413_42 (sequence is synthesized)
cagttctaaaagaattgttacaaaaaagacagcagaaagcacaaaatgcaaatactacacaagacccattatccaataaacatcaaccaaataaaaatatttctggttcccttgagcata

SEQ ID NO: 11086 - DNA, 120 bp, Artificial Sequence
  ENSG00000009413_43 (sequence is synthesized)
acaaagcaaataaacggacacgatcggtaacgtccccaagaaaacctcgaactcccagaagtacaaaacaaaaagaaaaaatccccaaacttctcaaagtagactctttaaatttacaaa

SEQ ID NO: 11087 - DNA, 120 bp, Artificial Sequence
  ENSG00000009413_44 (sequence is synthesized)
actctagccagttggataactctgtatcagatgatagtcccatctttttttcagatccaggctttgaaagttgttactcacttgaagatagtttatctcctgaacataattataattttg

SEQ ID NO: 11088 - DNA, 120 bp, Artificial Sequence
  ENSG00000009413_45 (sequence is synthesized)
gtcagactggattttgtagcttttattctggaagtcagtttgtcccagctgatcagaatttgcctcagaagttcctaagtgatgctgttcaggatctttttccaggacaagctatagaaa

SEQ ID NO: 11089 - DNA, 120 bp, Artificial Sequence
  ENSG00000009413_46 (sequence is synthesized)
aaaatgagtttttaagtcatgacaaccagaaatgtgatgaagacaagcatcataccacagactcagcctcatggattagatctggtactttaagtcctgaaatttttgagaagtcaacca

SEQ ID NO: 11090 - DNA, 120 bp, Artificial Sequence
  ENSG00000009413_47 (sequence is synthesized)
tagatagcaatgagaatcgtcgccacaaccagtggaaaaatagctttcatcctctaacaactcggtctaactcaataatggattctttctgtgttcagcaggcagaagactgtctaagtg

SEQ ID NO: 11091 - DNA, 120 bp, Artificial Sequence
  ENSG00000009413_48 (sequence is synthesized)
aaaaatctagattgaataggagttcagtaagcaaagaagtgtttcttagcctcccacagccaaacaattcagactggattcaaggtcacaccagaaaagaaatgggacagtctcttgact

SEQ ID NO: 11092 - DNA, 120 bp, Artificial Sequence
  ENSG00000009413_49 (sequence is synthesized)
cagccaatacctcttttactgcaatactctcctcccctgatggtgaacttgtagacgtggcctgtgaagatttagaactgtatgtttcaagaaacaatgatatgttgacaccaactcctg

SEQ ID NO: 11093 - DNA, 120 bp, Artificial Sequence
  ENSG00000009413_50 (sequence is synthesized)
atagttcaccaagatctactagctctccttcacaatctaaaaatggcagcttcacccctcgaactgctaacattctgaaaccacttatgtcccccccaagtagggaagaaattatggcaa

SEQ ID NO: 11094 - DNA, 120 bp, Artificial Sequence
  ENSG00000009413_51 (sequence is synthesized)
ctttgttggatcatgacctgtctgagactatttaccaggaaccattttgcagtaatccttctgatgtaccagaaaagcccagggagattggtggacggctcctcatggtagaaactcgac

SEQ ID NO: 11095 - DNA, 120 bp, Artificial Sequence
  ENSG00000009413_52 (sequence is synthesized)
ttgcaaatgatctggctgagtttgagggagacttttccttggaaggacttcgtctttggaaaacagcattctcagcaatgactcagaatccaaggccagggtcaccccttcgcagtggcc

SEQ ID NO: 11096 - DNA, 120 bp, Artificial Sequence
  ENSG00000009413_53 (sequence is synthesized)
aaggagttgtcaataaagggtcaagtaatagccctaagatggttgaagataaaaaaattgtgattatgccttgcaaatgtgccccaagtcgacaactggttcaagtgtggcttcaagcca

SEQ ID NO: 11097 - DNA, 120 bp, Artificial Sequence
  ENSG00000009413_54 (sequence is synthesized)
aagaagaatacgaacgttccaagaaactgcctaaaaccaagccaactggagttgtaaaatctgctgagaactttagctcttcagttaacccagatgacaaacctgtagtgcctccaaaaa

SEQ ID NO: 11098 - DNA, 120 bp, Artificial Sequence
  ENSG00000009413_55 (sequence is synthesized)
tggatgtaagtccatgtatactccccactacagcacataccaaggaggatgttgataattctcagattgctttacaagcaccaaccacgggatgtagtcaaactgcaagtgaaagtcaga

SEQ ID NO: 11099 - DNA, 120 bp, Artificial Sequence
  ENSG00000009413_56 (sequence is synthesized)
tgctgccaccagttgcctctgcaagtgatcccgaaaaagatgaagatgatgatgataactattacattagttatagctcccctgattctccagtaattcccccttggcaacaaccaatat

SEQ ID NO: 11100 - DNA, 120 bp, Artificial Sequence
  ENSG00000009413_57 (sequence is synthesized)
ccccagattccaaagcattaaatggagatgatagaccctcatcaccagtagaggagctgccttcattggcttttgagaacttcttaaagccaataaaagatggtatacaaaaaagcccct

SEQ ID NO: 11101 - DNA, 120 bp, Artificial Sequence
  ENSG00000009413_58 (sequence is synthesized)
gcagtgagcctcaagagcctctagtgatatctccaattaatactagggcaagaactgggaaatgtgaatcactttgctttcatagtacaccaatcatacagagaaaacttctggaaaggc

SEQ ID NO: 11102 - DNA, 120 bp, Artificial Sequence
  ENSG00000009413_59 (sequence is synthesized)
ttcctgaagcacctggccttagcccattatcaacagaaccaaaaacacagaagttgagtaataagaaaggaagtaatactgacactcttagaagagtactgttaacacaagcaaagaatc

SEQ ID NO: 11103 - DNA, 120 bp, Artificial Sequence
  ENSG00000009413_60 (sequence is synthesized)
aatttgcagcagtaaataccccacagaaagaaacttctcagattgatggaccatctttaaacaatacttacggtttcaaagtcagcatacaaaacttacaggaggcaaaagctttacatg

SEQ ID NO: 11104 - DNA, 120 bp, Artificial Sequence
  ENSG00000009413_61 (sequence is synthesized)
agatacaaaatcttaccctaatcagtgtggagttgcatgctcgaactagacgagacttagaaccggatcctgaatttgacccaatctgtgctctgttctactgcatctcatctgacactc

SEQ ID NO: 11105 - DNA, 120 bp, Artificial Sequence
  ENSG00000009413_62 (sequence is synthesized)
cactgccagatacagaaaaaacagaactcacaggtgtaatagtgattgataaagacaagacagttttcagtcaagatatcagatatcagactccattacttattagatctggaattacag

SEQ ID NO: 11106 - DNA, 120 bp, Artificial Sequence
  ENSG00000009413_63 (sequence is synthesized)
gactcgaagtcacctatgctgctgatgagaaggcactttttcatgaaattgcaaatataataaagaggtatgatcctgatattctgctaggatatgagattcagatgcattcctggggtt

SEQ ID NO: 11107 - DNA, 120 bp, Artificial Sequence
  ENSG00000009413_64 (sequence is synthesized)
acctcttacaaagggctgccgctttaagtattgacttatgtcggatgatctctcgggtgccagatgacaaaattgagaacagatttgcagctgaaagagatgagtatggatcatatacaa

SEQ ID NO: 11108 - DNA, 120 bp, Artificial Sequence
  ENSG00000009413_65 (sequence is synthesized)
tgagtgagataaatattgttggccgaattacactaaatctttggagaatcatgagaaatgaggtggctctaactaactacacctttgaaaatgtgagctttcatgttcttcatcagcgtt

SEQ ID NO: 11109 - DNA, 120 bp, Artificial Sequence
  ENSG00000009413_66 (sequence is synthesized)
ttcccctctttacctttcgagtcttgtcagactggtttgataacaagacagatctatacagatggaaaatggttgatcattatgttagccgtgtccgtggaaatctccaaatgttagaac

SEQ ID NO: 11110 - DNA, 120 bp, Artificial Sequence
  ENSG00000009413_67 (sequence is synthesized)
agctggacctgattgggaaaaccagtgagatggctagactttttggcattcagtttttacatgtactgacaaggggttcacagtaccgtgtggaatcaatgatgttgcgtattgctaaac

SEQ ID NO: 11111 - DNA, 120 bp, Artificial Sequence
  ENSG00000009413_68 (sequence is synthesized)
caatgaactatattcctgtgacacctagtgttcagcaaagatcccagatgagagccccacagtgtgttcctctaattatggagcctgaatcccgcttctatagcaactctgttctcgttt

SEQ ID NO: 11112 - DNA, 120 bp, Artificial Sequence
  ENSG00000009413_69 (sequence is synthesized)
tggatttccaatcactttatccttctattgtgattgcatataactactgcttttccacctgccttggccatgtggagaacttgggaaagtatgatgagttcaaatttggctgtacctctc

SEQ ID NO: 11113 - DNA, 120 bp, Artificial Sequence
  ENSG00000009413_70 (sequence is synthesized)
tgagagtacctccagatttactttaccaagttaggcatgatatcacagtgtcccccaatggagtagcttttgtcaagccttcagtaagaaaaggtgtactaccaagaatgcttgaagaaa

SEQ ID NO: 11114 - DNA, 120 bp, Artificial Sequence
  ENSG00000009413_71 (sequence is synthesized)
ttttgaagactagatttatggtgaagcagtcaatgaaggcttacaagcaagacagagccctgtcacgaatgcttgatgcgcgtcagttgggacttaagctgatagcaaatgtcacatttg

SEQ ID NO: 11115 - DNA, 120 bp, Artificial Sequence
  ENSG00000009413_72 (sequence is synthesized)
gctatacatctgctaatttttctgggagaatgccatgcattgaggttggcgatagtattgttcacaaagccagagagaccttggaacgagctattaaactggtgaatgataccaagaaat

SEQ ID NO: 11116 - DNA, 120 bp, Artificial Sequence
  ENSG00000009413_73 (sequence is synthesized)
ggggggctagggttgtatatggcgatactgacagtatgtttgtgctactgaaaggagccactaaggagcagtcttttaagattggtcaggaaattgccgaagctgtaactgctaccaatc

SEQ ID NO: 11117 - DNA, 120 bp, Artificial Sequence
  ENSG00000009413_74 (sequence is synthesized)
ctaaaccagtgaaattgaagtttgaaaaggtatatttgccctgtgttttacaaacaaaaaagaggtatgtgggttacatgtatgaaacactggatcagaaggacccagtatttgatgcaa

SEQ ID NO: 11118 - DNA, 120 bp, Artificial Sequence
  ENSG00000009413_75 (sequence is synthesized)
aaggaatagaaacagtcagaagagattcctgccctgctgtttctaagatacttgagcgttctctaaagctgctatttgaaacgagagatataagtctaattaaacagtatgttcagcgac

SEQ ID NO: 11119 - DNA, 120 bp, Artificial Sequence
  ENSG00000009413_76 (sequence is synthesized)
aatgtatgaagcttctggaaggaaaggccagcatacaagactttatctttgccaaggaatacagaggaagtttttcttataaaccaggagcttgtgtgccagcccttgaacttacaagga

SEQ ID NO: 11120 - DNA, 120 bp, Artificial Sequence
  ENSG00000009413_77 (sequence is synthesized)
aaatgctgacttatgaccggcgctctgagcctcaggttggggagcgagtgccatacgtcatcatttatgggacccccggagtaccacttatccagcttgtaaggcgcccagtggaagtcc

SEQ ID NO: 11121 - DNA, 120 bp, Artificial Sequence
  ENSG00000009413_78 (sequence is synthesized)
tgcaggacccaactctgagactgaatgctacttactatattaccaagcaaatccttccacccttggcaagaatcttctcacttattggtattgatgtcttcagctggtatcatgaattac

SEQ ID NO: 11122 - DNA, 120 bp, Artificial Sequence
  ENSG00000009413_79 (sequence is synthesized)
caaggatccataaagctaccagctcctcgcgaagtgaacctgaagggcggaaaggcactatttcacaatattttactaccttacactgtcctgtgtgtgatgacctaactcagcatggca

SEQ ID NO: 11123 - DNA, 120 bp, Artificial Sequence
  ENSG00000009413_80 (sequence is synthesized)
tctgtagtaaatgtcggagccaacctcagcatgttgcagtcatcctcaaccaagaaatccgggagttggaacgtcaacaggagcaacttgtaaagatatgcaagaactgtacaggttgct

SEQ ID NO: 11124 - DNA, 120 bp, Artificial Sequence
  ENSG00000009413_81 (sequence is synthesized)
ttgatcgacacatcccatgtgtttctctgaactgcccagtacttttcaaactctcccgagtaaatagagaattgtccaaggcaccatatctccggcagttattagaccagttttaaattg

SEQ ID NO: 11125 - DNA, 120 bp, Artificial Sequence
  ENSG00000009413_82 (sequence is synthesized)
tcaatatcacagtattacaggtgctatttttttcagtgcttaccactaaactgttgtgcatggtgctttttaactttcatcgagtcaaggatgttcactgtctgttatctgaagactatg

SEQ ID NO: 11126 - DNA, 120 bp, Artificial Sequence
  ENSG00000009413_83 (sequence is synthesized)
aagacttctatgctaaccgaattaaaatgtacttgttgatctctgaatagctcacttcttacaatgtacaaattcctcattctgtcaccttttaaacattgttttataatgcaggtgttg

SEQ ID NO: 11127 - DNA, 120 bp, Artificial Sequence
  ENSG00000009413_84 (sequence is synthesized)
gatttgctccagtatgtgtaccatcttgtaaattcatttgagtagatcatgtttacttcccagtggaaggagcactgaaaacctcttaaagaaaaagcatttgtgtgttttccttgaact

SEQ ID NO: 11128 - DNA, 120 bp, Artificial Sequence
  ENSG00000009413_85 (sequence is synthesized)
gtctgtatcaagacgtgttacttcgagatatccattcactttataattttgactgcaaaatattttgtaaatacacttttttacttttcaaacgagcaaaataatgtgcaatgattttta

SEQ ID NO: 11129 - DNA, 120 bp, Artificial Sequence
  ENSG00000009413_86 (sequence is synthesized)
tacaaatgattttcaagttgtttggtatatttcctctaggttttgcttgactcaaagtagatcgttattttgatcaaactgtgcaaacagtagtaccacgtgtagcattttgaaacatta

SEQ ID NO: 11130 - DNA, 120 bp, Artificial Sequence
  ENSG00000009413_87 (sequence is synthesized)
tttttttttaaaaaatgctgtcttgctttagctattaatggggcattgtgaggaactgtgcaaagacatttttgttacaaacctgtgggcctgttgcaatactttaaaaataaaaaattt

SEQ ID NO: 11131 - DNA, 120 bp, Artificial Sequence
  ENSG00000009413_88 (sequence is synthesized)
tattccatttgcttgttttgtatagacatttctattgcttctaaatatacttaaaatattttctttccttatgtactgtacagttaatcttatttgccatcatcttgaacacaaaatgtg

SEQ ID NO: 11132 - DNA, 120 bp, Artificial Sequence
  ENSG00000009413_89 (sequence is synthesized)
tatttagaatatttgtataactgtgtaaaataaaaaaggaattatgtggtcagtgcattgttttttaaactggaaatcattttgttttaaaagttaataatggaaaccatattaaaattg

SEQ ID NO: 11133 - DNA, 120 bp, Artificial Sequence
  ENSG00000009413_90 (sequence is synthesized)
aaaacccaagacaagccacataaaagcaacctaaaaattaaactgtcatcatattatttgttttaaaactatggaataatatatctgaggaagatttctctcaaaattgtttttctcaat

SEQ ID NO: 11134 - DNA, 120 bp, Artificial Sequence
  ENSG00000009413_91 (sequence is synthesized)
tcttgactactgggatatctgagctgatctgtgtgttagaaatattggatgtcttaaaagatttgtaacaagatataagtacataaggaaagtaataaaacaggagagcttacatagaaa

SEQ ID NO: 11135 - DNA, 120 bp, Artificial Sequence
  ENSG00000009413_92 (sequence is synthesized)
gcatcttaaagagtaaataggagaaagggagttttctttggcattagacaagagtcatagccaggaaagttactcttgataaaatttttgttataatgacttcctcattaccttacttta

SEQ ID NO: 11136 - DNA, 120 bp, Artificial Sequence
  ENSG00000009413_93 (sequence is synthesized)
agtggttaccataattaaattttaaccttttattgtattggatctttttaatctatacacttaacagaaacaaaccttgacattagtgtattacaaggaataaacgattttaaaaacaaa

SEQ ID NO: 11137 - DNA, 120 bp, Artificial Sequence
  ENSG00000009413_94 (sequence is synthesized)
ccaaaatgttgtttagaaataagatattcggtcaatataatgatttaatcattatagagtattagtaagatttactatatagcttatgcgtttgtcaattactgttatacttaagtagag

SEQ ID NO: 11138 - DNA, 120 bp, Artificial Sequence
  ENSG00000009413_95 (sequence is synthesized)
tttctaaaatgcaaaactacagaggtaatagactttaatgttttaagtgagtttttttttttttcttgtgtctaaggtagcaataactagaaaggtctatagctataataaaatattggg

SEQ ID NO: 11139 - DNA, 120 bp, Artificial Sequence
  ENSG00000009413_96 (sequence is synthesized)
ttcctatgacccttgaaagcagagttactcttgggaagattttatactcacttcccaccaccatcactattttcatcagacaagggataggaaaagcagtgttctgttctcaagattgag

SEQ ID NO: 11140 - DNA, 120 bp, Artificial Sequence
  ENSG00000009413_97 (sequence is synthesized)
gggccagtgaaagacaaatatttgtttagcctctaactaacttcccagttgtacttgaggttggtttttctgtggtgctgaaataatggagaactgtataaagttccattgtattattca

SEQ ID NO: 11141 - DNA, 120 bp, Artificial Sequence
  ENSG00000009694_0 (sequence is synthesized)
gactgcttgcattaaaggacttcctcatcctttttttcatgaaactgagcttgcttaatcagagatggagcaaactgactgcaaaccctaccagcctctaccaaaagtcaagcatgaaat

SEQ ID NO: 11142 - DNA, 120 bp, Artificial Sequence
  ENSG00000009694_1 (sequence is synthesized)
ggatctagcttacaccagttcttctgatgagagtgaagatggaagaaaaccaagacagtcatacaactccagggagaccctgcacgagtataaccaggagctgaggatgaattacaatag

SEQ ID NO: 11143 - DNA, 120 bp, Artificial Sequence
  ENSG00000009694_2 (sequence is synthesized)
ccagagtagaaagaggaaagaagtagaaaaatctactcaagagatggaattctgtgaaacctctcacactctgtgctctggctaccaaacagacatgcacagcgtttctcggcatggcta

SEQ ID NO: 11144 - DNA, 120 bp, Artificial Sequence
  ENSG00000009694_3 (sequence is synthesized)
ccagctagagatgggatctgatgtggacacagagacagaaggtgctgcctcacctgaccatgcactaagaatgtggataaggggaatgaaatcagagcatagttcctgtttgtccagccg

SEQ ID NO: 11145 - DNA, 120 bp, Artificial Sequence
  ENSG00000009694_4 (sequence is synthesized)
ggccaactctgcattatccttgactgacactgaccatgaaaggaagtctgatggggaaaatggtttcaaattctctcctgtttgttgtgacatggaggctcaagctgggtctactcaaga

SEQ ID NO: 11146 - DNA, 120 bp, Artificial Sequence
  ENSG00000009694_5 (sequence is synthesized)
tgtgcagagcagcccacacaaccagttcaccttcagacccctcccaccgccacctccgcctcctcatgcctgcacctgtgccaggaagccaccccctgcagcggactctcttcagaggag

SEQ ID NO: 11147 - DNA, 120 bp, Artificial Sequence
  ENSG00000009694_6 (sequence is synthesized)
atcaatgactacccgcagccagcccagcccagctgctccagctcccccaaccagcacgcaggattcagtccatctgcataacagctgggtcctgaacagcaacataccattggagaccag

SEQ ID NO: 11148 - DNA, 120 bp, Artificial Sequence
  ENSG00000009694_7 (sequence is synthesized)
gcatttcctgttcaaacatggatctggttcctctgcgatcttcagtgcagccagtcagaactaccctctgacatccaataccgtgtactcgccccctcccaggcctcttcctcgaagcac

SEQ ID NO: 11149 - DNA, 120 bp, Artificial Sequence
  ENSG00000009694_8 (sequence is synthesized)
cttttcccgacctgcctttacctttaacaaaccttacaggtgctgcaactggaagtgcacagcattgagcgccactgcaatcacagtgactttggccttgttactagcctatgtgattgc

SEQ ID NO: 11150 - DNA, 120 bp, Artificial Sequence
  ENSG00000009694_9 (sequence is synthesized)
agtgcatttgttcggcctgacttggcagttgcaaccagttgaaggagagctgtatgcaaatggagttagcaaagggaacagggggaccgagtccatggacactacttactctccaattgg

SEQ ID NO: 11151 - DNA, 120 bp, Artificial Sequence
  ENSG00000009694_10 (sequence is synthesized)
aggaaaagtttctgataaatcagagaaaaaagtgtttcagaagggacgggcgatagacactggagaagttgacattggtgcacaggtcatgcagaccattccacctggtttattctggcg

SEQ ID NO: 11152 - DNA, 120 bp, Artificial Sequence
  ENSG00000009694_11 (sequence is synthesized)
tttccagattactatccaccatccaatatatctgaagttcaatatttctttagccaaggactctctgctgggaatttatggcagaagaaacattccacctacacatactcagtttgattt

SEQ ID NO: 11153 - DNA, 120 bp, Artificial Sequence
  ENSG00000009694_12 (sequence is synthesized)
tgtaaaactaatggatggcaaacagctggtcaagcaggactccaagggctctgatgatacacagcactcccctcggaacctgatcttaacttcgcttcaggagacaggtttcatagagta

SEQ ID NO: 11154 - DNA, 120 bp, Artificial Sequence
  ENSG00000009694_13 (sequence is synthesized)
tatggatcaaggaccttggtatctggcgttttacaatgatggaaaaaagatggagcaagtattcgtgttaactacagcaattgaaataatggatgactgttcaaccaattgcaatggaaa

SEQ ID NO: 11155 - DNA, 120 bp, Artificial Sequence
  ENSG00000009694_14 (sequence is synthesized)
tggagagtgtatctctggccattgtcattgtttcccaggattccttggacctgactgtgctagagattcctgccctgtgctgtgtggtgggaatggagaatacgagaaaggacactgtgt

SEQ ID NO: 11156 - DNA, 120 bp, Artificial Sequence
  ENSG00000009694_15 (sequence is synthesized)
ctgccggcatggctggaaggggccagagtgtgacgttccggaagaacaatgcattgatccaacatgctttggccacggcacctgcatcatgggagtctgcatctgtgtgccaggatacaa

SEQ ID NO: 11157 - DNA, 120 bp, Artificial Sequence
  ENSG00000009694_16 (sequence is synthesized)
aggagaaatatgcgaggaagaggactgcctagacccaatgtgttccaaccatggcatctgtgtaaaaggagaatgtcactgttctactggctggggaggagttaactgtgaaacaccact

SEQ ID NO: 11158 - DNA, 120 bp, Artificial Sequence
  ENSG00000009694_17 (sequence is synthesized)
tcctgtatgtcaagagcagtgctcaggacacggaacttttcttctggacgctggagtatgcagctgtgatcccaagtggacaggatctgactgctcaacagagctgtgtaccatggagtg

SEQ ID NO: 11159 - DNA, 120 bp, Artificial Sequence
  ENSG00000009694_18 (sequence is synthesized)
tggtagccatggagtctgctcaagaggaatttgccagtgtgaagaaggctgggtaggaccaacatgtgaggaacgctcctgtcattctcattgtactgagcatggccaatgcaaagatgg

SEQ ID NO: 11160 - DNA, 120 bp, Artificial Sequence
  ENSG00000009694_19 (sequence is synthesized)
aaaatgtgagtgtagccctggatgggagggcgaccactgcacaattgctcactacttagatgctgtccgagatggctgcccagggctctgctttggaaatggacgatgtaccctggatca

SEQ ID NO: 11161 - DNA, 120 bp, Artificial Sequence
  ENSG00000009694_20 (sequence is synthesized)
aaatggttggcactgtgtgtgtcaggtgggttggagtgggacaggctgcaatgttgtcatggaaatgctttgtggagataacttggacaatgatggagatggtttaaccgactgtgtgga

SEQ ID NO: 11162 - DNA, 120 bp, Artificial Sequence
  ENSG00000009694_21 (sequence is synthesized)
tcctgactgttgtcaacaaagcaactgttatataagtcctctctgccagggctcaccagatcctcttgacctcattcagcaaagccaaactctcttctctcagcacacttcaagactttt

SEQ ID NO: 11163 - DNA, 120 bp, Artificial Sequence
  ENSG00000009694_22 (sequence is synthesized)
ttatgatcgaatcaaattcctcattggcaaggacagtactcatgtcattcctcctgaggtgtcatttgacagcaggcgtgcctgtgtgattcgaggccaagtggtggccatagatggaac

SEQ ID NO: 11164 - DNA, 120 bp, Artificial Sequence
  ENSG00000009694_23 (sequence is synthesized)
tcctctagtgggagtgaatgtcagtttcttgcaccacagtgattatgggtttaccatcagccggcaagatggaagctttgacctcgtggccatcggtggcatctctgtcatcttaatctt

SEQ ID NO: 11165 - DNA, 120 bp, Artificial Sequence
  ENSG00000009694_24 (sequence is synthesized)
cgaccgatcccctttcctgcctgagaagagaacactctggttgccttggaatcagtttattgtggtagagaaagtcaccatgcagagagttgtatcagacccgccatcctgcgatatctc

SEQ ID NO: 11166 - DNA, 120 bp, Artificial Sequence
  ENSG00000009694_25 (sequence is synthesized)
caactttatcagcccaaaccctattgtgcttccttcaccgctcacatcatttggagggtcctgtccagagaggggaactattgttcctgagctgcaggttgtacaggaggaaattcccat

SEQ ID NO: 11167 - DNA, 120 bp, Artificial Sequence
  ENSG00000009694_26 (sequence is synthesized)
tccctccagctttgtgaggctgagttacctgagcagccgcacccctgggtataaaaccctgctacggatccttctgacacattcaacgattcctgtaggcatgataaaagtacacctcac

SEQ ID NO: 11168 - DNA, 120 bp, Artificial Sequence
  ENSG00000009694_27 (sequence is synthesized)
agtagctgtggaagggcgactcacacagaagtggtttcccgccgcaattaatcttgtctacacatttgcttggaacaagaccgacatctatggacagaaggtttggggcctggcagaggc

SEQ ID NO: 11169 - DNA, 120 bp, Artificial Sequence
  ENSG00000009694_28 (sequence is synthesized)
tttggtatctgtgggatatgaatatgaaacgtgccctgactttattctctgggagcaaaggacagtcgttttacaaggttttgagatggatgcttctaacctaggaggctggtctttgaa

SEQ ID NO: 11170 - DNA, 120 bp, Artificial Sequence
  ENSG00000009694_29 (sequence is synthesized)
taagcatcacattttgaatcctcaaagtggaatcatacataaagggaatggagaaaatatgttcatttcccagcagcccccagtcatatcaaccataatgggtaatggacaccaaaggag

SEQ ID NO: 11171 - DNA, 120 bp, Artificial Sequence
  ENSG00000009694_30 (sequence is synthesized)
tgtagcctgcaccaactgcaatggcccagcccacaacaacaaactctttgctcctgtcgccttagcttctggccctgatggcagtgtgtatgttggcgacttcaattttgtaaggagaat

SEQ ID NO: 11172 - DNA, 120 bp, Artificial Sequence
  ENSG00000009694_31 (sequence is synthesized)
atttccctcgggaaactccgttagtattttggaattaagaaacagagataccagacatagcacaagtcctgctcacaaatactatctggctatggaccctgtgtctgaatcactctatct

SEQ ID NO: 11173 - DNA, 120 bp, Artificial Sequence
  ENSG00000009694_32 (sequence is synthesized)
atcagacaccaatactcgcaaagtctacaagttgaaatctcttgtggagacgaaagatctgtccaagaattttgaagtggtggcaggaactggtgatcagtgccttccctttgaccagag

SEQ ID NO: 11174 - DNA, 120 bp, Artificial Sequence
  ENSG00000009694_33 (sequence is synthesized)
tcattgtggagatggtgggagagcatcggaagcttcactgaatagccctcgaggcatcacagttgataggcatggatttatttactttgtggatgggactatgattcgcaaaattgatga

SEQ ID NO: 11175 - DNA, 120 bp, Artificial Sequence
  ENSG00000009694_34 (sequence is synthesized)
gaatgctgtgatcacaactgtaatcggctcaaatggtctgacttccacacaaccactgagctgtgactcaggaatggacatcactcaggtgcgattagagtggccaacagaccttgcagt

SEQ ID NO: 11176 - DNA, 120 bp, Artificial Sequence
  ENSG00000009694_35 (sequence is synthesized)
aaatcctatggacaattcattgtatgtcttggataacaacattgtgctgcaaatttctgagaacaggcgtgttcggatcatcgcaggacgccccattcactgccaggtgccaggcatcga

SEQ ID NO: 11177 - DNA, 120 bp, Artificial Sequence
  ENSG00000009694_36 (sequence is synthesized)
tcatttcctggtcagcaaggtagcaattcactccactctagagtcagcgagggccatcagtgtctcccacagcgggctgctcttcatagctgaaacagacgagaggaaagtaaaccgcat

SEQ ID NO: 11178 - DNA, 120 bp, Artificial Sequence
  ENSG00000009694_37 (sequence is synthesized)
tcagcaagtaaccaccaatggggagatctacatcatcgctggtgcccccactgactgtgactgcaaaattgatccaaactgtgactgtttttcaggtgatggtggctatgccaaagatgc

SEQ ID NO: 11179 - DNA, 120 bp, Artificial Sequence
  ENSG00000009694_38 (sequence is synthesized)
aaagatgaaagccccttcctccttagcagtgtcgcctgatggaaccctctatgtggcagacctcggaaatgttcgaattcgtaccatcagcaggaaccaagcccacctgaatgacatgaa

SEQ ID NO: 11180 - DNA, 120 bp, Artificial Sequence
  ENSG00000009694_39 (sequence is synthesized)
catttatgagattgcttcacccgctgatcaggaactgtaccagttcactgtaaatggaacccacctacacaccctgaacttgataacaagggactatgtttataacttcacctacaattc

SEQ ID NO: 11181 - DNA, 120 bp, Artificial Sequence
  ENSG00000009694_40 (sequence is synthesized)
tgaaggtgacttgggcgcgattaccagcagcaatggcaattcagtgcacattcgccgtgatgcaggcggaatgccgctatggcttgtggtgcctggcggacaagtatactggctgactat

SEQ ID NO: 11182 - DNA, 120 bp, Artificial Sequence
  ENSG00000009694_41 (sequence is synthesized)
aagcagcaatggagtcctgaaaagagtgtcagcccaaggctataatctggccttaatgacctatccaggaaacacagggcttctggctaccaaaagtaacgaaaatggatggacaaccgt

SEQ ID NO: 11183 - DNA, 120 bp, Artificial Sequence
  ENSG00000009694_42 (sequence is synthesized)
ttatgagtatgaccccgagggacacctgaccaatgcaacgtttcccactggagaggtcagcagcttccacagtgacctggagaagctgacaaaagtggagctagatacttccaaccgtga

SEQ ID NO: 11184 - DNA, 120 bp, Artificial Sequence
  ENSG00000009694_43 (sequence is synthesized)
aaatgtcctcatgtcaaccaacttgacggcaactagtaccatatatattttaaaacaagaaaatactcaaagtacctatcgggtgaatccagatggttccctgcgtgtcacttttgccag

SEQ ID NO: 11185 - DNA, 120 bp, Artificial Sequence
  ENSG00000009694_44 (sequence is synthesized)
cgggatggagatcggcctcagctcagagccccacatcctggcaggggcagtcaaccctaccctgggcaaatgcaacatctcattgcccggagagcacaatgcaaacctcatcgagtggcg

SEQ ID NO: 11186 - DNA, 120 bp, Artificial Sequence
  ENSG00000009694_45 (sequence is synthesized)
gcagaggaaggagcaaaacaaaggcaatgtttcggcttttgaaaggaggctgagggcccacaacagaaacctactctccatagattttgatcatataacccgcacaggaaagatctatga

SEQ ID NO: 11187 - DNA, 120 bp, Artificial Sequence
  ENSG00000009694_46 (sequence is synthesized)
tgaccatcgaaaattcacccttcgaattctttatgaccagactgggcgacccattctgtggtctcctgtaagcagatataatgaagtgaacatcacatattcaccttcgggattggtgac

SEQ ID NO: 11188 - DNA, 120 bp, Artificial Sequence
  ENSG00000009694_47 (sequence is synthesized)
gtttattcaaagaggaacgtggaatgaaaaaatggaatatgaccagagtgggaaaattatttcaagaacttgggctgatgggaaaatttggagctatacctacttagaaaaatctgtgat

SEQ ID NO: 11189 - DNA, 120 bp, Artificial Sequence
  ENSG00000009694_48 (sequence is synthesized)
gcttctcctacacagccagcggcgttacatctttgagtatgaccaaccagattgtctgctctcagtcaccatgcctagcatggtgcgtcacagcttacaaaccatgctttcagtgggcta

SEQ ID NO: 11190 - DNA, 120 bp, Artificial Sequence
  ENSG00000009694_49 (sequence is synthesized)
ctaccggaacatctacaccccaccggacagtagcacttcttttatccaagactatagtcgagatggccgattgctacagaccctgcatctggggacagggcgcagagtcttatacaagta

SEQ ID NO: 11191 - DNA, 120 bp, Artificial Sequence
  ENSG00000009694_50 (sequence is synthesized)
caccaagcaagcaaggctttctgaggttctctatgataccactcaggtcacattaacatatgaagagtcttctggagtgattaagacaatacacctgatgcatgacggattcatctgcac

SEQ ID NO: 11192 - DNA, 120 bp, Artificial Sequence
  ENSG00000009694_51 (sequence is synthesized)
aatcagatacaggcaaacaggacctcttattggacgccagattttcagattcagtgaagaaggccttgtgaatgcacggttcgactacagctacaacaatttccgagtcacaagcatgca

SEQ ID NO: 11193 - DNA, 120 bp, Artificial Sequence
  ENSG00000009694_52 (sequence is synthesized)
agctgtaatcaatgaaacccctttgcctatagatctttaccgatatgttgatgtctctggcagaacagagcagtttggaaaattcagtgtaattaattacgatttaaatcaggtcataac

SEQ ID NO: 11194 - DNA, 120 bp, Artificial Sequence
  ENSG00000009694_53 (sequence is synthesized)
tgaagtccaatatgaaatcctaaaggcaattgcctactggatgaccattcaatatgataatgtgggccgcatggtaatatgtgacataagggtaggagtagatgccaatataacaaggta

SEQ ID NO: 11195 - DNA, 120 bp, Artificial Sequence
  ENSG00000009694_54 (sequence is synthesized)
cttctatgaatacgatgctgatgggcaacttcagactgtttctgtaaatgacaaaacccagtggcgttatagttacgatctgaatggaaacatcaacctcttaagccatgggaagagtgc

SEQ ID NO: 11196 - DNA, 120 bp, Artificial Sequence
  ENSG00000009694_55 (sequence is synthesized)
tcgtcttactcctctccgatatgacctccgagaccgcatcaccagattaggagaaattcagtataaaatggatgaagatggctttctgaggcagaggggaaatgatatttttgaatataa

SEQ ID NO: 11197 - DNA, 120 bp, Artificial Sequence
  ENSG00000009694_56 (sequence is synthesized)
ttctaatggcctgctgcagaaagcctacaataaggcttctggctggactgtgcagtattactatgatgggcttgggcgacgtgtcgcgagtaagtccagcctagggcagcaccttcagtt

SEQ ID NO: 11198 - DNA, 120 bp, Artificial Sequence
  ENSG00000009694_57 (sequence is synthesized)
cttttatgcagaccttaccaaccccataagagttactcatttgtacaaccacacaagctcggagattacatctctgtattatgatctccaaggtcaccttattgccatggagttaagcag

SEQ ID NO: 11199 - DNA, 120 bp, Artificial Sequence
  ENSG00000009694_58 (sequence is synthesized)
tggtgaagaatattatgtagcctgtgataatacaggtaccccactagctgtgttcagcagccgaggtcaggtcataaaggagatactatacacaccttatggcgatatctatcatgacac

SEQ ID NO: 11200 - DNA, 120 bp, Artificial Sequence
  ENSG00000009694_59 (sequence is synthesized)
ttaccctgactttcaggtcattattggttttcatggaggactctatgatttccttactaaattagtgcacctggggcaaagggattatgatgttgttgctggcagatggacaacgcctaa

SEQ ID NO: 11201 - DNA, 120 bp, Artificial Sequence
  ENSG00000009694_60 (sequence is synthesized)
tcatcacatatggaaacagttgaacctccttcctaaaccattcaacctctactcctttgaaaataactacccagttggcaaaattcaagatgttgcaaagtataccacagacatcagaag

SEQ ID NO: 11202 - DNA, 120 bp, Artificial Sequence
  ENSG00000009694_61 (sequence is synthesized)
ttggttggagctatttggtttccaattacacaatgtactacctggatttcccaaacctgaattagaaaatttagaattaacttacgagcttctacggcttcagacaaaaactcaagagtg

SEQ ID NO: 11203 - DNA, 120 bp, Artificial Sequence
  ENSG00000009694_62 (sequence is synthesized)
ggatcctggaaagactatcctgggcattcagtgtgaactccagaaacagctcaggaatttcatttccttggaccaactacctatgactccccgatacaatgatggacggtgccttgaagg

SEQ ID NO: 11204 - DNA, 120 bp, Artificial Sequence
  ENSG00000009694_63 (sequence is synthesized)
agggaagcaaccaaggtttgctgctgtcccttctgtttttgggaaaggtataaaatttgccatcaaggatggcatagtaacagctgatattataggagtagccaatgaagatagcaggcg

SEQ ID NO: 11205 - DNA, 120 bp, Artificial Sequence
  ENSG00000009694_64 (sequence is synthesized)
gcttgctgccattctcaataatgcccattacctggaaaacctacattttaccatagaggggagggacactcactacttcattaagcttgggtctctggaggaagacctggtgctcatcgg

SEQ ID NO: 11206 - DNA, 120 bp, Artificial Sequence
  ENSG00000009694_65 (sequence is synthesized)
taacactggggggaggcggattctggagaatggtgtcaatgtcactgtgtcccagatgacttctgtgttgaatgggaggactagacggtttgcagatattcagctccagcatggagccct

SEQ ID NO: 11207 - DNA, 120 bp, Artificial Sequence
  ENSG00000009694_66 (sequence is synthesized)
gtgcttcaacatccggtatgggacaactgtcgaagaggaaaagaatcacgtgttggagattgccagacagcgcgcagtggcccaggcctggactaaggaacaaagaaggctgcaagaggg

SEQ ID NO: 11208 - DNA, 120 bp, Artificial Sequence
  ENSG00000009694_67 (sequence is synthesized)
ggaagaggggattagggcatggacagaaggggaaaagcagcagcttttgagcactgggcgggtacaaggttacgatgggtattttgttttgtctgttgagcagtatttagaactttctga

SEQ ID NO: 11209 - DNA, 120 bp, Artificial Sequence
  ENSG00000009694_68 (sequence is synthesized)
cagtgccaataatattcactttatgagacagagcgaaataggcaggaggtaacaaaaatatctctgcctttgcgtcaccaaagactgcctgtttttaaaacataaaatggtttattgtat

SEQ ID NO: 11210 - DNA, 120 bp, Artificial Sequence
  ENSG00000009694_69 (sequence is synthesized)
tggttttctagatcagaactctgtatatgtaaatatggaggaaaaacatatccaactgcctttcaatgtgacggaagatggtattttaatattgtttgtttaaactctttaagaaatgac

SEQ ID NO: 11211 - DNA, 120 bp, Artificial Sequence
  ENSG00000009694_70 (sequence is synthesized)
agagatttttagttcttgtgtggcagtattcaaaataacacaagtagaactcaaacagctaaaaacagttttcagaaagcaccactttcaatttgccgagccatgcatatgttccaatat

SEQ ID NO: 11212 - DNA, 120 bp, Artificial Sequence
  ENSG00000009694_71 (sequence is synthesized)
ccagaaagaacccaaggttctctatctctattgtgagaagcagtttcatccttaactgttggcagaacttacgggctatttgaataggtggtgcaatagtatctgaaacttgcctttcga

SEQ ID NO: 11213 - DNA, 120 bp, Artificial Sequence
  ENSG00000009694_72 (sequence is synthesized)
aagactgccagccctttgacgttttccagatctgttataggaaacttaaaaacaggtgtaaaatgtcttcagccaccatctcctagagtgaggacccaattgcccttccttcttgattat

SEQ ID NO: 11214 - DNA, 120 bp, Artificial Sequence
  ENSG00000009694_73 (sequence is synthesized)
tcctccttgcttgttaaagtaaatgccatattgttgtgctgtgttttggcgtgtggtggctgggttctgtctaccatgcttccctgtgggtgtggtaaccagactgtatagccgctattt

SEQ ID NO: 11215 - DNA, 120 bp, Artificial Sequence
  ENSG00000009694_74 (sequence is synthesized)
gctcgtgtgtacatgataccaaagcagctggccagcgtgacctctctcacacgacctgttttgactcaattttttactaaaagttgttcagctgtattggtatcatgtaaacatagcttt

SEQ ID NO: 11216 - DNA, 120 bp, Artificial Sequence
  ENSG00000009694_75 (sequence is synthesized)
tattaacctgggtaggaatttctcatttatatataggatgtgttttggtcatagtttcacattagtgattcagtatctatacactgacccaatggttttgtgcacatgaacggtaattta

SEQ ID NO: 11217 - DNA, 120 bp, Artificial Sequence
  ENSG00000009694_76 (sequence is synthesized)
cttaaaagtatgattctggtacaaaaacaaacaaaggctttagcaggcatacgtgtctgggatgccgatacatacattaactactactgcagaaattcataagagccaaaaccttaaaaa

SEQ ID NO: 11218 - DNA, 120 bp, Artificial Sequence
  ENSG00000009694_77 (sequence is synthesized)
aatagacctggtacttaagtgaaagtactaaagggaagaccagaccaaacatcacagcagttgctgccacattgtttcagcccacttagatttatctttcaaatgtacaattctgtattg

SEQ ID NO: 11219 - DNA, 120 bp, Artificial Sequence
  ENSG00000009694_78 (sequence is synthesized)
aacatctcccagccatcttcaggaaatcgaatcaagtaaatcctttccaaccgaaaacatttcaactaactatagagaggcagactcatttttactaaaataatttatacagttagttat

SEQ ID NO: 11220 - DNA, 120 bp, Artificial Sequence
  ENSG00000009694_79 (sequence is synthesized)
tttcgttctccgtacttacccatttatctttatttaatcgtctctactgcctaggaaaataactattttccaggacgggttatttgttctgcgatcatttaaaatttggagaaaggtcag

SEQ ID NO: 11221 - DNA, 120 bp, Artificial Sequence
  ENSG00000009694_80 (sequence is synthesized)
gattagtgttaatatcagctgcagtttctcaatctctaggaatcctgcagtaaaacaagccccttggtgagctggaagatttgtgcccagtgacaaagagatagtttgtaaaatgctgtg

SEQ ID NO: 11222 - DNA, 120 bp, Artificial Sequence
  ENSG00000009694_81 (sequence is synthesized)
taattgtaagttaccacaaatgaaaatacatgacagcacaatgtggcccgtagaaaattcccctgagccagcttctgcactttcatcaccgaatctgaacatttgctatgtctgaaggca

SEQ ID NO: 11223 - DNA, 120 bp, Artificial Sequence
  ENSG00000009694_82 (sequence is synthesized)
aatttatgatggaatgttagtttggattctttccagatgctacctaaatgcagtgtggggtcattgccttgctttgcgatgacagtttctttgaaaatatgcaaagtcataagctcatgt

SEQ ID NO: 11224 - DNA, 120 bp, Artificial Sequence
  ENSG00000009694_83 (sequence is synthesized)
taaggtttttcaagagtctgcctcctactacacaaaggaaagcaagggaaaggaaatgaccctggcaaacagtagggaagggtgtattcaaacatttcattttcaaaaccttcgggttag

SEQ ID NO: 11225 - DNA, 120 bp, Artificial Sequence
  ENSG00000009694_84 (sequence is synthesized)
aataccacttacacatgtattctgagagacagaattcatgaggaactcatctctctttataactggaaacacaccagcttgatatattgctaatccatactaaaatcatattattgggtt

SEQ ID NO: 11226 - DNA, 120 bp, Artificial Sequence
  ENSG00000009694_85 (sequence is synthesized)
ttttctgaatcaggcctgtattaatggtacagtatttattcagaatggaattctaaaattactaacaaacttgttgaaaatttgaatacctccacaccaacctaaaaatggaccttaagt

SEQ ID NO: 11227 - DNA, 120 bp, Artificial Sequence
  ENSG00000009694_86 (sequence is synthesized)
tcctagaacctctgatgttcttttaaattaatggaaaaataatttgtgaactgtatatagagagtgcattcataaatgtgattatgtattttatcacaaatccaaaatgtcaatattaga

SEQ ID NO: 11228 - DNA, 120 bp, Artificial Sequence
  ENSG00000009694_87 (sequence is synthesized)
gtctattttgcttatattttaagcaattatacgtttttgcaattcattgatgatgtatcattttcaaactgctttaaatatccattagaaacaaatatttgaagcttttacttaatagtg

SEQ ID NO: 11229 - DNA, 120 bp, Artificial Sequence
  ENSG00000009694_88 (sequence is synthesized)
attaccttgaactgtgcatttctagtttgtaatacgtatttggttggttcgtgcctttagtttgttaaagttacatttgtattatattcaggaaatgcactttttattacttacagctgt

SEQ ID NO: 11230 - DNA, 120 bp, Artificial Sequence
  ENSG00000009694_89 (sequence is synthesized)
ggttttaatactgccttgaactattattattctttttacaactcctaaagcttgagggaggaaagaaaaaaaaaacaaaactactaatcagtagtaaatcgaagagaaacattttggcat

SEQ ID NO: 11231 - DNA, 120 bp, Artificial Sequence
  ENSG00000009694_90 (sequence is synthesized)
ttcttaagaagaagatggagatattgagtatatcacttcctattcagctgaatagaaagaatgccttcattgacttgcagttctgcagtttaaattattgaaagaacaattcgtttgcat

SEQ ID NO: 11232 - DNA, 120 bp, Artificial Sequence
  ENSG00000009694_91 (sequence is synthesized)
ttcctgatgaaagtaaaagcatttttcagagaaacatatgaatttctcatacccagcagacagatggctgacactgcacagccacacaccattcgagtaagttaaagtgagagcatagta

SEQ ID NO: 11233 - DNA, 120 bp, Artificial Sequence
  ENSG00000009694_92 (sequence is synthesized)
gttggactctcctatgaagaacattctgggctggaggcagggaatactccatggttgtttctttttcctacttaagcccattttgtttgtgcttttctgttttgttttgttttcactctt

SEQ ID NO: 11234 - DNA, 120 bp, Artificial Sequence
  ENSG00000009694_93 (sequence is synthesized)
gcactacagtctagagatccaaatgaactgaaaagttcaaagtttaacacatttaaatatgtttacttttagttgtcattctaatcgttattgattagaagcatgactcctgaaggaaag

SEQ ID NO: 11235 - DNA, 120 bp, Artificial Sequence
  ENSG00000009694_94 (sequence is synthesized)
ggaaataaatctcaattcatactaacttgcaacaaaacacttttaccatataaataagtatatgatttatttttaacccaaaaaatgtataaaataagtgtgtcctttactgtcaattta

SEQ ID NO: 11236 - DNA, 120 bp, Artificial Sequence
  ENSG00000009694_95 (sequence is synthesized)
tctagaagatctataatatatagactacatatatataatatatacaacatagccaaatgtatgaaaacttgacaatgtataatttggaattcacatgctacctatgtagacaggtatgaa

SEQ ID NO: 11237 - DNA, 120 bp, Artificial Sequence
  ENSG00000009694_96 (sequence is synthesized)
attaagttataattttcatgagacattttcatcactgttgacacagtttcaagcattccatcatgttattttgactctttttcttttttttttctttaaaaatatatttttaactagacc

SEQ ID NO: 11238 - DNA, 120 bp, Artificial Sequence
  ENSG00000009694_97 (sequence is synthesized)
aggccccactataatatcacttaagagagtcagggcaaagtttttgcatttatgaagatgtgttcatgtaagggtgattgtaatggagttcattggtaatagaagcaaaagtacagtaac

SEQ ID NO: 11239 - DNA, 120 bp, Artificial Sequence
  ENSG00000009694_98 (sequence is synthesized)
gaagtattgaaaagaaaattttggagacattggagcatattatatatagcttgtggaaagacataaggctacagatggaatggaacattcctgttttcttgaagaaattcacatacacat

SEQ ID NO: 11240 - DNA, 120 bp, Artificial Sequence
  ENSG00000009694_99 (sequence is synthesized)
gttttcttgaagaaattcacatacacatagctgacctgactagtacttcagctcttccacagccttctataaaggttctttcttctgcaaagaaaacaaaacaaaacaaaacaaaacaaa

SEQ ID NO: 11241 - DNA, 120 bp, Artificial Sequence
  ENSG00000009694_100 (sequence is synthesized)
aaacaaaaaaaagcaaagtaaaatttaaaaatacagaaaacaaacaacaaaaaagaattcaaccataaatagtgactattattttcagtgtgtccttcatgtgaaagctattaaggacca

SEQ ID NO: 11242 - DNA, 120 bp, Artificial Sequence
  ENSG00000009694_101 (sequence is synthesized)
aatatactactgttcataagaagaaattactttctaaacagtaactgaaaatacttagagttaaacttgctgtggattttgtcttggcagttgtcatcttacattatttgtcaaaggaaa

SEQ ID NO: 11243 - DNA, 120 bp, Artificial Sequence
  ENSG00000009694_102 (sequence is synthesized)
tgtgtttggcagttaaaaatctttccttagatttagtggtggactttaacctcttaaataaatgttagtatatcagattgtgtccttgaaaaatattttacttgtatgaatcatgacaac

SEQ ID NO: 11244 - DNA, 120 bp, Artificial Sequence
  ENSG00000009694_103 (sequence is synthesized)
gtctaaatctttactattcttctggcaaaagcatcagtaagaaagaaggcgaaaaagagaagtatagcctttatgtcagaaaaacattctttttagctgcttactttctcatgaaaagta

SEQ ID NO: 11245 - DNA, 120 bp, Artificial Sequence
  ENSG00000009694_104 (sequence is synthesized)
aagatgtttacagtgtatgccaagttttcagtttctgtataacaacaggtagaggttctaatcatattgaaaattgtgttataatggtctgagccatgttgctaggaaacaataggttcc

SEQ ID NO: 11246 - DNA, 120 bp, Artificial Sequence
  ENSG00000009694_105 (sequence is synthesized)
aattttgtattcctgctctcctgtgctgaaaagtgactggatactgtacaggttcatgttctctggctgcagttaaatggtcttttgcattttgctctggctttcaggccagaagcatgc

SEQ ID NO: 11247 - DNA, 120 bp, Artificial Sequence
  ENSG00000009694_106 (sequence is synthesized)
atttttctacaagagcatcacaacaacatgctgtaaatatttaaagttaaacattatgtgttgatatttgaaagaaaagtactttgaatatttcatttttaaaaaataaaattgccaatg

SEQ ID NO: 11248 - DNA, 120 bp, Artificial Sequence
  ENSG00000009709_0 (sequence is synthesized)
aacacttttgcacaacttacccagctgatcactcgcgccccctcgcttttccatttctctttccccaaccccgtcaccccctgtctcctccgtccagccctgaaacccgaggaggctcct

SEQ ID NO: 11249 - DNA, 120 bp, Artificial Sequence
  ENSG00000009709_1 (sequence is synthesized)
tcttccgtctgtccccgggtctcctaggggacggggctgtgaaagctggtgtggagggagaagcgagtgtggtccggagaaagaaggcgtggagaagagggagggagcgagagcgagaga

SEQ ID NO: 11250 - DNA, 120 bp, Artificial Sequence
  ENSG00000009709_2 (sequence is synthesized)
ataaatatataaataaatacgagaacgaaatccactccgcagtctccgggctcggaaactttggccccgagcgccagagcgccagagcgcgagagcgcggcgctcgccactctgaggctg

SEQ ID NO: 11251 - DNA, 120 bp, Artificial Sequence
  ENSG00000009709_3 (sequence is synthesized)
gcggcctcgattccggccgcgttcccccggcccccctccgccgcggggcctggtctccgggttctgccaggcgcatcagcccgcacaacttctggccgaggccagccggcagaggcggac

SEQ ID NO: 11252 - DNA, 120 bp, Artificial Sequence
  ENSG00000009709_4 (sequence is synthesized)
ttggggttggagtgtttgtttgtttgaacttcctcgtcgtcgccaccttccctccccccaacctccaccccacctcacccccctccccagcttctggacgcgtttgactgcagccagggg

SEQ ID NO: 11253 - DNA, 120 bp, Artificial Sequence
  ENSG00000009709_5 (sequence is synthesized)
tggggggtgggggtagggagtgtgtgtggaggggagggagaagaggttaaaaaaaagaagacgaagaagacggaaagaaagagatcgcagcaggggtgaagggagcggacgggaagcgat

SEQ ID NO: 11254 - DNA, 120 bp, Artificial Sequence
  ENSG00000009709_6 (sequence is synthesized)
ttttgccgactttggattcgtccccggcgtgcgcaagaatggcggcccttcccggcacggtaccgagaatgatgcggccggctccggggcagaactacccccgcacgggattccctttgg

SEQ ID NO: 11255 - DNA, 120 bp, Artificial Sequence
  ENSG00000009709_7 (sequence is synthesized)
aagtgtccaccccgcttggccaaggccgggtcaatcagctgggaggggtcttcatcaatgggcgacccctgcctaaccacatccgccacaagatagtggagatggcccaccatggcatcc

SEQ ID NO: 11256 - DNA, 120 bp, Artificial Sequence
  ENSG00000009709_8 (sequence is synthesized)
ggccctgtgtcatctcccgacagctgcgtgtctcccacggctgcgtctccaagattctttgccgctaccaggagaccgggtccatccggcctggggccatcggcggcagcaagcccagac

SEQ ID NO: 11257 - DNA, 120 bp, Artificial Sequence
  ENSG00000009709_9 (sequence is synthesized)
aggtggcgactccggatgtagagaaaaagattgaggagtacaagagggaaaacccaggcatgttcagctgggagatccgggacaggctgctgaaggatgggcactgtgaccgaagcactg

SEQ ID NO: 11258 - DNA, 120 bp, Artificial Sequence
  ENSG00000009709_10 (sequence is synthesized)
tgccctcaggtttagtgagttcgattagccgcgtgctcagaatcaagttcgggaagaaagaggaggaggatgaagcggacaagaaggaggacgacggcgaaaagaaggccaaacacagca

SEQ ID NO: 11259 - DNA, 120 bp, Artificial Sequence
  ENSG00000009709_11 (sequence is synthesized)
tcgacggcatcctgggcgacaaagggaaccggctggacgagggctcggatgtggagtcggaacctgacctcccactgaagcgcaagcagcgacgcagtcggaccacattcacggccgagc

SEQ ID NO: 11260 - DNA, 120 bp, Artificial Sequence
  ENSG00000009709_12 (sequence is synthesized)
agctggaggagctggagaaggcctttgagaggacccactacccagacatatacacccgcgaggagctggcgcagaggaccaagctgacagaggcgcgtgtgcaggtctggttcagtaacc

SEQ ID NO: 11261 - DNA, 120 bp, Artificial Sequence
  ENSG00000009709_13 (sequence is synthesized)
gccgcgcccgttggcgtaagcaggcaggagccaaccagctggcggcgttcaaccaccttctgccaggaggcttcccacccaccggcatgcccacgctgcccccctaccagctgccggact

SEQ ID NO: 11262 - DNA, 120 bp, Artificial Sequence
  ENSG00000009709_14 (sequence is synthesized)
ccacctaccccaccaccaccatctcccaagatgggggcagcactgtgcaccggcctcagcccctgccaccgtccaccatgcaccagggcgggctggctgcagcggctgcagccgccgaca

SEQ ID NO: 11263 - DNA, 120 bp, Artificial Sequence
  ENSG00000009709_15 (sequence is synthesized)
ccagctctgcctacggagcccgccacagcttctccagctactctgacagcttcatgaatccggcggcgccctccaaccacatgaacccggtcagcaacggcctgtctcctcaggtgatga

SEQ ID NO: 11264 - DNA, 120 bp, Artificial Sequence
  ENSG00000009709_16 (sequence is synthesized)
gcatcttgggcaaccccagtgcggtgcccccgcagccacaggctgacttctccatctccccgctgcatggcggcctggactcggccacctccatctcagccagctgcagccagcgggccg

SEQ ID NO: 11265 - DNA, 120 bp, Artificial Sequence
  ENSG00000009709_17 (sequence is synthesized)
actccatcaagccaggagacagcctgcccacctcccaggcctactgcccacccacctacagcaccaccggctacagcgtggaccccgtggccggctatcagtacggccagtacggccaga

SEQ ID NO: 11266 - DNA, 120 bp, Artificial Sequence
  ENSG00000009709_18 (sequence is synthesized)
ctgctgttgattatctggccaaaaatgtgagcctctccacccagcgtcgcatgaagctcggggagcactctgctgtgctgggactcctgcctgtggaaactggccaggcctactagggcc

SEQ ID NO: 11267 - DNA, 120 bp, Artificial Sequence
  ENSG00000009709_19 (sequence is synthesized)
cctggggcgacttgccccagcccaattcccagcccaaccctaactgacccctgagcttcccagccttgccgcctcacccccctgttgtcctaggaggccaggaaaggagcccacctgctt

SEQ ID NO: 11268 - DNA, 120 bp, Artificial Sequence
  ENSG00000009709_20 (sequence is synthesized)
ctcatcaccagccccctggaggtagacagccagcttgtcactcacctgtggttagggatccagagtgatgcccttggagtctgctccccactttccccaaggagggtttctggtcagcct

SEQ ID NO: 11269 - DNA, 120 bp, Artificial Sequence
  ENSG00000009709_21 (sequence is synthesized)
gaggtcctcccctgtcaaatcccatggtggcctctgtgccatctcaggcatggagattggggcccaccttgaacaccttgggtgtccagaggaggatggtgcctgagaggaggtcctaca

SEQ ID NO: 11270 - DNA, 120 bp, Artificial Sequence
  ENSG00000009709_22 (sequence is synthesized)
gccctttggacccaactccagtgggggccctagctagaagtggaggtgaagctttcagggctgctctcagctggatgtactgggagccagccctgcaaggagggtctctggctcagtgtc

SEQ ID NO: 11271 - DNA, 120 bp, Artificial Sequence
  ENSG00000009709_23 (sequence is synthesized)
agaaccacagccctttcctcctctagacattgggactccagcaaagaggggaccctggccctggggtcttcccaggggagtcagcaggggggcagtctcacccccacccaggaatttgaa

SEQ ID NO: 11272 - DNA, 120 bp, Artificial Sequence
  ENSG00000009709_24 (sequence is synthesized)
ggacttcagaaccctccccagacacctctactgggtgcatggggaaatctagcacaggcagggagactggggagaccaggaagaggcttaaccagagggtaggggcacatgggggtgggg

SEQ ID NO: 11273 - DNA, 120 bp, Artificial Sequence
  ENSG00000009709_25 (sequence is synthesized)
tccactccatctggggcctggggagcccacagaacttttcagtttccttcattagctgaatcagatgagatggggaggggataaagtcttgaggatacatgagtggaggagcaggaagtg

SEQ ID NO: 11274 - DNA, 120 bp, Artificial Sequence
  ENSG00000009709_26 (sequence is synthesized)
ggctcagaaggcactttcataaccagatccctctgtttgtgggagggcaagcctttgttgcccaaggcttcagctctctgcctgcaagtccacaccccagggagttgagattttgcccaa

SEQ ID NO: 11275 - DNA, 120 bp, Artificial Sequence
  ENSG00000009709_27 (sequence is synthesized)
agccttccgcagaggcccgagcccatccttaccatgccccatcctctaggaagaggtctccatcttccccaaacccctttcagtttgtggggatgcagagagctaccctcagagctttgg

SEQ ID NO: 11276 - DNA, 120 bp, Artificial Sequence
  ENSG00000009709_28 (sequence is synthesized)
aggagggttgtagactgggcagggatggtttgccccacagacaagatgatcccccctggcatgttgttaggggcaaattgctgtcctgctcagagtggcatctttcaatgttgcctccat

SEQ ID NO: 11277 - DNA, 120 bp, Artificial Sequence
  ENSG00000009709_29 (sequence is synthesized)
cttggccaagaggtccctgcctcctgatccggcacagctgagctgaggcagatgtgaccagttttcaagctaccagccctgggcagaggaagatgtcaacaattccagagcagagggaag

SEQ ID NO: 11278 - DNA, 120 bp, Artificial Sequence
  ENSG00000009709_30 (sequence is synthesized)
aggcaccttccttgaccacaccagtggcctcctgaagttccatgcttttaagagctgggaccttgggaggatgattcaaaccctcaattcctcctccctgggaactttttaccaccttta

SEQ ID NO: 11279 - DNA, 120 bp, Artificial Sequence
  ENSG00000009709_31 (sequence is synthesized)
cctatttatcaaaatcatattcatctttaccatcactgtcactgtaatctacattccatcacctttatcaggtgctgctgagtacaaagcacttgggatgggagacacagcactgaattc

SEQ ID NO: 11280 - DNA, 120 bp, Artificial Sequence
  ENSG00000009709_32 (sequence is synthesized)
acaaacattggaccaaactgtttgtccccatctgggttcatgaggccacctctttgctcaatccatgcctcttgccctcagtcaacaagacattcctagagggaaagggctgctgctctg

SEQ ID NO: 11281 - DNA, 120 bp, Artificial Sequence
  ENSG00000009709_33 (sequence is synthesized)
ggagtcaacctgagttcctccctcctgggaagctgggttggcaagattctaggacactcacctgcatggacatcacctctgtgacaaatgcttacctgtttctcatcttcagacttggcg

SEQ ID NO: 11282 - DNA, 120 bp, Artificial Sequence
  ENSG00000009709_34 (sequence is synthesized)
atatcaagcctgttctggaccatgaccaggctggctcatatctctggtttagagaaacctatgaataactggggacaaacagactctttggtagcagcagacacatgtgatccatcaaga

SEQ ID NO: 11283 - DNA, 120 bp, Artificial Sequence
  ENSG00000009709_35 (sequence is synthesized)
tcaaccaaggttgcaactggagcgtccactgccagagacctttggctcttcaagctcgggacaaaaaagaagactctgttgtcccttggtaacccagtccctgcttttgtagctatcaca

SEQ ID NO: 11284 - DNA, 120 bp, Artificial Sequence
  ENSG00000009709_36 (sequence is synthesized)
gcagaaagcaactcttcctgaagaccaaacactcgtcatccacattccttgaatggccaatccttccatctggaggcctggctcagaaagtatctgagtatcctgacaccctctgtgact

SEQ ID NO: 11285 - DNA, 120 bp, Artificial Sequence
  ENSG00000009709_37 (sequence is synthesized)
caggagcagggatctcaggcagctgatatcaaaaccacccagccccatccccaggaggcgacattccaatgctaggaccaatcccagatatctggtcccgatggtgaaatggaacaaaga

SEQ ID NO: 11286 - DNA, 120 bp, Artificial Sequence
  ENSG00000009709_38 (sequence is synthesized)
cctgcttgggaataaaccaaatgatttctcatgacgttgaacataagttctcccaagccatcatcttggtagaaaatgggacttattccttgacaggccccacccccttcagaaagaggc

SEQ ID NO: 11287 - DNA, 120 bp, Artificial Sequence
  ENSG00000009709_39 (sequence is synthesized)
ccttgaccctgataggttctctctaaaacccgtatattaacgcatctggccaacttgggttataaaattcagccttgtgttggcaactcgaaacatcaccagagaggtgatgttgaatga

SEQ ID NO: 11288 - DNA, 120 bp, Artificial Sequence
  ENSG00000009709_40 (sequence is synthesized)
gagacacaaggcctccatctctttggggctgaccacagcctgagaaagaaggtctgggttccagtggccaggccgtcccagaaacaacccccatccatccctgtaaatagagtctgtagc

SEQ ID NO: 11289 - DNA, 120 bp, Artificial Sequence
  ENSG00000009709_41 (sequence is synthesized)
aaaataagagctgcttcctccaacttatcacaagtcgccgttggtcctctctaaggagggctctcttctgagttcattgtacaatagttggaaacgtggtgatgtgctgttcgtttatag

SEQ ID NO: 11290 - DNA, 120 bp, Artificial Sequence
  ENSG00000009709_42 (sequence is synthesized)
aaagctgactttttataaatatatatatatactaaaaaaggaaagaaatcccccacagtgtgtgtcgtgctagtgccagagaccatctgtagggatatatcttcatattgtgtgtttcaa

SEQ ID NO: 11291 - DNA, 120 bp, Artificial Sequence
  ENSG00000009709_43 (sequence is synthesized)
attatgcattccaggctctagtgggttctttcaatcttgttcctttatttttttcatttggtatttctctcttgctatataaagaaaaaaagaagtgatgtgtaagaaccaagctatgct

SEQ ID NO: 11292 - DNA, 120 bp, Artificial Sequence
  ENSG00000009709_44 (sequence is synthesized)
tttatacttccattttatacttgatttagctttgttgttcttttgccagaggaacatcaaagggcagagcaaacagagaactagggggataagagagaagaaaagaagaatggagagaga

SEQ ID NO: 11293 - DNA, 120 bp, Artificial Sequence
  ENSG00000009709_45 (sequence is synthesized)
ggtttgcccagaaggaaaacgaagagccagattgaaatctgactctggcttgagaacaggacgggtcccagagtttgaccactgccagaatccagtgtttcaagatggagttggtgaagc

SEQ ID NO: 11294 - DNA, 120 bp, Artificial Sequence
  ENSG00000009709_46 (sequence is synthesized)
atccaagattttggatcctgggcctcagtgacactccatcacccaactaaaaagatgttctctgggacctctctcaggctgatgttcttctcatcaagctcccgaatgtgtctcgcacta

SEQ ID NO: 11295 - DNA, 120 bp, Artificial Sequence
  ENSG00000009709_47 (sequence is synthesized)
ttggacactttttgggggtacacaggtcttctctcctcccctcctgcagaggcaccaaaaccaagaccaaatgggggttctctagccgccaacttgaaacgctctgagacttctgtgtat

SEQ ID NO: 11296 - DNA, 120 bp, Artificial Sequence
  ENSG00000009709_48 (sequence is synthesized)
ttgatgcttcttcaagtcagctctgacgtggccaattccctgacctgggaaatatttacatagtactctagatcattccttcttcctagtaactgcaactttgttgcttctgtgtttgac

SEQ ID NO: 11297 - DNA, 120 bp, Artificial Sequence
  ENSG00000009709_49 (sequence is synthesized)
tcacagccactttcccccatgcggaagtgagtgggtgtacgtgagggtgtgagtggggtgtgtgcgtgggcgtgtgggcgtgaggtgtgtgtttaaatataatcacaccataatttattc

SEQ ID NO: 11298 - DNA, 120 bp, Artificial Sequence
  ENSG00000009709_50 (sequence is synthesized)
agctatatggagtagtagactagaaagagaaactggtatttgctttaactacctgctgcttgtaagcgcttcctctgtaactcaggcgtaactgttatacattaaaagaaattaaaagca

SEQ ID NO: 11299 - DNA, 120 bp, Artificial Sequence
  ENSG00000009709_51 (sequence is synthesized)
gcgtcccccgtccccattccttctcccacccccagggcctcctgcttgtttatggagagctacaaggtggtgtcagggtggggaatgtccatttcacagatggaaaaattgaagtccagc

SEQ ID NO: 11300 - DNA, 120 bp, Artificial Sequence
  ENSG00000009709_52 (sequence is synthesized)
cagatggaacagttcacctaaaatgacactgagttgggcaaaacccaggacatctcctggctaagcctctgcttccgtactatggctccaacagaaataaaatacacaacacaaatatca

SEQ ID NO: 11301 - DNA, 120 bp, Artificial Sequence
  ENSG00000009724_0 (sequence is synthesized)
agaccaggccaggccagctggacgggcacaccatgaggctgctgaccctcctgggccttctgtgtggctcggtggccacccccttgggcccgaagtggcctgaacctgtgttcgggcgcc

SEQ ID NO: 11302 - DNA, 120 bp, Artificial Sequence
  ENSG00000009724_1 (sequence is synthesized)
tggcatcccccggctttccaggggagtatgccaatgaccaggagcggcgctggaccctgactgcaccccccggctaccgcctgcgcctctacttcacccacttcgacctggagctctccc

SEQ ID NO: 11303 - DNA, 120 bp, Artificial Sequence
  ENSG00000009724_2 (sequence is synthesized)
acctctgcgagtacgacttcgtcaagctgagctcgggggccaaggtgctggccacgctgtgcgggcaggagagcacagacacggagcgggcccctggcaaggacactttctactcgctgg

SEQ ID NO: 11304 - DNA, 120 bp, Artificial Sequence
  ENSG00000009724_3 (sequence is synthesized)
gctccagcctggacattaccttccgctccgactactccaacgagaagccgttcacggggttcgaggccttctatgcagccgaggacattgacgagtgccaggtggccccgggagaggcgc

SEQ ID NO: 11305 - DNA, 120 bp, Artificial Sequence
  ENSG00000009724_4 (sequence is synthesized)
ccacctgcgaccaccactgccacaaccacctgggcggtttctactgctcctgccgcgcaggctacgtcctgcaccgtaacaagcgcacctgctcagccctgtgctccggccaggtcttca

SEQ ID NO: 11306 - DNA, 120 bp, Artificial Sequence
  ENSG00000009724_5 (sequence is synthesized)
cccagaggtctggggagctcagcagccctgaatacccacggccgtatcccaaactctccagttgcacttacagcatcagcctggaggaggggttcagtgtcattctggactttgtggagt

SEQ ID NO: 11307 - DNA, 120 bp, Artificial Sequence
  ENSG00000009724_6 (sequence is synthesized)
ccttcgatgtggagacacaccctgaaaccctgtgtccctacgactttctcaagattcaaacagacagagaagaacatggcccattctgtgggaagacattgccccacaggattgaaacaa

SEQ ID NO: 11308 - DNA, 120 bp, Artificial Sequence
  ENSG00000009724_7 (sequence is synthesized)
aaagcaacacggtgaccatcacctttgtcacagatgaatcaggagaccacacaggctggaagatccactacacgagcacagcgcagccttgcccttatccgatggcgccacctaatggcc

SEQ ID NO: 11309 - DNA, 120 bp, Artificial Sequence
  ENSG00000009724_8 (sequence is synthesized)
acgtttcacctgtgcaagccaaatacatcctgaaagacagcttctccatcttttgcgagactggctatgagcttctgcaaggtcacttgcccctgaaatcctttactgcagtttgtcaga

SEQ ID NO: 11310 - DNA, 120 bp, Artificial Sequence
  ENSG00000009724_9 (sequence is synthesized)
aagatggatcttgggaccggccaatgcccgcgtgcagcattgttgactgtggccctcctgatgatctacccagtggccgagtggagtacatcacaggtcctggagtgaccacctacaaag

SEQ ID NO: 11311 - DNA, 120 bp, Artificial Sequence
  ENSG00000009724_10 (sequence is synthesized)
taaatatgtgtgtgaggctgatggattctggacgagctccaaaggagaaaaatcactcccagtctgtgagcctgtttgtggactatcagcccgcacaacaggagggcgtatatatggagg

SEQ ID NO: 11312 - DNA, 120 bp, Artificial Sequence
  ENSG00000009724_11 (sequence is synthesized)
gcaaaaggcaaaacctggtgattttccttggcaagtcctgatattaggtggaaccacagcagcaggtgcacttttatatgacaactgggtcctaacagctgctcatgccgtctatgagca

SEQ ID NO: 11313 - DNA, 120 bp, Artificial Sequence
  ENSG00000009724_12 (sequence is synthesized)
aaaacatgatgcatccgccctggacattcgaatgggcaccctgaaaagactatcacctcattatacacaagcctggtctgaagctgtttttatacatgaaggttatactcatgatgctgg

SEQ ID NO: 11314 - DNA, 120 bp, Artificial Sequence
  ENSG00000009724_13 (sequence is synthesized)
ctttgacaatgacatagcactgattaaattgaataacaaagttgtaatcaatagcaacatcacgcctatttgtctgccaagaaaagaagctgaatcctttatgaggacagatgacattgg

SEQ ID NO: 11315 - DNA, 120 bp, Artificial Sequence
  ENSG00000009724_14 (sequence is synthesized)
aactgcatctggatggggattaacccaaaggggttttcttgctagaaatctaatgtatgtcgacataccgattgttgaccatcaaaaatgtactgctgcatatgaaaagccaccctatcc

SEQ ID NO: 11316 - DNA, 120 bp, Artificial Sequence
  ENSG00000009724_15 (sequence is synthesized)
aaggggaagtgtaactgctaacatgctttgtgctggcttagaaagtgggggcaaggacagctgcagaggtgacagcggaggggcactggtgtttctagatagtgaaacagagaggtggtt

SEQ ID NO: 11317 - DNA, 120 bp, Artificial Sequence
  ENSG00000009724_16 (sequence is synthesized)
tgtgggaggaatagtgtcctggggttccatgaattgtggggaagcaggtcagtatggagtctacacaaaagttattaactatattccctggatcgagaacataattagtgatttttaact

SEQ ID NO: 11318 - DNA, 120 bp, Artificial Sequence
  ENSG00000009724_17 (sequence is synthesized)
tgcgtgtctgcagtcaaggattcttcatttttagaaatgcctgtgaagaccttggcagcgacgtggctcgagaagcattcatcattactgtggacatggcagttgttgctccacccaaaa

SEQ ID NO: 11319 - DNA, 120 bp, Artificial Sequence
  ENSG00000009724_18 (sequence is synthesized)
aaacagactccaggtgaggctgctgtcatttctccacttgccagtttaattccagccttacccattgactcaaggggacataaaccacgagagtgacagtcatctttgcccacccagtgt

SEQ ID NO: 11320 - DNA, 120 bp, Artificial Sequence
  ENSG00000009724_19 (sequence is synthesized)
aatgtcactgctcaaattacatttcattaccttaaaaagccagtctcttttcatactggctgttggcatttctgtaaactgcctgtccatgctctttgtttttaaacttgttcttattga

SEQ ID NO: 11321 - DNA, 120 bp, Artificial Sequence
  ENSG00000009724_20 (sequence is synthesized)
gggggtaactctgtcttaggccaggcagccctgccttcagtttccccacctttcccagggcaggggagaggcctctggcctgacatcatccacaatgcaaagaccaaaacagccgtgacc

SEQ ID NO: 11322 - DNA, 120 bp, Artificial Sequence
  ENSG00000009724_21 (sequence is synthesized)
gacctccattcacatgggctgagtgccaactctgagccagggatctgaggacagcatcgcctcaagtgacgcagggactggccgggcgcagcagctcacgcctgtaattccagcactttg

SEQ ID NO: 11323 - DNA, 88 bp, Artificial Sequence
  ENSG00000009724_22 (sequence is synthesized)
tccagcactttgggaggccgaggctggctgatcatttgaggtcaggagttcaaggccagccagggcaacacggtgaaactctatctcc

SEQ ID NO: 11324 - DNA, 63 bp, Artificial Sequence
  ENSG00000009724_23 (sequence is synthesized)
aattgcttgaacctgcgaggtggaggctgcagtgaacacaaaaaacaaaaacgacgcaggggc

SEQ ID NO: 11325 - DNA, 120 bp, Artificial Sequence
  ENSG00000009724_24 (sequence is synthesized)
aaacaaaaaacaaaaacgacgcaggggccgagggccccatttacagctgacaaagtggggccctgccagcgggagcgctgccaggatgtttgatttcagatcccagtccctgcagagacc

SEQ ID NO: 11326 - DNA, 120 bp, Artificial Sequence
  ENSG00000009724_25 (sequence is synthesized)
ttctctgctccttaggaagctgctgcaagggttcagcgctgtagccccgccccctgggtttgattgactcccctcattagctgggtgacctcgggccggacactgaaactcccactggtt

SEQ ID NO: 11327 - DNA, 120 bp, Artificial Sequence
  ENSG00000009724_26 (sequence is synthesized)
taacagaggtgatgtttgcatctttctcccagcgctgctgggagcttgcagcgaccctaggcctgtaaggtgattggcccggcaccagtcccgcaccctagacaggacgaggcctcctct

SEQ ID NO: 11328 - DNA, 120 bp, Artificial Sequence
  ENSG00000009724_27 (sequence is synthesized)
gaggtccactctgaggtcatggatctcctgggaggagtccaggctggatcccgcctctttccctcctgacggcctgcctggccctgcctctcccccagacattgacgagtgccaggtggc

SEQ ID NO: 11329 - DNA, 120 bp, Artificial Sequence
  ENSG00000009724_28 (sequence is synthesized)
ctgcctgggccccaacgcaccctctcctgggatacccggggctcctcagggccattgctgctctgcccaggggtgcggagggcctgggccctggacactgggtgcttctaggccctgctg

SEQ ID NO: 11330 - DNA, 120 bp, Artificial Sequence
  ENSG00000009724_29 (sequence is synthesized)
cctccagctccccttctcagccctgcttcccctctcagcagccaggctcatcagtgccaccctgccctagcgactgagactaattctaacatcccactgtgtacctggttccacctgggc

SEQ ID NO: 11331 - DNA, 120 bp, Artificial Sequence
  ENSG00000009724_30 (sequence is synthesized)
tctgggaacccctcatgtagccacgggagagtcgggggtatctagccctcgttccttgggacctggttccctggttccctgcactgtgggacgggccagtgctctggggcgtgggcagcc

SEQ ID NO: 11332 - DNA, 120 bp, Artificial Sequence
  ENSG00000009724_31 (sequence is synthesized)
ccacctgctggcgctgaccctgcctcccccgactcggtttctccctctcggtgtctctccttgcctctctgatctctcttccagagcagagcctctagcctcccctggagctccggcctg

SEQ ID NO: 11333 - DNA, 120 bp, Artificial Sequence
  ENSG00000009724_32 (sequence is synthesized)
cccagcaggtcagaagccagagccagcctgctggcctcagctccgggttgggctgagatggctgtgccccaactcccattcacccaccatggacccaataataaacctggccccacccca

SEQ ID NO: 11334 - DNA, 120 bp, Artificial Sequence
  ENSG00000009724_33 (sequence is synthesized)
aaggctggggccttcgagtacaagtgtgggaggcagagtggggaggggcaccccaatccatggcctgggttggcctcattggctgtccctgaaatgctgaggaggtgggttacttccctc

SEQ ID NO: 11335 - DNA, 120 bp, Artificial Sequence
  ENSG00000009765_0 (sequence is synthesized)
gaagagttctgcactttgttccttccctggcacacctgtgtctgcattccttctatctcccggcattctccactcctgtctctgtgtgtttaaaaaccggtgtgggaagtgtgcacgcct

SEQ ID NO: 11336 - DNA, 120 bp, Artificial Sequence
  ENSG00000009765_1 (sequence is synthesized)
gtgacgtcagactccagaccatgtatttcctgactcccatcttggtagccattctctgcattttggttgtgtggatctttaaaaatgccgacagaagcatggagaaaaagaagggggagc

SEQ ID NO: 11337 - DNA, 120 bp, Artificial Sequence
  ENSG00000009765_2 (sequence is synthesized)
ctagaaccagggccgaagctcgcccctgggtggatgaagacttaaaagacagcagtgacctgcaccaagcagaagaagatgctgatgaatggcaagaatcagaagaaaatgttgaacaca

SEQ ID NO: 11338 - DNA, 120 bp, Artificial Sequence
  ENSG00000009765_3 (sequence is synthesized)
tccccttctctcataaccactatcctgagaaggaaatggttaagaggtctcaggaattttatgaacttctcaataagagacggtcagtcaggttcataagtaatgagcaagtcccaatgg

SEQ ID NO: 11339 - DNA, 120 bp, Artificial Sequence
  ENSG00000009765_4 (sequence is synthesized)
aagtcattgataatgtcatcagaacggcaggaacagccccgagtggggctcacacagagccctggaccttcgtggttgtgaaggacccagacgtgaagcacaagattcgaaagatcattg

SEQ ID NO: 11340 - DNA, 120 bp, Artificial Sequence
  ENSG00000009765_5 (sequence is synthesized)
aggaggaagaggagatcaactacatgaaaaggatgggacatcgctgggtcacagacctcaagaaactgagaaccaactggattaaagagtacttggatactgcccctattttgattctca

SEQ ID NO: 11341 - DNA, 120 bp, Artificial Sequence
  ENSG00000009765_6 (sequence is synthesized)
ttttcaaacaagtacatggtttcgccgcaaatggcaagaaaaaagtccactactacaatgagatcagtgtttccatcgcttgtggcatcctgctagctgccctgcagaatgcaggtctgg

SEQ ID NO: 11342 - DNA, 120 bp, Artificial Sequence
  ENSG00000009765_7 (sequence is synthesized)
tgactgtcactaccactcctctcaactgtggccctcgactgagggtgctcctgggccgccccgcacatgaaaagctgctgatgctgctccccgtggggtaccccagcaaggaggccacgg

SEQ ID NO: 11343 - DNA, 120 bp, Artificial Sequence
  ENSG00000009765_8 (sequence is synthesized)
tgcctgacctcaagcgcaaacctctggaccagatcatggtgacagtgtaggcagggccccccaagggagtggcagggagatggcgcccctgcttttccctgagcctctcgcctgctcctc

SEQ ID NO: 11344 - DNA, 120 bp, Artificial Sequence
  ENSG00000009765_9 (sequence is synthesized)
ttgggtctcttggctgctctttctccaggtgtcaggtcccctcattgctcttctcaggtggccacactatgtcaagaagcctctccacactctgtggcacttccagtcccataaatcctg

SEQ ID NO: 11345 - DNA, 120 bp, Artificial Sequence
  ENSG00000009765_10 (sequence is synthesized)
tttcttatccactttggaaatgcatgaacactttacaaagaacatgcccgggtttttacattttaaaagttattctagacaatcactattggcttttttcttttatttttaaaaaactca

SEQ ID NO: 11346 - DNA, 120 bp, Artificial Sequence
  ENSG00000009765_11 (sequence is synthesized)
catagaggagacaatcagaaatttaccatagtcccaagaattcagctacatgatgactcgaatttaaatttagattaatcaaatggtctcctgttctctgatttctggtggcttttagac

SEQ ID NO: 11347 - DNA, 120 bp, Artificial Sequence
  ENSG00000009765_12 (sequence is synthesized)
agacactaatttttgagaactacttttttttttttaccaaacttcagggacactctgctagttttgaataagtaaccatcaaagttactaaaacatggccaggcgcagtggctcatgcct

SEQ ID NO: 11348 - DNA, 83 bp, Artificial Sequence
  ENSG00000009765_13 (sequence is synthesized)
aggaggctgaggcaagagaactgcttgaatccgggaggtagagattgcagtgagtcaagatgctgagatgcctgtctcaaaaa

SEQ ID NO: 11349 - DNA, 120 bp, Artificial Sequence
  ENSG00000009765_14 (sequence is synthesized)
gcgagaacctgtctcaaaaaaaacaaaaacaaagttactaaaatgtcaccttcacagaacaggacagggtacccttgggtcgcacgggcctggctggcatgtaaacggtcagttgcactg

SEQ ID NO: 11350 - DNA, 120 bp, Artificial Sequence
  ENSG00000009765_15 (sequence is synthesized)
cctagtggtttggtagatctgacttgtaagcagttcatagaagctgctcaatactcaagaatcttgcaagacagttattaaacattcatagcttgaaattgcccatggtgggagagttta

SEQ ID NO: 11351 - DNA, 120 bp, Artificial Sequence
  ENSG00000009765_16 (sequence is synthesized)
catcacaaccactacaaatcagcacttgctttcttcttcttaaagagagctgcttaccatacatagcacccacagtgtctcccttctcttctaccccaacccctgaaacacactgacccc

SEQ ID NO: 11352 - DNA, 120 bp, Artificial Sequence
  ENSG00000009765_17 (sequence is synthesized)
tattctccagatgacagcacagctgtttgggactgatagggtcacagttgccaggttgggaatgctagatgtagtcttcacccatcaccttctgtcgtcctcccaggggtgtcatattta

SEQ ID NO: 11353 - DNA, 120 bp, Artificial Sequence
  ENSG00000009765_18 (sequence is synthesized)
cagaggcaaactcttacagcttggatgatttctcatcaagcaactctactcacctctttttcccctttccctgtgcgtttcttcttcttgtcctcattttccttgagaaaactctctcta

SEQ ID NO: 11354 - DNA, 88 bp, Artificial Sequence
  ENSG00000009765_19 (sequence is synthesized)
cttcttcttgtcctcattttccttgagaaaactctctctataaaaaatttccatagagtatgtggctgataaacaacagaaatttggt

SEQ ID NO: 11355 - DNA, 120 bp, Artificial Sequence
  ENSG00000009765_20 (sequence is synthesized)
ctgggttgcagactgctgacttcttattgtgtcctcgtggtagaaagagggttagagcctctggcatgccttttataagggtactaatcccatcatgaggccccgtccttatgacctcat

SEQ ID NO: 11356 - DNA, 120 bp, Artificial Sequence
  ENSG00000009765_21 (sequence is synthesized)
cacctcccaaaggaccccctcctaataccatcacattgggggttagggtttcaacatatgaattgcgggggacacaaacattccgtccatggcacctacttcatagggtttggcatgctg

SEQ ID NO: 11357 - DNA, 120 bp, Artificial Sequence
  ENSG00000009765_22 (sequence is synthesized)
ctcggtacatggttaacattcataaatggtgggggcccttactgtggtagaaaccattgtcactgcaaggcagccctgcttgggattcaggtgaacaaatgtaacgtgggtgggtgaggg

SEQ ID NO: 11358 - DNA, 120 bp, Artificial Sequence
  ENSG00000009765_23 (sequence is synthesized)
actccctcctcttcagagaagccctcctgtggctcaggggcagctgcagggccagatggagttggcctgcagggagtcagccttaccccatcagagaccaacttgaaagatttttttctc

SEQ ID NO: 11359 - DNA, 120 bp, Artificial Sequence
  ENSG00000009765_24 (sequence is synthesized)
tgtgtagttcgtgttatcaatctgatctgcagccaggttatttacttctgaagcattggagttatcgattgccattgccccatggttctcactctttgcaggcactcttcaaatttttat

SEQ ID NO: 11360 - DNA, 120 bp, Artificial Sequence
  ENSG00000009765_25 (sequence is synthesized)
tttaaaaattataatgcaaacatctggccatcaccttaaccaagtgacaaagtcctagcacaccattaatggtaggataactgacattaagtgttcctgctgggatgaattatgaagtat

SEQ ID NO: 11361 - DNA, 120 bp, Artificial Sequence
  ENSG00000009765_26 (sequence is synthesized)
tccttccaaagatgtcaatggaaactaatcgagtcttacacctaattttcagtttacagtaaatacagaggataaagaagttaatggcatggtggaataaccaaaatgtgtatcattcta

SEQ ID NO: 11362 - DNA, 120 bp, Artificial Sequence
  ENSG00000009765_27 (sequence is synthesized)
caaaaaaataggcctggactatttaaggagtgagtgtcactgtgggaagaataagagggggactgtcttgtccttgctactcaaagagtggtcctgggcctgtatcatcattgggaccac

SEQ ID NO: 11363 - DNA, 120 bp, Artificial Sequence
  ENSG00000009765_28 (sequence is synthesized)
ctgggcgcttgttagaatcaaagactctcaggcctcacctagacatccagaatcaaaatctgcattttaacaagatgcccaggtgatctgcatgcctgttaaagtctgagctctgttgca

SEQ ID NO: 11364 - DNA, 120 bp, Artificial Sequence
  ENSG00000009765_29 (sequence is synthesized)
gataaccagagacccaacaaccaaaggcaaagcgtaagccttgattggattttggtttaggaaaaatctcataggtataaaagacaactgggaatgttgaatgtggatctggtggtaggt

SEQ ID NO: 11365 - DNA, 120 bp, Artificial Sequence
  ENSG00000009765_30 (sequence is synthesized)
gatattgttagtgatgtgagtgatgcctgctgaagtactgagagatgaagcatcatattgacaacttactccaggaaaaaaggtgtgtgtataggtgtgtgtttggagagtgtgagcgag

SEQ ID NO: 11366 - DNA, 120 bp, Artificial Sequence
  ENSG00000009765_31 (sequence is synthesized)
aactaacatggtaaaatgttaggtggagcatatacagttctcattatactcttattttaaatttatatttgaacacagtcaaatctgaatggaaatacatttaaataagcatttctttca

SEQ ID NO: 11367 - DNA, 120 bp, Artificial Sequence
  ENSG00000009765_32 (sequence is synthesized)
gtcatataagtaatttgcctaaaaatgccctctaagtccatcattaggttaagcgatttactgaaggtgcagatatcatgcttatttcattgggttgttttggaatgtcccccacttgga

SEQ ID NO: 11368 - DNA, 120 bp, Artificial Sequence
  ENSG00000009765_33 (sequence is synthesized)
gagtttgaggaatggaaatgagaatcggaggagaaataaggccagaggctcacattgcttgcagggaaccgactgagtaatgaagaagaggaaggaagcccttggaaggaacgtaaaatc

SEQ ID NO: 11369 - DNA, 120 bp, Artificial Sequence
  ENSG00000009765_34 (sequence is synthesized)
catttcagcctgccgccccttggaatggagggtcttctagggaccagaaacaccagacacttcttctgccccaagcacaccccacactaatttctgctgcagcatcacgatcagggcaaa

SEQ ID NO: 11370 - DNA, 120 bp, Artificial Sequence
  ENSG00000009765_35 (sequence is synthesized)
cattaaatgcagtcatgtgacaactgtgttcaaagttagaaatagtggtcggggaggcttatagatcctcttgctgttctgaggccttaaaaccaaaaaaataatggaatgattgcatca

SEQ ID NO: 11371 - DNA, 120 bp, Artificial Sequence
  ENSG00000009765_36 (sequence is synthesized)
ctgcgaggaagtatacttaattaagaaagttgaaaatggtttgtgtcttactaataggactcacctgaagactctactttgccaagagggaatttttaactcaaagttgtgtcagccagc

SEQ ID NO: 11372 - DNA, 120 bp, Artificial Sequence
  ENSG00000009765_37 (sequence is synthesized)
acggggtagagccatggtcctcatacttgctggcatccctcatctggtggtctgttaaagcacagattgctgggccgcaccctcagggtgtgtgattgtgtgattcagtattgctgggtg

SEQ ID NO: 11373 - DNA, 120 bp, Artificial Sequence
  ENSG00000009765_38 (sequence is synthesized)
gtgcccaaatgctccagttctaatgtattcccaggtgttgctgatgctggtgattgggtaccacattttgagaaccatggggcattggcaatcaacaaatgcaatgcttgtgacttgacg

SEQ ID NO: 11374 - DNA, 120 bp, Artificial Sequence
  ENSG00000009765_39 (sequence is synthesized)
tgataaaagttcatttattgggcaggcaaagtcctctgcaggcctggaaaccctccgagacaattacttgcatggggtaacccagtaatactgtgggatgcaacttctagggcatggctg

SEQ ID NO: 11375 - DNA, 120 bp, Artificial Sequence
  ENSG00000009765_40 (sequence is synthesized)
cctccttcctagaggcagcagggggagaaaacactggaagaggtcaccccaacaattccatcgtaccttggcctaggagtgacctcctcagtctcacaaccctttggctagaactagtca

SEQ ID NO: 11376 - DNA, 120 bp, Artificial Sequence
  ENSG00000009765_41 (sequence is synthesized)
tgtgacctcacaggaggtggagcagtgtcgtcaatgttatcatccccctgcacctgcaaggaaggaggcccagatgtgtgtaggtgctggatgtctcttccccaaaacatataactctgg

SEQ ID NO: 11377 - DNA, 120 bp, Artificial Sequence
  ENSG00000009765_42 (sequence is synthesized)
atttggaaaacaaaactggatataacagaaaagaaaaggaggggagaaggaaagttgaagaaattggtgaaatcagaataggacagtgaaaggcataaagattttcttctgaaacgctaa

SEQ ID NO: 11378 - DNA, 120 bp, Artificial Sequence
  ENSG00000009765_43 (sequence is synthesized)
gatcggttgatatttgtctaatacagctttaaatagagtatcactttgggccaaagaaaattgatataaacatacataaagtggaactaagattgacttcttcctagacatctctgcctc

SEQ ID NO: 11379 - DNA, 120 bp, Artificial Sequence
  ENSG00000009765_44 (sequence is synthesized)
tgtccacaaaatggaaacttccatcaaggagtactggaggacagttcagtatttcttcttatttgctcctccctatgaaaggaagagtgacttctctgctgcatgatattgggggtaaat

SEQ ID NO: 11380 - DNA, 120 bp, Artificial Sequence
  ENSG00000009765_45 (sequence is synthesized)
agttattgcacatttgctcaaaccccagcaaagtgcaccccattttaagccaaatttacaaacttacaaagatgatccaccaatagttttctctatttactttattcttgctctgtcacc

SEQ ID NO: 11381 - DNA, 120 bp, Artificial Sequence
  ENSG00000009765_46 (sequence is synthesized)
ggtgtgattatagctcactgcagcctccaacttctggactcaagtgatcctcccaccttagcttcccaggtagctgggatacaggtgcacgccaccacacccaggctagtttttctaaat

SEQ ID NO: 11382 - DNA, 120 bp, Artificial Sequence
  ENSG00000009765_47 (sequence is synthesized)
gctagtttttctaaatattggagttcccaaagagtattcaaactgatgtgatattttaaaagacattttgtaagcatcttttaggaatatcagtaagtggaagaaaaacacatagttatc

SEQ ID NO: 11383 - DNA, 120 bp, Artificial Sequence
  ENSG00000009765_48 (sequence is synthesized)
agtggatattatgccagagaggcatgagaaatataattttattttgctaggtatcagcagagtgccctcttataatttgtgtgaaatggaaacaaaggtaacatcgtgttttcaattcac

SEQ ID NO: 11384 - DNA, 120 bp, Artificial Sequence
  ENSG00000009765_49 (sequence is synthesized)
acatatatacaagtaatgagaggtccagaagaaatgtggcttcagctctgctgctactgtgcctcccttctcctgccccactcagcccacaaaataggctggacactcaaaaaacgttgc

SEQ ID NO: 11385 - DNA, 120 bp, Artificial Sequence
  ENSG00000009765_50 (sequence is synthesized)
gtttatctaccttttagagagggtgaatagcagagaactggaggtgggaatggtaaggaactcccagcagggtagtggagggaatgggctgacgcatctaaggctgatgccaggtctgct

SEQ ID NO: 11386 - DNA, 120 bp, Artificial Sequence
  ENSG00000009765_51 (sequence is synthesized)
ccctatctgggtggcctcagcaaatgacgtccagcacatccaggggcaggctcaagggagaacagcccccaaagctaagatcctgccaagctaaatacagtagttctaatgaaatgtgag

SEQ ID NO: 11387 - DNA, 120 bp, Artificial Sequence
  ENSG00000009765_52 (sequence is synthesized)
aggctataatcccatttgggaaattcctaaaaagtcatgaggcaggggattggtttatgttattatcatgacctgagagtcatggctcagagccaaatgttcaggattgaattcaacagc

SEQ ID NO: 11388 - DNA, 120 bp, Artificial Sequence
  ENSG00000009765_53 (sequence is synthesized)
atttaaatgtctttagagcaggatggaaatatgttagcaatgcctgcagagtgccaagtaaacgcaaaagccaatgagatcataaaggaagttgttagctaacctaggtggagtcgccaa

SEQ ID NO: 11389 - DNA, 120 bp, Artificial Sequence
  ENSG00000009765_54 (sequence is synthesized)
cttccttctactctaataattaaaaataaaaataatacttgggaggtaactggaataaaggttctaaaatcaaaaccctctgaagggtgaaaactgggagcctcctgttcccatagtaac

SEQ ID NO: 11390 - DNA, 120 bp, Artificial Sequence
  ENSG00000009765_55 (sequence is synthesized)
cacagcactcagggcactgtctcccagcgctggagtactgtcttatgaccagagatcctaagcaacctctgctcatctgagttgtccaccatattgtgggcatgagtccttgacaatagt

SEQ ID NO: 11391 - DNA, 120 bp, Artificial Sequence
  ENSG00000009765_56 (sequence is synthesized)
aaatagcacctctgttcccttattgggtaaatgattttccaactctgggaatgtgtagaattcattatggaaataatgcaataattcaaatccataatattgatactttcatgttaagtt

SEQ ID NO: 11392 - DNA, 120 bp, Artificial Sequence
  ENSG00000009765_57 (sequence is synthesized)
taggactaatcttgtgtatgctccttaagtgatttgaatctttaaaaagcttatgattccaatttgaaatgtgaaattgattttacgtttgtgatttgaagttgaaaggtataagaatat

SEQ ID NO: 11393 - DNA, 120 bp, Artificial Sequence
  ENSG00000009765_58 (sequence is synthesized)
ttaacttagctcatgaaaagtattagactagatttactataagtttaatgtattagatttacaagagatgcttaaatatatgagaatgttttgtcttaattggttataatcttgtcatat

SEQ ID NO: 11394 - DNA, 120 bp, Artificial Sequence
  ENSG00000009765_59 (sequence is synthesized)
caatgatttgaagtgctaaaatagaaaattaaatatgataaattacacaagaagtttagaatgtttaaaagattttaataaacaaagcctataactaagactgatgctttaagggagttt

SEQ ID NO: 11395 - DNA, 120 bp, Artificial Sequence
  ENSG00000009765_60 (sequence is synthesized)
ggcttattcaacttgagttaatcaaacattaattaaagccccccttccccaaagagatttgttttatttatttgtttactagttttataaataggataataaaatgtgtgtatgaggtca

SEQ ID NO: 11396 - DNA, 120 bp, Artificial Sequence
  ENSG00000009765_61 (sequence is synthesized)
gaatgcttttgacagaagtaatacaaacaaaaaaacctcactataacccaaacaaataagggattatttttccctcctagtgagaagtctggaggtagatattagatgctggtctattgc

SEQ ID NO: 11397 - DNA, 120 bp, Artificial Sequence
  ENSG00000009765_62 (sequence is synthesized)
ttcaatgaagttagtgccaaagtctcagtggttctcttggtctttcttcataaccaccggatgctgttatagcttcaccaatcacaacaagcacagtgcttggaacataataggtgctca

SEQ ID NO: 11398 - DNA, 120 bp, Artificial Sequence
  ENSG00000009765_63 (sequence is synthesized)
ataaatattcagtacatattgaatgtgtgcagaaatatatctcaatctagtcataaaattttagaatgcaagatctgaaagggacatgggaatctgtgtttttaacgtgttccaggtgat

SEQ ID NO: 11399 - DNA, 120 bp, Artificial Sequence
  ENSG00000009765_64 (sequence is synthesized)
tctgctgaccaggtgagtatggtaaatgtggcaagtattctcaagtgagctcatcagtcccagggctgttagcaccttccatctgccaggccctccctggtctagaccttcagccttgac

SEQ ID NO: 11400 - DNA, 120 bp, Artificial Sequence
  ENSG00000009765_65 (sequence is synthesized)
cttgccctgaaacgccaaactcttactcccagctgctttctctgtccctccacttagatgttagtaggcaccacaaccttttaatgctcaaaatactacttttgagtcctttccacccct

SEQ ID NO: 11401 - DNA, 120 bp, Artificial Sequence
  ENSG00000009765_66 (sequence is synthesized)
tacttggcccctcaattcatactttttgggatggagcctcaaatccagaaatcttctgtattagtccattctcacactgctaataaagaatacctgagactgagtaatttataaaggaag

SEQ ID NO: 11402 - DNA, 120 bp, Artificial Sequence
  ENSG00000009765_67 (sequence is synthesized)
ctcaggaaacttacaatcatggcagaaagaaaagcaaacatgcccttcttcacatggtgacaggaagcagaagaatgacaactgagtgaatggggaaaccccttataaagccatcagatc

SEQ ID NO: 11403 - DNA, 120 bp, Artificial Sequence
  ENSG00000009765_68 (sequence is synthesized)
actgagtgaatggggaaaccccttataaagccatcagatctcatgagaactcactcattctcatgagaataacatgggggaaactgcccccattattcaattatcccccatcagttctct

SEQ ID NO: 11404 - DNA, 120 bp, Artificial Sequence
  ENSG00000009765_69 (sequence is synthesized)
tgacatgtggggattatgggaactacaatgcaagatgagatttgggtgaagacatagccaaaccatatcatcatcttaaatttctgtgattcttttattctgcacatccaaatccatgag

SEQ ID NO: 11405 - DNA, 120 bp, Artificial Sequence
  ENSG00000009765_70 (sequence is synthesized)
tgagcaagttatactgactttatctctgaatattgaccatgggaggggaacaaggagaagcagtgtgaacaggaaaagcatgctgcctgctgctgtgaataataacatatcttgctctga

SEQ ID NO: 11406 - DNA, 120 bp, Artificial Sequence
  ENSG00000009765_71 (sequence is synthesized)
aggtaaataatggaatcaccatgcggcatcagactgcgaggcaccgccacctgattgagggtcctggaagaagcagcgaagcctgcagcaagctcagctcacaaggctgcccaggtgcct

SEQ ID NO: 11407 - DNA, 120 bp, Artificial Sequence
  ENSG00000009765_72 (sequence is synthesized)
ctgcagcaggcagtctttttcactttgccattgagtttgctgccccctagctttcataaggcataatcccgagagtaggttatgattagtgatggaggaaagaaaaatctccatgaagcc

SEQ ID NO: 11408 - DNA, 120 bp, Artificial Sequence
  ENSG00000009765_73 (sequence is synthesized)
gggcaggcggggaagtgtctggaagctactcattgcttttacttagatgtttgttatttggaggcttggaaagaggtcgatggggtaccccttggccactgagtcccctatcaacgggca

SEQ ID NO: 11409 - DNA, 120 bp, Artificial Sequence
  ENSG00000009765_74 (sequence is synthesized)
tcagcatctcactgggtggggatgctctgcttccatggttggctctgtagtcataggaacttgccgtggtggttgttgtttagaatataatatacaagcctttattaatatattaaatac

SEQ ID NO: 11410 - DNA, 120 bp, Artificial Sequence
  ENSG00000009765_75 (sequence is synthesized)
caagagctagtcgtagctctataattttaaagtagtgatgaatgtaatgatattttaaaatatctataacaactgtaaaatgatatgaaaataactgtggatttcattggtgataaagtc

SEQ ID NO: 11411 - DNA, 120 bp, Artificial Sequence
  ENSG00000009765_76 (sequence is synthesized)
atagatattgctaacactactgtggtttgctgcctacatttataaaggaagaaactgctaaatttcagttagatgttagtgaatatgaaaactttttttttcaaattcaagttcatggac

SEQ ID NO: 11412 - DNA, 120 bp, Artificial Sequence
  ENSG00000009765_77 (sequence is synthesized)
ctgctaaattcaatccttggccctttgggggtctgaggattccagttaaaaaaatcctgacctataataagaccaaagtactcacatcgagagagtgaaagataaaataataatagaagt

SEQ ID NO: 11413 - DNA, 120 bp, Artificial Sequence
  ENSG00000009765_78 (sequence is synthesized)
caacttaacattaataatattaataagaggaattgtttaatatggtctgtgtatttgcaggtttctactgctagagacatacaaaattcagtatggagtaaaagctatgtcttgaaaagg

SEQ ID NO: 11414 - DNA, 120 bp, Artificial Sequence
  ENSG00000009765_79 (sequence is synthesized)
cagtatggagtaaaagctatgtcttgaaaaggaccaagatataaaatgacactaaattaaggtgtaaatattttctcaaaaaagtttaagacttggccaggtgcggtggctcacgcctct

SEQ ID NO: 11415 - DNA, 120 bp, Artificial Sequence
  ENSG00000009765_80 (sequence is synthesized)
gcaggtttttggaaaaattatcctgaaggagctggcattgatttccttcctgaatctgtaagcagaatgcaggtctggtgactgtcactaccactcctctcaactgtggccctcgactga

SEQ ID NO: 11416 - DNA, 120 bp, Artificial Sequence
  ENSG00000009780_0 (sequence is synthesized)
gccgcagccagcagcctgcagccgccgccgggttgtgcctcagactgtcagataaatcggcgggccgggccggcgggtcggtgagcgcggcccgggccggacatggcggcgctctacgcc

SEQ ID NO: 11417 - DNA, 120 bp, Artificial Sequence
  ENSG00000009780_1 (sequence is synthesized)
tgcaccaagtgccaccagcgcttccccttcgaggcgctgtctcaggggcagcagctgtgcaaggaatgtcggattgcacaccctgttgtgaagtgcacctactgcaggactgagtaccag

SEQ ID NO: 11418 - DNA, 120 bp, Artificial Sequence
  ENSG00000009780_2 (sequence is synthesized)
caggagagtaaaaccaatacaatatgcaagaaatgtgctcagaacgtgcagttgtatggaacgcccaaaccttgtcagtattgcaacataattgcagcatttattgggaataaatgccag

SEQ ID NO: 11419 - DNA, 120 bp, Artificial Sequence
  ENSG00000009780_3 (sequence is synthesized)
cgctgcacaaattcagaaaagaagtatggaccaccctattcttgtgaacagtgcaagcagcagtgtgcatttgacaggaaagatgatagaaagaaggtagatgggaaattgctgtgctgg

SEQ ID NO: 11420 - DNA, 120 bp, Artificial Sequence
  ENSG00000009780_4 (sequence is synthesized)
ctgtgcacactttcatacaaacgggtccttcagaagaccaaagagcagaggaaacacctgagtagctcttctcgtgctggccaccaggagaaggagcagtatagtcgcctgagtggtggt

SEQ ID NO: 11421 - DNA, 120 bp, Artificial Sequence
  ENSG00000009780_5 (sequence is synthesized)
ggccattataacagccagaaaacactttctacatcttcaattcaaaatgaaatcccaaagaaaaagtccaagtttgagtcaatcacaactaatggagacagcttctccccagacctggct

SEQ ID NO: 11422 - DNA, 120 bp, Artificial Sequence
  ENSG00000009780_6 (sequence is synthesized)
ctggactcaccaggcactgaccactttgtcatcattgcccaactgaaggaagaagtggctaccctgaagaagatgttgcatcaaaaggatcaaatgattttagagaaagagaagaagatt

SEQ ID NO: 11423 - DNA, 120 bp, Artificial Sequence
  ENSG00000009780_7 (sequence is synthesized)
acagagttgaaggctgattttcagtaccaggaatcgcagatgagagccaaaatgaaccagatggagaaaacccacaaagaagtcacagaacaactgcaggccaaaaaccgagagctcctg

SEQ ID NO: 11424 - DNA, 120 bp, Artificial Sequence
  ENSG00000009780_8 (sequence is synthesized)
aagcaggcagctgctttgtccaagagcaagaagtcagagaagtcaggagctataacctctccatgacagacctcaaggaggctccctagcaacagcaaatggagttgtccagggttaggg

SEQ ID NO: 11425 - DNA, 120 bp, Artificial Sequence
  ENSG00000009780_9 (sequence is synthesized)
ttggagacctggctgttctgtgggaattgcaagctttcttaagaaatctctattttattacagttatccttctttgtgcgattgcagtgggctgaatggaaacacctggtttgtgctgtg

SEQ ID NO: 11426 - DNA, 120 bp, Artificial Sequence
  ENSG00000009780_10 (sequence is synthesized)
ttagactgcatgcttgagtgtttgggatttcaagctcgctctctttctctcactattaggacttttctttttcttcttcctcttctctctattttggttctattctttttttttcttttt

SEQ ID NO: 11427 - DNA, 81 bp, Artificial Sequence
  ENSG00000009780_11 (sequence is synthesized)
cagtgtaatgtgcagacattgcatcctgccatacccatgagcaaacagtttggcattaattatatatcactgccaccctct

SEQ ID NO: 11428 - DNA, 120 bp, Artificial Sequence
  ENSG00000009780_12 (sequence is synthesized)
caaacagtttggcattaattatatatcactgccaccctctgaactttgaaaactgccatcttcagacttggtataatggaagaggctttctctctccaataaaccttttgcttcagggta

SEQ ID NO: 11429 - DNA, 120 bp, Artificial Sequence
  ENSG00000009780_13 (sequence is synthesized)
tactcttcggtttttttccagatgtattatgtatgaactttgtactatgtatagccagagttttatttattttttaaaaaagaaactttttcttgataaaggaataatggtggtctagct

SEQ ID NO: 11430 - DNA, 120 bp, Artificial Sequence
  ENSG00000009780_14 (sequence is synthesized)
accttggagtcttaaaaactgattgctaaggtgaaacaattcaatgcataagtatggagctaagtgccttttggaggatttcttggaagagcatttatggagatacttaagggaggtagc

SEQ ID NO: 11431 - DNA, 120 bp, Artificial Sequence
  ENSG00000009780_15 (sequence is synthesized)
aaagatttgaaccgtctgtctttttaagtaagggcagaaagcaaggttgtccaggttgtactggacacttctctccccacccctttcctgattgttttatgtgattgattttaaattctc

SEQ ID NO: 11432 - DNA, 120 bp, Artificial Sequence
  ENSG00000009780_16 (sequence is synthesized)
acactgccacttctttaaaaaataaaatcctttatttgcttatatcagttgtcatactgggctgctgtcagagaatgtttttttacatgaatgaacagattaaaaatggaataatatggt

SEQ ID NO: 11433 - DNA, 81 bp, Artificial Sequence
  ENSG00000009780_17 (sequence is synthesized)
cgaatcccgggaggcagaggttgcaatgagctgaaatcgcaacactgcactgcagcctgggcaatggagtgagactccgtc

SEQ ID NO: 11434 - DNA, 120 bp, Artificial Sequence
  ENSG00000009780_18 (sequence is synthesized)
cgtctcaaaaaaaaaaaaaaaaggaataatatttgaactacagagcatttttggggtcagcatgagctgctctagtaaggactcttgagtctgggaaaagtggtatcactataccttctc

SEQ ID NO: 11435 - DNA, 120 bp, Artificial Sequence
  ENSG00000009780_19 (sequence is synthesized)
ttgagtctgggaaaagtggtatcactataccttctccccactcctcacccacccgagcccatacactccctgcttttcatggatatgtattgaaaacaggtgcttctcagaagcactttg

SEQ ID NO: 11436 - DNA, 120 bp, Artificial Sequence
  ENSG00000009780_20 (sequence is synthesized)
cctcaaccagagttatgtatgccctgcctatcttcccttcttaaccctgtaggaatatggatttacttttccaggaaaggggatagatttacatttctaggcatactctcaggtcctcta

SEQ ID NO: 11437 - DNA, 120 bp, Artificial Sequence
  ENSG00000009780_21 (sequence is synthesized)
tgtgatgtttgtgaaaggaattagggtgtgtcatgtgtgccatgaaacaacaaaaccaactaccctagaatcatttatgcagggggtactagagttagaaataataatgagggcagataa

SEQ ID NO: 11438 - DNA, 120 bp, Artificial Sequence
  ENSG00000009780_22 (sequence is synthesized)
catttgtacctcagtctaccaaaaaattatagtactaaatttaacttctaggcgtttcctggaagcagatgctctataatttgtgatagcattctcataaatggagtcctacacataatt

SEQ ID NO: 11439 - DNA, 120 bp, Artificial Sequence
  ENSG00000009780_23 (sequence is synthesized)
ggacagagatgtggaaatggtggtttccttctgataagggatacagtggaccatgtcgcttatatatcaccctactaggggatataattttcccttctaagcaagggaaatggcagtgct

SEQ ID NO: 11440 - DNA, 120 bp, Artificial Sequence
  ENSG00000009780_24 (sequence is synthesized)
aaatagttttgtaaagtttttgaatgagaagcttttaggtaaagataaactgtcataatatttttcagatgcatttgcattgactatgggagaaaaattagggggaaatgacagtcatgg

SEQ ID NO: 11441 - DNA, 120 bp, Artificial Sequence
  ENSG00000009780_25 (sequence is synthesized)
tgtttttttttaattttaaggactgaaattctgttacatgatgtatgacaatataaaaacatacttagttttatactaaatctttttttaaggtcttggcatttaatataaagcaaattc

SEQ ID NO: 11442 - DNA, 120 bp, Artificial Sequence
  ENSG00000009780_26 (sequence is synthesized)
acacgttttctaactttccataagttccaaaaagggaaagaagaaacctcagtcttgaaattttgatttttaaaaatcatgacactgttttaccatgaaattgagtagctaacttttggt

SEQ ID NO: 11443 - DNA, 120 bp, Artificial Sequence
  ENSG00000009780_27 (sequence is synthesized)
aacaccttttgtttctttgtatgtttgtaataatggacattttaaaacacaggaatgttttggtttgtacagactttgacaaatgtgtgttaataaaaattcatattgactcaagtgtaa

SEQ ID NO: 11444 - DNA, 82 bp, Artificial Sequence
  ENSG00000009780_28 (sequence is synthesized)
caaaatgaaccagatggagaaaacccacaaagaagtcacagaacaactgcagagatgggctctcgctatattgcctgggcta

SEQ ID NO: 11445 - DNA, 120 bp, Artificial Sequence
  ENSG00000009780_29 (sequence is synthesized)
cccagcctgtagatactttgtattgtttcactcttggatgtgttctgatcttttcccctcaaaaacagtagaattattaagtatgttctttgatttttgaataaaccagatgtgattcca

SEQ ID NO: 11446 - DNA, 120 bp, Artificial Sequence
  ENSG00000009780_30 (sequence is synthesized)
ttttatgtgctaaaattgtgtacctacctggtatacctagctgattgtattttaagtgatcatctcttagatttcttttttttctcaaagtattaacaaatcatgttaatccccctttta

SEQ ID NO: 11447 - DNA, 120 bp, Artificial Sequence
  ENSG00000009790_0 (sequence is synthesized)
agagaattccagactgagccagagtagcgaagtcccagtaaaggggcagagagtctgctacctgttgagtctgtttggcctataaataaaccccaaggggttagagctagcaaatgcctg

SEQ ID NO: 11448 - DNA, 120 bp, Artificial Sequence
  ENSG00000009790_1 (sequence is synthesized)
ctagttggtgaagctgagataccctcctcccagggtggtgggtaatgaggtcgtgggaggaagagaagcagcagcagctgtgagggggagtccctcttccttcatcagtccctggtctga

SEQ ID NO: 11449 - DNA, 120 bp, Artificial Sequence
  ENSG00000009790_2 (sequence is synthesized)
ctccagtgatcagaggaggcaggacacagaatttccaacgctcaggatccagctcatccaaatccagcccaactcagcaaagtgaccagagggttctaggaggataaactacagaagcag

SEQ ID NO: 11450 - DNA, 120 bp, Artificial Sequence
  ENSG00000009790_3 (sequence is synthesized)
ccttattgaggtacaattcatgtgcttgtgggtttggatggcacaatctgtgtctgggctaaggaaagcagacttggcaccaacattaaccctgacagatccaggcatctattccaggaa

SEQ ID NO: 11451 - DNA, 120 bp, Artificial Sequence
  ENSG00000009790_4 (sequence is synthesized)
ctggaagccaagcgcaacaggtgcttggaggtcatcatgatcagcccagaccccaggccctcccctggcttggcccggtgggctgagagctatgaggccaagtgtgagcgcaggcaagag

SEQ ID NO: 11452 - DNA, 120 bp, Artificial Sequence
  ENSG00000009790_5 (sequence is synthesized)
atccgtgaaagccgccgctgccgtcccaatgtgaccacttgccgccaggtggggaagacgctgaggatccaacagagagagcagctccagagagctcgactgcagcagttcttcaggagg

SEQ ID NO: 11453 - DNA, 120 bp, Artificial Sequence
  ENSG00000009790_6 (sequence is synthesized)
aggaacctggagctagaggagaagggcaaagcgcagcatccccaggccagggagcaagggccctccaggcggccaggacaggtgactgtcctcaaggaacccttgtcttgtgccagaagg

SEQ ID NO: 11454 - DNA, 120 bp, Artificial Sequence
  ENSG00000009790_7 (sequence is synthesized)
atttcttctcccagagagcaggtgacaggcaccagctctgaagtctttccagcccagcatcctcctccctcaggcatctgcagggatctgtctgaccacctctcctcacaggctgggggc

SEQ ID NO: 11455 - DNA, 120 bp, Artificial Sequence
  ENSG00000009790_8 (sequence is synthesized)
cttcctccacaggacactcccatcaagaagccacccaaacaccaccgtggtactcagacaaaggcagaaggaccaacaattaagaacgatgccagtcagcaaaccaattacggagttgca

SEQ ID NO: 11456 - DNA, 120 bp, Artificial Sequence
  ENSG00000009790_9 (sequence is synthesized)
caaagggagctggtcctaaaacagaaaatggtgattctccaagacctactgtccactctgattcaggcctctgacagctcttggaagggacagcttaatgaagacaaactgaaggggaaa

SEQ ID NO: 11457 - DNA, 120 bp, Artificial Sequence
  ENSG00000009790_10 (sequence is synthesized)
ctgagatccttagaaaaccagctatacacctgtacccagaaatactccccttggggaatgaaaaaagtactactggagatggaagaccagaaaaacagctatgagcagaaggccaaggag

SEQ ID NO: 11458 - DNA, 120 bp, Artificial Sequence
  ENSG00000009790_11 (sequence is synthesized)
tcactgcagaaagtgctggaggagaaaatgaatgcagagcagcaactacagagcacacagcgatccctggccctggcagagcagaagtgtgaagagtggaggagccagtatgaggctctg

SEQ ID NO: 11459 - DNA, 120 bp, Artificial Sequence
  ENSG00000009790_12 (sequence is synthesized)
aaggaggactggaggacccttgggacccagcacagggagctggagagccaactccacgtgcttcagtccaaactgcagggagcagatagcagggacttacagatgaaccaggccctgcga

SEQ ID NO: 11460 - DNA, 120 bp, Artificial Sequence
  ENSG00000009790_13 (sequence is synthesized)
tttttggaaaatgagcaccagcaactgcaggccaagattgaatgcctgcaaggggacagagacctgtgcagcttggatacccaggacctacaagatcaactaaaaaggtcagaggcagag

SEQ ID NO: 11461 - DNA, 120 bp, Artificial Sequence
  ENSG00000009790_14 (sequence is synthesized)
aaactcaccctggtgaccagagtacagcagttgcagggtttgcttcaaaatcaatccttacagcttcaagaacaggagaaactcttaacaaagaaagatcaggctttgcccgtgtggagt

SEQ ID NO: 11462 - DNA, 120 bp, Artificial Sequence
  ENSG00000009790_15 (sequence is synthesized)
ccaaagtccttccctaacgaagtggagcctgagggtacagggaaggagaaagactgggatctcagagaccagctgcaaaagaagactttgcagctccaggccaaggaaaaggagtgcaga

SEQ ID NO: 11463 - DNA, 120 bp, Artificial Sequence
  ENSG00000009790_16 (sequence is synthesized)
gaactgcattcagaattagacaacctcagtgacgagtatctctcctgcctgcgtaagctgcagcactgtcgagaagagctgaaccagagccagcagctgcctcccagaaggcaatgtggg

SEQ ID NO: 11464 - DNA, 120 bp, Artificial Sequence
  ENSG00000009790_17 (sequence is synthesized)
cgatggctcccagtgctgatggtggtgattgctgcagcactggcagtgttcctggccaataaagacaacctgatgatctgaataatttgtgacaactgccttgggtgaaaatcagaagca

SEQ ID NO: 11465 - DNA, 120 bp, Artificial Sequence
  ENSG00000009790_18 (sequence is synthesized)
agcaactcagcgaaaaactcagaaggtttgggtacattacagcttgggttttccaactgacttaggatttctgactttttattaatttcttaacctactgtaaataaacttcacctgacc

SEQ ID NO: 11466 - DNA, 120 bp, Artificial Sequence
  ENSG00000009790_19 (sequence is synthesized)
agatgataccagagagcaagagagaggaactggggtttgcgaaccttgtggctttgtctgtttcctgtttcagcaaggctgctgtgcaaaaagaaagacggtaccaagaagggacgtgtt

SEQ ID NO: 11467 - DNA, 120 bp, Artificial Sequence
  ENSG00000009790_20 (sequence is synthesized)
aatggggcccagacctatggattgaaagcgtgtgctttacccatctgctgtcttgctccatctgagaccagagccaagatctgcccaggactggaatgctttcccgagtggcttgagttg

SEQ ID NO: 11468 - DNA, 120 bp, Artificial Sequence
  ENSG00000009790_21 (sequence is synthesized)
gagatgacagcgcagcggggattggctgaagccctaagcaacctctactagagcagagagatgagctgtgggctggtgcttctgtggtgaggtggtggtgtttctggagagcagatcaga

SEQ ID NO: 11469 - DNA, 120 bp, Artificial Sequence
  ENSG00000009790_22 (sequence is synthesized)
tcttacctgcctagaggcagcgggatggactacatgacctcctggagtcccagccagttctgggagtctgttaagtccgggatgtgtgggagctttttaaggactgatcattggctctga

SEQ ID NO: 11470 - DNA, 120 bp, Artificial Sequence
  ENSG00000009790_23 (sequence is synthesized)
ggacacttcaactagttagccttctatcttgaggtatataaactgtgaaaaagggtttctattctctctgaaagcacatgtctgtgttgaacatttcaataaatttattttgaactcagg

SEQ ID NO: 11471 - DNA, 120 bp, Artificial Sequence
  ENSG00000009790_24 (sequence is synthesized)
ttttttctactgttctccttccatgccaatgacaccacttacatttcccctagaactgcagattttttttaaatactgggtttcctaaagcagttcttattttatatattctaatttatg

SEQ ID NO: 11472 - DNA, 120 bp, Artificial Sequence
  ENSG00000009790_25 (sequence is synthesized)
tacatgaatgtgtcacatagacctgtcattagagatggtttagaaaataagcttacactatacgtgcctcaatccacttcaaaactacatattgggcccaaagaggaaaagggacttctc

SEQ ID NO: 11473 - DNA, 120 bp, Artificial Sequence
  ENSG00000009790_26 (sequence is synthesized)
agaagaaaagcagtttctgaaaagctggagaacctgactcaattaatacagctgctggttgcccaccactttaacctctgacacctgatagagaagcttcatgaaagcagcaatgattat

SEQ ID NO: 11474 - DNA, 120 bp, Artificial Sequence
  ENSG00000009790_27 (sequence is synthesized)
taagagagcaaagcaaccacagggaaaagggaaaatcttcaagcaaagacttgaagatagagacatggtagggggagatataaggatgctatattcatagcaaagtaccacagactgggt

SEQ ID NO: 11475 - DNA, 120 bp, Artificial Sequence
  ENSG00000009790_28 (sequence is synthesized)
gccttgaagaacagaaatgtattgtctcacagttctggagactagaaatccaagatgtcagcagggttgtttccttctgagggcgtttagggaaagatctatcccagggctctttccttg

SEQ ID NO: 11476 - DNA, 120 bp, Artificial Sequence
  ENSG00000009790_29 (sequence is synthesized)
gctttgtagatggccgtcttctctctgtgtctcttcacattgtctttcccatgaacatatctgtgtccatatttccccttcttataaggacaccagtgatattagattggggcccacctg

SEQ ID NO: 11477 - DNA, 120 bp, Artificial Sequence
  ENSG00000009790_30 (sequence is synthesized)
aatgaccccattttaacttgattatcttttaaagaatctatctccaaataaggtcattatttaaggtactgagggttaggacttcaacatatatattctgggggacaaaattcaacacac

SEQ ID NO: 11478 - DNA, 120 bp, Artificial Sequence
  ENSG00000009790_31 (sequence is synthesized)
agcagatgggaacatatttaataaccaaggttctaagcaaagttctgaaaagaaaactttttgtagtaaatatgctagcatagacaagttccttgtgttttccaacaggtttgcttcaaa

SEQ ID NO: 11479 - DNA, 120 bp, Artificial Sequence
  ENSG00000009790_32 (sequence is synthesized)
tccatgtttcctgagaattcactgtgtatacagaggggcaatagctcctcacctgtccactacacacgaccttttgttttctcttcacaatcattgggcataatataatagataaggcag

SEQ ID NO: 11480 - DNA, 120 bp, Artificial Sequence
  ENSG00000009790_33 (sequence is synthesized)
aaatttttatgctcacagagtatggataagaacatgaaagtctatggtgacacaaactaacaacacagctataacaacaatccaaaacttctgactcctagtccatgctcttttcaccaa

SEQ ID NO: 11481 - DNA, 120 bp, Artificial Sequence
  ENSG00000009790_34 (sequence is synthesized)
gactaagactgcagggtggctaaaaaaccatctttaaccatatgaagataaattttaggatatgactgccatcttcacaactttcaaatgaggacatcagggaaaagggattgtattaaa

SEQ ID NO: 11482 - DNA, 120 bp, Artificial Sequence
  ENSG00000009790_35 (sequence is synthesized)
gcatttaccaaacttatttgacaaactaggaagaatgtgacatacaaccaatgaaattcaattaagaagtattcactaaaactatctagcactagataagactggggatacaaagaaaag

SEQ ID NO: 11483 - DNA, 120 bp, Artificial Sequence
  ENSG00000009790_36 (sequence is synthesized)
atcccaatcttgccctcaaggagctcagattccagctgtctgtccaagcttagcaggggcctactggaagttaacctttatgtcagagaatgccatcagtctagccaagagcacgccctc

SEQ ID NO: 11484 - DNA, 120 bp, Artificial Sequence
  ENSG00000009790_37 (sequence is synthesized)
ccaagttccctcccctctccccactcctagtggtttcaccctcagggcccttcctcagaggtgtgggcctcactgtcaccaagaatctggctgcttttttagatcaggctttgcccgtgt

SEQ ID NO: 11485 - DNA, 120 bp, Artificial Sequence
  ENSG00000009790_38 (sequence is synthesized)
accaaaactcaaacacatttaataaaaatattaacttctcaatatgtcgtcccacattgagtatcttaagtctttatatgtctcttaaagagtaaaactcttcctttgtacatactcaca

SEQ ID NO: 11486 - DNA, 120 bp, Artificial Sequence
  ENSG00000009790_39 (sequence is synthesized)
aacatacacatccccagaagtattgatatgcaactagctcctgggaaagaaacttgtactaaggtcacttctaggtcgtttgttctataagaacttcatttttcggtgtctctcatttgc

SEQ ID NO: 11487 - DNA, 120 bp, Artificial Sequence
  ENSG00000009790_40 (sequence is synthesized)
aaagcacttgcacgtaaagtcatataaaagaacttaaatgtataaaatgtaatactataatatgcattactgtcaatcatttaaatgaacacattccagacaatgtaagacagtcaaaag

SEQ ID NO: 11488 - DNA, 120 bp, Artificial Sequence
  ENSG00000009790_41 (sequence is synthesized)
gaagggaagatggtggtaaaaattccaaatgagtgaaacttacaaagggcagtctcccctgcctgggctctgtcctagacagaagtgacagtgatgactttggtgatgttctccccagtg

SEQ ID NO: 11489 - DNA, 120 bp, Artificial Sequence
  ENSG00000009790_42 (sequence is synthesized)
tggattagggactccaaaggcagctgacagcatctggctttcagttcctcagtcaccactactttgtaccaaattcactgttttggctctgaaatctaattttgagtttagcaaggatgt

SEQ ID NO: 11490 - DNA, 120 bp, Artificial Sequence
  ENSG00000009790_43 (sequence is synthesized)
ctgcattgctcatgcaaatgaactaagcgttcattggaatgacaccatcaccacccaaatgaaaagaactggctggaatattcatcagcctactaatgtcatctcccaacccactctcca

SEQ ID NO: 11491 - DNA, 120 bp, Artificial Sequence
  ENSG00000009790_44 (sequence is synthesized)
gagaaaatgaatgcagagcagcaactacagagcacacaggtatggggatgccacatagacatggggctggggactccaggcagcttggggaacaaggggagccagctgcacaactccctg

SEQ ID NO: 11492 - DNA, 120 bp, Artificial Sequence
  ENSG00000009790_45 (sequence is synthesized)
tccatcccaaaaaagcatccagttcagaattgcccactgttggcaaagaaagaatgtcactaatttatttacaggtgagtattaacactttctgccaatgtgtattttaagcaattacat

SEQ ID NO: 11493 - DNA, 120 bp, Artificial Sequence
  ENSG00000009790_46 (sequence is synthesized)
ttagcaattacaattagattcttggcatcctcaagggttccatcatcttcaatctgtcctaagcctcagtttccccatctctaaaatgaggataatagtacctacatcataaggtggttc

SEQ ID NO: 11494 - DNA, 120 bp, Artificial Sequence
  ENSG00000009790_47 (sequence is synthesized)
tgagtattaagtaagatgatccatgtaaagcacttagcacaatgcctggcacacaaaaacactcagtaaatattagctattattttgcatagatttatttacctggtttggaattttgag

SEQ ID NO: 11495 - DNA, 120 bp, Artificial Sequence
  ENSG00000009790_48 (sequence is synthesized)
gatccacctcaaaagctgatctttgtaattttcctgaagcagggctcagaacagcccacttgataagagacagagtatgtgagtcttatcaaaggagtgaacccagctggtcactctgcg

SEQ ID NO: 11496 - DNA, 120 bp, Artificial Sequence
  ENSG00000009790_49 (sequence is synthesized)
tggtatccacagctcaacctttgttgttttcttcttcccatcacctataaggcaactcctatgaagatttttgtgaggggttttttaactttaaatctttgtggaaaaaaaaagacccta

SEQ ID NO: 11497 - DNA, 120 bp, Artificial Sequence
  ENSG00000009790_50 (sequence is synthesized)
accaaaaaaaaaactgatactgccagaagtagaaaaaagagaaaatgaaaacatccagaaaactaatgactttgtattccttaatttggtgatttaccaaagtgtcaagacatgactccc

SEQ ID NO: 11498 - DNA, 120 bp, Artificial Sequence
  ENSG00000009790_51 (sequence is synthesized)
ctaaagcaattcttattttatatattctaatttatgtacatgaatgtgtcacttagacctgtcactagggatggtttagaaaataaacttacactgcacatgcctcagtccacttcaaaa

SEQ ID NO: 11499 - DNA, 90 bp, Artificial Sequence
  ENSG00000009790_52 (sequence is synthesized)
tggcaaaagatgggaggattgcttgagcccaagaggtcgaggctgcaatgtgctatgatggcaccactgcactccagtctgggtgacaaa

SEQ ID NO: 11500 - DNA, 120 bp, Artificial Sequence
  ENSG00000009790_53 (sequence is synthesized)
caaagtgagaccccatctctaaaaataaaaataaataaataaaagacgcgagttccttgtgaatatcaaaagtctaatctgctgttataaatatgaggaacaaagcaaagggaagaaata

SEQ ID NO: 11501 - DNA, 120 bp, Artificial Sequence
  ENSG00000009790_54 (sequence is synthesized)
ggaaaaaagaaagacttctctattttctcatctccctaacattccttctatctctaaaattccagacttttctacattttcctcttccatggtacccgccccccaacctccaccccaaca

SEQ ID NO: 11502 - DNA, 120 bp, Artificial Sequence
  ENSG00000009790_55 (sequence is synthesized)
actgaattaagagaaaggcttcagccttttatttgtttgcttgattggttgattggctttataatctcattttaccttgagggagaggcaggactgttttaatcatccaaaattgaaaat

SEQ ID NO: 11503 - DNA, 120 bp, Artificial Sequence
  ENSG00000009790_56 (sequence is synthesized)
taatttcactgtagtagatagagtatcttgttgtctgagctctcttttttagcccatccctctgggccagatcacagctgctcccacatcagtcacatatgtcaaggccacagtcctaat

SEQ ID NO: 11504 - DNA, 120 bp, Artificial Sequence
  ENSG00000009790_57 (sequence is synthesized)
ttgaaagggaaaggtcagttgaaacacaaggcatagagaaagtctctcagtcacatcctctgtgtccgctgatagagaggactagatagtgtgtaaacacaagcctcaatgcaacccaac

SEQ ID NO: 11505 - DNA, 120 bp, Artificial Sequence
  ENSG00000009790_58 (sequence is synthesized)
attgttgatgcacaaaaacctgaggtacttggcttctggtttacctcttcagaactgggacacgaagatagagcaacttccaatagacacacgttaaagaccatgacaagacagcatcta

SEQ ID NO: 11506 - DNA, 120 bp, Artificial Sequence
  ENSG00000009830_0 (sequence is synthesized)
cgcctcctagcggcccgggccgcgaccacgctgcccgccccgccccgagcccggggccccgcgctccgctgcagtgaagggcgttgcatttcccggggtaccccgagctgccctcttgtg

SEQ ID NO: 11507 - DNA, 120 bp, Artificial Sequence
  ENSG00000009830_1 (sequence is synthesized)
tgccctcttgtgactccttggcggggcggctggtcagacaaagtgtgcctccgggccggagggcgacccagaggagggggaagatgccgccggccacgggcggaggcctggcagagtccg

SEQ ID NO: 11508 - DNA, 120 bp, Artificial Sequence
  ENSG00000009830_2 (sequence is synthesized)
agctgcgtccccggaggggccgctgtggcccccaggctgctagggccgcaggccgggacgtggccgctgaggctgtggcgcgaagccccaaacggcctgcttggggctcacggcgcttcg

SEQ ID NO: 11509 - DNA, 120 bp, Artificial Sequence
  ENSG00000009830_3 (sequence is synthesized)
aggcggtcggctggtgggccctgctggccttggtgacgctgctgtccttcgccacccgcttccaccgcttggacgagccgccgcacatctgttgggatgagactcactttggaaaaatgg

SEQ ID NO: 11510 - DNA, 120 bp, Artificial Sequence
  ENSG00000009830_4 (sequence is synthesized)
gaagttactatatcaaccgtacatttttctttgatgtgcacccgcccctgggaaagatgctgataggtcttgctggctacctgagtggatatgatggtacctttttgttccagaagcctg

SEQ ID NO: 11511 - DNA, 120 bp, Artificial Sequence
  ENSG00000009830_5 (sequence is synthesized)
gggataaatatgagcatcacagctacatgggaatgagaggattctgtgcattccttggctcctggctggtcccctttgcctacctcactgtactggatctgtccaagtccctctcggcag

SEQ ID NO: 11512 - DNA, 120 bp, Artificial Sequence
  ENSG00000009830_6 (sequence is synthesized)
cactgctcacagctgccctcctcacctttgacacgggatgcctcactctgtcccagtacatcctccttgaccccatcctgatgttcttcatcatggctgccatgctgagcatggtcaagt

SEQ ID NO: 11513 - DNA, 120 bp, Artificial Sequence
  ENSG00000009830_7 (sequence is synthesized)
acaactcttgcgccgacaggcccttctctgccccctggtggttctggctcagcctgactggcgttagtcttgctggtgctttaggggtcaagtttgttggcctctttatcatccttcaag

SEQ ID NO: 11514 - DNA, 120 bp, Artificial Sequence
  ENSG00000009830_8 (sequence is synthesized)
tggggctgaacaccattgcagacctttggtacctgttcggagacctcagtctttcattggtgactgtgggaaaacacctgactgctcgtgtcctgtgcctcatagtgctgcccctggctc

SEQ ID NO: 11515 - DNA, 120 bp, Artificial Sequence
  ENSG00000009830_9 (sequence is synthesized)
tctatacagccacctttgctgttcacttcatggtgctgagtaaaagtggccctggtgacggtttcttcagttctgccttccaggcccggctttcagggaacaacctgcacaatgcttcca

SEQ ID NO: 11516 - DNA, 120 bp, Artificial Sequence
  ENSG00000009830_10 (sequence is synthesized)
tccctgaacacctggcctacggctctgtgatcactgtgaagaacctccggatggccatcggctatctgcactcccacaggcacctctaccccgagggcattggtgcccgtcagcagcagg

SEQ ID NO: 11517 - DNA, 120 bp, Artificial Sequence
  ENSG00000009830_11 (sequence is synthesized)
tcaccacctatttgcacaaggactacaacaacctgtggattatcaagaaacataacacaaactcagatcccctagacccttccttcccagtggagtttgtaagacatggagacattattc

SEQ ID NO: 11518 - DNA, 120 bp, Artificial Sequence
  ENSG00000009830_12 (sequence is synthesized)
gactagaacacaaagaaacttcccggaacttgcacagtcactatcatgaggcccccatgacccggaagcactatcaggtcaccggctatggcataaatggaacaggggactcaaatgatt

SEQ ID NO: 11519 - DNA, 120 bp, Artificial Sequence
  ENSG00000009830_13 (sequence is synthesized)
tctggcggattgaggtcgtaaacaggaaatttggaaaccggatcaaagtgctgagaagtcgaattcgcttcatccatttggtcacaggttgtgtcctgggctcctcgggaaaggttctgc

SEQ ID NO: 11520 - DNA, 120 bp, Artificial Sequence
  ENSG00000009830_14 (sequence is synthesized)
ccaagtggggctgggagcagttggaagttacttgcaccccatacctgaaagaaaccctcaactccatctggaatgtggaggaccatatcaatcccaagttgccaaacatcagcctggatg

SEQ ID NO: 11521 - DNA, 120 bp, Artificial Sequence
  ENSG00000009830_15 (sequence is synthesized)
tgctacagcccagttttcctgagatcttgctggaatcccacatggtcatgatccgggggaacagtggcctcaaacccaaggacaatgagttcacgtccaaaccctggcactggcctatca

SEQ ID NO: 11522 - DNA, 120 bp, Artificial Sequence
  ENSG00000009830_16 (sequence is synthesized)
actatcagggcctacgcttctcaggggtcaatgacacagatttccgagtctatctgcttggcaacccggtggtttggtggctgaatctgttgagcatcgccctctacctcctctcaggga

SEQ ID NO: 11523 - DNA, 120 bp, Artificial Sequence
  ENSG00000009830_17 (sequence is synthesized)
gcatcattgctgtagccatgcagagaggggcacggctgccagcggaggttgcagggttgtcccaggtcctgcttcgaggaggcggccaggtcctgctcggctggacactccattacttcc

SEQ ID NO: 11524 - DNA, 120 bp, Artificial Sequence
  ENSG00000009830_18 (sequence is synthesized)
cgtttttcctgatgggccgggtcctctacttccaccactacttcccagccatgctcttctcaagcatgttgacaggcattctgtgggacaccctcctgcggctctgtgcctggggcttgg

SEQ ID NO: 11525 - DNA, 120 bp, Artificial Sequence
  ENSG00000009830_19 (sequence is synthesized)
cctcatggcccctggcgaggggcatacatgtggcgggaatcctgagcctgctcctgggaactgcctacagcttctacctcttccaccctctggcttacgggatggttggtcccctggccc

SEQ ID NO: 11526 - DNA, 120 bp, Artificial Sequence
  ENSG00000009830_20 (sequence is synthesized)
cctgggtccaggaacttcccaggagagccagctgggaagcagtactggaccatccggccatgaggaagctgcctaaggagcccgaagaattctgctgctcaccaggacccagctctggga

SEQ ID NO: 11527 - DNA, 120 bp, Artificial Sequence
  ENSG00000009830_21 (sequence is synthesized)
gtgcagctggaatggaacccagcattggagagagccgggagagagccgcagctccgtccacagcaccacggagaggacagcgcctcttgggctgctccctcgtgcacagcgcaggggagg

SEQ ID NO: 11528 - DNA, 120 bp, Artificial Sequence
  ENSG00000009830_22 (sequence is synthesized)
atgggtgccagagggtgggagtgggtgcgcgtgtgtgtatgtgagggcatgttgtccatatccctgtggaatacagaccgtgtaactggacagctgagtgtcataaactctaaaatagtc

SEQ ID NO: 11529 - DNA, 120 bp, Artificial Sequence
  ENSG00000009830_23 (sequence is synthesized)
caggctatagtaatattttctggtatttttttctgttggatttctttggttttggtttgtaagatccatcaaaaattctcagacctctgagagggccttgagggcagagaatactgacct

SEQ ID NO: 11530 - DNA, 120 bp, Artificial Sequence
  ENSG00000009830_24 (sequence is synthesized)
caccttgggatgtcaccaaaggcagagcagatgggactgtcaaagttgtgctgccctccctcccacaaacaaatgaatccagcgtggaggaaggcgcgccgccccgagctggagggcctg

SEQ ID NO: 11531 - DNA, 120 bp, Artificial Sequence
  ENSG00000009830_25 (sequence is synthesized)
gctcccaccatgccccccagtggctgcaggtagctggacttcctgcctgtgacgcacagagagcagcggactccggagcgtcagcctgccttagcccttggttcctcgttttttgggatt

SEQ ID NO: 11532 - DNA, 120 bp, Artificial Sequence
  ENSG00000009830_26 (sequence is synthesized)
gtcacactgtgacactcgggaggaacgatgtcctatcctgggctgctcagtgttcccaggccctgtgtgccagaggccaggtctctccaagtgcatctagcctggcctggagggcaaggc

SEQ ID NO: 11533 - DNA, 120 bp, Artificial Sequence
  ENSG00000009830_27 (sequence is synthesized)
agatgcattctcctggctgctgggagagcccatgggaaccttgcttagcgcccaaggtagatgagagacagggcagggaatctgcgtggtgctgggatgtggggactctggcctctccag

SEQ ID NO: 11534 - DNA, 120 bp, Artificial Sequence
  ENSG00000009830_28 (sequence is synthesized)
actaatgttcctgtcacctgctgagctttcccagtgtcacttctgcagtcctcctctgctcacccctccctcactccgtgggcaattccctttctctctgtcactgcttcagcagtgaag

SEQ ID NO: 11535 - DNA, 120 bp, Artificial Sequence
  ENSG00000009830_29 (sequence is synthesized)
acccatggcacctagaaatgcatgccagcttcctgcgtctaccactctgcagctcaaacaagaagctcagagctgccccttccacttcctccccaaaagggatgaagaaaaccctgtggt

SEQ ID NO: 11536 - DNA, 120 bp, Artificial Sequence
  ENSG00000009830_30 (sequence is synthesized)
agaaccaaaccacccaaggccagcccttaagcctgcctccaccttcctggtgcatgacaaaatatttcttttgtctcagaggactttgatgcttcaatatttaatgatgaatccgccaca

SEQ ID NO: 11537 - DNA, 120 bp, Artificial Sequence
  ENSG00000009830_31 (sequence is synthesized)
ctccattttccctcctctgaagctcccaacaactctgacagggtcagatctctttaaagcatcttcaggaggcggttgccacggagactggatattggtcccagggacaggctgtgctac

SEQ ID NO: 11538 - DNA, 120 bp, Artificial Sequence
  ENSG00000009830_32 (sequence is synthesized)
ctactgggtggtggggagggaagcttctggccatgcttgggcattcagaccaaccatcattaatgttaatagaggaaatgcagcaacgtcaaaagcaaggcaggttggttaattagatct

SEQ ID NO: 11539 - DNA, 120 bp, Artificial Sequence
  ENSG00000009830_33 (sequence is synthesized)
ggggcccgatgacctccctttcccactgctacagcccttttgacttcccccagcaggaagcgctgtctgtgcggctgagtctgggccacttgcttaattgcatttctggcagggaaggag

SEQ ID NO: 11540 - DNA, 120 bp, Artificial Sequence
  ENSG00000009830_34 (sequence is synthesized)
aggagggatggagaagctctgctcgctgcttccacctcaccgtgtgtcctcccctcccctcccttcctctcctccccacaggcggaattgctttcttctgagccgggtgggctctcctgc

SEQ ID NO: 11541 - DNA, 120 bp, Artificial Sequence
  ENSG00000009830_35 (sequence is synthesized)
agggagaatgcaggggtctgtgcttggctcttagcaaagcaggtggcccacagtgacctccaggaggtggctgattttcctttgtgccttcttatttctcagtaggaacttggaagggaa

SEQ ID NO: 11542 - DNA, 120 bp, Artificial Sequence
  ENSG00000009830_36 (sequence is synthesized)
gagctctgaaggagccagaggggcagccaccttgcatgagggtgaggaaggagaagcccagccagcctctacccatccctccctcccaattaggctgcactggggccgaacgcttccctg

SEQ ID NO: 11543 - DNA, 120 bp, Artificial Sequence
  ENSG00000009830_37 (sequence is synthesized)
ggctcccactgccttctaaggagccaaggagaattccctgcccactttctgttcctccatgcccaaactggcagatgcttctctgggagcaaggccacatgggctgatgcagctttgagt

SEQ ID NO: 11544 - DNA, 120 bp, Artificial Sequence
  ENSG00000009830_38 (sequence is synthesized)
gctcaggttctgttttctggaagttgctggagaagggctgtcagggtgcttctatgaatatgggcttcagctgtagcacttggcagaaacgtgatgtgtcccacaaactgctggtggagg

SEQ ID NO: 11545 - DNA, 120 bp, Artificial Sequence
  ENSG00000009830_39 (sequence is synthesized)
aagaagatgttcgtcagccaattcaacctccagccagcttcttgagcctatttggtttaaaaaaaaaaagtcttctaatcagaagccactgattttataataaataacacttgttttgaa

SEQ ID NO: 11546 - DNA, 120 bp, Artificial Sequence
  ENSG00000009830_40 (sequence is synthesized)
attcctggtatgtagctccttggtctcttttctctctcactgtgacttggaatctcactttcctttcaaaaggccaattccccaggaatcagcctctgtccaagagctgccgtgttttat

SEQ ID NO: 11547 - DNA, 120 bp, Artificial Sequence
  ENSG00000009830_41 (sequence is synthesized)
tttataccatctgaaggaaagcggaatcagagagccccttactgactctacccttcaaattgtggggctctttttccttcctgagtgtttaggttgtgctgttcctagacctcggccata

SEQ ID NO: 11548 - DNA, 120 bp, Artificial Sequence
  ENSG00000009830_42 (sequence is synthesized)
gttttcctgtgttcacctgctgtctgcttgttcttagtggcagatggagggagagtagatatcaggtgtattatggagcacagaactccgggggagcttcggtgttttatgtgttctgat

SEQ ID NO: 11549 - DNA, 120 bp, Artificial Sequence
  ENSG00000009830_43 (sequence is synthesized)
gatcctagattggtcgtgtctcctaggtgcatggctaaaagcaaatgtaagccctctttggggaaagtcgttgtcatttgttcccatagttttttagtgacaatagtacacacccaaaag

SEQ ID NO: 11550 - DNA, 120 bp, Artificial Sequence
  ENSG00000009830_44 (sequence is synthesized)
taacaaagcacacaaggaaatagggcactgtgtgcaagaacaagctgaaacgacagacagcaggagcagccccgtaaacatttcatagactggaattatcggatacaaatttttaaaaat

SEQ ID NO: 11551 - DNA, 120 bp, Artificial Sequence
  ENSG00000009830_45 (sequence is synthesized)
agaggacagaggaatcttctcccaaaggcttctcatctttttgtttgttcttctctcctcagatgctgataggtcttgctggctacctgagtggatatgatgttctgtgcattccttggc

SEQ ID NO: 11552 - DNA, 120 bp, Artificial Sequence
  ENSG00000009830_46 (sequence is synthesized)
aggctgggccctgaccagagctctcgagccccagctgctcctctccagtttctgtagcgtggtttgggttggtccaatgaggtgatatgacatattcaaggtcacacagcaaggaagggg

SEQ ID NO: 11553 - DNA, 120 bp, Artificial Sequence
  ENSG00000009830_47 (sequence is synthesized)
cagagctggaccagagcctggaatctctgcccgctccttgtcttctgactgggctgtgctgcttgggcccagggttgtcccaggtcctgcttcgaggaggcggccaggtcctgctcggct

SEQ ID NO: 11554 - DNA, 120 bp, Artificial Sequence
  ENSG00000009830_48 (sequence is synthesized)
aactgcctacaggtgagcatctctgcacctcacatgccctcccagtgtgggctcagcagtgcctcagccctgatgcattcgagaatcccctgcggtgcttttaacaccaccagtgcccat

SEQ ID NO: 11555 - DNA, 120 bp, Artificial Sequence
  ENSG00000009830_49 (sequence is synthesized)
taattcaacaactctttatcaagtatgccaggaaccacatggggccctgtggacatattggcgaggagacagacttggtccccatcccgacagcagctgctccaggcgtccagaatgatt

SEQ ID NO: 11556 - DNA, 120 bp, Artificial Sequence
  ENSG00000009830_50 (sequence is synthesized)
tattcctcattcccaggcccttcaaagggccacagtgactcgggggctgtgcagctgtcccttatgcctaataggagagcagcatttgagccagtaccacagtgaaaagcaatggtgctg

SEQ ID NO: 11557 - DNA, 120 bp, Artificial Sequence
  ENSG00000009830_51 (sequence is synthesized)
ggagctgttggagcaccaagcaggtgaaaccttgttgtctatttcctttgcatttcttagaatgcctgatgagttcttcatacagctaagtaaatgatcaagaattgggccaagctttct

SEQ ID NO: 11558 - DNA, 120 bp, Artificial Sequence
  ENSG00000009830_52 (sequence is synthesized)
ctcctcaacagttgtgaacttgtcagcaaggctgcatttggattctggtgggaatgtggacaccatggacagactgaggaaagaatgtatgacaaaggcttttctcctgcatttttttcc

SEQ ID NO: 11559 - DNA, 120 bp, Artificial Sequence
  ENSG00000009830_53 (sequence is synthesized)
ctagctcaggccatgcagattacaagttttaatttttcctctcctcaaacctgcctcctaagtcaggcaagctaagtgcttcaaagctactaaatgtgtgaaagtcgccccccacctccc

SEQ ID NO: 11560 - DNA, 120 bp, Artificial Sequence
  ENSG00000009830_54 (sequence is synthesized)
tgccagcacctaaagttagcccctttcttggcatgccgtccagtgctcctaccatctgtctctcctggtttgggctcatctcttctccagttctcaggatatttcttgtgagtaaatagg

SEQ ID NO: 11561 - DNA, 120 bp, Artificial Sequence
  ENSG00000009830_55 (sequence is synthesized)
tgttgagcatcgccctctacctcctctcagggagcatcattgctgtagccatgcagagaggggcacggctgccagcggaggttgcaggcattctgtgggacaccctcctgcggctctgtg

SEQ ID NO: 11562 - DNA, 120 bp, Artificial Sequence
  ENSG00000009830_56 (sequence is synthesized)
cacctgcacccctggggagggccggctgcctgctgatgggccatcctttgcgtttaccaccccacaccttcccttatcctttgcttttgaaaggaaaccaaggaaccatgagattaagaa

SEQ ID NO: 11563 - DNA, 120 bp, Artificial Sequence
  ENSG00000009830_57 (sequence is synthesized)
acttgccccaggacatacagctaggttgtcccaggtcctgcttcgaggaggcggccaggtcctgctcggctggacactccattacttcccgtttttcctgatgggccgggtcctctactt

SEQ ID NO: 11564 - DNA, 120 bp, Artificial Sequence
  ENSG00000009830_58 (sequence is synthesized)
caaagaatgtccacttaaaaaaatctggcgatgggagcagaaagaaacttcccggaacttgcacagtcactatcatgaggcccccatgacccggaagcactatcaggtcaccggctatgg

SEQ ID NO: 11565 - DNA, 120 bp, Artificial Sequence
  ENSG00000009830_59 (sequence is synthesized)
ttttatggattaggaaaccaaggaaccatgagattaagaaacttgccccaggacatacagctaggttgtcccaggtcctgcttcgaggaggcggccaggtcctgctcggctggacactcc

SEQ ID NO: 11566 - DNA, 120 bp, Artificial Sequence
  ENSG00000009830_60 (sequence is synthesized)
taggaggagggccacggtggaggggaacttgagaaggcagtacgcagacctcctctttgtcctggagggagacactgcctcttctctcaaagttgcttgctgcaaacacaaccatgagaa

SEQ ID NO: 11567 - DNA, 120 bp, Artificial Sequence
  ENSG00000009830_61 (sequence is synthesized)
ttatcatccttcaagtggggctgaacaccattgcagacctttggtacctgttcggagacctcagtctttcattggtgagcacccaagggtttgctgtggaaatgtttttgctccctgatg

SEQ ID NO: 11568 - DNA, 120 bp, Artificial Sequence
  ENSG00000009830_62 (sequence is synthesized)
ttgctgagtaggagctggtggccttctctgtctctactgcaggtggcagagtggctgtgttctgggtcccaggtgggctggaccccccaacctccgcagacagcaggacatcagggagtg

SEQ ID NO: 11569 - DNA, 120 bp, Artificial Sequence
  ENSG00000009830_63 (sequence is synthesized)
agtgggcccggctgaggactggatagggttcaagggagaggatagattaacattcttggaagtctctttttgcatttgttttataatgtctgtcttttttttttttttgagatagagttt

SEQ ID NO: 11570 - DNA, 64 bp, Artificial Sequence
  ENSG00000009830_64 (sequence is synthesized)
cggttctaccatgttggccagattgttctcaaacccctgacctcaagtgatccgcccgccttgg

SEQ ID NO: 11571 - DNA, 120 bp, Artificial Sequence
  ENSG00000009830_65 (sequence is synthesized)
acaggcatgagccaccgagcccggtctgaactcacaattttcatttcctgacccacggtctccatatttggaggccagtaagggcctttacagtttattatttattaagggctgattcta

SEQ ID NO: 11572 - DNA, 120 bp, Artificial Sequence
  ENSG00000009830_66 (sequence is synthesized)
tgccaggcactatgcgaaacgctttaccttcattatctcatttacccctcataatagtcctatgaggtagggagttattaccctgattttcaaatgaggaaatcaaaacctacagaggta

SEQ ID NO: 11573 - DNA, 120 bp, Artificial Sequence
  ENSG00000009830_67 (sequence is synthesized)
atgacttccccgaggccatcggggagtgagaggtgtatctaggagtcacaaccaggttaggttggccccaggccatcactctgctgtggtgctgctccatcacctccaaaccagctccta

SEQ ID NO: 11574 - DNA, 120 bp, Artificial Sequence
  ENSG00000009830_68 (sequence is synthesized)
acaagtttattcattcattcattcatttattcagaaaatgtgtaaagatcatccagccactgtgtgtgaggtgctggaatatacagatgaatataatatggtccccaccctctgtggtca

SEQ ID NO: 11575 - DNA, 120 bp, Artificial Sequence
  ENSG00000009830_69 (sequence is synthesized)
atggagagagagaaataaggaagcaggcagttacagtcagccaggagtgctgggagagcacagaaaagggcactcggccagtcccaggcaatccaggaaggcctctggaaggaagccgcg

SEQ ID NO: 11576 - DNA, 120 bp, Artificial Sequence
  ENSG00000009830_70 (sequence is synthesized)
aagttaagataaggagccattagccatgtgatgggttgggctgggacagtagaggaagcactgggaaagttcaaggaggttagtgtacctggaacatggagcggactggtgagcaactgt

SEQ ID NO: 11577 - DNA, 120 bp, Artificial Sequence
  ENSG00000009830_71 (sequence is synthesized)
gttgcagatgcaggtgccttgtccttggcacagtaacatcctggggttttgggtgtagagcctggagaggtagcagagggctggcccatgtttatcttgtgtagtgcttgggtggtgggt

SEQ ID NO: 11578 - DNA, 120 bp, Artificial Sequence
  ENSG00000009830_72 (sequence is synthesized)
gttacagaaaggcttagggtttccacatattcttctctctcctcttggccattttttatgattatgactgatatattaaaagctatatataatgcatgcatagtgcctaaggaataatga

SEQ ID NO: 11579 - DNA, 120 bp, Artificial Sequence
  ENSG00000009830_73 (sequence is synthesized)
aaccatgagattaagaaacttgccccaggacatacagctagtaagtgatagagctgaggctcaaacccgtgcaatctgactccacagccctcacttttagccccatgctgtgtacagagc

SEQ ID NO: 11580 - DNA, 120 bp, Artificial Sequence
  ENSG00000009830_74 (sequence is synthesized)
tgcccatcttttctgccacctccttgttccatggccctgtcctctcatgggctagagaggagcctccagggttattgagttcccatcccagtgctgttcttggtaactttggctgccaga

SEQ ID NO: 11581 - DNA, 120 bp, Artificial Sequence
  ENSG00000009830_75 (sequence is synthesized)
ccatgggccacagcacctgagacagtcacacaggcccttttgcctctgcagctctctgtctgaacagtcatagtcccagacacctcctcactccatcctcacctgtaacctcaccttagc

SEQ ID NO: 11582 - DNA, 120 bp, Artificial Sequence
  ENSG00000009830_76 (sequence is synthesized)
gcctgtctgccgctgcaaagatctgtgtggcagcaaagatgtgggaggtggaagtagggagtgaagctgtctgcaggcgcagaagggtttctttagaggctgggctgcctcctgctggtg

SEQ ID NO: 11583 - DNA, 120 bp, Artificial Sequence
  ENSG00000009844_0 (sequence is synthesized)
aggaagtggtgagttcggagtagagatggccgcgcttgcaccgctgcccccgctccccgcacagttcaagagcatacagcatcatctgaggacggctcaggagcatgacaagcgagaccc

SEQ ID NO: 11584 - DNA, 120 bp, Artificial Sequence
  ENSG00000009844_1 (sequence is synthesized)
tgtggtggcttattactgtcgtttatacgcaatgcagactggaatgaagatcgatagtaaaactcctgaatgtcgcaaatttttatcaaagttaatggatcagttagaagctctaaagaa

SEQ ID NO: 11585 - DNA, 120 bp, Artificial Sequence
  ENSG00000009844_2 (sequence is synthesized)
gcagttgggtgataatgaagctattactcaagaaatagtgggctgtgcccatttggagaattatgctttgaaaatgtttttgtatgcagacaatgaagatcgtgctggacgatttcacaa

SEQ ID NO: 11586 - DNA, 120 bp, Artificial Sequence
  ENSG00000009844_3 (sequence is synthesized)
aaacatgatcaagtccttctatactgcaagtcttttgatagatgtcataacagtatttggagaactcactgatgaaaatgtgaaacacaggaagtatgccagatggaaggcaacatacat

SEQ ID NO: 11587 - DNA, 120 bp, Artificial Sequence
  ENSG00000009844_4 (sequence is synthesized)
ccataattgtttaaagaatggggagactcctcaagcaggccctgttggaattgaagaagataatgatattgaagaaaatgaagatgctggagcagcctctctgcccactcagccaactca

SEQ ID NO: 11588 - DNA, 120 bp, Artificial Sequence
  ENSG00000009844_5 (sequence is synthesized)
gccatcatcatcttcaacttatgacccaagcaacatgccatcaggcaactatactggaatacagattcctccgggtgcacacgctccagctaatacaccagcagaagtgcctcacagcac

SEQ ID NO: 11589 - DNA, 120 bp, Artificial Sequence
  ENSG00000009844_6 (sequence is synthesized)
aggtgtagcaagtaatactatccaacctactccacagactatacctgccattgatcccgcacttttcaatacaatttcccagggggatgttcgtctaaccccagaagactttgctagagc

SEQ ID NO: 11590 - DNA, 120 bp, Artificial Sequence
  ENSG00000009844_7 (sequence is synthesized)
tcagaagtactgcaaatatgctggcagtgctttgcagtatgaagatgtaagcactgctgtccagaatctacaaaaggctctcaagttactgacgacaggcagagaatgaagcctttgtat

SEQ ID NO: 11591 - DNA, 120 bp, Artificial Sequence
  ENSG00000009844_8 (sequence is synthesized)
gacagacccatgtatttttggcatgaggaactaacagtccattactctatcttcagcctatcaggatcacagttttaaggaagacttggttttgttgaatatgacaatgaaatctgtgtg

SEQ ID NO: 11592 - DNA, 120 bp, Artificial Sequence
  ENSG00000009844_9 (sequence is synthesized)
tatcagatttttattgaagcattcatcagcagcctcaaccagttttcattgtccatttactagattcaatcgtctctgagtatatagggctgatgttagcaagaccctaaaaatgtccat

SEQ ID NO: 11593 - DNA, 120 bp, Artificial Sequence
  ENSG00000009844_10 (sequence is synthesized)
tgaaccctgcttcaaaaaatgaaaacacacctctataaaatgtgtactgggaataagctttgtatttacatacattaggggaattttttaaaatctgtaatgtttggacaaacagatgat

SEQ ID NO: 11594 - DNA, 120 bp, Artificial Sequence
  ENSG00000009844_11 (sequence is synthesized)
attactttgctataaaattataaatgtaacttttaataaagatagccagaatattctaaattagaaattacgtttttgtttccctcaagacataaaacaaatataaacattctaaactgc

SEQ ID NO: 11595 - DNA, 120 bp, Artificial Sequence
  ENSG00000009844_12 (sequence is synthesized)
tggatgaatctgaaaagacattaagttcaaattttaatttattctcatattaaatataactccattaaaagtttaaaatttcatgggagaaaatataataaggtaaagaggtagaatcac

SEQ ID NO: 11596 - DNA, 120 bp, Artificial Sequence
  ENSG00000009844_13 (sequence is synthesized)
tttcagacttaagaataatgttgatttcccaagtgctttaccttatctgttaaagcgtaagatgaattggtatttgcttcataggcagtttgactgcatgtattagagaatgaaaagaag

SEQ ID NO: 11597 - DNA, 120 bp, Artificial Sequence
  ENSG00000009844_14 (sequence is synthesized)
atatttgtagtaatgcctggaaacttggtgctttaaattaaggtactcctctgctgctgtagaatggattccacacagtggatagctatgggtgattcagaatattatgtttagattccc

SEQ ID NO: 11598 - DNA, 120 bp, Artificial Sequence
  ENSG00000009844_15 (sequence is synthesized)
atttgttaagtttataagttttgtggggaattatgaacttactgtgtactacctgcatttgtgctgtgtgaaaaataaatacaaggattcgtttagctaattcaacttactacaaagaca

SEQ ID NO: 11599 - DNA, 120 bp, Artificial Sequence
  ENSG00000009844_16 (sequence is synthesized)
aatgtctgtttttatttgcctgctaggattgtcttttttaaaagtcatttttatttataggaatatgggtgtttctataggaagaaacaggttttttgttttttgttttttaagataaat

SEQ ID NO: 11600 - DNA, 120 bp, Artificial Sequence
  ENSG00000009844_17 (sequence is synthesized)
ttgacaaagttaactgaaatttatctggtccattttattcatgctactaagatgggaatctttaaacacaagggtcagcaagctttggcccatggattggccacctgttacgtaaataaa

SEQ ID NO: 11601 - DNA, 120 bp, Artificial Sequence
  ENSG00000009844_18 (sequence is synthesized)
gtttctttgaaacaagcctacactcattcatttatgttttgtctgtggttgctttccacaactgcagagttgtatggcttgcaagtctaaaaacatttactatttggccctctaagaaaa

SEQ ID NO: 11602 - DNA, 120 bp, Artificial Sequence
  ENSG00000009844_19 (sequence is synthesized)
agttaagacacctagtctaatggccttttgggaaaaaacaaatcactaactcataatcatttatatccattattttctgcataaatgtaatgctattgtacagggtttggtagaataaat

SEQ ID NO: 11603 - DNA, 120 bp, Artificial Sequence
  ENSG00000009844_20 (sequence is synthesized)
attcagactgactaaactgttctaaatcctcacaaaaaagtccccaaacaacatgcctcctaaaaaacattttcctatcttttacaagaggtatgaacatttgtagggttccacatttgc

SEQ ID NO: 11604 - DNA, 120 bp, Artificial Sequence
  ENSG00000009844_21 (sequence is synthesized)
atctagaaatccaatgctctttagaatgttattacgaatagaaagatggccaggatgacctttagtgttacatgatgttcagcaaattttaattcaaaccttgatatgcctggacactga

SEQ ID NO: 11605 - DNA, 120 bp, Artificial Sequence
  ENSG00000009844_22 (sequence is synthesized)
aaagtaaacgcatcacctcctattttataccctaccttctggttcccaattgggagagcacatagagggaaggagacaatatagaaactacggagtccgctggtagtgggctgcatggtg

SEQ ID NO: 11606 - DNA, 120 bp, Artificial Sequence
  ENSG00000009844_23 (sequence is synthesized)
tgacagagcccttctctgtaaaatggaaatgacaccactagccatctcaatagttacaagaattaaaagagatacagtacctgaagtgcttagcgcatggtagcatttcataaatgttta

SEQ ID NO: 11607 - DNA, 120 bp, Artificial Sequence
  ENSG00000009844_24 (sequence is synthesized)
gtgtcaatactaatgctctaataatgtaaattgttaataatttatttccctaatatcaggaaatcccagttgtctatgtggcccagtgcttaaaaacgccttcttgcatgaggggattga

SEQ ID NO: 11608 - DNA, 120 bp, Artificial Sequence
  ENSG00000009844_25 (sequence is synthesized)
actatacaatgtttgttaactttgtatttgtattttttcctataaaatcttaaaataaaattaggagatgtgttctgatgtaacagtaggattagcaattttcatttattccttccatat

SEQ ID NO: 11609 - DNA, 120 bp, Artificial Sequence
  ENSG00000009844_26 (sequence is synthesized)
atatttactgaatggctactatatgcctggtattgttctttgaaagcagaaacagcaggaaaaaaagtccctccctcatagagtttacattctaaaagggaggaaatagataataaaata

SEQ ID NO: 11610 - DNA, 120 bp, Artificial Sequence
  ENSG00000009844_27 (sequence is synthesized)
tacattacatttaatcagtggctctccgagtgtgattagaaatacaaattttgggccccacctgtcctacccaatcagaaactctagggatgggtcccagccttctgagttttaagagac

SEQ ID NO: 11611 - DNA, 120 bp, Artificial Sequence
  ENSG00000009844_28 (sequence is synthesized)
acttaaggtggtccctaaagttcgagtggtttagctctacccaaatcagaaatattgcaagtctgagaaaagagattctcctcaaaccggttctcaaaggtgtctctggacgaccggcat

SEQ ID NO: 11612 - DNA, 120 bp, Artificial Sequence
  ENSG00000009844_29 (sequence is synthesized)
tggggaccacactatgggaacttctgtattaaatagtgataaatgctatggaggaaacattgaggacaggataggagatgcttaggtgtgtacagacatatgcatatttcaatagaatag

SEQ ID NO: 11613 - DNA, 120 bp, Artificial Sequence
  ENSG00000009844_30 (sequence is synthesized)
ccaggatagacctccctgaggtaacatttgagcaaagaaggaaaagagtaactagtatgcagatacatacatggaggaagagcattcccaacaggtagacagaaatcaggtcagagggta

SEQ ID NO: 11614 - DNA, 120 bp, Artificial Sequence
  ENSG00000009844_31 (sequence is synthesized)
aaagcaggagaaaggctggtgagggagctaaaagcttaggatcataaagcttttttgtaagacacttgactgggagctatatggaaaggttttcagaagaaacgtagcctgatgtgactt

SEQ ID NO: 11615 - DNA, 120 bp, Artificial Sequence
  ENSG00000009844_32 (sequence is synthesized)
aacttttgaaataatcatattggctcctatgttgagaatagaccgtaaggtgggtggtaagtaagggaggaagctgggagaccagttaaaaagagtattaacaataggccgggggcggtg

SEQ ID NO: 11616 - DNA, 87 bp, Artificial Sequence
  ENSG00000009844_33 (sequence is synthesized)
accagttaaaaagagtattaacaataggccgggggcggtggttcgcacctgcaatcccagcactttgggaatatatttattaatata

SEQ ID NO: 11617 - DNA, 120 bp, Artificial Sequence
  ENSG00000009844_34 (sequence is synthesized)
gagactccttctcaaaaaaaaaaaaagtattacaataatcaaggtgagatattatgatgtcttagtccaggagtagccttggaggtaataaaacgggattggtttctggcggcttttttt

SEQ ID NO: 11618 - DNA, 120 bp, Artificial Sequence
  ENSG00000009844_35 (sequence is synthesized)
taaaacgggattggtttctggcggcttttttttaggtagagccacaggatttctgtaaactggatgtgaggtacgaacataagagaaggagtaaaggttgactccagatttttcacctga

SEQ ID NO: 11619 - DNA, 120 bp, Artificial Sequence
  ENSG00000009844_36 (sequence is synthesized)
atgcctgaaaggaatgagtaatcatgtactgcagtagggaaagttgccgaattcctctctcacttagactgaagtacaatgtttccaagtttttgtgaccagcccaagtgaaactgataa

SEQ ID NO: 11620 - DNA, 120 bp, Artificial Sequence
  ENSG00000009844_37 (sequence is synthesized)
cggtgttttgtcaatgcggcagagggagaagaagaaataaggttctgctgacaatgattgccacagatatctcaccaaatcactgctgaactggagctgcaagccaagaatagttcccat

SEQ ID NO: 11621 - DNA, 120 bp, Artificial Sequence
  ENSG00000009844_38 (sequence is synthesized)
ggttagcatggcctaggaagtttactgacatcaggactacaccaagaaaaagactccagttatgggtcttgaaaattaatatcctcagatgtttttagaatttatatatgacttgtaatt

SEQ ID NO: 11622 - DNA, 120 bp, Artificial Sequence
  ENSG00000009844_39 (sequence is synthesized)
ctagaaatttgagaattctatgtatgcattgaaagattatatactgtcttttctaaagaaacaccctaatagcagcattgtacaaatattttcaactctaaaagaataatagctaatgga

SEQ ID NO: 11623 - DNA, 120 bp, Artificial Sequence
  ENSG00000009844_40 (sequence is synthesized)
gttgatgggttttggttttcatatgagaagtatccttccctggttggttgtaatctttgaagtctatgtggaattctaagactgcaggcttgttcattggagtacacttaagtaggacaa

SEQ ID NO: 11624 - DNA, 120 bp, Artificial Sequence
  ENSG00000009844_41 (sequence is synthesized)
attctaagtaagcaacacttcaataataatcataatagctaacatttcaatgtttactaaatgtcagatactattctaagtattttgcatatattaattcatttaatcttcacagtggtc

SEQ ID NO: 11625 - DNA, 120 bp, Artificial Sequence
  ENSG00000009844_42 (sequence is synthesized)
ctgagaggtaggctttatttctgttttaagatgaggaaagggagccacagagtaacaaatttgcctaaggtaacacagctaatatttatttctaagctcagactgcctgtttcagatcat

SEQ ID NO: 11626 - DNA, 120 bp, Artificial Sequence
  ENSG00000009844_43 (sequence is synthesized)
aagaagtatcatccatgtcagtaagtcacctgttacattgtaagtacaatgagatgttatgagttccacattatcaaggtcattggacagttccttttattagtgaggtgttagcaccta

SEQ ID NO: 11627 - DNA, 120 bp, Artificial Sequence
  ENSG00000009844_44 (sequence is synthesized)
aatttttctattatctgggccatatgttccaattgacagtgctaggcagtgaacacagggtatgaacttgaaaatctgattgcaccctcaatatctggaatatacactgatctatgacct

SEQ ID NO: 11628 - DNA, 120 bp, Artificial Sequence
  ENSG00000009844_45 (sequence is synthesized)
gaaattgtatggactgcagcaatccaaggggacactaagcagggtttgagtaatgctacaatggatttataggtcattttggagaaggtgttccacatcattagggagtctgggtttccc

SEQ ID NO: 11629 - DNA, 120 bp, Artificial Sequence
  ENSG00000009844_46 (sequence is synthesized)
agatgtgcctgttttatcctttttattttaaataacatcactgtctttcctaactaaaaattcttcatcttcaggaaataagattgagatacggactgaaaatataaaattagcaataat

SEQ ID NO: 11630 - DNA, 120 bp, Artificial Sequence
  ENSG00000009844_47 (sequence is synthesized)
gtttattattagatacttcctcaattaaatttctccctgaaagtcttaggcaaaagcccctgtctcttacttcatatatcaagtttggagggaaagacataattgcatagcagtattcca

SEQ ID NO: 11631 - DNA, 120 bp, Artificial Sequence
  ENSG00000009844_48 (sequence is synthesized)
tgaatataacttaatggggaactggcttcagagttcagcaatattgggaagtcttgtcaaatattaagtcattcatatgttcaaaaatattaatatgtattgagcatctaccatcaaata

SEQ ID NO: 11632 - DNA, 120 bp, Artificial Sequence
  ENSG00000009844_49 (sequence is synthesized)
tttaatatgataatgccatactggatattatatacgagttacaataattcttcctaaagtcagggaaagcttcacagataaggttgagctgaaggtttggcaggcagggaagcaaggaga

SEQ ID NO: 11633 - DNA, 120 bp, Artificial Sequence
  ENSG00000009844_50 (sequence is synthesized)
agttagcagagagaaaagcacaagcaacaccatggaggaacaaatgtgggcaattcaggtaactcgagtaatttagtgttactatgcatatggcctatggaggccaggagtgtaaatgta

SEQ ID NO: 11634 - DNA, 120 bp, Artificial Sequence
  ENSG00000009844_51 (sequence is synthesized)
ttatggctggggcggggggctagggaatgtgttatgactaaattgtatcccttcagaattcatattttgaagcactgatctccagtgtgtctgtgttcagaggcaggtcccatagggagg

SEQ ID NO: 11635 - DNA, 120 bp, Artificial Sequence
  ENSG00000009844_52 (sequence is synthesized)
caattaaggttacatgagatcataaaggtgaggccctaatcctataggtctgctgtcattacaagaagaggaagagccaccggagctggctcattctgcacgtgtacagagaagaggcca

SEQ ID NO: 11636 - DNA, 120 bp, Artificial Sequence
  ENSG00000009844_53 (sequence is synthesized)
tgtgaggacacgcagaggctcgaatatgctctcaaccctatcagttgcctgctttaattcatcccatggaattgttttgtcttttcgacccctcggctatgttatttgtattgtgatata

SEQ ID NO: 11637 - DNA, 120 bp, Artificial Sequence
  ENSG00000009844_54 (sequence is synthesized)
ggggatattcggagtcctctgagacgggacaaggacactggacggtctattgtgccatgcttatatattttctgtatacaatgctttctgtataaaaccagtaatacctgagaaacaaca

SEQ ID NO: 11638 - DNA, 120 bp, Artificial Sequence
  ENSG00000009844_55 (sequence is synthesized)
gtaacttgacaaaattactattgatcacttaactttatgtatcacgtaagttaaactttatttatttacatgtgtctccctcattagatgctaagttccttgatattttatacatttgtg

SEQ ID NO: 11639 - DNA, 120 bp, Artificial Sequence
  ENSG00000009844_56 (sequence is synthesized)
aattcctggtaattcacatgaagcttgatgcattgtaagtattctgacctggtgaaataaatatacgaatgggcaaaaaaatatatactaaaatgatcaaataaaggttgtgttcagaaa

SEQ ID NO: 11640 - DNA, 120 bp, Artificial Sequence
  ENSG00000009844_57 (sequence is synthesized)
gaagaactgcatttcttatcacatatgtgcctcataatgatggtcatgaaaacatgacaagttccttgaattccatttgaacccacaagaaacattaaattattttcattaaaattttaa

SEQ ID NO: 11641 - DNA, 120 bp, Artificial Sequence
  ENSG00000009950_0 (sequence is synthesized)
agggaccaggcggttgcggcggcgacagccatggccggcgcgctggcaggtctggccgcgggcttgcaggtcccgcgggtcgcgcccagcccagactcggactcggacacagactcggag

SEQ ID NO: 11642 - DNA, 120 bp, Artificial Sequence
  ENSG00000009950_1 (sequence is synthesized)
gacccgagtctccggcgcagcgcgggcggcttgctccgctcgcaggtcatccacagcggtcacttcatggtgtcgtcgccgcacagcgactcgctgccccggcggcgcgaccaggagggg

SEQ ID NO: 11643 - DNA, 120 bp, Artificial Sequence
  ENSG00000009950_2 (sequence is synthesized)
tccgtggggccctccgacttcgggccgcgcagtatcgaccccacactcacacgcctcttcgagtgcttgagcctggcctacagtggcaagctggtgtctcccaagtggaagaatttcaaa

SEQ ID NO: 11644 - DNA, 120 bp, Artificial Sequence
  ENSG00000009950_3 (sequence is synthesized)
ggcctcaagctgctctgcagagacaagatccgcctgaacaacgccatctggagggcctggtatatccagtatgtgaagcggaggaagagccccgtgtgtggcttcgtgacccccctgcag

SEQ ID NO: 11645 - DNA, 120 bp, Artificial Sequence
  ENSG00000009950_4 (sequence is synthesized)
gggcctgaggctgatgcgcaccggaagccggaggccgtggtcctggaggggaactactggaagcggcgcatcgaggtggtgatgcgggaataccacaagtggcgcatctactacaagaag

SEQ ID NO: 11646 - DNA, 120 bp, Artificial Sequence
  ENSG00000009950_5 (sequence is synthesized)
cggctccgtaagcccagcagggaagatgacctcctggcccctaagcaggcggaaggcaggtggccgccgccggagcaatggtgcaaacagctcttctccagtgtggtccccgtgctgctg

SEQ ID NO: 11647 - DNA, 120 bp, Artificial Sequence
  ENSG00000009950_6 (sequence is synthesized)
ggggacccagaggaggagccgggtgggcggcagctcctggacctcaattgctttttgtccgacatctcagacactctcttcaccatgactcagtccggcccttcgcccctgcagctgccg

SEQ ID NO: 11648 - DNA, 120 bp, Artificial Sequence
  ENSG00000009950_7 (sequence is synthesized)
cctgaggatgcctacgtcggcaatgctgacatgatccagccggacctgacgccactgcagccaagcctggatgacttcatggacatctcagatttctttaccaactcccgcctcccacag

SEQ ID NO: 11649 - DNA, 120 bp, Artificial Sequence
  ENSG00000009950_8 (sequence is synthesized)
ccgcccatgccttcaaacttcccagagccccccagcttcagccccgtggttgactccctcttcagcagtgggaccctgggcccagaggtgcccccggcttcctcggccatgacccacctc

SEQ ID NO: 11650 - DNA, 120 bp, Artificial Sequence
  ENSG00000009950_9 (sequence is synthesized)
tctggacacagccgtctgcaggctcggaacagctgccctggccccttggactccagcgccttcctgagttctgatttcctccttcctgaagaccccaagccccggctcccaccccctcct

SEQ ID NO: 11651 - DNA, 120 bp, Artificial Sequence
  ENSG00000009950_10 (sequence is synthesized)
gtacccccacctctgctgcattaccctccccctgccaaggtgccaggcctggagccctgccccccacctcccttccctcccatggcaccacccactgctttgctgcaggaagagcctctc

SEQ ID NO: 11652 - DNA, 120 bp, Artificial Sequence
  ENSG00000009950_11 (sequence is synthesized)
ttctctcccaggtttcccttccccaccgtccctcctgccccaggagtgtctccgctgcctgctcctgcagccttcccacccaccccacagtctgtccccagcccagcccccacccccttc

SEQ ID NO: 11653 - DNA, 120 bp, Artificial Sequence
  ENSG00000009950_12 (sequence is synthesized)
cccatagagcttctacccttggggtattcggagcctgcctttgggccttgcttctccatgcccagaggcaagccccccgccccatcccctaggggacagaaagccagcccccctacctta

SEQ ID NO: 11654 - DNA, 120 bp, Artificial Sequence
  ENSG00000009950_13 (sequence is synthesized)
gccagtccccccaccactgcggggagcaacaacccctgcctcacacagctgctcacagcagctaagccggagcaagccctggagccaccacttgtatccagcaccctcctccggtcccca

SEQ ID NO: 11655 - DNA, 120 bp, Artificial Sequence
  ENSG00000009950_14 (sequence is synthesized)
gggtccccgcaggagacagtccctgaattcccctgcacattccttcccccgaccccggcccctacaccgccccggccacctccaggcccggccacattggccccttccaggcccctgctt

SEQ ID NO: 11656 - DNA, 120 bp, Artificial Sequence
  ENSG00000009950_15 (sequence is synthesized)
gtccccaaagcggagcggctctcacccccagcgcccagcggcagtgaacggcggctgtcaggggacctcagctccatgccaggccctgggactctgagcgtccgtgtctctcccccgcaa

SEQ ID NO: 11657 - DNA, 120 bp, Artificial Sequence
  ENSG00000009950_16 (sequence is synthesized)
cccatcctcagccggggccgtccagacagcaacaagaccgagaaccggcgtatcacacacatctccgcggagcagaagcggcgcttcaacatcaagctggggtttgacacccttcatggg

SEQ ID NO: 11658 - DNA, 120 bp, Artificial Sequence
  ENSG00000009950_17 (sequence is synthesized)
ctcgtgagcacactcagtgcccagcccagcctcaaggtgagcaaagctaccacgctgcagaagacagctgagtacatccttatgctacagcaggagcgtgcgggcttgcaggaggaggcc

SEQ ID NO: 11659 - DNA, 120 bp, Artificial Sequence
  ENSG00000009950_18 (sequence is synthesized)
cagcagctgcgggatgagattgaggagctcaatgccgccattaacctgtgccagcagcagctgcccgccacaggggtacccatcacacaccagcgttttgaccagatgcgagacatgttt

SEQ ID NO: 11660 - DNA, 120 bp, Artificial Sequence
  ENSG00000009950_19 (sequence is synthesized)
gatgactacgtccgaacccgtacgctgcacaactggaagttctgggtgttcagcatcctcatccggcctctgtttgagtccttcaacgggatggtgtccacggcaagtgtgcacaccctc

SEQ ID NO: 11661 - DNA, 120 bp, Artificial Sequence
  ENSG00000009950_20 (sequence is synthesized)
cgccagacctcactggcctggctggaccagtactgctctctgcccgctctccggccaactgtcctgaactccctacgccagctgggcacatctaccagtatcctgaccgacccgggccgc

SEQ ID NO: 11662 - DNA, 120 bp, Artificial Sequence
  ENSG00000009950_21 (sequence is synthesized)
atccctgagcaagccacacgggcagtcacagagggcacccttggcaaacctttatagtcctggccagaccctgctgctcactcagctgccctgggggctgctttccctgggcacgggctc

SEQ ID NO: 11663 - DNA, 120 bp, Artificial Sequence
  ENSG00000009950_22 (sequence is synthesized)
cagggatcatctctgggcactcccttcctgccccaggccctggctctgcccttccctggggggtggagcagggtccaggtttcacacttgccacctcctggaggtcaagaagagcagagt

SEQ ID NO: 11664 - DNA, 120 bp, Artificial Sequence
  ENSG00000009950_23 (sequence is synthesized)
ccccgtccctgctctgccactgtgctccagcaccgtgaccttgggtgactcgtccgctgtctttggaccgctgtgtttcaatctgcaaaatggggatggggaaggttcaatcagcagatg

SEQ ID NO: 11665 - DNA, 120 bp, Artificial Sequence
  ENSG00000009950_24 (sequence is synthesized)
acccccaggccttggcagctgtgacattgggggcctaggctggcaactccgggggctcaacggtggaaagaggaggatgctgtttctctgtcacctccacttgctccccgacaggtgggg

SEQ ID NO: 11666 - DNA, 120 bp, Artificial Sequence
  ENSG00000009950_25 (sequence is synthesized)
cacagacctctgttcctgagcagagaagcagaaaaggaggttccctctctctgctccttcactgctgacccagaggggctgcaggatggtttcccctgggagaggccaggagggcctgat

SEQ ID NO: 11667 - DNA, 120 bp, Artificial Sequence
  ENSG00000009950_26 (sequence is synthesized)
cccaggagacaccagggccagagtgaccacagcagggcaggcatcatgtgtgtgtgtgtgtgtggatgtgtgtgtgtgggttttgtaaagaattcttgaccaataaaagcaaaaactgtc

SEQ ID NO: 11668 - DNA, 120 bp, Artificial Sequence
  ENSG00000009950_27 (sequence is synthesized)
tgcagggattgggggaatctaggggatgaggggaagaggaggaagaagaaggggactgggtctggggccagatgagaggaagggggcaatggggaccctttcccctgggtcggtctttct

SEQ ID NO: 11669 - DNA, 120 bp, Artificial Sequence
  ENSG00000009950_28 (sequence is synthesized)
ccggccaagtacgtgagccatctccctgcctgctagagggacccagcctcgggggtggagggagcattccaccctgcttagatcccacatccagcttgccatcaacacagcctagggttg

SEQ ID NO: 11670 - DNA, 120 bp, Artificial Sequence
  ENSG00000009950_29 (sequence is synthesized)
tggccaccccgcatcccccagatggtcctctggccaccagacgcctgtagacagaggttctaggagggggtgacagtcttgccaactaatacctccccctatccctttggttccacatcc

SEQ ID NO: 11671 - DNA, 120 bp, Artificial Sequence
  ENSG00000009950_30 (sequence is synthesized)
ttgttgagctcttctcttcttggggggtgagggtgaggtggtgagaagaccccaggtcattgagcaagtggtgggaggcatgggagaacagagggaccaggccgggcgtggtggctcacg

SEQ ID NO: 11672 - DNA, 90 bp, Artificial Sequence
  ENSG00000009950_31 (sequence is synthesized)
cagagggaccaaagaactggggtcccagacaggaaaaaatctaaagagcaggaaggggacccctgtatctgcatcctggtctatctcctg

SEQ ID NO: 11673 - DNA, 120 bp, Artificial Sequence
  ENSG00000009950_32 (sequence is synthesized)
ggaaggggacccctgtatctgcatcctggtctatctcctgggggaagttcttagaggccaatggagtgatcttggcctttcaagcagcaagctaggtccactagggaaaggtgacagagg

SEQ ID NO: 11674 - DNA, 120 bp, Artificial Sequence
  ENSG00000009950_33 (sequence is synthesized)
tgtgaacagacagaccctctgtcctgctgaccacttgaccctggagaggggtgatatggaagatcggggcagtgggagctctctagcggctgctgacggctctgtctccctaggcggaag

SEQ ID NO: 11675 - DNA, 120 bp, Artificial Sequence
  ENSG00000009950_34 (sequence is synthesized)
cacggccttcaacccgactctccgcccttctccaccccagcaggagacagtccctgaattcccctgcacattccttcccccgaccccggcccctacaccgccccggccacctccaggccc

SEQ ID NO: 11676 - DNA, 120 bp, Artificial Sequence
  ENSG00000009954_0 (sequence is synthesized)
agtgtgtgcgttggccgggcccgggggaggaggggaatctcccgccatttttcaataatttcctccggtgctgctgaggaggagtcgtgactgccggccgccgggacccgaagcggaggt

SEQ ID NO: 11677 - DNA, 120 bp, Artificial Sequence
  ENSG00000009954_1 (sequence is synthesized)
ggggggctgctgggaggcgcggcggtgtgcgcgggagctctgcgccgtggcgttccgctccatgactgtcgcgcggccgcgccggcggtgagggagccggagttcgcgccgccctctcac

SEQ ID NO: 11678 - DNA, 80 bp, Artificial Sequence
  ENSG00000009954_2 (sequence is synthesized)
cctctcacccctcccttcccccaccccacccccgggcgcctggcgctcgctccgggccgcggggcctagtgctgcgccgc

SEQ ID NO: 11679 - DNA, 120 bp, Artificial Sequence
  ENSG00000009954_3 (sequence is synthesized)
atggcgccgctcctgggccgcaagcccttcccgctggtgaagccgttgcccggagaggagccgctcttcaccatcccgcacactcaggaggccttccgcacccgggaagagtatgaagcc

SEQ ID NO: 11680 - DNA, 120 bp, Artificial Sequence
  ENSG00000009954_4 (sequence is synthesized)
cgcttggaaaggtacagtgagcgcatttggacgtgcaagagtactggaagcagtcagctaacacacaaggaagcctgggaggaagaacaggaagttgctgagcttttgaaggaggagttt

SEQ ID NO: 11681 - DNA, 120 bp, Artificial Sequence
  ENSG00000009954_5 (sequence is synthesized)
cctgcctggtatgagaagcttgttctggaaatggttcaccataacacagcctccttagagaagttagtagatactgcttggttggagatcatgaccaaatatgctgtgggagaagagtgt

SEQ ID NO: 11682 - DNA, 120 bp, Artificial Sequence
  ENSG00000009954_6 (sequence is synthesized)
gacttcgaggttgggaaggagaaaatgctcaaggtgaagattgtgaagattcatcctttggagaaagtggatgaagaggccactgagaagaaatctgatggtgcctgtgattctccatca

SEQ ID NO: 11683 - DNA, 120 bp, Artificial Sequence
  ENSG00000009954_7 (sequence is synthesized)
agtgacaaagagaactccagtcagattgctcaggaccatcagaagaaggagacagttgtgaaagaggatgaaggaaggagagagagtattaatgacagagcacgtagatcgccacgaaaa

SEQ ID NO: 11684 - DNA, 120 bp, Artificial Sequence
  ENSG00000009954_8 (sequence is synthesized)
cttcctacttcattaaaaaaaggagaaaggaaatgggctcctccaaaatttctgcctcacaaatatgatgtgaaactacaaaatgaagataagatcatcagtaacgtgccagcagacagc

SEQ ID NO: 11685 - DNA, 120 bp, Artificial Sequence
  ENSG00000009954_9 (sequence is synthesized)
ttgattcgtacagagcgcccaccaaataaggagatagttcgatactttatacggcataatgcattacgagctggtactggtgaaaatgcaccttgggtcgtagaagatgaattggtgaag

SEQ ID NO: 11686 - DNA, 120 bp, Artificial Sequence
  ENSG00000009954_10 (sequence is synthesized)
aaatactctctgcccagcaagttcagtgactttttacttgatccatacaagtatatgactctcaacccttctactaagaggaagaatactggatccccagacaggaagccctcaaagaaa

SEQ ID NO: 11687 - DNA, 120 bp, Artificial Sequence
  ENSG00000009954_11 (sequence is synthesized)
tccaagacagacaactcttctcttagttcaccactaaatcctaagttatggtgtcacgtacacttgaagaagtcattgagtggctcgccactcaaagtgaagaactcaaagaattccaaa

SEQ ID NO: 11688 - DNA, 120 bp, Artificial Sequence
  ENSG00000009954_12 (sequence is synthesized)
tctcctgaagaacatctagaagaaatgatgaagatgatgtcgcccaataagctgcacactaactttcacattcctaaaaaaggcccacctgccaagaaaccagggaagcacagtgacaag

SEQ ID NO: 11689 - DNA, 120 bp, Artificial Sequence
  ENSG00000009954_13 (sequence is synthesized)
cctttgaaggcaaagggcagaagcaaaggcatcctgaatggacagaaatccacagggaattccaaatctcccaaaaaaggactgaagactcctaaaaccaaaatgaagcagatgactttg

SEQ ID NO: 11690 - DNA, 120 bp, Artificial Sequence
  ENSG00000009954_14 (sequence is synthesized)
ttggatatggccaaaggcacgcagaagatgacacgagccccacggaattctgggggtacacctaggacctctagtaaacctcataaacatctgcctcctgcagccctacacctcattgca

SEQ ID NO: 11691 - DNA, 120 bp, Artificial Sequence
  ENSG00000009954_15 (sequence is synthesized)
tactacaaagaaaacaaagacagggaggacaagaggagcgccctgtcctgtgttatctccaaaacagctcgtcttctctctagtgaagatagagctcgtctcccagaagaattgcgaagt

SEQ ID NO: 11692 - DNA, 120 bp, Artificial Sequence
  ENSG00000009954_16 (sequence is synthesized)
cttgttcaaaaacgctatgaacttctagagcacaaaaagaggtgggcttctatgtctgaagaacaacggaaagaatatttgaaaaagaaacgggaggagctgaaaaagaagttgaaggaa

SEQ ID NO: 11693 - DNA, 120 bp, Artificial Sequence
  ENSG00000009954_17 (sequence is synthesized)
aaagccaaagaacgaagagagaaagaaatgcttgagagattagaaaaacagaagcggtatgaggaccaagagttaactggcaaaaaccttccagcattcagattggtggatacccctgaa

SEQ ID NO: 11694 - DNA, 120 bp, Artificial Sequence
  ENSG00000009954_18 (sequence is synthesized)
gggctgcccaacacgctgtttggggatgtggccatggtggtggaattcttgagctgttattctgggctacttttaccagatgctcagtatcctattactgctgtgtcccttatggaagcc

SEQ ID NO: 11695 - DNA, 120 bp, Artificial Sequence
  ENSG00000009954_19 (sequence is synthesized)
ttgagtgcagataagggtggctttttataccttaacagggtgttggtcatcctcttacagaccctcctacaagatgagatagcagaagactatggtgaattgggaatgaagctgtcggaa

SEQ ID NO: 11696 - DNA, 120 bp, Artificial Sequence
  ENSG00000009954_20 (sequence is synthesized)
atccccttgactctgcattctgtttcagagctggtgcggctctgcttgcgcagatctgatgttcaggaggaaagcgagggctcagacacagatgacaataaagattcagctgcatttgag

SEQ ID NO: 11697 - DNA, 120 bp, Artificial Sequence
  ENSG00000009954_21 (sequence is synthesized)
gataatgaggtacaagatgagttcctagaaaagctggagacctctgaattttttgagctgacgtcagaggagaagctacagatcttgacagcactgtgccaccggatcctcatgacatac

SEQ ID NO: 11698 - DNA, 120 bp, Artificial Sequence
  ENSG00000009954_22 (sequence is synthesized)
tcagtgcaagaccacatggagaccagacagcagatgtctgcagagttgtggaaggaacggcttgctgtgttgaaggaagaaaatgataagaagagagcagagaaacagaaacggaaagaa

SEQ ID NO: 11699 - DNA, 120 bp, Artificial Sequence
  ENSG00000009954_23 (sequence is synthesized)
atggaagccaaaaataaagaaaatggaaaagttgagaatgggttaggcaaaactgataggaaaaaagaaattgtgaagtttgagccccaagtagatacagaagctgaagacatgattagt

SEQ ID NO: 11700 - DNA, 120 bp, Artificial Sequence
  ENSG00000009954_24 (sequence is synthesized)
gctgtgaagagcagaaggttgcttgccattcaagctaagaaggaacgggaaatccaggaaagagaaatgaaagtgaaactggaacgccaagctgaagaagaacgaatacggaagcacaaa

SEQ ID NO: 11701 - DNA, 120 bp, Artificial Sequence
  ENSG00000009954_25 (sequence is synthesized)
ttccaggattattcattgaaaaaggctgggtacatgacagcattgactaccgattcaaccatcactgcaaagaccacacagtctctggtgatgaggattactgtcctcgcagtaagaaag

SEQ ID NO: 11702 - DNA, 120 bp, Artificial Sequence
  ENSG00000009954_26 (sequence is synthesized)
caaacttaggtaaaaatgcaagcatgaacacacaacatggaacagcaacagaagttgctgtagagacaaccacacccaaacaaggacagaacctatggtttttatgtgatagtcaaaagg

SEQ ID NO: 11703 - DNA, 120 bp, Artificial Sequence
  ENSG00000009954_27 (sequence is synthesized)
agctggatgagttgctaaactgtcttcaccctcagggaataagagaaagtcaacttaaagagagactagagaagaggtaccaggacattattcactctattcatctagcacggaagccaa

SEQ ID NO: 11704 - DNA, 120 bp, Artificial Sequence
  ENSG00000009954_28 (sequence is synthesized)
atttgggtctaaaatcttgtgatggcaaccaggagcttttaaacttccttcgtagtgatctcattgaagttgcaacaaggttacaaaaaggaggacttggatatgtggaagaaacatcag

SEQ ID NO: 11705 - DNA, 120 bp, Artificial Sequence
  ENSG00000009954_29 (sequence is synthesized)
aatttgaagcccgggtcatttcattagagaaattgaaggattttggtgagtgtgtgattgcccttcaggccagtgtcataaagaaatttctccaaggcttcatggctcccaagcaaaaga

SEQ ID NO: 11706 - DNA, 120 bp, Artificial Sequence
  ENSG00000009954_30 (sequence is synthesized)
gaagaaaactccaaagtgaagattcagcaaaaactgaggaagtggatgaagagaagaaaatggtagaggaagcaaaggttgcatctgcactggagaaatggaagacagcaatccgggaag

SEQ ID NO: 11707 - DNA, 120 bp, Artificial Sequence
  ENSG00000009954_31 (sequence is synthesized)
ctcagactttctccaggatgcacgtgctgcttgggatgcttgatgcctgtatcaagtgggatatgtccgcagaaaatgctaggtgcaaagtttgtcgaaagaaaggtgaggatgacaaat

SEQ ID NO: 11708 - DNA, 120 bp, Artificial Sequence
  ENSG00000009954_32 (sequence is synthesized)
tgatcttgtgtgatgagtgtaataaagccttccacctgttttgtctgaggccggccctctatgaagtaccagatggtgagtggcagtgcccagcttgccagcccgctactgccaggcgca

SEQ ID NO: 11709 - DNA, 120 bp, Artificial Sequence
  ENSG00000009954_33 (sequence is synthesized)
actcccgtggcaggaactatactgaagagtctgcttctgaggacagtgaagatgatgagagtgatgaagaggaggaggaggaagaagaggaggaggaggaagaagattatgaggtggctg

SEQ ID NO: 11710 - DNA, 120 bp, Artificial Sequence
  ENSG00000009954_34 (sequence is synthesized)
gtttgcgattgagacctcgaaagaccatccggggcaagcacagcgtcatcccccctgcagcaaggtcaggccggcgcccgggtaagaagccacactctaccaggaggtctcagcccaagg

SEQ ID NO: 11711 - DNA, 120 bp, Artificial Sequence
  ENSG00000009954_35 (sequence is synthesized)
caccacctgtggatgatgctgaggtggatgagctggtgcttcagaccaagcggagctcccggaggcaaagcctggagctgcagaagtgtgaagagatcctccacaagatcgtgaagtacc

SEQ ID NO: 11712 - DNA, 120 bp, Artificial Sequence
  ENSG00000009954_36 (sequence is synthesized)
gcttcagctggcccttcagggagcctgtgaccagagatgaggccgaggactactatgatgtgatcacgcaccccatggactttcagacagtgcagaacaaatgttcctgtgggagctacc

SEQ ID NO: 11713 - DNA, 120 bp, Artificial Sequence
  ENSG00000009954_37 (sequence is synthesized)
gctctgtgcaggagtttcttactgacatgaagcaagtgtttaccaatgctgaggtttacaactgccgtggcagccatgtgctaagctgcatggtgaagacagaacagtgtctagtggctc

SEQ ID NO: 11714 - DNA, 120 bp, Artificial Sequence
  ENSG00000009954_38 (sequence is synthesized)
tgttgcataaacaccttcctggccacccatatgtccgcaggaagcgcaagaagtttcctgataggcttgctgaagatgaaggggacagtgagccagaggccgttggacagtccaggggac

SEQ ID NO: 11715 - DNA, 120 bp, Artificial Sequence
  ENSG00000009954_39 (sequence is synthesized)
gaagacagaagaagtagagaggcagggccgtggtgacagtatcagtgagtgccatacagaattgtgtattcaccagcatcatgaaacagttgtggtcttttgagttgatcttggcagagt

SEQ ID NO: 11716 - DNA, 120 bp, Artificial Sequence
  ENSG00000009954_40 (sequence is synthesized)
tggtcttttgagttgatcttggcagagtaaagggacgtgtcctggagccattcctgaatctccccttctttgtgacagctcctcccacccccccaaaaaataaaaaaaccacaaaaaaca

SEQ ID NO: 11717 - DNA, 120 bp, Artificial Sequence
  ENSG00000009954_41 (sequence is synthesized)
gagactggagtcctgcttataatcatgcatataacctttactttgatggatctggccagaggggtgttggagcccagcccacccacataccagtcaagctcttaggggagcagaagaaaa

SEQ ID NO: 11718 - DNA, 120 bp, Artificial Sequence
  ENSG00000009954_42 (sequence is synthesized)
gcaggaagaatttaaatgtttaattttttttttaaattgacttttctagttattaaaagttgcttgtttcagcagtgatattgtataaagaacatcttgtaagatactcctgacatcttg

SEQ ID NO: 11719 - DNA, 120 bp, Artificial Sequence
  ENSG00000009954_43 (sequence is synthesized)
ctttagcacatgtacagtacagtttctatgataatgtgtttgctctaacttccctggcttctccttcagcccatccactctcctctagagcagttgggttggaggctcattgaggcaagc

SEQ ID NO: 11720 - DNA, 120 bp, Artificial Sequence
  ENSG00000009954_44 (sequence is synthesized)
agcaacattggagggggagcagggcagtgctgtgtctgctgcctcccatgcccgttctgacctcagccttggaactcctcaagaacctgaagattccagtggtcagtgtcggtggggggt

SEQ ID NO: 11721 - DNA, 120 bp, Artificial Sequence
  ENSG00000009954_45 (sequence is synthesized)
gggaggagagagcggcagagaagctctgagagccccttcccccacaacaaatctagctctagttgttatatttaggcaaaactttgtagtcttctttcccttttatgatggattttgata

SEQ ID NO: 11722 - DNA, 120 bp, Artificial Sequence
  ENSG00000009954_46 (sequence is synthesized)
aaagtacaaaacagggtttttcttttttatcacctttgaatttggaaattttgagcacccaagctcttctgtacctatttaaagtccaccaaggggactgcagctcctagaacatgagaa

SEQ ID NO: 11723 - DNA, 120 bp, Artificial Sequence
  ENSG00000009954_47 (sequence is synthesized)
tcaagcctcttaattttaaactgcggaatgtggcctctgcttcctccgtcctcctgcccaaggacgacgaggattgctccagggctgctgggtagtttaccgtcccttctataggcatgg

SEQ ID NO: 11724 - DNA, 120 bp, Artificial Sequence
  ENSG00000009954_48 (sequence is synthesized)
agttggcactgacatcacagcttcataaccccaccaccgccagcttcccctgcctcctacatccagtctgttcttgttcatagtgagaatcctgtgttcccacttcagtgacacctgaat

SEQ ID NO: 11725 - DNA, 120 bp, Artificial Sequence
  ENSG00000009954_49 (sequence is synthesized)
tgtttgttgttgttttttttttttattgtcttcaaagaggaagggccccattaaagggtgaacttgtaataaattggaatttcaaataaacctcatgtacttgtgtttataaagaagaaa

SEQ ID NO: 11726 - DNA, 120 bp, Artificial Sequence
  ENSG00000009954_50 (sequence is synthesized)
ggggggacagctagggagggtgggagggaggcgagcgaggaagaccaagaacctggaagagatcacagggagtccagaaacgcctgtcatcccaagcttatgctgtttttctaaaagctc

SEQ ID NO: 11727 - DNA, 120 bp, Artificial Sequence
  ENSG00000009954_51 (sequence is synthesized)
tttatggggcttgatattgggttggtggtctttgtccagaaatatgaagggacaaagagggccataaccctcccttctgagagtttccaggaggagtccgagggtctagcttttctggtg

SEQ ID NO: 11728 - DNA, 120 bp, Artificial Sequence
  ENSG00000009954_52 (sequence is synthesized)
aagccagttcctgttcctgccttctttcctaagggcctgctcgctctggcttccaccacagtgccaagcccctctggtctccaggggagggattgctgtgttacatagcaggatcggggt

SEQ ID NO: 11729 - DNA, 120 bp, Artificial Sequence
  ENSG00000009954_53 (sequence is synthesized)
aatcaggccaacaggggagatggtggcgatttttcttttttaatctgtatttattatacagtcttgtttctttaagcccatactctgtctcttcccccgtcttcctctcaggtgacagta

SEQ ID NO: 11730 - DNA, 120 bp, Artificial Sequence
  ENSG00000009954_54 (sequence is synthesized)
aaatcagatgtttggatttgtcttggaagacatgtatggaaccaaaaataccttatgtatatgtattttttccttgttatcttttgctgctatccagaaaaacttagtaattggcttaca

SEQ ID NO: 11731 - DNA, 120 bp, Artificial Sequence
  ENSG00000009954_55 (sequence is synthesized)
accttggtatgaaaagagcttcactactaaggtgaatgaaaactggttgtagaggctccagtcgtatagcatcatttaacatctttaccttgcgatgcctgtgctttcaggtgtgaaaca

SEQ ID NO: 11732 - DNA, 120 bp, Artificial Sequence
  ENSG00000009954_56 (sequence is synthesized)
tgcttgcatatcctgcacttgcccattcttcacactcagtcagctcagatttctatttatgttgggcatcactcatgttgtccagtgtgctgtcattacagtcctgtcctttattgctca

SEQ ID NO: 11733 - DNA, 80 bp, Artificial Sequence
  ENSG00000010017_0 (sequence is synthesized)
ttctctcccggcctcccgggcccgccgcctactcccgcgtctccgagctcctcaaccgccgcggtctccctgggcgcgcg

SEQ ID NO: 11734 - DNA, 120 bp, Artificial Sequence
  ENSG00000010017_1 (sequence is synthesized)
gtgccggcggccgcagcgacagcgcccccgggaagcagaggaggaaggagagaagaggtggaggtggccgcaggctgagtcgcggccgggatgtccgggcagccgccgccgccgccgccg

SEQ ID NO: 11735 - DNA, 120 bp, Artificial Sequence
  ENSG00000010017_2 (sequence is synthesized)
cagcagcagcaacagcagcagcagctgtcgccgccaccgccggcggccttggccccagtctccggagtcgtcctgccggcgcccccggccgtcagcgccggctcttctccggccggctcg

SEQ ID NO: 11736 - DNA, 80 bp, Artificial Sequence
  ENSG00000010017_3 (sequence is synthesized)
gctcttctccggccggctcgcccggcggcggtgcgggcggcgaaggcttaggggccgcggcggccgccctgctcctccac

SEQ ID NO: 11737 - DNA, 80 bp, Artificial Sequence
  ENSG00000010017_4 (sequence is synthesized)
ccggcccggctggaggagccccgaccccagctctggtggcgggcagcagcgccgcggcccccttccctcacggggactcg

SEQ ID NO: 11738 - DNA, 120 bp, Artificial Sequence
  ENSG00000010017_5 (sequence is synthesized)
gcccccttccctcacggggactcggccctgaacgagcaggagaaggagttgcagcggcggctgaagcgtctctacccggccgtggacgaacaagagacgccgctgcctcggtcctggagc

SEQ ID NO: 11739 - DNA, 120 bp, Artificial Sequence
  ENSG00000010017_6 (sequence is synthesized)
ccgaaggacaagttcagctacatcggcctctctcagaacaacctgcgggtgcactacaaaggtcatggcaaaaccccaaaagatgccgcgtcagttcgagccacgcatccaataccagca

SEQ ID NO: 11740 - DNA, 120 bp, Artificial Sequence
  ENSG00000010017_7 (sequence is synthesized)
gcctgtgggatttattattttgaagtaaaaattgtcagtaagggaagagatggttacatgggaattggtctttctgctcaaggtgtgaacatgaatagactaccaggttgggataagcat

SEQ ID NO: 11741 - DNA, 120 bp, Artificial Sequence
  ENSG00000010017_8 (sequence is synthesized)
tcatatggttaccatggggatgatggacattcgttttgttcttctggaactggacaaccttatggaccaactttcactactggtgatgtcattggctgttgtgttaatcttatcaacaat

SEQ ID NO: 11742 - DNA, 120 bp, Artificial Sequence
  ENSG00000010017_9 (sequence is synthesized)
acctgcttttacaccaagaatggacatagtttaggtattgctttcactgacctaccgccaaatttgtatcctactgtggggcttcaaacaccaggagaagtggtcgatgccaattttggg

SEQ ID NO: 11743 - DNA, 120 bp, Artificial Sequence
  ENSG00000010017_10 (sequence is synthesized)
caacatcctttcgtgtttgatatagaagactatatgcgggagtggagaaccaaaatccaggcacagatagatcgatttcctatcggagatcgagaaggagaatggcagaccatgatacaa

SEQ ID NO: 11744 - DNA, 120 bp, Artificial Sequence
  ENSG00000010017_11 (sequence is synthesized)
aaaatggtttcatcttatttagtccaccatgggtactgtgccacagcagaggcctttgccagatctacagaccagaccgttctagaagaattagcttccattaagaatagacaaagaatt

SEQ ID NO: 11745 - DNA, 120 bp, Artificial Sequence
  ENSG00000010017_12 (sequence is synthesized)
cagaaattggtattagcaggaagaatgggagaagccattgaaacaacacaacagttatacccaagtttacttgaaagaaatcctaatctccttttcacattaaaagtgcgtcagtttata

SEQ ID NO: 11746 - DNA, 120 bp, Artificial Sequence
  ENSG00000010017_13 (sequence is synthesized)
gaagtacgatgtttgggaggccgaagtccaaagtctcaagacagttatcctgttagtcctcgaccttttagtagtccaagtatgagccccagccatggaatgaatatccacaatttagca

SEQ ID NO: 11747 - DNA, 120 bp, Artificial Sequence
  ENSG00000010017_14 (sequence is synthesized)
tcaggcaaaggaagcaccgcacatttttcaggttttgaaagttgtagtaatggtgtaatatcaaataaagcacatcaatcatattgccatagtaataaacaccagtcatccaacttgaat

SEQ ID NO: 11748 - DNA, 120 bp, Artificial Sequence
  ENSG00000010017_15 (sequence is synthesized)
gtaccagaactaaacagtataaatatgtcaagatcacagcaagttaataacttcaccagtaatgatgtagacatggaaacagatcactactccaatggagttggagaaacttcatccaat

SEQ ID NO: 11749 - DNA, 120 bp, Artificial Sequence
  ENSG00000010017_16 (sequence is synthesized)
ggtttcctaaatggtagctctaaacatgaccacgaaatggaagattgtgacaccgaaatggaagttgattcaagtcagttgagacgccagttgtgtggaggaagtcaggccgccatagaa

SEQ ID NO: 11750 - DNA, 120 bp, Artificial Sequence
  ENSG00000010017_17 (sequence is synthesized)
agaatgatccactttggacgagagctgcaagcaatgagtgaacagctaaggagagactgtggcaagaacactgcaaacaaaaaaatgttgaaggatgcattcagtctactagcatattca

SEQ ID NO: 11751 - DNA, 120 bp, Artificial Sequence
  ENSG00000010017_18 (sequence is synthesized)
gatccctggaacagcccagttggaaatcagcttgacccgattcagagagaacctgtgtgctcagctcttaacagtgcaatattagaaacccacaatctgccaaagcaacctccacttgcc

SEQ ID NO: 11752 - DNA, 120 bp, Artificial Sequence
  ENSG00000010017_19 (sequence is synthesized)
ctagcaatgggacaggccacacaatgtctaggactgatggctcgatcaggaattggatcctgcgcatttgccacagtggaagactacctacattagctatgcatttcaagagctcacact

SEQ ID NO: 11753 - DNA, 120 bp, Artificial Sequence
  ENSG00000010017_20 (sequence is synthesized)
tatattgtggcatatagtcaacatggaagtagaccagctctgctgatttgaaatttagattttttaaattatgtactggggacaggtttttgtcgctttacattgcttcctagtttacag

SEQ ID NO: 11754 - DNA, 120 bp, Artificial Sequence
  ENSG00000010017_21 (sequence is synthesized)
catgatgcaaatgattttctaacttagtgttaggagaaattattttccatctttaacctcttagttgtctaagagttaaatattactgaatttcagacgttcaaattgatcatcacaaat

SEQ ID NO: 11755 - DNA, 120 bp, Artificial Sequence
  ENSG00000010017_22 (sequence is synthesized)
cctttaaaacaattacctaaaagaaaccaaaaatcctgccttctttgtgggggaggggggagagaggggaaggaaatggaacaagttgtgtttgtgttagcatgtgggtgatgtaaactt

SEQ ID NO: 11756 - DNA, 120 bp, Artificial Sequence
  ENSG00000010017_23 (sequence is synthesized)
caaattgggagatgttccgacccccactcccatataagcattcaatcagtgtaacttgcaaaatgcataaacatccgacagtttgaatttatagtgttgatggaagaaatcatttttaat

SEQ ID NO: 11757 - DNA, 120 bp, Artificial Sequence
  ENSG00000010017_24 (sequence is synthesized)
gtgtactgtaaaacttgaaatactcaggagctgagtgaatatgtttgttgctacttacaatcccgacctgttagtcccagtagttttgttttaacatggtctttttcaactttgtttcct

SEQ ID NO: 11758 - DNA, 120 bp, Artificial Sequence
  ENSG00000010017_25 (sequence is synthesized)
gtttaactacagatgacttctgttgtagactcacaagtttaactgttgtattataacagtattacatgtcaacggtgtggttatgacctttatttatataaaaaccaaatatttagtcaa

SEQ ID NO: 11759 - DNA, 120 bp, Artificial Sequence
  ENSG00000010017_26 (sequence is synthesized)
tttaccgtgtcttaatttaatctttgtacaccttccatttttaagtgcttaaatgagtactatattgcaataaaatgtagtgatataattaaccagccattaaaaatttacttctacaga

SEQ ID NO: 11760 - DNA, 120 bp, Artificial Sequence
  ENSG00000010017_27 (sequence is synthesized)
tgtcccctctcaactgcatgctgaatactggatcctagactcttgagagctaaataaagtatatcttttagctgcagtttcatattaaaaatgaatttttaacaatctgcatatttagat

SEQ ID NO: 11761 - DNA, 120 bp, Artificial Sequence
  ENSG00000010017_28 (sequence is synthesized)
gaaatattagggaatagttactaaatgtacaaaatggtataagaaatgtatgttcgtgtcctcattatactccattccataaggtagtaaaatacttgtctgtttttcttacagaagttg

SEQ ID NO: 11762 - DNA, 120 bp, Artificial Sequence
  ENSG00000010030_0 (sequence is synthesized)
ccagttctcggagccaggttaggggtttggcggaggaggactgcggggcgcgggcctagggccccagcagccacagccaggggagcgctcaagacagaaagccggtggcttcctcacctc

SEQ ID NO: 11763 - DNA, 120 bp, Artificial Sequence
  ENSG00000010030_1 (sequence is synthesized)
cacctgtaatgcaggagggagaattggctatttctcctataagccctgtggcagccatgcctcccctaggcacccacgtgcaagccagatgtgaagctcaaattaacctgctgggtgaag

SEQ ID NO: 11764 - DNA, 120 bp, Artificial Sequence
  ENSG00000010030_2 (sequence is synthesized)
gggggatctgcaagctgccaggaagactccgcatccagcccgcactgtggagcagggaggacgtgctgcactggctgcgctgggcagagcaggagtactctctgccatgcaccgcggagc

SEQ ID NO: 11765 - DNA, 120 bp, Artificial Sequence
  ENSG00000010030_3 (sequence is synthesized)
acgggttcgagatgaacggacgcgccctctgcatcctcaccaaggacgacttccggcaccgtgcgcccagctcaggtgacgtcctgtatgagctgctccagtacatcaagacccagcggc

SEQ ID NO: 11766 - DNA, 120 bp, Artificial Sequence
  ENSG00000010030_4 (sequence is synthesized)
gagccctggtgtgtgggcccttttttggagggatcttcaggctgaagacgcccacccagcactctccagtccccccggaagaggtgactggcccctctcagatggacacccgaaggggcc

SEQ ID NO: 11767 - DNA, 120 bp, Artificial Sequence
  ENSG00000010030_5 (sequence is synthesized)
acctgctgcagccaccagacccagggcttaccagcaacttcggccacctggatgaccctggcctggcaaggtggacccctggcaaggaggagtccctcaacttatgtcactgtgcagagc

SEQ ID NO: 11768 - DNA, 120 bp, Artificial Sequence
  ENSG00000010030_6 (sequence is synthesized)
aggcccccattgacggcaggatcgctgactgccgcctgctgtgggattacgtgtatcagctgctccttgatacccgatatgagccctacatcaagtgggaagacaaggacgccaagatct

SEQ ID NO: 11769 - DNA, 120 bp, Artificial Sequence
  ENSG00000010030_7 (sequence is synthesized)
tccgagttgtggatccaaatgggctcgccagactctggggaaatcacaagaaccgggtgaacatgacctacgagaagatgtctcgtgccctgcgccactattataagcttaatatcatta

SEQ ID NO: 11770 - DNA, 120 bp, Artificial Sequence
  ENSG00000010030_8 (sequence is synthesized)
agaaggaaccggggcagaaactcctgttcagatttctaaagactccgggaaagatggtccaggacaagcacagccacctggagccgctggagagccaggagcaggacagaatagagttca

SEQ ID NO: 11771 - DNA, 120 bp, Artificial Sequence
  ENSG00000010030_9 (sequence is synthesized)
aggacaagaggccagaaatctctccgtgaggggcaggtggactccaggcacccggtaccgatggggcagggaccgagtctcccatgaaggcagactcctcctcccagcagagcagcagga

SEQ ID NO: 11772 - DNA, 120 bp, Artificial Sequence
  ENSG00000010030_10 (sequence is synthesized)
tccccagccagactctgtacccacaggattacagccattgcttgggaaggctgggaggcctcccatccaggacactgggggcaggagtgtcatcttttgggcagggcaatcctggggcta

SEQ ID NO: 11773 - DNA, 120 bp, Artificial Sequence
  ENSG00000010030_11 (sequence is synthesized)
aatgaggtacaggggaatggactctcccctactgcacccctgggagaggaagccaggcaccgatagagcacccagccccacccctgtaaatggaatttaccagatgaagggaatgaagtc

SEQ ID NO: 11774 - DNA, 120 bp, Artificial Sequence
  ENSG00000010030_12 (sequence is synthesized)
cctcactgagcctcagatttcctcacctgtgaaatgggctgaggcaggaaatgggaaaaagtgttagtgcttccaggcggcactgacagcctcagtaacaataaaaacaatggtagctga

SEQ ID NO: 11775 - DNA, 120 bp, Artificial Sequence
  ENSG00000010030_13 (sequence is synthesized)
cagaaatggacttcagctgatcttcatattcatatggagtttccagtgaccccaaatagccaaaacagtcttggaaagaaaaacaaagttggaggacccacacttcctgattttgaaact

SEQ ID NO: 11776 - DNA, 120 bp, Artificial Sequence
  ENSG00000010030_14 (sequence is synthesized)
tgctacaaagctatagtactcaacaaagattggtaatggcataaggatatagattaagaacagttttttcaacaaatagtgttgggacaatgggtgtccacatgcaaaagaataaagttg

SEQ ID NO: 11777 - DNA, 120 bp, Artificial Sequence
  ENSG00000010030_15 (sequence is synthesized)
tccccttaccttacaccatctccaaaaattaactcaaaatatgtcaaagacataaacgtaagagctaaaactgtaaaactcctagaataaaacataggagtaaatcttcatgaccttgga

SEQ ID NO: 11778 - DNA, 120 bp, Artificial Sequence
  ENSG00000010030_16 (sequence is synthesized)
ttaggccattgtgtcttaaatataacaccaaaagaataagtaataaaaaaatagataaattgaactccatcaaaattaaaagcctttgtgcttcataggacaccatcaagaaagtaaaaa

SEQ ID NO: 11779 - DNA, 120 bp, Artificial Sequence
  ENSG00000010030_17 (sequence is synthesized)
aaaaaaaaaaaacccataggatgggagaaaatatctccaaatcatatatctgataaaagaattgtatccaggattgataaagaattcctacaactcaataataaaaagacaaaaaacccc

SEQ ID NO: 11780 - DNA, 120 bp, Artificial Sequence
  ENSG00000010030_18 (sequence is synthesized)
cccgctctttcgttttcgtttcccggaaggatagcgattaccggagcgcctcgcgcgcctgcccgcctgcggaggacccgggcgcacacgccttggcgcttctcgaaagagatttcctcc

SEQ ID NO: 11781 - DNA, 120 bp, Artificial Sequence
  ENSG00000010072_0 (sequence is synthesized)
agtcctggtcctcggctaggcggcttggggtcgcggcgtaactggggagccagcctgacgccggcggaccccgcctgtgatcctggcaacgatggatgatgacttgatgttggcactgcg

SEQ ID NO: 11782 - DNA, 120 bp, Artificial Sequence
  ENSG00000010072_1 (sequence is synthesized)
gcttcaggaggagtggaacttgcaggaggcggagcgcgatcatgcccaggagtccctgtcgctagtggacgcgtcgtgggagttggtggaccccacaccggacttgcaggcactgtttgt

SEQ ID NO: 11783 - DNA, 120 bp, Artificial Sequence
  ENSG00000010072_2 (sequence is synthesized)
tcagtttaacgaccaattcttctggggccagctggaggccgtcgaggtgaagtggagcgtgcgaatgaccctgtgtgctgggatatgcagctatgaagggaagggtggaatgtgttccat

SEQ ID NO: 11784 - DNA, 120 bp, Artificial Sequence
  ENSG00000010072_3 (sequence is synthesized)
ccgtctcagcgaaccccttttgaagttgaggccaagaaaggatcttgtagagaccctcctgcatgaaatgatacatgcctatttatttgtcactaataacgacaaagaccgagaagggca

SEQ ID NO: 11785 - DNA, 120 bp, Artificial Sequence
  ENSG00000010072_4 (sequence is synthesized)
tggtccagaattttgtaaacatatgcatcgcatcaacagcctgactggagccaatataacggtataccatacttttcacgatgaggtggatgagtatcggcgacactggtggcgctgcaa

SEQ ID NO: 11786 - DNA, 120 bp, Artificial Sequence
  ENSG00000010072_5 (sequence is synthesized)
tgggccgtgccagcacaggccaccgtattacggctatgtcaaacgagctactaacagggaaccctctgctcatgactattggtgggctgagcaccagaaaacctgtggaggcacttacat

SEQ ID NO: 11787 - DNA, 120 bp, Artificial Sequence
  ENSG00000010072_6 (sequence is synthesized)
aaaaatcaaggaaccagagaattactcaaaaaaaggcaaaggaaaggcaaaactaggaaaggaaccagtattggccgcagagaataaagataaacccaacagaggtgaggcccagctagt

SEQ ID NO: 11788 - DNA, 120 bp, Artificial Sequence
  ENSG00000010072_7 (sequence is synthesized)
aatcccttttagtgggaaaggatatgttctaggagaaacaagcaatttaccttcacctgggaaactgatcacttcacatgccattaataaaacccaagatcttttaaatcaaaaccattc

SEQ ID NO: 11789 - DNA, 120 bp, Artificial Sequence
  ENSG00000010072_8 (sequence is synthesized)
agcaaatgctgtaagacctaattctaaaatcaaggtgaaatttgaacagaatggttcaagtaaaaattctcatctggtctcccctgctgttagtaacagtcaccaaaatgttctaagcaa

SEQ ID NO: 11790 - DNA, 120 bp, Artificial Sequence
  ENSG00000010072_9 (sequence is synthesized)
ctactttcctagagtatcatttgccaaccaaaaggctttcagaggtgtgaatggatctccaaggataagtgtaacagttggcaacatccctaaaaactcagtctcttctagttctcagag

SEQ ID NO: 11791 - DNA, 120 bp, Artificial Sequence
  ENSG00000010072_10 (sequence is synthesized)
aagggtttcatcttctaagatatccctaagaaattcttcaaaagtaacggaatcagcatctgtgatgccatcccaggatgtgagtgggtctgaagatacattcccaaataaacgacctag

SEQ ID NO: 11792 - DNA, 120 bp, Artificial Sequence
  ENSG00000010072_11 (sequence is synthesized)
gctagaagataagactgtttttgacaatttttttatcaagaaagagcaaataaaaagcagtggtaatgatccaaagtatagtacaaccacagctcagaattccagcagttcatccagtca

SEQ ID NO: 11793 - DNA, 120 bp, Artificial Sequence
  ENSG00000010072_12 (sequence is synthesized)
gagcaaaatggttaattgcccagtttgtcagaatgaagttctggagtctcagattaatgagcacttggactggtgccttgaaggtgacagcatcaaagtcaaaagcgaagaaagtctttg

SEQ ID NO: 11794 - DNA, 120 bp, Artificial Sequence
  ENSG00000010072_13 (sequence is synthesized)
ctagttcacataaccaatagaaagtgtcctattttatatatacgcatataagattgtaattttaagatgttttgtgtctcagggtgctacattcactcttgccttaggtatactgtaacc

SEQ ID NO: 11795 - DNA, 120 bp, Artificial Sequence
  ENSG00000010072_14 (sequence is synthesized)
caggttctgcctgtcgtgtataagttttagatacttttgttctttcttgctcttaaggattttaaaaacctgttaatctttttatttgtatactttcctaaaaatattcatatggggaat

SEQ ID NO: 11796 - DNA, 120 bp, Artificial Sequence
  ENSG00000010072_15 (sequence is synthesized)
cctgtcaggtgtttggttatattgactatttattaatagtattagaactcattccctgaactgatgtaaatcttcatagtgtcagacatactgaccaaaaccacaatctagactacaaag

SEQ ID NO: 11797 - DNA, 120 bp, Artificial Sequence
  ENSG00000010072_16 (sequence is synthesized)
ttgttttagagtactcaaattgtattatttattaatttttttgtttgcaaaatcttaacaggaactgtattttctatattttaaagaattttatttgtcccacttttactaaacagtggc

SEQ ID NO: 11798 - DNA, 120 bp, Artificial Sequence
  ENSG00000010072_17 (sequence is synthesized)
tggcagcagattttaagttaaagaatatggaatatagtaaaataagtaaatttcttttggaatatttttagtaacaaatagccactataattctgtaggccaaattttatattgagttta

SEQ ID NO: 11799 - DNA, 120 bp, Artificial Sequence
  ENSG00000010072_18 (sequence is synthesized)
gctgttttctcaaaatttagcagagtggttaaaattctgtgctgataagtaactgatacatataacataaacataacaaagttgcctagttgatgtaacagtggaaagttatctggaaat

SEQ ID NO: 11800 - DNA, 120 bp, Artificial Sequence
  ENSG00000010072_19 (sequence is synthesized)
agtattttgaactttaagccaagtttaaaacattataataaaaggaataccatttgtgcattttaagtaatcttttttaaaaaaaatattttccatgttatagggaaaggacaaagagac

SEQ ID NO: 11801 - DNA, 120 bp, Artificial Sequence
  ENSG00000010072_20 (sequence is synthesized)
ttttatcagtttgctttttgtcttgtggctgtacatgctgttggcatagccctaacacagttgttcacaagttttcttttttcttgttgcaattttccttcactttgttgtaatacaggt

SEQ ID NO: 11802 - DNA, 120 bp, Artificial Sequence
  ENSG00000010072_21 (sequence is synthesized)
gcacaaatcttaagtgcacagctgggtaaacttttacagtgttcacctgtgtaactaccacccggatcaagttagagaacacttccattgccacagaaggcttcctataggtgtctgttc

SEQ ID NO: 11803 - DNA, 120 bp, Artificial Sequence
  ENSG00000010072_22 (sequence is synthesized)
ccagttgatacccatgaccctcaccacctccagaggtccccactgttttcaccccatcgtcgcagattattttttaattttataatgtagtatctttgttcctatgtatagcaggagttc

SEQ ID NO: 11804 - DNA, 120 bp, Artificial Sequence
  ENSG00000010072_23 (sequence is synthesized)
attttcattgctcttgcatttgtatgaatatactagaatttattcatccattctaatgttaatggacatttgaattatttccagtttggggctgttaagcataatgctgctaagaacatt

SEQ ID NO: 11805 - DNA, 120 bp, Artificial Sequence
  ENSG00000010072_24 (sequence is synthesized)
cttatcttttctgttgggtatatatacaggaatggaattgctgagtcacggggtatatttctgtttagctttagtaaattctgccagtttacactcctaccagcaatgtatgagagtttt

SEQ ID NO: 11806 - DNA, 120 bp, Artificial Sequence
  ENSG00000010072_25 (sequence is synthesized)
agttgttcaccattcataacactgttagcagcccttttcgttttagactggttggctgttcacaaattttgatattccttaaagcattaaaacattttaataaatacttataaataggta

SEQ ID NO: 11807 - DNA, 120 bp, Artificial Sequence
  ENSG00000010072_26 (sequence is synthesized)
caccaacaagcaatcgttcatgagaaagccgtgcacccgctgcagttgggccatgtggtccgcatcgtattccactaggtccccattgtacaccaagtactgtcccggcgtctccagcag

SEQ ID NO: 11808 - DNA, 120 bp, Artificial Sequence
  ENSG00000010072_27 (sequence is synthesized)
atgcctgcagccttccaccttctcaagcagggtggtgagagtgcgctgctttccttcctcgcctggaccggagccgtcgcgggaggcacccccgggggtggagaaaaagccggcctggcc

SEQ ID NO: 11809 - DNA, 120 bp, Artificial Sequence
  ENSG00000010072_28 (sequence is synthesized)
tcggaggtggtctcggccccccgccccaccgactccctcctcccctccagaggcggcggcggctccggcggcagcagcggcaggcagcaacgtaagcgggatgctctccaggctgctttt

SEQ ID NO: 11810 - DNA, 120 bp, Artificial Sequence
  ENSG00000010072_29 (sequence is synthesized)
ctgctcggtcagcaaatggctgagctggtacatctcgctctccaggtaggagatctcgcgggccgtctctatgaactgccggtagttctggtagacgttgcgcttcaggttctgcgccgt

SEQ ID NO: 11811 - DNA, 120 bp, Artificial Sequence
  ENSG00000010072_30 (sequence is synthesized)
ctcctccgccagcgcctggatgcgctgccggtgctcctggaggtcccggtccccatccgactgctgcgagagctgcttcacgtacagccgcgcctcaaaaccccctgactccagctgccg

SEQ ID NO: 11812 - DNA, 120 bp, Artificial Sequence
  ENSG00000010072_31 (sequence is synthesized)
acgcaggcggctcgccccactgtccgacatcgccatcgccatttctctccgggtctcacgcactcactgtcactatcggcgccgcagccgccgcggctgtctagacccacccaaggccaa

SEQ ID NO: 11813 - DNA, 120 bp, Artificial Sequence
  ENSG00000010072_32 (sequence is synthesized)
ccgagctcctgggctgaggaagcaggaatgggaacgagacgagtacgcctgcgccgggtctgagcgtcagacactgcgcctgcgcaagtgggccgagcgcagacattgcgcctgcgcagc

SEQ ID NO: 11814 - DNA, 120 bp, Artificial Sequence
  ENSG00000010072_33 (sequence is synthesized)
aatgccatcggttaaagcgcatgcgcaagatgagctattgcggaagtgaggggagggagaggccgagagaaatttcggtactgcgcatgaaccgagcgtgacgttgaggtttgaaataac

SEQ ID NO: 11815 - DNA, 120 bp, Artificial Sequence
  ENSG00000010072_34 (sequence is synthesized)
cggcaaagagtaaaggctgaaactagcttcctgaaagcttcgtagggcccgagccctgtgagcccaggttctgcgcccactaggaggtgtcatgctgactgctttttttaaagccctaga

SEQ ID NO: 11816 - DNA, 120 bp, Artificial Sequence
  ENSG00000010072_35 (sequence is synthesized)
taccttcgtgtatattcttctgatttttatgtgaccatagctatgatgtaaagacaatactgtccttcagagaactggtattaagataaacttaaggatcgtttctggtgtagaagtctt

SEQ ID NO: 11817 - DNA, 120 bp, Artificial Sequence
  ENSG00000010072_36 (sequence is synthesized)
caagtgtagacttaaggaaaaaatcccactgtccatgaaatgatggtaggaaaacagactttgctctgtacagaagtaagtaaaagtaggaatagtttccatggatatttttatttttat

SEQ ID NO: 11818 - DNA, 120 bp, Artificial Sequence
  ENSG00000010072_37 (sequence is synthesized)
taacttttttcagtttctttttattcaaagaaacaaaattcaatctctgataatatttgaggtaaagttcctttccctatcttgactcactgagttattaggaaacagaaggcaaaaaga

SEQ ID NO: 11819 - DNA, 120 bp, Artificial Sequence
  ENSG00000010072_38 (sequence is synthesized)
ttgtcaaaataaaaacaataattcaagtaacaatgcccggaatatacgtcctaactacaccccttcctatcagctggattctatccaagtgactctattgatgtatgtatgttcattcaa

SEQ ID NO: 11820 - DNA, 120 bp, Artificial Sequence
  ENSG00000010072_39 (sequence is synthesized)
agaatgggaaaaggatatgacatatatttgccagtacttcatcttcaagatttacccttttcctgtgaagttcagagttactgaagatgcttcttcccttgggaagttgttgacccaaga

SEQ ID NO: 11821 - DNA, 120 bp, Artificial Sequence
  ENSG00000010072_40 (sequence is synthesized)
acataggttatatttcccaaatctttaattattgagtgaaagagctatagatgaattgatatggaaagaccgtatcttcattttcgtgagtagaaggaaagataagaatgaggcagcaga

SEQ ID NO: 11822 - DNA, 120 bp, Artificial Sequence
  ENSG00000010072_41 (sequence is synthesized)
ttttccctcctggaattacacataaaggacactaagcaattttcaaggtaaatgttgccttgttgttggtctttggcatgataagattctttatttaaatatgagagaatttttttttat

SEQ ID NO: 11823 - DNA, 120 bp, Artificial Sequence
  ENSG00000010072_42 (sequence is synthesized)
cctttatattctctcaatatcagaactcctgaattctgaagattgccctcctcccattaataggattgtatggatgtaagatggaataaaatactagttcttcattttgagaaaactgta

SEQ ID NO: 11824 - DNA, 120 bp, Artificial Sequence
  ENSG00000010072_43 (sequence is synthesized)
atcagttctgaaggaagcctgtgatacagaaaaggttagacaccagatagaataagaaaatttatattttccaaagtgtcatacagactctaaaactaatttgaatattttatgttccag

SEQ ID NO: 11825 - DNA, 120 bp, Artificial Sequence
  ENSG00000010072_44 (sequence is synthesized)
ttgggccatgtggtccgcatcgtattccactaggtccccgttgtacaccaggtgtgctgggatatgcagctatgaagggaagggtggaatgtgttccatccgtctcagcgaacccctttt

SEQ ID NO: 11826 - DNA, 120 bp, Artificial Sequence
  ENSG00000010072_45 (sequence is synthesized)
gaagttgaggccaagaaaggatcttgtagagcataattttataagactaaaattcattaatgacagtctagttcttctgatggaaattgttttttaaaaaaattatggaggatcatgaaa

SEQ ID NO: 11827 - DNA, 120 bp, Artificial Sequence
  ENSG00000010072_46 (sequence is synthesized)
tcagcgaaccccttttgaagttgaggccaagaaaggatcttgtagaggtatttttcgtgtaaacttgcttcctagcgcagtaatttacaaatacttgtcaatgatttagactgctgtgaa

SEQ ID NO: 11828 - DNA, 120 bp, Artificial Sequence
  ENSG00000010072_47 (sequence is synthesized)
ttcgcctgtatgtatcgttaaaaaaagtcactttgccctcagtgaaagcttgaattatggggcaaacaataatgaacaccttatgttttttatagtgcttcatagtaaaaaaaaaaaaaa

SEQ ID NO: 11829 - DNA, 120 bp, Artificial Sequence
  ENSG00000010165_0 (sequence is synthesized)
acccggatatggttatgggctcggaaatctagttcgggaaaagtgtgaggggctcttcacgtggggaaggaacagcaggcgcggaggagggggcaagcgtgtgtgagattcagtggtcca

SEQ ID NO: 11830 - DNA, 120 bp, Artificial Sequence
  ENSG00000010165_1 (sequence is synthesized)
tgcgtgcgtttgtcgtgtaagggtcattcctggggtttggagtgggggaacaaatcaatgtggctgtttttccgtggaaagaattcccactgcagtgtcccggagcctgcgtgtggtggg

SEQ ID NO: 11831 - DNA, 120 bp, Artificial Sequence
  ENSG00000010165_2 (sequence is synthesized)
caagctcctcaaatggtatctcacagggaataggggagtcttgaaaacgcagcttcggcagtaggaacatgaacctcttacctaaaagttccagggagtttggctccgttgactattggg

SEQ ID NO: 11832 - DNA, 120 bp, Artificial Sequence
  ENSG00000010165_3 (sequence is synthesized)
agaagttcttccagcagcgaggaaagaaagctttcgagtggtatggaacctacctggaactgtgcggggtgctacataaatatatcaagcccagggaaaaggtgctggtgattgggtgtg

SEQ ID NO: 11833 - DNA, 120 bp, Artificial Sequence
  ENSG00000010165_4 (sequence is synthesized)
gcaactcagaactgagtgagcaactgtatgatgtgggctatcgggatatagtgaacatcgacatcagtgaggttgtcatcaagcaaatgaaggaatgtaatgccacccgacggccccaga

SEQ ID NO: 11834 - DNA, 120 bp, Artificial Sequence
  ENSG00000010165_5 (sequence is synthesized)
tgagcttcttgaagatggacatgacgcagatggagtttcctgatgcctcgttccaggtggtgttggacaagggcaccctggatgctgtcctgacagatgaggaagagaagaccttacaac

SEQ ID NO: 11835 - DNA, 120 bp, Artificial Sequence
  ENSG00000010165_6 (sequence is synthesized)
aggtggacaggatgctggctgaggttggccgtgtcctgcaggtgggcggtcgctatctctgcatctccctggctcaggctcacatcctgaagaaagcagtgggccacttctcccgggagg

SEQ ID NO: 11836 - DNA, 120 bp, Artificial Sequence
  ENSG00000010165_7 (sequence is synthesized)
ggtggatggtgagggtgcaccaagtggccaacagccaggaccaggtgttggaagcagagcctcagttctccttgcctgtctttgccttcatcatgaccaagttcaggccagtccctggct

SEQ ID NO: 11837 - DNA, 120 bp, Artificial Sequence
  ENSG00000010165_8 (sequence is synthesized)
ctgcccttcagatctttgagctgtgtgctcaggagcagcgcaagcctgtgcggctggagagtgccgagcggctggccgaggcggtgcaggagcgacagcagtatgcctggctgtgcagcc

SEQ ID NO: 11838 - DNA, 120 bp, Artificial Sequence
  ENSG00000010165_9 (sequence is synthesized)
agctgcgccgcaaggccaggctggggagtgtgtctctggacttgtgcgatggggacacgggggagccacgctacaccctccacgtggtggacagccccactgtgaaaccatcgcgggaca

SEQ ID NO: 11839 - DNA, 120 bp, Artificial Sequence
  ENSG00000010165_10 (sequence is synthesized)
atcattttgcgattttcatcatccctcagggccgggagaccgagtggctctttggcatggatgagggccggaaacagctggcggccagtgctggcttcaggaggttgattacagtggccc

SEQ ID NO: 11840 - DNA, 120 bp, Artificial Sequence
  ENSG00000010165_11 (sequence is synthesized)
ttcaccgaggtcagcagtatgaaagcatggaccacatccaagctgagctgtcggctagagtcatggagctggccccagctgggatgcccacccagcagcaggtcccctttctgtctgtgg

SEQ ID NO: 11841 - DNA, 120 bp, Artificial Sequence
  ENSG00000010165_12 (sequence is synthesized)
gtggggacattggggtccggaccgttcagcaccaagactgcagccccttgagcggtgactatgtcattgaggatgtgcaaggggatgacaagcgatacttccgtcgactgatcttcctca

SEQ ID NO: 11842 - DNA, 120 bp, Artificial Sequence
  ENSG00000010165_13 (sequence is synthesized)
gcaacaggaatgtggtgcagtccgaagccaggttgctgaaggatgtgtctcacaaagcccagaagaagcggaaaaaggacaggaagaagcagcggcctgctgatgcggaggacctccctg

SEQ ID NO: 11843 - DNA, 120 bp, Artificial Sequence
  ENSG00000010165_14 (sequence is synthesized)
gggcagtccattgataagagttacctgtgttgtgaacaccacaaagccatgatcgctggccttgccctgctgagaaacccagagctactcctagagatcccactggcattgttggtggta

SEQ ID NO: 11844 - DNA, 120 bp, Artificial Sequence
  ENSG00000010165_15 (sequence is synthesized)
ggcctgggcgggggcagcctccccctctttgtccacgatcattttccaaagtcctgcattgatgctgtggagatcgatccctccatgttggaagtggccacccagtggtttggcttctcc

SEQ ID NO: 11845 - DNA, 120 bp, Artificial Sequence
  ENSG00000010165_16 (sequence is synthesized)
cagagtgaccgaatgaaggtccacattgcagatggcctggactatatcgccagcttggcaggaggaggagaagcacggccttgctacgatgtcataatgtttgatgttgacagtaaggac

SEQ ID NO: 11846 - DNA, 120 bp, Artificial Sequence
  ENSG00000010165_17 (sequence is synthesized)
ccaacactgggaatgagttgtccgcccccagcatttgtggagcaatcttttctacagaaggttaaaagcatcttgactcctgaaggtgtttttattctcaaccttgtgtgccgagacttg

SEQ ID NO: 11847 - DNA, 120 bp, Artificial Sequence
  ENSG00000010165_18 (sequence is synthesized)
gggctaaaagactcagtgctggctgggctcaaggcagtgttccccctcctatatgtccggcgaattgagggtgaagtgaatgagatcctgttctgtcagctgcaccctgagcaaaaactt

SEQ ID NO: 11848 - DNA, 120 bp, Artificial Sequence
  ENSG00000010165_19 (sequence is synthesized)
gccacaccagagctcctagaaacagcccaggctttggagcggaccctgaggaagcctgggaggggttgggatgacacgtatgtcttgtcagatatgctcaagacggtgaaaattgtgtga

SEQ ID NO: 11849 - DNA, 120 bp, Artificial Sequence
  ENSG00000010165_20 (sequence is synthesized)
ctgcttaggccaagcagccctcctgcctagactgaccttggactcccagcctgccagagaatgaagaaatacaacgcacagtacttttgaagcttcgtatttttcttggtttcacactca

SEQ ID NO: 11850 - DNA, 120 bp, Artificial Sequence
  ENSG00000010165_21 (sequence is synthesized)
gctacatgtgacctccagcttggtgaggttgcctgaagattagggaaaataaaaatgtccttcccatcttgtcctcttcagtaccacttgggttggtttgtctttgcttcctacaccacg

SEQ ID NO: 11851 - DNA, 120 bp, Artificial Sequence
  ENSG00000010165_22 (sequence is synthesized)
tccttgagtggagttccctgctgaagcccctagcacacactgcatgccttaacaagtgtgtgcaagcccctcagaactcaagacatccaaattttattgcgtctctacttatactggttt

SEQ ID NO: 11852 - DNA, 120 bp, Artificial Sequence
  ENSG00000010165_23 (sequence is synthesized)
gcttttgatttattcctctattagttctataggagtgatctcaagtgagatagcagagcaagatgccaaaagaccataaatagagtaaggtttctatagatgtgagacagatttgagaga

SEQ ID NO: 11853 - DNA, 120 bp, Artificial Sequence
  ENSG00000010165_24 (sequence is synthesized)
gcatttactctgtctccctgtggatgaaactgctgctgaaatggttccaatttttaggaatctgcttacccacttcattatttgacagctttccttggtgacccaaaccttgtagcctaa

SEQ ID NO: 11854 - DNA, 120 bp, Artificial Sequence
  ENSG00000010165_25 (sequence is synthesized)
gccatttgtctttttctcagtggagggagtgtatggacctggccccatggctttgcatgttagagacctggcagactaaagtctctagtgtttgtttgctcacatttgctgagtgacagc

SEQ ID NO: 11855 - DNA, 120 bp, Artificial Sequence
  ENSG00000010165_26 (sequence is synthesized)
tatgtgccagactgcataaagggtggtggcagaagtgaaaatgtttaagaatgaccaaaaacattagtaatgaaagttaatgtgttccaggcattcttctaagtggtttacatgcactgt

SEQ ID NO: 11856 - DNA, 120 bp, Artificial Sequence
  ENSG00000010165_27 (sequence is synthesized)
ctcatttaatctgagataaaggatacttaagcccaaactatatctaaacccaaatctcacttggctggaaacatcaatcttaaccatttattcagaaccattaaaccaatgattccaaga

SEQ ID NO: 11857 - DNA, 120 bp, Artificial Sequence
  ENSG00000010165_28 (sequence is synthesized)
ggaaatctagttcgggaaaagtgtgaggggctcttcacgtggggaaggaacagcaggcgcggaggagggggcaagcgtgtgtgagattcagtggtccatgcgtgcgtttgtcgtgtgctg

SEQ ID NO: 11858 - DNA, 120 bp, Artificial Sequence
  ENSG00000010165_29 (sequence is synthesized)
ttgcattgtagttgaagaacagcaattacaagctgacaatgtatctttcttcatctcaaccatgttataagttaatgagcattctaattaactgttgcctcaaactcaacctgttatatt

SEQ ID NO: 11859 - DNA, 120 bp, Artificial Sequence
  ENSG00000010165_30 (sequence is synthesized)
gaaattgtattgaaatatgttagagtctaagtggtattttttctgttcatttctttttaaaattaaggtatatcatgtattcaatgagatatgtaaaaatacacagattttaattgttca

SEQ ID NO: 11860 - DNA, 120 bp, Artificial Sequence
  ENSG00000010165_31 (sequence is synthesized)
tcaccatggcttcaaaagaattcagtgttctgcaagactcttcagtcctactactgctctctattgagattggatcatgtgcccataatccaagagatttccttcaaatctgtgtaccag

SEQ ID NO: 11861 - DNA, 120 bp, Artificial Sequence
  ENSG00000010219_0 (sequence is synthesized)
ccttctacagaacaccagtgttacttcactcccctttgtggacaccaaggggaagaagaatacggtaagcttcccacacattagcaagaaagtcctgctgaagtcatccctgctgtatca

SEQ ID NO: 11862 - DNA, 120 bp, Artificial Sequence
  ENSG00000010219_1 (sequence is synthesized)
ggagaatcaagctcacaatcagatgccggcctcagagctcaaggcttcagaaatacctttccaccctagcattaaaacccaggatcccaaggcagaggagaagtcaccaaagaagcaaaa

SEQ ID NO: 11863 - DNA, 120 bp, Artificial Sequence
  ENSG00000010219_2 (sequence is synthesized)
ggtgactctgacagcggcagaggccctaaagctttttaagaaccagctgtctccatatgaacaaagtgaaatcctgggctacgcggagctgtggttcctgggtcttgaagccaagaagct

SEQ ID NO: 11864 - DNA, 120 bp, Artificial Sequence
  ENSG00000010219_3 (sequence is synthesized)
cgacacggctcctgagaaatttagcaagacgagttttgatgatgagcatggcttctatctgaaggtcctgcatgatcacattgcctaccgctatgaagttctggagacaatcgggaaggg

SEQ ID NO: 11865 - DNA, 120 bp, Artificial Sequence
  ENSG00000010219_4 (sequence is synthesized)
gtcctttggacaggtggccaagtgcttggatcacaaaaacaatgagctggtggccctgaaaatcatcaggaacaagaagaggtttcaccagcaggccctgatggagctgaagatcctgga

SEQ ID NO: 11866 - DNA, 120 bp, Artificial Sequence
  ENSG00000010219_5 (sequence is synthesized)
agctctcagaaagaaggacaaagacaacacctacaatgtggtgcatatgaaggactttttctactttcgcaatcacttctgcatcacctttgagctcctgggaatcaacttgtatgagtt

SEQ ID NO: 11867 - DNA, 120 bp, Artificial Sequence
  ENSG00000010219_6 (sequence is synthesized)
gatgaagaataacaactttcaaggcttcagtctgtccatagttcggcgcttcactctctctgttttgaagtgcttgcagatgctttcggtagagaaaatcattcactgtgatctcaagcc

SEQ ID NO: 11868 - DNA, 120 bp, Artificial Sequence
  ENSG00000010219_7 (sequence is synthesized)
aaagtcattgactttggatcaagctgttatgaacaccagaaagtatacacgtacatccaaagccggttctaccgatccccagaagtgatcctgggccacccctacgacgtggccattgac

SEQ ID NO: 11869 - DNA, 120 bp, Artificial Sequence
  ENSG00000010219_8 (sequence is synthesized)
atgtggagcctgggctgcatcacggcggagttgtacacgggctaccccctgttccccggggagaatgaggtggagcagctggcctgcatcatggaggtgctgggtctgccgccagccggc

SEQ ID NO: 11870 - DNA, 120 bp, Artificial Sequence
  ENSG00000010219_9 (sequence is synthesized)
ttcattcagacagcctccaggagacagacattctttgattccaaaggttttcctaaaaatataaccaacaacagggggaaaaaaagatacccagattccaaggacctcacgatggtgctg

SEQ ID NO: 11871 - DNA, 120 bp, Artificial Sequence
  ENSG00000010219_10 (sequence is synthesized)
aaaacctatgacaccagcttcctggactttctcagaaggtgtttggtatgggaaccttctcttcgcatgaccccggaccaggccctcaagcatgcttggattcatcagtctcggaacctc

SEQ ID NO: 11872 - DNA, 120 bp, Artificial Sequence
  ENSG00000010219_11 (sequence is synthesized)
aagccacagcccaggccccagaccctgaggaaatccaattcctttttcccctctgagacaaggaaggacaaggttcaaggctgtcatcactcgagcagaaaagcagatgagatcaccaaa

SEQ ID NO: 11873 - DNA, 120 bp, Artificial Sequence
  ENSG00000010219_12 (sequence is synthesized)
gagactacagagaaaacaaaagatagccccacgaagcatgttcagcattcaggtgatcagcaggactgtctccagcacggagctgacactgttcagctgcctcaactggtagacgctccc

SEQ ID NO: 11874 - DNA, 120 bp, Artificial Sequence
  ENSG00000010219_13 (sequence is synthesized)
aagaagtcagaggcagctgtcggggcggaggtgtccatgacctccccaggacagagcaaaaacttctccctcaagaacacaaacgttttaccccctattgtatgacctttgctgagggta

SEQ ID NO: 11875 - DNA, 120 bp, Artificial Sequence
  ENSG00000010219_14 (sequence is synthesized)
tgtcctgctcctttccaccagtgatttgtattaagacagcacttatattgtacaatacttcagactgttttttttaaatacataaaactttatgttaaaaaactctattaacatggccaa

SEQ ID NO: 11876 - DNA, 120 bp, Artificial Sequence
  ENSG00000010219_15 (sequence is synthesized)
ttgaactctcagtgttacagcatcattaatggaactccaaacaaaagaaattttttttcttcttgcccatgactgccaacctatgtcaggatttttgtttgaaaatgatagaagctgaat

SEQ ID NO: 11877 - DNA, 120 bp, Artificial Sequence
  ENSG00000010219_16 (sequence is synthesized)
tcaaaagcagtttaaacaacggaagacacttattgacttacataattggggcatcagaaaaggtagatgtagtttcaggcgcagcaggatccaggaattcaaatgaggttgtagggctca

SEQ ID NO: 11878 - DNA, 120 bp, Artificial Sequence
  ENSG00000010219_17 (sequence is synthesized)
gactccctcttcatctattagccttgcttctcactatggttaacttcatcctgatgtcaggccctgctcagaagttaaccgccaacatccagtcaaaaagatacaggcttccttgctaac

SEQ ID NO: 11879 - DNA, 120 bp, Artificial Sequence
  ENSG00000010219_18 (sequence is synthesized)
agggagtctccaaaatgattgtgacacagaaattgtgactgggatactgggatgcttggccagtctgggccccaagcccacagtgatggtgaaggcactgtgactgatgcttctctagac

SEQ ID NO: 11880 - DNA, 120 bp, Artificial Sequence
  ENSG00000010219_19 (sequence is synthesized)
tagagcaagggatggaaggtttcccaaaggaagggaagctaagtaaacaagcaggacatgttcactcatctaccatacgccaaatctaagtatgtcttcttacttccctttctaatcctc

SEQ ID NO: 11881 - DNA, 120 bp, Artificial Sequence
  ENSG00000010219_20 (sequence is synthesized)
atctacacaaatacataatttttatgtggttgtcataggacagatagaattttacgtgaaacttaagatcataacatcagaaacaacatagagtatataaaaatagttttcttttttgct

SEQ ID NO: 11882 - DNA, 120 bp, Artificial Sequence
  ENSG00000010219_21 (sequence is synthesized)
tgccatttggaataacctccccccagtacagttttcattttaattgttgcataatattttatgaagggggacaccaggtcattgaagcaatggatttggatgtaatctcccaggaaaaat

SEQ ID NO: 11883 - DNA, 120 bp, Artificial Sequence
  ENSG00000010219_22 (sequence is synthesized)
cttgagttagaatagcagagggttgagagaaagtcccaggaaagacaaatatataaggagttgccagagttgaggaggtcctccaagagacccagagatacagaaagaaaattagaagcc

SEQ ID NO: 11884 - DNA, 120 bp, Artificial Sequence
  ENSG00000010219_23 (sequence is synthesized)
aatggagaagtttctagacagaaagaggagtcaagatagaaaattccacagaaaatccagggtaagaacagaaaatatttcttaagtggggtgatatggacattaagtcagagcagtgtt

SEQ ID NO: 11885 - DNA, 120 bp, Artificial Sequence
  ENSG00000010219_24 (sequence is synthesized)
agaacaggtaacttatcccagtttctatagccagaaagccacaaaaccagcaatagaactcagatccttgggaacattcttgaaacgatcttcaaccatggatgaagttggaggtggaca

SEQ ID NO: 11886 - DNA, 120 bp, Artificial Sequence
  ENSG00000010219_25 (sequence is synthesized)
ctgttctgcagctctacagagaataagaagccaggtcttcaacattgtaatcaggatgattttgattgaataattcaaaagtatcttctgattttcatggttataaaaggttaaaatgaa

SEQ ID NO: 11887 - DNA, 120 bp, Artificial Sequence
  ENSG00000010219_26 (sequence is synthesized)
tctcacagcctcccgcagcggcgggcggtcagcgccggcctcatgcagctcctcccgccgcctatccgcaccggaacaaagactcaaatggatgctaaaaagccaaggaaatgtgatttg

SEQ ID NO: 11888 - DNA, 120 bp, Artificial Sequence
  ENSG00000010219_27 (sequence is synthesized)
actcccttcctggttttgaaagcaagaaagaaacaaaagttcacctctgcgaaggttggaagtaaactttcggttcagatccagaagccaccttccaatatcaagaactccagaatgacc

SEQ ID NO: 11889 - DNA, 120 bp, Artificial Sequence
  ENSG00000010219_28 (sequence is synthesized)
gaaaagggacttgcaaaggacacagagcaagcggtttcagctgtactctgctaatgtaacagggaatgactcaaatggatgctaaaaagccaaggaaatgtgatttgactcccttcctgg

SEQ ID NO: 11890 - DNA, 120 bp, Artificial Sequence
  ENSG00000010219_29 (sequence is synthesized)
tgaagtatgactgaggcgggatggtgtgatggaggtgtgcctttccgaaaaggctgggtggcctgaggcctgcagagagtccagttgctatcttccctgaacagtccaggttggaagtaa

SEQ ID NO: 11891 - DNA, 120 bp, Artificial Sequence
  ENSG00000010219_30 (sequence is synthesized)
cgtcacacacacataagtccatgtgctcctgggcaagtcactttgtcttgttgggagctcaccttcttaagagcagcagtgaaaaactgttcccatctcttcccatagtgagatgttgct

SEQ ID NO: 11892 - DNA, 120 bp, Artificial Sequence
  ENSG00000010219_31 (sequence is synthesized)
ggggttgtcagcagcatacggtaaggtacaggggtctccccaggaatagtgtcagtcagacagatgcttcctttgggagagaggtagggagaaccttctgtctcttaatcgctgttttct

SEQ ID NO: 11893 - DNA, 120 bp, Artificial Sequence
  ENSG00000010219_32 (sequence is synthesized)
ccctggagaggtaggtaaagagcctggctgaaggtgggtgtctttggttaaataaatggtttatggcccccaggagagtcctaagtagttatttattgcaaacctcttttcctggacagg

SEQ ID NO: 11894 - DNA, 120 bp, Artificial Sequence
  ENSG00000010219_33 (sequence is synthesized)
gactcaaatggatgctaaaaagccaaggaaatgtgatttgactcccttcctggttttgaaagcaagaaagaaacaaaagttcacctctgcgaagaaaggggcttcctgcaagagacgggc

SEQ ID NO: 11895 - DNA, 120 bp, Artificial Sequence
  ENSG00000010219_34 (sequence is synthesized)
aaagcaggaacaaaacaaaatcctgatccgaccatttggtgttgggcaaaggaatggaaatcagttcaagctgaagagacagcaaacagcagagatgtgaattgctagttctgtctaggt

SEQ ID NO: 11896 - DNA, 120 bp, Artificial Sequence
  ENSG00000010219_35 (sequence is synthesized)
ttttaggttggcacactattatttatggtaatgcattcacctgttaaatgcaaatggaagactcgaactagaagaacttgtaatgatcattgcaagttaacattaaaacgtttaaaatat

SEQ ID NO: 11897 - DNA, 120 bp, Artificial Sequence
  ENSG00000010219_36 (sequence is synthesized)
tgaaggatgaggagcatttaggtaagtagagggcctagggccgcattactgtagcttgacatatgtcttttcttctctctaggaaaatatagtgctataccaaaagggccaagcctctgt

SEQ ID NO: 11898 - DNA, 120 bp, Artificial Sequence
  ENSG00000010219_37 (sequence is synthesized)
gcagctagtaagtagtagagcagggactcaaacccagagcccatgtgtttgttgactctgctgctctggaatctgcatttcttgccaagaactttaagaataggtttagaacaccagtgt

SEQ ID NO: 11899 - DNA, 120 bp, Artificial Sequence
  ENSG00000010219_38 (sequence is synthesized)
acagaggagggactgcgtgactgtggcccctgcagaatgccagcccttcctgactgtgcctctccctccaatcttcccttttgtcttcccttttctctttctacccgtctgattccatga

SEQ ID NO: 11900 - DNA, 120 bp, Artificial Sequence
  ENSG00000010219_39 (sequence is synthesized)
tggatgtgaatatttagtaactagaatggacatgacagtcactcagttatccagaatgcccaggagcaaggaggttgggatgaaagcaggccatcttggtatgcctgtcacctgccagca

SEQ ID NO: 11901 - DNA, 120 bp, Artificial Sequence
  ENSG00000010219_40 (sequence is synthesized)
tacccatgatgtacttccctggtgctgggtactgagccaggtgacatgaccaaaacaaggcctctttccttaagagctaaactgaaatagtcaaaaaggacatttctttgtttgcagtca

SEQ ID NO: 11902 - DNA, 120 bp, Artificial Sequence
  ENSG00000010219_41 (sequence is synthesized)
ttttccccactcattggctttctggcctggtcgtgcagaggctgaaacccaaaggaacaggcagctggctgctcagagtgggaaatgggttttgattttgagtaaataaggacaagagca

SEQ ID NO: 11903 - DNA, 120 bp, Artificial Sequence
  ENSG00000010219_42 (sequence is synthesized)
ggcgggcggtcagcgccggcctcatgcagctcctcccgccgcctatccgcaccggaacaaagcttaagtggagactcggcaaaagcaggaggccatttagtggaaaagttcaaaccgtgg

SEQ ID NO: 11904 - DNA, 120 bp, Artificial Sequence
  ENSG00000010219_43 (sequence is synthesized)
aaacaacaaatgaaaatgtcctttgtcttgcttgagcgatttgatcacctacatgtggtcgaatgcaaacggaatccctgcaaaccctgcactgccatactttctgccccaaagacagcc

SEQ ID NO: 11905 - DNA, 120 bp, Artificial Sequence
  ENSG00000010219_44 (sequence is synthesized)
ggaaggtcggggtgttaagagctaagctgcgctggagtgagctaagctgccaggtgtcagagtagtcaaagaaggcagccagccaagaggaaagtagaagttaagcgttgaacctctgac

SEQ ID NO: 11906 - DNA, 120 bp, Artificial Sequence
  ENSG00000010219_45 (sequence is synthesized)
tgtggtagtataagcaagaggctgaataggaggctgaatttcccccaaggagtggctctgggcaagggcgggatgtaccaatgcagacagaaggaagtgtctcatttgcctaaggagccc

SEQ ID NO: 11907 - DNA, 120 bp, Artificial Sequence
  ENSG00000010219_46 (sequence is synthesized)
agacacaaggctcctgtcattttatggacccaggggccagcgggaaggcactgagagagtggaagagccaggagtggaaaggtactgaatactgagagcagagcaaagggtgctgaagct

SEQ ID NO: 11908 - DNA, 120 bp, Artificial Sequence
  ENSG00000010219_47 (sequence is synthesized)
tgctccttcctcttgataaggaggtgttggagaggagcctctgtagggggatcttgattagaaatgcagacatgtagaagagcatggccagccaggggtctcagtccttggctgtagctt

SEQ ID NO: 11909 - DNA, 120 bp, Artificial Sequence
  ENSG00000010219_48 (sequence is synthesized)
tgtgagtttgttgggacatctctgcttctgggtttcctcttaaatgctgtactttgacacacgtttgctggtgaaagactaaggctgggagatagttataaaagtaacaagaaatgctaa

SEQ ID NO: 11910 - DNA, 120 bp, Artificial Sequence
  ENSG00000010219_49 (sequence is synthesized)
caatagagctttaaagtctacaaattgcttccacatctgttgtttcatcagacatctctccctactgtgtggttgtcagggcagatgatttgctctgttttgcacgtatggaggttgggg

SEQ ID NO: 11911 - DNA, 120 bp, Artificial Sequence
  ENSG00000010219_50 (sequence is synthesized)
cctgtctggccctgcagacattacagttctcaaagcctctcaagacggactaattatagcttaattccacgttaacttgggcaacttgccacctaaactatatactattgtcgacactaa

SEQ ID NO: 11912 - DNA, 120 bp, Artificial Sequence
  ENSG00000010219_51 (sequence is synthesized)
taatattctagaattctgtaaatctccttgtgatatttttgaagccccagttctgtagtctggaaattaaaatctttgtttttaatattctgtttaatatgctgtttaagcatttctgaa

SEQ ID NO: 11913 - DNA, 120 bp, Artificial Sequence
  ENSG00000010219_52 (sequence is synthesized)
aaaaaatcaatttttaaagtaaattgcattccttgggtaatctacacatggttatttcaaactgagtgtgtgtgtgtgtgtttattggggtgtggcatgaggcgagtgtgtaagacagag

SEQ ID NO: 11914 - DNA, 120 bp, Artificial Sequence
  ENSG00000010219_53 (sequence is synthesized)
agcaaaagagctacagaggccactctaagcagcagcatcatgtgaccactaaagatttacacctgaaactaaatacagaatgttctatctctacagattccaaaggttttcctaaaaata

SEQ ID NO: 11915 - DNA, 120 bp, Artificial Sequence
  ENSG00000010244_0 (sequence is synthesized)
gggaggcggagcggggaacgaggccgtcggccattttgtgtctgcttcctgtgggacgtggtggtagccgttgggttgggaaagtgagggatttttggcctcgtttctcctgcttctttt

SEQ ID NO: 11916 - DNA, 120 bp, Artificial Sequence
  ENSG00000010244_1 (sequence is synthesized)
ctcctcccttttactttgccggtagaacacagttatgggtcgcaagaagaagaagcagctgaagccgtggtgctggtattgtaatagagattttgatgatgagaagatccttattcagca

SEQ ID NO: 11917 - DNA, 120 bp, Artificial Sequence
  ENSG00000010244_2 (sequence is synthesized)
ccaaaaagcaaagcattttaaatgccatatatgtcacaagaaattgtatacaggacctggcttagctattcattgcatgcaggtacataaagaaacaatagatgccgtaccaaatgcaat

SEQ ID NO: 11918 - DNA, 120 bp, Artificial Sequence
  ENSG00000010244_3 (sequence is synthesized)
acctggaagaacagacatagagttggaaatatatggtatggaaggtattccagaaaaagacatggatgaaagacgacgacttcttgaacagaaaacacaagaaagtcaaaaaaagaagca

SEQ ID NO: 11919 - DNA, 120 bp, Artificial Sequence
  ENSG00000010244_4 (sequence is synthesized)
acaagatgattctgatgaatatgatgatgacgactctgcagcctcaacttcatttcagccacagcctgttcaacctcagcaaggttatattcctccaatggcacagccaggactgccacc

SEQ ID NO: 11920 - DNA, 120 bp, Artificial Sequence
  ENSG00000010244_5 (sequence is synthesized)
agtaccaggagcaccaggaatgcctccaggcatacctccattaatgccaggtgttcctcctctgatgccaggaatgccaccagttatgccaggcatgccacctggaatgatgccaatggg

SEQ ID NO: 11921 - DNA, 120 bp, Artificial Sequence
  ENSG00000010244_6 (sequence is synthesized)
tggaatgatgccacctggaccaggaataccacctctgatgcctggaatgccaccaggtatgcccccacctgttccacgtcctggaattcctccaatgactcaagcacaggctgtttcagc

SEQ ID NO: 11922 - DNA, 120 bp, Artificial Sequence
  ENSG00000010244_7 (sequence is synthesized)
gccaggtattcttaatagaccacctgcaccaacagcaactgtacctgccccacagcctccagttactaagcctcttttccccagtgctggacagatggggacacctgtcacaagctcaag

SEQ ID NO: 11923 - DNA, 120 bp, Artificial Sequence
  ENSG00000010244_8 (sequence is synthesized)
tacagcttcatccaattcagaaagtctgtctgcatcttctaaagctctgtttcctagcacagcacaagctcaggcagctgtccaaggacctgttggtacagatttcaaacccttaaatag

SEQ ID NO: 11924 - DNA, 120 bp, Artificial Sequence
  ENSG00000010244_9 (sequence is synthesized)
ccctgcaacaactacagaacccccaaagcctacattccctgcttatacacagtctacagcttcaacaactagtacaacaaatagtactgcagctaaaccagcggcttcaataacaagtaa

SEQ ID NO: 11925 - DNA, 120 bp, Artificial Sequence
  ENSG00000010244_10 (sequence is synthesized)
gcctgctacacttacaacaactagtgcaaccagtaagttgatccatccagatgaggatatatccctggaagagagaagggcacagttacctaagtatcaacgtaatcttcctcggccagg

SEQ ID NO: 11926 - DNA, 120 bp, Artificial Sequence
  ENSG00000010244_11 (sequence is synthesized)
acaggcccccatcggtaatccaccagttggaccaattggaggtatgatgccaccacagccaggcatcccacagcaacaaggaatgagacccccaatgccacctcatggtcagtatggtgg

SEQ ID NO: 11927 - DNA, 120 bp, Artificial Sequence
  ENSG00000010244_12 (sequence is synthesized)
tcatcatcaaggcatgccaggataccttcctggtgctatgcccccgtatgggcagggaccgccaatggtgcccccttaccagggtgggcctcctcgacctccgatgggaatgagacctcc

SEQ ID NO: 11928 - DNA, 120 bp, Artificial Sequence
  ENSG00000010244_13 (sequence is synthesized)
tgtaatgtcgcaaggtggccgttactgatcttacttcatccagtctaataggtttggagattaaaccttttctcaacttgtgctgtttatatagccaagcttccgtcaataaggcttcat

SEQ ID NO: 11929 - DNA, 120 bp, Artificial Sequence
  ENSG00000010244_14 (sequence is synthesized)
tgtgactttaacaaacattatcttcccacataccaggaactattggacatttattttacatgggaaaaattatttggaataataaagcaggaacttttcctgaagttgcaatttatactg

SEQ ID NO: 11930 - DNA, 120 bp, Artificial Sequence
  ENSG00000010244_15 (sequence is synthesized)
tatggcttctttttcatgtttcatctaggtttttagaagtgaagtatagtaaatttggttcgttaaattgtgaaggcgctggaattacatgaacataccaccctagtaaaggcaagttct

SEQ ID NO: 11931 - DNA, 120 bp, Artificial Sequence
  ENSG00000010244_16 (sequence is synthesized)
gtaagcttacattgctatttgtaaagtttgccttcacagcatttcagatgctgttggacttcatgtccccaacctagcttggtgagggctgtaactgtttccaagtacttgtacattgga

SEQ ID NO: 11932 - DNA, 120 bp, Artificial Sequence
  ENSG00000010244_17 (sequence is synthesized)
agtctgaatgtgtaacaatatttaatgtatttagagttcctcatgttgcagggtttaagaaatctgacccaccaaggtcatgtgacttttctgtactgttaaacttcattgtaataaaat

SEQ ID NO: 11933 - DNA, 120 bp, Artificial Sequence
  ENSG00000010244_18 (sequence is synthesized)
gagagaaaaatttatgcctttttattcataacccagctgtggaccactgcctgaaaggtttgtacagatgcatgccacagtagatgtccacataataaaattcatagttaccaatgcagt

SEQ ID NO: 11934 - DNA, 120 bp, Artificial Sequence
  ENSG00000010244_19 (sequence is synthesized)
gttttaaactgaatttgcatagagttgtatgttaatgtttcagttaagagaaaaacttaagatacatgagtcattacataatgggtatgaaatctttataatcacccttccaccctctat

SEQ ID NO: 11935 - DNA, 120 bp, Artificial Sequence
  ENSG00000010244_20 (sequence is synthesized)
ggtgtcagtacacatcacgtgtcatagatacttaaaatgtaaatgttaacacttttccttcctgctgagatgtttagagcctagtgccagacccattcatttccttttgattatttttga

SEQ ID NO: 11936 - DNA, 120 bp, Artificial Sequence
  ENSG00000010244_21 (sequence is synthesized)
gactcagtactgcatggacctcagaagcttttcaggtgcaaacttctagaagcttaggtgcatgcagtaatagcttcttgtgctgttaatgggttattatatattattctaagtgtaatg

SEQ ID NO: 11937 - DNA, 120 bp, Artificial Sequence
  ENSG00000010244_22 (sequence is synthesized)
ctgagaatctaaatgtgtctctgttgggatggttaacagatgaattggcaatttttattatgttcctggaagattacattattcatttgagtaccttctgttattaagcctaggtagcct

SEQ ID NO: 11938 - DNA, 120 bp, Artificial Sequence
  ENSG00000010244_23 (sequence is synthesized)
tactgtgcaactttttatttatccttggaaattttgaatgttgtgttcttacagagagcttttctgtagagatgactgctattcaatattttgtgttgcaacctcttaaaataatagctc

SEQ ID NO: 11939 - DNA, 120 bp, Artificial Sequence
  ENSG00000010244_24 (sequence is synthesized)
ttgttgacctttttgggatctgtttttctgatcttttgcagggtagttttatgattttttaggcatcaaataacctatgcaaagtattaatataatgaactcaagttgagtttttctcat

SEQ ID NO: 11940 - DNA, 120 bp, Artificial Sequence
  ENSG00000010244_25 (sequence is synthesized)
tataaagttaagacttctaagaaaatggtaacatttctttataactttcctgtgaaggtatagataaaacacatgaagtctgaagttgtatggaaaaaagggctttaactttgaaggaaa

SEQ ID NO: 11941 - DNA, 120 bp, Artificial Sequence
  ENSG00000010244_26 (sequence is synthesized)
atatattgaaaagtgatttagccatcacaaaagagttcgtatttatgtgacagatgaaagtcatacctttaagcaaaacattgcaagtattataaagctgaatgctattttaactcacat

SEQ ID NO: 11942 - DNA, 79 bp, Artificial Sequence
  ENSG00000010244_27 (sequence is synthesized)
ttgcaagtattataaagctgaatgctattttaactcacctggaaggctgagatgggaggattgcttgagtccaggagtt

SEQ ID NO: 11943 - DNA, 120 bp, Artificial Sequence
  ENSG00000010244_28 (sequence is synthesized)
aaaacatttaaaaattagccaggcgcgttagtgtgtgtctgtggtcccagctgctcaagaggctgaggaaggaggttcttcctccttccgaggctgcggtgagctatgttcactccagcc

SEQ ID NO: 11944 - DNA, 120 bp, Artificial Sequence
  ENSG00000010244_29 (sequence is synthesized)
caacagagcgagactctgtcaaaaaataaattaaaatatctgattatctggcttcaatgattttggctcctgtgcttgtggtaccatagtggtacaaaaattttcatagtttgaaaataa

SEQ ID NO: 11945 - DNA, 120 bp, Artificial Sequence
  ENSG00000010244_30 (sequence is synthesized)
ataaaacaggtattttgccagtaatgtatttctttctgccagcagccaagtcccaaaccactttcccctctgaacctctgcttacctaaatggtttcaaaattaatacatgctgctttga

SEQ ID NO: 11946 - DNA, 120 bp, Artificial Sequence
  ENSG00000010244_31 (sequence is synthesized)
caaaattaatacatgctgctttgatttggcagcacacttaatatactgctgaaggaaaacttgtgttgaaagtctttaagataaaaatggtgtgataggccgggcgcagtggctcacgcc

SEQ ID NO: 11947 - DNA, 60 bp, Artificial Sequence
  ENSG00000010244_32 (sequence is synthesized)
tgcggatgcctgtagtcccaactactctggagaccgaggcaggagaatggcgtgaacccg

SEQ ID NO: 11948 - DNA, 85 bp, Artificial Sequence
  ENSG00000010244_33 (sequence is synthesized)
ggaggcattagcctggacgacagattgagactccgtctcaaaaaaaaaaaatgctgtgattaaatttagaataattaagtaaggg

SEQ ID NO: 11949 - DNA, 120 bp, Artificial Sequence
  ENSG00000010244_34 (sequence is synthesized)
aaaaaatgctgtgattaaatttagaataattaagtaaggggtgctctcccaaattctcaggaatttcatgtatacggttattgacaaactgcaatagggttagtagacctgtttcagaaa

SEQ ID NO: 11950 - DNA, 120 bp, Artificial Sequence
  ENSG00000010244_35 (sequence is synthesized)
ttatgtgaagctttatttgcattttatgcaaagaaggttgatactttgtagcaaggttttttgctctctgtataggtctgatgggcaaaaatggaacttttaaatatgggatagaattct

SEQ ID NO: 11951 - DNA, 120 bp, Artificial Sequence
  ENSG00000010244_36 (sequence is synthesized)
aattaaaaattaattgaaagtgttaggcattggcagataaaacttaagctcatgagttcctgagtttgtagctataggctcagaggtggtgtacccatttaatatatttgaagtgtaatt

SEQ ID NO: 11952 - DNA, 120 bp, Artificial Sequence
  ENSG00000010244_37 (sequence is synthesized)
tttgcatgcatccaaacgtaattaagcttctagaaaataccttttttctaaatgcttctggggtccatagtgtggttgaattatgagtggagcaaattatattcatataattaactctga

SEQ ID NO: 11953 - DNA, 120 bp, Artificial Sequence
  ENSG00000010244_38 (sequence is synthesized)
ctcaaccttccttaagtagtagatgaagttgagtcaaagtggatgccaactgccctcacagaagacaacttttgggacttgataattcaggcaggcattgtgattgtcataattaaggaa

SEQ ID NO: 11954 - DNA, 120 bp, Artificial Sequence
  ENSG00000010244_39 (sequence is synthesized)
gctgtaaggttagtagggctggcaactttggctctaccttacatccaccccttttagaaaaacaagaaaacattttgtctggcactagtttctgttgtataagttttcatactgtttaac

SEQ ID NO: 11955 - DNA, 120 bp, Artificial Sequence
  ENSG00000010244_40 (sequence is synthesized)
aagaccacagcaggtaaggattaatttttgagtggctgctggaattacttgatttgaatacttagtattttagtagtgtctcacacatttgccattaggtatgaataaaatattcctact

SEQ ID NO: 11956 - DNA, 120 bp, Artificial Sequence
  ENSG00000010244_41 (sequence is synthesized)
gtactcctattccactaagttacattttgaacttagactcaccttaattaaacttaattaattggggagggggattccccaacaaaaagaagtacgggctcagagtggaattgtagtgga

SEQ ID NO: 11957 - DNA, 120 bp, Artificial Sequence
  ENSG00000010244_42 (sequence is synthesized)
caatagttaaaaacaaagctgctccttttgcttgcttgatcattgggatttttaaaaaaaaaaattttaatgcatgtcttttaaattaattgggaactgtttttctaaaattaaaatttt

SEQ ID NO: 11958 - DNA, 120 bp, Artificial Sequence
  ENSG00000010244_43 (sequence is synthesized)
cttcttcctatagccctgccataggacaggctgaggctgagtctcagtgttgccctgttcagtctgaggcaagtgggatttattttattccttataggggctttcacagctttatggctg

SEQ ID NO: 11959 - DNA, 120 bp, Artificial Sequence
  ENSG00000010244_44 (sequence is synthesized)
ttggatatttatgtccccaaacttgcagcaagtttggtgaaggcccctaaatttaattaaacttaggatttttatactcttttggcagagaaggctctatattaatattcacgtttgact

SEQ ID NO: 11960 - DNA, 120 bp, Artificial Sequence
  ENSG00000010244_45 (sequence is synthesized)
gtggtgttaataaacataagtatttcatatgcaattttatgtaatttgctgtgtgttacataattaacagcttcagtaaagcttgtgttcctatattgaacttcaataaattgacaaaat

SEQ ID NO: 11961 - DNA, 120 bp, Artificial Sequence
  ENSG00000010244_46 (sequence is synthesized)
ttgatatttttgattggaggcaagaaatgtttcattcaagttttttactttcacttctaggaaaatcttactggttttattttctccataaactattaaatttaacctcaaggataagtt

SEQ ID NO: 11962 - DNA, 120 bp, Artificial Sequence
  ENSG00000010244_47 (sequence is synthesized)
taaatttaacctcaaggataagtttaatcattggaaatgccactggatactgaaatgtgccttctcttttttgagacggagtttcactcttatcacccaggatggagtgcagtggtgcga

SEQ ID NO: 11963 - DNA, 68 bp, Artificial Sequence
  ENSG00000010244_48 (sequence is synthesized)
gccaccacatctggctattttttcaatatttttcagtagggatggggttttgccgtgttggccaggct

SEQ ID NO: 11964 - DNA, 79 bp, Artificial Sequence
  ENSG00000010244_49 (sequence is synthesized)
aggtgatccacccatctcagcctcccagagtgctggagtagcaggtgtgagccaccgcgcctggccaaaatctcgctgt

SEQ ID NO: 11965 - DNA, 79 bp, Artificial Sequence
  ENSG00000010244_50 (sequence is synthesized)
caccgcgcctggccaaaatctcgctgtgtcacccaggccagagtgcagtagcacgatctcagctcactacaacctccac

SEQ ID NO: 11966 - DNA, 120 bp, Artificial Sequence
  ENSG00000010244_51 (sequence is synthesized)
ggattacaggcgtgggccaccgcgcttggccaaaatctgcattcttaatcacaaacttacgcattgaatgttaaggctaaaaggtcatctggaaatgcttaattttaaaatattttcaag

SEQ ID NO: 11967 - DNA, 120 bp, Artificial Sequence
  ENSG00000010244_52 (sequence is synthesized)
aattttaaaatattttcaagcctcaccacattagagcaaatgttaatgtagagccctgtaaaggtgggaaggtggtgtctatgtgtgtgcttgtgtatgtgggggtatagaccatatagt

SEQ ID NO: 11968 - DNA, 120 bp, Artificial Sequence
  ENSG00000010244_53 (sequence is synthesized)
tgatataacaacagaatttgggtgttacagacctttcagcatggatggattactaattttcaggtatcgaaactgaaatttgatacctgatcctgtggtaaagtatgttaaactatggtt

SEQ ID NO: 11969 - DNA, 120 bp, Artificial Sequence
  ENSG00000010244_54 (sequence is synthesized)
ttggagtgattattttgaggttcattttcagcctcactgaacagtgttttacgcacatgtgaaaagtatccacatttgtttccaactaaaatttgcttttatttggtgagaaaagttgtg

SEQ ID NO: 11970 - DNA, 120 bp, Artificial Sequence
  ENSG00000010244_55 (sequence is synthesized)
gatagcagtttactctgagcagtaacaatgaacaagcagtatagcatttagcaaacctggaattgtttgtatatggttttcattcttggaagcataaagaaaaaatatgcattaaatgaa

SEQ ID NO: 11971 - DNA, 120 bp, Artificial Sequence
  ENSG00000010244_56 (sequence is synthesized)
ttgtaaattttgacttgttaaataacatgtttttcactataactaataggattttaatatttaaagaattttgttgcttccatgacaaaatatcccattggactattttataacctcagt

SEQ ID NO: 11972 - DNA, 120 bp, Artificial Sequence
  ENSG00000010244_57 (sequence is synthesized)
aatcaacatttaagagtccttaattggagatctgttttctctattacctaccatcctgcaatatgctgaaatctttctaagttgcttatcttaattctaatggtgataattgaaaaaagt

SEQ ID NO: 11973 - DNA, 120 bp, Artificial Sequence
  ENSG00000010244_58 (sequence is synthesized)
gtgctggaaatacaggctcttatctggttgagtactgggggtgggaaggatttagtaatgtcataatctgttgaaggtaatatctatagataactaagatagttcctttttttttgtagt

SEQ ID NO: 11974 - DNA, 120 bp, Artificial Sequence
  ENSG00000010244_59 (sequence is synthesized)
tctgtgactcagacaaataagattttgagaattatgtagtttttaggtgtctgtaacatccactagtaaaacttggcaaatgaaagaaaattgtgaagtcaccactttaactgagtcaaa

SEQ ID NO: 11975 - DNA, 120 bp, Artificial Sequence
  ENSG00000010244_60 (sequence is synthesized)
attttgtttgaataagctgatgaaaatagacatgtaccctagaagtagatactctaaaattatacagacatgaatgtcttttttaaaaggttgtcattattgacctaatattgagtaatc

SEQ ID NO: 11976 - DNA, 120 bp, Artificial Sequence
  ENSG00000010244_61 (sequence is synthesized)
tttctgcgttattccaaattgaaatttgtttgctcttcattgtaacttttatgtaaaagtcctttaaaaggggattcaattataaggctatttgactatagggcagatttttataagtaa

SEQ ID NO: 11977 - DNA, 120 bp, Artificial Sequence
  ENSG00000010244_62 (sequence is synthesized)
acattcccccaattccacttatgctaactgtctcatgacagtaaagtttactcctttttagaaaccctttctcagtattttaatttctgtcattgaatcatttaaataataaccttttgt

SEQ ID NO: 11978 - DNA, 120 bp, Artificial Sequence
  ENSG00000010244_63 (sequence is synthesized)
ttttatagcaaagaaatcatctgacttttctgtgtgatgtttcttggcaaaataagcacttgatgtatggtcatgtacataatggatattcattaattttgtgattagtgctgagttttc

SEQ ID NO: 11979 - DNA, 120 bp, Artificial Sequence
  ENSG00000010244_64 (sequence is synthesized)
taaactactatcttaagctcttaggcaccctattatggatctaattcaaaccaatatgtaggaaatggagaaagtaggacttcagtttgcgcttcccaataactttaaatatatccacct

SEQ ID NO: 11980 - DNA, 120 bp, Artificial Sequence
  ENSG00000010244_65 (sequence is synthesized)
tttccaagtgtttaagccctaaaacatctatctttatttttttacctggcatttttgttagaaaatagattacgttttaaagtaacattaaaaaaattcttcagtaagataattgctttt

SEQ ID NO: 11981 - DNA, 120 bp, Artificial Sequence
  ENSG00000010244_66 (sequence is synthesized)
aataagtatatttttcttgctcttggctctatacatttttgcataatattttagtcttgaaaagcttttcattttcttaactctggaaaataatagtttggaactaaattagtttgagaa

SEQ ID NO: 11982 - DNA, 120 bp, Artificial Sequence
  ENSG00000010244_67 (sequence is synthesized)
atctgaatcatctctctttaaatctgttcagttagtctcatgtattctcaggggaaaatgtctttattttactaagcggaagtagtagtcatattgaggcagaaatttgtagcccaaaca

SEQ ID NO: 11983 - DNA, 120 bp, Artificial Sequence
  ENSG00000010244_68 (sequence is synthesized)
aggtaggtcttcgctgaaactaatttgaactattcctatttgaagcaaattgaacactattataaatctagactggctaattagatggaaactttgatggttaggttctttaagaggcat

SEQ ID NO: 11984 - DNA, 120 bp, Artificial Sequence
  ENSG00000010244_69 (sequence is synthesized)
acaatccgttatgagaatgtttatgtttatgttttaatttttatcaaaataacctcagaggaggtacatgtgagtaaactgtcttaatggttgattacttggaacccacccattaattct

SEQ ID NO: 11985 - DNA, 120 bp, Artificial Sequence
  ENSG00000010244_70 (sequence is synthesized)
aaatgatgtaatggtctataaggtagtaatctggcacagcttcagtaatgtgtgctgtgtttgtaaaaaggtgaagtactttattggcattttctaagccctctgacattgttagtgtct

SEQ ID NO: 11986 - DNA, 120 bp, Artificial Sequence
  ENSG00000010244_71 (sequence is synthesized)
gggttggttggtttgcattttactattatggtggaatctgtgttccttcaccattggttaagtctgaggaactaacagtgaaattcattgatggccaacttggataaaaatgaagaatga

SEQ ID NO: 11987 - DNA, 120 bp, Artificial Sequence
  ENSG00000010244_72 (sequence is synthesized)
tattttcccagtttactacacatggaccaatagtgattatttgggagagaacactgggtagtattgtttgacttaagaaccttaaatatattgaaaagtaatggcattcttgctcatgat

SEQ ID NO: 11988 - DNA, 120 bp, Artificial Sequence
  ENSG00000010244_73 (sequence is synthesized)
ttgcatttgttagtgaggtctcaccatagtattttaatgtagcttcttattaaaattttattcataaatagtttagcagtcacagaggtgaaaaaaaaaagatttgcaccatcatatccg

SEQ ID NO: 11989 - DNA, 120 bp, Artificial Sequence
  ENSG00000010244_74 (sequence is synthesized)
agtctttactaataaaatgaggctgcttaagtacccaagtggagcaagggaagagttactacagttactgtaagtctgagttagaaaaaatacagagcatctagttattgagcaaagccc

SEQ ID NO: 11990 - DNA, 120 bp, Artificial Sequence
  ENSG00000010244_75 (sequence is synthesized)
ccttttacctgttcgcttattcaaagagaaacaatagaatttgcttctcagtacatgtttttaaaattgagaatctctgatgtgacaaaatcaatttttacaaaagttgaattaaaaact

SEQ ID NO: 11991 - DNA, 120 bp, Artificial Sequence
  ENSG00000010244_76 (sequence is synthesized)
tttaaaaattgcttgtctttgggggtatgtctacatattcgtttaaatttagaaattcccacatgtttaagatatatgcccatcccctttttagagtaatcaaaatttctatcacagttc

SEQ ID NO: 11992 - DNA, 120 bp, Artificial Sequence
  ENSG00000010244_77 (sequence is synthesized)
acatactggaatacatagtaaaattgagatgtgtccaagagattttcaatgttaattagctcattctaaatagccaatataaggtaacttctgtttaaaaaaaaaaaaaactagggaaaa

SEQ ID NO: 11993 - DNA, 120 bp, Artificial Sequence
  ENSG00000010244_78 (sequence is synthesized)
gttttaaatgtattagtatcaggctctgaggaaatttaatgcacattgactttttaaactatggattgaactcctcagtttaatacaatttgtgtttttgttaactagcagcagaatttc

SEQ ID NO: 11994 - DNA, 120 bp, Artificial Sequence
  ENSG00000010244_79 (sequence is synthesized)
agcatttgctacttactggtagagaagaaaaatcccacagccctgccagtacaggttagtttaatctgtaagtacctgatgttcctatttttttcaaacatatccatataactcacacaa

SEQ ID NO: 11995 - DNA, 120 bp, Artificial Sequence
  ENSG00000010244_80 (sequence is synthesized)
ggaagaaagctgtgcggttacttaaatgttagtataactaataatagatccattggacactttaaacactcagtacttgggccaaagtagatctaggtttgctaaccccagttgtaataa

SEQ ID NO: 11996 - DNA, 120 bp, Artificial Sequence
  ENSG00000010244_81 (sequence is synthesized)
aggtgtaatactgctcctttgttatctccttgtggttcaacctaagtagatacattgtacataaaaggaaaagacagtttcagttggctatgcccttgttgatagatgatatggagtcca

SEQ ID NO: 11997 - DNA, 120 bp, Artificial Sequence
  ENSG00000010244_82 (sequence is synthesized)
gggctttgggtccagggtcttttacttaagctatttcatggtggttctctcattcaccttttaactttttacattatgaatcaacctaagaaaaaaggcaagtttcctcacatctagaaa

SEQ ID NO: 11998 - DNA, 120 bp, Artificial Sequence
  ENSG00000010244_83 (sequence is synthesized)
tgataaatggtgtacagtcataagctagaatatgtttttataatgcttttttgttcttttagcaacacttgtaaatacaagtactcctctatttttgttctttttttgtaaactataacg

SEQ ID NO: 11999 - DNA, 120 bp, Artificial Sequence
  ENSG00000010244_84 (sequence is synthesized)
tatcccgttggtgtaccagtgagttcattttactgtaaactaagaataacatacctttttaatactgaaagttgactactcatcaagaaatgtagctagattctttatgtaacacttttg

SEQ ID NO: 12000 - DNA, 120 bp, Artificial Sequence
  ENSG00000010244_85 (sequence is synthesized)
aggggcagtggggacataatgggttgtggaaaatgtgttttaacatttttattttttttttattctacccgagttcattgttgtttgaaccatcctctaaagatttcctttaacctctaa

SEQ ID NO: 12001 - DNA, 120 bp, Artificial Sequence
  ENSG00000010244_86 (sequence is synthesized)
atgttgtgcttttaggttgataacaaatgtaaagcactgaggagggaggaataaagcatacaagttaatttctaattttcgcaagcctgaaccatcctaatctgatagtaggatgtatgg

SEQ ID NO: 12002 - DNA, 120 bp, Artificial Sequence
  ENSG00000010244_87 (sequence is synthesized)
cttcttccttttcaccttgtgtgatgtttaatttgagacgatctagccataaaactagtaatcttgaattcctcttgagctggatggtgattagccattgtgaaaacagattatatggaa

SEQ ID NO: 12003 - DNA, 120 bp, Artificial Sequence
  ENSG00000010244_88 (sequence is synthesized)
attgtgcatattgctaaattttaaaacatggatttatcaactgataataaaatatatcttacaagataaccacttgttttttaatgtaaaattgcacaagggcttaagtttcattgcctt

SEQ ID NO: 12004 - DNA, 120 bp, Artificial Sequence
  ENSG00000010244_89 (sequence is synthesized)
tcacagtttaatctgtatatgaaatggtgtagatacagtggaaatggttttccttaaaaccatctctttaaagctgcctttctggtgagtactgttttatacttttatatattataattt

SEQ ID NO: 12005 - DNA, 120 bp, Artificial Sequence
  ENSG00000010244_90 (sequence is synthesized)
tatcttctaaaattaactgaaataggacactttgattaaagaggtgagcactctgaatttctacatctttggatattacttgaatcaagaatattagaaaattattttaccacctggcat

SEQ ID NO: 12006 - DNA, 120 bp, Artificial Sequence
  ENSG00000010244_91 (sequence is synthesized)
ttcccttttaatttgctagttcacttttttctgaccttcacttaacagactataaatacaaaaactttgaacacataaattatttcattttggtgagatggaataaatgtttaaaattag

SEQ ID NO: 12007 - DNA, 120 bp, Artificial Sequence
  ENSG00000010244_92 (sequence is synthesized)
tatttaagaaagttcttaaacattttttttagttggcagccaaaagatttttcttagtgctttggagacattgcataggtgtaaaattaagataccagaacttcattctgttcttgttga

SEQ ID NO: 12008 - DNA, 120 bp, Artificial Sequence
  ENSG00000010244_93 (sequence is synthesized)
agctgttgttgtggtgattcatgagcagtaagctggagttagagtggaagaagggtttaccaaaattcttcctgcagactagttgcttacagggtttctttgagaggcttaaaaatttca

SEQ ID NO: 12009 - DNA, 120 bp, Artificial Sequence
  ENSG00000010244_94 (sequence is synthesized)
aaagtattatttaagccactctaaccctgcatgaaaaattggagttagaaatactgatttctgagaccacgtataccagtgaaaattagcttctgagtaaatttctaatttatgccctgc

SEQ ID NO: 12010 - DNA, 120 bp, Artificial Sequence
  ENSG00000010244_95 (sequence is synthesized)
tttatttagcctcgctatatgtaacacatggattattttttccctctagtttttaactatatcctagattaaaaccagcatatgctaagaatgtttttacattctgtttcctcctgtgat

SEQ ID NO: 12011 - DNA, 120 bp, Artificial Sequence
  ENSG00000010244_96 (sequence is synthesized)
ctttctgaaccaataataaacagtcaactgtgatgctttttagtatgaacaatgatagttttctaaaatctgaaaatcaatacctgagtatgtgatgtggcaatgcattcttctagataa

SEQ ID NO: 12012 - DNA, 120 bp, Artificial Sequence
  ENSG00000010244_97 (sequence is synthesized)
gcactaaacaaagtatggaccctcaatttatgtctttaagatttaaagtgaagtaaatttctaaggaactgtgtcctttcctagcaggaataaacagtgaaaatttggtaagtatttaac

SEQ ID NO: 12013 - DNA, 120 bp, Artificial Sequence
  ENSG00000010244_98 (sequence is synthesized)
ttgaagtgcatgtaatagtgatgagagtaagtagccaaatttccgtaatataaggtaatgtttaaaagtgagcaataattattgcatctcttttgcgacttcatgtagatgtgattaaca

SEQ ID NO: 12014 - DNA, 120 bp, Artificial Sequence
  ENSG00000010244_99 (sequence is synthesized)
ttttttacaaatttgcctgcataaagattaaattggaacataccttactcctttgtctggtttttttattttgtatggtgctttaaatactaattttatatttcaagctttttgcagggt

SEQ ID NO: 12015 - DNA, 120 bp, Artificial Sequence
  ENSG00000010244_100 (sequence is synthesized)
agaaataagtggctgttaaagaaaatatcttcaagaaggattatttcagtgtccctttttaaaactcgatgatggctttcagtttatttaagtcttctgtttttcagctccagttaaaac

SEQ ID NO: 12016 - DNA, 120 bp, Artificial Sequence
  ENSG00000010244_101 (sequence is synthesized)
tgacaataggcagctatcaaaaatggaaaaaatcttgtgctctttctggaatattagaggaatcagttaataatagtaaagtggtattaacccaatacttgatttgcagtttttaaagca

SEQ ID NO: 12017 - DNA, 76 bp, Artificial Sequence
  ENSG00000010244_102 (sequence is synthesized)
gtggtattaacccaatacttgatttgcagtttttaaagcagtttttaaattgagagaaaaggggctgggcccagct

SEQ ID NO: 12018 - DNA, 73 bp, Artificial Sequence
  ENSG00000010244_103 (sequence is synthesized)
cgtgcctgtaagggaggaggttgcagtgagccgagatggcgccgttgcactccagcttgggtgacagagcgag

SEQ ID NO: 12019 - DNA, 120 bp, Artificial Sequence
  ENSG00000010244_104 (sequence is synthesized)
actccgtctcaaaaaaaaaaagaaaaaaagaaaaagtgataagatttgggagtctattccctgggatgttctattaataataaagtgataataaatgaaggttaaagtcaagtgttcaat

SEQ ID NO: 12020 - DNA, 120 bp, Artificial Sequence
  ENSG00000010244_105 (sequence is synthesized)
gttaaagtcaagtgttcaattactacaccaggaaagattgattatttctgaggaaaaggtccatttatttccaaactagtctgtagtggtttagagtaagcattattttatgaagtggta

SEQ ID NO: 12021 - DNA, 120 bp, Artificial Sequence
  ENSG00000010244_106 (sequence is synthesized)
caagattgcaaaggttagtaaagggacctgtctgtcaggtcaatcttcggtcttcacttttactggcaagggattatgtgaagagtaagtcatacaagggatatgattgtaaggaggtcc

SEQ ID NO: 12022 - DNA, 120 bp, Artificial Sequence
  ENSG00000010244_107 (sequence is synthesized)
tgaacaaagcatgataaatgttagtccatgtgtattattaaatggtctaaagaaaaatcatgactgatcgcataatttttaatgtaagtaaatgagctcactaagggtaattaaatacta

SEQ ID NO: 12023 - DNA, 120 bp, Artificial Sequence
  ENSG00000010244_108 (sequence is synthesized)
gcttttaaaatttaaagttctcacgaatattagtgcatcttgtcactttgatttgtcacctggttaaatagctggaagcttgtgcaaatgaaaaatgaaatggaagactacatttgtata

SEQ ID NO: 12024 - DNA, 120 bp, Artificial Sequence
  ENSG00000010244_109 (sequence is synthesized)
tatatctgtataatttttgtttactagtaggttcagagagagatctgagatgttccttaacatgtagccatgtaattagaactcacaaggggcattgaaatgtttttctttttcagatag

SEQ ID NO: 12025 - DNA, 120 bp, Artificial Sequence
  ENSG00000010244_110 (sequence is synthesized)
tctggggctatttacttattttaagtaagccaagtctaccatttgaaaaatggtgctttatttccatatctgaagcctgaagttattttttagtttgttttcatctaaaagtggaaagat

SEQ ID NO: 12026 - DNA, 120 bp, Artificial Sequence
  ENSG00000010244_111 (sequence is synthesized)
ttttgcttctgcgttattaagagcctctttgtttggaggagatggttatctccttcactcattaacctttgagtgcttgttatctacaaagatgaataaaatctttcatttattatttat

SEQ ID NO: 12027 - DNA, 120 bp, Artificial Sequence
  ENSG00000010244_112 (sequence is synthesized)
ctgagaccaggccattgcactccagcctggacaatgagtgaaaccccgtctcaaaaaaaaaaagaatgttaataacaatacttcattagatagtttcttgttgaagcaatttgtaattcc

SEQ ID NO: 12028 - DNA, 120 bp, Artificial Sequence
  ENSG00000010244_113 (sequence is synthesized)
cggaaagttgttagccatgcttcaagtttacaaataggtgaagttttaaggtatctagagtttaagtagttggattggtttgtctggcaaaagtaaatagttgggatgtaagggtaaatt

SEQ ID NO: 12029 - DNA, 120 bp, Artificial Sequence
  ENSG00000010244_114 (sequence is synthesized)
tttgaaaattactcttaacgttgtaagattttagatgcatgcctttatgcttggtgagcctctgcattcgagtatttagccctgcgcttatttttattcccaggaagagagaagggcaca

SEQ ID NO: 12030 - DNA, 120 bp, Artificial Sequence
  ENSG00000010244_115 (sequence is synthesized)
ccccagtgctggacaggtaaggtgaaaatcctgaaaaggagtgcacttatatttaaagataaagtacagttgtttacagaagtctttgaaattttcataggtcaatttttttgtttataa

SEQ ID NO: 12031 - DNA, 120 bp, Artificial Sequence
  ENSG00000010244_116 (sequence is synthesized)
tccctttaaaataagtgttcatttgtactcagatggtctgtgatctggtttaatgctcactaagtggtttttgccattctgattcttaagaaatcataaaatacttaaagtggacagata

SEQ ID NO: 12032 - DNA, 120 bp, Artificial Sequence
  ENSG00000010244_117 (sequence is synthesized)
ttgcatgttttggtcttagatggtttctctccccttcctccagactgtttctaaaagaagacagtaagtcaggttcttaactctcttaaaaatcattttagttaaacataagtttgcata

SEQ ID NO: 12033 - DNA, 120 bp, Artificial Sequence
  ENSG00000010244_118 (sequence is synthesized)
tgttaattgaataaacgttaagtgtgaagtagaatctgcagatcccttaagtcccatataaatgaatgaattttgatacaaagttaatgtttagaatgttgataatggccaggtgtggtg

SEQ ID NO: 12034 - DNA, 120 bp, Artificial Sequence
  ENSG00000010244_119 (sequence is synthesized)
aaattcttttaattgccctgtaggcttgtgcctagtaatgatctttttcaatttggatgttatatgaatgaaatgttactttccattttttgcttctagaaggtatgggctctatatatc

SEQ ID NO: 12035 - DNA, 120 bp, Artificial Sequence
  ENSG00000010244_120 (sequence is synthesized)
ttgtctaataaagggatcaaccagtaaatttaaggaatataaatttgcctctgagtaatagatttttgggttttagggtatatgtaagcaaccatctacttcaattgcatttactgtgat

SEQ ID NO: 12036 - DNA, 120 bp, Artificial Sequence
  ENSG00000010244_121 (sequence is synthesized)
taaagtagttggttatttatagatttgcgtttctgagattcagaattatctgtgacactttgtagttgtgacaagaagcagagaaactctgtaaatgatttatttgtcaaagcatcaaaa

SEQ ID NO: 12037 - DNA, 120 bp, Artificial Sequence
  ENSG00000010244_122 (sequence is synthesized)
gttttagacaatttattttgataggattgttacagtgtgttgtgtgttctttcagctttgattcatttcagtattagaggtcagattcaagtcttctatctagtgttgtttcaggcttta

SEQ ID NO: 12038 - DNA, 120 bp, Artificial Sequence
  ENSG00000010244_123 (sequence is synthesized)
aagaagaagaagcagctgaagccgtggtgctgtgtgcatttgtaaatgttgaaatatttataacaaaagtttcaccgacatctctgttaaacacaggaatttgacaaagtatattgctga

SEQ ID NO: 12039 - DNA, 120 bp, Artificial Sequence
  ENSG00000010244_124 (sequence is synthesized)
ttattgagatgtgttttttggggtggtgaagagagctggccttctaggaaattgaaaatactgaaataacatggcaatgtcatcattaggctgtctttgtgccttaacagtattgatcag

SEQ ID NO: 12040 - DNA, 120 bp, Artificial Sequence
  ENSG00000010244_125 (sequence is synthesized)
aatcttcaggaagcgttctcacagggcggagtttctgttacccaactttgtaggactaaaaagtgcctatcttattaggaaaactcttactacagtgtggtattaatgctttttctggaa

SEQ ID NO: 12041 - DNA, 120 bp, Artificial Sequence
  ENSG00000010244_126 (sequence is synthesized)
gcgttaatattctttacattaaaattgattttatttactgttttgtacgtaaaggcggcttgttacagtactgcgtttatgtaacagttttaaaaatagcttaaatacggttacgaattt

SEQ ID NO: 12042 - DNA, 120 bp, Artificial Sequence
  ENSG00000010256_0 (sequence is synthesized)
gcaacagggccgactgcagctggaagatggcggcgtccgtggtctgtcgggccgctaccgccggggcacaagtgctattgcgcgcccgccgctcgccggccctgctgcggacgccagcct

SEQ ID NO: 12043 - DNA, 120 bp, Artificial Sequence
  ENSG00000010256_1 (sequence is synthesized)
tgcggagtacggcaaccttcgctcaggcgctccagttcgtgccggagacgcaggttagcctgctggacaacggcctgcgtgtggcctccgagcagtcctctcagcccacttgcacggtgg

SEQ ID NO: 12044 - DNA, 120 bp, Artificial Sequence
  ENSG00000010256_2 (sequence is synthesized)
gagtgtggattgatgttggcagccgttttgagactgagaagaataatggggcaggctactttttggagcatctggctttcaagggaacaaagaatcggcctggcagtgccctggagaagg

SEQ ID NO: 12045 - DNA, 120 bp, Artificial Sequence
  ENSG00000010256_3 (sequence is synthesized)
aggtggagagcatgggggcccatcttaatgcctacagcacccgggagcacacagcttactacatcaaggcgctgtccaaggatctgccgaaagctgtggagctcctgggtgacattgtgc

SEQ ID NO: 12046 - DNA, 120 bp, Artificial Sequence
  ENSG00000010256_4 (sequence is synthesized)
agaactgtagtctggaagactcacagattgagaaggaacgtgatgtgatcctgcgggagatgcaggagaatgatgcatctatgcgagatgtggtctttaactacctgcatgccacagcat

SEQ ID NO: 12047 - DNA, 120 bp, Artificial Sequence
  ENSG00000010256_5 (sequence is synthesized)
tccagggcacacctctagcccaggctgtggaggggcccagtgagaatgtcaggaagctgtctcgtgcagacttgaccgagtacctcagcacacattacaaggcccctcgaatggtgctgg

SEQ ID NO: 12048 - DNA, 120 bp, Artificial Sequence
  ENSG00000010256_6 (sequence is synthesized)
gacctcgcccagaagcacctcggtggcatcccatggacatatgcagaggacgctgtgcccactcttactccatgccgcttcactggcagtgagatccgccaccgtgatgatgctctacct

SEQ ID NO: 12049 - DNA, 120 bp, Artificial Sequence
  ENSG00000010256_7 (sequence is synthesized)
tttgcccacgtggccattgcagtagagggtcctggctgggccagcccggacaatgtggccttgcaagtggccaatgccatcatcggccactatgactgcacttatggtggtggcgtgcac

SEQ ID NO: 12050 - DNA, 120 bp, Artificial Sequence
  ENSG00000010256_8 (sequence is synthesized)
ctgtccagcccactggcttcaggtgctgtggccaacaagctatgccagagtttccagaccttcagcatctgctatgcagagacgggcttgctgggtgcacactttgtctgtgaccgaatg

SEQ ID NO: 12051 - DNA, 120 bp, Artificial Sequence
  ENSG00000010256_9 (sequence is synthesized)
aaaatcgatgacatgatgttcgtcctgcaagggcagtggatgcgcctgtgtaccagtgccacggagagtgaggtggcccggggcaaaaacatcctcagaaatgccctggtatctcatcta

SEQ ID NO: 12052 - DNA, 120 bp, Artificial Sequence
  ENSG00000010256_10 (sequence is synthesized)
gatggcactactcctgtgtgtgaggacatcggacgcagcctcctgacctatggccgccgcatccccctggctgaatgggaaagccggattgcggaggtggatgccagtgtggtacgtgag

SEQ ID NO: 12053 - DNA, 120 bp, Artificial Sequence
  ENSG00000010256_11 (sequence is synthesized)
atctgctccaagtacatctatgaccagtgcccagcagtggctggatatggccccattgagcagctcccagactacaaccggatccgtagcggcatgttctggctgcgcttctaggcggga

SEQ ID NO: 12054 - DNA, 120 bp, Artificial Sequence
  ENSG00000010256_12 (sequence is synthesized)
agcctatgtaagcaagagggcagggccggggtttgtggtcccccccccaccacaaacacagcacttcggctcctctaacctgtgccacaggtgaccaccaataaaatcctctgctgagaa

SEQ ID NO: 12055 - DNA, 120 bp, Artificial Sequence
  ENSG00000010256_13 (sequence is synthesized)
gagggcagggaagcagaggacagctacctaggagcccctggctgaccacagaatcatattacccttagcgtatggctttgcagctgggcaactaggggtgggcagcaggagatgccaggc

SEQ ID NO: 12056 - DNA, 120 bp, Artificial Sequence
  ENSG00000010256_14 (sequence is synthesized)
gactgcagctggaagatggcggcgtccgtggtctgtcgggccgctaccgccggggcacaagtgctattgcgcgcccgccgctcggtgaggtggtggcgagagcgcggggcttcgggacag

SEQ ID NO: 12057 - DNA, 120 bp, Artificial Sequence
  ENSG00000010256_15 (sequence is synthesized)
gtcaggtgagagttggctggccttgtggggggatgcttgctccattctggcctggccagaccctttccaggtcacatttttagttggctagctgtcggggttattttcctgagttatgca

SEQ ID NO: 12058 - DNA, 120 bp, Artificial Sequence
  ENSG00000010256_16 (sequence is synthesized)
actggagacagtttctgtatccatgtggtccagtgagtcttttttaatggctttgtgggcttcacttgaattttgggctttgttttaaggtatgttttggtgcatgtcctgacagtccaa

SEQ ID NO: 12059 - DNA, 120 bp, Artificial Sequence
  ENSG00000010256_17 (sequence is synthesized)
gatgagatttatgctctaatgtaacttctgagcacatttgatgtaatttctgagcacatggagagccgccaccaccagtgtataaactgtcggaaacactgctttggagcagtctagcag

SEQ ID NO: 12060 - DNA, 120 bp, Artificial Sequence
  ENSG00000010256_18 (sequence is synthesized)
aaactccctgaaaggctctcccgggttgcaattcttggtaagtttccacgctggtactttagccctgggctcgaacctgcggacacgctgtggctgcaactccccgcccgccagacctca

SEQ ID NO: 12061 - DNA, 120 bp, Artificial Sequence
  ENSG00000010256_19 (sequence is synthesized)
tcgggctgatggacggcaggtggactgatgtgcgcagggactggcggcagcgcggtcagagccagtcagccaaagccaggccagcacaatagactgtcccggttcccgccaggaggcggc

SEQ ID NO: 12062 - DNA, 120 bp, Artificial Sequence
  ENSG00000010256_20 (sequence is synthesized)
cgagcaccaactgtacggtactgcgcctgcgccgcgaccgccaacgcgcccagtctacgcttgcgcggcgcaacagggccgactgcagctggaagatggcggcgtccgtggtctgtcggg

SEQ ID NO: 12063 - DNA, 120 bp, Artificial Sequence
  ENSG00000010256_21 (sequence is synthesized)
agctctccccagtcccctggctgccagggagttcttgctcagaaaacctgtcccagcagttccttgactgcctgccaaggtgccttcatcaataccctgcacccgtcaggtaacgggcac

SEQ ID NO: 12064 - DNA, 120 bp, Artificial Sequence
  ENSG00000010256_22 (sequence is synthesized)
ctccatgtggggtggggcttcaagggccagaacatgaagggacaggctcagcacccctgggggaatgttctctcctctctttccactcaaagcctgtcttgtgctgctctgggcagcatc

SEQ ID NO: 12065 - DNA, 120 bp, Artificial Sequence
  ENSG00000010256_23 (sequence is synthesized)
tccgagctgggtgcggcacagggccaggtgtccctgtgcaggccaggtaccccaccctgacgctccaccctatccccacaggccccattgagcagctcccagactacaaccggatccgta

SEQ ID NO: 12066 - DNA, 120 bp, Artificial Sequence
  ENSG00000010270_0 (sequence is synthesized)
gtgtgcgtcgacgtcagcgtgctgacgtcacgggccggaggtcccggggctgctgggtgcgggcggtgggctgcgcgttgtccgctggactgggtcccggtcacgccccgccaagccccg

SEQ ID NO: 12067 - DNA, 120 bp, Artificial Sequence
  ENSG00000010270_1 (sequence is synthesized)
cccctcaggccggggcgcgaccgcggatccgcagttcccgggccagcctggggcggccggccaggaaccacccgttaaggtgtcttctctttagggatggtgaggttggaaaaaggctcc

SEQ ID NO: 12068 - DNA, 120 bp, Artificial Sequence
  ENSG00000010270_2 (sequence is synthesized)
tgtaaccctcctccaggatgaaccacctgccagaagacatggagaacgctctcaccgggagccagagctcccatgcttctctgcgcaatatccattccatcaaccccacacaactcatgg

SEQ ID NO: 12069 - DNA, 120 bp, Artificial Sequence
  ENSG00000010270_3 (sequence is synthesized)
ccaggattgagtcctatgaaggaagggaaaagaaaggcatatctgatgtcaggaggactttctgtttgtttgtcacctttgacctcttattcgtaacattactgtggataatagagttaa

SEQ ID NO: 12070 - DNA, 120 bp, Artificial Sequence
  ENSG00000010270_4 (sequence is synthesized)
atgtgaatggaggcattgagaacacattagagaaggaggtgatgcagtatgactactattcttcatattttgatatatttcttctggcagtttttcgatttaaagtgttaatacttgcat

SEQ ID NO: 12071 - DNA, 120 bp, Artificial Sequence
  ENSG00000010270_5 (sequence is synthesized)
atgctgtgtgcagactgcgccattggtgggcaatagcgttgacaacggcagtgaccagtgcctttttactagcaaaagtgatcctttcgaagcttttctctcaaggggcttttggctatg

SEQ ID NO: 12072 - DNA, 120 bp, Artificial Sequence
  ENSG00000010270_6 (sequence is synthesized)
tgctgcccatcatttcattcatccttgcctggattgagacgtggttcctggatttcaaagtgttacctcaagaagcagaagaagaaaacagactcctgatagttcaggatgcttcagaga

SEQ ID NO: 12073 - DNA, 120 bp, Artificial Sequence
  ENSG00000010270_7 (sequence is synthesized)
ctcctgaatccgaagcaggatctgaagaagctgaagaaaaacaggacagtgagaaaccacttttagaactatgagtactacttttgttaaatgtgaaaaaccctcacagaaagtcatcga

SEQ ID NO: 12074 - DNA, 120 bp, Artificial Sequence
  ENSG00000010270_8 (sequence is synthesized)
ggcaaaaagaggcaggcagtggagtctccctgtcgacagtaaagttgaaatggtgacgtccactgctggctttattgaacagctaataaagatttatttattgtaatacctcacagacgt

SEQ ID NO: 12075 - DNA, 120 bp, Artificial Sequence
  ENSG00000010270_9 (sequence is synthesized)
tgtaccatatccatgcacatttagttgcctgcctgtggctggtaaggtaatgtcatgattcatcctctcttcagtgagactgagcctgatgtgttaacaaataggtgaagaaagtcttgt

SEQ ID NO: 12076 - DNA, 120 bp, Artificial Sequence
  ENSG00000010270_10 (sequence is synthesized)
gctgtattcctaatcaaaagacttaatatattgaagtaacacttttttagtaagcaagatacctttttatttcaattcacagaatggaatttttttgtttcatgtctcagatttattttg

SEQ ID NO: 12077 - DNA, 120 bp, Artificial Sequence
  ENSG00000010270_11 (sequence is synthesized)
tatttcttttttaacactctacatttcccttgttttttaactcatgcacatgtgctctttgtacagttttaaaaagtgtaataaaatctgacatgtcaatgtggctagttttatttttct

SEQ ID NO: 12078 - DNA, 120 bp, Artificial Sequence
  ENSG00000010270_12 (sequence is synthesized)
tgttttgcattatgtgtatggcctgaagtgttggacttgcaaaaggggaagaaaggaattgcgaatacatgtaaaatgtcaccagacatttgtattatttttatcatgaaatcatgtttt

SEQ ID NO: 12079 - DNA, 120 bp, Artificial Sequence
  ENSG00000010270_13 (sequence is synthesized)
tctctgattgttctgaaatgttctaaatactcttattttgaatgcacaaaatgacttaaaccattcatatcatgtttcctttgcgttcagccaatttcaattaaaatgaactaaattata

SEQ ID NO: 12080 - DNA, 120 bp, Artificial Sequence
  ENSG00000010270_14 (sequence is synthesized)
ccggggcgcgaccgcggatccgcagttcccgggccagcctggggcggccggccaggaaccacccgttaagatggaatcactgaattcatcacttgacacagtactagtttggataagttt

SEQ ID NO: 12081 - DNA, 90 bp, Artificial Sequence
  ENSG00000010270_15 (sequence is synthesized)
ctgggactacaggtgtgcactaccactcctgtctaatgtttgtattttttgtctggtcttgaactgctggcctcaagtgatctgcccgcc

SEQ ID NO: 12082 - DNA, 120 bp, Artificial Sequence
  ENSG00000010270_16 (sequence is synthesized)
aggcctgggctgggagaagatacagttctaatgcaggtggaatcccaccagctttcctgagtcccgtttcctccatacttaagtaggtttaatactccagggcttctttccaatgttaat

SEQ ID NO: 12083 - DNA, 120 bp, Artificial Sequence
  ENSG00000010270_17 (sequence is synthesized)
gagtaactagatttgtctcttggtgctgagccaaatgaggaatctagaagcccaacagtgattattggccaagcaccaagccaccctctacctcattttgcaaataagagatgagaggag

SEQ ID NO: 12084 - DNA, 120 bp, Artificial Sequence
  ENSG00000010270_18 (sequence is synthesized)
acctctgtcacagagatatttggaaaatgtcttatttggttgaaactgcttagtgattgttttcatgacatggtctgtacttatttaggtaattgccttaccccctcctttcttccccac

SEQ ID NO: 12085 - DNA, 120 bp, Artificial Sequence
  ENSG00000010270_19 (sequence is synthesized)
aaccccctgtcttggagggaaaagctctcagtctctctgttgttgccttggacttctcaaggacaaggacttttttactcctctgtttcctggcatctagcacagagagctttggtattc

SEQ ID NO: 12086 - DNA, 120 bp, Artificial Sequence
  ENSG00000010270_20 (sequence is synthesized)
ttaataagtatttagagattgatagaattactagcagttctgcctgacagatgtctgaatatttgccttttgtaaagctttaataagtcagttctatgggaagaaaatgtggagctcctc

SEQ ID NO: 12087 - DNA, 120 bp, Artificial Sequence
  ENSG00000010270_21 (sequence is synthesized)
agactagagagagctgctcagaaataacctgcagttctgcaattagagggtgagagctcgggtctgggtggcccaggcctgggtttctccagctgggaataggacttgtgctgccctcct

SEQ ID NO: 12088 - DNA, 120 bp, Artificial Sequence
  ENSG00000010270_22 (sequence is synthesized)
gagtccactagggggcgatgtctgtctgggccatgtcttctgagcattctcagaatcacggggcagcggtcagaccatctgttaatccggaagctctcatttcatggatataggctgaca

SEQ ID NO: 12089 - DNA, 120 bp, Artificial Sequence
  ENSG00000010270_23 (sequence is synthesized)
gtcttggccagacttgactccctttcctgaatactcttttgctgatatcatcatagcttttgatgattgtaccctcccatttttctgcattttctacaacagatccctttgggatgttgt

SEQ ID NO: 12090 - DNA, 120 bp, Artificial Sequence
  ENSG00000010270_24 (sequence is synthesized)
attcctgagtccccatatgtatgctagtatttgtcagactatccctctcaatgtttgttttagaaaagtgtttgacatatagatattcagtgagagctgtaagacagtatcttcaatatc

SEQ ID NO: 12091 - DNA, 120 bp, Artificial Sequence
  ENSG00000010270_25 (sequence is synthesized)
tgctttcagattatctgaagaataagtctaatttagcaaatcattttattgcttctgattcttgttttaaaaaacatttgcagagaagagtctagaagctggaaggaggagaagtcagct

SEQ ID NO: 12092 - DNA, 80 bp, Artificial Sequence
  ENSG00000010270_26 (sequence is synthesized)
ctgcaactttgttaatacttattgagcaagatacttggtgttccctgtcctccttctgtcagtcaagctactattggtat

SEQ ID NO: 12093 - DNA, 120 bp, Artificial Sequence
  ENSG00000010270_27 (sequence is synthesized)
ttccctgtcctccttctgtcagtcaagctactattggtattcattttggtcaggtttcaccatgctaaaaatattagttgaaggaacagtgacaaggctcaggtattatggtatctctgg

SEQ ID NO: 12094 - DNA, 120 bp, Artificial Sequence
  ENSG00000010270_28 (sequence is synthesized)
acttcacaacccctggcgagagccctacctatgcactttaccagtctcttcatgtgcttgtagaggctttggaattgtaccttctggtggatcaaacttagttacctagcacaccagcct

SEQ ID NO: 12095 - DNA, 120 bp, Artificial Sequence
  ENSG00000010270_29 (sequence is synthesized)
gctgaaatgtgggagaataaaccacacacagtcatttagggattgtgtcacatgtagaagcccattttgccccagtgtgggtctaggggagagagactgagtgatatgggaaggagccag

SEQ ID NO: 12096 - DNA, 120 bp, Artificial Sequence
  ENSG00000010270_30 (sequence is synthesized)
gctaggcacaggtttttcaggccttgcctgctcctggctcagacgggtctcttgtgaagagggaggtaccttcacagtgtgagatgcctagtgtgaacagtgctggattatgtgtcttgc

SEQ ID NO: 12097 - DNA, 120 bp, Artificial Sequence
  ENSG00000010270_31 (sequence is synthesized)
agttgacaacggcagtgaccagtgcctttttactagcaaaagtgatcctttcgaaggtatggcctaccactttttctatacagttaccatcttcagtgatgaagcctcgtttttcagtgt

SEQ ID NO: 12098 - DNA, 120 bp, Artificial Sequence
  ENSG00000010270_32 (sequence is synthesized)
ttcccgggccagcctggggcggccggccaggaaccacccgttaagaattaactcctagaattctgacaggcggtagtgctttgcaagctttgtgttaagagctgctactggggaatatgt

SEQ ID NO: 12099 - DNA, 120 bp, Artificial Sequence
  ENSG00000010270_33 (sequence is synthesized)
cggccggccaggaaccacccgttaagatggatccatgtaggccccaccgtttttgcctgtaaaaagagtcagaaagatcaggctggcaaagtcaattgcctccaggctaggtgaagattg

SEQ ID NO: 12100 - DNA, 120 bp, Artificial Sequence
  ENSG00000010278_0 (sequence is synthesized)
agccgcctgcatctgtatccagcgccaggtcccgccagtcccagctgcgcgcgccccccagtcccgcacccgttcggcccaggctaagttagccctcaccatgccggtcaaaggaggcac

SEQ ID NO: 12101 - DNA, 120 bp, Artificial Sequence
  ENSG00000010278_1 (sequence is synthesized)
caagtgcatcaaatacctgctgttcggatttaacttcatcttctggcttgccgggattgctgtccttgccattggactatggctccgattcgactctcagaccaagagcatcttcgagca

SEQ ID NO: 12102 - DNA, 120 bp, Artificial Sequence
  ENSG00000010278_2 (sequence is synthesized)
agaaactaataataataattccagcttctacacaggagtctatattctgatcggagccggcgccctcatgatgctggtgggcttcctgggctgctgcggggctgtgcaggagtcccagtg

SEQ ID NO: 12103 - DNA, 120 bp, Artificial Sequence
  ENSG00000010278_3 (sequence is synthesized)
catgctgggactgttcttcggcttcctcttggtgatattcgccattgaaatagctgcggccatctggggatattcccacaaggatgaggtgattaaggaagtccaggagttttacaagga

SEQ ID NO: 12104 - DNA, 120 bp, Artificial Sequence
  ENSG00000010278_4 (sequence is synthesized)
cacctacaacaagctgaaaaccaaggatgagccccagcgggaaacgctgaaagccatccactatgcgttgaactgctgtggtttggctgggggcgtggaacagtttatctcagacatctg

SEQ ID NO: 12105 - DNA, 120 bp, Artificial Sequence
  ENSG00000010278_5 (sequence is synthesized)
ttcaccgtgaagtcctgtcctgatgccatcaaagaggtcttcgacaataaattccacatcatcggcgcagtgggcatcggcattgccgtggtcatgatatttggcatgatcttcagtatg

SEQ ID NO: 12106 - DNA, 120 bp, Artificial Sequence
  ENSG00000010278_6 (sequence is synthesized)
atcttgtgctgtgctatccgcaggaaccgcgagatggtctagagtcagcttacatccctgagcaggaaagtttacccatgaagattggtgggattttttgtttgtttgttttgttttgtt

SEQ ID NO: 12107 - DNA, 120 bp, Artificial Sequence
  ENSG00000010278_7 (sequence is synthesized)
tgttgtttgttgtttgtttttttgccactaattttagtattcattctgcattgctagataaaagctgaagttactttatgtttgtcttttaatgcttcattcaatattgacatttgtagt

SEQ ID NO: 12108 - DNA, 120 bp, Artificial Sequence
  ENSG00000010278_8 (sequence is synthesized)
tgagcggggggtttggtttgctttggtttatattttttcagttgtttgtttttgcttgttatattaagcagaaatcctgcaatgaaaggtactatatttgctagactctagacaagatat

SEQ ID NO: 12109 - DNA, 120 bp, Artificial Sequence
  ENSG00000010278_9 (sequence is synthesized)
tgtacataaaagaatttttttgtctttaaatagatacaaatgtctatcaactttaatcaagttgtaacttatattgaagacaatttgatacataataaaaaattatgacaatgtcctgga

SEQ ID NO: 12110 - DNA, 120 bp, Artificial Sequence
  ENSG00000010278_10 (sequence is synthesized)
ctgcccagccctcagctgtgttattattcggtgataggtatttgctaattacttccaaaagcctcccatctgtcatcccacccagactgcgcgcttctaattcctcctaccccacatgct

SEQ ID NO: 12111 - DNA, 120 bp, Artificial Sequence
  ENSG00000010278_11 (sequence is synthesized)
gtgcccaatgaaaagtatggtcagcgagcgaaggtttgcaaggagacagacgagggcgaaattaagccaggcggcttccctttaaatcctcgcaaagcagaagggcccctcactctggca

SEQ ID NO: 12112 - DNA, 120 bp, Artificial Sequence
  ENSG00000010278_12 (sequence is synthesized)
gcaggccttggccaaggggcctttagccctgacgacccggggaagagtctcccaaagcagaacgcccggtccggcgcccagaccaaacgcgggggaaccggaagggcgaggcctccaccg

SEQ ID NO: 12113 - DNA, 120 bp, Artificial Sequence
  ENSG00000010278_13 (sequence is synthesized)
ggcgcattcgggtgggggctcatcaccgcccagccggcgtggggagccgggccctcttgagatgaggcgtgcgggagggtcctgagcactttagctcgcctaggatttgagctggggtgt

SEQ ID NO: 12114 - DNA, 120 bp, Artificial Sequence
  ENSG00000010278_14 (sequence is synthesized)
gtgtctgctcccagctcaagtccctccgagtgccagagaggaaggcagggagaagcggagcacccctctttgggccaaggccaaggaggactgtgcttgccgggattgctgtccttgcca

SEQ ID NO: 12115 - DNA, 120 bp, Artificial Sequence
  ENSG00000010278_15 (sequence is synthesized)
ttctaaagagtcgactctcttagccgttaaggttcagggcacatgggtggcagtgctggcactgctagtcctcggagcatgtctcctcacgcacctgctgttcttctccctaagaaagtc

SEQ ID NO: 12116 - DNA, 120 bp, Artificial Sequence
  ENSG00000010278_16 (sequence is synthesized)
gttcactagaggctaccggcgtgggaattgttccatttcctgaagtgcatctgaacatgggcagccagaaggaggtctctcgctaatcagcccctagaaaccaacaagggccaaccaggt

SEQ ID NO: 12117 - DNA, 120 bp, Artificial Sequence
  ENSG00000010278_17 (sequence is synthesized)
ctttatcatttataggcacatgtaagcgtctagctctgtgtgcatccctaaacagcatagcgtttttaactacatggaatcatattgtgtgtgtgcctgtggctctggcttcttggttta

SEQ ID NO: 12118 - DNA, 120 bp, Artificial Sequence
  ENSG00000010278_18 (sequence is synthesized)
gcattgtgagatgcactcatggtgttgcgtgtagctagagttactcgttttcactgctgtatagtgttctgttgcctataaaataccccttcagccaatgggcggcagcttgccgggatt

SEQ ID NO: 12119 - DNA, 120 bp, Artificial Sequence
  ENSG00000010278_19 (sequence is synthesized)
gggacttgggcttgggaaagacttttgctctagccacgctggccagtcgtgtccctttcaagttgtgcagtttttgtgtgtgtcgttgtgcctgggaatttgcgtttaactgatgtggtt

SEQ ID NO: 12120 - DNA, 120 bp, Artificial Sequence
  ENSG00000010278_20 (sequence is synthesized)
catgctgggactggtgagtatcccctcggcatccccacagccaccctgactcccaccaacaaaaacctcagcaggcccagacccagaccacagaacagatggagggggatggggtcagga

SEQ ID NO: 12121 - DNA, 120 bp, Artificial Sequence
  ENSG00000010278_21 (sequence is synthesized)
aggtacccaaagggcatgagctgtcctcagcctgggcccctccccgatgtgaggcgtcgcccctcttcctttctggagcctgtcttatcgcttcccctaggcaactaaaaggactatgtt

SEQ ID NO: 12122 - DNA, 120 bp, Artificial Sequence
  ENSG00000010278_22 (sequence is synthesized)
ttcttgtttcaaaatctgttttggtcttttccgaactccacggagtggattcgctccctttacttgcccaaatctcttgtcttttgtgaacaatagtagttgcctgctcactgactctta

SEQ ID NO: 12123 - DNA, 120 bp, Artificial Sequence
  ENSG00000010278_23 (sequence is synthesized)
actaacgccttgtaaatgctagttctgggctcagctgtgctcagctctttcctcatgtccgggcaccttgcctcactgtggcctctgtcctgggcttggttaactgcctgttctgtgaac

SEQ ID NO: 12124 - DNA, 120 bp, Artificial Sequence
  ENSG00000010278_24 (sequence is synthesized)
atctgctctgacagcgtcctctgtaaggcagggtcccagaagttagccagagtgtggaaggtatatgctaactagcttgagtggattcatcttgctggaaagagctgacagactggacca

SEQ ID NO: 12125 - DNA, 120 bp, Artificial Sequence
  ENSG00000010278_25 (sequence is synthesized)
gtttgcattccgaatgtagggattcccgtggatattctctgtcctggattgagggctaatgggcaccttccagaagggctgagggtaaggagtctatattctgatcggagccggcgccct

SEQ ID NO: 12126 - DNA, 120 bp, Artificial Sequence
  ENSG00000010278_26 (sequence is synthesized)
atacctgctgttcggatttaacttcatcttctgggttggggtcagcgggactttatttggatccaccacaggtcttttcaaccaaagccttgcagaaacaggctttaccccatacacaca

SEQ ID NO: 12127 - DNA, 120 bp, Artificial Sequence
  ENSG00000010278_27 (sequence is synthesized)
agcatgaaagtgacagcagccaagtgctgcttcagcaagacccgttctgcctgtgaaagggccccagggcacccatctctttctctcccactttgggccctctgtttactcaagggcaat

SEQ ID NO: 12128 - DNA, 120 bp, Artificial Sequence
  ENSG00000010278_28 (sequence is synthesized)
agctctcaagggcaggcgtgcttctgagtcttggactcccactctgactttgtcagtggctcctgtctgtaagccagagttaatgtccaactccagaatagtaaaaggtgaccttacaac

SEQ ID NO: 12129 - DNA, 120 bp, Artificial Sequence
  ENSG00000010278_29 (sequence is synthesized)
catgtcagaaatagacccccaagcagggcctgtccctcctccttccctgacgtcctgcccagattttagggatccactagcatagccatccctttgttcccctttccatccaccagccag

SEQ ID NO: 12130 - DNA, 120 bp, Artificial Sequence
  ENSG00000010278_30 (sequence is synthesized)
aacttctcttatccccgaacactcctgtccccagcccaccctctgcccaccagttctcccgggtgagacgggggccatgggagggaggaggtgccctgggaggaaggattgtgtgtgacc

SEQ ID NO: 12131 - DNA, 120 bp, Artificial Sequence
  ENSG00000010282_0 (sequence is synthesized)
agggcctgaatacacagagcgctgagagagtggggcagtgtggtcacggacacaggtcatgggggccttggcaggagcggttttggcagagggtggggccggtgcctctggaaggtatga

SEQ ID NO: 12132 - DNA, 120 bp, Artificial Sequence
  ENSG00000010282_1 (sequence is synthesized)
agatgtaaatgaagccctgtccaggctatgggcatcaagacagcattgccggcggctgagctgggcctctactctctggtgctgagtggggccctggcctatgctggccggggcctcctt

SEQ ID NO: 12133 - DNA, 120 bp, Artificial Sequence
  ENSG00000010282_2 (sequence is synthesized)
gaggcttcacaagatggggcccacaggaaggccttccgggagtctgtgcgacctggctgggagtacattggccggaagatggatgtggctgacttcgagtgggtgatgtggttcacctcc

SEQ ID NO: 12134 - DNA, 120 bp, Artificial Sequence
  ENSG00000010282_3 (sequence is synthesized)
tttcgcaacgtcatcatctttgccctctccggacatgtgctgtttgctaaactctgcacgatggttgccccaaagctccgctcctggatgtatgctgtgtacggggccttggctgtgatg

SEQ ID NO: 12135 - DNA, 120 bp, Artificial Sequence
  ENSG00000010282_4 (sequence is synthesized)
ggcacaatgggcccttggtacctgctgctgctgcttggtcactgtgtgggcctctatgtggcctcgcttttgggccagccctggctctgtcttggccttggcttggccagcctggcctcc

SEQ ID NO: 12136 - DNA, 120 bp, Artificial Sequence
  ENSG00000010282_5 (sequence is synthesized)
ttcaagatggaccccctaatctcttggcagagcgggtttgtaacaggcacttttgatcttcaagaggtgctgtttcatgggggcagcagcttcacagtgctgcgttgcaccagctttgca

SEQ ID NO: 12137 - DNA, 120 bp, Artificial Sequence
  ENSG00000010282_6 (sequence is synthesized)
ctggagagctgtgcccaccctgaccgccactactccttagctgacctgctcaagtacaacttctacctgcccttcttcttcttcgggcccatcatgacctttgatcgcttccatgctcag

SEQ ID NO: 12138 - DNA, 120 bp, Artificial Sequence
  ENSG00000010282_7 (sequence is synthesized)
tggtggccatcatggccgtcgacatcttctttcacttcttctacatcctcactatccccagcgacctcaagttcgccaaccgcctcccagacagtgccctcgctggcctagcctattcaa

SEQ ID NO: 12139 - DNA, 120 bp, Artificial Sequence
  ENSG00000010282_8 (sequence is synthesized)
acctggtgtatgactgggtgaaggcggccgtcctctttggtgttgtcaacactgtggcatgcctcgaccacctggacccaccccagcctcccaagtgcatcaccgcactctacgtctttg

SEQ ID NO: 12140 - DNA, 120 bp, Artificial Sequence
  ENSG00000010282_9 (sequence is synthesized)
cggaaacgcactttgaccgtggcatcaacgactggctttgcaaatatgtgtataaccacattggtggggagcattccgctgtgatcccagagctggcagccacagtggccacatttgcca

SEQ ID NO: 12141 - DNA, 120 bp, Artificial Sequence
  ENSG00000010282_10 (sequence is synthesized)
tcaccacactgtggcttgggccttgtgacattgtctacctgtggtcattccttaactgctttggcctcaactttgagctctggatgcaaaaactggcagagtgggggcccctagcacgaa

SEQ ID NO: 12142 - DNA, 120 bp, Artificial Sequence
  ENSG00000010282_11 (sequence is synthesized)
ttgaggcctctctgtcagtgcagatgtcccgtagggtccgggccctgtttggagccatgaacttctgggccatcatcatgtacaaccttgtgagcctgaacagcctcaaattcacagagc

SEQ ID NO: 12143 - DNA, 120 bp, Artificial Sequence
  ENSG00000010282_12 (sequence is synthesized)
tggttgcccggcgcctgctactcacagggttcccccagaccacgctgtccatcctgtttgtcacctactgtggcgtccagctggtaaaggagcgtgagcgaaccttggcactggaggagg

SEQ ID NO: 12144 - DNA, 120 bp, Artificial Sequence
  ENSG00000010282_13 (sequence is synthesized)
agcagaagcaggacaaagagaagccggagtaggagggagcgggtagagggatgggctctgctcagctattcttgggccagatggggcctgaccgatagaataaaagacttttctacaaca

SEQ ID NO: 12145 - DNA, 120 bp, Artificial Sequence
  ENSG00000010282_14 (sequence is synthesized)
actctgctcagctccgctccaggaaggccacctcctcctccccctcctcctcccgctgtcaccactcaccgctcataacctcaagggggtggggaccccagggctggacacaccccaccg

SEQ ID NO: 12146 - DNA, 120 bp, Artificial Sequence
  ENSG00000010282_15 (sequence is synthesized)
agttggaagccggaccccagagcctgaggtgggcagtgtgccagggtcccttgcggcctcctcaaggtcatgggggccttggcaggagcggttttggcagagggtggggccggtgcctct

SEQ ID NO: 12147 - DNA, 120 bp, Artificial Sequence
  ENSG00000010282_16 (sequence is synthesized)
agggcctgaatacacagagcgctgagagagtggggcagtgtggtcacggacacaggcagggactgggatgtgacaggctggagctcagggacttgttgggggaatgggggtcagtgacag

SEQ ID NO: 12148 - DNA, 120 bp, Artificial Sequence
  ENSG00000010282_17 (sequence is synthesized)
gctggaggcttaatgcgaggatggaggcttggctctaggggcagcacctggggtggtcatgggatctcagggaggggagtgggagtcagagaaagggtcttagagaagctggggctttgt

SEQ ID NO: 12149 - DNA, 120 bp, Artificial Sequence
  ENSG00000010282_18 (sequence is synthesized)
gaggaggagctgctacgtgaggtcaggaatgttgaatgcacccagggtgacagtgttgaggaggacgccctgttgtgtgtcctctcccatctcatccctgccctttcccacactcccagt

SEQ ID NO: 12150 - DNA, 120 bp, Artificial Sequence
  ENSG00000010282_19 (sequence is synthesized)
gaggacggagctgggtttgagcagggataggggaatctgtcaatcaagtgacatggctagtagcaattgcatatacaaatcaggagagactgggctaaagacacagatttaggggtcatc

SEQ ID NO: 12151 - DNA, 120 bp, Artificial Sequence
  ENSG00000010282_20 (sequence is synthesized)
ctcccttctatgaggaatggagcacctgggccttgccatgttggtcaggccttgtcctctctctggacctgtttccccatgtttaacaaggagggagagctgacctggggctctccgaga

SEQ ID NO: 12152 - DNA, 120 bp, Artificial Sequence
  ENSG00000010292_0 (sequence is synthesized)
ccttttcatttcagcctgactgccggaatcagagccgcgggtgagatccccagccctgtgagcctgtaggagtagaatggctccccaaatgtatgagttccatctgccattatccccaga

SEQ ID NO: 12153 - DNA, 120 bp, Artificial Sequence
  ENSG00000010292_1 (sequence is synthesized)
ggagttgttgaaaagtggaggggtgaatcagtatgttgtgcaagaggtactgtccatcaaacatcttccaccacagcttagagcttttcaggctgcctttcgagctcaggggcccctggc

SEQ ID NO: 12154 - DNA, 120 bp, Artificial Sequence
  ENSG00000010292_2 (sequence is synthesized)
tatgctgcagcactttgatactatctacagcattttgcatcactttcgaagtatagatcctggcctcaaagaagatactctgcaattcctgataaaagtggtatcccgccactcccagga

SEQ ID NO: 12155 - DNA, 120 bp, Artificial Sequence
  ENSG00000010292_3 (sequence is synthesized)
gcttccagctatcctggatgatacaactttgagtggatcagatagaaacgcccatctaaatgccctcaaaatgaactgttatgctctgatacgtctcctggaatcctttgagaccatggc

SEQ ID NO: 12156 - DNA, 120 bp, Artificial Sequence
  ENSG00000010292_4 (sequence is synthesized)
cagccagacaaaccttgtggacctggaccttggtgggaagggtaagaaagctcggaccaaggcagcccatggctttgactgggaagaagagaggcaaccaattcttcagcttttaacaca

SEQ ID NO: 12157 - DNA, 120 bp, Artificial Sequence
  ENSG00000010292_5 (sequence is synthesized)
gctacttcagttggacatccgtcacctgtggaaccactcaataattgaagaagaatttgtcagtttggttactggctgttgctaccgccttctggagaatcccaccattaatcaccagaa

SEQ ID NO: 12158 - DNA, 120 bp, Artificial Sequence
  ENSG00000010292_6 (sequence is synthesized)
gaaccgccccactcgggaagccataacacacctgcttggtgtagccttgacccgttataaccatatgctcagtgctacagtgaagatcatccagatgctgcagcactttgaacacctggc

SEQ ID NO: 12159 - DNA, 120 bp, Artificial Sequence
  ENSG00000010292_7 (sequence is synthesized)
acctgtactggttgcagccgtgagtctatgggcaactgactatggaatgaagagcatagtgggagagattgtaagagagattggacaaaagtgtccccaagagctgagtcgagacccttc

SEQ ID NO: 12160 - DNA, 120 bp, Artificial Sequence
  ENSG00000010292_8 (sequence is synthesized)
agggacaaagggctttgcagcattcctgacagaactagcagaacgtgtcccagctatcctgatgtccagcatgtgcattttgctagatcacctggatggagaaaattacatgatgcgtaa

SEQ ID NO: 12161 - DNA, 120 bp, Artificial Sequence
  ENSG00000010292_9 (sequence is synthesized)
tgctgtgctggcagccatggcggagatggtgctgcaggttctcagtggcgatcaactggaagcagcagcccgagacaccagagaccagttcttggatactttacaagcccatggccatga

SEQ ID NO: 12162 - DNA, 120 bp, Artificial Sequence
  ENSG00000010292_10 (sequence is synthesized)
tgtcaactcctttgtgcggagccgtgttttgcagctcttcacccgaattgtccagcagaaggctctccccctgacacgtttccaggcagtggtggctttagctgtgggacgtctggcaga

SEQ ID NO: 12163 - DNA, 120 bp, Artificial Sequence
  ENSG00000010292_11 (sequence is synthesized)
caagtcagtgctagtatgtaaaaatgccatccagctgctggccagttttctagccaataatcctttctcctgcaagcttagtgatgctgaccttgccggaccactgcagaaggagaccca

SEQ ID NO: 12164 - DNA, 120 bp, Artificial Sequence
  ENSG00000010292_12 (sequence is synthesized)
gaaattacaagagatgagggcccagaggcgaactgcagcagcttctgcagtgctggacccagaggaggagtgggaagccatgctgccagagttgaagtctaccctgcagcagcttctaca

SEQ ID NO: 12165 - DNA, 120 bp, Artificial Sequence
  ENSG00000010292_13 (sequence is synthesized)
gcttccccagggagaggaggagattcctgagcaaattgccaatacagagacaactgaagatgtgaaaggacgcatctatcaactgcttgccaaagctagttacaaaaaggccatcattct

SEQ ID NO: 12166 - DNA, 120 bp, Artificial Sequence
  ENSG00000010292_14 (sequence is synthesized)
cactcgagaagccacaggccacttccaggagtccgaacccttcagtcatatagacccagaggagtcagaggagaccaggctcttgaatatcttaggacttatcttcaaaggcccagcagc

SEQ ID NO: 12167 - DNA, 120 bp, Artificial Sequence
  ENSG00000010292_15 (sequence is synthesized)
ttccacacaagaaaagaatccccgggagtctacaggaaacatggtcacaggacagactgtctgtaaaaataaacccaatatgtcggatcctgaggaatccaggggaaatgatgaactagt

SEQ ID NO: 12168 - DNA, 120 bp, Artificial Sequence
  ENSG00000010292_16 (sequence is synthesized)
gaagcaggagatgctggtacagtatctgcaggatgcctacagcttctcccggaagattacagaggccattggcatcatcagcaagatgatgtatgaaaacacaactacagtggtgcagga

SEQ ID NO: 12169 - DNA, 120 bp, Artificial Sequence
  ENSG00000010292_17 (sequence is synthesized)
ggtgattgaattctttgtgatggtcttccaatttggggtaccccaggccctgtttggggtgcgccgtatgctgcctctcatctggtctaaggagcctggtgtccgggaagccgtgcttaa

SEQ ID NO: 12170 - DNA, 120 bp, Artificial Sequence
  ENSG00000010292_18 (sequence is synthesized)
tgcctaccgccaactctacctcaaccccaaaggggactctgccagagccaaggcccaggctttgattcagaatctctctctgctgctagtggatgcctcggttgggaccattcagtgtct

SEQ ID NO: 12171 - DNA, 120 bp, Artificial Sequence
  ENSG00000010292_19 (sequence is synthesized)
tgaggaaattctctgtgagtttgtgcagaaggatgagttgaaaccagcagtgacccagctgctgtgggagcgggccaccgagaaggtcgcctgctgtcctctggagcgctgttcctctgt

SEQ ID NO: 12172 - DNA, 120 bp, Artificial Sequence
  ENSG00000010292_20 (sequence is synthesized)
ggaaagccagaaattgtgggaagcaatttagacacactggtgagcatagggctggatgagaagtttccacaggactacaggctggcccagcaggtgtgccatgccattgccaacatctcg

SEQ ID NO: 12173 - DNA, 120 bp, Artificial Sequence
  ENSG00000010292_21 (sequence is synthesized)
gacaggagaaagccttctctgggcaaacgtcacccccccttccggctgcctcaggaacacaggttgtttgagcgactgcgggagacagtcacaaaaggctttgtccacccagacccactc

SEQ ID NO: 12174 - DNA, 120 bp, Artificial Sequence
  ENSG00000010292_22 (sequence is synthesized)
tggatcccattcaaagaggtggcagtgaccctcatttaccaactggcagagggccccgaagtgatctgtgcccagatattgcagggctgtgcaaaacaggccctggagaagctagaagag

SEQ ID NO: 12175 - DNA, 120 bp, Artificial Sequence
  ENSG00000010292_23 (sequence is synthesized)
aagagaaccagtcaggaggacccgaaggagtcccccgcaatgctccccactttcctgttgatgaacctgctgtccctggctggggatgtggctctgcagcagctggtccacttggagcag

SEQ ID NO: 12176 - DNA, 120 bp, Artificial Sequence
  ENSG00000010292_24 (sequence is synthesized)
gcagtgagtggagagctctgccggcgccgagttctccgggaagaacaggagcacaagaccaaagatcccaaggagaagaatacgagctctgagaccaccatggaggaggagctggggctg

SEQ ID NO: 12177 - DNA, 120 bp, Artificial Sequence
  ENSG00000010292_25 (sequence is synthesized)
gttggggcaacagcagatgacacagaggcagaactaatccgtggcatctgcgagatggaactgttggatggcaaacagacactggctgcctttgttccactcttgcttaaagtctgtaac

SEQ ID NO: 12178 - DNA, 120 bp, Artificial Sequence
  ENSG00000010292_26 (sequence is synthesized)
aacccaggcctctatagcaacccagacctctctgcagctgcttcacttgcccttggcaagttctgcatgatcagtgccactttctgcgactcccagcttcgtcttctgttcaccatgctg

SEQ ID NO: 12179 - DNA, 120 bp, Artificial Sequence
  ENSG00000010292_27 (sequence is synthesized)
gaaaagtctccacttcccattgtccggtctaacctcatggttgccactggggatctggccatccgctttcccaatctggtggacccctggactcctcatctgtatgctcgtctccgggac

SEQ ID NO: 12180 - DNA, 120 bp, Artificial Sequence
  ENSG00000010292_28 (sequence is synthesized)
cctgctcagcaagtgcggaaaacagcggggctggtgatgacccacctgatcctcaaggacatggtgaaggtgaaggggcaggtcagcgagatggcggtgctgctcatcgaccccgagcct

SEQ ID NO: 12181 - DNA, 120 bp, Artificial Sequence
  ENSG00000010292_29 (sequence is synthesized)
cagattgctgccctggccaagaacttcttcaatgagctctcccacaagggcaacgcaatctataatctccttccagatatcatcagccgcctgtcagaccccgagctgggggtggaggaa

SEQ ID NO: 12182 - DNA, 120 bp, Artificial Sequence
  ENSG00000010292_30 (sequence is synthesized)
gagcctttccacaccatcatgaaacagctcctctcctacatcaccaaggacaagcagacagagagcctggtggaaaagctgtgtcagcggttccgcacatcccgaactgagcggcagcag

SEQ ID NO: 12183 - DNA, 120 bp, Artificial Sequence
  ENSG00000010292_31 (sequence is synthesized)
cgagacctggcctactgtgtgtcacagctgcccctcacagagcgaggcctccgtaagatgcttgacaattttgactgttttggagacaaactgtcagatgagtccatcttcagtgctttt

SEQ ID NO: 12184 - DNA, 120 bp, Artificial Sequence
  ENSG00000010292_32 (sequence is synthesized)
ttgtcagttgtaggcaagctgcgacgtggggccaagcctgagggcaaggctataatagatgaatttgagcagaagcttcgggcctgtcataccagaggtttggatggaatcaaggagctt

SEQ ID NO: 12185 - DNA, 120 bp, Artificial Sequence
  ENSG00000010292_33 (sequence is synthesized)
gagattggccaagcaggtagccagagagcgccatcagccaagaaaccatccactggttctaggtaccagcctctggcttctacagcctcagacaatgactttgtcacaccagagccccgc

SEQ ID NO: 12186 - DNA, 120 bp, Artificial Sequence
  ENSG00000010292_34 (sequence is synthesized)
cgtactacccgtcggcatccaaacacccagcagcgagcttccaaaaagaaacccaaagttgtcttctcaagtgatgagtccagtgaggaagatctttcagcagagatgacagaagacgag

SEQ ID NO: 12187 - DNA, 120 bp, Artificial Sequence
  ENSG00000010292_35 (sequence is synthesized)
acacccaagaaaacaactcccattctcagagcatcggctcgcaggcacagatcctaggaagtctgttcctgtcctccctgtgcagggtatcctgtagggtgacctggaattcgaattctg

SEQ ID NO: 12188 - DNA, 85 bp, Artificial Sequence
  ENSG00000010292_36 (sequence is synthesized)
tgcagggtatcctgtagggtgacctggaattcgaattctgtttcccttgtaaaatatttgtctgtctcttttttttaaaaaaaaa

SEQ ID NO: 12189 - DNA, 120 bp, Artificial Sequence
  ENSG00000010292_37 (sequence is synthesized)
aatcgcctgaacccagaggcggaggttgtagtgagccgaaatcacaccattgcactccagcttgggcaacaatagcgaacctccatctcaaattaaaaaaaaaatgcctacacgctcttt

SEQ ID NO: 12190 - DNA, 120 bp, Artificial Sequence
  ENSG00000010292_38 (sequence is synthesized)
aaaatgcaaggctttctcttaaattagcctaactgaactgcgttgagctgcttcaactttggaatatatgtttgccaatctccttgttttctaatgaataaatgtttttatatactttta

SEQ ID NO: 12191 - DNA, 120 bp, Artificial Sequence
  ENSG00000010292_39 (sequence is synthesized)
gcaaaagaatgggatattcttcgtgatctgtttatgtttagagttaacctttgagaaacttacataatgtgtcttttaaattaactgcacacagatatgctgccaccaggtgatggtaga

SEQ ID NO: 12192 - DNA, 120 bp, Artificial Sequence
  ENSG00000010292_40 (sequence is synthesized)
tgttttcatgtagtaatggtctgaccataggcctagtccacaattaagcatgtgtttctactttataaatgtttaaaaaaactactgaaacaattaaatgttaacagtattataatcaaa

SEQ ID NO: 12193 - DNA, 120 bp, Artificial Sequence
  ENSG00000010292_41 (sequence is synthesized)
ctgaggtccgcgactcgtcgctaagattccccaaaactgagatttcaagaaaattcaccctttccgctttctttggcgtccttcaaccgtgaaggaaatgaaggttgagaacctggaacc

SEQ ID NO: 12194 - DNA, 120 bp, Artificial Sequence
  ENSG00000010292_42 (sequence is synthesized)
cgcttccaatgaccaagccctttctctgtgcctcacaacagtcttccgctgtagctgtttttattacccctattttactactggggaggagatttgaggtcctgaaagtgaagtgacttg

SEQ ID NO: 12195 - DNA, 120 bp, Artificial Sequence
  ENSG00000010292_43 (sequence is synthesized)
ctggacgtcacttagcagaggagatggcgaaacctggattagaggcgatgccttctaactcccagcgtggacttgcctcctttcctgggggtgactgaatgcccagccagggacgcgacg

SEQ ID NO: 12196 - DNA, 120 bp, Artificial Sequence
  ENSG00000010292_44 (sequence is synthesized)
gaaatacggcctcctccccgccgactgggcaaagggggaccttgcggccaaggagggattcgcaggcgggccgggggtgggagcgggggccggagccggagccttggcccgcccccgggc

SEQ ID NO: 12197 - DNA, 120 bp, Artificial Sequence
  ENSG00000010292_45 (sequence is synthesized)
gtcgcgattggccgtcctgcagccgttgagatttgaactcggtatttgtggctttgcccgcgcgttgccagactcagaggcggccctttgcctctgcctgccggggattggccggattct

SEQ ID NO: 12198 - DNA, 120 bp, Artificial Sequence
  ENSG00000010292_46 (sequence is synthesized)
ccgccgacttgaaaactgccttgctaattgccctgtgagcctgtaggagtagaatggctccccaaatgtatgagttccatctgccattatccccagaggagttgttgaaaagtggagggg

SEQ ID NO: 12199 - DNA, 120 bp, Artificial Sequence
  ENSG00000010292_47 (sequence is synthesized)
agacatacagtagcactcactccctagcagctgctcctgttaatttccattcacagtgaaaattcctgagccgggggcggggtggggtccctctctgctgaatgggacagggcaagggga

SEQ ID NO: 12200 - DNA, 120 bp, Artificial Sequence
  ENSG00000010292_48 (sequence is synthesized)
gtggtgaggcagacaggggccgtggcagagaacatcagagaagacgagtgctgggggagggtccagggttggtcttagtggatggcagagctggccctgggccatcgaacatcctcatct

SEQ ID NO: 12201 - DNA, 120 bp, Artificial Sequence
  ENSG00000010292_49 (sequence is synthesized)
ttggtgtagccttgacccgttataaccatatgctcagtaagttaccagtcgctttgccccgccttttttgtattgcccataatttctcatgtttaatgcttccacaggtgctacagtgaa

SEQ ID NO: 12202 - DNA, 120 bp, Artificial Sequence
  ENSG00000010292_50 (sequence is synthesized)
gaactagtgaagcaggagatgctggtacagtatctgcaggatgcctacagcttctcccggaagattacagaggccattggcatcatcagcaagatgatgtatgaaaacacaactacaggc

SEQ ID NO: 12203 - DNA, 120 bp, Artificial Sequence
  ENSG00000010292_51 (sequence is synthesized)
tctagacagctttctgactgcttctggagtggcagagcatgggataattgattcctgctgagggccttttctaccagtgttagggtgtagcccggaggtctcggtccccatgacccgcaa

SEQ ID NO: 12204 - DNA, 120 bp, Artificial Sequence
  ENSG00000010292_52 (sequence is synthesized)
gggccctggggcacattttccacatagcacgggcttaggaatcagacacacctgtatttgaattccacctcggctactctttagctgtacagccttcggcaataacttagcctctctttg

SEQ ID NO: 12205 - DNA, 120 bp, Artificial Sequence
  ENSG00000010292_53 (sequence is synthesized)
gagcgccggacaagctgaggtccgcgactcgtcgctaagattccccaaaactgagatttcaagaaaattcaccctttccgctttctttggcgtccttcaaccgtgaaggaaatgaagcct

SEQ ID NO: 12206 - DNA, 120 bp, Artificial Sequence
  ENSG00000010295_0 (sequence is synthesized)
tgctcctgcaccggtctgcatctcccagcagaaggcgcagccatgaatccgttattcggccccaacctcttcctcctgcagcaggagcagcagggcctggccgggccactgggggactca

SEQ ID NO: 12207 - DNA, 120 bp, Artificial Sequence
  ENSG00000010295_1 (sequence is synthesized)
gagacttgcccccggcgcctctctcgccggccggccctgctgcctactcgccgcccgggccgggcccggccccgcctgccgccatggccctccgcaatgacctgggctccaacatcaacg

SEQ ID NO: 12208 - DNA, 120 bp, Artificial Sequence
  ENSG00000010295_2 (sequence is synthesized)
cgcaatgacctgggctccaacatcaacgtgctcaagaccctgaacctccggttccgctgcttcctggccaaggtgcatgagctggagcgccggaaccggctgttggagaagcaactgcag

SEQ ID NO: 12209 - DNA, 120 bp, Artificial Sequence
  ENSG00000010295_3 (sequence is synthesized)
caagcgctggaggagggtaagcagggccggcggggcctgggtcgtcgcgaccaggcagtgcagaccggcttcgtcagccccatccggcccctggggctgcagctgggcgcccggccggcc

SEQ ID NO: 12210 - DNA, 120 bp, Artificial Sequence
  ENSG00000010295_4 (sequence is synthesized)
gctgtctgcagcccttcggcgcgcgtgctgggctcgcccgcgcgctccccggccggccccctcgcgccctccgcggccagcctctcgtcgtcctccacctccacctccaccacctattcc

SEQ ID NO: 12211 - DNA, 120 bp, Artificial Sequence
  ENSG00000010295_5 (sequence is synthesized)
tcgtcggcccgcttcatgcccggcaccatctggtcgttctcgcacgcccgccggctcgggccgggactggagcccactctggtgcaagggcctggcttgtcgtgggtgcacccggatggg

SEQ ID NO: 12212 - DNA, 120 bp, Artificial Sequence
  ENSG00000010295_6 (sequence is synthesized)
gtgggcgtccagatcgacaccatcacgcccgagatccgcgctctctacaacgtgctggccaaagtgaagcgggagcgggacgagtacaagcggaggtgggaagaggagtacacggtgcgg

SEQ ID NO: 12213 - DNA, 120 bp, Artificial Sequence
  ENSG00000010295_7 (sequence is synthesized)
atccagctgcaagaccgtgtaaatgagctccaggaggaagcccaggaggctgatgcctgccaggaggagctggcactgaaggtggaacagttgaaggctgagctggtggtcttcaagggg

SEQ ID NO: 12214 - DNA, 120 bp, Artificial Sequence
  ENSG00000010295_8 (sequence is synthesized)
ctcatgagtaacaacctgtcggagctggacaccaagatccaggagaaagccatgaaggtggatatggacatctgccgccgcatcgacatcaccgccaagctctgcgatgtggctcagcag

SEQ ID NO: 12215 - DNA, 120 bp, Artificial Sequence
  ENSG00000010295_9 (sequence is synthesized)
cgcaactgcgaggacatgatccagatgttccagaagaagctggtcccatccatgggggggcggaagcgggagcgcaaggctgccgtcgaggaggacacctccctgtcggagagtgagggg

SEQ ID NO: 12216 - DNA, 120 bp, Artificial Sequence
  ENSG00000010295_10 (sequence is synthesized)
ccccgccagcccgatggggatgaggaggagagcacagccctcagcatcaacgaggagatgcagcgcatgctcaaccagctgagggagtatgattttgaggacgactgtgacagcctgact

SEQ ID NO: 12217 - DNA, 120 bp, Artificial Sequence
  ENSG00000010295_11 (sequence is synthesized)
gctatgccatggcagctgcagaggcccagggagagcaggaagatagcctggagaaggtgattaaagatacggagtccctgttcaaaacccgggagaaggagtatcaggagaccattgacc

SEQ ID NO: 12218 - DNA, 120 bp, Artificial Sequence
  ENSG00000010295_12 (sequence is synthesized)
agatagagctggagttggccacggccaagaacgacatgaaccggcacctgcacgagtacatggagatgtgcagcatgaagcgcggcctggacgtgcagatggagacctgccgccggctca

SEQ ID NO: 12219 - DNA, 120 bp, Artificial Sequence
  ENSG00000010295_13 (sequence is synthesized)
tcacccagtctggagaccgaaagtctcctgctttcactgcggtcccgcttagcgacccgccgccgccgccaagcgaggctgaggactccgatcgcgatgtctcatctgacagctccatga

SEQ ID NO: 12220 - DNA, 120 bp, Artificial Sequence
  ENSG00000010295_14 (sequence is synthesized)
gatagagacctgcctcccccttgcacccgaggccctcgcagcagggagctcagcgaggcagagggtggggctgcacagaggggaacatcagctgcagctctgcaccaggccggtccctgg

SEQ ID NO: 12221 - DNA, 120 bp, Artificial Sequence
  ENSG00000010295_15 (sequence is synthesized)
ggactggggcgctcctccctcaggctttctccctcagtcttggcttctccagggctctggggtgtctggagctaggcttggccctaccattctggggccatttccaccacagttggggct

SEQ ID NO: 12222 - DNA, 120 bp, Artificial Sequence
  ENSG00000010295_16 (sequence is synthesized)
ctcctgccttcacgcgtgggtgtctgctacttccccatctttaaaatgctgccagagcgattgcggcccctcaccttgtccacgtatcaggaatgtgaatgtgggacctttcctccatcc

SEQ ID NO: 12223 - DNA, 120 bp, Artificial Sequence
  ENSG00000010295_17 (sequence is synthesized)
ctgttgtccggagccagctcactgtcttccacactggtgctaactggcccaggcactggagtggaatagaatgcagctggaggctacgcatggcctctgcagcacacgcagctggagagg

SEQ ID NO: 12224 - DNA, 120 bp, Artificial Sequence
  ENSG00000010295_18 (sequence is synthesized)
gcttctgtccctgtcagcggcagagggcgttggggctggccggggcaccttgtccctgctatggtccacgtgctcacgctgtccacctgccaggtggagtgtatgtggctgtggccctcc

SEQ ID NO: 12225 - DNA, 120 bp, Artificial Sequence
  ENSG00000010295_19 (sequence is synthesized)
ctcgtggaggtgccgtgctttaaagaggccttagtgcccgggatgggcacagtgttttgaagggaggtgggagctcttgctctcctggtcactgcagaatgacagagaaggtgaagctcc

SEQ ID NO: 12226 - DNA, 120 bp, Artificial Sequence
  ENSG00000010295_20 (sequence is synthesized)
atgcatgtgtgcgcgggtgtatgtgcgctcagggtctctgtttaagtatcagctaaagatgtgcttcctccgtgtctgtcatacactgagaccaacaggctacagtgtccctgattcttg

SEQ ID NO: 12227 - DNA, 120 bp, Artificial Sequence
  ENSG00000010295_21 (sequence is synthesized)
gaaaagcctggagaagctggggagatgcggttcacaatgcctcggtataggaggctgtgttgagctgacattcaaatggattctttaataataatgaaactggcgagtatttattgtgca

SEQ ID NO: 12228 - DNA, 120 bp, Artificial Sequence
  ENSG00000010295_22 (sequence is synthesized)
gatgagacatgacaaagctggctctgggaagcatgccctacctaggaccctgccctgtggcccagggtgtcgtccggcccacttgcagtcttaatctctgaattctgggccctggaacag

SEQ ID NO: 12229 - DNA, 120 bp, Artificial Sequence
  ENSG00000010295_23 (sequence is synthesized)
gctgtgtctagttctcatttgccgtactcaccgggcccctttacatactctactttctctttccctctgggtttgagtgctagtaaccccaggctcgtgtgtccactgctgtcatgctgc

SEQ ID NO: 12230 - DNA, 120 bp, Artificial Sequence
  ENSG00000010295_24 (sequence is synthesized)
tgtgggacttccggcctctgagccagtctggtcacctctctgtgactcccttagaggaggctctggatgcttttacagggttaaatgataccacaagaggcagggcagcgggctcgacga

SEQ ID NO: 12231 - DNA, 120 bp, Artificial Sequence
  ENSG00000010295_25 (sequence is synthesized)
tgcagtggtgtggtctcagctcactgcagcctctgcctccggggtgcaagcgattctcctgcttcagcatgcctgtagctgggactataggcatgtgccatgaagcctggctgatttttg

SEQ ID NO: 12232 - DNA, 120 bp, Artificial Sequence
  ENSG00000010295_26 (sequence is synthesized)
ggcgtgcgcgctctaccgaggtatgtacttttgtctccactaggtaagcacacgtgcaaagtgaggcccgggagtaactgcccaaagcaactgagccgttcagtggcagagccaggggtc

SEQ ID NO: 12233 - DNA, 120 bp, Artificial Sequence
  ENSG00000010295_27 (sequence is synthesized)
tggacctaggtcccagctacacgccttgcccctacccaagttcccctaaggacgatgatggaaataagtcaccctgacacatctcagttcatcttcctcaaaactatgcgagatagccta

SEQ ID NO: 12234 - DNA, 120 bp, Artificial Sequence
  ENSG00000010295_28 (sequence is synthesized)
ggactggagcgaggagaggaaaaggccttgttctctgaagtagtggtgccagcttcctgtagcactcaagacgtctgagcgggaagcaaatggttctcgaagcaagcaaggctgtttgga

SEQ ID NO: 12235 - DNA, 120 bp, Artificial Sequence
  ENSG00000010295_29 (sequence is synthesized)
ggccctaccctcagtctgaggagaacataccaggtccctccccagcaagaatgtctcaccttgacacaagcccagcttccctcccctctgccccagaccctagaataagacaggacaagt

SEQ ID NO: 12236 - DNA, 120 bp, Artificial Sequence
  ENSG00000010295_30 (sequence is synthesized)
ctgctttgggaggatttctcaggctatgccatggcagctgcagaggcccagggagaggtaacctctgctcccggcctcagggccctctggctctgcctctccagcctgaagcccactccc

SEQ ID NO: 12237 - DNA, 120 bp, Artificial Sequence
  ENSG00000010295_31 (sequence is synthesized)
ccgctcctctccttgctctgtccccccatgtggctgtcatcctctacctgcgtctcccctcttcctttatccttttgcttttctttctccagtttctttaaccagacttcctctctctct

SEQ ID NO: 12238 - DNA, 120 bp, Artificial Sequence
  ENSG00000010295_32 (sequence is synthesized)
gagcagttagtgagcagcttctggggtggaggctctgcagctggcgccggggcgctgggccgattcctcagcctctgaggcctcacctttggcgtggggaaataaacgcgtgcgctctgc

SEQ ID NO: 12239 - DNA, 120 bp, Artificial Sequence
  ENSG00000010295_33 (sequence is synthesized)
aggagtattgtgagggtggtcatgtactcgggacagtgcccagcatgcagtgttagctggaagagtgttagctgttgcgattattatagtcctttctccactcttataattcccaggagt

SEQ ID NO: 12240 - DNA, 120 bp, Artificial Sequence
  ENSG00000010295_34 (sequence is synthesized)
ctctttctctctgggaatgtaagttctaggaggatgaggaccgctagtcgttccagtgagccccctgcatgtcccaggcactggccatgccctccagggcttccgtttggccagggagca

SEQ ID NO: 12241 - DNA, 120 bp, Artificial Sequence
  ENSG00000010295_35 (sequence is synthesized)
gtggcccgagccgccccatgcccagcatattcacacagtgctgtggggaggccaccgctacccaggaagaggggtgcagtcagctcagggagactccacagaagaggcaccggtgcaatg

SEQ ID NO: 12242 - DNA, 120 bp, Artificial Sequence
  ENSG00000010295_36 (sequence is synthesized)
cccagcgagcccttccttccttgtctgactgctcttcttctcgatttcttcttgttctgccttctcggtttgcagccctgacccccgctgtgtgtctggcccttggtgactgtccgtgtt

SEQ ID NO: 12243 - DNA, 120 bp, Artificial Sequence
  ENSG00000010295_37 (sequence is synthesized)
tctgttcctgtcattgtaactgtgacttttctctctgtctgcccccccttcctactggttcatgcttctcccccattcccaccctctctgcccggcctcccgctcccgccctttctcctc

SEQ ID NO: 12244 - DNA, 120 bp, Artificial Sequence
  ENSG00000010295_38 (sequence is synthesized)
ctggatgtgattcaggttctcttttgtacacattgcacactcatcctccttgcgtcctaaagcttttttttttttagttgagtcatttaatcaaaaagactttttttagaaaaaaatttc

SEQ ID NO: 12245 - DNA, 120 bp, Artificial Sequence
  ENSG00000010310_0 (sequence is synthesized)
agagccgagacaaggcagttggaggcagcggtggcaggggctgcaggagcaagtgaccaggagcaggactggggacaggcctgatcgcccctgcacgaaccagacccttcgccgccctca

SEQ ID NO: 12246 - DNA, 120 bp, Artificial Sequence
  ENSG00000010310_1 (sequence is synthesized)
cgatgactacctctccgatcctgcagctgctgctgcggctctcactgtgcgggctgctgctccagagggcggagacaggctctaaggggcagacggcgggggagctgtaccagcgctggg

SEQ ID NO: 12247 - DNA, 120 bp, Artificial Sequence
  ENSG00000010310_2 (sequence is synthesized)
aacggtaccgcagggagtgccaggagaccttggcagccgcggaaccgccttcaggcctcgcctgtaacgggtccttcgatatgtacgtctgctgggactatgctgcacccaatgccactg

SEQ ID NO: 12248 - DNA, 120 bp, Artificial Sequence
  ENSG00000010310_3 (sequence is synthesized)
cccgtgcgtcctgcccctggtacctgccctggcaccaccatgtggctgcaggtttcgtcctccgccagtgtggcagtgatggccaatggggactttggagagaccatacacaatgtgaga

SEQ ID NO: 12249 - DNA, 120 bp, Artificial Sequence
  ENSG00000010310_4 (sequence is synthesized)
acccagagaagaatgaggcctttctggaccaaaggctcatcttggagcggttgcaggtcatgtacactgtcggctactccctgtctctcgccacactgctgctagccctgctcatcttga

SEQ ID NO: 12250 - DNA, 120 bp, Artificial Sequence
  ENSG00000010310_5 (sequence is synthesized)
gtttgttcaggcggctacattgcactagaaactatatccacatcaacctgttcacgtctttcatgctgcgagctgcggccattctcagccgagaccgtctgctacctcgacctggcccct

SEQ ID NO: 12251 - DNA, 120 bp, Artificial Sequence
  ENSG00000010310_6 (sequence is synthesized)
accttggggaccaggcccttgcgctgtggaaccaggccctcgctgcctgccgcacggcccagatcgtgacccagtactgcgtgggtgccaactacacgtggctgctggtggagggcgtct

SEQ ID NO: 12252 - DNA, 120 bp, Artificial Sequence
  ENSG00000010310_7 (sequence is synthesized)
acctgcacagtctcctggtgctcgtgggaggctccgaggagggccacttccgctactacctgctcctcggctggggggcccccgcgcttttcgtcattccctgggtgatcgtcaggtacc

SEQ ID NO: 12253 - DNA, 120 bp, Artificial Sequence
  ENSG00000010310_8 (sequence is synthesized)
tgtacgagaacacgcagtgctgggagcgcaacgaagtcaaggccatttggtggattatacggacccccatcctcatgaccatcttgattaatttcctcatttttatccgcattcttggca

SEQ ID NO: 12254 - DNA, 120 bp, Artificial Sequence
  ENSG00000010310_9 (sequence is synthesized)
ttctcctgtccaagctgaggacacggcaaatgcgctgccgggattaccggctgaggctggctcgctccacgctgacgctggtgcccctgctgggtgtccacgaggtggtgtttgctcccg

SEQ ID NO: 12255 - DNA, 120 bp, Artificial Sequence
  ENSG00000010310_10 (sequence is synthesized)
tgacagaggaacaggcccggggcgccctgcgcttcgccaagctcggctttgagatcttcctcagctccttccagggcttcctggtcagcgtcctctactgcttcatcaacaaggaggtgc

SEQ ID NO: 12256 - DNA, 120 bp, Artificial Sequence
  ENSG00000010310_11 (sequence is synthesized)
ggaggtgcagtcggagatccgccgtggctggcaccactgccgcctgcgccgcagcctgggcgaggagcaacgccagctcccggagcgcgccttccgggccctgccctccggctccggccc

SEQ ID NO: 12257 - DNA, 120 bp, Artificial Sequence
  ENSG00000010310_12 (sequence is synthesized)
tccccaccagccgcggcttgtcctcggggaccctcccagggcctgggaatgaggccagccgggagttggaaagttactgctagggggcgggatccccgtgtctgttcagttagcatggat

SEQ ID NO: 12258 - DNA, 120 bp, Artificial Sequence
  ENSG00000010310_13 (sequence is synthesized)
aaggtccctgcccttctggagatgacaactgagtggggaaaacagaccgtgaacacaaaacatcaagttccacacacgctatggaatggttatgaagggaagcgagaagggggcctaggg

SEQ ID NO: 12259 - DNA, 120 bp, Artificial Sequence
  ENSG00000010310_14 (sequence is synthesized)
tggtctgggaggcgtctccaaggaggtgacacttaagccatccccgaaagaggtgaaagagatcactttggggagagctggagaacaggattctaggcggaagcgatagcataggcaaag

SEQ ID NO: 12260 - DNA, 120 bp, Artificial Sequence
  ENSG00000010310_15 (sequence is synthesized)
gcccttgggcaggaaggcgctcagccttggctggagtagaattaagtcagagccaacaggtggggagagacagagaagtgggcaggggcacccaagttgggatttcatttcaggtgcatt

SEQ ID NO: 12261 - DNA, 120 bp, Artificial Sequence
  ENSG00000010310_16 (sequence is synthesized)
caagttgggatttcatttcaggtgcattggagattcttaggagtgtctcttgggggtaatattttattttttaaaaaatgaggatgtcactcttacccaggttggtcttgaactcctggg

SEQ ID NO: 12262 - DNA, 65 bp, Artificial Sequence
  ENSG00000010310_17 (sequence is synthesized)
ctcctgggctcaagcaatcctcccaccactttttttttaaacggagtctcactctgtcacccagg

SEQ ID NO: 12263 - DNA, 79 bp, Artificial Sequence
  ENSG00000010310_18 (sequence is synthesized)
aaatgggctaatgttttaaacagatccttcttgtctgccctgtaggaggacaaattatcaggggcaggggtggaagctg

SEQ ID NO: 12264 - DNA, 120 bp, Artificial Sequence
  ENSG00000010310_19 (sequence is synthesized)
ctgtaggaggacaaattatcaggggcaggggtggaagctggagcccagaaaggaggggactgcaggtgggaagtgatggtggctggaccaggatggaggccactgaggggtatgaagcag

SEQ ID NO: 12265 - DNA, 120 bp, Artificial Sequence
  ENSG00000010310_20 (sequence is synthesized)
tcggatttgaagctgtttaaaaggtggaggtgagaggatttcatgaaggagcacatgaggacacagcagcagagaggactccttggctttggatggtggagagactaaagatagagagat

SEQ ID NO: 12266 - DNA, 120 bp, Artificial Sequence
  ENSG00000010310_21 (sequence is synthesized)
tgggttcgggtagggggagaaccacgtgtgctctttggaaaggttaggctggcagtgtttgtaggacatgacaggacactgagtgtaagggtctggagctctcaggagaggggcgagctg

SEQ ID NO: 12267 - DNA, 120 bp, Artificial Sequence
  ENSG00000010310_22 (sequence is synthesized)
gagatagtaatgtgagaggcactgggtcctgagagggtgatttggtgtggaccggagcacaggtgaggcaaggcaggcctcgcagctgaaactttatatccagagcagccagggccactg

SEQ ID NO: 12268 - DNA, 120 bp, Artificial Sequence
  ENSG00000010310_23 (sequence is synthesized)
ctggctgcggagtgaggacgcatatccccactgtccttagatgggtggcccctggaacctgggagaatgagggggcatgctgacagtctcattgtggctggaccacctgtacatacaccc

SEQ ID NO: 12269 - DNA, 120 bp, Artificial Sequence
  ENSG00000010310_24 (sequence is synthesized)
acaagaccctcacccctaaatcctccccctacacatatgcacacttaagttaccgtatgggtgttgtcgagcattttccctggggtctgtggctccctggaccgacatgccccaaagctg

SEQ ID NO: 12270 - DNA, 120 bp, Artificial Sequence
  ENSG00000010310_25 (sequence is synthesized)
aactcagccttttcaagcttgcggccctgctgcccaattcccctacaccctgccttgtgggttctcgcggggtgggggccttagggcaaggctcttgtaaataaagtataagaaacagtt

SEQ ID NO: 12271 - DNA, 120 bp, Artificial Sequence
  ENSG00000010310_26 (sequence is synthesized)
taggaaaggttgtgttccagggcaatcggcaaggggagggggtggggcctggatcgtaatgggcgggaccttagagaatgtgtgtggtctcaagtgcggtgggcggggcctagcgagcaa

SEQ ID NO: 12272 - DNA, 120 bp, Artificial Sequence
  ENSG00000010310_27 (sequence is synthesized)
atgagcttggtgatcggtgagtctagagtttttctatctcttagctctactccgccttccccaggtgctgggagcgcaacgaagtcaaggccatttggtggattatacggacccccatcc

SEQ ID NO: 12273 - DNA, 120 bp, Artificial Sequence
  ENSG00000010310_28 (sequence is synthesized)
tcatgaccatcttggtaggatcggtcccgcctccaccaggccgccctcagggatttcccattctgggaagtgggctgccacctcctcctgccccttcagaatgggatcgcggctggctca

SEQ ID NO: 12274 - DNA, 120 bp, Artificial Sequence
  ENSG00000010310_29 (sequence is synthesized)
aggggcacgaaagctacagtcgttctctggtgcagccactgaatggggtgggaagatgggatttagttcgttcattaattaattcattcttttttttttttgagacggattctcgccctg

SEQ ID NO: 12275 - DNA, 120 bp, Artificial Sequence
  ENSG00000010310_30 (sequence is synthesized)
agagccgagacaaggcagttggaggcagcggtggcaggggctgcaggagcaagtgaccaggagcaggactggggacagatcatcacgcctgggagttgcgggagcgggtgcgctgcctcg

SEQ ID NO: 12276 - DNA, 120 bp, Artificial Sequence
  ENSG00000010310_31 (sequence is synthesized)
gagtcccgcgtgtatacggctccccagccgtctgcccctgtgtgtgaatccctgaggcggggtgacgctggggttggagtaggagggcagagctgctgctgcggctctcactgtgcgggc

SEQ ID NO: 12277 - DNA, 120 bp, Artificial Sequence
  ENSG00000010310_32 (sequence is synthesized)
tgctgctccagagggcggaggctctaaggggcagacggcgggggagctgtaccagcgctgggaacggtaccgcagggagtgccaggagaccttggcagccgcggaaccgccttcagcttc

SEQ ID NO: 12278 - DNA, 77 bp, Artificial Sequence
  ENSG00000010310_33 (sequence is synthesized)
gccaggagaccttggcagccgcggaaccgccttcagcttctctgtctccgtatctctttctatttatttatttgatg

SEQ ID NO: 12279 - DNA, 120 bp, Artificial Sequence
  ENSG00000010310_34 (sequence is synthesized)
cctcaattttcccatatgtagaactaggttaaggatattactaattccatgggctagtatgaatattaaattaatacaaataacatgccatataagggtttatcatcatcatcatcatca

SEQ ID NO: 12280 - DNA, 120 bp, Artificial Sequence
  ENSG00000010310_35 (sequence is synthesized)
tcatcatcatcaccacttcggctctctccctctctgttattgtctcacagtttgtctttctgtatttatctctttctctgtgtgccttaattccctctcttctttccccacagtggctgc

SEQ ID NO: 12281 - DNA, 120 bp, Artificial Sequence
  ENSG00000010310_36 (sequence is synthesized)
cagagatgtgagctcggcctcagtttgtccagtaagatggggtggtctgtttccaccaggtccagctatccactggtggttctatggggagcagtgggggtggttaaaggagctctgtgt

SEQ ID NO: 12282 - DNA, 84 bp, Artificial Sequence
  ENSG00000010310_37 (sequence is synthesized)
tctatggggagcagtgggggtggttaaaggagctctgtgtggccgggagcggtggctgatgcctgtaatcccagctctttggga

SEQ ID NO: 12283 - DNA, 83 bp, Artificial Sequence
  ENSG00000010310_38 (sequence is synthesized)
cagattcgagttttgattatcgtttccactcccttttcttcccccaacaagtcctcctgataatttccagccaccccctcccc

SEQ ID NO: 12284 - DNA, 120 bp, Artificial Sequence
  ENSG00000010310_39 (sequence is synthesized)
ccaacaagtcctcctgataatttccagccaccccctccccaattttcttgaaggttttcagtctcccatagcaactccagtgggtggcttccaggcaccccaccccaagacttggaactg

SEQ ID NO: 12285 - DNA, 120 bp, Artificial Sequence
  ENSG00000010318_0 (sequence is synthesized)
agtcttcgccggcgcagtcaccgcgcagggcggccgcccggaggtagctaccacggcctgtgtcaacgactaaagctccagtacagcggcgccctcagacagctgggagggtggctctgg

SEQ ID NO: 12286 - DNA, 120 bp, Artificial Sequence
  ENSG00000010318_1 (sequence is synthesized)
ccgggagcggcggccggtgagctaccgcgaggaggagcggcggaggcgacctcggcccggccctgcactggccgcccggcaggcgcgacatgagcctggtctggcatccgcgggatgctc

SEQ ID NO: 12287 - DNA, 120 bp, Artificial Sequence
  ENSG00000010318_2 (sequence is synthesized)
cttaagccccttctccggctgttaacctccggggaacggttgtgaccacaccgacacgtattttacagataaatcattcttgcggcggcgggtcgaacacgtttatttattttttatttt

SEQ ID NO: 12288 - DNA, 120 bp, Artificial Sequence
  ENSG00000010318_3 (sequence is synthesized)
ctcaacaagcttttacccagcacctgtccagtgaaacaacttgataatcgtttcgaggggcgtccgccgggttaggaagccactgcctggcagcttgtggaagcctcatttgcaaagcca

SEQ ID NO: 12289 - DNA, 120 bp, Artificial Sequence
  ENSG00000010318_4 (sequence is synthesized)
cccctcagatgttttgaagatcgtgacgtcttgtaactagcagtgtgtgcacagaatcctactcaaggaacgtcttggcccagcgatgcaaagaactgaagtttcaagctggaagagcct

SEQ ID NO: 12290 - DNA, 120 bp, Artificial Sequence
  ENSG00000010318_5 (sequence is synthesized)
gtattgtcctcacaatagtatagaagaattcaagagaggagagagagacagcaccgaatgaagactgtaaaagaaaagaaggaatgccagagattgagaaaatctgccaagactaggagg

SEQ ID NO: 12291 - DNA, 120 bp, Artificial Sequence
  ENSG00000010318_6 (sequence is synthesized)
gtaacccagaggaaaccgtcttcagggcctgtttgctggctatgccttcgagaacctggggatcccgaaaaattaggggaatttcttcagaaagacaatatcagcgtgcattatttctgt

SEQ ID NO: 12292 - DNA, 120 bp, Artificial Sequence
  ENSG00000010318_7 (sequence is synthesized)
cttatcttatctagtaagctgcctcagaggggccagtccaacagaggcttccatggatttctgcctgaagacatcaaaaaggaggcagcccgggcttctaggaagatctgctttgtgtgc

SEQ ID NO: 12293 - DNA, 120 bp, Artificial Sequence
  ENSG00000010318_8 (sequence is synthesized)
tcacaattttttggagagtacaaatcattttgtgacaaacatcgcccaacacagaacatccaacatgggcatgtgggggaggaaagctgcatcttatgttgtgaagacttatcccaacag

SEQ ID NO: 12294 - DNA, 120 bp, Artificial Sequence
  ENSG00000010318_9 (sequence is synthesized)
agtgttgagaacatccagagcccgtgttgtagtcaagccatctaccaccgcaagtgcatacagaaatatgcccacacatcagcaaagcatttcttcaaatgtccacagtgtaacaatcga

SEQ ID NO: 12295 - DNA, 120 bp, Artificial Sequence
  ENSG00000010318_10 (sequence is synthesized)
aaagagtttcctcaagaaatgctgagaatgggaattcatattccagacagagatgctgcctgggaactcgagccaggggctttctcagacttatatcagcgctatcagcactgtgatgcc

SEQ ID NO: 12296 - DNA, 120 bp, Artificial Sequence
  ENSG00000010318_11 (sequence is synthesized)
cccatctgtctgtatgaacaaggcagagacagctttgaggatgaagggaggtggtgcctcattctgtgtgctacatgcggatcccacggaacccacagggactgctcctctcttagatct

SEQ ID NO: 12297 - DNA, 120 bp, Artificial Sequence
  ENSG00000010318_12 (sequence is synthesized)
aacagtaagaaatgggagtgtgaggagtgttcacctgctgcagccacagactacatacctgaaaactcaggggacatcccttgctgcagcagcaccttccaccctgaggaacatttctgc

SEQ ID NO: 12298 - DNA, 120 bp, Artificial Sequence
  ENSG00000010318_13 (sequence is synthesized)
agagacaacaccttggaagagaatccgggcctttcttggactgattggccagaaccttccttattagaaaagccagagtcctctcgtggcaggaggagctactcctggaggtccaagggt

SEQ ID NO: 12299 - DNA, 120 bp, Artificial Sequence
  ENSG00000010318_14 (sequence is synthesized)
gtcagaatcactaacagctgcaaaaaatccaagtaacaccttctgagtagctgctgtcccacacaatagggtatgaagctgcgctcctccatcgggtttggggagggagcactctgggac

SEQ ID NO: 12300 - DNA, 120 bp, Artificial Sequence
  ENSG00000010318_15 (sequence is synthesized)
tgtgagacaaggaagcagggccagcagtgagactatgagccaagcaaagagaagtctcagtggagcatgaggagggagcagtccagatgccaacaaggaaatgcgtttatggctacaaga

SEQ ID NO: 12301 - DNA, 120 bp, Artificial Sequence
  ENSG00000010318_16 (sequence is synthesized)
gtgcctctgctttctcctcctctcctcccaccaaggattcttccaccttaatcttgttttcatatgcctcttcttacttcacccatgtttgttgttatgcaaataaaggttttctctcca

SEQ ID NO: 12302 - DNA, 120 bp, Artificial Sequence
  ENSG00000010318_17 (sequence is synthesized)
aaggaatgccagagattgagaaaatctgccaagactaggagggtaacccagaggaaaccgtcttcagggcctgtttgctggctatgcttcgagaacctggggatcccgaaaaattagggg

SEQ ID NO: 12303 - DNA, 120 bp, Artificial Sequence
  ENSG00000010318_18 (sequence is synthesized)
gagtttcctcaagaaatgctgagaatgggaattcatattccagacaggtagtgggaaccccaaagcaggaactgagccagggagtgggttgcctagatttctagagaggaggtgagtgag

SEQ ID NO: 12304 - DNA, 120 bp, Artificial Sequence
  ENSG00000010318_19 (sequence is synthesized)
aggatagttcagagaatgagagcagcagaggcactgataagaaggaaggggaggagggagtgcttttcaattatcaaaacagaagggagggggaagaagtttgcgggggaatggggtgct

SEQ ID NO: 12305 - DNA, 120 bp, Artificial Sequence
  ENSG00000010318_20 (sequence is synthesized)
tgttgctgaaaagggcatttggggaatcagaattccctggggggttgagttattggattccagagtggaactaaggaacctgcatgcatgttccattcatcctgcttcaaccctctccca

SEQ ID NO: 12306 - DNA, 120 bp, Artificial Sequence
  ENSG00000010318_21 (sequence is synthesized)
ctgccaggccacttggccagccttgttggaagtgttcaggcagcctactgaactcttgctgtgcttagcttgggctcttcctaactcctccctgatggacaaaagtttcaccaacccatt

SEQ ID NO: 12307 - DNA, 120 bp, Artificial Sequence
  ENSG00000010318_22 (sequence is synthesized)
ggctagaaagagctctcatcagtgctatcttagagttagaccttggcacagttattagaagtaagaaattcactcttgtatgcagaccttaggataaacacgattgctaagtctcattct

SEQ ID NO: 12308 - DNA, 120 bp, Artificial Sequence
  ENSG00000010318_23 (sequence is synthesized)
tgaccagcccgactcacttgtgtgcacgtgaacacgtctcccctgcaaggtccgcttcaccttgtgcccagtggagagacattcagagccaattcctttcctaatctacctttcaagggg

SEQ ID NO: 12309 - DNA, 120 bp, Artificial Sequence
  ENSG00000010318_24 (sequence is synthesized)
ttacgactgatggcaggcttctgggatcagcactcatcctctctgagccatacattcatcttgggtaaaatgtgctgtaaaaaatgcctggcccatagcaaacatccaagcatggcagtt

SEQ ID NO: 12310 - DNA, 120 bp, Artificial Sequence
  ENSG00000010318_25 (sequence is synthesized)
tttgctttgaatatcctatggcttttggtgtactgactgttctctgttacattcatcctcatatccacagccttgtttttttatttttcttaatagcttttttgttttaaaatctatttt

SEQ ID NO: 12311 - DNA, 120 bp, Artificial Sequence
  ENSG00000010319_0 (sequence is synthesized)
aaactacaaccggcggccagcgggaccagagggcggctctgcaggcaggcggcagcggtgccctcagttccccagcatggccccctcggcctgggccatttgctggctgctagggggcct

SEQ ID NO: 12312 - DNA, 120 bp, Artificial Sequence
  ENSG00000010319_1 (sequence is synthesized)
cctgctccatgggggtagctctggccccagccccggccccagtgtgccccgcctgcggctctcctaccgagacctcctgtctgccaaccgctctgccatctttctgggcccccagggctc

SEQ ID NO: 12313 - DNA, 120 bp, Artificial Sequence
  ENSG00000010319_2 (sequence is synthesized)
cctgaacctccaggccatgtacctagatgagtaccgagaccgcctctttctgggtggcctggacgccctctactctctgcggctggaccaggcatggccagatccccgggaggtcctgtg

SEQ ID NO: 12314 - DNA, 120 bp, Artificial Sequence
  ENSG00000010319_3 (sequence is synthesized)
gccaccgcagccaggacagagggaggagtgtgttcgaaagggaagagatcctttgacagagtgcgccaacttcgtgcgggtgctacagcctcacaaccggacccacctgctagcctgtgg

SEQ ID NO: 12315 - DNA, 120 bp, Artificial Sequence
  ENSG00000010319_4 (sequence is synthesized)
cactggggccttccagcccacctgtgccctcatcacagttggccaccgtggggagcatgtgctccacctggagcctggcagtgtggaaagtggccgggggcggtgccctcacgagcccag

SEQ ID NO: 12316 - DNA, 120 bp, Artificial Sequence
  ENSG00000010319_5 (sequence is synthesized)
ccgtccctttgccagcaccttcatagacggggagctgtacacgggtctcactgctgacttcctggggcgagaggccatgatcttccgaagtggaggtcctcggccagctctgcgttccga

SEQ ID NO: 12317 - DNA, 120 bp, Artificial Sequence
  ENSG00000010319_6 (sequence is synthesized)
ctctgaccagagtctcttgcacgacccccggtttgtgatggccgcccggatccctgagaactctgaccaggacaatgacaaggtgtacttcttcttctcggagacggtcccctcgcccga

SEQ ID NO: 12318 - DNA, 120 bp, Artificial Sequence
  ENSG00000010319_7 (sequence is synthesized)
tggtggctcgaaccatgtcactgtcagccgcgtgggccgcgtctgcgtgaatgatgctgggggccagcgggtgctggtgaacaaatggagcactttcctcaaggccaggctggtctgctc

SEQ ID NO: 12319 - DNA, 120 bp, Artificial Sequence
  ENSG00000010319_8 (sequence is synthesized)
ggtgcccggccctggtggtgccgagacccactttgaccagctagaggatgtgttcctgctgtggcccaaggccgggaagagcctcgaggtgtacgcgctgttcagcaccgtcagtgccgt

SEQ ID NO: 12320 - DNA, 120 bp, Artificial Sequence
  ENSG00000010319_9 (sequence is synthesized)
gttccagggcttcgccgtctgtgtgtaccacatggcagacatctgggaggttttcaacgggccctttgcccaccgagatgggcctcagcaccagtgggggccctatgggggcaaggtgcc

SEQ ID NO: 12321 - DNA, 120 bp, Artificial Sequence
  ENSG00000010319_10 (sequence is synthesized)
cttccctcgccctggcgtgtgccccagcaagatgaccgcacagccaggacggccttttggcagcaccaaggactacccagatgaggtgctgcagtttgcccgagcccaccccctcatgtt

SEQ ID NO: 12322 - DNA, 120 bp, Artificial Sequence
  ENSG00000010319_11 (sequence is synthesized)
ctggcctgtgcggcctcgacatggccgccctgtccttgtcaagacccacctggcccagcagctacaccagatcgtggtggaccgcgtggaggcagaggatgggacctacgatgtcatttt

SEQ ID NO: 12323 - DNA, 120 bp, Artificial Sequence
  ENSG00000010319_12 (sequence is synthesized)
cctggggactgactcagggtctgtgctcaaagtcatcgctctccaggcagggggctcagctgaacctgaggaagtggttctggaggagctccaggtgtttaaggtgccaacacctatcac

SEQ ID NO: 12324 - DNA, 120 bp, Artificial Sequence
  ENSG00000010319_13 (sequence is synthesized)
cgaaatggagatctctgtcaaaaggcaaatgctatacgtgggctctcggctgggtgtggcccagctgcggctgcaccaatgtgagacttacggcactgcctgtgcagagtgctgcctggc

SEQ ID NO: 12325 - DNA, 120 bp, Artificial Sequence
  ENSG00000010319_14 (sequence is synthesized)
ccgggacccatactgtgcctgggatggtgcctcctgtacccactaccgccccagccttggcaagcgccggttccgccggcaggacatccggcacggcaaccctgccctgcagtgcctggg

SEQ ID NO: 12326 - DNA, 120 bp, Artificial Sequence
  ENSG00000010319_15 (sequence is synthesized)
ccagagccaggaagaagaggcagtgggacttgtggcagccaccatggtctacggcacggagcacaatagcaccttcctggagtgcctgcccaagtctccccaggctgctgtgcgctggct

SEQ ID NO: 12327 - DNA, 120 bp, Artificial Sequence
  ENSG00000010319_16 (sequence is synthesized)
cttgcagaggccaggggatgaggggcctgaccaggtgaagacggacgagcgagtcttgcacacggagcgggggctgctgttccgcaggcttagccgtttcgatgcgggcacctacacctg

SEQ ID NO: 12328 - DNA, 120 bp, Artificial Sequence
  ENSG00000010319_17 (sequence is synthesized)
caccactctggagcatggcttctcccagactgtggtccgcctggctctggtggtgattgtggcctcacagctggacaacctgttccctccggagccaaagccagaggagcccccagcccg

SEQ ID NO: 12329 - DNA, 120 bp, Artificial Sequence
  ENSG00000010319_18 (sequence is synthesized)
gggaggcctggcttccaccccacccaaggcctggtacaaggacatcctgcagctcattggcttcgccaacctgccccgggtggatgagtactgtgagcgcgtgtggtgcaggggcaccac

SEQ ID NO: 12330 - DNA, 120 bp, Artificial Sequence
  ENSG00000010319_19 (sequence is synthesized)
ggaatgctcaggctgcttccggagccggagccggggcaagcaggccaggggcaagagctgggcagggctggagctaggcaagaagatgaagagccgggtgcatgccgagcacaatcggac

SEQ ID NO: 12331 - DNA, 120 bp, Artificial Sequence
  ENSG00000010319_20 (sequence is synthesized)
agcccccagcatctcccacccacccagctagggcagaggggtcaggatgtctgtttgcctcttagagacaggtgtctctgcccccacaccgctactggggtctaatggaggggctgggtt

SEQ ID NO: 12332 - DNA, 120 bp, Artificial Sequence
  ENSG00000010319_21 (sequence is synthesized)
cttgaagcctgttccctgcccttctctgtgctcttagacccagctggagccagcaccctctggctgctggcagccccaagggatctgccatttgttctcagagatggcctggcttccgca

SEQ ID NO: 12333 - DNA, 120 bp, Artificial Sequence
  ENSG00000010319_22 (sequence is synthesized)
acacatttccgggtgtgcccagaggcaagagggttgggtggttctttcccagcctacagaacaatggccattctgagtgaccctcagagtgggtgtgtgggtgcgtctagggggtatccc

SEQ ID NO: 12334 - DNA, 120 bp, Artificial Sequence
  ENSG00000010319_23 (sequence is synthesized)
ggtagggggcctgcagggagccagagggtggaaatggcctctaagctagcaccccgtaagaagagcctacctgaccgacttggggagggaacacagaggtgttgggaaggtggagcaaca

SEQ ID NO: 12335 - DNA, 120 bp, Artificial Sequence
  ENSG00000010319_24 (sequence is synthesized)
atgcacctcccctcctgtcgcgccgtgatatcttggtggctccctgccactgcccaccgcctcttctccatctgagaatcacggagaggtgtagataatctagaggcatagactgctaga

SEQ ID NO: 12336 - DNA, 120 bp, Artificial Sequence
  ENSG00000010319_25 (sequence is synthesized)
gcccccagggatctggggtggtcagggctcaggcttcactttgtaaaccaggtgggggcatctcacagcctgacttcccttccccaggccagggttgctgggatgcctgcccctcctgag

SEQ ID NO: 12337 - DNA, 120 bp, Artificial Sequence
  ENSG00000010319_26 (sequence is synthesized)
aggaccccctccccattgtcaggctctccatgtccacgagcggggaggggtgggttctggggcattgttgtcccttgtgtctgtggactagagatagggtgggggagctggggaagggtg

SEQ ID NO: 12338 - DNA, 120 bp, Artificial Sequence
  ENSG00000010319_27 (sequence is synthesized)
caggcgggaagagtgggctgtctttcccagggtgatgcaagcatgccgcagccctggaggctgggaatgtggaggctctgtgagccctgcagccctcagaatcagggccagggatgcaga

SEQ ID NO: 12339 - DNA, 120 bp, Artificial Sequence
  ENSG00000010319_28 (sequence is synthesized)
agattgagaggatatggagatggatagagggcaggagacccttaggatagattgtgggacccaggcaggaacaggtgtccacaagaactcaggatggcatcagttagctcagaagccacc

SEQ ID NO: 12340 - DNA, 120 bp, Artificial Sequence
  ENSG00000010319_29 (sequence is synthesized)
tggaagacccagtgtttccatctctggaatctctgttttatgctaaatggatttaggaagactgtttttcttttaagggggaaacaaggtagagaaaaggacgaagaagtgtaagtcccg

SEQ ID NO: 12341 - DNA, 120 bp, Artificial Sequence
  ENSG00000010319_30 (sequence is synthesized)
ctgattctcgggggtaaggctcggatggcaaggacgcgttctgcctgggcatgtaggggaggtgtttttgccatcaccagtttctcaggctggggagcacagaggggaggaggaggacta

SEQ ID NO: 12342 - DNA, 120 bp, Artificial Sequence
  ENSG00000010319_31 (sequence is synthesized)
aatgaaaagttgttcccagcctgcacatgaacacattcatgacacacaaaactggctggaaggagataagagcactgggtttgagattccctccattaaaacaaccaagacaaagaaagg

SEQ ID NO: 12343 - DNA, 120 bp, Artificial Sequence
  ENSG00000010319_32 (sequence is synthesized)
aggggaaaaaaagataaaaagcaagccagggttccctgccctattgaaactcaaacccagactgccttgggttttatctttcccttacccctggcacctccagagaactgggacctgaaa

SEQ ID NO: 12344 - DNA, 120 bp, Artificial Sequence
  ENSG00000010319_33 (sequence is synthesized)
tagtccctccgttctcccctttgaccatgtaataaatgaaccagaagcactgagattaacctatcaacgccctgagaagccttccagcctgcggtgctgtctgctgggaggtcagctggt

SEQ ID NO: 12345 - DNA, 120 bp, Artificial Sequence
  ENSG00000010319_34 (sequence is synthesized)
caaggcagaggaggagaggaggaaaggatgggggctgaagagcagaagggaggggagacagaggggattaaagaggggaggagagagtgcagagctccaggaaagggtatcagagctgca

SEQ ID NO: 12346 - DNA, 120 bp, Artificial Sequence
  ENSG00000010319_35 (sequence is synthesized)
gccagctctgccctctaccctagggaggccagaaagacacaaacagccctccgggcctttacgctggactctggcttggcaggctccaggcagggtcctctgggaagttactctagaaaa

SEQ ID NO: 12347 - DNA, 120 bp, Artificial Sequence
  ENSG00000010319_36 (sequence is synthesized)
cgaagggaggaggagcacaagatcctcagcaacgaacacctgcacttagaaaaagtggacagcttctgccaaccacaccctacccatggtactgtatgctattaactcctggaaacgccc

SEQ ID NO: 12348 - DNA, 120 bp, Artificial Sequence
  ENSG00000010319_37 (sequence is synthesized)
cgtaaatgcgagttgtttttgtatttgtgtgttgagatgggccttgtggtttctctgtactcagagcacatttcttgtaattactattgttatttttattgtcatgactgcccctgagct

SEQ ID NO: 12349 - DNA, 120 bp, Artificial Sequence
  ENSG00000010319_38 (sequence is synthesized)
ctggtgagaaaagctgaatttacaaggaaagggatgaagttaatatttgcatcacataattatatcattactgtgtatctgtgtattgtactaaatggactgatgctgcgcacatgagct

SEQ ID NO: 12350 - DNA, 120 bp, Artificial Sequence
  ENSG00000010319_39 (sequence is synthesized)
gaaaatgaagagccctcccatccattccatgagaaagaaggtcaccctgagtgacttctgtttcatgatttcccaaacaggttttagagctggaaaaggacttaaagaaagagactgggt

SEQ ID NO: 12351 - DNA, 120 bp, Artificial Sequence
  ENSG00000010319_40 (sequence is synthesized)
ggtgctttctagaaaggaggaagatgggtatcaggggaaggaaggagttagagggctttgtacaaagccgagattgctcattaaatgaggaacatcctggcctgtgggcttgtaagactg

SEQ ID NO: 12352 - DNA, 120 bp, Artificial Sequence
  ENSG00000010322_0 (sequence is synthesized)
agtctgcgccgggcggcggtggcggcggagacccgaacatggcgaccgcgcgcaccttcgggcccgagcgggaagccgagccggccaaggaagcgcgcgtcgtgggctcggagcttgtgg

SEQ ID NO: 12353 - DNA, 120 bp, Artificial Sequence
  ENSG00000010322_1 (sequence is synthesized)
acacttatacggtttacatcatccaggtcactgatggcagccatgagtggacagtaaagcaccgctacagcgacttccatgacctgcatgaaaagctcgttgcagagagaaagattgata

SEQ ID NO: 12354 - DNA, 120 bp, Artificial Sequence
  ENSG00000010322_2 (sequence is synthesized)
aaaatctgcttccgcccaaaaagataattgggaaaaactcaagaagcttggtggagaagagggagaaggatctggaggtctacctccagaagctcctggctgccttccctggcgtgaccc

SEQ ID NO: 12355 - DNA, 120 bp, Artificial Sequence
  ENSG00000010322_3 (sequence is synthesized)
ccagagtactggcccacttcttgcattttcacttctatgagataaatggcatcaccgcggcactggctgaagagctctttgagaaaggagaacagctcctgggggccggcgaggtctttg

SEQ ID NO: 12356 - DNA, 120 bp, Artificial Sequence
  ENSG00000010322_4 (sequence is synthesized)
ccattggacccctgcagctgtatgccgtcacggagcagctgcagcagggaaagcccacgtgcgccagtggggatgccaagaccgacctcgggcacatcctggacttcacctgtcgcctta

SEQ ID NO: 12357 - DNA, 120 bp, Artificial Sequence
  ENSG00000010322_5 (sequence is synthesized)
agtaccttaaggtttctggcacagaaggaccttttgggaccagcaacattcaggagcagctcctgccgttcgacctatcaatattcaagtccctgcatcaggtggagataagtcactgtg

SEQ ID NO: 12358 - DNA, 120 bp, Artificial Sequence
  ENSG00000010322_6 (sequence is synthesized)
atgctaagcacatcagagggctggtcgcatcgaagcccaccttagccacgctgagtgtccgcttctcagcaacctcgatgaaggaagtccttgttcctgaagcctcagaatttgatgagt

SEQ ID NO: 12359 - DNA, 120 bp, Artificial Sequence
  ENSG00000010322_7 (sequence is synthesized)
gggagcctgaaggcacaaccctagaaggccctgtgactgccgtcatccccacttggcaggcattgaccacgcttgacctgagccacaacagcgtctccgagatcgacgagtctgtgaaac

SEQ ID NO: 12360 - DNA, 120 bp, Artificial Sequence
  ENSG00000010322_8 (sequence is synthesized)
tgatcccaaagattgagttcctggacctgagtcacaatggattgctggttgtggacaatctgcagcacctgtataaccttgtgcatctggacctgtcctacaacaagctctcctccttgg

SEQ ID NO: 12361 - DNA, 120 bp, Artificial Sequence
  ENSG00000010322_9 (sequence is synthesized)
aagggcttcacaccaagctggggaacatcaagaccttaaacctggcaggcaacctcctagagagtctgagtggcctgcacaagctctactcactggtcaacctggatctccgggacaaca

SEQ ID NO: 12362 - DNA, 120 bp, Artificial Sequence
  ENSG00000010322_10 (sequence is synthesized)
ggatcgaacagatggaggaggtccggagcataggcagcctcccgtgtctggagcacgtgtctctgctgaacaaccctctgagcatcatccccgactaccggaccaaggtgctggctcagt

SEQ ID NO: 12363 - DNA, 120 bp, Artificial Sequence
  ENSG00000010322_11 (sequence is synthesized)
tcggagagagggcctcagaggtctgtctggatgacacagtgaccacagagaaggagctggacactgtggaagtgctgaaagcaattcagaaagccaaggaggtcaagtccaaactgagca

SEQ ID NO: 12364 - DNA, 120 bp, Artificial Sequence
  ENSG00000010322_12 (sequence is synthesized)
acccagagaagaagggtggtgaagactcccggctctcagctgccccctgcatcagacccagcagctcccctcccactgtggctcccgcatctgcctccctgccccagcccatcctctcta

SEQ ID NO: 12365 - DNA, 120 bp, Artificial Sequence
  ENSG00000010322_13 (sequence is synthesized)
accaaggaatcatgttcgttcaggaggaggccctggccagcagcctctcgtccactgacagtctgactcccgagcaccagcccattgcccagggatgttctgattccttggagtccatcc

SEQ ID NO: 12366 - DNA, 120 bp, Artificial Sequence
  ENSG00000010322_14 (sequence is synthesized)
ctgcgggacaggcagcttccgatgatttaagggacgtgccaggagctgttggtggtgcaagcccagaacatgccgagccggaggtccaggtggtgccggggtctggccagatcatcttcc

SEQ ID NO: 12367 - DNA, 120 bp, Artificial Sequence
  ENSG00000010322_15 (sequence is synthesized)
tgcccttcacctgcattggctacacggccaccaatcaggacttcatccagcgcctgagcacactgatccggcaggccatcgagcggcagctgcctgcctggatcgaggctgccaaccagc

SEQ ID NO: 12368 - DNA, 120 bp, Artificial Sequence
  ENSG00000010322_16 (sequence is synthesized)
gggaggagggccagggtgaacagggcgaggaggaggatgaggaggaggaagaagaggaggacgtggctgagaaccgctactttgaaatggggcccccagacgtggaggaggaggagggag

SEQ ID NO: 12369 - DNA, 120 bp, Artificial Sequence
  ENSG00000010322_17 (sequence is synthesized)
gaggccagggggaggaagaggaggaggaagaggaggatgaagaggccgaggaggagcgcctggctctggaatgggccctgggcgcggacgaggacttcctgctggagcacatccgcatcc

SEQ ID NO: 12370 - DNA, 120 bp, Artificial Sequence
  ENSG00000010322_18 (sequence is synthesized)
tcaaggtgctgtggtgcttcctgatccatgtgcagggcagtatccgccagttcgccgcctgccttgtgctcaccgacttcggcatcgcagtcttcgagatcccgcaccaggagtctcggg

SEQ ID NO: 12371 - DNA, 120 bp, Artificial Sequence
  ENSG00000010322_19 (sequence is synthesized)
gcagcagccagcacatcctctcctccctgcgctttgtcttttgcttcccgcatggcgacctcaccgagtttggcttcctcatgccggagctgtgtctggtgctcaaggtacggcacagtg

SEQ ID NO: 12372 - DNA, 120 bp, Artificial Sequence
  ENSG00000010322_20 (sequence is synthesized)
agaacacgctcttcattatctcggacgccgccaacctgcacgagttccacgcggacctgcgctcatgctttgcaccccagcacatggccatgctgtgtagccccatcctctacggcagcc

SEQ ID NO: 12373 - DNA, 120 bp, Artificial Sequence
  ENSG00000010322_21 (sequence is synthesized)
tctacagtgacaagcgcatggtgcagacggccgccggggactactcaggcaacatcgagtgggccagctgcacactctgttcagccgtgcggcgctcctgctgcgcgccctctgaggccg

SEQ ID NO: 12374 - DNA, 120 bp, Artificial Sequence
  ENSG00000010322_22 (sequence is synthesized)
tcaagtccgccgccatcccctactggctgttgctcacgccccagcacctcaacgtcatcaaggccgacttcaaccccatgcccaaccgtggcacccacaactgtcgcaaccgcaacagct

SEQ ID NO: 12375 - DNA, 120 bp, Artificial Sequence
  ENSG00000010322_23 (sequence is synthesized)
tcaagctcagccgtgtgccgctctccaccgtgctgctggaccccacacgcagctgtacccagcctcggggcgcctttgctgatggccacgtgctagagctgctcgtggggtaccgctttg

SEQ ID NO: 12376 - DNA, 120 bp, Artificial Sequence
  ENSG00000010322_24 (sequence is synthesized)
tcactgccatcttcgtgctgccccacgagaagttccacttcctgcgcgtctacaaccagctgcgggcctcgctgcaggacctgaagactgtggtcatcgccaagacccccgggacgggag

SEQ ID NO: 12377 - DNA, 120 bp, Artificial Sequence
  ENSG00000010322_25 (sequence is synthesized)
gcagcccccagggctcctttgcggatggccagcctgccgagcgcagggccagcaatgaccagcgtccccaggaggtcccagcagaggctctggccccggccccagcggaagtcccagctc

SEQ ID NO: 12378 - DNA, 120 bp, Artificial Sequence
  ENSG00000010322_26 (sequence is synthesized)
cagcccctgcagcagcctcagcctcaggcccagcgaagactccggccccagcagaggcctcaacttcagctttggtcccagaggagacgccagtggaagctccagccccacccccagccg

SEQ ID NO: 12379 - DNA, 120 bp, Artificial Sequence
  ENSG00000010322_27 (sequence is synthesized)
aggcccctgcccagtacccgagtgagcacctcatccaggccacctcggaggagaatcagatcccctcgcacttgcctgcctgcccgtcgctccggcacgtcgccagcctgcggggcagcg

SEQ ID NO: 12380 - DNA, 120 bp, Artificial Sequence
  ENSG00000010322_28 (sequence is synthesized)
ccatcatcgagctcttccacagcagcattgctgaggttgaaaacgaggagctgaggcacctcatgtggtcctcggtggtgttctaccagaccccagggctggaggtgactgcctgcgtgc

SEQ ID NO: 12381 - DNA, 120 bp, Artificial Sequence
  ENSG00000010322_29 (sequence is synthesized)
tgctctccaccaaggctgtgtactttgtgctccacgacggcctccgccgctacttctcagagccactgcaggatttctggcatcagaaaaacaccgactacaacaacagccctttccaca

SEQ ID NO: 12382 - DNA, 120 bp, Artificial Sequence
  ENSG00000010322_30 (sequence is synthesized)
tctcccagtgcttcgtgctaaagcttagtgacctgcagtcagtcaatgtggggcttttcgaccagcatttccggctgacgggttccaccccgatgcaggtggtcacgtgcttgacgcggg

SEQ ID NO: 12383 - DNA, 120 bp, Artificial Sequence
  ENSG00000010322_31 (sequence is synthesized)
acagctacctgacgcactgcttcctccagcacctcatggtcgtgctgtcctctctggaacgcacgccctcgccggagcctgttgacaaggacttctactccgagtttgggaacaagacca

SEQ ID NO: 12384 - DNA, 120 bp, Artificial Sequence
  ENSG00000010322_32 (sequence is synthesized)
cagggaagatggagaactacgagctgatccactctagtcgcgtcaagtttacctaccccagtgaggaggagattggggacctgacgttcactgtggcccaaaagatggctgagccagaga

SEQ ID NO: 12385 - DNA, 120 bp, Artificial Sequence
  ENSG00000010322_33 (sequence is synthesized)
aggccccagccctcagcatcctgctgtacgtgcaggccttccaggtgggcatgccaccccctgggtgctgcaggggccccctgcgccccaagacactcctgctcaccagctccgagatct

SEQ ID NO: 12386 - DNA, 120 bp, Artificial Sequence
  ENSG00000010322_34 (sequence is synthesized)
tcctcctggatgaggactgtgtccactacccactgcccgagtttgccaaagagccgccgcagagagacaggtaccggctggacgatggccgccgcgtccgggacctggaccgagtgctca

SEQ ID NO: 12387 - DNA, 120 bp, Artificial Sequence
  ENSG00000010322_35 (sequence is synthesized)
tgggctaccagacctacccgcaggccctcaccctcgtcttcgatgacgtgcaaggtcatgacctcatgggcagtgtcaccctggaccactttggggaggtgccaggtggcccggctagag

SEQ ID NO: 12388 - DNA, 120 bp, Artificial Sequence
  ENSG00000010322_36 (sequence is synthesized)
ccagccagggccgtgaagtccagtggcaggtgtttgtccccagtgctgagagcagagagaagctcatctcgctgttggctcgccagtgggaggccctgtgtggccgtgagctgcctgtcg

SEQ ID NO: 12389 - DNA, 120 bp, Artificial Sequence
  ENSG00000010322_37 (sequence is synthesized)
agctcaccggctagcccaggccacagccagcctgtcgtgtccagcctgacgcctactggggcagggcagcaggcttttgtgttctctaaaaatgttttatcctccctttggtaccttaat

SEQ ID NO: 12390 - DNA, 120 bp, Artificial Sequence
  ENSG00000010322_38 (sequence is synthesized)
ttgactgtcctcgcagagaatgtgaacatgtgtgtgtgttgtgttaattctttctcatgttgggagtgagaatgccgggcccctcagggctgtcggtgtgctgtcagcctcccacaggtg

SEQ ID NO: 12391 - DNA, 120 bp, Artificial Sequence
  ENSG00000010322_39 (sequence is synthesized)
gtacagccgtgcacaccagtgtcgtgtctgctgttgtgggaccgttgttaacacgtgacactgtgggtctgactttctcttctacacgtcctttcctgaagtgtcgagtccagtcctttg

SEQ ID NO: 12392 - DNA, 120 bp, Artificial Sequence
  ENSG00000010322_40 (sequence is synthesized)
ttgctgttgctgttgctgttgctgttgctgttgctgttggcatcttgctgctaatcctgaggctggtagcagaatgcacattggaagctcccaccccatattgttcttcaaagtggaggt

SEQ ID NO: 12393 - DNA, 120 bp, Artificial Sequence
  ENSG00000010322_41 (sequence is synthesized)
ctcccctgatccagacaagtgggagagcccgtgggggcaggggacctggagctgccagcaccaagcgtgattcctgctgcctgtattctctattccaataaagcagagtttgacaccgtc

SEQ ID NO: 12394 - DNA, 120 bp, Artificial Sequence
  ENSG00000010322_42 (sequence is synthesized)
gtgtgccgtcccgagtggagccgaggctcgggacacgcaggaaaggacgccgcctgcccgggctcctggagacgcagaacttggtgtgaggtcttgggaaaacagttcaacccgatgttt

SEQ ID NO: 12395 - DNA, 120 bp, Artificial Sequence
  ENSG00000010322_43 (sequence is synthesized)
taagagccagaaaaacattcccaccccttgacctggtaaccccactggtggggattttctcttagagggataagataccgggaaggggaggtgaaatgctcaccactgccaaaacacggg

SEQ ID NO: 12396 - DNA, 120 bp, Artificial Sequence
  ENSG00000010322_44 (sequence is synthesized)
ctgcaactgcaacatcggaggatgagagggagagtcggctgtggtgcagaatgctcagcagccctcccagcagggacaggaagactgggcaggaagaggggagaagcattcaagttaagg

SEQ ID NO: 12397 - DNA, 120 bp, Artificial Sequence
  ENSG00000010322_45 (sequence is synthesized)
caaaaggcccaacgcagagcagcacactgaggtcacacctgtgagatgtggaagagaattcctgagcgtggagcgatggggttaggtgccaggatgattgcccattttgcttctgtcaga

SEQ ID NO: 12398 - DNA, 120 bp, Artificial Sequence
  ENSG00000010322_46 (sequence is synthesized)
ctcttgactaaggatttctggttgcattttattacataaaagccagggaggttatatcacggtgagaaagcttccctgacgctgcctcctgtagcgcagccaagcgagcctgtggaggta

SEQ ID NO: 12399 - DNA, 120 bp, Artificial Sequence
  ENSG00000010322_47 (sequence is synthesized)
ccatatgactgtaggcctctggggacagggagctgcatctgcttctcaaggccagggacacagccatttctgccagcatctgttgatcagtgagtgagtgagtgggcaggtagagcagga

SEQ ID NO: 12400 - DNA, 120 bp, Artificial Sequence
  ENSG00000010322_48 (sequence is synthesized)
gccagtgaagagcaggccctggatgggtggggatgcaccatgtccccaggctgcagctgcaggcagccccccacattgtcggagaagcctctgcaccagctcagccccctcctcactccc

SEQ ID NO: 12401 - DNA, 120 bp, Artificial Sequence
  ENSG00000010322_49 (sequence is synthesized)
cttgtgccctggggacactctgcagaggggcactctgcagtctgtccccgccatcgctggacttctggacatggcctccagatttgcacctcttaaataaaactgcagtggatgtctttg

SEQ ID NO: 12402 - DNA, 120 bp, Artificial Sequence
  ENSG00000010322_50 (sequence is synthesized)
cataggaaccaaaggcatgctttaatgcaagtttacttccacatgctaaatatgctccagcccttccttaaattctgcaacgactgtgttcccagtgagtgttgcgtgagggcccgagtg

SEQ ID NO: 12403 - DNA, 90 bp, Artificial Sequence
  ENSG00000010322_51 (sequence is synthesized)
gagcccaggagtttgagaccagtctgggctatgtagggagacctcgtttctacagaaaaaaattttttaattagctgggcaaggtggtgt

SEQ ID NO: 12404 - DNA, 120 bp, Artificial Sequence
  ENSG00000010322_52 (sequence is synthesized)
ctggctgggctggggttgggggagaggtgccagcacctgcttccaacagggtcagacacagggagggcagtgccttctgcaggctggtcctcgcggggggacacatggcaggggtgcctg

SEQ ID NO: 12405 - DNA, 120 bp, Artificial Sequence
  ENSG00000010322_53 (sequence is synthesized)
gcctgatgccagctgttgcttgcttggtgaggactcccaattgctctgatgcccacatccagctcctctaggagaccgcagggtgtctgacaggccctgaggctgccctctgaacaggct

SEQ ID NO: 12406 - DNA, 120 bp, Artificial Sequence
  ENSG00000010322_54 (sequence is synthesized)
cggggctgttggctcatgggacccattccctcaccggcagcacaagcaggttggctcctggttacaggaagccgggcttgtgactttactgtctggagcccgaatccctgtgcagggaaa

SEQ ID NO: 12407 - DNA, 120 bp, Artificial Sequence
  ENSG00000010322_55 (sequence is synthesized)
agcttgcttttatcactgcctcatctctgtggggtgacccagccccagaacaccatgtttgtggggccaagatgggccatctctgtccctgtggacccatggaagaccaggcccattcgt

SEQ ID NO: 12408 - DNA, 120 bp, Artificial Sequence
  ENSG00000010322_56 (sequence is synthesized)
ctgcccactatcttagcgttttcaaagggctttcacctctgaacccaggcatcctcggagatgagtgagtgaagcaggtctcatgagcgtgtctgctggcccggcccccacggaagaggg

SEQ ID NO: 12409 - DNA, 120 bp, Artificial Sequence
  ENSG00000010322_57 (sequence is synthesized)
agagtaatgcagctctgctggcctcctgggctacagtgcccttggccctatggactggagtcgcagcattaggctgatttcccttctgctttggaggagacatttcaggagataaatggc

SEQ ID NO: 12410 - DNA, 120 bp, Artificial Sequence
  ENSG00000010322_58 (sequence is synthesized)
ggagaatcagatcccctcgcacttgcctgcctgcccgtcgctccggcacgtcgccagcctgcggggcagcgccatcatcgagctcttccacagcagcattgctgaggtagcggcccgggt

SEQ ID NO: 12411 - DNA, 120 bp, Artificial Sequence
  ENSG00000010322_59 (sequence is synthesized)
gtgggtgccagctatggcacggccagtcctgagggcgaggccaagcttggcttcaggtcagcctcaggtccctggacttccctgatgtcggagtcctcagctgagctgctcacagctttg

SEQ ID NO: 12412 - DNA, 120 bp, Artificial Sequence
  ENSG00000010322_60 (sequence is synthesized)
aggacctgggcagtgaggtcctgagttgccctcccctggccatttgtgctgtgtcaccacctcctgtgccacttccagccccaggtagacctcccaccaacagccatctcccacccctct

SEQ ID NO: 12413 - DNA, 120 bp, Artificial Sequence
  ENSG00000010322_61 (sequence is synthesized)
cttcctctctgccttgaagcatacggattcattggtgagccaagaggggcttcccatgtctccttgtggaagctgtgggcatgtccctggtatgtgcaggttgctagggtggtggagctg

SEQ ID NO: 12414 - DNA, 120 bp, Artificial Sequence
  ENSG00000010322_62 (sequence is synthesized)
gtggcctgcacaagctctactcactggtcaacctggatctccgggacaacaggatcgaacaggtgagcccaaggacctcacagttttgggatttctgtgccttggtgtgtatcatgttaa

SEQ ID NO: 12415 - DNA, 120 bp, Artificial Sequence
  ENSG00000010322_63 (sequence is synthesized)
caggagactgacgcagccttgggaattggccaggggttgtaagggcaggggttgctgtcttcgctttaggatcccagcaatgcactgagtgattgttgctctagttccaaagaattagga

SEQ ID NO: 12416 - DNA, 120 bp, Artificial Sequence
  ENSG00000010322_64 (sequence is synthesized)
agcatgagtaaatacaaaccaggcatgatgatgcacctccgtcctgaaggtggacagccatgttttcaacgcccaccccaactgtctgcaggggtgccactgtgctgtggcatgtgcggc

SEQ ID NO: 12417 - DNA, 120 bp, Artificial Sequence
  ENSG00000010322_65 (sequence is synthesized)
agagaagagggacttcccttcctaaaataactgtcagagtgacttgcagaactgggtagtttgggttggaaggcccatcctgccattagtgtcaggcccctatctttggagacttgacct

SEQ ID NO: 12418 - DNA, 120 bp, Artificial Sequence
  ENSG00000010322_66 (sequence is synthesized)
tggtttttaaaaaatgtgtctgtggaagtttaatttttatgtagtcacatctcagtttttttccattgcatttattctcagaatgcttctccctgccctgagattagataagcagtcatt

SEQ ID NO: 12419 - DNA, 120 bp, Artificial Sequence
  ENSG00000010322_67 (sequence is synthesized)
tgttctttcttgagttattttgagatttcagttttaacattttcttctataatccatgtggctgggttttgggatctggctaacccccgccatgccagtagcctgaggggcccagcccca

SEQ ID NO: 12420 - DNA, 120 bp, Artificial Sequence
  ENSG00000010322_68 (sequence is synthesized)
atcaccgcggcactggctgaagagctctttgagaaaggagccacaggtatagggaaggatacggggtcagcggcccagtcaccagcctgagggcacatggctgggaggagtggagcgagg

SEQ ID NO: 12421 - DNA, 120 bp, Artificial Sequence
  ENSG00000010327_0 (sequence is synthesized)
ctgcctgtgctgtgcctgcctcctagagctcattccctacgccccgactctgtcctggacagcgtgcccaccagccatggcggggccccggggcctcctcccactctgcctcctggcctt

SEQ ID NO: 12422 - DNA, 120 bp, Artificial Sequence
  ENSG00000010327_1 (sequence is synthesized)
ctgcctggcaggcttcagcttcgtcagggggcaggtgctgttcaaaggctgtgatgtgaaaaccacgtttgtcactcatgtaccctgcacctcgtgcgcggccatcaagaagcagacgtg

SEQ ID NO: 12423 - DNA, 120 bp, Artificial Sequence
  ENSG00000010327_2 (sequence is synthesized)
tccctcaggctggctgcgggagctcccggatcagataacccaggactgccgctacgaagtacagctggggggctctatggtgtccatgagcggctgcagacggaagtgccggaagcaagt

SEQ ID NO: 12424 - DNA, 120 bp, Artificial Sequence
  ENSG00000010327_3 (sequence is synthesized)
ggtgcagaaggcctgctgccctggctactggggttcccggtgccatgaatgccctgggggcgctgagaccccatgcaatggccacgggacctgcttggatggcatggacaggaatgggac

SEQ ID NO: 12425 - DNA, 120 bp, Artificial Sequence
  ENSG00000010327_4 (sequence is synthesized)
ctgtgtgtgccaggaaaacttccgcggctcagcctgccaggagtgccaagaccccaaccggttcgggcctgactgccaatcggtgtgcagctgtgtgcacggagtgtgcaaccatgggcc

SEQ ID NO: 12426 - DNA, 120 bp, Artificial Sequence
  ENSG00000010327_5 (sequence is synthesized)
acgtggggatggaagctgcctgtgctttgctggatacactggcccccactgtgatcaagagctgcccgtctgccaggagctgcgctgtccccagaacacccagtgctccgcagaggctcc

SEQ ID NO: 12427 - DNA, 120 bp, Artificial Sequence
  ENSG00000010327_6 (sequence is synthesized)
cagctgcaggtgcctgcccggctacacacagcagggcagtgaatgccgagcccccaacccctgctggccatcaccctgctcactgctggcccagtgctcggtgagccccaaggggcaggc

SEQ ID NO: 12428 - DNA, 120 bp, Artificial Sequence
  ENSG00000010327_7 (sequence is synthesized)
tcagtgtcactgccctgagaactaccatggcgatgggatggtgtgtctgcccaaggacccatgcactgacaaccttggtggctgccccagcaactctactttgtgtgtgtaccagaagcc

SEQ ID NO: 12429 - DNA, 120 bp, Artificial Sequence
  ENSG00000010327_8 (sequence is synthesized)
gggccaggccttctgcacctgccggccaggcctggtcagcatcaacagcaacgcttctgcgggctgcttcgccttctgctcccccttctcctgcgaccggtctgccacttgccaggtgac

SEQ ID NO: 12430 - DNA, 120 bp, Artificial Sequence
  ENSG00000010327_9 (sequence is synthesized)
cgctgatgggaagaccagctgtgtgtgcagggaaagcgaggtgggggatgggcgtgcctgctacggacacctgctccacgaggtgcagaaggccacgcagacaggccgggtgttcctgca

SEQ ID NO: 12431 - DNA, 120 bp, Artificial Sequence
  ENSG00000010327_10 (sequence is synthesized)
gctgagggtcgccgtggccatgatggaccagggctgccgggaaatccttaccacagcgggccctttcaccgtgctggtgccatccgtctcctccttctcctccaggaccatgaatgcatc

SEQ ID NO: 12432 - DNA, 120 bp, Artificial Sequence
  ENSG00000010327_11 (sequence is synthesized)
ccttgcccagcagctctgtagacagcacatcatcgcagggcagcacatcctggaggacacaaggacccaacaaacacgaaggtggtggacgctggccgggcaggagatcaccgtcacctt

SEQ ID NO: 12433 - DNA, 120 bp, Artificial Sequence
  ENSG00000010327_12 (sequence is synthesized)
taaccaattcacgaaatactcctacaagtacaaagaccagccccagcagacgttcaacatctacaaggccaacaacatagcagctaatggcgtcttccacgtggtcactggcctgcggtg

SEQ ID NO: 12434 - DNA, 120 bp, Artificial Sequence
  ENSG00000010327_13 (sequence is synthesized)
gcaggccccctctgggacccctggggatcccaagagaactatcggacagatcctcgcctctaccgaggccttcagccgctttgaaaccatcctggagaactgtgggctgccctccatcct

SEQ ID NO: 12435 - DNA, 120 bp, Artificial Sequence
  ENSG00000010327_14 (sequence is synthesized)
ggacggacctgggcccttcacagtctttgccccaagcaatgaggctgtggacagcttgcgtgacggccgcctgatctacctcttcacagcgggtctctctaaactgcaggagttggtgcg

SEQ ID NO: 12436 - DNA, 120 bp, Artificial Sequence
  ENSG00000010327_15 (sequence is synthesized)
gtaccacatctacaaccacggccagctgaccgttgagaagctcatctccaagggtcggatcctcaccatggcgaaccaggtcctggctgtgaacatttctgaggaggggcgcatcctgct

SEQ ID NO: 12437 - DNA, 120 bp, Artificial Sequence
  ENSG00000010327_16 (sequence is synthesized)
gggacccgagggggtcccgctgcagagggtagacgtgatggccgccaatggtgtgatccacatgctggacggcatcctgctgcccccgaccatcctgcccatcctgcccaagcactgcag

SEQ ID NO: 12438 - DNA, 120 bp, Artificial Sequence
  ENSG00000010327_17 (sequence is synthesized)
cgaggagcagcacaagattgtggcgggctcctgtgtggactgccaagccctgaacaccagcacgtgtccccccaacagtgtgaagctggacatcttccccaaggagtgtgtctacatcca

SEQ ID NO: 12439 - DNA, 120 bp, Artificial Sequence
  ENSG00000010327_18 (sequence is synthesized)
tgacccaacggggctcaatgtgctaaagaagggctgtgccagctactgcaaccaaaccatcatggaacaaggctgctgcaaaggttttttcgggcctgactgcacgcagtgtcctggggg

SEQ ID NO: 12440 - DNA, 120 bp, Artificial Sequence
  ENSG00000010327_19 (sequence is synthesized)
cttctccaacccctgctatggcaaaggcaattgcagtgatgggatccagggcaatggggcctgcctctgcttcccagactacaagggcatcgcctgccacatctgctcgaacccaaacaa

SEQ ID NO: 12441 - DNA, 120 bp, Artificial Sequence
  ENSG00000010327_20 (sequence is synthesized)
gcatggagagcaatgccaggaagactgcggctgtgtccatggtctctgcgacaaccgcccaggcagtgggggggtgtgccagcagggcacgtgtgcccctggcttcagtggccggttctg

SEQ ID NO: 12442 - DNA, 120 bp, Artificial Sequence
  ENSG00000010327_21 (sequence is synthesized)
caacgagtccatgggggactgtgggcccacagggctggcccagcactgccacctgcatgcccgctgtgttagccaggagggtgttgccagatgtcgctgtcttgatggctttgagggtga

SEQ ID NO: 12443 - DNA, 120 bp, Artificial Sequence
  ENSG00000010327_22 (sequence is synthesized)
tggcttctcctgcacacctagcaacccctgctcccacccggaccgtggaggctgctcagagaatgctgagtgtgtccctgggtccctgggcacccaccactgcacatgccacaaaggctg

SEQ ID NO: 12444 - DNA, 120 bp, Artificial Sequence
  ENSG00000010327_23 (sequence is synthesized)
gagtggggatggccgcgtctgtgtggctattgacgagtgtgagctggacatgagaggtggctgccacaccgatgccctctgcagctatgtgggccccgggcagagccgatgcacctgcaa

SEQ ID NO: 12445 - DNA, 120 bp, Artificial Sequence
  ENSG00000010327_24 (sequence is synthesized)
gctgggctttgccggggatggctaccagtgcagccccatcgacccctgccgggcaggcaatggcggctgccacggcctggccacctgccgggcagtggggggaggtcagcgggtctgcac

SEQ ID NO: 12446 - DNA, 120 bp, Artificial Sequence
  ENSG00000010327_25 (sequence is synthesized)
gtgcccccctggctttgggggtgatggcttcagctgttatggagacatcttccgggagctggaggcaaatgcccacttctccatcttctaccaatggcttaagagtgccggcatcacgct

SEQ ID NO: 12447 - DNA, 120 bp, Artificial Sequence
  ENSG00000010327_26 (sequence is synthesized)
tcctgccgaccgccgagtcacagccctggtgccctccgaggctgcagtccgtcagctgagccccgaggaccgagctttctggctgcagccaaggacgctgccgaacctggtcagggccca

SEQ ID NO: 12448 - DNA, 120 bp, Artificial Sequence
  ENSG00000010327_27 (sequence is synthesized)
ttttctccagggtgccctcttcgaggaggagctggcccggctgggtgggcaggaagtggccaccctgaaccccaccacacgctgggagattcgcaacattagtgggagggtctgggtgca

SEQ ID NO: 12449 - DNA, 120 bp, Artificial Sequence
  ENSG00000010327_28 (sequence is synthesized)
gaatgccagcgtggatgtggctgacctccttgccaccaacggtgtcctacacatcctcagccaggtcttactgcccccccgaggggatgtgcccggtgggcaggggttgctgcagcagct

SEQ ID NO: 12450 - DNA, 120 bp, Artificial Sequence
  ENSG00000010327_29 (sequence is synthesized)
ggacttggtgcctgccttcagcctcttccgggaattgctgcagcaccatgggttggtgccccagattgaggctgccactgcctacaccatctttgtgcccaccaaccgctccctggaggc

SEQ ID NO: 12451 - DNA, 120 bp, Artificial Sequence
  ENSG00000010327_30 (sequence is synthesized)
ccagggcaacagcagtcacctggacgcagacacagtgcggcaccatgtggtcctgggggaggccctctccatggaaaccctgcggaagggtggacaccgcaactccctcctgggccctgc

SEQ ID NO: 12452 - DNA, 120 bp, Artificial Sequence
  ENSG00000010327_31 (sequence is synthesized)
ccactggatcgtcttctacaaccacagtggccagcctgaggtgaaccatgtgccactggaaggccccatgctggaggcccctggccgctcgctgattggtctgtcgggggtcctgacggt

SEQ ID NO: 12453 - DNA, 120 bp, Artificial Sequence
  ENSG00000010327_32 (sequence is synthesized)
gggctcaagtcgctgcctgcatagccacgctgaggccctgcgggagaaatgtgtaaactgcaccaggagattccgctgcactcagggcttccagctgcaggacacacccaggaagagctg

SEQ ID NO: 12454 - DNA, 120 bp, Artificial Sequence
  ENSG00000010327_33 (sequence is synthesized)
gatctggcttctccttctcccggggctgctcttacacatgtgccaagaagatccaggtgccggactgctgccctggtttctttggcacgctgtgtgagccatgcccagggggtctagggg

SEQ ID NO: 12455 - DNA, 120 bp, Artificial Sequence
  ENSG00000010327_34 (sequence is synthesized)
gggtgtgctcaggccatgggcagtgccaggacaggttcctgggcagcggggagtgccactgccacgagggcttccatggaacggcctgtgaggtgtgtgagctgggccgctacgggccca

SEQ ID NO: 12456 - DNA, 120 bp, Artificial Sequence
  ENSG00000010327_35 (sequence is synthesized)
actgcaccggagtgtgtgactgtgcccatgggctgtgccaggaggggctgcaaggggacggaagctgtgtctgtaacgtgggctggcagggcctccgctgtgaccagaaaatcaccagcc

SEQ ID NO: 12457 - DNA, 120 bp, Artificial Sequence
  ENSG00000010327_36 (sequence is synthesized)
ctcagtgccctaggaagtgcgaccccaatgccaactgcgtgcaggactcggccggagcctccacctgcgcctgtgctgcgggatactccggcaatggcatcttctgttcagaggtggacc

SEQ ID NO: 12458 - DNA, 120 bp, Artificial Sequence
  ENSG00000010327_37 (sequence is synthesized)
cctgcgcccacggccatgggggctgctcccctcatgccaactgtaccaaggtggcacctgggcagcggacatgcacctgccaggatggctacatgggcgacggggagctgtgccaggaaa

SEQ ID NO: 12459 - DNA, 120 bp, Artificial Sequence
  ENSG00000010327_38 (sequence is synthesized)
ttaacagctgtctcatccaccacgggggctgccacattcacgccgagtgcatccccactggcccccagcaggtctcctgcagctgccgtgagggttacagcggggatggcatccggacct

SEQ ID NO: 12460 - DNA, 120 bp, Artificial Sequence
  ENSG00000010327_39 (sequence is synthesized)
gcgagctcctggacccctgctctaagaacaatggaggatgcagcccatatgccacctgcaaaagcacaggggatggccagaggacatgtacctgcgacacagcccacaccgtgggggacg

SEQ ID NO: 12461 - DNA, 120 bp, Artificial Sequence
  ENSG00000010327_40 (sequence is synthesized)
gcctcacctgccgtgcccgagtcggcctggagctcctgagggataagcatgcctcattcttcagcctccgcctcctggaatataaggagctcaagggcgatgggcctttcaccatcttcg

SEQ ID NO: 12462 - DNA, 120 bp, Artificial Sequence
  ENSG00000010327_41 (sequence is synthesized)
tgccgcacgcagatctaatgagcaacctgtcgcaggatgagctggcccggattcgtgcgcatcgccagctggtgtttcgctaccacgtggttggctgtcggcggctgcggagcgaggacc

SEQ ID NO: 12463 - DNA, 120 bp, Artificial Sequence
  ENSG00000010327_42 (sequence is synthesized)
tgctggagcaggggtacgccacggccctctcagggcacccactgcgcttcagcgagagggagggcagcatatacctcaatgacttcgcgcgcgtggtgagcagcgaccatgaggccgtga

SEQ ID NO: 12464 - DNA, 120 bp, Artificial Sequence
  ENSG00000010327_43 (sequence is synthesized)
acggcatcctgcacttcattgaccgtgtcctgctgccccccgaggcgctgcactgggagcctgatgatgctcccatcccgaggagaaatgtcaccgccgccgcccagggcttcggttaca

SEQ ID NO: 12465 - DNA, 120 bp, Artificial Sequence
  ENSG00000010327_44 (sequence is synthesized)
agatcttcagcggcctcctgaaggtggccggcctcctgcccctgcttcgagaggcatcccataggcccttcacaatgctgtggcccacagacgccgcctttcgagctctgcctccggatc

SEQ ID NO: 12466 - DNA, 120 bp, Artificial Sequence
  ENSG00000010327_45 (sequence is synthesized)
gccaggcctggctgtaccatgaggaccaccgtgacaagctagcagccattctgcggggccacatgattcgcaatgtcgaggccttggcatctgacctgcccaacctgggcccacttcgaa

SEQ ID NO: 12467 - DNA, 120 bp, Artificial Sequence
  ENSG00000010327_46 (sequence is synthesized)
ccatgcatgggacccccatctctttctcctgcagccgaacgcgggccggtgagctcatggtgggtgaggatgatgctcgcattgtgcagcggcacttgccctttgagggtggcctggcct

SEQ ID NO: 12468 - DNA, 120 bp, Artificial Sequence
  ENSG00000010327_47 (sequence is synthesized)
atggcatcgaccagctgctggagccacctggccttggtgctcgctgtgaccactttgagacccggcccctgcgactgaacacctgcagcatctgtgggctggagccaccctgtcctgagg

SEQ ID NO: 12469 - DNA, 120 bp, Artificial Sequence
  ENSG00000010327_48 (sequence is synthesized)
ggtcacaggagcagggcagccctgaggcctgctggcgcttctacccgaagttctggacgtcccctccgctgcactctttgggattacgcagcgtctgggtccaccccagcctttggggta

SEQ ID NO: 12470 - DNA, 120 bp, Artificial Sequence
  ENSG00000010327_49 (sequence is synthesized)
ggccccaaggcctgggcaggggctgccaccgcaattgtgtcaccaccacctggaagcccagctgctgccctggtcactatggcagtgagtgccaagcttgccctggcggccccagcagcc

SEQ ID NO: 12471 - DNA, 120 bp, Artificial Sequence
  ENSG00000010327_50 (sequence is synthesized)
cttgtagtgaccgtggcgtgtgcatggacggcatgagtggcagtgggcagtgtctgtgccgttcaggttttgctgggacagcctgtgaactctgtgctcctggtgcctttgggccccatt

SEQ ID NO: 12472 - DNA, 120 bp, Artificial Sequence
  ENSG00000010327_51 (sequence is synthesized)
gtcaagcctgccgctgcactgtgcatggccgctgtgatgagggccttgggggctctggctcctgcttctgtgatgaaggctggactgggccacgctgtgaggtgcaactggagctgcagc

SEQ ID NO: 12473 - DNA, 120 bp, Artificial Sequence
  ENSG00000010327_52 (sequence is synthesized)
ctgtgtgtaccccaccctgtgcacccgaggctgtgtgccgtgcaggcaacagctgtgagtgcagcctgggctatgaaggggatggccgtgtgtgtacagtggcagacctgtgccaggacg

SEQ ID NO: 12474 - DNA, 120 bp, Artificial Sequence
  ENSG00000010327_53 (sequence is synthesized)
ggcatggtggctgcagtgagcacgccaactgtagccaggtaggaacaatggtcacttgtacctgcctgcccgactacgagggtgatggctggagctgccgggcccgcaacccctgcacag

SEQ ID NO: 12475 - DNA, 120 bp, Artificial Sequence
  ENSG00000010327_54 (sequence is synthesized)
atggccaccgcgggggctgcagcgagcacgccaactgcttgagcaccggcctgaacacacggcgctgtgagtgccacgcaggctacgtaggcgatggactgcagtgtctggaggagtcgg

SEQ ID NO: 12476 - DNA, 120 bp, Artificial Sequence
  ENSG00000010327_55 (sequence is synthesized)
aaccacctgtggaccgctgcttgggccagccaccgccctgccactcagatgccatgtgcactgacctgcacttccaggagaaacgggctggcgttttccacctccaggccaccagcggcc

SEQ ID NO: 12477 - DNA, 120 bp, Artificial Sequence
  ENSG00000010327_56 (sequence is synthesized)
cttatggtctgaacttttcggaggctgaggcggcatgcgaagcacagggagccgtccttgcttcattccctcagctctctgctgcccagcagctgggcttccacctgtgcctcatgggct

SEQ ID NO: 12478 - DNA, 120 bp, Artificial Sequence
  ENSG00000010327_57 (sequence is synthesized)
ggctggccaatggctccactgcccaccctgtggttttccctgtggcggactgtggcaatggtcgggtgggcatagtcagcctgggtgcccgcaagaacctctcagaacgctgggatgcct

SEQ ID NO: 12479 - DNA, 120 bp, Artificial Sequence
  ENSG00000010327_58 (sequence is synthesized)
actgcttccgtgtgcaagatgtggcctgccgatgccgaaatggcttcgtgggtgacgggatcagcacgtgcaatgggaagctgctggatgtgctggctgccactgccaacttctccacct

SEQ ID NO: 12480 - DNA, 120 bp, Artificial Sequence
  ENSG00000010327_59 (sequence is synthesized)
tctatgggatgctattgggctatgccaatgccacccagcggggtctcgacttcctggacttcctggatgatgagctcacgtataagacactcttcgtccctgtcaatgaaggctttgtgg

SEQ ID NO: 12481 - DNA, 120 bp, Artificial Sequence
  ENSG00000010327_60 (sequence is synthesized)
acaacatgacgctgagtggcccagacttggagctgcatgcctccaacgccaccctcctaagtgccaacgccagccaggggaagttgcttccggcccactcaggcctcagcctcatcatca

SEQ ID NO: 12482 - DNA, 120 bp, Artificial Sequence
  ENSG00000010327_61 (sequence is synthesized)
gtgacgcaggccctgacaacagttcctgggcccctgtggccccagggacagttgtggttagccgtatcattgtgtgggacatcatggccttcaatggcatcatccatgctctggccagcc

SEQ ID NO: 12483 - DNA, 120 bp, Artificial Sequence
  ENSG00000010327_62 (sequence is synthesized)
ccctcctggcacccccacagccccaggcagtgctggcgcctgaagccccacctgtggcggcaggcgtgggggctgtgcttgccgctggagcactgcttggcttggtggccggagctctct

SEQ ID NO: 12484 - DNA, 120 bp, Artificial Sequence
  ENSG00000010327_63 (sequence is synthesized)
acctccgtgcccgaggcaagcccatgggctttggcttctctgccttccaggcggaagatgatgctgatgacgacttctcaccgtggcaagaagggaccaaccccaccctggtctctgtcc

SEQ ID NO: 12485 - DNA, 120 bp, Artificial Sequence
  ENSG00000010327_64 (sequence is synthesized)
ccaaccctgtctttggcagcgacaccttttgtgaacccttcgatgactcactgctggaggaggacttccctgacacccagaggatcctcacagtcaagtgacgaggctggggctgaaagc

SEQ ID NO: 12486 - DNA, 120 bp, Artificial Sequence
  ENSG00000010327_65 (sequence is synthesized)
agaagcatgcacagggaggagaccacttttattgcttgtctgggtggatggggcaggaggggctgagggcctgtcccagacaataaaggtgccctcagcggatgtgggccatgtcaccaa

SEQ ID NO: 12487 - DNA, 120 bp, Artificial Sequence
  ENSG00000010327_66 (sequence is synthesized)
cttccagggtgtgtccccctgcccactcccagtacccatttcattcctcagagccggccagctgaccatgcacccctccattctgcagagaaacgggctggcgttttccacctccaggcc

SEQ ID NO: 12488 - DNA, 120 bp, Artificial Sequence
  ENSG00000010327_67 (sequence is synthesized)
aaaaaacgtctgcctaaagatgggtctgggggctctcaagaagggaaacgaagccccaggaggagggacgaaggccaaggggagtggaggaagatttgcctaaaaatgggtctgggggct

SEQ ID NO: 12489 - DNA, 120 bp, Artificial Sequence
  ENSG00000010327_68 (sequence is synthesized)
gtgactggctgtgtgtctgggccaagcctgccactctggccttgggattctcatatctatgcagtggaaagttggatcaaattatttctcatattttaattaaaaataattagagaggcc

SEQ ID NO: 12490 - DNA, 120 bp, Artificial Sequence
  ENSG00000010327_69 (sequence is synthesized)
gagaagcactcacttatccatgcccctgtggccccacctgggtggtggagataggcggggaggaaggggtaaaggcgaggggcaggaggggtttatggggcacctgctatgtgctaggcc

SEQ ID NO: 12491 - DNA, 120 bp, Artificial Sequence
  ENSG00000010327_70 (sequence is synthesized)
ctgtgctcagctctgggccaggcagagcagggaggtgggtgggagccccggaagccaatgtggggaggctgggtgggggctgtgcaagggagccttttccatcaccctgcccaccctctg

SEQ ID NO: 12492 - DNA, 120 bp, Artificial Sequence
  ENSG00000010327_71 (sequence is synthesized)
ttccatggaacggcctgtgaggtgtgtgagctgggccgctacgggcccaactgcaccggaggtgaggactggggaggggcgggggtgggcctcctggcagcagagagcagcctggagacc

SEQ ID NO: 12493 - DNA, 120 bp, Artificial Sequence
  ENSG00000010327_72 (sequence is synthesized)
actccggcaatggcatcttctgttcaggtccagccacacggatgcccagggccctccctgaaattttggggtggctgtccccacagagcccccttcacttcctctaggcccagcccccct

SEQ ID NO: 12494 - DNA, 120 bp, Artificial Sequence
  ENSG00000010327_73 (sequence is synthesized)
cactgtcccatctcaggactcacccttccctctgaccttttcctttctctcacgccctcctctcctgtcctgcctccggccccgtgcctgctcctgaggactctctggccatctcccctt

SEQ ID NO: 12495 - DNA, 120 bp, Artificial Sequence
  ENSG00000010327_74 (sequence is synthesized)
atttgatcctgattctggccctgaccatgacactgagcctgacccctgattgtacctgggcctgaccccagctatgacccatgaaactagccctgaccccaactcagaccccgcggcttt

SEQ ID NO: 12496 - DNA, 120 bp, Artificial Sequence
  ENSG00000010327_75 (sequence is synthesized)
caggtgctgggacaggcaccaggccctgaatgggggccgccccaaatctgagctgaccctcgcccccccaggagctcctgagggataagcatgcctcattcttcagcctccgcctcctgg

SEQ ID NO: 12497 - DNA, 120 bp, Artificial Sequence
  ENSG00000010327_76 (sequence is synthesized)
tgagtggccagcttgggcctctgtgacctgcaagtcccacccctctctggacttctgtccccatctggtcagggggttggctggtttgttctctctgagtccaggtcttccccaggagat

SEQ ID NO: 12498 - DNA, 120 bp, Artificial Sequence
  ENSG00000010327_77 (sequence is synthesized)
ggtactgctcccgtgtgggcctgtcattgtggacacacatgcacgtgtaagtgtgtgcaagtgtgtatgcgtacctgtgtgtgcatacccacctgtgtgcacactgtcccgtgtgagcct

SEQ ID NO: 12499 - DNA, 120 bp, Artificial Sequence
  ENSG00000010327_78 (sequence is synthesized)
gtgtgaactcatgtgtgcacaagccacatctgtgtgcatgtgcaccccaggttgagcacatgggtgtgcttatgtgtgcccacattcctgacagcagtgtgcacagttgagatgtgtgca

SEQ ID NO: 12500 - DNA, 120 bp, Artificial Sequence
  ENSG00000010327_79 (sequence is synthesized)
cacacatgcctgcctgggatggtcacagatgagtgtgggtgagtgtggagccccttcctgctctgtggcacagccccctgcctttgctaactagtctctgactgggcagcgactgccaca

SEQ ID NO: 12501 - DNA, 120 bp, Artificial Sequence
  ENSG00000010361_0 (sequence is synthesized)
gcctgaatagggtttgagggtctgtttgagttgggtgaagaaggcgggaagttaatcctcttccaatcagctccccatctcgccctctggcggctccggaccacaggccgagttactctg

SEQ ID NO: 12502 - DNA, 120 bp, Artificial Sequence
  ENSG00000010361_1 (sequence is synthesized)
attaccgccatgctccaagacccgcactgacagtccccacgtgagggaccgcggtgggagtcctaaatgggggaggaggggacgggcggcactgtgcatctgctgtgcctcgcggcctcc

SEQ ID NO: 12503 - DNA, 120 bp, Artificial Sequence
  ENSG00000010361_2 (sequence is synthesized)
agcggggtccccctattctgcaggagcagtcgcggcggcgcccccgcccgtcagcagctcccgttctctgtcatcggttccctcaatggagtccacatgtttgggcagaatctggaggtg

SEQ ID NO: 12504 - DNA, 120 bp, Artificial Sequence
  ENSG00000010361_3 (sequence is synthesized)
cagctgagctctgcgaggaccgagaacacgactgtggtgtggaaaagcttccatgacagcatcaccctcattgttctgtcatctgaggtgggcatctctgagctgaggctggagagacta

SEQ ID NO: 12505 - DNA, 120 bp, Artificial Sequence
  ENSG00000010361_4 (sequence is synthesized)
ctccaaatggtgtttggagccatggtccttcttgtgggacttgaagaactgaccaatatccgcaacgtggagagactgaagaaggacttgagggccagttattgcctcatcgacagcttc

SEQ ID NO: 12506 - DNA, 120 bp, Artificial Sequence
  ENSG00000010361_5 (sequence is synthesized)
ctgggggactcggagctcatcggggacctgacccagtgtgtggactgcgtgattcctccagaggggtccctcttgcaggaagccctctccgggttcgctgaggccgcgggcacgaccttc

SEQ ID NO: 12507 - DNA, 120 bp, Artificial Sequence
  ENSG00000010361_6 (sequence is synthesized)
gtcagtctggtggtgtccggccgggtggtggcagcaacagagggttggtggcggctggggacgcccgaggccgtgctgctcccctggctggtggggtccctgccgccgcagaccgctcgc

SEQ ID NO: 12508 - DNA, 120 bp, Artificial Sequence
  ENSG00000010361_7 (sequence is synthesized)
ctcctgaccctgactctgctgccgagcctggagctgtgtctactctgcgggccgagcccacccctcagccagttgtatccacagcttctggagcgctggtggcagccactgctggacccg

SEQ ID NO: 12509 - DNA, 120 bp, Artificial Sequence
  ENSG00000010361_8 (sequence is synthesized)
ttgcgggcctgtctgccgttgggaccccgggcgctgcccagtggcttcccccttcacacagacatcctcgggctgctgctcctccacctggaactgaagcgctgcctcttcaccgtggag

SEQ ID NO: 12510 - DNA, 120 bp, Artificial Sequence
  ENSG00000010361_9 (sequence is synthesized)
cccttgggggataaagagccttcaccagaacagcgccggcgcctcctccgaaacttctataccctggtcacctccacgcacttcccaccagagccagggccaccagagaagacagaagat

SEQ ID NO: 12511 - DNA, 120 bp, Artificial Sequence
  ENSG00000010361_10 (sequence is synthesized)
gaggtctaccaggcccagctgcccagagcttgctacctggtgttggggactgaggaaccaggcacaggagtgcgtctggtggccttgcagctggggcttcggcggctgctgctgctgctg

SEQ ID NO: 12512 - DNA, 120 bp, Artificial Sequence
  ENSG00000010361_11 (sequence is synthesized)
tctccccagagtcccacccatgggctgcgaagcctggccacccacactctgcatgccctcaccccacttctttgactacctagcagtgggtgatggacacagacatggggctgttagcgt

SEQ ID NO: 12513 - DNA, 120 bp, Artificial Sequence
  ENSG00000010361_12 (sequence is synthesized)
ctctctgtttattcgctcacaataatacacagcccctggatggggagggggtaggaggggctacaacagggtggggtgggaggggaggagacatccacttccctggcccctctcccctct

SEQ ID NO: 12514 - DNA, 120 bp, Artificial Sequence
  ENSG00000010361_13 (sequence is synthesized)
gtgcttgggggggaaagggagggagggggactccccctaaccccccagaatgtaaacagcagcagatgaacaaaaataaaaatacaaaaggccggaggaaagtcccaggcatcccccaaa

SEQ ID NO: 12515 - DNA, 120 bp, Artificial Sequence
  ENSG00000010361_14 (sequence is synthesized)
tgcgtgattcctccagaggggtccctcttgcaggtactggggatgctatggaaactcttacacctgttctgctggccctggctcagtcctcatcctctttcttctggaccattgtcccaa

SEQ ID NO: 12516 - DNA, 120 bp, Artificial Sequence
  ENSG00000010361_15 (sequence is synthesized)
gctcagtcctcatcctctttcttctggaccattgtcccaacctcctcctatcctctcagcttccagtcctatccccacctggtcccagaagaatcttttttcttttttttttttcttttc

SEQ ID NO: 12517 - DNA, 120 bp, Artificial Sequence
  ENSG00000010361_16 (sequence is synthesized)
aacaggcctggatgaacggtagctgctgcggttacattattagcttcagtttgcccgcccaggctagatgtttaatcagatttcacagacttcacagtgtgagttggggatgtgacttcg

SEQ ID NO: 12518 - DNA, 120 bp, Artificial Sequence
  ENSG00000010361_17 (sequence is synthesized)
gcgggaagttaatcctcttccaatcagctccccatctcgccctctggcggctccggaccacaggccgagttactctgattaccgccatgctccaagacccgcactgacagtccccacctc

SEQ ID NO: 12519 - DNA, 120 bp, Artificial Sequence
  ENSG00000010361_18 (sequence is synthesized)
aacgtgggacagggacagggcctgggtgatagtccctgttgaagatgaccccggaggccttccagctctctaaaagcagctgttaatttggctatgggatctttagcaagccagttaccc

SEQ ID NO: 12520 - DNA, 120 bp, Artificial Sequence
  ENSG00000010361_19 (sequence is synthesized)
aggtcgcacaaaatgggagtaggaggtggggttggaggatccggaggaacccagtatgcactgggccatagggcagtggttttccttgagatctgagcattgatgcagatgggaagggag

SEQ ID NO: 12521 - DNA, 120 bp, Artificial Sequence
  ENSG00000010361_20 (sequence is synthesized)
gggaagggaggtccccgcctggcttcagaatctcctggatcatagtcaacaatagttaacactgagacctcacctcttcccagtgcctttacacgtaatgaaagaatgaaatcacttcat

SEQ ID NO: 12522 - DNA, 120 bp, Artificial Sequence
  ENSG00000010361_21 (sequence is synthesized)
aaatacattccaggtggattaaaaattggttactaggcaacgatcgctggactcaaccaccctcgaaggttgtaggggagatggtgtttttctcgatttcgccccaaggagggtgctcgg

SEQ ID NO: 12523 - DNA, 120 bp, Artificial Sequence
  ENSG00000010361_22 (sequence is synthesized)
acttcgacgtgccgccatctttgagcagggcacagctgtttacagccttggaatggatatcaggctgaatggtggttgcttggcaacgccccgccacggtcgccatctttgactcccgtt

SEQ ID NO: 12524 - DNA, 120 bp, Artificial Sequence
  ENSG00000010379_0 (sequence is synthesized)
agataattcttctcccctgactggacctctggcagcagcttcactaaggtgggatggatagcagggtctcaggcacaaccagtaatggagagacaaaaccagtgtatccagtcatggaaa

SEQ ID NO: 12525 - DNA, 120 bp, Artificial Sequence
  ENSG00000010379_1 (sequence is synthesized)
agaaggaggaagatggcaccctggagcgggggcactggaacaacaagatggagtttgtgctgtcagtggctggggagatcattggcttaggcaacgtctggaggtttccctatctctgct

SEQ ID NO: 12526 - DNA, 120 bp, Artificial Sequence
  ENSG00000010379_2 (sequence is synthesized)
acaaaaatgggggaggtgccttcttcatcccctacctcgtcttcctctttacctgtggcattcctgtcttccttctggagacagcactaggccagtacactagccagggaggcgtcacag

SEQ ID NO: 12527 - DNA, 120 bp, Artificial Sequence
  ENSG00000010379_3 (sequence is synthesized)
cctggaggaagatctgccccatctttgagggcattggctatgcctcccagatgatcgtcatcctcctcaacgtctactacatcattgtgttggcctgggccctgttctacctcttcagca

SEQ ID NO: 12528 - DNA, 120 bp, Artificial Sequence
  ENSG00000010379_4 (sequence is synthesized)
gcttcaccatcgacctgccctggggcggctgctaccatgagtggaacacagaacactgtatggagttccagaagaccaacggctccctgaatggtacctctgagaatgccacctctcctg

SEQ ID NO: 12529 - DNA, 120 bp, Artificial Sequence
  ENSG00000010379_5 (sequence is synthesized)
tcatcgagttctgggagcggcgggtcttgaagatctctgatgggatccagcacctgggggccctgcgctgggagctggctctgtgcctcctgctggcctgggtcatctgctacttctgca

SEQ ID NO: 12530 - DNA, 120 bp, Artificial Sequence
  ENSG00000010379_6 (sequence is synthesized)
tctggaagggggtgaagtccacaggcaaggtggtgtacttcacggccacatttccttacctcatgctggtggtcctgttaattcgaggggtgacgttgcctggggcagcccaaggaattc

SEQ ID NO: 12531 - DNA, 120 bp, Artificial Sequence
  ENSG00000010379_7 (sequence is synthesized)
agttttacctgtacccaaacctcacgcgtctgtgggatccccaggtgtggatggatgcaggcacccagatattcttctccttcgccatctgtcttgggtgcctgacagccctgggcagct

SEQ ID NO: 12532 - DNA, 120 bp, Artificial Sequence
  ENSG00000010379_8 (sequence is synthesized)
acaacaagtaccacaacaactgctacagggactgcatcgccctctgcttcctcaacagcggcaccagctttgtggccggctttgccatcttctccatcctgggcttcatgtctcaggagc

SEQ ID NO: 12533 - DNA, 120 bp, Artificial Sequence
  ENSG00000010379_9 (sequence is synthesized)
gtcaggccctggcctggctttcatcgcttacccgcgggctgtggtgatgctgcccttctctcctctctgggcctgctgtttcttcttcatggtcgttctcctgggactggatagccagtt

SEQ ID NO: 12534 - DNA, 120 bp, Artificial Sequence
  ENSG00000010379_10 (sequence is synthesized)
tgtgtgtgtagaaagcctggtgacagcgctggtggacatgtaccctcacgtgttccgcaagaagaaccggagggaagtcctcatccttggagtatctgtcgtctccttccttgtggggct

SEQ ID NO: 12535 - DNA, 120 bp, Artificial Sequence
  ENSG00000010379_11 (sequence is synthesized)
gatcatgctcacagagggcggaatgtacgtgttccagctctttgactactatgcggccagtggcatgtgcctcctgttcgtggccatcttcgagtccctctgtgtggcttgggtttacgg

SEQ ID NO: 12536 - DNA, 120 bp, Artificial Sequence
  ENSG00000010379_12 (sequence is synthesized)
agccaagcgcttctacgacaacatcgaagacatgattgggtacaggccatggcctcttatcaaatactgttggctcttcctcacaccagctgtgtgcacagccacctttctcttctccct

SEQ ID NO: 12537 - DNA, 120 bp, Artificial Sequence
  ENSG00000010379_13 (sequence is synthesized)
gataaagtacactccgctgacctacaacaagaagtacacgtacccgtggtggggcgatgccctgggctggctcctggctctgtcctccatggtctgcattcctgcctggagcctctacag

SEQ ID NO: 12538 - DNA, 120 bp, Artificial Sequence
  ENSG00000010379_14 (sequence is synthesized)
actcggaaccctcaagggccccttcagagagagaatccgtcagctcatgtgcccagccgaggacctgccccagcggaacccagcaggaccctcggctcccgccacccccaggacctcact

SEQ ID NO: 12539 - DNA, 120 bp, Artificial Sequence
  ENSG00000010379_15 (sequence is synthesized)
gctcagactcacagagctagagtctcactgctagggggcaggcccttggatggtgcctgtgtgcctggccttggggatggctgtggagggaacgtggcagaagcagccccatgtgcttcc

SEQ ID NO: 12540 - DNA, 120 bp, Artificial Sequence
  ENSG00000010379_16 (sequence is synthesized)
ctgcccccgacctggagtggataagacaagaggggtattttggagtccacctgctgagctggaggcctcccactgcaacttttcagctcaggggttgttgaacagatgtgaaaggccagt

SEQ ID NO: 12541 - DNA, 120 bp, Artificial Sequence
  ENSG00000010379_17 (sequence is synthesized)
gccaagagtgtccctctgagacccttgggaagctgggtgggggctggtaggtggggcgagacttgctggcttcgggccctctcatccttcattccattaaatccacattcttcccgctga

SEQ ID NO: 12542 - DNA, 120 bp, Artificial Sequence
  ENSG00000010379_18 (sequence is synthesized)
agctcctgcccctcccattcccggactcctgccctcactgggggctgtcacccaggagttctctaagctgtggccccgttgaggatgggaggcgatgacccagcgaggatttgatgtggc

SEQ ID NO: 12543 - DNA, 120 bp, Artificial Sequence
  ENSG00000010379_19 (sequence is synthesized)
tcccttccttgattctccgcctctcctagactcacatacttctggtttttgggactggaagagagcgagaaaggcaggaaggacacctccagggtaatctgatcttggaactgacgatgg

SEQ ID NO: 12544 - DNA, 120 bp, Artificial Sequence
  ENSG00000010379_20 (sequence is synthesized)
acaaaaatgggggaggtgagatgagagcccttgtgccaccccacccactcctggaaggaggatacttccatctcctgcacttacggcccctctggggagtcccatagatgtatagaattc

SEQ ID NO: 12545 - DNA, 120 bp, Artificial Sequence
  ENSG00000010379_21 (sequence is synthesized)
tggaggtaggaggacgcttagaggtcattaaggacactctgtaagagactaagacctagaaaggttacgtgactatcccagggctctttctattataacgtggcatcgtagaaatatgag

SEQ ID NO: 12546 - DNA, 120 bp, Artificial Sequence
  ENSG00000010379_22 (sequence is synthesized)
tgagagtttggattctggctctgctacttaacactctgtgtgatcttggacaagttacttaagctctcagagcatcaattgccgctcctgcaaattgagataataatgcctgcctttcaa

SEQ ID NO: 12547 - DNA, 120 bp, Artificial Sequence
  ENSG00000010379_23 (sequence is synthesized)
ggtcattgtaaggattagagacaatgtgtgtaaagcacttaataaatagtagctctgctgatgatgacgttgataaccaaactgttctgtggtcttaagtaataaatagtagctctgctg

SEQ ID NO: 12548 - DNA, 120 bp, Artificial Sequence
  ENSG00000010379_24 (sequence is synthesized)
atgatgacgttgataaccaaactgttctgtggtcttaagtaataagtagtagctctgttgatgatgacgttgataaccaaactgttctgtggtcttaagtaataagtagtagctctgctg

SEQ ID NO: 12549 - DNA, 120 bp, Artificial Sequence
  ENSG00000010379_25 (sequence is synthesized)
atgatgacgttgataaccaaactgttctgtggtcttaagtaataaatagtagctctgctgatgatgatgttgataaccaaactgttctgtggtcttaagtaataaatagtagctctgctg

SEQ ID NO: 12550 - DNA, 120 bp, Artificial Sequence
  ENSG00000010379_26 (sequence is synthesized)
atgatgacgttgataaccaaactgttctgtggtcttaagtaataaatagtagctctgctgatgatgacgttgataaccaaactgttctgtggtcttaagtaataaatagtagctctgctg

SEQ ID NO: 12551 - DNA, 120 bp, Artificial Sequence
  ENSG00000010379_27 (sequence is synthesized)
gcggaatgtacgtgttccagctctttgactactatgcggccagtggcatgtgcctcctgttcgtggccatcttcgagtccctctgtgtggcttgggtttacggtgagtgactcctcccct

SEQ ID NO: 12552 - DNA, 120 bp, Artificial Sequence
  ENSG00000010379_28 (sequence is synthesized)
acaggtggtgactttgcacaggacgcttacatagaaatgttagcatgccttgaagcagctgacctgaagagcacctttcctgttgccatctgatcatgcttgaggagaatgtatacccaa

SEQ ID NO: 12553 - DNA, 120 bp, Artificial Sequence
  ENSG00000010379_29 (sequence is synthesized)
gcatctatgtacccacatgtccaagtgtgcgggagagagtgagctgcatttgttgagaacactgtatggagttccagaagaccaacggctccctgaatggtacctctgagaatgccacct

SEQ ID NO: 12554 - DNA, 120 bp, Artificial Sequence
  ENSG00000010379_30 (sequence is synthesized)
gtgagctgcatttgttgaggttattacgtgtgggaggatgttttgtacagataaccttagcctggctcctgccaaataccttccttcccattctcctagaatttcaccccactctccagt

SEQ ID NO: 12555 - DNA, 120 bp, Artificial Sequence
  ENSG00000010379_31 (sequence is synthesized)
acgctgaaacacagctgaagtgaaatcatatggtgcctctcaaaattgaattcaggcgactaagagttatttgttgtttgggattacccattagcatgccagatgggatgatggcagagt

SEQ ID NO: 12556 - DNA, 120 bp, Artificial Sequence
  ENSG00000010379_32 (sequence is synthesized)
ggtggcgtcccatgcggtgtggacctacgtggtagagaggggcggctgtgtggcggtttgtcacatctagatccatgttttgcttccctggagccgcattcttttaggactaccttgatt

SEQ ID NO: 12557 - DNA, 120 bp, Artificial Sequence
  ENSG00000010379_33 (sequence is synthesized)
tttgcgtggtcctctgaattctgccaggtagccctgctccggcgtccgtgaaggggccaggacagtgtccgccaggaggggctgtgctcccagacaggaagcaggagaggttgcagccct

SEQ ID NO: 12558 - DNA, 120 bp, Artificial Sequence
  ENSG00000010404_0 (sequence is synthesized)
actcgcgctgcggccagcgcccgggcctgcgggcccgggcggcggctgtgttgcgcagtcttcatgggttcccgacgaggaggtctctgtggctgcggcggcggctgctaactgcgccac

SEQ ID NO: 12559 - DNA, 120 bp, Artificial Sequence
  ENSG00000010404_1 (sequence is synthesized)
ctgctgcagcctgtccccgccgctctgaagcggccgcgtcgaagccgaaatgccgccaccccggaccggccgaggccttctctggctgggtctggttctgagctccgtctgcgtcgccct

SEQ ID NO: 12560 - DNA, 120 bp, Artificial Sequence
  ENSG00000010404_2 (sequence is synthesized)
cggatccgaaacgcaggccaactcgaccacagatgctctgaacgttcttctcatcatcgtggatgacctgcgcccctccctgggctgttatggggataagctggtgaggtccccaaatat

SEQ ID NO: 12561 - DNA, 120 bp, Artificial Sequence
  ENSG00000010404_3 (sequence is synthesized)
tgaccaactggcatcccacagcctcctcttccagaatgcctttgcgcagcaagcagtgtgcgccccgagccgcgtttctttcctcactggcaggagacctgacaccacccgcctgtacga

SEQ ID NO: 12562 - DNA, 120 bp, Artificial Sequence
  ENSG00000010404_4 (sequence is synthesized)
cttcaactcctactggagggtgcacgctggaaacttctccaccatcccccagtacttcaaggagaatggctatgtgaccatgtcggtgggaaaagtctttcaccctgggatatcttctaa

SEQ ID NO: 12563 - DNA, 120 bp, Artificial Sequence
  ENSG00000010404_5 (sequence is synthesized)
ccataccgatgattctccgtatagctggtcttttccaccttatcatccttcctctgagaagtatgaaaacactaagacatgtcgagggccagatggagaactccatgccaacctgctttg

SEQ ID NO: 12564 - DNA, 120 bp, Artificial Sequence
  ENSG00000010404_6 (sequence is synthesized)
ccctgtggatgtgctggatgttcccgagggcaccttgcctgacaaacagagcactgagcaagccatacagttgttggaaaagatgaaaacgtcagccagtcctttcttcctggccgttgg

SEQ ID NO: 12565 - DNA, 120 bp, Artificial Sequence
  ENSG00000010404_7 (sequence is synthesized)
gtatcataagccacacatccccttcagataccccaaggaatttcagaagttgtatcccttggagaacatcaccctggcccccgatcccgaggtccctgatggcctaccccctgtggccta

SEQ ID NO: 12566 - DNA, 120 bp, Artificial Sequence
  ENSG00000010404_8 (sequence is synthesized)
caacccctggatggacatcaggcaacgggaagacgtccaagccttaaacatcagtgtgccgtatggtccaattcctgtggactttcagcggaaaatccgccagagctactttgcctctgt

SEQ ID NO: 12567 - DNA, 120 bp, Artificial Sequence
  ENSG00000010404_9 (sequence is synthesized)
gtcatatttggatacacaggtcggccgcctcttgagtgctttggacgatcttcagctggccaacagcaccatcattgcatttacctcggatcatgggtgggctctaggtgaacatggaga

SEQ ID NO: 12568 - DNA, 120 bp, Artificial Sequence
  ENSG00000010404_10 (sequence is synthesized)
atgggccaaatacagcaattttgatgttgctacccatgttcccctgatattctatgttcctggaaggacggcttcacttccggaggcaggcgagaagcttttcccttacctcgacccttt

SEQ ID NO: 12569 - DNA, 120 bp, Artificial Sequence
  ENSG00000010404_11 (sequence is synthesized)
tgattccgcctcacagttgatggagccaggcaggcaatccatggaccttgtggaacttgtgtctctttttcccacgctggctggacttgcaggactgcaggttccacctcgctgccccgt

SEQ ID NO: 12570 - DNA, 120 bp, Artificial Sequence
  ENSG00000010404_12 (sequence is synthesized)
tccttcatttcacgttgagctgtgcagagaaggcaagaaccttctgaagcattttcgattccgtgacttggaagaggatccgtacctccctggtaatccccgtgaactgattgcctatag

SEQ ID NO: 12571 - DNA, 120 bp, Artificial Sequence
  ENSG00000010404_13 (sequence is synthesized)
ccagtatccccggccttcagacatccctcagtggaattctgacaagccgagtttaaaagatataaagatcatgggctattccatacgcaccatagactataggtatactgtgtgggttgg

SEQ ID NO: 12572 - DNA, 120 bp, Artificial Sequence
  ENSG00000010404_14 (sequence is synthesized)
cttcaatcctgatgaatttctagctaacttttctgacatccatgcaggggaactgtattttgtggattctgacccattgcaggatcacaatatgtataatgattcccaaggtggagatct

SEQ ID NO: 12573 - DNA, 120 bp, Artificial Sequence
  ENSG00000010404_15 (sequence is synthesized)
tttccagttgttgatgccttgagttttgccaaccatggatggcaaatgtgatgtgctcccttccagctggtgagaggaggagttagagctggtcgttttgtgattacccataatattgga

SEQ ID NO: 12574 - DNA, 120 bp, Artificial Sequence
  ENSG00000010404_16 (sequence is synthesized)
agcagcctgagggctagttaatccaaacatgcatcaacaatttggcctgagaatatgtaacagccaaaccttttcgtttagtctttattaaaatttataattggtaattggaccagtttt

SEQ ID NO: 12575 - DNA, 120 bp, Artificial Sequence
  ENSG00000010404_17 (sequence is synthesized)
ttttttaatttccctctttttaaaacagttacggcttatttactgaataaatacaaagcaaacaaactcaagttatgtcatacctttggatacgaagaccatacataataaccaaacata

SEQ ID NO: 12576 - DNA, 120 bp, Artificial Sequence
  ENSG00000010404_18 (sequence is synthesized)
acattatacacaaagaatactttcattatttgtggaatttagtgcatttcaaaaagtaatcatatatcaaactaggcaccacactaagttcctgattattttgtttataatttaataata

SEQ ID NO: 12577 - DNA, 120 bp, Artificial Sequence
  ENSG00000010404_19 (sequence is synthesized)
tatcttatgagccctatatattcaaaatattatgttaacatgtaatccatgtttctttttcaaatctaaagttaaaaaaaaatagcagaagccagtgtcttaaagtctatcttttgtttc

SEQ ID NO: 12578 - DNA, 120 bp, Artificial Sequence
  ENSG00000010404_20 (sequence is synthesized)
taagaccatgggatttcataatctcaagataaaatatgtatgaagtaattaatgtagaatttttacaccaaataataaataatgcttaataaactagagatatgagatgtgtaggaaatt

SEQ ID NO: 12579 - DNA, 120 bp, Artificial Sequence
  ENSG00000010404_21 (sequence is synthesized)
tggttaaacttttttcagatactttctggcccaaataataatttgttagcaaataatatgacccttgaactcaatggccatctattaaaagactgttgttcacactggaaaacatttaaa

SEQ ID NO: 12580 - DNA, 120 bp, Artificial Sequence
  ENSG00000010404_22 (sequence is synthesized)
gatgtgactatatccatgggtggattgaatcactcaaaatatattagtatccttctttagggatggttggttacagacatgtatttattcaggaggcagaaaatattccattttaattgc

SEQ ID NO: 12581 - DNA, 120 bp, Artificial Sequence
  ENSG00000010404_23 (sequence is synthesized)
ttattaaagaaaacattaaattctaaattattttgaggactgtgaagacttttcattagtgtaatattaggtcattgtcaatctcccagaatgtagttctatattctctaaatatgaaag

SEQ ID NO: 12582 - DNA, 120 bp, Artificial Sequence
  ENSG00000010404_24 (sequence is synthesized)
tatccagaaaggccagtggtagtaaaaagcttagtgtatataatctcaaaagggatggaatatttacaactcatatttataacatgttgaatcttctcagttatcagtagtcatcagaag

SEQ ID NO: 12583 - DNA, 120 bp, Artificial Sequence
  ENSG00000010404_25 (sequence is synthesized)
tgtcaatagctttctaaataaatattaaatatctactgtcctgtagtgaaggagtaatttttagtaattttctctttacaaagtctccagtgtttccaggtaaatatttgtgaaacaaaa

SEQ ID NO: 12584 - DNA, 120 bp, Artificial Sequence
  ENSG00000010404_26 (sequence is synthesized)
tacagcaaactacattgttacttcagtgtattgttgccaaaaatgacaagatattatattaaaatcagtaaattttagacagattttaaaaattaattagcctacaatagaggttatatg

SEQ ID NO: 12585 - DNA, 120 bp, Artificial Sequence
  ENSG00000010404_27 (sequence is synthesized)
gtaacacggtgatcttctaagcagttaagtgactgactgttctggcaacaacgacttctccgtgactgaagggccctgttcatttcctgatcctgaagctcgtctctcttttgagcctcc

SEQ ID NO: 12586 - DNA, 120 bp, Artificial Sequence
  ENSG00000010404_28 (sequence is synthesized)
gcttgctttggtcgatggtttccctcagctttttctttgctgttcttcatcctcgttgttgctgtcatcatgttcactgtggcttttacaatacagcctgtaaattccttatgacatagt

SEQ ID NO: 12587 - DNA, 120 bp, Artificial Sequence
  ENSG00000010404_29 (sequence is synthesized)
tcagtgcatttggctttattgcctgctccacagttctttacctttacttggcttagagaaactgtatctttgttgcttcatataacctttccccaaccccactaagctggacataactta

SEQ ID NO: 12588 - DNA, 120 bp, Artificial Sequence
  ENSG00000010404_30 (sequence is synthesized)
ttagtggtcctcccgtcactttatttgtagaaatctctctttcacatgagcaggggttctttcatgtggtttagctgacagcagaactagtgattctagacattttgcatggccctcatt

SEQ ID NO: 12589 - DNA, 90 bp, Artificial Sequence
  ENSG00000010404_31 (sequence is synthesized)
cattttgcatggccctcattcagtggctcacaaacatgagggagcatcagaactacttgaggggcttgttaaaacccagtgcgttagaag

SEQ ID NO: 12590 - DNA, 120 bp, Artificial Sequence
  ENSG00000010404_32 (sequence is synthesized)
gaatcgcttgaaccaggagacggaggtttcagtgaatgaagatcgtgccattgtattccagcctcggcaacacagcaggactgtgattttctttggagactcctagattttctgtggttt

SEQ ID NO: 12591 - DNA, 120 bp, Artificial Sequence
  ENSG00000010404_33 (sequence is synthesized)
tgaactgaatttgttggatgttggcaagtgcctcttatgagctgtttctttatcctgcatttgccccacaaagacttatctggaggtgagcaaagtatgtttggtagtgaggtcacaaag

SEQ ID NO: 12592 - DNA, 120 bp, Artificial Sequence
  ENSG00000010404_34 (sequence is synthesized)
gcaatcagccccttcctccccactcccattgccatcttctcagtccttctccctttctttccaagtagtttacccacccctcctctttcctcccctgtccctaaaataatccacgtgtct

SEQ ID NO: 12593 - DNA, 120 bp, Artificial Sequence
  ENSG00000010404_35 (sequence is synthesized)
tcctaaaatctctctttgatcctgtcctttgataacaccgtcagtgcctactactgggtctagacagacctctgttgagcagtcagagtcttccctgactccacaatgcccctttccttg

SEQ ID NO: 12594 - DNA, 120 bp, Artificial Sequence
  ENSG00000010404_36 (sequence is synthesized)
gctgaccagtatgactactggtccccacctttcccttgcctatccctacctccctcctactaggttgtcccatccctctcttcacccattcattcatgaccatttttcactaccaagctc

SEQ ID NO: 12595 - DNA, 120 bp, Artificial Sequence
  ENSG00000010404_37 (sequence is synthesized)
cccccctcccgaaggaggctgaggtttttgtgactctctagactctattgtgggatggaatgaacattgctaaagaatcttgtgttcgctttactttaaaaaggtatttttttcctaatt

SEQ ID NO: 12596 - DNA, 120 bp, Artificial Sequence
  ENSG00000010404_38 (sequence is synthesized)
ataaaactgatgtgtcagttacggaaaaattagaaatgcagcacaaatacatgaatattttaccacaaaattgccatataatatcttgtcttttttgggggtgtgaattttttgcattgt

SEQ ID NO: 12597 - DNA, 120 bp, Artificial Sequence
  ENSG00000010404_39 (sequence is synthesized)
ttgttctggtcatattctttatcatgtaatttatgttcttttttactaagtattatgtgtggttattatagattttcacaaagatatattgctggtaatatattttattgtgtagtctta

SEQ ID NO: 12598 - DNA, 120 bp, Artificial Sequence
  ENSG00000010404_40 (sequence is synthesized)
ttacttaaccttctttcaattgttagaaatttaggctatttccagattttcagtattgtaaataatgctgtgatgaccaattttgtgaataaaatgtttttatgtatttcagattattcc

SEQ ID NO: 12599 - DNA, 120 bp, Artificial Sequence
  ENSG00000010404_41 (sequence is synthesized)
cttaggatagtctctcagtgccaagttgtcaaaaacatctctattttgcttatcttcctgctctcttgctgccttagggggtagtaaactgaaacataaagtaaacatgcatacaaataa

SEQ ID NO: 12600 - DNA, 120 bp, Artificial Sequence
  ENSG00000010404_42 (sequence is synthesized)
taaagtaaacatgcatacaaataaaaaacataaaacaaaaataagcaacctgatggtaataggtgaaagtggtaacctgttttaactttgaattcttgccgggcgcggtggctcacgcct

SEQ ID NO: 12601 - DNA, 120 bp, Artificial Sequence
  ENSG00000010404_43 (sequence is synthesized)
acaacaaaaaacaaaaaaaacttaaaattctttgcttgttagtgaccttgatcatggttctctttgtacgatagttgggcatctgtatttccacttgtgtgaatttgcctttaaattttg

SEQ ID NO: 12602 - DNA, 120 bp, Artificial Sequence
  ENSG00000010404_44 (sequence is synthesized)
gttatgggtttcaccttttaaaataatcaaacatatttatcttttcctgtgtgataggtttttttctgtatcttttcctgttaaacacacagacccctccccaatctggacattgaataa

SEQ ID NO: 12603 - DNA, 120 bp, Artificial Sequence
  ENSG00000010404_45 (sequence is synthesized)
atattcattttcctttgcattgtttggggtttggttttatgcttactgtgtctctccaccccattatcagagtaatatatgctcattgcataaaatctggaacatgtgaaaactggagat

SEQ ID NO: 12604 - DNA, 120 bp, Artificial Sequence
  ENSG00000010404_46 (sequence is synthesized)
gaaaagaagcccagcatttgagacatacccactgctgacatttgtatatttcctttcattcttttacctgcctaaagacatatatgcagatatggacatatttagctttacatacatgca

SEQ ID NO: 12605 - DNA, 120 bp, Artificial Sequence
  ENSG00000010404_47 (sequence is synthesized)
gactaccacatataatctatatcttgtttttttgatctaacacaatgttagcttggttttttatgtcattgacagttcttgattaacagctgtaatggctgcacagccctgcttcattaa

SEQ ID NO: 12606 - DNA, 120 bp, Artificial Sequence
  ENSG00000010404_48 (sequence is synthesized)
tttttttttttggactgaaatgtatgtaccacgttccgcttatccattcatccaccagtgaccacttgggtcatttctaccttttggccattgcaataatgttgctgtcaacaaggatgt

SEQ ID NO: 12607 - DNA, 120 bp, Artificial Sequence
  ENSG00000010404_49 (sequence is synthesized)
acaaatatctgttcgagtccctgctcttaattgttttgggtatacacccaacctacattaatctttaatcacttaagatgttggggtttgtgctgggaggtaaccaagtgactctggagc

SEQ ID NO: 12608 - DNA, 120 bp, Artificial Sequence
  ENSG00000010404_50 (sequence is synthesized)
agcctcaccctagctacagagggaaactgactcttccctctctgcccaatcttttgccgcctgtcaggttcccaagctgtccataccttactgtgtgaagcgctttgggtataaactccc

SEQ ID NO: 12609 - DNA, 120 bp, Artificial Sequence
  ENSG00000010404_51 (sequence is synthesized)
aaatagaggctcagccccttttcctttcccaagtccatcctgcaggttatagctcttcagaggaatctcttgaattctggcctgggatctgggattaaagtagaacccagggtgtccctt

SEQ ID NO: 12610 - DNA, 120 bp, Artificial Sequence
  ENSG00000010404_52 (sequence is synthesized)
ggggccttaggcatagcccgttgtggtggaacctgccatcagccccactgcactcagtggtcccctggtacttcaggacagtttctctcttctgcacatgagaacttcaagcagagagga

SEQ ID NO: 12611 - DNA, 120 bp, Artificial Sequence
  ENSG00000010404_53 (sequence is synthesized)
ctgtcagttgttgccttcacatcaccaatcgtttggccataatggccaagagccctcactgctcttgggtcttgcctttccacatgttactgaaagctcccgttggtgtccctgtccact

SEQ ID NO: 12612 - DNA, 120 bp, Artificial Sequence
  ENSG00000010404_54 (sequence is synthesized)
aactcacctgatgggacagatgccactttcctctgagtgtctgataaaacacagtctgttgtggggagcccacgctcaagggttttctttgggatcagagtttcccggctattactccat

SEQ ID NO: 12613 - DNA, 120 bp, Artificial Sequence
  ENSG00000010404_55 (sequence is synthesized)
gccctgcctgacatcactgtcatgtatggtgctaatcaccaaaggatgcccttgtttgattctggattctaggtgatagtccttatcctctgatgggggaagagtttgggtgggagagaa

SEQ ID NO: 12614 - DNA, 120 bp, Artificial Sequence
  ENSG00000010404_56 (sequence is synthesized)
caaaccgacaagttggttccagatgaggtggctgggagccaaccctcaggtacttggctctgagtaatgtgacggcccaggcaagagggctcccactgccaatgaggaacaaaagctcaa

SEQ ID NO: 12615 - DNA, 120 bp, Artificial Sequence
  ENSG00000010404_57 (sequence is synthesized)
ggtctagtagtgtattcagcacatgctaggaaacaagagttgggacgtggacaaggagaggagcaaaggccaggggttaactgcttttggtttttcctctataaaagtcagggactatga

SEQ ID NO: 12616 - DNA, 120 bp, Artificial Sequence
  ENSG00000010404_58 (sequence is synthesized)
tttatatgggtgagaaggtttggagtaggactgaagctgccatttacaaaccccttgccctaatttattgtagttttgggtgtgtttctgaaagaaccttttgcaggtgatttttattca

SEQ ID NO: 12617 - DNA, 120 bp, Artificial Sequence
  ENSG00000010404_59 (sequence is synthesized)
gtactcattaacttacagcttttatgaattcacatcttctacactattgaaaaacataagtttgtattgtgttaagtgcagcatgagttattatatgaataaatcacattaaatttgcca

SEQ ID NO: 12618 - DNA, 120 bp, Artificial Sequence
  ENSG00000010404_60 (sequence is synthesized)
ctgtggtaattccaagtgaatatttttcttctaggtgatgagtttctacttcctctggtttttacaacaggaaatgaaatggtatctaaaataaacaagctgtggtatgatgattattca

SEQ ID NO: 12619 - DNA, 120 bp, Artificial Sequence
  ENSG00000010404_61 (sequence is synthesized)
cagcattcccatcctggggatggggctgtctttgcagagccctcttctggctgggcgagtccctcgctagtcagtgcttcctttctaaaaaactgacttgtcaacccagccacgttttca

SEQ ID NO: 12620 - DNA, 120 bp, Artificial Sequence
  ENSG00000010404_62 (sequence is synthesized)
cccaaagtgaaaaagggtagaaagagctttgcttcctttcagaaaccactgagggtgtgctgttgggtctttcagctcctcgggtggtagggaggacacaggctggggaggtggcagtgt

SEQ ID NO: 12621 - DNA, 120 bp, Artificial Sequence
  ENSG00000010404_63 (sequence is synthesized)
tgggtggagtccagctcagggccccaccctctcccctgcagggtacctgtcagtaaacctaggggtggggtgaggacacctgagggcctcccgtgtggccagcattgctgttgctgactt

SEQ ID NO: 12622 - DNA, 120 bp, Artificial Sequence
  ENSG00000010404_64 (sequence is synthesized)
attgcccaatgagggggctgtgcttaggtaggggctgctatccactctggaaattaagtcagaaagatgagtgtaatctggtacccaggatctatagggtcccagagacggacattcctt

SEQ ID NO: 12623 - DNA, 120 bp, Artificial Sequence
  ENSG00000010404_65 (sequence is synthesized)
acctcaaatgctgcctgataaactggctctctttaatgccaatatggggatagtgaaaagcaaacaaactttaaaactttttatttatagaagtaatgcatgagtatttgagaaaaaaaa

SEQ ID NO: 12624 - DNA, 120 bp, Artificial Sequence
  ENSG00000010404_66 (sequence is synthesized)
tggactacctgccttagaatttctgggagggcttgttggaaatgcaaagtcttggcccactcagatttacacaattggaagctggaggtggaacttgacctgacaaccgacatttcttaa

SEQ ID NO: 12625 - DNA, 120 bp, Artificial Sequence
  ENSG00000010404_67 (sequence is synthesized)
agcattttatcatgtttgttggcgcttgtatgtcgtcttttgagaagcgtctgttcatgtcctttgcctggtttttaatggggttgtttttagcttgttgattttagttccttgtagatt

SEQ ID NO: 12626 - DNA, 120 bp, Artificial Sequence
  ENSG00000010404_68 (sequence is synthesized)
ctggatattagacatttttggatgcatactttccttgacctcatgaggacgcccttcccaggacaggggggacatctgctgcttcccaaatgccacatttcttcaaataaaaagcagaag

SEQ ID NO: 12627 - DNA, 120 bp, Artificial Sequence
  ENSG00000010438_0 (sequence is synthesized)
gacaggccttccaccaccagtcaggcacactctaccaccatgaatccattcctgatccttgcctttgtgggagctgctgttgctgtcccctttgacgatgatgacaagattgttgggggc

SEQ ID NO: 12628 - DNA, 120 bp, Artificial Sequence
  ENSG00000010438_1 (sequence is synthesized)
tacacctgtgaggagaattctctcccctaccaggtgtccctgaattctggctcccacttctgcggtggctccctcatcagcgaacagtgggtggtatcagcagctcactgctacaagacc

SEQ ID NO: 12629 - DNA, 120 bp, Artificial Sequence
  ENSG00000010438_2 (sequence is synthesized)
cgcatccaggtgagactgggagagcacaacatcaaagtcctggaggggaatgagcagttcatcaatgcggccaagatcatccgccaccctaaatacaacagggacactctggacaatgac

SEQ ID NO: 12630 - DNA, 120 bp, Artificial Sequence
  ENSG00000010438_3 (sequence is synthesized)
aacactctgagctttggtgctgactacccagacgagctgaagtgcctggatgctccggtgctgacccaggctgagtgtaaagcctcctaccctggaaagattaccaacagcatgttctgt

SEQ ID NO: 12631 - DNA, 120 bp, Artificial Sequence
  ENSG00000010438_4 (sequence is synthesized)
gtgggcttccttgagggaggcaaggattcctgccagcgtgactctggtggccctgtggtctgcaacggacagctccaaggagttgtctcctggggccatggctgtgcctggaagaacagg

SEQ ID NO: 12632 - DNA, 120 bp, Artificial Sequence
  ENSG00000010438_5 (sequence is synthesized)
cctggagtctacaccaaggtctacaactatgtggactggattaaggacaccatcgctgccaacagctaaagcccccggtccctctgcagtctctataccaataaagtggccctgctctca

SEQ ID NO: 12633 - DNA, 120 bp, Artificial Sequence
  ENSG00000010438_6 (sequence is synthesized)
ggagttcctggggccagagacatctccaagggaaggtcaagggcctggaggatgtgcggacctgacgacagatgccccgcacgctggccgggaccgggaagggcggtcaagtgtggaaag

SEQ ID NO: 12634 - DNA, 120 bp, Artificial Sequence
  ENSG00000010438_7 (sequence is synthesized)
aagtgtggaaagggtctggcggctgccaggcctggcagagtggagcggggcggggcgcagcggggcggggcgggcctggagctgcacccgcttctgggtggacgcacttggcgagcggcg

SEQ ID NO: 12635 - DNA, 120 bp, Artificial Sequence
  ENSG00000010438_8 (sequence is synthesized)
ggctgcgaggcgctgggcacaggttgccaggacaaccgtgaggctgcataaaaagaacctatgacaggatgcacatgagagagacaagtggcttcacattgaagaaggggaggagtgcgc

SEQ ID NO: 12636 - DNA, 120 bp, Artificial Sequence
  ENSG00000010438_9 (sequence is synthesized)
acttggcgagcggcgcgggatgcagacggctgcgaggcgctgggcacagcacccagaagaatcctgtatttaattggctcatatggaaaattttagaaagagagagacatcggggctcag

SEQ ID NO: 12637 - DNA, 120 bp, Artificial Sequence
  ENSG00000010438_10 (sequence is synthesized)
gctccggtgctgacccaggctgagtgtaaagcctcctaccctggaaagattaccaacagcatgttctgtgtgggcttccttgagggaggcaaggattcctgccaggtgatttgacccttt

SEQ ID NO: 12638 - DNA, 120 bp, Artificial Sequence
  ENSG00000010438_11 (sequence is synthesized)
cccatgctgaggctcccaccgatacccaggccccaccggggaaaaagatttgaactcccaaggtggcagggctgaggcggctccctgcagtgctcccatggagaaatgaggaaggctccc

SEQ ID NO: 12639 - DNA, 120 bp, Artificial Sequence
  ENSG00000010438_12 (sequence is synthesized)
cacgctgcctgcttaggaagaacagagaatgggccaccgtgggaaggacgtggagccacagagctggctggaaaggggtcttttaaggttcacagtaaatgtagctatattcctcctcca

SEQ ID NO: 12640 - DNA, 120 bp, Artificial Sequence
  ENSG00000010539_0 (sequence is synthesized)
tttcccagcaggccctggggttagactggccgcagctggagaggtgccagcccgtcgtggatgactagagccaaccacctgccttccgtcttccaggcagaaccacagagaggctacagc

SEQ ID NO: 12641 - DNA, 120 bp, Artificial Sequence
  ENSG00000010539_1 (sequence is synthesized)
cgtcctggcctccctccggccctgagagctcctctggcctgtctcaagtcttaacgtctcaagcgcagactgccggctccgaacggggagaccaggcttctgcaccggaaacaaggcacc

SEQ ID NO: 12642 - DNA, 120 bp, Artificial Sequence
  ENSG00000010539_2 (sequence is synthesized)
ggttgtgacgtcacagccgcagagcgcccgacttcccagaaggcaccgagtccctgccgttctcctcaactggcggcggcgcgaacgaatagtcgccggcgacctgtgagggcactcgga

SEQ ID NO: 12643 - DNA, 120 bp, Artificial Sequence
  ENSG00000010539_3 (sequence is synthesized)
agggcgaggggagggctcgaccgctcgcgcctagtttttctatctctcccggagcctgagtctctgagccgtccccagcaaacgctcaggggctgcagaggccccgagagcttggctctc

SEQ ID NO: 12644 - DNA, 120 bp, Artificial Sequence
  ENSG00000010539_4 (sequence is synthesized)
tggcagatttcctctagtaagaggtggctctggaggccccgcgaaacgagtgtggtgtgtggttgcaaggcatgatggctgcaaaagtggttcctatgcccccaaagccaaagcagtcct

SEQ ID NO: 12645 - DNA, 120 bp, Artificial Sequence
  ENSG00000010539_5 (sequence is synthesized)
ttatactgagagttccgccagactccaagctgggccaagacctacttcgagatgccactaacgggcccaagaccatccaccagctagtgctggagcacttcctcaccttcttgcccaagc

SEQ ID NO: 12646 - DNA, 120 bp, Artificial Sequence
  ENSG00000010539_6 (sequence is synthesized)
caagcctggtccagcccagtcagaaagtcaaggagaccttggttattatgaaagatgtgagctcaagccttcagaacagagtgcatcctcgtcccttggtgaagcttctgcccaaaggag

SEQ ID NO: 12647 - DNA, 120 bp, Artificial Sequence
  ENSG00000010539_7 (sequence is synthesized)
tccaaaaggaacaagagacagtgtctctgtatttgaaagctaaccctgaggagctggtggtctttgaggatttgaatgtatttcactgccaggaagaatgtgtgagcttggatcctactc

SEQ ID NO: 12648 - DNA, 120 bp, Artificial Sequence
  ENSG00000010539_8 (sequence is synthesized)
aacaactcacgtcagagaaggaagatgacagcagtgtcggggaaatgatgttactggcagtcaatggcagtaatcctgaaggtgaagatcctgagagggaacctgtagaaaatgaagatt

SEQ ID NO: 12649 - DNA, 120 bp, Artificial Sequence
  ENSG00000010539_9 (sequence is synthesized)
atagagaaaagtcttcagatgatgatgaaatggattcttccttggtctctcagcagcctcccgataaccaggaaaaggaacgactaaatacatccattccacaaaaaaggaaaatgagaa

SEQ ID NO: 12650 - DNA, 120 bp, Artificial Sequence
  ENSG00000010539_10 (sequence is synthesized)
atctgttagttaccattgagaatgatactcctctagaggaactctcaaaatatgtagacatcagtattattgcccttactcgaaatcggaggacaaggagatggtacacttgtccactgt

SEQ ID NO: 12651 - DNA, 120 bp, Artificial Sequence
  ENSG00000010539_11 (sequence is synthesized)
gtgggaaacagtttaatgaaagttcttacctcatttcccaccagaggacccacactggagaaaaaccctatgactgtaatcactgtgggaaaagcttcaatcataaaacaaacctcaata

SEQ ID NO: 12652 - DNA, 120 bp, Artificial Sequence
  ENSG00000010539_12 (sequence is synthesized)
aacatgagcgaattcatacaggagagaaaccttattcctgttctcagtgtggaaaaaacttccgtcagaattctcatcggagtcgtcatgaaggaatccatataagggagaagatattta

SEQ ID NO: 12653 - DNA, 120 bp, Artificial Sequence
  ENSG00000010539_13 (sequence is synthesized)
aggctgagagaccatatggttgcaaaaaatgtgggagaagatttggtcggctgtcaaactgtacccggcatgagaaaacccactcagcctgtaagacccgaaagcagaagtaatactggg

SEQ ID NO: 12654 - DNA, 120 bp, Artificial Sequence
  ENSG00000010539_14 (sequence is synthesized)
aaccctttctgggtctgatggtgctgcctcaacctgagagctttcataagtagttctgaattcccaagctgcctaaaaaggtataaatgtgtaaaaatctcattattgccaaaattggat

SEQ ID NO: 12655 - DNA, 120 bp, Artificial Sequence
  ENSG00000010539_15 (sequence is synthesized)
aaatgcccatcttagctaaaacctcaaattgctagaaaattcacagggaagaaaacatttcaagggctatacctcagcatctaggctttttggactaaggagctttcctttttgaagtta

SEQ ID NO: 12656 - DNA, 120 bp, Artificial Sequence
  ENSG00000010539_16 (sequence is synthesized)
tatgataatgtacaggtcacagatcccctttcccaacactttgaagatgaatctggagtctgcttacttggaaggcaaagagtgacttgtgtctattgaaagtatatccgttttcccccc

SEQ ID NO: 12657 - DNA, 120 bp, Artificial Sequence
  ENSG00000010539_17 (sequence is synthesized)
acatggggattcatacttgagaaatagtgcaaagatgcttatctggaactgtgttctggtgaaagaaccaaattactggcttgttagccaacagcttctgatagcaattcatataaccct

SEQ ID NO: 12658 - DNA, 120 bp, Artificial Sequence
  ENSG00000010539_18 (sequence is synthesized)
ctaagaatacctgtttaagtcttgagtgttgaaaggaattgtttactttggaatataggaaaacagttgaatgtcagactctcatttgtatgtgatctaaatttgcaatcaatttcaata

SEQ ID NO: 12659 - DNA, 120 bp, Artificial Sequence
  ENSG00000010539_19 (sequence is synthesized)
atatttacaatttgtgataaaactgacttttacagattccttttcacaacataatttaggtgtctactgttcttattgtattttgttctgctgttgatctctccagcagccgtctcatgc

SEQ ID NO: 12660 - DNA, 120 bp, Artificial Sequence
  ENSG00000010539_20 (sequence is synthesized)
ttctcccttgctaaaagaagtttggattactcaggcagggccatccagccccaccactagaaaagctcttcagaatcttgtccctctgttgagcccagatctcatgtgctacgaaggaaa

SEQ ID NO: 12661 - DNA, 120 bp, Artificial Sequence
  ENSG00000010539_21 (sequence is synthesized)
ccccaagacccagagaggaagggtcaacctggaggcaggaaaaagttggcttggatccatgtctcatcaataaccttaccatatgcttaggtcccctctatgctgtcatcagacctttgg

SEQ ID NO: 12662 - DNA, 120 bp, Artificial Sequence
  ENSG00000010539_22 (sequence is synthesized)
caatggggtggtcactacctcacaaggcaaagtgttgtatgattagaaattacgtctccagtggttagctcacattgcctctcaagagacaggtttccaggtgtcttcattgtagtgggt

SEQ ID NO: 12663 - DNA, 120 bp, Artificial Sequence
  ENSG00000010539_23 (sequence is synthesized)
attaattgtcttcagcctcttgatatccataccttcctgtcctctgcctagaagcaaggccagcggtgcctttacggactgatcgtgtggtgcgatttagggattcttcagttttgcttg

SEQ ID NO: 12664 - DNA, 120 bp, Artificial Sequence
  ENSG00000010539_24 (sequence is synthesized)
ctttaggtttccaaaagttatacattggtgttttgattggaataaagaaatcctataagctatttgggaaaaattatagtgtatgtttcccatccagaaacatgcctttctatttattag

SEQ ID NO: 12665 - DNA, 120 bp, Artificial Sequence
  ENSG00000010539_25 (sequence is synthesized)
agtattatattcctgtgaaaatttttctaattttcttcacttgttttacacaattttgttattgtagttttttccattatatttttatagttgattattgcttttacatgggaaagttat

SEQ ID NO: 12666 - DNA, 120 bp, Artificial Sequence
  ENSG00000010539_26 (sequence is synthesized)
ttttaattatatatttgtatagtcatctcactgttgttaattttcaatagtttgttggtttagttctgttaacttttggtaaaatgacaccatctacaaagaatagtttttgtttcttgc

SEQ ID NO: 12667 - DNA, 120 bp, Artificial Sequence
  ENSG00000010539_27 (sequence is synthesized)
tccgttgctgagggagcaaggccgggtagggagcctggtgagcgcctcaggcaggggcgcacgctgagctttacggtaaaggtgttccttgaccagcggaagaggccccagagtgagcct

SEQ ID NO: 12668 - DNA, 120 bp, Artificial Sequence
  ENSG00000010539_28 (sequence is synthesized)
ggcccggcggtccttagtgggatgtcgcctgccgctctcagcagagctttgacggcggagaggagtcggcaggcggtgtgtggacacctcctcggccttgcatctgctccccgggagagt

SEQ ID NO: 12669 - DNA, 120 bp, Artificial Sequence
  ENSG00000010539_29 (sequence is synthesized)
tgctgggattacaggtgtgagccaccggtacctggccacactttgtatttctcaggaggctggaccttggccttctccgctccacccttactcccttccctttggacttgaggtttgcac

SEQ ID NO: 12670 - DNA, 120 bp, Artificial Sequence
  ENSG00000010539_30 (sequence is synthesized)
cccttactcccttccctttggacttgaggtttgcacagtctctgtttttcattctcaggatcttcctttcacatcttcctaagcatatcttgttcaaatactgcgtttcagttatgattt

SEQ ID NO: 12671 - DNA, 120 bp, Artificial Sequence
  ENSG00000010539_31 (sequence is synthesized)
ccctatcccagctgtcgttttctttagatctcatgtagcctcaccagccatgccacatattggagtgcagtaatgccgtgcctggtcttttgggtaatccctggtttctctgtctacagc

SEQ ID NO: 12672 - DNA, 120 bp, Artificial Sequence
  ENSG00000010539_32 (sequence is synthesized)
cagttcagcatggctggggaggcctccagaaacttaaaatcatggcaaaggcaagaggaagcaaggcatcatcttcacaaggcagcaggagggagaagtacgagtaaagggggaagagcc

SEQ ID NO: 12673 - DNA, 83 bp, Artificial Sequence
  ENSG00000010539_33 (sequence is synthesized)
tagcatgggggaaggcccccccgcccatgactcagttaccttcacctgatgtctccttgacatgtgggattacaatttaagat

SEQ ID NO: 12674 - DNA, 120 bp, Artificial Sequence
  ENSG00000010539_34 (sequence is synthesized)
acctgatgtctccttgacatgtgggattacaatttaagatgagatttgggcgaggacacaaagcctaaccataaagggggactttttgataaaaggtgttaggacgactgacagccactt

SEQ ID NO: 12675 - DNA, 120 bp, Artificial Sequence
  ENSG00000010539_35 (sequence is synthesized)
gataaattagtaccttactttacataccaagaaaaagtccacatggatcaaagattttaaatgtttaaaacaaatataaaaagcacatttagaaaatatgagtgattcctttataaccat

SEQ ID NO: 12676 - DNA, 120 bp, Artificial Sequence
  ENSG00000010539_36 (sequence is synthesized)
ataaccatgggataggaaggtttttgtaattaagactcaaaagcccagaagccttgaaagaaaagattgacagattcaaatacgtacaaaaggctggggcatggtggctcacgcctgtaa

SEQ ID NO: 12677 - DNA, 120 bp, Artificial Sequence
  ENSG00000010539_37 (sequence is synthesized)
gaagtgcaaattaagcctctagtgaattaacattttgcgtatttcatatttatagaaataaaaacacattgatggtgaggttgttgagaaacaggtatattgctggtgggcatataaaat

SEQ ID NO: 12678 - DNA, 120 bp, Artificial Sequence
  ENSG00000010539_38 (sequence is synthesized)
ggtatagtccctgtataagggtaattgcatctgtaactacccatcttatcctttgttccaggagttcaattctggaaatctgacctacagatatagcaacagaacacattcgaaatgatg

SEQ ID NO: 12679 - DNA, 120 bp, Artificial Sequence
  ENSG00000010539_39 (sequence is synthesized)
tacaaagaagattattcactgtggtattgtttgtaaaaacacaaggttggaagcagtccaagtgtagttaaagaggaagagttgagttaaaaattatttagacaagaaatcattgacaaa

SEQ ID NO: 12680 - DNA, 120 bp, Artificial Sequence
  ENSG00000010539_40 (sequence is synthesized)
tacatttataaaagccttaacccagtagattattttgcataatgaaaatccaaagtaaaactacaatgagaaactattttatacctattaaatattttaaaatttaatgctaacaagatt

SEQ ID NO: 12681 - DNA, 120 bp, Artificial Sequence
  ENSG00000010539_41 (sequence is synthesized)
gattaggtaaagttaatattcacatgaaattagtagagctgtttttgaaagcagaatggtagttcatgtcaagagctatggtaaaaattgacatttcattatcctaagggagtgattaaa

SEQ ID NO: 12682 - DNA, 120 bp, Artificial Sequence
  ENSG00000010539_42 (sequence is synthesized)
acacgatgaaaccctctctctactataaatacaaaaaattagctgggcgcggtggtggacgtctgtagtcccagctactggggaggctcaggtaggagaatggagtgaacccaggaggcg

SEQ ID NO: 12683 - DNA, 68 bp, Artificial Sequence
  ENSG00000010539_43 (sequence is synthesized)
ggctgggtgtgggggcttacacctgtaatccccagcactttgggaagattgcttgagtacacgagtgc

SEQ ID NO: 12684 - DNA, 120 bp, Artificial Sequence
  ENSG00000010539_44 (sequence is synthesized)
ttacacctgtaatccccagcactttgggaagattgcttgagtacacgagtgcaaaaccagcctaggcaacatagcaagaccctatctctgccaaaaaaaaaaaaaagtgaaataaaaaaa

SEQ ID NO: 12685 - DNA, 120 bp, Artificial Sequence
  ENSG00000010539_45 (sequence is synthesized)
tgaaactgctgaatccagcagagattccaactccagcttcaggatcagcccccatgtcttggtggttgatttgaacccttgactctcagtaggcctgagttgaggggtcccttgtcacac

SEQ ID NO: 12686 - DNA, 120 bp, Artificial Sequence
  ENSG00000010539_46 (sequence is synthesized)
ttgtaaatatatagctcaagttttcacaaaatgtacacactaagcaccacccaaaatggacttttcttagcatcccaaaaatcccttttgtgccctgtacccactcactacttcctttcc

SEQ ID NO: 12687 - DNA, 120 bp, Artificial Sequence
  ENSG00000010539_47 (sequence is synthesized)
tacacaaagagaaacactactgacttctaatcccaaagcttcattagttgtagtaatctctttaattgccaaataataaacttttttctgttttgagacagattcgctcttgttgcccag

SEQ ID NO: 12688 - DNA, 80 bp, Artificial Sequence
  ENSG00000010539_48 (sequence is synthesized)
ccatgcccaatggtcaggctggtcttgaactcccagccttgggtgatctgctcgccttgacctcccaaagtgctgggatt

SEQ ID NO: 12689 - DNA, 120 bp, Artificial Sequence
  ENSG00000010539_49 (sequence is synthesized)
caccacgcctggccaataataaacttttgtatgaatatgctgtgccctctttaattttgcttattggaattgtttcaattttctcattgtaagacattatgatattatttagtgctataa

SEQ ID NO: 12690 - DNA, 120 bp, Artificial Sequence
  ENSG00000010539_50 (sequence is synthesized)
tagtgtgataatatttaatatagtgaaaacctacaagtggttcgtcttactattcagttaccagactccttcaagatgatgagtggttccctgtatagatgtatagtcttcatccctagt

SEQ ID NO: 12691 - DNA, 120 bp, Artificial Sequence
  ENSG00000010539_51 (sequence is synthesized)
ccttacctgagtgctctacagagtataaggtgaatatgaacttgtcgagtaattaacacctatgaagagaacaaacatttgaagtctttcagtgaaatcccactcattttatttctttaa

SEQ ID NO: 12692 - DNA, 120 bp, Artificial Sequence
  ENSG00000010539_52 (sequence is synthesized)
agtgtgcttgcattgtggtagatggaaagatttatcagttatgtatcccaccctcaataagtatggaaaaggagtgcgacggcagtatccgccactccccagattgacgttcaaggtggc

SEQ ID NO: 12693 - DNA, 120 bp, Artificial Sequence
  ENSG00000010539_53 (sequence is synthesized)
tgtggcataagaaacctgacttgttttttcctgcctggtgttgtgatatctctcagaagttgttaaattctctctttgtttcagcagtcaatggcagtaatcctgaaggtgaagatcctg

SEQ ID NO: 12694 - DNA, 120 bp, Artificial Sequence
  ENSG00000010539_54 (sequence is synthesized)
gaaattgagaaaggaaaccgagacagtaggagaagggcaattaagatgtctttaaaaacaagacggccggtgcggacagcagtgtagaagttagcaagctggagtgggcaatgtcggtgc

SEQ ID NO: 12695 - DNA, 120 bp, Artificial Sequence
  ENSG00000010539_55 (sequence is synthesized)
cccatctctaacctatgggagtcaccagagcgggggcggagtcccatggcggccacaccctgtccgcctccgcagtctttttactggagaaccgcagtaaaaggcggaaaccgcggaggc

SEQ ID NO: 12696 - DNA, 120 bp, Artificial Sequence
  ENSG00000010610_0 (sequence is synthesized)
ctctcttcatttaagcacgactctgcagaaggaacaaagcaccctccccactgggctcctggttgcagagctccaagtcctcacacagatacgcctgtttgagaagcagcgggcaagaaa

SEQ ID NO: 12697 - DNA, 120 bp, Artificial Sequence
  ENSG00000010610_1 (sequence is synthesized)
gacgcaagcccagaggccctgccatttctgtgggctcaggtccctactggctcaggcccctgcctccctcggcaaggccacaatgaaccggggagtcccttttaggcacttgcttctggt

SEQ ID NO: 12698 - DNA, 120 bp, Artificial Sequence
  ENSG00000010610_2 (sequence is synthesized)
gctgcaactggcgctcctcccagcagccactcagggaaagaaagtggtgctgggcaaaaaaggggatacagtggaactgacctgtacagcttcccagaagaagagcatacaattccactg

SEQ ID NO: 12699 - DNA, 120 bp, Artificial Sequence
  ENSG00000010610_3 (sequence is synthesized)
gaaaaactccaaccagataaagattctgggaaatcagggctccttcttaactaaaggtccatccaagctgaatgatcgcgctgactcaagaagaagcctttgggaccaaggaaactttcc

SEQ ID NO: 12700 - DNA, 120 bp, Artificial Sequence
  ENSG00000010610_4 (sequence is synthesized)
cctgatcatcaagaatcttaagatagaagactcagatacttacatctgtgaagtggaggaccagaaggaggaggtgcaattgctagtgttcggattgactgccaactctgacacccacct

SEQ ID NO: 12701 - DNA, 120 bp, Artificial Sequence
  ENSG00000010610_5 (sequence is synthesized)
gcttcaggggcagagcctgaccctgaccttggagagcccccctggtagtagcccctcagtgcaatgtaggagtccaaggggtaaaaacatacagggggggaagaccctctccgtgtctca

SEQ ID NO: 12702 - DNA, 120 bp, Artificial Sequence
  ENSG00000010610_6 (sequence is synthesized)
gctggagctccaggatagtggcacctggacatgcactgtcttgcagaaccagaagaaggtggagttcaaaatagacatcgtggtgctagctttccagaaggcctccagcatagtctataa

SEQ ID NO: 12703 - DNA, 120 bp, Artificial Sequence
  ENSG00000010610_7 (sequence is synthesized)
gaaagagggggaacaggtggagttctccttcccactcgcctttacagttgaaaagctgacgggcagtggcgagctgtggtggcaggcggagagggcttcctcctccaagtcttggatcac

SEQ ID NO: 12704 - DNA, 120 bp, Artificial Sequence
  ENSG00000010610_8 (sequence is synthesized)
ctttgacctgaagaacaaggaagtgtctgtaaaacgggttacccaggaccctaagctccagatgggcaagaagctcccgctccacctcaccctgccccaggccttgcctcagtatgctgg

SEQ ID NO: 12705 - DNA, 120 bp, Artificial Sequence
  ENSG00000010610_9 (sequence is synthesized)
ctctggaaacctcaccctggcccttgaagcgaaaacaggaaagttgcatcaggaagtgaacctggtggtgatgagagccactcagctccagaaaaatttgacctgtgaggtgtggggacc

SEQ ID NO: 12706 - DNA, 120 bp, Artificial Sequence
  ENSG00000010610_10 (sequence is synthesized)
cacctcccctaagctgatgctgagtttgaaactggagaacaaggaggcaaaggtctcgaagcgggagaaggcggtgtgggtgctgaaccctgaggcggggatgtggcagtgtctgctgag

SEQ ID NO: 12707 - DNA, 120 bp, Artificial Sequence
  ENSG00000010610_11 (sequence is synthesized)
tgactcgggacaggtcctgctggaatccaacatcaaggttctgcccacatggtccaccccggtgcagccaatggccctgattgtgctggggggcgtcgccggcctcctgcttttcattgg

SEQ ID NO: 12708 - DNA, 120 bp, Artificial Sequence
  ENSG00000010610_12 (sequence is synthesized)
gagcggatgtctcagatcaagagactcctcagtgagaagaagacctgccagtgtcctcaccggtttcagaagacatgtagccccatttgaggcacgaggccaggcagatcccacttgcag

SEQ ID NO: 12709 - DNA, 120 bp, Artificial Sequence
  ENSG00000010610_13 (sequence is synthesized)
cctccccaggtgtctgccccgcgtttcctgcctgcggaccagatgaatgtagcagatccccagcctctggcctcctgttcgcctcctctacaatttgccattgtttctcctgggttaggc

SEQ ID NO: 12710 - DNA, 120 bp, Artificial Sequence
  ENSG00000010610_14 (sequence is synthesized)
cccggcttcactggttgagtgttgctctctagtttccagaggcttaatcacaccgtcctccacgccatttccttttccttcaagcctagcccttctctcattatttctctctgaccctct

SEQ ID NO: 12711 - DNA, 120 bp, Artificial Sequence
  ENSG00000010610_15 (sequence is synthesized)
ccccactgctcatttggatcccaggggagtgttcagggccagccctggctggcatggagggtgaggctgggtgtctggaagcatggagcatgggactgttcttttacaagacaggaccct

SEQ ID NO: 12712 - DNA, 120 bp, Artificial Sequence
  ENSG00000010610_16 (sequence is synthesized)
gggaccacagagggcaggaacttgcacaaaatcacacagccaagccagtcaaggatggatgcagatccagaggtttctggcagccagtacctcctgccccatgctgcccgcttctcaccc

SEQ ID NO: 12713 - DNA, 120 bp, Artificial Sequence
  ENSG00000010610_17 (sequence is synthesized)
tatgtgggtgggaccacagactcacatcctgaccttgcacaaacagcccctctggacacagccccatgtacacggcctcaagggatgtctcacatcctctgtctatttgagacttagaaa

SEQ ID NO: 12714 - DNA, 120 bp, Artificial Sequence
  ENSG00000010610_18 (sequence is synthesized)
aatcctacaaggctggcagtgacagaactaagatgatcatctccagtttatagaccagaaccagagctcagagaggctagatgattgattaccaagtgccggactagcaagtgctggagt

SEQ ID NO: 12715 - DNA, 120 bp, Artificial Sequence
  ENSG00000010610_19 (sequence is synthesized)
cgggactaacccaggtcccttgtcccaagttccactgctgcctcttgaatgcagggacaaatgccacacggctctcaccagtggctagtggtgggtactcaatgtgtacttttgggttca

SEQ ID NO: 12716 - DNA, 120 bp, Artificial Sequence
  ENSG00000010610_20 (sequence is synthesized)
cagaagcacagcacccatgggaagggtccatctcagagaatttacgagcagggatgaaggcctccctgtctaaaatccctccttcatcccccgctggtggcagaatctgttaccagagga

SEQ ID NO: 12717 - DNA, 120 bp, Artificial Sequence
  ENSG00000010610_21 (sequence is synthesized)
caaagcctttggctcttctaatcagagcgcaagctgggagcacaggcactgcaggagagaatgcccagtgaccagtcactgaccctgtgcagaacctcctggaagcgagctttgctggga

SEQ ID NO: 12718 - DNA, 120 bp, Artificial Sequence
  ENSG00000010610_22 (sequence is synthesized)
gagggggtagctagcctgagagggaaccctctaagggacctcaaaggtgattgtgccaggctctgcgcctgccccacaccctcccttaccctcctccagaccattcaggacacagggaaa

SEQ ID NO: 12719 - DNA, 120 bp, Artificial Sequence
  ENSG00000010610_23 (sequence is synthesized)
tcagggttacaaatcttcttgatccacttctctcaggatcccctctcttcctacccttcctcaccacttccctcagtcccaactccttttccctatttccttctcctcctgtctttaaag

SEQ ID NO: 12720 - DNA, 120 bp, Artificial Sequence
  ENSG00000010610_24 (sequence is synthesized)
cctgcctcttccaggaagacccccctattgctgctggggctccccatttgcttactttgcatttgtgcccactctccacccctgctcccctgagctgaaataaaaatacaataaacttac

SEQ ID NO: 12721 - DNA, 120 bp, Artificial Sequence
  ENSG00000010610_25 (sequence is synthesized)
cccaggatccagtcccagcatctcagcacggccttcaagcatttccacgtcctggcctggctccatggtctccccgccaatttgccaccttctccatgcatccttttctgatcccctcct

SEQ ID NO: 12722 - DNA, 120 bp, Artificial Sequence
  ENSG00000010610_26 (sequence is synthesized)
atatcagaagagccgtgggcattctcttgccagaggtgccctgtctccagggcgcctcagtccccccccatatgtcttctgctcccaggtccatccaagctgaatgatcgcgctgactca

SEQ ID NO: 12723 - DNA, 120 bp, Artificial Sequence
  ENSG00000010610_27 (sequence is synthesized)
gggcaggtggggatgaggatacctcctgcctggttcccttccccactactcccacccctgcaccaaatccagcctgagctggtgataccgcagcagccccaagaggaccaggctgtcaaa

SEQ ID NO: 12724 - DNA, 120 bp, Artificial Sequence
  ENSG00000010610_28 (sequence is synthesized)
agaggaggggagagggaaaccctatcttggctgggggtgcgcagctgggtgctgggaggaaggagatgttgggacggcgataatggagagatgttgttggtttcctgttgtctgcccttc

SEQ ID NO: 12725 - DNA, 120 bp, Artificial Sequence
  ENSG00000010610_29 (sequence is synthesized)
tggctgggctgctctgtgatggcttccgggaggagggaggtggcctgctgtaggaaaatgctgggtggaagaagggagagaaggctggagaggtaggaaggaactgaagtatctgaagtg

SEQ ID NO: 12726 - DNA, 120 bp, Artificial Sequence
  ENSG00000010610_30 (sequence is synthesized)
acaaggtgggtgtctggactcgtcgggtccccttccatctccctgctgcctccacatgccaaccccactcgtgcaccctcatcttcctatctcctcacccagggtctctcccttcccacc

SEQ ID NO: 12727 - DNA, 120 bp, Artificial Sequence
  ENSG00000010610_31 (sequence is synthesized)
cataagctggagtggtgaccatatctgtcttcttcaacatcacatccccagctacctagcagagtgccttgggctggtacacgcttaactacgtacatgaatgaatggagcagggctcaa

SEQ ID NO: 12728 - DNA, 120 bp, Artificial Sequence
  ENSG00000010626_0 (sequence is synthesized)
agccccgccccctctcttctcgcttctcagccctgcccacttctttttgtcctcagccaattagcggcccaacgccccttccgcgcctcatccgggttcccgggacgggaaagtggcgtg

SEQ ID NO: 12729 - DNA, 120 bp, Artificial Sequence
  ENSG00000010626_1 (sequence is synthesized)
gtaaccaggcaactactgatcaatcccctccccggctgatttgcgcatcaggaggaggactgagcttatctgactccagagctttcaggagggaagaaagatgtcagatgaagatgatct

SEQ ID NO: 12730 - DNA, 120 bp, Artificial Sequence
  ENSG00000010626_2 (sequence is synthesized)
agaagactctgagccagaccaggatgattctgagaaagaagaggacgagaaggagacagaggagggggaggactacagaaaagagggggaagagttccctgaggaatggctgcccacccc

SEQ ID NO: 12731 - DNA, 120 bp, Artificial Sequence
  ENSG00000010626_3 (sequence is synthesized)
cctcacggaggacatgatgaaggaagggctttctctgctctgtaagacaggcaatgggctggctcatgcttatgtcaagctggaggttaaagagagggacctgacagacatctacttgct

SEQ ID NO: 12732 - DNA, 120 bp, Artificial Sequence
  ENSG00000010626_4 (sequence is synthesized)
gcgctcctacatccatctgcgctatgtggatatttctgagaaccacctgacagacctgtctccactcaactacctcacccacctgctctggctcaaggctgatggcaatcggctgcgaag

SEQ ID NO: 12733 - DNA, 120 bp, Artificial Sequence
  ENSG00000010626_5 (sequence is synthesized)
tgcccagatgaatgaactgccctacctgcagattgctagttttgcttataaccagattactgacactgaaggcatctctcatcctcgtcttgaaaccctgaatctcaaagggaacagcat

SEQ ID NO: 12734 - DNA, 120 bp, Artificial Sequence
  ENSG00000010626_6 (sequence is synthesized)
cttcgggggaaccagctggaaagcaccctgggaatcaatcttcctaagctgaagaacctctacctggcccaaaacatgctgaagaaggtggaaggcttggaggatctgagcaatctcacc

SEQ ID NO: 12735 - DNA, 120 bp, Artificial Sequence
  ENSG00000010626_7 (sequence is synthesized)
accttgcatcttcgagacaaccagattgacaccctgagtggcttctccagagaaatgaaatcattgcagtacctcaacctgaggggcaacatggtggccaacctgggggagctggccaag

SEQ ID NO: 12736 - DNA, 120 bp, Artificial Sequence
  ENSG00000010626_8 (sequence is synthesized)
cttcgagacctgcccaagctgcgagcgttggtgctgcttgataacccatgcacggacgaaaccagctaccgccaggaggccctggtgcagatgccataccttgaacgcctggacaaggaa

SEQ ID NO: 12737 - DNA, 120 bp, Artificial Sequence
  ENSG00000010626_9 (sequence is synthesized)
ttctatgaggaggaggaacgggctgaggctgatgtgattcgacagaggctgaaggaagaaaaggagcaggagcctgagccccagcgtgacctggaacccgaacagtcattgatctagcag

SEQ ID NO: 12738 - DNA, 120 bp, Artificial Sequence
  ENSG00000010626_10 (sequence is synthesized)
cagttctagcctctaaagatagagatcaaagacgctggccttcagacctgatcagactcccaggggcagccaccacatgtatgacagagaacagaggatgcctgtttttgccccaaagct

SEQ ID NO: 12739 - DNA, 120 bp, Artificial Sequence
  ENSG00000010626_11 (sequence is synthesized)
ggaaattcatcacaacctgaggcccaggatctgctctgtgccggtcctctgggcagtgtggggtgcagaatggggtgcctaggcctgagcgttgcctggagcctaggccgggggccgccc

SEQ ID NO: 12740 - DNA, 120 bp, Artificial Sequence
  ENSG00000010626_12 (sequence is synthesized)
tcgggcaggcgtgggtgagagccaagaccgcgtgggccgcggggtgctggtaggagtggttggagagacttgcgaaggcggctggggtgttcggatttccaataaagaaacagagtgatg

SEQ ID NO: 12741 - DNA, 120 bp, Artificial Sequence
  ENSG00000010626_13 (sequence is synthesized)
atccgggttcccgggacgggaaagtggcgtggtaaccaggcaactactgatcaatcccctccccggctgatttgcgcatcaggtagtcgccgctctactctcaacggtggcgagctgcag

SEQ ID NO: 12742 - DNA, 120 bp, Artificial Sequence
  ENSG00000010626_14 (sequence is synthesized)
ttgccaagtgccccgtccccgttgccataacagcagtacacaacccctccttcccctcgcccgcttgctaaacagtccttccctctcgggaccaagggcctctccagaactgcttctgat

SEQ ID NO: 12743 - DNA, 120 bp, Artificial Sequence
  ENSG00000010626_15 (sequence is synthesized)
tcccgggctgtgaccctccccgaggccccgcccccacggcgaaggcccggggcagttaacccttctcttgctgcggcagagtccgcacccgggcaggcccatctcagaattaacgctttg

SEQ ID NO: 12744 - DNA, 120 bp, Artificial Sequence
  ENSG00000010626_16 (sequence is synthesized)
atggcatcaccgcgtcgggaatccctggggatggtgttctccaccgtcaagacctttgagccgcctgagcgactaactcctgcgcccctgaggggacattttattcagaaattaaatcat

SEQ ID NO: 12745 - DNA, 120 bp, Artificial Sequence
  ENSG00000010626_17 (sequence is synthesized)
tcagagttccagcactgtcgggggtcatcgggctctgtccaccgccataggcctagcattgtcaccaacggagccatagagggacctcggcccaagctggggcctcttcattgtcgaaga

SEQ ID NO: 12746 - DNA, 120 bp, Artificial Sequence
  ENSG00000010626_18 (sequence is synthesized)
ggggtcaggatgcctgctttctagtaggctcagctactaacttcatcattatgataataactggtattattatcaagaccatagttggttccagatgctgtggagatacacagccaccta

SEQ ID NO: 12747 - DNA, 120 bp, Artificial Sequence
  ENSG00000010626_19 (sequence is synthesized)
gcagggctgataatatataatgtgtggataatacagagataatttaccttgatacaggtagtagcaaaatggaccataattgaggtacaaacatcagtctgtggaaatgttttaggaaaa

SEQ ID NO: 12748 - DNA, 120 bp, Artificial Sequence
  ENSG00000010626_20 (sequence is synthesized)
ctgctgcagaaggaggtgggagaggaaagcatcagacaagcaggacccttaaagagaggagggttaggagtcagggagaggaaaagggacccaaggggcctgggaccagctgagaaagac

SEQ ID NO: 12749 - DNA, 120 bp, Artificial Sequence
  ENSG00000010626_21 (sequence is synthesized)
ggctggtgtaccagagggcccaaggaaattggcccagtggggagggaaaagtagaagaaatgaatggagcagggattacggatggcgcaatgggagctgagaggagaggaggaggaattg

SEQ ID NO: 12750 - DNA, 120 bp, Artificial Sequence
  ENSG00000010626_22 (sequence is synthesized)
cgctttgatggcatcaccgcgtcgggaatccctggggatggtgttctccaccgtcaagacctttgagccgcctgagcgactaactcctgcgcccctgaggtcacagctacttggaaggct

SEQ ID NO: 12751 - DNA, 120 bp, Artificial Sequence
  ENSG00000010626_23 (sequence is synthesized)
tcacagctacttggaaggctgagatgtgaagactacttgagctcagaagttccactgcactccagcctgggttacagagggaaaccttgtctctaaaaaaaagaaaaaagaaagaaagaa

SEQ ID NO: 12752 - DNA, 120 bp, Artificial Sequence
  ENSG00000010671_0 (sequence is synthesized)
gctcagactgtccttcctctctggactgtaagaatatgtctccagggccagtgtctgctgcgatcgagtcccaccttccaagtcctggcatctcaatgcatctgggaagctacctgcatt

SEQ ID NO: 12753 - DNA, 120 bp, Artificial Sequence
  ENSG00000010671_1 (sequence is synthesized)
aagtcaggactgagcacacaggtgaactccagaaagaagaagctatggccgcagtgattctggagagcatctttctgaagcgatcccaacagaaaaagaaaacatcacctctaaacttca

SEQ ID NO: 12754 - DNA, 120 bp, Artificial Sequence
  ENSG00000010671_2 (sequence is synthesized)
agaagcgcctgtttctcttgaccgtgcacaaactctcctactatgagtatgactttgaacgtgggagaagaggcagtaagaagggttcaatagatgttgagaagatcacttgtgttgaaa

SEQ ID NO: 12755 - DNA, 120 bp, Artificial Sequence
  ENSG00000010671_3 (sequence is synthesized)
cagtggttcctgaaaaaaatcctcctccagaaagacagattccgagaagaggtgaagagtccagtgaaatggagcaaatttcaatcattgaaaggttcccttatcccttccaggttgtat

SEQ ID NO: 12756 - DNA, 120 bp, Artificial Sequence
  ENSG00000010671_4 (sequence is synthesized)
atgatgaagggcctctctacgtcttctccccaactgaagaactaaggaagcggtggattcaccagctcaaaaacgtaatccggtacaacagtgatctggttcagaaatatcacccttgct

SEQ ID NO: 12757 - DNA, 120 bp, Artificial Sequence
  ENSG00000010671_5 (sequence is synthesized)
tctggatcgatgggcagtatctctgctgctctcagacagccaaaaatgctatgggctgccaaattttggagaacaggaatggaagcttaaaacctgggagttctcaccggaagacaaaaa

SEQ ID NO: 12758 - DNA, 120 bp, Artificial Sequence
  ENSG00000010671_6 (sequence is synthesized)
agcctcttcccccaacgcctgaggaggaccagatcttgaaaaagccactaccgcctgagccagcagcagcaccagtctccacaagtgagctgaaaaaggttgtggccctttatgattaca

SEQ ID NO: 12759 - DNA, 120 bp, Artificial Sequence
  ENSG00000010671_7 (sequence is synthesized)
tgccaatgaatgcaaatgatctacagctgcggaagggtgatgaatattttatcttggaggaaagcaacttaccatggtggagagcacgagataaaaatgggcaggaaggctacattccta

SEQ ID NO: 12760 - DNA, 120 bp, Artificial Sequence
  ENSG00000010671_8 (sequence is synthesized)
gtaactatgtcactgaagcagaagactccatagaaatgtatgagtggtattccaaacacatgactcggagtcaggctgagcaactgctaaagcaagaggggaaagaaggaggtttcattg

SEQ ID NO: 12761 - DNA, 120 bp, Artificial Sequence
  ENSG00000010671_9 (sequence is synthesized)
tcagagactccagcaaagctggcaaatatacagtgtctgtgtttgctaaatccacaggggaccctcaaggggtgatacgtcattatgttgtgtgttccacacctcagagccagtattacc

SEQ ID NO: 12762 - DNA, 120 bp, Artificial Sequence
  ENSG00000010671_10 (sequence is synthesized)
tctgcaggactcatatccaggctcaaatatccagtgtctcaacaaaacaagaatgcaccttccactgcaggcctgggatacggatcatgggaaattgatccaaaggacctgaccttcttg

SEQ ID NO: 12763 - DNA, 120 bp, Artificial Sequence
  ENSG00000010671_11 (sequence is synthesized)
aaggagctggggactggacaatttggggtagtgaagtatgggaaatggagaggccagtacgacgtggccatcaagatgatcaaagaaggctccatgtctgaagatgaattcattgaagaa

SEQ ID NO: 12764 - DNA, 120 bp, Artificial Sequence
  ENSG00000010671_12 (sequence is synthesized)
gccaaagtcatgatgaatctttcccatgagaagctggtgcagttgtatggcgtctgcaccaagcagcgccccatcttcatcatcactgagtacatggccaatggctgcctcctgaactac

SEQ ID NO: 12765 - DNA, 120 bp, Artificial Sequence
  ENSG00000010671_13 (sequence is synthesized)
ctgagggagatgcgccaccgcttccagactcagcagctgctagagatgtgcaaggatgtctgtgaagccatggaatacctggagtcaaagcagttccttcaccgagacctggcagctcga

SEQ ID NO: 12766 - DNA, 120 bp, Artificial Sequence
  ENSG00000010671_14 (sequence is synthesized)
aactgtttggtaaacgatcaaggagttgttaaagtatctgatttcggcctgtccaggtatgtcctggatgatgaatacacaagctcagtaggctccaaatttccagtccggtggtcccca

SEQ ID NO: 12767 - DNA, 120 bp, Artificial Sequence
  ENSG00000010671_15 (sequence is synthesized)
ccggaagtcctgatgtatagcaagttcagcagcaaatctgacatttgggcttttggggttttgatgtgggaaatttactccctggggaagatgccatatgagagatttactaacagtgag

SEQ ID NO: 12768 - DNA, 120 bp, Artificial Sequence
  ENSG00000010671_16 (sequence is synthesized)
actgctgaacacattgcccaaggcctacgtctctacaggcctcatctggcttcagagaaggtatataccatcatgtacagttgctggcatgagaaagcagatgagcgtcccactttcaaa

SEQ ID NO: 12769 - DNA, 120 bp, Artificial Sequence
  ENSG00000010671_17 (sequence is synthesized)
attcttctgagcaatattctagatgtcatggatgaagaatcctgagctcgccaataagcttcttggttctacttctcttctccacaagccccaatttcactttctcagaggaaatcccaa

SEQ ID NO: 12770 - DNA, 120 bp, Artificial Sequence
  ENSG00000010671_18 (sequence is synthesized)
gcttaggagccctggagcctttgtgctcccactcaatacaaaaaggcccctctctacatctgggaatgcacctcttctttgattccctgggatagtggcttctgagcaaaggccaagaaa

SEQ ID NO: 12771 - DNA, 120 bp, Artificial Sequence
  ENSG00000010671_19 (sequence is synthesized)
ttattgtgcctgaaatttcccgagagaattaagacagactgaatttgcgatgaaaatattttttaggagggaggatgtaaatagccgcacaaaggggtccaacagctctttgagtaggca

SEQ ID NO: 12772 - DNA, 120 bp, Artificial Sequence
  ENSG00000010671_20 (sequence is synthesized)
tttggtagagcttgggggtgtgtgtgtgggggtggaccgaatttggcaagaatgaaatggtgtcataaagatgggaggggagggtgttttgataaaataaaattactagaaagcttgaaa

SEQ ID NO: 12773 - DNA, 120 bp, Artificial Sequence
  ENSG00000010671_21 (sequence is synthesized)
acagattccggtaagaagagaccaatgtctgagatggggaacagcagatttgaagaaatttgcaacatttaaattctctgtaaatagactggtgatgctgtgcaacgtggaacacggtca

SEQ ID NO: 12774 - DNA, 120 bp, Artificial Sequence
  ENSG00000010671_22 (sequence is synthesized)
agtttcctttaaaaattcttcactctaccatattggttataaagaatcttagcttctttccttcatattcagaacatctcactaaacatggaaaatttgttaacacaaacttttaaatga

SEQ ID NO: 12775 - DNA, 120 bp, Artificial Sequence
  ENSG00000010671_23 (sequence is synthesized)
attttatctagaaagtactataagttaggcgtgcctctgccccagtgctgagcccatcaaatatctccagcctcagctccatgaagtctgccgtggtgggaatcagagcagtcactcact

SEQ ID NO: 12776 - DNA, 120 bp, Artificial Sequence
  ENSG00000010671_24 (sequence is synthesized)
cccaaccccctaccacccacaagaaaatggtggggtctttcagtggccattctggatttggaacagaagggactgtgcttcccaatgggactgctcctggcatggggccatcatttggtt

SEQ ID NO: 12777 - DNA, 120 bp, Artificial Sequence
  ENSG00000010671_25 (sequence is synthesized)
ccttcagagtcacatactggggcctgtggatgcatttggcccacatgtgtgggttttttttatgttatataataattagcaaacccttaaaaagaaacatttcgcttaaaaaaaaaaaaa

SEQ ID NO: 12778 - DNA, 120 bp, Artificial Sequence
  ENSG00000010671_26 (sequence is synthesized)
ggtaagtgctttattaggatctcttaaattatttccttgaatctacttgcccatttagctggccattcagccaccaaagactgatagctgcacacattcttttttttccttttttttttt

SEQ ID NO: 12779 - DNA, 120 bp, Artificial Sequence
  ENSG00000010671_27 (sequence is synthesized)
ctccttcagggtggccaaggagggggcagttgcttgaagttcaccactaagctcaaagaggaaaacatgcaaatggtggcttctcctccatgtcagatgtgatctctctcttctttcctg

SEQ ID NO: 12780 - DNA, 120 bp, Artificial Sequence
  ENSG00000010671_28 (sequence is synthesized)
tttgctggagtctaggaattcacacaacaacccactgaggcttaaagatgacttacagtaagagaggtttgggacgagggactgaagtttacctttaactggcggtagtcctaagtgcta

SEQ ID NO: 12781 - DNA, 120 bp, Artificial Sequence
  ENSG00000010671_29 (sequence is synthesized)
agataatagtttctgtgccttagatattggttgagaatagtggtgatcatgggtgtgtaccatctcagtagcatttgggggtagatgtagaaaattaaactttcaagagaaatattctaa

SEQ ID NO: 12782 - DNA, 120 bp, Artificial Sequence
  ENSG00000010671_30 (sequence is synthesized)
ttcgtcactttatctcttttggtggactctgctacgtagtggcgttcagtgaagggagcagtgtttttcccagatcctctggcctccccgtccccgagggaagccaggactagggtcgaa

SEQ ID NO: 12783 - DNA, 120 bp, Artificial Sequence
  ENSG00000010671_31 (sequence is synthesized)
tgaaggggtcctccacctccacgttccattcctgttccacctcaaggtcactgggaacacctttcgcagcaaactgctaattcaatgaagacctggagggagccaattgttccagttcat

SEQ ID NO: 12784 - DNA, 120 bp, Artificial Sequence
  ENSG00000010671_32 (sequence is synthesized)
gatcttatttcacttcatccttcttgtaaccatattgtcaatcaggaaagctcaatcagatacaaaaacaggaaattcgttaaaagtaacgtttgtagaagatactagttgaggaggaga

SEQ ID NO: 12785 - DNA, 120 bp, Artificial Sequence
  ENSG00000010671_33 (sequence is synthesized)
ttgtgacactcttgtgaccgtgccaagaaaacgtaagcaaatatcaagcctccaaatcctaatgcaacaagtcctgaatcccttgcaggtatgtcctggatgatgaatacacaagctcag

SEQ ID NO: 12786 - DNA, 120 bp, Artificial Sequence
  ENSG00000010704_0 (sequence is synthesized)
ttttactgggcatctcctgagcctaggcaatagctgtagggtgacttctggagccatccccgtttccccgccccccaaaagaagcggagatttaacggggacgtgcggccagagctgggg

SEQ ID NO: 12787 - DNA, 120 bp, Artificial Sequence
  ENSG00000010704_1 (sequence is synthesized)
aaatgggcccgcgagccaggccggcgcttctcctcctgatgcttttgcagaccgcggtcctgcaggggcgcttgctgcgttcacactctctgcactacctcttcatgggtgcctcagagc

SEQ ID NO: 12788 - DNA, 120 bp, Artificial Sequence
  ENSG00000010704_2 (sequence is synthesized)
aggaccttggtctttccttgtttgaagctttgggctacgtggatgaccagctgttcgtgttctatgatcatgagagtcgccgtgtggagccccgaactccatgggtttccagtagaattt

SEQ ID NO: 12789 - DNA, 120 bp, Artificial Sequence
  ENSG00000010704_3 (sequence is synthesized)
caagccagatgtggctgcagctgagtcagagtctgaaagggtgggatcacatgttcactgttgacttctggactattatggaaaatcacaaccacagcaaggagtcccacaccctgcagg

SEQ ID NO: 12790 - DNA, 120 bp, Artificial Sequence
  ENSG00000010704_4 (sequence is synthesized)
tcatcctgggctgtgaaatgcaagaagacaacagtaccgagggctactggaagtacgggtatgatgggcaggaccaccttgaattctgccctgacacactggattggagagcagcagaac

SEQ ID NO: 12791 - DNA, 120 bp, Artificial Sequence
  ENSG00000010704_5 (sequence is synthesized)
ccagggcctggcccaccaagctggagtgggaaaggcacaagattcgggccaggcagaacagggcctacctggagagggactgccctgcacagctgcagcagttgctggagctggggagag

SEQ ID NO: 12792 - DNA, 120 bp, Artificial Sequence
  ENSG00000010704_6 (sequence is synthesized)
gtgttttggaccaacaagtgcctcctttggtgaaggtgacacatcatgtgacctcttcagtgaccactctacggtgtcgggccttgaactactacccccagaacatcaccatgaagtggc

SEQ ID NO: 12793 - DNA, 120 bp, Artificial Sequence
  ENSG00000010704_7 (sequence is synthesized)
tgaaggataagcagccaatggatgccaaggagttcgaacctaaagacgtattgcccaatggggatgggacctaccagggctggataaccttggctgtaccccctggggaagagcagagat

SEQ ID NO: 12794 - DNA, 120 bp, Artificial Sequence
  ENSG00000010704_8 (sequence is synthesized)
atacgtgccaggtggagcacccaggcctggatcagcccctcattgtgatctgggagccctcaccgtctggcaccctagtcattggagtcatcagtggaattgctgtttttgtcgtcatct

SEQ ID NO: 12795 - DNA, 120 bp, Artificial Sequence
  ENSG00000010704_9 (sequence is synthesized)
tgttcattggaattttgttcataatattaaggaagaggcagggttcaagaggagccatggggcactacgtcttagctgaacgtgagtgacacgcagcctgcagactcactgtgggaagga

SEQ ID NO: 12796 - DNA, 120 bp, Artificial Sequence
  ENSG00000010704_10 (sequence is synthesized)
gacaaaactagagactcaaagagggagtgcatttatgagctcttcatgtttcaggagagagttgaacctaaacatagaaattgcctgacgaactccttgattttagccttctctgttcat

SEQ ID NO: 12797 - DNA, 120 bp, Artificial Sequence
  ENSG00000010704_11 (sequence is synthesized)
ttcctcaaaaagatttccccatttaggtttctgagttcctgcatgccggtgatccctagctgtgacctctcccctggaactgtctctcatgaacctcaagctgcatctagaggcttcctt

SEQ ID NO: 12798 - DNA, 120 bp, Artificial Sequence
  ENSG00000010704_12 (sequence is synthesized)
catttcctccgtcacctcagagacatacacctatgtcatttcatttcctatttttggaagaggactccttaaatttgggggacttacatgattcattttaacatctgagaaaagctttga

SEQ ID NO: 12799 - DNA, 120 bp, Artificial Sequence
  ENSG00000010704_13 (sequence is synthesized)
accctgggacgtggctagtcataaccttaccagatttttacacatgtatctatgcattttctggacccgttcaacttttcctttgaatcctctctctgtgttacccagtaactcatctgt

SEQ ID NO: 12800 - DNA, 120 bp, Artificial Sequence
  ENSG00000010704_14 (sequence is synthesized)
caccaagccttggggattcttccatctgattgtgatgtgagttgcacagctatgaaggctgtacactgcacgaatggaagaggcacctgtcccagaaaaagcatcatggctatctgtggg

SEQ ID NO: 12801 - DNA, 120 bp, Artificial Sequence
  ENSG00000010704_15 (sequence is synthesized)
tagtatgatgggtgtttttagcaggtaggaggcaaatatcttgaaaggggttgtgaagaggtgttttttctaattggcatgaaggtgtcatacagatttgcaaagtttaatggtgccttc

SEQ ID NO: 12802 - DNA, 120 bp, Artificial Sequence
  ENSG00000010704_16 (sequence is synthesized)
atttgggatgctactctagtattccagacctgaagaatcacaataattttctacctggtctctccttgttctgataatgaaaattatgataaggatgataaaagcacttacttcgtgtcc

SEQ ID NO: 12803 - DNA, 120 bp, Artificial Sequence
  ENSG00000010704_17 (sequence is synthesized)
gactcttctgagcacctacttacatgcattactgcatgcacttcttacaataattctatgagataggtactattatccccatttcttttttaaatgaagaaagtgaagtaggccgggcac

SEQ ID NO: 12804 - DNA, 85 bp, Artificial Sequence
  ENSG00000010704_18 (sequence is synthesized)
tgaagtatagagtatctcatagtttgtcagtgatagaaacaggtttcaaactcagtcaatctgaccgtttgatacatctcagaca

SEQ ID NO: 12805 - DNA, 120 bp, Artificial Sequence
  ENSG00000010704_19 (sequence is synthesized)
tcaaactcagtcaatctgaccgtttgatacatctcagacaccactacattcagtagtttagatgcctagaataaatagagaaggaaggagatggctcttctcttgtctcattgtgtttct

SEQ ID NO: 12806 - DNA, 120 bp, Artificial Sequence
  ENSG00000010704_20 (sequence is synthesized)
tgagcttgaatcacatgaaggggaacagcagaaaacaaccaactgatcctcagctgtcatgtttcctttaaaagtccctgaaggaaggtcctggaatgtgactcccttgctcctctgttg

SEQ ID NO: 12807 - DNA, 120 bp, Artificial Sequence
  ENSG00000010704_21 (sequence is synthesized)
ctctctttggcattcatttctttggaccctacgcaaggactgtaattggtggggacagctagtggccctgctgggcttcacacacggtgtcctccctaggccagtgcctctggagtcaga

SEQ ID NO: 12808 - DNA, 120 bp, Artificial Sequence
  ENSG00000010704_22 (sequence is synthesized)
actctggtggtatttccctcaatgaagtggagtaagctctctcattttgagatggtataatggaagccaccaagtggcttagaggatgcccaggtccttccatggagccactggggttcc

SEQ ID NO: 12809 - DNA, 120 bp, Artificial Sequence
  ENSG00000010704_23 (sequence is synthesized)
ggtgcacattaaaaaaaaaatctaaccaggacattcaggaattgctagattctgggaaatcagttcaccatgttcaaaagagtcttttttttttttttgagactctattgcccaggctgg

SEQ ID NO: 12810 - DNA, 120 bp, Artificial Sequence
  ENSG00000010704_24 (sequence is synthesized)
ctgcccagccgtcaaaagagtcttaatatatatatccagatggcatgtgtttactttatgttactacatgcacttggctgcataaatgtggtacaagcattctgtcttgaagggcaggtg

SEQ ID NO: 12811 - DNA, 120 bp, Artificial Sequence
  ENSG00000010704_25 (sequence is synthesized)
cttcaggataccatatacagctcagaagtttcttctttaggcattaaattttagcaaagatatctcatctcttcttttaaaccattttctttttttgtggttagaaaagttatgtagaaa

SEQ ID NO: 12812 - DNA, 120 bp, Artificial Sequence
  ENSG00000010704_26 (sequence is synthesized)
aaagtaaatgtgatttacgctcattgtagaaaagctataaaatgaatacaattaaagctgttatttaattagccagtgaaaaactattaacaacttgtctattacctgttagtattattg

SEQ ID NO: 12813 - DNA, 120 bp, Artificial Sequence
  ENSG00000010704_27 (sequence is synthesized)
ttgcattaaaaatgcatatactttaataaatgtatattgtattgtatactgcatgattttattgaagttcttgttcatcttgtgtatatacttaatcgctttgtcattttggagacattt

SEQ ID NO: 12814 - DNA, 120 bp, Artificial Sequence
  ENSG00000010704_28 (sequence is synthesized)
attttgcttctaatttctttacattttgtcttacggaatattttcattcaactgtggtagccgaattaatcgtgtttcttcactctagggacattgtcgtctaagttgtaagacattggt

SEQ ID NO: 12815 - DNA, 120 bp, Artificial Sequence
  ENSG00000010704_29 (sequence is synthesized)
tattttaccagcaaaccattctgaaagcatatgacaaattatttctctcttaatatcttactatactgaaagcagactgctataaggcttcacttactcttctacctcataaggaatatg

SEQ ID NO: 12816 - DNA, 120 bp, Artificial Sequence
  ENSG00000010704_30 (sequence is synthesized)
ttacaattaatttattaggtaagcatttgttttatattggttttatttcacctgggctgagatttcaagaaacaccccagtcttcacagtaacacatttcactaacacatttactaaaca

SEQ ID NO: 12817 - DNA, 120 bp, Artificial Sequence
  ENSG00000010704_31 (sequence is synthesized)
tcagcaactgtggcctgttaatttttttaatagaaattttaagtcctcattttctttcggtgttttttaagcttaatttttctggctttattcataaattcttaaggtcaactacatttg

SEQ ID NO: 12818 - DNA, 120 bp, Artificial Sequence
  ENSG00000010704_32 (sequence is synthesized)
aaaaatcaaagacctgcattttaaattcttattcacctctggcaaaaccattcacaaaccatggtagtaaagagaagggtgacacctggtggccataggtaaatgtaccacggtggtccg

SEQ ID NO: 12819 - DNA, 120 bp, Artificial Sequence
  ENSG00000010704_33 (sequence is synthesized)
gtgaccagagatgcagcgctgagggttttcctgaaggtaaaggaataaagaatgggtggaggggcgtgcactggaaatcacttgtagagaaaagcccctgaaaatttgagaaaacaaaca

SEQ ID NO: 12820 - DNA, 120 bp, Artificial Sequence
  ENSG00000010704_34 (sequence is synthesized)
agaaactacttaccagctatttgaattgctggaatcacaggccattgctgagctgcctgaactgggaacacaacagaaggaaaacaaaccactctgataatcattgagtcaagtacagca

SEQ ID NO: 12821 - DNA, 120 bp, Artificial Sequence
  ENSG00000010704_35 (sequence is synthesized)
ggtgattgaggactgctgagaggtacaggccaaaattcttatgttgtattataataatgtcatcttataatactgtcagtattttataaaacattcttcacaaactcacacacatttaaa

SEQ ID NO: 12822 - DNA, 120 bp, Artificial Sequence
  ENSG00000010704_36 (sequence is synthesized)
aacaaaacactgtctctaaaatccccaaatttttcataaactcagttttaaactaactttttttcaaaccacaatctgatttaacaatgactatcatttaaatatttctgactttcaaat

SEQ ID NO: 12823 - DNA, 120 bp, Artificial Sequence
  ENSG00000010704_37 (sequence is synthesized)
taaagattttcacatgcaggctgatatttgtaattgtgattctctctgtaggctttgggtataatgtgttcttttccttttttgcatcagcgattaacttctacactctaacatgtagaa

SEQ ID NO: 12824 - DNA, 120 bp, Artificial Sequence
  ENSG00000010704_38 (sequence is synthesized)
tgttactacaatattaaagtattttgtatgacaattttatttgaaagcctaggatgcgttgacatcctgcatgcatttattacttgatatgcatgcattctggtatctcaagcattctat

SEQ ID NO: 12825 - DNA, 120 bp, Artificial Sequence
  ENSG00000010704_39 (sequence is synthesized)
ttctgagtaattgtttaaggtgtagaagagatagatatggtggatttggagttgatacttatatattttctatttcttggatggatgaatttgtacattaaaagttttccatggcagaaa

SEQ ID NO: 12826 - DNA, 120 bp, Artificial Sequence
  ENSG00000010704_40 (sequence is synthesized)
tcaccttcctgaggttgtcagagcttttcatcttttcatgcatcttgaaggaaacagctggaagtctgaggtcttgtgggagcagggaagagggaaggaatttgcttcctgagatcattt

SEQ ID NO: 12827 - DNA, 120 bp, Artificial Sequence
  ENSG00000010803_0 (sequence is synthesized)
ttaatcttatactttctttccacatgactatttttctctccctctgcagtgatagactggagtgatgttagaaaacacaaatatggtcacctatcagagtctgcatcccaatatcaagaa

SEQ ID NO: 12828 - DNA, 120 bp, Artificial Sequence
  ENSG00000010803_1 (sequence is synthesized)
gctgctgacatcctggatctagggttgtaaagaagattacatgagctaatggatgtgaaaacatcttaaaaactctcaaatacttttcaactttggaggattattatgattttcattctg

SEQ ID NO: 12829 - DNA, 120 bp, Artificial Sequence
  ENSG00000010803_2 (sequence is synthesized)
ttcagcggctatactcagactttactctaaaagtcaaatcttctgacattctttgaagtgaagcattctatgaatgtgagctgaagaaatgaatgaaatgaaataatgcagtcctacaca

SEQ ID NO: 12830 - DNA, 120 bp, Artificial Sequence
  ENSG00000010803_3 (sequence is synthesized)
cctccaagcaacgagttcaagatcagtatgaaattggaagcacaggaccccaggaacaccacatccacctgtattgccacagtagttggactgacaggtgcccgccttcgcctgcgcctt

SEQ ID NO: 12831 - DNA, 120 bp, Artificial Sequence
  ENSG00000010803_4 (sequence is synthesized)
gatgggagcgacaacaaaaatgacttctggcggctggttgactcagctgaaatccagcctattgggaactgtgaaaagaatgggggtatgctacagccacctcttggatttcggctgaat

SEQ ID NO: 12832 - DNA, 120 bp, Artificial Sequence
  ENSG00000010803_5 (sequence is synthesized)
gcgtcttcttggcccatgttccttttgaagacgctaaatggagcagagatggctcccatcaggattttccacaaggagccaccatcgccttcccacaacttcttcaaaatgggaatgaag

SEQ ID NO: 12833 - DNA, 120 bp, Artificial Sequence
  ENSG00000010803_6 (sequence is synthesized)
ctagaagctgtggacaggaagaaccctcatttcatttgcccagccactattggggaggttcggggctcagaggtgcttgtcacttttgatgggtggcgaggggcctttgactactggtgc

SEQ ID NO: 12834 - DNA, 120 bp, Artificial Sequence
  ENSG00000010803_7 (sequence is synthesized)
cgcttcgactcccgagacatcttccctgtgggctggtgttccttgactggagacaacctgcagcctcctggcaccaaagttgtgattccaaagaatccctatcctgcctccgatgtgaat

SEQ ID NO: 12835 - DNA, 120 bp, Artificial Sequence
  ENSG00000010803_8 (sequence is synthesized)
actgagaagcccagcatccacagcagcaccaaaactgtcttggaacatcaaccagggcagagggggcgtaaaccaggaaagaagcggggccggacacccaagaccctaatttcccatccc

SEQ ID NO: 12836 - DNA, 120 bp, Artificial Sequence
  ENSG00000010803_9 (sequence is synthesized)
atctctgccccatccaagacagctgaacctttgaaattcccaaagaagagaggtcccaaacctggcagcaagaggaaacctcggactttgctgaacccaccacctgcctcaccaacaacc

SEQ ID NO: 12837 - DNA, 120 bp, Artificial Sequence
  ENSG00000010803_10 (sequence is synthesized)
agcactcctgaaccggataccagcactgtaccccaggatgctgccaccatccccagctcagccatgcaggccccaacagtttgtatctacttgaacaagaatggcagcacaggcccccac

SEQ ID NO: 12838 - DNA, 120 bp, Artificial Sequence
  ENSG00000010803_11 (sequence is synthesized)
ttagataagaagaaggtccagcaactccctgaccattttggaccagcccgtgcctctgtggtgttgcagcaggctgtccaggcctgtatcgactgtgcttatcaccagaaaaccgtcttc

SEQ ID NO: 12839 - DNA, 120 bp, Artificial Sequence
  ENSG00000010803_12 (sequence is synthesized)
agaaactctgccacaaccttcgtagtgacaatctgtttggcaaccagccctttacacagactcacttgtcactcactgccatagagtacagccacagccacgacaggtacctaccaggtg

SEQ ID NO: 12840 - DNA, 120 bp, Artificial Sequence
  ENSG00000010803_13 (sequence is synthesized)
aaacctttgtcctggggaatagtctggcccgctccttggaaccacactcagactcaatggactctgcctcaaatcccaccaaccttgtcagcacctcccaaaggcaccggcccttgcttt

SEQ ID NO: 12841 - DNA, 120 bp, Artificial Sequence
  ENSG00000010803_14 (sequence is synthesized)
catcctgtggcctcccaccaagcactgcctcagctgtgcgcaggctatgctccagggggtcggaccgatacctggagagccgcgatgcctctcgactgagtggccgggacccctcctcat

SEQ ID NO: 12842 - DNA, 120 bp, Artificial Sequence
  ENSG00000010803_15 (sequence is synthesized)
ggacagtcgaggatgtgatgcagtttgtccgggaagctgatcctcagcttggaccccacgctgacctgtttcgcaaacacgagatcgatggcaaggccctgctgctgctgcgcagtgaca

SEQ ID NO: 12843 - DNA, 120 bp, Artificial Sequence
  ENSG00000010803_16 (sequence is synthesized)
tgatgatgaagtacatgggcctgaagctggggcctgcactcaagctctcctaccacattgaccggctgaagcagggcaagttctgaaccaggagaggcagcctagacaaccaagtggcag

SEQ ID NO: 12844 - DNA, 120 bp, Artificial Sequence
  ENSG00000010803_17 (sequence is synthesized)
caggtgggggcattcttctaggaatgaggggcatcagcccaccccaggcacctcagtggggttccgggccacctcaggactccaagaggctgtgtggagccaccactcctagccacagct

SEQ ID NO: 12845 - DNA, 120 bp, Artificial Sequence
  ENSG00000010803_18 (sequence is synthesized)
gccatgataagtccttccatgaaggactgaggagggagagtgggggtccagggctggtgctgctcttccctcagctctgccggggctctaaggtccctctatttatttctcaaccctggc

SEQ ID NO: 12846 - DNA, 120 bp, Artificial Sequence
  ENSG00000010803_19 (sequence is synthesized)
tggcctctcaccaggagtttaggctgaatgccttccacgtgatggaggaaaaggccaactctgtcctggtcttgctgtggcaccccatcgccccacagctcgtaccttctcaccagattc

SEQ ID NO: 12847 - DNA, 120 bp, Artificial Sequence
  ENSG00000010803_20 (sequence is synthesized)
ccctgaatccaaactcgtggtgcaaacctctaccttttttacaaaaagatcttattgttaatttattgtttctggcacttgggcaaaccctgtagttaatactcctcccacactagacac

SEQ ID NO: 12848 - DNA, 120 bp, Artificial Sequence
  ENSG00000010803_21 (sequence is synthesized)
tgggtttcaggaggagggagactgccctgctttggtcccagagaggccctctgcagataggcgtggcccctcttcagaggacactaccctagggcactttctctttgaggtggagagacc

SEQ ID NO: 12849 - DNA, 120 bp, Artificial Sequence
  ENSG00000010803_22 (sequence is synthesized)
cataaagccttgaccacatcactccatatggggaggagaaggatccctgtcaccttctcctctcttcacggggcccttttgcagccctaggcctcatctgtgggaagggagtccctggct

SEQ ID NO: 12850 - DNA, 120 bp, Artificial Sequence
  ENSG00000010803_23 (sequence is synthesized)
tatactgcccccaccacagctccttgccctggccagaactgctgtcgaagaaaatcaggccggaaggccaagaaggcgctaagggggatgggagggcaggttttccaggctggagtcggt

SEQ ID NO: 12851 - DNA, 120 bp, Artificial Sequence
  ENSG00000010803_24 (sequence is synthesized)
tccacccactcgcctgtccacaggcttccttgtaagcaagtcagcagcacagctactcacgctgccatctggacttattttatgtcaatctgtttataaataaaaaccaatatagatacc

SEQ ID NO: 12852 - DNA, 120 bp, Artificial Sequence
  ENSG00000010803_25 (sequence is synthesized)
gcggaaacatggcggcgggaagagagtgagccgccccgcgcccccgccgcgccctcagatggagaaattagcatacaaagaaactgacttgtcagaagtcagagcaaggtattggtggat

SEQ ID NO: 12853 - DNA, 120 bp, Artificial Sequence
  ENSG00000010803_26 (sequence is synthesized)
tgctttttgcatggcccaaaggggctctgtgctgctccactacagaggaaacttcaagaaatgctggtttgctacagtgttttagcttgtgagattctctgggaccttccctgctccatc

SEQ ID NO: 12854 - DNA, 120 bp, Artificial Sequence
  ENSG00000010803_27 (sequence is synthesized)
atgcacctgatactgtccatcttaatatcctgtttctttcctttgttataattataatagttgctaatatttttagctacctgtattttgtcatctgcctcactatagtaaatgttccat

SEQ ID NO: 12855 - DNA, 120 bp, Artificial Sequence
  ENSG00000010803_28 (sequence is synthesized)
ggactcgtcctgcctagcgctgtactccactgccaggctgacatgcttggccctgtttactcactccacagccgtgtttgaccgggaacagcataccctcaacctcccagcagtcaacag

SEQ ID NO: 12856 - DNA, 120 bp, Artificial Sequence
  ENSG00000010803_29 (sequence is synthesized)
gccaaatcagtgactaagtacttccgagagagattaaagattcaatggaactctgcgtctctcatctggaacccaggacacagaacaagggagggaagaaaagctcagccttaaacatag

SEQ ID NO: 12857 - DNA, 120 bp, Artificial Sequence
  ENSG00000010803_30 (sequence is synthesized)
caagcagggggcatatttcagcccttttggtgttacagcaactcttttagccacgccgttcagcagatcccgagttcttgtcctgcaaccaggaagaatgaggtacgcagacaagtggag

SEQ ID NO: 12858 - DNA, 120 bp, Artificial Sequence
  ENSG00000010803_31 (sequence is synthesized)
ggtgagcaagatgaagaggtgctgtattgagcaatggaacagctcagagaagactcacagtgccagggcgtcccagtgagtgttcagcccctagcaggaaggatagctcctctctgcagt

SEQ ID NO: 12859 - DNA, 120 bp, Artificial Sequence
  ENSG00000010803_32 (sequence is synthesized)
ctatcgtggaggtaagagggattaagagacctagcaaggactggctttaaggaattcctcacgaataattagactactcgttatccttttctttatagccatgatgtcatttttgtcatt

SEQ ID NO: 12860 - DNA, 120 bp, Artificial Sequence
  ENSG00000010810_0 (sequence is synthesized)
agagcatcagcaagagtagcagcgagcagccgcgctggtggcggcggcgcgtcgttgcagttgcgccatctgtcaggagcggagccggcgaggagggggctgccgcgggcgaggaggagg

SEQ ID NO: 12861 - DNA, 120 bp, Artificial Sequence
  ENSG00000010810_1 (sequence is synthesized)
ggtcgccgcgagccgaaggccttcgagacccgcccgccgcccggcggcgagagtagaggcgaggttgttgtgcgagcggcgcgtcctctcccgcccgggcgcgccgcgcttctcccagcg

SEQ ID NO: 12862 - DNA, 80 bp, Artificial Sequence
  ENSG00000010810_2 (sequence is synthesized)
gccagggagggattcggccgccgggccggggacaccccggcgccgccccctcggtgctctcggaaggcccaccggctccc

SEQ ID NO: 12863 - DNA, 120 bp, Artificial Sequence
  ENSG00000010810_3 (sequence is synthesized)
ccaccggctcccgggcccgccggggaccccccggagccgcctcggccgcgccggaggagggcggggagaggaccatgtgagtgggctccggagcctcagcgccgcgcagtttttttgaag

SEQ ID NO: 12864 - DNA, 120 bp, Artificial Sequence
  ENSG00000010810_4 (sequence is synthesized)
cgcagtttttttgaagaagcaggatgctgatctaaacgtggaaaaagaccagtcctgcctctgttgtagaagacatgtggtgtatataaagtttgtgatcgttggcggacattttggaat

SEQ ID NO: 12865 - DNA, 120 bp, Artificial Sequence
  ENSG00000010810_5 (sequence is synthesized)
ttagataatgggctgtgtgcaatgtaaggataaagaagcaacaaaactgacggaggagagggacggcagcctgaaccagagctctgggtaccgctatggcacagaccccacccctcagca

SEQ ID NO: 12866 - DNA, 120 bp, Artificial Sequence
  ENSG00000010810_6 (sequence is synthesized)
ctaccccagcttcggtgtgacctccatccccaactacaacaacttccacgcagccgggggccaaggactcaccgtctttggaggtgtgaactcttcgtctcatacggggaccttgcgtac

SEQ ID NO: 12867 - DNA, 120 bp, Artificial Sequence
  ENSG00000010810_7 (sequence is synthesized)
gagaggaggaacaggagtgacactctttgtggccctttatgactatgaagcacggacagaagatgacctgagttttcacaaaggagaaaaatttcaaatattgaacagctcggaaggaga

SEQ ID NO: 12868 - DNA, 120 bp, Artificial Sequence
  ENSG00000010810_8 (sequence is synthesized)
ttggtgggaagcccgctccttgacaactggagagacaggttacattcccagcaattatgtggctccagttgactctatccaggcagaagagtggtactttggaaaacttggccgaaaaga

SEQ ID NO: 12869 - DNA, 120 bp, Artificial Sequence
  ENSG00000010810_9 (sequence is synthesized)
tgctgagcgacagctattgtcctttggaaacccaagaggtacctttcttatccgcgagagtgaaaccaccaaaggtgcctattcactttctatccgtgattgggatgatatgaaaggaga

SEQ ID NO: 12870 - DNA, 120 bp, Artificial Sequence
  ENSG00000010810_10 (sequence is synthesized)
ccatgtcaaacattataaaattcgcaaacttgacaatggtggatactacattaccacccgggcccagtttgaaacacttcagcagcttgtacaacattactcagagagagctgcaggtct

SEQ ID NO: 12871 - DNA, 120 bp, Artificial Sequence
  ENSG00000010810_11 (sequence is synthesized)
ctgctgccgcctagtagttccctgtcacaaagggatgccaaggcttaccgatctgtctgtcaaaaccaaagatgtctgggaaatccctcgagaatccctgcagttgatcaagagactggg

SEQ ID NO: 12872 - DNA, 120 bp, Artificial Sequence
  ENSG00000010810_12 (sequence is synthesized)
aaatgggcagtttggggaagtatggatgggtacctggaatggaaacacaaaagtagccataaagactcttaaaccaggcacaatgtcccccgaatcattccttgaggaagcgcagatcat

SEQ ID NO: 12873 - DNA, 120 bp, Artificial Sequence
  ENSG00000010810_13 (sequence is synthesized)
gaagaagctgaagcacgacaagctggtccagctctatgcagtggtgtctgaggagcccatctacatcgtcaccgagtatatgaacaaaggaagtttactggatttcttaaaagatggaga

SEQ ID NO: 12874 - DNA, 120 bp, Artificial Sequence
  ENSG00000010810_14 (sequence is synthesized)
aggaagagctctgaaattaccaaatcttgtggacatggcagcacaggtggctgcaggaatggcttacatcgagcgcatgaattatatccatagagatctgcgatcagcaaacattctagt

SEQ ID NO: 12875 - DNA, 120 bp, Artificial Sequence
  ENSG00000010810_15 (sequence is synthesized)
gacttcggattggcccgattgatagaagacaatgagtacacagcaagacaaggtgcaaagttccccatcaagtggacggcccccgaggcagccctgtacgggaggttcacaatcaagtct

SEQ ID NO: 12876 - DNA, 120 bp, Artificial Sequence
  ENSG00000010810_16 (sequence is synthesized)
gacgtgtggtcttttggaatcttactcacagagctggtcaccaaaggaagagtgccatacccaggcatgaacaaccgggaggtgctggagcaggtggagcgaggctacaggatgccctgc

SEQ ID NO: 12877 - DNA, 120 bp, Artificial Sequence
  ENSG00000010810_17 (sequence is synthesized)
ccgcaggactgccccatctctctgcatgagctcatgatccactgctggaaaaaggaccctgaagaacgccccacttttgagtacttgcagagcttcctggaagactactttaccgcgaca

SEQ ID NO: 12878 - DNA, 120 bp, Artificial Sequence
  ENSG00000010810_18 (sequence is synthesized)
gagccccagtaccaacctggtgaaaacctgtaaggcccgggtctgcggagagaggccttgtcccagaggctgccccacccctccccattagctttcaattccgtagccagctgctcccca

SEQ ID NO: 12879 - DNA, 120 bp, Artificial Sequence
  ENSG00000010810_19 (sequence is synthesized)
gcagcggaaccgcccaggatcagattgcatgtgactctgaagctgacgaacttccatggccctcattaatgacacttgtccccaaatccgaacctcctctgtgaagcattcgagacagaa

SEQ ID NO: 12880 - DNA, 120 bp, Artificial Sequence
  ENSG00000010810_20 (sequence is synthesized)
ccttgttatttctcagactttggaaaatgcattgtatcgatgttatgtaaaaggccaaacctctgttcagtgtaaatagttactccagtgccaacaatcctagtgctttccttttttaaa

SEQ ID NO: 12881 - DNA, 120 bp, Artificial Sequence
  ENSG00000010810_21 (sequence is synthesized)
aatgcaaatcctatgtgattttaactctgtcttcacctgattcaactaaaaaaaaaaaagtattattttccaaaagtggcctctttgtctaaaacaataaaattttttttcatgttttaa

SEQ ID NO: 12882 - DNA, 120 bp, Artificial Sequence
  ENSG00000010810_22 (sequence is synthesized)
caaaaaccaatcaggacaggtgtttgtttttgttttcttttttataaatatgaatatatataatatatatgtccctgtacatatacaatgtgggtgctaatgtggagactgtggccggcc

SEQ ID NO: 12883 - DNA, 120 bp, Artificial Sequence
  ENSG00000010810_23 (sequence is synthesized)
tgagccaccaagctgcgggacccagagggaggattttactgcaagtcagcatcaaagcaccggtgttattctgaaaacaccagtggcctcatttttggcttttgcaaagcatgaattttt

SEQ ID NO: 12884 - DNA, 120 bp, Artificial Sequence
  ENSG00000010810_24 (sequence is synthesized)
tcatttggattgcactttcctggttcatgactgtacctgtaggtggttgttactttgactcttttcaggaaccaccccccaagctgaatttacaagttctgttagcactatttgcttcaa

SEQ ID NO: 12885 - DNA, 120 bp, Artificial Sequence
  ENSG00000010810_25 (sequence is synthesized)
cttactgcgatttgttctcaaaacttaaaaataagcaagcaaatggctgatactaccaagagaactggaagatggataccacacaaacttcttgtataaaaatatgaatgctgaaatgtt

SEQ ID NO: 12886 - DNA, 120 bp, Artificial Sequence
  ENSG00000010810_26 (sequence is synthesized)
tcagacatttttaatttaataaacctgtaaccacatttaagtgatctaaaacccatagcattgtagtcatggcaacccgctaaactttctcatgcaactaaaatttctgggggaaatgag

SEQ ID NO: 12887 - DNA, 120 bp, Artificial Sequence
  ENSG00000010810_27 (sequence is synthesized)
ggtgggggttgtacatttcccattgtaaaataagtgttttaaatgtcctgtactgctaacgaatgactttctatatgtccaggagttctccagtggaataactatgcactactttacatt

SEQ ID NO: 12888 - DNA, 120 bp, Artificial Sequence
  ENSG00000010810_28 (sequence is synthesized)
tcatggggatgcacaaaaacaaaaaagtattacatttttagttgctgtttgtaccaaccttaaattacatatgtttaacaacaacaaatcaaaaatcctatttctattgagtttttaata

SEQ ID NO: 12889 - DNA, 120 bp, Artificial Sequence
  ENSG00000010810_29 (sequence is synthesized)
ctgactagcaactctgaagtcttaattccttttttgttatgatttatttgtgagtttacatttttaaattgtttaactttcttaatttagtaattaaaaagagagcattttacatttgaa

SEQ ID NO: 12890 - DNA, 120 bp, Artificial Sequence
  ENSG00000010810_30 (sequence is synthesized)
aagagaacaaaagtgtctgagaaagccagagtgtgaccacgcggtttctatgctccaagggatttatttcagtggtaggtggagcagctctgtggagcacatggctaatgataatggatt

SEQ ID NO: 12891 - DNA, 120 bp, Artificial Sequence
  ENSG00000010810_31 (sequence is synthesized)
gactgaccagaagcaggagaggacctagcagaagccggaggtcaagctgccccaagactgggggacagcctgggtgaagactctggacctcatgaccatgtatattccagagggggatct

SEQ ID NO: 12892 - DNA, 120 bp, Artificial Sequence
  ENSG00000010810_32 (sequence is synthesized)
tcgagttgtaccccacaaacttctggattggctaaagatgcttgggaagttgcacgtcgttcgttgtgtctggagaagaagctgggtcaggggtgtttcgctgaagtgtggcttggtacc

SEQ ID NO: 12893 - DNA, 120 bp, Artificial Sequence
  ENSG00000010810_33 (sequence is synthesized)
caggctggtggaaggttctgcagatactcagtggatgtcagagccgcagcgccacatccatggcctccccgatgttaatgggaagaggtacacactccattcctgctcttcatcacaggg

SEQ ID NO: 12894 - DNA, 120 bp, Artificial Sequence
  ENSG00000010810_34 (sequence is synthesized)
atttattcttaagctgtttttgtcagggatggatgagtttctcattcttgagttgaaatgaaacttttaaatattcttaataactgtcttatcgccagaccctctgcatgagacaccaag

SEQ ID NO: 12895 - DNA, 120 bp, Artificial Sequence
  ENSG00000010810_35 (sequence is synthesized)
gtttgttgaattttacatccctcaggaaatagctgtggctcaaaggcagacagctttgggtagaagcacatgacagcagcatcggagaaagctagtcagcagtggcagcagcaaggcaac

SEQ ID NO: 12896 - DNA, 120 bp, Artificial Sequence
  ENSG00000010810_36 (sequence is synthesized)
gagggggcagccacccttaaatcttttggcaattgaacatctgggttcccatcacttccctttgactaggggtttcacatgtaagtttctaatctgtctcctctactagatgaggggttg

SEQ ID NO: 12897 - DNA, 120 bp, Artificial Sequence
  ENSG00000010810_37 (sequence is synthesized)
tccaaagctgcgtgaacagaatgctaaaggataggaagtgtgagaagaatgctttgaaagaaaccttaaaaacaaaacaactgactattcagagaataccaggtcttatgtggaatcatc

SEQ ID NO: 12898 - DNA, 120 bp, Artificial Sequence
  ENSG00000010810_38 (sequence is synthesized)
gtataagccaaggagctgagagagggggagaccagcgcaggtctgaggagctgagaagggaggcttacgtgaagggtaagactcgcatgggcctggccggtggacaagatgtgggaactg

SEQ ID NO: 12899 - DNA, 120 bp, Artificial Sequence
  ENSG00000010810_39 (sequence is synthesized)
catggacagttatgtggaggtgcattccatcctggctggagagtgtgtgaggggcagtgggagattggtggaaaagatataggccactggtgtggaaggctgggaagccacgcttcagat

SEQ ID NO: 12900 - DNA, 120 bp, Artificial Sequence
  ENSG00000010810_40 (sequence is synthesized)
atggccaggcctgttccaacccctggactttcatcactgtatggtgcagagcttttggtataaatgtgtaatcatatgactgagccaaaaaaagagagagtggtaatatatcaaaattta

SEQ ID NO: 12901 - DNA, 120 bp, Artificial Sequence
  ENSG00000010810_41 (sequence is synthesized)
aaaaaattttaatgagttataaatcttaatatagccatcttagccataaccacaaataaactcattttttctgttaaaatacttgacagagtccttgcaattgaatgtctttgttcaaca

SEQ ID NO: 12902 - DNA, 120 bp, Artificial Sequence
  ENSG00000010810_42 (sequence is synthesized)
aaaactgtattaagtgttttaaatttaaaatctaatcttatgcaaatagctggtggtcaaaacctttttccatcaaaagaagatctttggtttgacttcatattctgggatgtttgtagg

SEQ ID NO: 12903 - DNA, 120 bp, Artificial Sequence
  ENSG00000010810_43 (sequence is synthesized)
atttttcttatcagtaaagtggtccctttcacaggaccaagtaaaattactcgcttttaaattgaaaaacacaaaccaaatacattttgtttttgtttttgttttctgacttgggtcttg

SEQ ID NO: 12904 - DNA, 120 bp, Artificial Sequence
  ENSG00000010810_44 (sequence is synthesized)
agagtatgttttctttgccagcccttaatggtagggcttggctgtataggttctattgctattgttctactgttgttattattagttccacatgtttgtccgaagattctataatatttt

SEQ ID NO: 12905 - DNA, 120 bp, Artificial Sequence
  ENSG00000010810_45 (sequence is synthesized)
tgtttcccaagtagaaagcaataggttaaattttaaaagttgtttgttttttcatcttcaagttgtcttttcccattccccgcgttgcatgtgagaaagcagtctctcggagggcgctta

SEQ ID NO: 12906 - DNA, 120 bp, Artificial Sequence
  ENSG00000010810_46 (sequence is synthesized)
catggggactcctacaaggaatattgtgtttccactatcactttaccctcagcactgttgcaggaatagctgcacgtacatttcattctcatgcaagccatttatcatgttccccaccaa

SEQ ID NO: 12907 - DNA, 120 bp, Artificial Sequence
  ENSG00000010810_47 (sequence is synthesized)
caggatgctgatctaaacgtggaaaaaagtgaacataagtcaagacagcagtgaggcactctggcgctgggacacagtgagaaattaagatttgctagtgctggttccagggcggcctga

SEQ ID NO: 12908 - DNA, 120 bp, Artificial Sequence
  ENSG00000010810_48 (sequence is synthesized)
actcttgtacttcagctcatgtcatgctgggacagatctgaaggaagatccatctccctcgggtttcttgatacttctgtgccttctgtctggcaagggcgtcagagccacgggaactta

SEQ ID NO: 12909 - DNA, 120 bp, Artificial Sequence
  ENSG00000010810_49 (sequence is synthesized)
aactgtgggttcatctcatggctgactcgaactggaaccttctgaccttcacagggggactatgttggagttcagagtaaaggaataggttggagaaatcgggtggcaggatgattaggt

SEQ ID NO: 12910 - DNA, 120 bp, Artificial Sequence
  ENSG00000010810_50 (sequence is synthesized)
aggaaggaaaacaacgcatagcaacaaatttcctgttttttaaagaaagatccaacttggtttagaaattatgctggcttgctttctatgtttctaatagagaataaggagaaacttgct

SEQ ID NO: 12911 - DNA, 120 bp, Artificial Sequence
  ENSG00000010810_51 (sequence is synthesized)
cccaaacaccaaagatggaaggtgaaaataaagactgcgtgaccgggaagaaagtttgaattactaatagtggggaataataatttcagttttggttttaacattctggaattcctaaaa

SEQ ID NO: 12912 - DNA, 120 bp, Artificial Sequence
  ENSG00000010810_52 (sequence is synthesized)
gtcaaaccacagcggagagaataatcgaatgaaaactgaagctttctgctttattccttttctccttctcctttcagtcagggtctcactctgtcacccaggctgacacgatcatggctc

SEQ ID NO: 12913 - DNA, 120 bp, Artificial Sequence
  ENSG00000010818_0 (sequence is synthesized)
ccgccggcctgcggccgagcgagcgcagcgaaggcgctggctctgggcatttcagtgactccctttacctcccgggcaaggaaggaaggaaggaaggagcgaaggaaggaagcgaggaag

SEQ ID NO: 12914 - DNA, 120 bp, Artificial Sequence
  ENSG00000010818_1 (sequence is synthesized)
gaggggactgtctcgatggaaggttcaggcggaggcgccctcgccttgcgggtgcaccggctgcagagcggctctggccgctgccggctggacccgggcgcgtggagacgggtggagcct

SEQ ID NO: 12915 - DNA, 120 bp, Artificial Sequence
  ENSG00000010818_2 (sequence is synthesized)
ttgaattttttaaaagaccatagtaatcagatctacttgaaaaattaagtgaattgatttggttggaatgctcttttaccgatgctttaacatacagccactaggaagcgtcaggacaat

SEQ ID NO: 12916 - DNA, 120 bp, Artificial Sequence
  ENSG00000010818_3 (sequence is synthesized)
catgcccataagaactctaaactgttcagatcattttatcttagtgaaactggcaattgaactttgctctagttgatgggcaaaatttctcctagactattcatcatcccaatttcatcc

SEQ ID NO: 12917 - DNA, 120 bp, Artificial Sequence
  ENSG00000010818_4 (sequence is synthesized)
tagttgaaaattttcaaatgccataagaaatctttatagatttgcacttagcttttggatggacgtttctacaatggagagaactgtgttatagccctggtccaaggacattactagcta

SEQ ID NO: 12918 - DNA, 120 bp, Artificial Sequence
  ENSG00000010818_5 (sequence is synthesized)
atgcccatcgactgtggtgtgcgtgtggaaggttccaaagagaaggagcaatcagcaagtttgcagacaccctggaacatggaagcaaccaagctttaagaagcacagctttggagacac

SEQ ID NO: 12919 - DNA, 120 bp, Artificial Sequence
  ENSG00000010818_6 (sequence is synthesized)
tccatgagtctgcactgctttcaggggaactagcacttaagaccttgtgtaacaaaatggacactggggacacagctctaggacaaaaagctacctcaaggtctggagaaactgataaag

SEQ ID NO: 12920 - DNA, 120 bp, Artificial Sequence
  ENSG00000010818_7 (sequence is synthesized)
catcaggtagatggagacaggaacaatcagctgttattaagatgagcacttttggcagtcatgaaggacagcggcaaccacaaatagagcctgagcaaatcggaaacacagcatcagcac

SEQ ID NO: 12921 - DNA, 120 bp, Artificial Sequence
  ENSG00000010818_8 (sequence is synthesized)
aactgtttggttctgggaaactggcctcccctagtgaagtggtgcagcaagtcgcagagaagcaatatccaccgcatcgtccgagtccttactcatgccaacactcactctctttccctc

SEQ ID NO: 12922 - DNA, 120 bp, Artificial Sequence
  ENSG00000010818_9 (sequence is synthesized)
agcactcattgccacagggggtcatgcacagcaccaagccacatcagagcctcgaaggtcctccgtggcttttccctggccctttgccatccgttgcctctgaggacttatttccttttc

SEQ ID NO: 12923 - DNA, 120 bp, Artificial Sequence
  ENSG00000010818_10 (sequence is synthesized)
ctatacatggccacagtggtggttatcctagaaaaaagatttcaagtctgaaccctgcttatagccaatactcccagaaaagtattgaacaggcagaagaggctcacaagaaagagcaca

SEQ ID NO: 12924 - DNA, 120 bp, Artificial Sequence
  ENSG00000010818_11 (sequence is synthesized)
aacccaaaaagcctggcaagtacatttgcccttactgcagcagagcgtgtgccaaacctagtgtactgaaaaaacacatcaggtcccatactggggagcggccatatccatgtatacctt

SEQ ID NO: 12925 - DNA, 120 bp, Artificial Sequence
  ENSG00000010818_12 (sequence is synthesized)
gtggtttctctttcaagacaaagagcaatttgtacaagcacaggaagtcacatgcccatgcaattaaggcaggattagtacctttcacagagtcagctgtatctaaattggacctagagg

SEQ ID NO: 12926 - DNA, 120 bp, Artificial Sequence
  ENSG00000010818_13 (sequence is synthesized)
ctggttttattgatgtagaagcagaaatacattcagatggtgaacagagtacagacacagatgaggagagttctttatttgccgaggcttctgacaaaatgagtcctggtccacccatcc

SEQ ID NO: 12927 - DNA, 120 bp, Artificial Sequence
  ENSG00000010818_14 (sequence is synthesized)
cactggacattgccagcagaggcggctatcatgggtcattggaagaatcattgggaggtccaatgaaggtgccgattttgattatccctaaaagtgggattcctctccctaatgaaagct

SEQ ID NO: 12928 - DNA, 120 bp, Artificial Sequence
  ENSG00000010818_15 (sequence is synthesized)
ctcagtatattggccctgatatgctaccaaatccatctttaaatactaaggctgatgattcgcacacagtcaaacagaaacttgcactaagactgtcagagaaaaaaggacaagattctg

SEQ ID NO: 12929 - DNA, 120 bp, Artificial Sequence
  ENSG00000010818_16 (sequence is synthesized)
agccatcgctcaaccttctgagcccgcacagtaaaggaagcactgattctggttacttttctcgctcagaaagtgctgagcagcaaataagccctcccaacacaaatgcaaagtcttatg

SEQ ID NO: 12930 - DNA, 120 bp, Artificial Sequence
  ENSG00000010818_17 (sequence is synthesized)
aagaaatcatctttggaaaatactgtcggcttagtccgagaaatgcactcagtgttacaaccacaagtcaggagcgtgccgcaatgggtaggaagggcataatggaaccattacctcacg

SEQ ID NO: 12931 - DNA, 120 bp, Artificial Sequence
  ENSG00000010818_18 (sequence is synthesized)
ttaacaccaggttagatgtcaagatgtttgaagatcctgtttcacagctgatcccaagcaagggagatgtcgaccccagtcaaacgagcatgctgaaatccactaagttcaacagtgagt

SEQ ID NO: 12932 - DNA, 120 bp, Artificial Sequence
  ENSG00000010818_19 (sequence is synthesized)
ccagacaaccccagattattccatcatctatcaggaacgaaggaaaactttatccagcaaacttccaaggcagcaacccggttctcttagaagctcctgtagactcttcaccccttatta

SEQ ID NO: 12933 - DNA, 120 bp, Artificial Sequence
  ENSG00000010818_20 (sequence is synthesized)
gaagcaactcagtgccaacttcttcagcaactaatctaactattcctccttctttgagaggaagtcactcatttgatgaaaggatgactggttccgacgatgtattctatccagggaccg

SEQ ID NO: 12934 - DNA, 120 bp, Artificial Sequence
  ENSG00000010818_21 (sequence is synthesized)
tgggcataccccctcagcgcatgctaagaagacaagcggcatttgagctgccttcggtacaggagggccacgtggaagtcgagcaccatggcaggatgttgaagggtatcagcagttcat

SEQ ID NO: 12935 - DNA, 120 bp, Artificial Sequence
  ENSG00000010818_22 (sequence is synthesized)
ccctgaaggaaaagaaattgtctcctggggacagggttgggtatgactatgatgtctgtcggaaaccctataagaagtgggaggactctgaaacaccaaagcaaaactacagggacattt

SEQ ID NO: 12936 - DNA, 120 bp, Artificial Sequence
  ENSG00000010818_23 (sequence is synthesized)
cctgcttgagttctttaaagcatggtggagaatatttcatggatcccgtggtgccattgcagggagtaccaagcatgtttggaactacctgtgaaaacaggaaacgccggaaagagaaga

SEQ ID NO: 12937 - DNA, 120 bp, Artificial Sequence
  ENSG00000010818_24 (sequence is synthesized)
gcgtaggggatgaagaggacacgcccatgatctgcagcagcattgtaagcactcctgtgggcatcatggcttccgattatgaccccaaactgcagatgcaggaaggagtcaggagtggat

SEQ ID NO: 12938 - DNA, 120 bp, Artificial Sequence
  ENSG00000010818_25 (sequence is synthesized)
ttgccatggctggacacgaaaacctttctcatggtcacacggaacgctttgacccatgtcggccccaactgcagcctggaagtccatctcttgtgtcagaggagtcaccttcagccattg

SEQ ID NO: 12939 - DNA, 120 bp, Artificial Sequence
  ENSG00000010818_26 (sequence is synthesized)
attcagacaagatgtcagacctagggggcaggaaacctcctggaaatgtgatttctgtgattcagcacaccaactcactgagccgacccaattcatttgaaaggtctgagtcagccgaac

SEQ ID NO: 12940 - DNA, 120 bp, Artificial Sequence
  ENSG00000010818_27 (sequence is synthesized)
ttgtggcttgcacacaggataaagccccttccccttcagagacttgtgacagtgagatttcagaagccccagtgagtcctgagtgggctccacctggggatggtgcagaaagtgggggga

SEQ ID NO: 12941 - DNA, 120 bp, Artificial Sequence
  ENSG00000010818_28 (sequence is synthesized)
aaccctctccatctcagcaggtgcagcagcagtcctatcacacacagcccaggctagttcggcaacacaacatccaggttcctgagattcgagtgaccgaggagcctgataaacctgaga

SEQ ID NO: 12942 - DNA, 120 bp, Artificial Sequence
  ENSG00000010818_29 (sequence is synthesized)
aggagaaggaagcccagagcaaagagccagagaagcctgtggaagaatttcagtggccccagagaagtgagaccctttcccagctccccgcggagaagttgccacccaaaaagaagcgtc

SEQ ID NO: 12943 - DNA, 120 bp, Artificial Sequence
  ENSG00000010818_30 (sequence is synthesized)
tgcgacttgcagatatggagcactcctcaggggagtccagctttgaatccacaggcacaggcctctcccgcagccccagccaagaaagcaacttgtcccacagctccagtttctccatgt

SEQ ID NO: 12944 - DNA, 120 bp, Artificial Sequence
  ENSG00000010818_31 (sequence is synthesized)
cttttgaaagagaagaaaccagtaagctttctgcacttcctaagcaggatgagtttgggaagcattcagagtttctgactgtccctgctggttcatactcattgtctgtcccaggccatc

SEQ ID NO: 12945 - DNA, 120 bp, Artificial Sequence
  ENSG00000010818_32 (sequence is synthesized)
accaccagaaagagatgcgacgctgctcatcagagcagatgccttgtcctcacccagcggaagtcccagaagttcggagcaaatcatttgattatgggaatctgtcccatgctcctgtgt

SEQ ID NO: 12946 - DNA, 120 bp, Artificial Sequence
  ENSG00000010818_33 (sequence is synthesized)
cgggagcagcagcctccacggtatcaccgtccagggagaggaagaaatgctttctggtgcggcaagcttccttcagtggctccccagaaatctcccagggcgaggttggcatggatcaga

SEQ ID NO: 12947 - DNA, 120 bp, Artificial Sequence
  ENSG00000010818_34 (sequence is synthesized)
gcgtgaagcaagagcagctggagcacctgcatgctggcctccggtccgggtggcaccatggcccgcctgctgtgctgcctcctcttcagcaagaggacccagggaagcaggtggcgggtc

SEQ ID NO: 12948 - DNA, 120 bp, Artificial Sequence
  ENSG00000010818_35 (sequence is synthesized)
cttgtcccccgctgagctcggggccactgcacctggcccagccacagatcatgcacatggacagtcaggaatctttgagaaatcccttgatccaaccaacatcctatatgacaagcaagc

SEQ ID NO: 12949 - DNA, 120 bp, Artificial Sequence
  ENSG00000010818_36 (sequence is synthesized)
acttacctgaacagccacacttatttccacatcaagagacaattccattttctccaatccagaatgccttgtttcagtttcagtatcctacagtttgtatggttcatttaccagctcagc

SEQ ID NO: 12950 - DNA, 120 bp, Artificial Sequence
  ENSG00000010818_37 (sequence is synthesized)
agcctccctggtggcaggcacatttcccacatccctttgctcagcaccctcagaagagctatggcaagccctcttttcagacagaaatccattcgagctatcccttagagcatgtggcag

SEQ ID NO: 12951 - DNA, 120 bp, Artificial Sequence
  ENSG00000010818_38 (sequence is synthesized)
agcacactggaaagaaacctgctgagtatgcacacacgaaagagcagacctacccatgttattcaggagcatcagggctacacccaaagaaccttcttccaaagtttccatcagaccaga

SEQ ID NO: 12952 - DNA, 120 bp, Artificial Sequence
  ENSG00000010818_39 (sequence is synthesized)
gcagtaagtcaactgaaacgccctctgagcaggttcttcaagaagattttgcctcggcaaatgctgggtctttgcagtccctcccaggaacagtggttcctgttcggatccagacgcacg

SEQ ID NO: 12953 - DNA, 120 bp, Artificial Sequence
  ENSG00000010818_40 (sequence is synthesized)
tctcagatacttgggcagaatagccctgccattgtcatatgcaaagtcgatgagaatatgacccaaaggacactggtcaccaacgcagccatgcaagggataggattcaacattgcccag

SEQ ID NO: 12954 - DNA, 120 bp, Artificial Sequence
  ENSG00000010818_41 (sequence is synthesized)
gtgctggggcagcatgcgggcttggagaagtaccccatttggaaagcacctcagactttgcccctcggcttagaatcctccatccccttgtgtttaccttccacctctgacagcgtggcc

SEQ ID NO: 12955 - DNA, 120 bp, Artificial Sequence
  ENSG00000010818_42 (sequence is synthesized)
accctgggaggtagcaagcgaatgctttctccagccagtagcttggagctcttcatggaaaccaagcagcagaaaagggtcaaagaagaaaagatgtacggacagattgtggaggagctt

SEQ ID NO: 12956 - DNA, 120 bp, Artificial Sequence
  ENSG00000010818_43 (sequence is synthesized)
agtgctgtggagctgaccaactcagacatcaaaaaggacctctcccgcccccagaaaccccagctggttcgacaaggatgtgcttctgagccaaaagatggcttgcagtcagggtcatct

SEQ ID NO: 12957 - DNA, 120 bp, Artificial Sequence
  ENSG00000010818_44 (sequence is synthesized)
tccttctcctcgctgtcgccctcctcatctcaagactatccttctgttagcccgtcttccagggagccattcctgcccagcaaggagatgctttccggttcccgggcaccacttccgggg

SEQ ID NO: 12958 - DNA, 120 bp, Artificial Sequence
  ENSG00000010818_45 (sequence is synthesized)
cagaagtccagtgggccttctgaaagcaaagaatcttcagatgaattagatatcgatgagacggcatcggacatgagcatgagcccacagagttcttcattaccagcaggagatggtcag

SEQ ID NO: 12959 - DNA, 120 bp, Artificial Sequence
  ENSG00000010818_46 (sequence is synthesized)
ctggaagaggaagggaagggccacaagcggcctgttggcatgctggtccgcatggcctctgcccccagcgggaacgtggcagactcaactcttcttctcacggacatggcagatttccag

SEQ ID NO: 12960 - DNA, 120 bp, Artificial Sequence
  ENSG00000010818_47 (sequence is synthesized)
cagattcttcagttccccagtctgcggacaacaactactgtgagttggtgcttcttgaattatacaaaacccaattatgtgcaacaggccaccttcaaatcctcggtttatgcttcatgg

SEQ ID NO: 12961 - DNA, 120 bp, Artificial Sequence
  ENSG00000010818_48 (sequence is synthesized)
tgcattagttcctgtaatccaaacccatcaggattgaacaccaagaccacgctggctcttctgaggtccaagcaaaaaatcactgcagaaatttatactctggctgctatgcataggcct

SEQ ID NO: 12962 - DNA, 120 bp, Artificial Sequence
  ENSG00000010818_49 (sequence is synthesized)
ggaaccggcaagcttacatcatcaagtgcttggaagcagtttactcagatgaaacctgatgcgtcctttttatttggcagcaaactagaaaggaaactagtgggaaatatcttaaaggaa

SEQ ID NO: 12963 - DNA, 120 bp, Artificial Sequence
  ENSG00000010818_50 (sequence is synthesized)
agagggaaaggagatattcatggagataaagatattggatccaaacaaactgagccaatccgaattaaaatatttgaaggagggtacaaatcgaatgaagattatgtatatgtcagagga

SEQ ID NO: 12964 - DNA, 120 bp, Artificial Sequence
  ENSG00000010818_51 (sequence is synthesized)
cgtggccggggaaagtacatttgtgaagaatgtgggattcgctgtaagaagccaagcatgctcaaaaaacacatccgtacccatactgatgttcggccttatgtatgcaagttatgtaac

SEQ ID NO: 12965 - DNA, 120 bp, Artificial Sequence
  ENSG00000010818_52 (sequence is synthesized)
tttgccttcaaaacgaaaggaaacctaacgaagcatatgaaatctaaagcacacatgaaaaaatgcctggaattgggagtctcaatgacatcggtggatgatacagaaactgaggaagca

SEQ ID NO: 12966 - DNA, 120 bp, Artificial Sequence
  ENSG00000010818_53 (sequence is synthesized)
gaaaatttggaagatttgcacaaagcagcagagaagcatagcatgtccagcatttcaactgatcatcagttctccgatgctgaggaatcagatggtgaggatggagatgataatgatgat

SEQ ID NO: 12967 - DNA, 120 bp, Artificial Sequence
  ENSG00000010818_54 (sequence is synthesized)
gatgatgaagatgaagatgactttgacgaccagggagatttaacaccaaaaacaagatcaagaagcaccagtcctcagcctcctagattctcctccttgcctgtgaatgttggcgccgta

SEQ ID NO: 12968 - DNA, 120 bp, Artificial Sequence
  ENSG00000010818_55 (sequence is synthesized)
ccccacggggttccttcagatagttccctgggacattcttcgttgatcagctatttggttactttgccaagtattcgagttactcagcttatgacacccagtgattcatgtgaagatacc

SEQ ID NO: 12969 - DNA, 120 bp, Artificial Sequence
  ENSG00000010818_56 (sequence is synthesized)
cagatgacagaataccagaggctattccagagcaaaagtacggactcagaaccagacaaagacagattggacatacctagttgtatggatgaggagtgcatgctaccttcagagccaagc

SEQ ID NO: 12970 - DNA, 120 bp, Artificial Sequence
  ENSG00000010818_57 (sequence is synthesized)
tcctctcccagggacttctcaccctcaagccaccattcctctccaggatatgattcttcaccctgtcgagataattcaccaaagaggtatctgatacccaaaggagatttatctcccagg

SEQ ID NO: 12971 - DNA, 120 bp, Artificial Sequence
  ENSG00000010818_58 (sequence is synthesized)
agacatttatcacctaggagagatctgtcacccatgagacatctttcaccaagaaaggaagctgcattgagaagagagatgtcccaaagagatgtttcaccaagaaggcatttgtctcca

SEQ ID NO: 12972 - DNA, 120 bp, Artificial Sequence
  ENSG00000010818_59 (sequence is synthesized)
aggaggccagtgtctcctgggaaagatatcacagcaagaagagacctctctcctagaagagagagaagatacatgaccacaataagagcgccatctcccagaagggctttataccataac

SEQ ID NO: 12973 - DNA, 120 bp, Artificial Sequence
  ENSG00000010818_60 (sequence is synthesized)
ccaccattgtccatgggacagtatttgcaagcagagccaattgtattggggcctcctaatttaagaagaggattacctcaggttccttacttcagtctctatggagaccaagaaggtgct

SEQ ID NO: 12974 - DNA, 120 bp, Artificial Sequence
  ENSG00000010818_61 (sequence is synthesized)
tatgaacatccaggctccagccttttccctgagggtcctaatgactatgtcttcagtcatcttccactccactctcagcaacaagtgcgagcccctatccccatggtgcccgttggtggg

SEQ ID NO: 12975 - DNA, 120 bp, Artificial Sequence
  ENSG00000010818_62 (sequence is synthesized)
atccagatggttcactccatgccgccagccctttccagtttacatccttcacccacattgcccctgccaatggagggctttgaggagaagaaaggcgcgtcaggggagtccttctccaag

SEQ ID NO: 12976 - DNA, 120 bp, Artificial Sequence
  ENSG00000010818_63 (sequence is synthesized)
gacccctatgtgctttctaagcagcatgagaagcgaggtcctcacgctttgcagtcatctggtccacctagcactccctcctctcctcggctgttgatgaaacagagcacttcggaagac

SEQ ID NO: 12977 - DNA, 120 bp, Artificial Sequence
  ENSG00000010818_64 (sequence is synthesized)
agcctaaacgcaacagagcgggaacaggaggaaaatatacagacttgtacaaaagccattgcctctctccggattgccacggaagaggcagctctgctcgggccagatcagccagcgcgg

SEQ ID NO: 12978 - DNA, 120 bp, Artificial Sequence
  ENSG00000010818_65 (sequence is synthesized)
gtgcaggagccccaccagaaccccctgggaagtgcacatgttagcattagacactttagtagacctgagccaggtcagccctgtacctcagccacccaccctgacttgcatgatggtgaa

SEQ ID NO: 12979 - DNA, 120 bp, Artificial Sequence
  ENSG00000010818_66 (sequence is synthesized)
aaggacaattttggtacatcacagactccattagctcactccacgttttacagcaagagttgtgtggatgacaagcagttggactttcacagcagcaaggaattatcttcaagcacagag

SEQ ID NO: 12980 - DNA, 120 bp, Artificial Sequence
  ENSG00000010818_67 (sequence is synthesized)
gaaagcaaagatccttcatcagaaaagagtcagctacattgatctatgatgcatggagactttcatttccacattttcccatttttttgtttttgtttttctagaaatggaggtaatcca

SEQ ID NO: 12981 - DNA, 120 bp, Artificial Sequence
  ENSG00000010818_68 (sequence is synthesized)
gtttatagcatgcctgtcctaagttacagtagtttgctattatatatacttttgttatatcaaaagaattaggtaaattaacaagtcatcatgagcctgaccaaaacaaaatttgaaatt

SEQ ID NO: 12982 - DNA, 120 bp, Artificial Sequence
  ENSG00000010818_69 (sequence is synthesized)
aacctattgggtctggtacttttaaaattgtacagatgtttgtgccttttctttactttgcttatattcttataagcattttttagcagtaatttgtacatattttagaatttgtgtatc

SEQ ID NO: 12983 - DNA, 120 bp, Artificial Sequence
  ENSG00000010818_70 (sequence is synthesized)
tgctttgtaataaatgtaatttctttccttttttggacacttggatctaaatgatgtaaagcaaaacagcatcaatatatatgtgaggttgcactaaaacatatttttatatgattaaaa

SEQ ID NO: 12984 - DNA, 120 bp, Artificial Sequence
  ENSG00000010818_71 (sequence is synthesized)
ctgaacagcttttatgtacagctctgattctgtaatactaatatttatttactttgtttcataaattgtacattttttcttaatgttgtggattgcttttctatgtgaagcatgggattt

SEQ ID NO: 12985 - DNA, 120 bp, Artificial Sequence
  ENSG00000010818_72 (sequence is synthesized)
actgttgcgtaactagaacaaaaatgtacattgtaaacaagatatttaaactagagtatcttattctgcacttatgcattagttaaaaaaagataaaggatgtatcagtcagttcttaac

SEQ ID NO: 12986 - DNA, 120 bp, Artificial Sequence
  ENSG00000010818_73 (sequence is synthesized)
tcttgtatatttttttgtctcttgtttgctggattgactataacttaagtgctgattgtgattttaaaatgatagtaccgtaaagcattaaagtaaacaatgtgctattgtgagtttttt

SEQ ID NO: 12987 - DNA, 120 bp, Artificial Sequence
  ENSG00000010818_74 (sequence is synthesized)
caaagctttataaatcagttataaataatattaaaagtatttggtcttatgtgaacatgttgatctatatactcatctaaaaatatgggaaaacattccaccccatgtaaatatgtacaa

SEQ ID NO: 12988 - DNA, 120 bp, Artificial Sequence
  ENSG00000010818_75 (sequence is synthesized)
gtgcatcactggtacaattttatgtaactcagttggacactaggttgccacagacctatgctaggtgtctttaaaaaattaaggtgacaaagcacatgggactgtgtagagcttggttat

SEQ ID NO: 12989 - DNA, 120 bp, Artificial Sequence
  ENSG00000010818_76 (sequence is synthesized)
cggccggcccggtggcttggcaggcagtgctgtgcgctgctcatggagaagacctgggcttagcaatctccttagttcttgctacacaggatggtgactggaactaaggctacacagagg

SEQ ID NO: 12990 - DNA, 120 bp, Artificial Sequence
  ENSG00000010818_77 (sequence is synthesized)
gtcgcacttggactctgagggttgggtgtggaagggggaaaaggagatggagacctgctccccagctcttcctgtcagccggtttacatgggaacagggttaacatctgtgttaggggag

SEQ ID NO: 12991 - DNA, 120 bp, Artificial Sequence
  ENSG00000010818_78 (sequence is synthesized)
gtcaccttaccctttttcataggggaagagtgtcacactcctggctatctcagggggaatggggaaaagaatctttcaagggcaaagaactcgtgggaggatgtctgttgtatgtaatac

SEQ ID NO: 12992 - DNA, 120 bp, Artificial Sequence
  ENSG00000010818_79 (sequence is synthesized)
tcacaatggcttttggttagtgttgaaggtgggaagagcatttgtaggtccagaagagtgaaagagagggaggggtgcagcaacatgtgcacaggcacgcacatgtgtgcacgcacacat

SEQ ID NO: 12993 - DNA, 120 bp, Artificial Sequence
  ENSG00000010818_80 (sequence is synthesized)
acaatctgggttatctttgtgctatatagtggattataattctgtgaaaccaagtttgtatattgaattacattaaggagtgttctttaaaaagagaaataaatatacaattacatgctt

SEQ ID NO: 12994 - DNA, 120 bp, Artificial Sequence
  ENSG00000010818_81 (sequence is synthesized)
actaatgagcgacgtgcaccggcgcgcacggcccggccaccgctgcggctgcggcggccggcggcggcccgttgtcaggtggagcctttgaattttttaaaagaccatagtaatcagatc

SEQ ID NO: 12995 - DNA, 120 bp, Artificial Sequence
  ENSG00000010818_82 (sequence is synthesized)
tacttgaaaaattaagtgaattgatttggttggaatgctcttttaccgatgctttaacatacagccactagattcccagaagttgtgcatgagttcctgtgaggagagttggcatcttgg

SEQ ID NO: 12996 - DNA, 120 bp, Artificial Sequence
  ENSG00000010818_83 (sequence is synthesized)
actcctcctagtaacttctgttcggggaggcgctgccaggaataacccggtgcgtccacagcccgggaggggaggcggccgctgcggctcccgcacgcagacagctgcggcccgggcctc

SEQ ID NO: 12997 - DNA, 120 bp, Artificial Sequence
  ENSG00000010818_84 (sequence is synthesized)
gcggctcccgcctgagcccggcggcccctgccccgggcccatctccgtacagtgtcagaaaaataaataaaggcaagaggagcctgggctggcggtcgggatcttttccctccctccgcg

SEQ ID NO: 12998 - DNA, 120 bp, Artificial Sequence
  ENSG00000010818_85 (sequence is synthesized)
cccgccctccctctgtccttaaggaaatgctaccagacaccccccaccagacacgctcagccttggcgaggagcggccgccgcggcagcgagaacaagggcaccaggggggtttcctccc

SEQ ID NO: 12999 - DNA, 120 bp, Artificial Sequence
  ENSG00000010818_86 (sequence is synthesized)
caaatactattgtctcaattttgtagaaaaatgaagctcttagagatgttaagggattggccaaatcactgtcaggtaaatgagggtgttgggttttgatctctggcctgtcactagaca

SEQ ID NO: 13000 - DNA, 120 bp, Artificial Sequence
  ENSG00000010818_87 (sequence is synthesized)
gtctcctctctgttgattttgcactgcacgggacggcctcctacttacgctgtaaacagctgcattttagtctttagccttgttagatctcattgtcagaaaaataaataaaggcaagag

SEQ ID NO: 13001 - DNA, 120 bp, Artificial Sequence
  ENSG00000010932_0 (sequence is synthesized)
cgctacagaagattcaaactgagcaaatcgcctaatcttccaaattctttttcctggcttgttagagcagccaagggtggggtggagcttgtgaataaaaagcctgcttcatcttcctca

SEQ ID NO: 13002 - DNA, 120 bp, Artificial Sequence
  ENSG00000010932_1 (sequence is synthesized)
tgcaggagaacatggccaagcgagttgccattgtgggagctggggtcagcggcctggcctccatcaagtgctgtctggaagaaggactggagcccacctgctttgagaggagcgatgacc

SEQ ID NO: 13003 - DNA, 120 bp, Artificial Sequence
  ENSG00000010932_2 (sequence is synthesized)
ttggggggctgtggagattcaccgaacatgttgaagaaggcagagccagtctctacaagtctgtggtttccaacagctgcaaggagatgtcttgttactcagactttccattcccagaag

SEQ ID NO: 13004 - DNA, 120 bp, Artificial Sequence
  ENSG00000010932_3 (sequence is synthesized)
attatccaaactatgtgccaaattctcaattcctggaatatctcaaaatgtatgcaaaccactttgaccttctgaaacacattcaattcaagaccaaagtctgcagtgtaacaaaatgct

SEQ ID NO: 13005 - DNA, 120 bp, Artificial Sequence
  ENSG00000010932_4 (sequence is synthesized)
cagattctgctgtctctggccaatgggaggtggtcactatgcatgaagagaagcaagagtcagccatctttgatgctgtcatggtctgcactggctttcttactaatccttatttgccac

SEQ ID NO: 13006 - DNA, 120 bp, Artificial Sequence
  ENSG00000010932_5 (sequence is synthesized)
tggattcctttccaggtattaatgcctttaaaggccagtactttcatagccggcaatataagcatccagatatatttaaggacaagagagtccttgtgattggaatgggaaattctggca

SEQ ID NO: 13007 - DNA, 120 bp, Artificial Sequence
  ENSG00000010932_6 (sequence is synthesized)
cagacattgctgtggaggccagccacctggcggaaaaggtgttcctcagcaccaccggagggggatgggtgatcagccgaatctttgactcgggctacccatgggacatggtgttcatga

SEQ ID NO: 13008 - DNA, 120 bp, Artificial Sequence
  ENSG00000010932_7 (sequence is synthesized)
cacgctttcagaacatgttgagaaattccctcccaaccccaattgtgacttggttgatggagcgaaagataaacaactggctcaatcatgcaaattacggcttaataccagaagacagga

SEQ ID NO: 13009 - DNA, 120 bp, Artificial Sequence
  ENSG00000010932_8 (sequence is synthesized)
ctcagctgaaagagtttgtgctaaatgatgagctcccaggacgcatcatcactgggaaagtgttcatcaggccaagcataaaagaggtaaaggaaaactctgtcatatttaacaatactt

SEQ ID NO: 13010 - DNA, 120 bp, Artificial Sequence
  ENSG00000010932_9 (sequence is synthesized)
caaaggaagagcctattgacatcattgtctttgccactggatacacatttgctttccccttccttgatgagtctgtagtgaaagttgaagatggccaggcctcactgtacaagtatatct

SEQ ID NO: 13011 - DNA, 120 bp, Artificial Sequence
  ENSG00000010932_10 (sequence is synthesized)
tccctgcacatctgcaaaagccaaccctggccattattggcctcatcaaacccttgggctccatgatacctacaggagaaacacaagctcggtgggctgttcgagtcctgaaaggtgtaa

SEQ ID NO: 13012 - DNA, 120 bp, Artificial Sequence
  ENSG00000010932_11 (sequence is synthesized)
ataagttaccaccaccaagtgtcatgatagaggaaattaatgcaaggaaagaaaacaagcccagttggtttggcttgtgctactgcaaggctttacaatcagattatatcacatacatag

SEQ ID NO: 13013 - DNA, 120 bp, Artificial Sequence
  ENSG00000010932_12 (sequence is synthesized)
atgaactcctgacctatatcaatgcaaaacccaacctgttctctatgctcctaacggatccacatctggctctgaccgtcttctttggcccatgctcaccataccagttccgcttgactg

SEQ ID NO: 13014 - DNA, 120 bp, Artificial Sequence
  ENSG00000010932_13 (sequence is synthesized)
gcccaggaaaatgggaaggagccagaaatgccatcatgacccagtgggaccgaacattcaaggtcatcaaagctcgagttgtacaagagtctccatctccctttgaaagttttcttaaag

SEQ ID NO: 13015 - DNA, 120 bp, Artificial Sequence
  ENSG00000010932_14 (sequence is synthesized)
tctttagctttctggctttgcttgtggctatttttctgattttcctataagtaaaagatctcctaaatggaagatgcacagagtagatttacaatgctccaattcctctcttacagcaat

SEQ ID NO: 13016 - DNA, 120 bp, Artificial Sequence
  ENSG00000010932_15 (sequence is synthesized)
attgccttcacagttataaactgtattcaaatagtaaaggccaccctctcgcttccctggctggccccagggctaccactggtattcctgagcctctcccagctccacttctaatgctag

SEQ ID NO: 13017 - DNA, 120 bp, Artificial Sequence
  ENSG00000010932_16 (sequence is synthesized)
agaatgataactaagacttctgtgcatttgaaggttgttggaaagttacaggttcattttagaaagaaagctgttcttgacagcactctgagccatcatacctctttcccatataaacta

SEQ ID NO: 13018 - DNA, 120 bp, Artificial Sequence
  ENSG00000010932_17 (sequence is synthesized)
ttttcacagatctcaactaaaaccccttacttcacaaatgattgtgttgtgctgaaatggtgctcttatagtactggcttattaaaagtaaaaaataaacctaaaaattgattgttttaa

SEQ ID NO: 13019 - DNA, 120 bp, Artificial Sequence
  ENSG00000010932_18 (sequence is synthesized)
aggtttatccactgtgctggggactcccaagccagcactggctcatactgattcattttgatctctgctaataccagagtcctgcgtggcagagccattggcaccagaaattacaagaga

SEQ ID NO: 13020 - DNA, 120 bp, Artificial Sequence
  ENSG00000010932_19 (sequence is synthesized)
agaccaggtttatccactgtgctggggactcccaagccagcactggctcatactgattcattttgatctctgctaataccagagtcctgcgtggcagagccattggcaccagaaattaca

SEQ ID NO: 13021 - DNA, 120 bp, Artificial Sequence
  ENSG00000010932_20 (sequence is synthesized)
gctgcatcagagacagctgaagatgaaaaaactaccatccccatatataactaatttgtgctgtgcaccaacaagaacatgctttaaatttccatgccaatttacaacccgcatactgca

SEQ ID NO: 13022 - DNA, 120 bp, Artificial Sequence
  ENSG00000010932_21 (sequence is synthesized)
taacagaatctttaaaagcaggatgcattctattgtttgctgaattatactgtcataatgatttgttccattactgcataaatggtatatcagggtcaaaaatatatatatttttttgat

SEQ ID NO: 13023 - DNA, 120 bp, Artificial Sequence
  ENSG00000010932_22 (sequence is synthesized)
ataccaaaaatataacagttgacataggctgtatctatgtcaactgtgatattttttcttttttatttttaagacacagggtctcactatctcgtccagactagtgtgcagtggctattt

SEQ ID NO: 13024 - DNA, 120 bp, Artificial Sequence
  ENSG00000010932_23 (sequence is synthesized)
tcaaactcctggtctcaagcaatcctcctacctcagtctcctgagtagtggagactacagacatgcacactgcacacagctacctgttattttgactaaaacaaaatgacagttaacatt

SEQ ID NO: 13025 - DNA, 120 bp, Artificial Sequence
  ENSG00000010932_24 (sequence is synthesized)
tgactaaaacaaaatgacagttaacatttctgtcagttgactgaatcaactggctcaattaaaatttttaaactcaagcaaatgagtgacaacattcagccaaactagttgtgagattct

SEQ ID NO: 13026 - DNA, 120 bp, Artificial Sequence
  ENSG00000010932_25 (sequence is synthesized)
gctatatcaaataattagtgagatgaccagatgcttatcttttcagctgacggcattattaccaggagcatacaaccagtcagctcaggctgctaacatttttgccagaaggatcaatga

SEQ ID NO: 13027 - DNA, 120 bp, Artificial Sequence
  ENSG00000010932_26 (sequence is synthesized)
cttcttatgctcttcccgacaagtttgcacaaaaaatgcatatgatgacattttgcctcttggcttcttagaatctcctttgccaatgtttagttatttttccccagtgaggcacagagt

SEQ ID NO: 13028 - DNA, 120 bp, Artificial Sequence
  ENSG00000010932_27 (sequence is synthesized)
ggcctcatcaaacccttgggctccatgatacctacaggagaaacacaagctcggtgggctgttcgagtcctgaaaggtttggcttgtgctactgcaaggctttacaatcagattatatca

SEQ ID NO: 13029 - DNA, 120 bp, Artificial Sequence
  ENSG00000011007_0 (sequence is synthesized)
attccgtcttgaagtagaccctggagaggtcttccaggcttgggctcagcacgcgagcacagggagcgggggtgccggcggcggaggcgcgtacggcccgagcagcccccagcccccagc

SEQ ID NO: 13030 - DNA, 80 bp, Artificial Sequence
  ENSG00000011007_1 (sequence is synthesized)
ctgggggcggagcctgcagcccaccgccccccacacaccccagccgaggcccggaaggggccaggcgcgcttccgtctcc

SEQ ID NO: 13031 - DNA, 120 bp, Artificial Sequence
  ENSG00000011007_2 (sequence is synthesized)
ggggccaggcgcgcttccgtctccgccggggatgcacggagggcggagctgcggcccgaggacgcgacgcgagcccagttccggcgaggaggccgcgccagtgacagcgatggcggcgga

SEQ ID NO: 13032 - DNA, 120 bp, Artificial Sequence
  ENSG00000011007_3 (sequence is synthesized)
gtcggcgctccaagttgtggagaagctgcaggcgcgcctggccgcgaacccggaccctaagaagctattgaaatatttgaagaaactctccaccctgcctattacagtagacattcttgc

SEQ ID NO: 13033 - DNA, 120 bp, Artificial Sequence
  ENSG00000011007_4 (sequence is synthesized)
ggagactggggttgggaaaacagtaaatagcttgcgaaaacacgagcatgttggaagctttgccagggacctagtggcccagtggaagaagctggttcctgtggaacgaaatgctgagcc

SEQ ID NO: 13034 - DNA, 120 bp, Artificial Sequence
  ENSG00000011007_5 (sequence is synthesized)
tgatgaacaggactttgagaagagcaattcccgaaagcgccctcgggatgccctgcagaaggaggaggagatggagggggactaccaagaaacctggaaagccacggggagccgatccta

SEQ ID NO: 13035 - DNA, 120 bp, Artificial Sequence
  ENSG00000011007_6 (sequence is synthesized)
tagccctgaccacaggcagaagaaacataggaaactctcggagctcgagagacctcacaaagtgtctcacggtcatgagaggagagatgagagaaagaggtgtcacagaatgtcaccaac

SEQ ID NO: 13036 - DNA, 120 bp, Artificial Sequence
  ENSG00000011007_7 (sequence is synthesized)
ttactcttcagaccctgagtcttctgattatggccatgttcaatcccctccatcttgtaccagtcctcatcagatgtacgtcgaccactacagatccctggaggaggaccaggagcccat

SEQ ID NO: 13037 - DNA, 120 bp, Artificial Sequence
  ENSG00000011007_8 (sequence is synthesized)
tgtttcacaccagaagcctgggaaaggccacagcaatgcctttcaggacagactcggggccagccaagaacgacacctgggtgaaccccatgggaaaggggttgtgagtcaaaacaagga

SEQ ID NO: 13038 - DNA, 120 bp, Artificial Sequence
  ENSG00000011007_9 (sequence is synthesized)
gcacaaatcttcccacaaggacaaacgccccgtggatgccaagagtgatgagaaggcctctgtggtgagcagagagaaatcacacaaggccctctccaaagaggagaaccgaaggccacc

SEQ ID NO: 13039 - DNA, 120 bp, Artificial Sequence
  ENSG00000011007_10 (sequence is synthesized)
ctcaggggacaatgcaagggagaaaccgccctctagtggcgtaaagaaagagaaggacagagagggcagcagcctgaagaagaagtgtttgcctccctcagaggccgcttcagacaacca

SEQ ID NO: 13040 - DNA, 120 bp, Artificial Sequence
  ENSG00000011007_11 (sequence is synthesized)
cctgaaaaagccaaagcacagagacccagagaaagccaaattggacaaaagcaagcaaggtctggacagctttgacacaggaaaaggagcaggagacctgttgcccaaggtaaaagagaa

SEQ ID NO: 13041 - DNA, 120 bp, Artificial Sequence
  ENSG00000011007_12 (sequence is synthesized)
gggttctaacaacctaaagactccagaagggaaagtcaaaactaatttggatagaaagtcactgggctccctccctaaagttgaggagacagatatggaggatgaattcgagcagccaac

SEQ ID NO: 13042 - DNA, 120 bp, Artificial Sequence
  ENSG00000011007_13 (sequence is synthesized)
catgtcttttgaatcctacctcagctatgaccagccccggaagaaaaagaaaaagattgtgaaaacttcagccacggcacttggagataaaggacttaaaaaaaatgactctaaaagcac

SEQ ID NO: 13043 - DNA, 120 bp, Artificial Sequence
  ENSG00000011007_14 (sequence is synthesized)
tggtaaaaacttggactcagttcagaaattacccaaggtgaacaaaaccaagtcagagaagccggctggagctgatttagccaagctgagaaaggtgcctgatgtgttgccagtgttgcc

SEQ ID NO: 13044 - DNA, 120 bp, Artificial Sequence
  ENSG00000011007_15 (sequence is synthesized)
agacctcccgttacccgcgatacaggccaattaccgtccactgccttccctcgagctgatatcctccttccagccaaagcgaaaagcgttctcttcaccccaggaagaagaagaagctgg

SEQ ID NO: 13045 - DNA, 120 bp, Artificial Sequence
  ENSG00000011007_16 (sequence is synthesized)
atttactgggcgcagaatgaattccaagatgcaggtgtattctggttccaagtgtgcctatctccctaaaatgatgaccttgcaccagcaatgcatccgagtacttaaaaacaacatcga

SEQ ID NO: 13046 - DNA, 120 bp, Artificial Sequence
  ENSG00000011007_17 (sequence is synthesized)
ttcaatctttgaagtgggaggagtcccatactctgttcttgaacccgttttggagaggtgtacacctgatcagctgtatcgcatagaggaatacaatcatgtattaattgaagaaacaga

SEQ ID NO: 13047 - DNA, 120 bp, Artificial Sequence
  ENSG00000011007_18 (sequence is synthesized)
tcaattatggaaagttcattgtcaccgagactttaaggaagaaagacccgaagagtatgagtcgtggcgagagatgtacctgcggcttcaggacgcccgagagcagcggctacgagtact

SEQ ID NO: 13048 - DNA, 120 bp, Artificial Sequence
  ENSG00000011007_19 (sequence is synthesized)
aacaaagaatatccagttcgcacatgccaataagcccaaaggccgacaagcaaagatggcctttgtcaactctgtggccaagccacctcgtgacgtccggaggaggcaggaaaagtttgg

SEQ ID NO: 13049 - DNA, 120 bp, Artificial Sequence
  ENSG00000011007_20 (sequence is synthesized)
aacgggaggagcagctgtccctgagaaaatcaagatcaagccagccccgtaccccatgggaagcagccatgcttccgccagtagcatcagctttaaccccagccctgaggagccggccta

SEQ ID NO: 13050 - DNA, 120 bp, Artificial Sequence
  ENSG00000011007_21 (sequence is synthesized)
taaagctttcaagaacagattctcccgacgataaactgaggacttgccttggaaatggaatctggggaggcaggaatacaaggacagtgggggttggggaatggaattctacaggagact

SEQ ID NO: 13051 - DNA, 120 bp, Artificial Sequence
  ENSG00000011007_22 (sequence is synthesized)
ggagtcttgctttgtggatccttttggtctccgagtcctgcagtctgcaggtgctgcccctgggaacctgcgtgccacagccccgcctccctgcctggagcacactttagaattctgaag

SEQ ID NO: 13052 - DNA, 120 bp, Artificial Sequence
  ENSG00000011007_23 (sequence is synthesized)
atgtgaagcctctgtctcactgaggattttaaaggtcaattatacttttgttgttcattagcatctttgtaaactataagacgtagttttaattaataaatattgcccccagattgtatt

SEQ ID NO: 13053 - DNA, 120 bp, Artificial Sequence
  ENSG00000011007_24 (sequence is synthesized)
tatattatcccccaggtttgtttttgttttttgtcctctaccacacatttagccttttatcttccaggtccttattaaaatcagatgaaagcctagtgaaagccagtctcctgccccagc

SEQ ID NO: 13054 - DNA, 120 bp, Artificial Sequence
  ENSG00000011007_25 (sequence is synthesized)
tcagctctgtgtggactctggtccagacagaggactgggcatctccagagcctgcacagtacctgctgcacgtagggcaaggaatgagcactagaccgcctgtccccaagggagcctcag

SEQ ID NO: 13055 - DNA, 120 bp, Artificial Sequence
  ENSG00000011007_26 (sequence is synthesized)
tggggcgacagggtgctcggcggactccacctcaggccctccccactgttgctgtgcattcctgtgcaggtgcatctctttcttactaactggtatttattaagggaggtgctctgtagg

SEQ ID NO: 13056 - DNA, 120 bp, Artificial Sequence
  ENSG00000011007_27 (sequence is synthesized)
tctggagcctttccctcatcctttttgcgagtccccacctttttgtttttttttttttctttgaggctcactagaggacgcagaaccttgggagattgatttgcacagaactccccacct

SEQ ID NO: 13057 - DNA, 120 bp, Artificial Sequence
  ENSG00000011007_28 (sequence is synthesized)
cccacttttacaatttccagtttctgattgaaaattttagggtttctccccactgcccttccctatctttccttcccctcaacaccatgaaggaaaaacacacacggcagggctttttgt

SEQ ID NO: 13058 - DNA, 120 bp, Artificial Sequence
  ENSG00000011007_29 (sequence is synthesized)
agccctgaaggcaactttagacatttaaaatccagcactttaatctcttgttctctgtgaatcactatgagaagtgaatggttttaaaggctgtaatgctatgttggaaattggtttgtt

SEQ ID NO: 13059 - DNA, 120 bp, Artificial Sequence
  ENSG00000011007_30 (sequence is synthesized)
ttgccttttattgaaaaggtaagatcatgtgattggaagaacacaactgttggcttgggaagaggactttgctgctgaagtgttttctaccttctgagtgtgtttaaggcaggatttgga

SEQ ID NO: 13060 - DNA, 120 bp, Artificial Sequence
  ENSG00000011007_31 (sequence is synthesized)
gggaaggaccagcttagggagagtgtctgagccacagcgtcaggatgggggaaaccacatgggatccatcaagttccagttgaacaggagcaagatcagaacttaggagggcagtgtcag

SEQ ID NO: 13061 - DNA, 120 bp, Artificial Sequence
  ENSG00000011007_32 (sequence is synthesized)
ctcccttgttggctgtcaaggaacaccgatctagtagaaacccacttggttgtgacccaggtagaggtagatgccatacatttgagatatgcgtccttaaggaacctgacaagcagactg

SEQ ID NO: 13062 - DNA, 120 bp, Artificial Sequence
  ENSG00000011007_33 (sequence is synthesized)
aagggatggtaagtgtgacagcctgataagttttctcaaagcccaggatacagagccagtgttttctgtaactggagacctcagttaggccaacttcgaattccagagcaacgtaggaag

SEQ ID NO: 13063 - DNA, 120 bp, Artificial Sequence
  ENSG00000011007_34 (sequence is synthesized)
tctattcagcagaaactcgacattgttcagtgtgtattgctgtgcagggtgcctattgtgacaggacacaaatgttactatgttttaatttgctatatttttgaatgggtaaagcattac

SEQ ID NO: 13064 - DNA, 120 bp, Artificial Sequence
  ENSG00000011007_35 (sequence is synthesized)
tttacttctcttggttacttgtaccaccattccacccctatccctagcctgccccacaaatctaatattaggaagcctcttaactgaaaccaaatgaacatttgggtcaggtgccagatg

SEQ ID NO: 13065 - DNA, 120 bp, Artificial Sequence
  ENSG00000011007_36 (sequence is synthesized)
tctgctgcctagaatagctttttctaggtgtctaccaccttgaatttatctcttaactgtgtgttcaagtctttgtcattgaaactagtttttcatatcttagattcagttgtgtatgat

SEQ ID NO: 13066 - DNA, 120 bp, Artificial Sequence
  ENSG00000011007_37 (sequence is synthesized)
ttaatgtcccttattaggagtctttaggcagggagggaagaaaaaacagatttgttcatagcaatgtcagtatccattttggcacataaagatttttgatgagccctgtttgcatagagc

SEQ ID NO: 13067 - DNA, 120 bp, Artificial Sequence
  ENSG00000011007_38 (sequence is synthesized)
cagatgttttcccctcccccaagagtatctacatcagggatgtgacttggtgcgaagagtcaggggaaagaggaaaaacccaatttctaaatgacctccttgcccagcttactaaaatgg

SEQ ID NO: 13068 - DNA, 120 bp, Artificial Sequence
  ENSG00000011007_39 (sequence is synthesized)
ctgcagagcagacacaggatgaatttgaacctgacacaggatgaatttgaacctttggtctcatttatggaaaaacttgtgcaattttttttctgtgctacactacatacaaatcaccaa

SEQ ID NO: 13069 - DNA, 120 bp, Artificial Sequence
  ENSG00000011007_40 (sequence is synthesized)
attacaaattacccttttgtgatccttggtgtactgagcagtttctttggggctttttctttctgggaagcgggagggaaaggagcaaggtgtcatcctgctcttcatttgtattttggt

SEQ ID NO: 13070 - DNA, 120 bp, Artificial Sequence
  ENSG00000011007_41 (sequence is synthesized)
cccaaaatgtaaatacaattttctatgttacttttttgtggtaactaccgagatgaatattttaattagataagttatatgaaaaggaaaattccatgtctaaataaaaaacaaactcca

SEQ ID NO: 13071 - DNA, 120 bp, Artificial Sequence
  ENSG00000011007_42 (sequence is synthesized)
aacgctgcggagcctggactcgcggtctggtccgcgcctctcggagacgcggttactactctccggctggatatcagagcgtggacctttcgctttctcagtgaatccctttcaaaacag

SEQ ID NO: 13072 - DNA, 120 bp, Artificial Sequence
  ENSG00000011007_43 (sequence is synthesized)
aataaagcctcgcgtcacctaagcatactcctgaaaacttaggttggaattgaaaaagaggcgggggcccggggttggaagtcgcagctaggtttccttttggccattaataggaagcta

SEQ ID NO: 13073 - DNA, 120 bp, Artificial Sequence
  ENSG00000011009_0 (sequence is synthesized)
gggactcgaacggaagttccggcgggggcggccgagggggaagagtgtgtctgcgggagaaagaggagaatcgcccaagcggcctcggaagtcccagggagtggaggcccccgccgtgga

SEQ ID NO: 13074 - DNA, 120 bp, Artificial Sequence
  ENSG00000011009_1 (sequence is synthesized)
gccgtgtggtgtatgtgtggtaacaccatgtctgtgcccctgctcaccgatgctgccaccgtgtctggagctgagcgggaaacggccgcggttatttttttacatggacttggagacaca

SEQ ID NO: 13075 - DNA, 120 bp, Artificial Sequence
  ENSG00000011009_2 (sequence is synthesized)
gggcacagctgggctgacgccctctccaccatccggctccctcacgtcaagtacatctgtccccatgcgcctaggatccctgtgaccctcaacatgaagatggtgatgccctcctggttt

SEQ ID NO: 13076 - DNA, 120 bp, Artificial Sequence
  ENSG00000011009_3 (sequence is synthesized)
gacctgatggggctgagtccagatgccccagaggacgaggctggcatcaagaaggcagcagagaacatcaaggccttgattgagcatgaaatgaagaacgggatccctgccaatcgaatc

SEQ ID NO: 13077 - DNA, 120 bp, Artificial Sequence
  ENSG00000011009_4 (sequence is synthesized)
gtcctgggaggcttttcacagggcggggccctgtccctctacacggccctcacctgcccccaccctctggctggcatcgtggcgttgagctgctggctgcctctgcaccgggccttcccc

SEQ ID NO: 13078 - DNA, 120 bp, Artificial Sequence
  ENSG00000011009_5 (sequence is synthesized)
caggcagctaatggcagtgccaaggacctggccatactccagtgccatggggagctggaccccatggtgcccgtacggtttggggccctgacggctgagaagctccggtctgttgtcaca

SEQ ID NO: 13079 - DNA, 120 bp, Artificial Sequence
  ENSG00000011009_6 (sequence is synthesized)
gaatttcttgagaagctgctgcctcctgtctaactagtcgctggccccagtgcagtaccccagctcatgggggactcagcaagcaagcgtggcaccatcttggatctgagccggtcgagc

SEQ ID NO: 13080 - DNA, 120 bp, Artificial Sequence
  ENSG00000011009_7 (sequence is synthesized)
ccctgtccccacccttcctgacctgtccttttcccacaggcctctgggggcaggtggcaaggcctggccgggccttccttcctggccttagccacctggctctgtctgcagcaggggcag

SEQ ID NO: 13081 - DNA, 120 bp, Artificial Sequence
  ENSG00000011009_8 (sequence is synthesized)
gctgctttcttatccatttccctggaggcgggcccccctggcagcagtattggaggggctacaggcagctggagaaaggggcccagccgctgacccactcactcaggacctcactcacta

SEQ ID NO: 13082 - DNA, 120 bp, Artificial Sequence
  ENSG00000011009_9 (sequence is synthesized)
gccccgctttgggccccctcctgtgacctcagggtttggcccatggggcccccccaggcccctgccccaactgattctgcccagataatcgtgtctcctgcctccactcagctgcttctc

SEQ ID NO: 13083 - DNA, 120 bp, Artificial Sequence
  ENSG00000011009_10 (sequence is synthesized)
agtcatgaatgtggccatggccccggggtccccttgctgctgtgggctccctgtccctgggcaggagtgctggtgaggaggtggagccttttgaggggggccttccctcagctgtttccc

SEQ ID NO: 13084 - DNA, 120 bp, Artificial Sequence
  ENSG00000011009_11 (sequence is synthesized)
cacactggggggctgggccctgcctccccgttaccctccttccctgcaggcctggagcctgtagggctggactgaggttcaggtctccccccagctgtctcacccccactttgtccccac

SEQ ID NO: 13085 - DNA, 120 bp, Artificial Sequence
  ENSG00000011009_12 (sequence is synthesized)
tctagagcagggaggcagtgggggaggagttgtgtctcgtcttctgtctccatgtggtttttgggtgtttttcttgttgtgtcctggattccgataaaattaaagaaattgcttcctcaa

SEQ ID NO: 13086 - DNA, 120 bp, Artificial Sequence
  ENSG00000011009_13 (sequence is synthesized)
tttgcagtcagtggcagcagcagcaggacagaacctgggtgctgtgtggggctgatggcctggtggcctcttgggccaggagtgtgtcctgtgcctggttttgctcttgaccgccgcccc

SEQ ID NO: 13087 - DNA, 120 bp, Artificial Sequence
  ENSG00000011021_0 (sequence is synthesized)
agtcacgtgaggcgcagatcctggctgggagggggttggtagaggggtccagagtggcagtaaaggaggaagatggcggggtgcagggggtctctgtgctgctgctgcaggtggtgctgc

SEQ ID NO: 13088 - DNA, 120 bp, Artificial Sequence
  ENSG00000011021_1 (sequence is synthesized)
tgctgcggtgagcgtgagacccgcacccccgaggagctgaccatccttggagaaacacaggaggaggaggatgagattcttccaaggaaagactatgagagtttggattatgatcgctgt

SEQ ID NO: 13089 - DNA, 120 bp, Artificial Sequence
  ENSG00000011021_2 (sequence is synthesized)
atcaatgacccttacctggaagttttggagaccatggataataagaaaggtcgaagatatgaggcggtgaagtggatggtggtgtttgccattggagtctgcactggcctggtgggtctc

SEQ ID NO: 13090 - DNA, 120 bp, Artificial Sequence
  ENSG00000011021_3 (sequence is synthesized)
tttgtggacttttttgtgcgactcttcacccaactcaagttcggagtggtacagacatcggtggaggagtgcagccagaaaggctgcctcgctctgtctctccttgaactcctgggtttt

SEQ ID NO: 13091 - DNA, 120 bp, Artificial Sequence
  ENSG00000011021_4 (sequence is synthesized)
aacctcacctttgtcttcctggcaagcctccttgttctcattgagccggtggcagcaggttccgggatacccgaggtcaaatgctatctgaatggcgtaaaggtgccaggaatcgtccgt

SEQ ID NO: 13092 - DNA, 120 bp, Artificial Sequence
  ENSG00000011021_5 (sequence is synthesized)
ctccggaccctgctctgcaaggtccttggagtgctgttcagtgtggctggagggctcttcgtggagaaggaaggccccatgatccacagtggttcggtggtgggagctggcctccctcag

SEQ ID NO: 13093 - DNA, 120 bp, Artificial Sequence
  ENSG00000011021_6 (sequence is synthesized)
tttcagagcatctccttacggaagatccagtttaacttcccctatttccgaagcgacagagacaagagagactttgtatcagcaggagcggctgctggagttgctgcagctttcggggcg

SEQ ID NO: 13094 - DNA, 120 bp, Artificial Sequence
  ENSG00000011021_7 (sequence is synthesized)
ccaatcgggggtaccttgttcagtctagaggagggttcgtccttctggaaccaagggctcacgtggaaagtgctcttttgttccatgtctgccaccttcaccctcaacttcttccgttct

SEQ ID NO: 13095 - DNA, 120 bp, Artificial Sequence
  ENSG00000011021_8 (sequence is synthesized)
gggattcagtttggaagctggggttccttccagctccctggattgctgaactttggcgagtttaagtgctctgactctgataaaaaatgtcatctctggacagctatggatttgggtttc

SEQ ID NO: 13096 - DNA, 120 bp, Artificial Sequence
  ENSG00000011021_9 (sequence is synthesized)
ttcgtcgtgatgggggtcattgggggcctcctgggagccacattcaactgtctgaacaagaggcttgcaaagtaccgtatgcgaaacgtgcacccgaaacctaagctcgtcagagtctta

SEQ ID NO: 13097 - DNA, 120 bp, Artificial Sequence
  ENSG00000011021_10 (sequence is synthesized)
gagagcctccttgtgtctctggtaaccaccgtggtggtgtttgtggcctcgatggtgttaggagaatgccgacagatgtcctcttcgagtcaaatcggtaatgactcattccagctccag

SEQ ID NO: 13098 - DNA, 120 bp, Artificial Sequence
  ENSG00000011021_11 (sequence is synthesized)
gtcacagaagatgtgaattcaagtatcaagacatttttttgtcccaatgatacctacaatgacatggccacactcttcttcaacccgcaggagtctgccatcctccagctcttccaccag

SEQ ID NO: 13099 - DNA, 120 bp, Artificial Sequence
  ENSG00000011021_12 (sequence is synthesized)
gatggtactttcagccccgtcactctggccttgttcttcgttctctatttcttgcttgcatgttggacttacggcatttctgttccaagtggcctttttgtgccttctctgctgtgtgga

SEQ ID NO: 13100 - DNA, 120 bp, Artificial Sequence
  ENSG00000011021_13 (sequence is synthesized)
gctgcttttggacgtttagttgccaatgtcctaaaaagctacattggattgggccacatctattcggggacctttgccctgattggtgcagcggctttcttgggcggggtggtccgcatg

SEQ ID NO: 13101 - DNA, 120 bp, Artificial Sequence
  ENSG00000011021_14 (sequence is synthesized)
accatcagcctcacggtcatcctgatcgagtccaccaatgagatcacctacgggctccccatcatggtcacactgatggtggccaaatggacaggggactttttcaataagggcatttat

SEQ ID NO: 13102 - DNA, 120 bp, Artificial Sequence
  ENSG00000011021_15 (sequence is synthesized)
gatatccacgtgggcctgcgaggcgtgccgcttctggaatgggagacagaggtggaaatggacaagctgagagccagcgacatcatggagcccaacctgacctacgtctacccgcacacc

SEQ ID NO: 13103 - DNA, 120 bp, Artificial Sequence
  ENSG00000011021_16 (sequence is synthesized)
cgcatccagtctctggtgagcatcctgcgcaccacggtccaccatgccttcccggtggtcacagagaaccgcggtaacgagaaggagttcatgaagggcaaccagctcatcagcaacaac

SEQ ID NO: 13104 - DNA, 120 bp, Artificial Sequence
  ENSG00000011021_17 (sequence is synthesized)
atcaagttcaagaaatccagcatcctcacccgggctggcgagcagcgcaaacggagccagtccatgaagtcctacccatccagcgagctacggaacatgtgtgatgagcacatcgcctct

SEQ ID NO: 13105 - DNA, 120 bp, Artificial Sequence
  ENSG00000011021_18 (sequence is synthesized)
gaggagccagccgagaaggaggacctcctgcagcagatgctggaaaggagatacactccctaccccaacctataccctgaccagtccccaagtgaagactggaccatggaggagcggttc

SEQ ID NO: 13106 - DNA, 120 bp, Artificial Sequence
  ENSG00000011021_19 (sequence is synthesized)
cgccctctgaccttccacggcctgatccttcggtcgcagcttgtcaccctgcttgtccgaggagtttgttactctgaaagccagtcgagcgccagccagccgcgcctctcctatgccgag

SEQ ID NO: 13107 - DNA, 120 bp, Artificial Sequence
  ENSG00000011021_20 (sequence is synthesized)
atggccgaggactacccgcggtaccccgacatccacgacctggacctgacgctgctcaacccgcgcatgatcgtggatgtcaccccatacatgaacccttcgcctttcaccgtctcgccc

SEQ ID NO: 13108 - DNA, 120 bp, Artificial Sequence
  ENSG00000011021_21 (sequence is synthesized)
aacacccacgtctcccaagtcttcaacctgttcagaacgatgggcctgcgccacctgcccgtggtgaacgctgtgggagagatcgtggggatcatcacacggcacaacctcacctatgaa

SEQ ID NO: 13109 - DNA, 120 bp, Artificial Sequence
  ENSG00000011021_22 (sequence is synthesized)
tttctgcaggcccggctgaggcagcactaccagaccatctgacagcccagcccaccctctcctggtgctgcctggggaggcaaatcatgctcactccggcgggcacagctggctggggct

SEQ ID NO: 13110 - DNA, 120 bp, Artificial Sequence
  ENSG00000011021_23 (sequence is synthesized)
ggtcagaggtcctgggggtggttttgaaccatcagagcttggacttttctgacttccccagcaaggatcttcccacttcctgctccctgtgttcccaccctccagtgttggcacaggccc

SEQ ID NO: 13111 - DNA, 120 bp, Artificial Sequence
  ENSG00000011021_24 (sequence is synthesized)
acccctggctccaccagagccagaagcagaggtagaatcaggcgggccccgggctgcactccgagcagtgttcctggccatctttgctactttcctagagaacccggctgttgccttaaa

SEQ ID NO: 13112 - DNA, 120 bp, Artificial Sequence
  ENSG00000011021_25 (sequence is synthesized)
tgtgtgagagggacttggccaaggcaaaagctggggagatgccagtgacaacatacagttcatgactaggtttaggaattgggcactgagaaaattctcaatatttcagagagtccttcc

SEQ ID NO: 13113 - DNA, 120 bp, Artificial Sequence
  ENSG00000011021_26 (sequence is synthesized)
cttatttgggactcttaacacggtatcctcgctagttggttttaagggaaacactctgctcctgggtgtgagcagaggctctggtcttgccctgtggtttgactctccttagaaccaccg

SEQ ID NO: 13114 - DNA, 120 bp, Artificial Sequence
  ENSG00000011021_27 (sequence is synthesized)
cccaccagaaacataaaggattaaaatcacactaataacccctggatggtcaatctgataataggatcagatttacgtctaccctaattcttaacattgcagctttctctccatctgcag

SEQ ID NO: 13115 - DNA, 120 bp, Artificial Sequence
  ENSG00000011021_28 (sequence is synthesized)
attattcccagtctcccagtaacacgtttctacccagatcctttttcatttccttaagttttgatctccgtcttcctgatgaagcaggcagagctcagaggatcttggcatcacccacca

SEQ ID NO: 13116 - DNA, 120 bp, Artificial Sequence
  ENSG00000011021_29 (sequence is synthesized)
aagttagctgaaagcagggcactcctggataaagcagcttcactcaactctggggaatgctaccattttttttccaaagtagaaaggaagcacttctgagccagtgaccactgaaaggta

SEQ ID NO: 13117 - DNA, 120 bp, Artificial Sequence
  ENSG00000011021_30 (sequence is synthesized)
tgtgctatgataaagcagatggcctatttgaggaagagggtgtctgcccttcacaaacacctctctctcccctgcactagctgtcccaagcttacatacagaggcccttcaggagggcct

SEQ ID NO: 13118 - DNA, 120 bp, Artificial Sequence
  ENSG00000011021_31 (sequence is synthesized)
cctgtgccgcagggagggtgcgtggggaagatgcttcctgccagcacgtgcctgaaggtttcacatgaagcatgggaagcgcaccctgtcgttcagtgacgtcattcttctccaggctgg

SEQ ID NO: 13119 - DNA, 120 bp, Artificial Sequence
  ENSG00000011021_32 (sequence is synthesized)
cccgccccctctgactaggcacccaaagtgagcatctgggcattgggcattcatgcttatcttcccccaccttctacatggtattagtcccagcaggcatccctggggcagacgtgcttt

SEQ ID NO: 13120 - DNA, 120 bp, Artificial Sequence
  ENSG00000011021_33 (sequence is synthesized)
ggctcaagatggccttcatttacgtttagttttttttaaaaccgtggaggttgcccacgggcctcggcacctggccctggcagcacagctctcaggcccagccctgggcgacctccttgg

SEQ ID NO: 13121 - DNA, 120 bp, Artificial Sequence
  ENSG00000011021_34 (sequence is synthesized)
ccaagtctgcctttcaccctggggtgagcatcagtcctggctctgctggtccagatcttgcgctcagcacactctagggaataattccactccagagatggggctgcttcaaggtctttt

SEQ ID NO: 13122 - DNA, 120 bp, Artificial Sequence
  ENSG00000011021_35 (sequence is synthesized)
ctagctgattgtggcccctccattttccccattttcttatctccctgaccaaaattgctttgacttctaaatgtttctgcttcccagaatgcacctgacttatgaaatggggataatact

SEQ ID NO: 13123 - DNA, 120 bp, Artificial Sequence
  ENSG00000011021_36 (sequence is synthesized)
cccaggaaatagcgcaggacatcacaaggaccaaaaaggcaattcttatttaaatgttactatttggccagctgctgctgtgttttatggcagtgttcagagcttgatcacgttatttct

SEQ ID NO: 13124 - DNA, 120 bp, Artificial Sequence
  ENSG00000011021_37 (sequence is synthesized)
tccttttattaagaaggaagccaattgtccaagtcaggagaatggtgtgatcacctgtcacagacactttgtcccctctccccgccccttcctggagctggcagagctaacgccctgcag

SEQ ID NO: 13125 - DNA, 120 bp, Artificial Sequence
  ENSG00000011021_38 (sequence is synthesized)
gaggaccccggcctctcgagggctggatcagcagccgcctgccctgaggctgccccggtgaatgttattggaattcatccctcgtgcacatcctgttgtgtttaagtcaccagatatttt

SEQ ID NO: 13126 - DNA, 120 bp, Artificial Sequence
  ENSG00000011021_39 (sequence is synthesized)
gttcccatcagtttagcccagagatagacagtagaatgcaaatacctccctcccctaaactgactggacggctgccaaggaggccccaaacccaggccccatgcaaaggcacgtggtttc

SEQ ID NO: 13127 - DNA, 120 bp, Artificial Sequence
  ENSG00000011021_40 (sequence is synthesized)
cttttctcctctctctgcatctgcgctttccagataagcccaaagacagcaacttctccactcatgacaaatcaactgtgaccctcgctccttccatttctgtccattagaaaccagcct

SEQ ID NO: 13128 - DNA, 120 bp, Artificial Sequence
  ENSG00000011021_41 (sequence is synthesized)
tttcagcatctcacccattagcagccccatcacccagtgatcagtcgcctcagtaaagcagatctgtggatggggagcctacgggtggtaagaagtggtgttttgtgtttcatctccagc

SEQ ID NO: 13129 - DNA, 120 bp, Artificial Sequence
  ENSG00000011021_42 (sequence is synthesized)
ttggtgttccatggcccctaggcgaggtgatcagggagtggggccaatgggcccccggccctggctttgggaccttgtgctgagggatgatttgctcctgaccttgattaacttaacagt

SEQ ID NO: 13130 - DNA, 120 bp, Artificial Sequence
  ENSG00000011021_43 (sequence is synthesized)
tcccagctggaagggacactttcaggacccagtccactgtatggcatttgtgatgcagaattatgcactgacatgaccctgggtgacaggaaagcctttcgagaggcccaaggtggcctc

SEQ ID NO: 13131 - DNA, 120 bp, Artificial Sequence
  ENSG00000011021_44 (sequence is synthesized)
gccagccctgcagtattgatgtgcagtattgcaccacagctctgcggaccttggccattgccgcagtcgcagcttccttttttctgtttgcactgtttgtttgtatgatgttagctaatt

SEQ ID NO: 13132 - DNA, 120 bp, Artificial Sequence
  ENSG00000011021_45 (sequence is synthesized)
ccactgtgtatataaattgtattttttttaatttgtaaaatgctatttttatttgaacctttggaacttgggagttctcattgtaaccctaacatgtgagaataaaatgtcttctgtctc

SEQ ID NO: 13133 - DNA, 120 bp, Artificial Sequence
  ENSG00000011021_46 (sequence is synthesized)
gcagccgcgtcctggaggagcagcggatggggaatccattctgtttcttcctggtgtttaggaagttgccccacacacagattgccccgatgtccaaccagaagaagtgaaactgctgct

SEQ ID NO: 13134 - DNA, 120 bp, Artificial Sequence
  ENSG00000011021_47 (sequence is synthesized)
gggtctggagaggtgaagacccgtggccagcttctgttgttgccatcggccattgctttttgttcgcttgcttttggttttgcaagaagagcggcctctgtctctgatctgcttcaaatc

SEQ ID NO: 13135 - DNA, 120 bp, Artificial Sequence
  ENSG00000011021_48 (sequence is synthesized)
aagtgttctgagtggaatttgaggcctccccaaccacctaccaaaaaaggagggtgaaatgaaaggaagaagaaaaactcagcattctttcctctgacaaagagtaaaacgacaaggaat

SEQ ID NO: 13136 - DNA, 120 bp, Artificial Sequence
  ENSG00000011021_49 (sequence is synthesized)
atcggcctgaattctcttcccaagaagaaagaaagcacaccaacgcaggcatttgtcttctgtccatggtgctgaagtttattcactttcaaaccactttcagtaacagcaaattcttta

SEQ ID NO: 13137 - DNA, 120 bp, Artificial Sequence
  ENSG00000011021_50 (sequence is synthesized)
gaaaaggaaaatacagggaaagggataaacctcactgacttggaggaaatcaagaggagtgagcacagcatcagaaagccccctggccccagactgcacccgctttcctggccctacctt

SEQ ID NO: 13138 - DNA, 120 bp, Artificial Sequence
  ENSG00000011021_51 (sequence is synthesized)
gaaatccatcaggtctgcgttggacacggcattgtacatgggattagctctggtctgacctaggagctggaatgccagtaaaaggaggaagctcacggtggtggtggagaaggagctcat

SEQ ID NO: 13139 - DNA, 120 bp, Artificial Sequence
  ENSG00000011021_52 (sequence is synthesized)
ttgagagaggatcccctagccaggtgctgtttgtgcacccaggcttctcaccagaaacgtaggcatcccaccaggaggggagagtgtggcccaacactagctttgaaccctgctcggctt

SEQ ID NO: 13140 - DNA, 120 bp, Artificial Sequence
  ENSG00000011021_53 (sequence is synthesized)
ccgtgcactcgggaccctttcccctgcctgccagcagatggcaccagcgtcccactggccgtcctttccagccagagccgcgcctctaccaggctgtgtcttcctcctgaaatgttgctc

SEQ ID NO: 13141 - DNA, 120 bp, Artificial Sequence
  ENSG00000011021_54 (sequence is synthesized)
ttcactccgtaccactggtgttccttggttctccacctgcgtagggatttgcgcattagatgagagaatttcaagcaaaatactttgagttttacaaagatataaaacacctagtaatta

SEQ ID NO: 13142 - DNA, 120 bp, Artificial Sequence
  ENSG00000011021_55 (sequence is synthesized)
gaacaaaacttcgggagactatatgttgtcaagagtggggaataatttcttaaaactccagaaggcacagactataagaaaaaacatcaatggggccggacacagtggctcacgcctgta

SEQ ID NO: 13143 - DNA, 120 bp, Artificial Sequence
  ENSG00000011021_56 (sequence is synthesized)
acttggaaagctgacagcaaggtgctttctgagccccagttactcttccacctccccttgcctgaaggggccacagcccagaggctcagcacccacctcatggcctctgtgactatgaca

SEQ ID NO: 13144 - DNA, 120 bp, Artificial Sequence
  ENSG00000011021_57 (sequence is synthesized)
gtcactcttgagaggaagaaatatctgtgtcagggcaaggaggcttctctcttcccagcatcctctgcctcttcccggcgttgggtcctttgtgggtgcgccaccctcctgcactcctcc

SEQ ID NO: 13145 - DNA, 120 bp, Artificial Sequence
  ENSG00000011021_58 (sequence is synthesized)
ttttcccttcttggggggcgcgatattttccagaggctttccctgaggagtggtcccatgaggtagtccgtggagcctactccacgctgtgttctttcggtccaacccggaggctctgag

SEQ ID NO: 13146 - DNA, 120 bp, Artificial Sequence
  ENSG00000011021_59 (sequence is synthesized)
ggcgagtttaagagtcttagagagcctccttgtgtctctggtaaccaccgtggtggtgtttgtggcctcgatggtgttaggagaatgccgacagatgtcctcttcgagtcaaatcggtaa

SEQ ID NO: 13147 - DNA, 120 bp, Artificial Sequence
  ENSG00000011021_60 (sequence is synthesized)
acatgggattagctctggtctgacctaggagctggaatgccagtaaaaggaggaagctcacggtggtggtggagaaggagctcatgctggcgtcgtcaaggagcaatccactgcttgctg

SEQ ID NO: 13148 - DNA, 120 bp, Artificial Sequence
  ENSG00000011021_61 (sequence is synthesized)
ctctgtctctcccctctggttcctctctggttcccctctcttggcctacgtctgtccctgtctcccagctgcccagtgccgcctctttttatagccccccagctctccaagcacgcagga

SEQ ID NO: 13149 - DNA, 120 bp, Artificial Sequence
  ENSG00000011021_62 (sequence is synthesized)
gagacagaaccctccccattctgtcacttgcagtgataaagctgccaagtgagaagccagcaggagatgcccttttaaagttatcatcccgcagggcttgtcacagcccctctctgcctt

SEQ ID NO: 13150 - DNA, 120 bp, Artificial Sequence
  ENSG00000011021_63 (sequence is synthesized)
gggcagccccaacagccccccagaccctcagctgcaagagccgcattcttactgatttgactcaagaggctcccacttcaaaggtgtgagaagagtaaaaaagagtccttggttatctca

SEQ ID NO: 13151 - DNA, 120 bp, Artificial Sequence
  ENSG00000011028_0 (sequence is synthesized)
atcacttcgtcccgacccggaggaggacgcgagccccttgcgggcggtcatcacagcccagcctcggggctgccacagcgcgttgcgcctgtgcgccctcggtccccgcgtccactgagc

SEQ ID NO: 13152 - DNA, 120 bp, Artificial Sequence
  ENSG00000011028_1 (sequence is synthesized)
ccggcccccgcgccctggcctcgtcacctgctgcgctgcgtcctgctcctcgggtgcctgcacctcggccgtcccggcgcccctggggacgccgccctcccggaacccaacgtcttcctc

SEQ ID NO: 13153 - DNA, 120 bp, Artificial Sequence
  ENSG00000011028_2 (sequence is synthesized)
cgccctcccggaacccaacgtcttcctcatcttcagccatggactgcagggctgcctggaggcccagggcgggcaggtcagagtcaccccggcttgcaataccagcctccctgcccagcg

SEQ ID NO: 13154 - DNA, 120 bp, Artificial Sequence
  ENSG00000011028_3 (sequence is synthesized)
ctggaagtgggtctcccgaaaccggctattcaacctgggtaccatgcagtgcctgggcacaggctggccaggcaccaacaccacggcctccctgggcatgtatgagtgtgaccgggaagc

SEQ ID NO: 13155 - DNA, 120 bp, Artificial Sequence
  ENSG00000011028_4 (sequence is synthesized)
actgaatcttcgctggcattgtcgtacactgggtgaccagctgtccttgctcctgggggcccgcaccagcaacatatccaagcctggcacccttgagcgtggtgaccagacccgcagtgg

SEQ ID NO: 13156 - DNA, 120 bp, Artificial Sequence
  ENSG00000011028_5 (sequence is synthesized)
ccagtggcgcatctacggcagcgaggaggacctatgtgctctgccctaccacgaggtctacaccatccagggaaactcccacggaaagccgtgcaccatccccttcaaatatgacaacca

SEQ ID NO: 13157 - DNA, 120 bp, Artificial Sequence
  ENSG00000011028_6 (sequence is synthesized)
gtggttccacggctgcaccagcacgggccgcgaggatggtcacctgtggtgtgccaccacccaggactacggcaaagacgagcgctggggcttctgccccatcaagagtaacgactgcga

SEQ ID NO: 13158 - DNA, 120 bp, Artificial Sequence
  ENSG00000011028_7 (sequence is synthesized)
gaccttctgggacaaggaccagctgactgacagctgctaccagtttaacttccagtccacgctgtcgtggagggaggcctgggccagctgcgagcagcagggtgcggatctgctgagcat

SEQ ID NO: 13159 - DNA, 120 bp, Artificial Sequence
  ENSG00000011028_8 (sequence is synthesized)
cacggagatccacgagcagacctacatcaacggcctcctcactgggtacagctccaccctgtggatcggcttgaatgacttggacacgagcggaggctggcagtggtcggacaactcgcc

SEQ ID NO: 13160 - DNA, 120 bp, Artificial Sequence
  ENSG00000011028_9 (sequence is synthesized)
cctcaagtacctcaactgggagagtgaccagccggacaaccccagtgaggagaactgtggagtgatccgcactgagtcctcgggcggctggcagaaccgtgactgcagcatcgcgctgcc

SEQ ID NO: 13161 - DNA, 120 bp, Artificial Sequence
  ENSG00000011028_10 (sequence is synthesized)
ctatgtgtgcaagaagaagcccaacgccacggccgagcccacccctccagacaggtgggccaatgtgaaggtggagtgcgagccgagctggcagcccttccagggccactgctaccgcct

SEQ ID NO: 13162 - DNA, 120 bp, Artificial Sequence
  ENSG00000011028_11 (sequence is synthesized)
gcaggccgagaagcgcagctggcaggagtccaagaaggcatgtctacggggcggtggcgacctggtcagcatccacagcatggcggagctggaattcatcaccaagcagatcaagcaaga

SEQ ID NO: 13163 - DNA, 120 bp, Artificial Sequence
  ENSG00000011028_12 (sequence is synthesized)
ggtggaggagctgtggatcggcctcaacgatttgaaactgcagatgaattttgagtggtctgacgggagccttgtgagcttcacccactggcacccctttgagcccaacaacttccggga

SEQ ID NO: 13164 - DNA, 120 bp, Artificial Sequence
  ENSG00000011028_13 (sequence is synthesized)
cagtctggaggactgtgtcaccatctggggcccggaaggccgctggaacgacagtccctgtaaccagtccttgccatccatctgcaagaaggcaggccagctgagccagggggccgccga

SEQ ID NO: 13165 - DNA, 120 bp, Artificial Sequence
  ENSG00000011028_14 (sequence is synthesized)
ggaggaccatggctgccggaagggttggacgtggcacagcccatcctgctactggctgggagaagaccaagtgacctacagtgaggcccggcgcctgtgcactgaccatggctctcagct

SEQ ID NO: 13166 - DNA, 120 bp, Artificial Sequence
  ENSG00000011028_15 (sequence is synthesized)
ggtcaccatcaccaacaggttcgagcaggccttcgtcagcagcctcatctacaactgggagggcgagtacttctggacggccctgcaggacctcaacagcaccggctccttcttctggct

SEQ ID NO: 13167 - DNA, 120 bp, Artificial Sequence
  ENSG00000011028_16 (sequence is synthesized)
cagtggggatgaagtcatgtacacccactggaaccgggaccagcccgggtacagccgtgggggctgcgtggcgctggccactggcagcgccatggggctgtgggaggtgaagaactgtac

SEQ ID NO: 13168 - DNA, 120 bp, Artificial Sequence
  ENSG00000011028_17 (sequence is synthesized)
ctcgttccgggcccgctacatctgccggcagagcctgggcactccagtgacgccggagctgccggggccagatcccacgcccagcctcactggctcctgtccccagggctgggcctcgga

SEQ ID NO: 13169 - DNA, 120 bp, Artificial Sequence
  ENSG00000011028_18 (sequence is synthesized)
caccaaactccggtattgctataaggtgttcagctcagagcggctgcaggacaagaagagctgggtccaggcccagggggcctgccaggagctgggggcccagctgctgagcctggccag

SEQ ID NO: 13170 - DNA, 120 bp, Artificial Sequence
  ENSG00000011028_19 (sequence is synthesized)
ctacgaggaggagcactttgtggccaacatgctcaacaagatcttcggtgaatcagaacccgagatccacgagcagcactggttctggatcggcctgaaccgtcgggatcccagaggggg

SEQ ID NO: 13171 - DNA, 120 bp, Artificial Sequence
  ENSG00000011028_20 (sequence is synthesized)
tcagagttggcgctggagcgacggcgtagggttctcttaccacaatttcgaccggagccggcacgacgacgacgacatccgaggctgtgcggtgctggacctggcctccctgcagtgggt

SEQ ID NO: 13172 - DNA, 120 bp, Artificial Sequence
  ENSG00000011028_21 (sequence is synthesized)
ggccatgcagtgcgacacacagctggactggatctgcaagatccccagaggtacggacgtgcgggagcccgacgacagccctcaaggccgacgggaatggctgcgcttccaggaggccga

SEQ ID NO: 13173 - DNA, 120 bp, Artificial Sequence
  ENSG00000011028_22 (sequence is synthesized)
gtacaagttctttgagcaccactccacgtgggcgcaggcgcagcgcatctgcacgtggttccaggccgagctgacctcggtgcacagccaggcggagctagacttcctgagccacaactt

SEQ ID NO: 13174 - DNA, 120 bp, Artificial Sequence
  ENSG00000011028_23 (sequence is synthesized)
acagatggttccattataaacttcatctcctgggcaccaggcaaacctcggcctgtcggcaaggacaagaagtgcgtgtacatgacagccagccgagaggactggggggaccagaggtgc

SEQ ID NO: 13175 - DNA, 120 bp, Artificial Sequence
  ENSG00000011028_24 (sequence is synthesized)
ctgacagccttgccctacatctgcaagcgcagcaacgtcaccaaagaaacgcagcccccagacctgccaactacagccctggggggctgcccctctgactggatccagttcctcaacaag

SEQ ID NO: 13176 - DNA, 120 bp, Artificial Sequence
  ENSG00000011028_25 (sequence is synthesized)
tgttttcaggtccagggccaggaaccccagagccgggtgaagtggtcagaggcacagttctcctgtgaacagcaagaggcccagctggtcaccatcacaaaccccttagagcaagcattc

SEQ ID NO: 13177 - DNA, 120 bp, Artificial Sequence
  ENSG00000011028_26 (sequence is synthesized)
atcacagccagcctgcccaatgtgacctttgacctttggattggcctccatgcctcgcagagggacttccagtgggtggagcaggagcctttgatgtatgccaactgggcacctggggag

SEQ ID NO: 13178 - DNA, 120 bp, Artificial Sequence
  ENSG00000011028_27 (sequence is synthesized)
ccctctggccctagccctgctcccagtggcaacaaaccgaccagctgtgcagtggtcctgcacagcccctcagcccacttcactggccgctgggacgatcggagctgcacggaggagacc

SEQ ID NO: 13179 - DNA, 120 bp, Artificial Sequence
  ENSG00000011028_28 (sequence is synthesized)
catggcttcatctgccagaagggcacggacccctccctgagcccgtccccagcagcgctgccccccgccccgggcactgagctctcctacctcaacggcaccttccggctgcttcagaag

SEQ ID NO: 13180 - DNA, 120 bp, Artificial Sequence
  ENSG00000011028_29 (sequence is synthesized)
ccgctgcgctggcacgatgccctcctgctgtgtgagagccgcaatgccagcctggcctacgtgcccgacccctacacccaggccttcctcacgcaggctgcccgagggctgcgcacgccg

SEQ ID NO: 13181 - DNA, 120 bp, Artificial Sequence
  ENSG00000011028_30 (sequence is synthesized)
ctctggattgggctggctggcgaggagggctctcggcggtactcctgggtctcagaggagccgctgaactacgtgggctggcaggacggggagccgcagcagccggggggctgtacctac

SEQ ID NO: 13182 - DNA, 120 bp, Artificial Sequence
  ENSG00000011028_31 (sequence is synthesized)
gtagatgtggacggggcctggcgcaccaccagctgtgacaccaagctgcagggggctgtgtgtggggttagcagtgggccccctcctccccgaagaataagctaccatggcagctgtccc

SEQ ID NO: 13183 - DNA, 120 bp, Artificial Sequence
  ENSG00000011028_32 (sequence is synthesized)
cagggactggcagactccgcgtggattcccttccgggagcactgctattctttccacatggagctgctgctgggccacaaggaggcgcgacagcgctgccagagagcgggtggggccgtc

SEQ ID NO: 13184 - DNA, 120 bp, Artificial Sequence
  ENSG00000011028_33 (sequence is synthesized)
ctgtctatcctggatgagatggagaatgtgtttgtctgggagcacctgcagagctatgagggccagagtcggggcgcctggctgggcatgaacttcaaccccaaaggaggcactctggtc

SEQ ID NO: 13185 - DNA, 120 bp, Artificial Sequence
  ENSG00000011028_34 (sequence is synthesized)
tggcaggacaacacagctgtgaactactccaactgggggcccccgggcttgggccccagcatgctgagccacaacagctgctactggattcagagcaacagcgggctatggcgccccggc

SEQ ID NO: 13186 - DNA, 120 bp, Artificial Sequence
  ENSG00000011028_35 (sequence is synthesized)
gcttgcaccaacatcaccatgggtgtcgtctgcaagcttcctcgtgctgagcagagcagcttctccccatcagcgcttccagagaacccagcggccctggtggtggtgctgatggcggtg

SEQ ID NO: 13187 - DNA, 120 bp, Artificial Sequence
  ENSG00000011028_36 (sequence is synthesized)
ctgctgctcctggccttgctgaccgcagccctcatcctttaccggaggcgccagagcatcgagcgcggggcctttgagggtgcccgctacagccgcagcagctccagccccaccgaggcc

SEQ ID NO: 13188 - DNA, 120 bp, Artificial Sequence
  ENSG00000011028_37 (sequence is synthesized)
actgagaagaacatcctggtgtcagacatggaaatgaatgagcaacaagaatagagccaggcgcgtgggcagggccagggcgggaggagctggggagctggggccctgggtcagtctggc

SEQ ID NO: 13189 - DNA, 120 bp, Artificial Sequence
  ENSG00000011028_38 (sequence is synthesized)
cccccaccagctgcctgtccagttggcctatggaagggtgcccttgggagtcgctgttgggagccggagctgggcagagcctgggctggtggggtgccaccctcccacaagggctgggct

SEQ ID NO: 13190 - DNA, 120 bp, Artificial Sequence
  ENSG00000011028_39 (sequence is synthesized)
gagacccagctgagtgcagcgtggcgtttccctttctgggggggcctgaggtcttgtcacctggtcctgtgcccccacaggaaccagaggtaggatgggagggggaacgagagcctcttt

SEQ ID NO: 13191 - DNA, 120 bp, Artificial Sequence
  ENSG00000011028_40 (sequence is synthesized)
ctccccagagcccccggcccaggcctgttgatccgcgccccaggacccccttctttgcagagcccgaggagcctcccctgtcccctcgggcagatctgttgtgtctctcttcccacctgg

SEQ ID NO: 13192 - DNA, 120 bp, Artificial Sequence
  ENSG00000011028_41 (sequence is synthesized)
cagcctcagctctgtgcccctcaccctgctccctctcgccccttctctcccaccccttccttctgagccgggccctggggattggggagccctcttgttcctgatgagggtcagctgagg

SEQ ID NO: 13193 - DNA, 120 bp, Artificial Sequence
  ENSG00000011028_42 (sequence is synthesized)
gggctgagcatccatcactcctgtgcctgctggggtggctgtggggcgtggcaggaggggcctaggtgggttgggcctgagaaccagggcacgggtgtggtgtctgctgggctggagata

SEQ ID NO: 13194 - DNA, 120 bp, Artificial Sequence
  ENSG00000011028_43 (sequence is synthesized)
agactggggagagacaccccaacctcccagggtgggagctgggccgggctgggatgtcatctcctgccgggcgggggagggctctgcccctggaagagtcccctgtggggaccaaaataa

SEQ ID NO: 13195 - DNA, 120 bp, Artificial Sequence
  ENSG00000011028_44 (sequence is synthesized)
gttccctaacatctccagctcctggctctggtttggagcaaggggaagggttgccagagtcctgggggccccagaggagcaggagtctgggagggcccagagttcaccctctagtggatc

SEQ ID NO: 13196 - DNA, 120 bp, Artificial Sequence
  ENSG00000011028_45 (sequence is synthesized)
caggaggagcagcacccgagccctggagtggcccagtacccttccaagaggccacagtcccagccaggacaaagtatgcggcccatcctggtgcgacagcgtgggacaatgtgaacatgg

SEQ ID NO: 13197 - DNA, 120 bp, Artificial Sequence
  ENSG00000011028_46 (sequence is synthesized)
actcgaagacatggccctttctctgtagttgattttttaaatgtgccattattgtttttaaaaaaaaaggaaaaaagaaaagcaaacaaataaaacacctttaagaggcttgaaagagaa

SEQ ID NO: 13198 - DNA, 120 bp, Artificial Sequence
  ENSG00000011028_47 (sequence is synthesized)
atatgatgatccgggggcctctttgtatttggtgcctacttaccatgtactggggggcttgaggcaggaaggaccaggagcacctgggactcagaatttgagcttgtctttttgcccttg

SEQ ID NO: 13199 - DNA, 120 bp, Artificial Sequence
  ENSG00000011028_48 (sequence is synthesized)
ggcttcctgccctggagtcctcaggcttcttttctggagcagcaagtgtccagggacagctggggccttatctagaggcaccaggtccttgggtctttgactgccctgagctcagtagct

SEQ ID NO: 13200 - DNA, 120 bp, Artificial Sequence
  ENSG00000011028_49 (sequence is synthesized)
ccacccctcagcctacagccactaaaccccagaacctgggcccttccctgcccccattcctgcggccttcattgctgcatccggtggaggcccagctgggggccggtgctggagttacct

SEQ ID NO: 13201 - DNA, 120 bp, Artificial Sequence
  ENSG00000011028_50 (sequence is synthesized)
gctagactcagcgaggggtggacctgtctccatggtccagaagacttgaattcggagctggacacaggccctgagcctctgcccagactcctctcagggcatgaggctgagtgtgctgcc

SEQ ID NO: 13202 - DNA, 120 bp, Artificial Sequence
  ENSG00000011028_51 (sequence is synthesized)
cagaagggcacggggctgacacctaccaagccttggtctgggccaagcgccgagtctggtggagaccgggtctttgcctgggctctcggcggtactcctgggtctcagaggagccgctga

SEQ ID NO: 13203 - DNA, 80 bp, Artificial Sequence
  ENSG00000011028_52 (sequence is synthesized)
gaggcaagcctggggcctggggcctggcacggtgcctgcctgggtccggtgtgcctgcaggctcgcctgctgccgcctgg

SEQ ID NO: 13204 - DNA, 120 bp, Artificial Sequence
  ENSG00000011028_53 (sequence is synthesized)
cagtggggatgaagtcatgtacacccactggaaccgggaccagcccggtgagccccttatttgacttgccttggtgaagcgaggagggaggccagggtggactggccctgccagcaccga

SEQ ID NO: 13205 - DNA, 120 bp, Artificial Sequence
  ENSG00000011083_0 (sequence is synthesized)
gtcagctgtctgtctgggtgtctatgcgggcgcagcagtgcacccttccccagcctcgggcgctgcgcagggacagacaaggcattcgcagcgccctgcccgcgctccacgcccgcagcc

SEQ ID NO: 13206 - DNA, 120 bp, Artificial Sequence
  ENSG00000011083_1 (sequence is synthesized)
gccagacggcagcgcctgcgtccgtgcccgccccagccggtgcgcgggagccgcgggggcaaaggcgcagtggccagcggaccatctctcgtgccctcgctctctgcgctccggggcagc

SEQ ID NO: 13207 - DNA, 120 bp, Artificial Sequence
  ENSG00000011083_2 (sequence is synthesized)
tgagccccggccacccgctctccaagatgaagaagctccagggagctcacctccgcaagcctgtcaccccagacctgctgatgacccccagtgaccagggcgatgtcgacctggatgtgg

SEQ ID NO: 13208 - DNA, 120 bp, Artificial Sequence
  ENSG00000011083_3 (sequence is synthesized)
actttgctgcacaccgggggaactggacaggcaagctggacttcctgctgtcctgcattggctactgtgtaggcctggggaatgtctggcgcttcccctatcgagcgtacaccaatggag

SEQ ID NO: 13209 - DNA, 120 bp, Artificial Sequence
  ENSG00000011083_4 (sequence is synthesized)
gaggcgccttcctcgtgccctacttcctcatgctggccatctgtggcatccccctcttcttcctggagctctccctgggccagttctccagcctagggcccctggctgtctggaaaatca

SEQ ID NO: 13210 - DNA, 120 bp, Artificial Sequence
  ENSG00000011083_5 (sequence is synthesized)
gccctctcttcaaaggcgccggcgcagccatgctgctcatcgtgggcttggtggccatctactacaacatgatcatcgcctacgtgctcttctacctcttcgcctccctcaccagcgacc

SEQ ID NO: 13211 - DNA, 120 bp, Artificial Sequence
  ENSG00000011083_6 (sequence is synthesized)
taccctgggagcactgtggcaactggtggaacacagaactctgcctggagcacagagtctccaaggacggcaacggggccctgcccctcaacctcacctgcaccgtcagccccagcgagg

SEQ ID NO: 13212 - DNA, 120 bp, Artificial Sequence
  ENSG00000011083_7 (sequence is synthesized)
agtactggagccgctacgtcctccacatccaaggcagccagggcatcggcagccctggggagatccgctggaacctctgcctctgcctgctgctggcctgggtcatcgtgttcctctgta

SEQ ID NO: 13213 - DNA, 120 bp, Artificial Sequence
  ENSG00000011083_8 (sequence is synthesized)
tcctcaagggtgtgaagtcttcgggcaaggtggtgtatttcacggccacgttcccctacctcatcctgctcatgctgctggtccgcggagtcaccctcccaggggcctggaagggcatcc

SEQ ID NO: 13214 - DNA, 120 bp, Artificial Sequence
  ENSG00000011083_9 (sequence is synthesized)
agttctatctcaccccccagttccaccacttgttgtcttccaaggtgtggattgaagctgctcttcagatcttctattccctgggtgtgggcttcggggggctcctcacctttgcctcct

SEQ ID NO: 13215 - DNA, 120 bp, Artificial Sequence
  ENSG00000011083_10 (sequence is synthesized)
acaacacgtttcaccagaacatctatagagacactttcatcgtcactctgggcaacgccatcaccagcatcctggctggctttgccatcttctccgtgctgggctacatgtctcaggagc

SEQ ID NO: 13216 - DNA, 120 bp, Artificial Sequence
  ENSG00000011083_11 (sequence is synthesized)
tgggcgtgcctgtggaccaagtagccaaagcaggccctggcctggcctttgtcgtctacccacaggccatgaccatgctgcctctgtcacccttctggtcctttctcttcttcttcatgc

SEQ ID NO: 13217 - DNA, 120 bp, Artificial Sequence
  ENSG00000011083_12 (sequence is synthesized)
ttctgactctcggcctagatagccagtttgcttttctggagaccattgtgacagctgtgacagatgagttcccatactacctgcggcccaagaaggcggtgttctcagggctcatctgcg

SEQ ID NO: 13218 - DNA, 120 bp, Artificial Sequence
  ENSG00000011083_13 (sequence is synthesized)
tggccatgtacctgatggggctgatcctcaccactgatgggggcatgtactggctggtccttctggatgactacagcgccagcttcgggctgatggtggtggttatcaccacgtgccttg

SEQ ID NO: 13219 - DNA, 120 bp, Artificial Sequence
  ENSG00000011083_14 (sequence is synthesized)
ccgtgacacgggtgtatggcattcagaggttctgccgagacatccacatgatgctgggcttcaagccgggcctctacttcagggcctgctggctgttcctgtccccagccacgctcttgg

SEQ ID NO: 13220 - DNA, 120 bp, Artificial Sequence
  ENSG00000011083_15 (sequence is synthesized)
gtaccagccctcggagtatggcagttaccgcttcccgccctgggctgagctgctgggcatcctgatgggcctgctgtcctgcctcatgatcccagctggcatgctggtggctgtgcttcg

SEQ ID NO: 13221 - DNA, 120 bp, Artificial Sequence
  ENSG00000011083_16 (sequence is synthesized)
agaagagggctcactctgggagcggctccaacaggccagccggccggccatggactggggaccatcgctggaggagaaccggacgggcatgtatgtggccacgctggctgggagccagtc

SEQ ID NO: 13222 - DNA, 120 bp, Artificial Sequence
  ENSG00000011083_17 (sequence is synthesized)
accaaagccactgatggtgcacatgcgcaagtacgggggcatcaccagcttcgagaacacggccatcgaggtggaccgtgagattgcagaggaggaggagtcgatgatgtgaggcaggag

SEQ ID NO: 13223 - DNA, 120 bp, Artificial Sequence
  ENSG00000011083_18 (sequence is synthesized)
gcaggcgggcagaaggccctgcccgggacctcacagtcccttcttagaagcctgcaaaggtcagctgtgccctctgggattctgagaggctatgggggggcctgccatagggatgccagt

SEQ ID NO: 13224 - DNA, 120 bp, Artificial Sequence
  ENSG00000011083_19 (sequence is synthesized)
cccccagtgggggtcccttctgcagcctctgcctctcctgaaacctctgacaaccccctacacacacacacaggcatactcagacccactcaaagctgagaatgatccaactcagcccta

SEQ ID NO: 13225 - DNA, 120 bp, Artificial Sequence
  ENSG00000011083_20 (sequence is synthesized)
ctttgcggatggacatattaaggccaggaggggagggacttgccccaggtcgcatggcagaggggacttgaacccacgcctcctgaccagccagctccctttcccatggggcagccggca

SEQ ID NO: 13226 - DNA, 120 bp, Artificial Sequence
  ENSG00000011083_21 (sequence is synthesized)
ccaccttctcatctctattcagggcctacacccctccctttttggggggagcctgtccccacacaccttagcacaaccagaatcttgagttgggcagggaaggtcagggctacagaggct

SEQ ID NO: 13227 - DNA, 120 bp, Artificial Sequence
  ENSG00000011083_22 (sequence is synthesized)
cttgaggctccgaggccctggggatcaaaggtcaatgagttaggtggggagaaagatccctgggggctcctgtatgcaggactcctgaaggaggtgggagctgagggccctggaggatgg

SEQ ID NO: 13228 - DNA, 120 bp, Artificial Sequence
  ENSG00000011083_23 (sequence is synthesized)
ggaaggtttgcagagagaggaagaagagggcagggtggggaggagctctgggccagaggatgctgagctgcctgggcagagaccaagagggttggagacactagttttaccaggttacag

SEQ ID NO: 13229 - DNA, 120 bp, Artificial Sequence
  ENSG00000011083_24 (sequence is synthesized)
gagggttcaagacagaaggaaaactaacagagggggagccagggatgatggggtgggcaggggatttgcatgatgaggagtatcattccagatctgtgcagagcggatcggacgggacag

SEQ ID NO: 13230 - DNA, 120 bp, Artificial Sequence
  ENSG00000011083_25 (sequence is synthesized)
ggtggagcggggaggcctgtgcaaagtgggaaagagctgccggtggcctgagccagggtgctggggctgcgggtggggaaaggaggccccagcacttcagacaaagaccaccccttcacc

SEQ ID NO: 13231 - DNA, 120 bp, Artificial Sequence
  ENSG00000011083_26 (sequence is synthesized)
cactggaccccaagccgcaaaagctggggaggtaggaagggtcactgtgagggcccagggcccctctcttcccatctcccttgtcctggtggccttcagtgtctcttccagttccaggag

SEQ ID NO: 13232 - DNA, 120 bp, Artificial Sequence
  ENSG00000011083_27 (sequence is synthesized)
ctgctgggaagctggccttcattgttggtgacagggcaaccatgggactaggaggtggcccatacacatggctggctggtcctgaggccacccaccttgttccaggacatgggcccgggc

SEQ ID NO: 13233 - DNA, 120 bp, Artificial Sequence
  ENSG00000011083_28 (sequence is synthesized)
ccggtgtgggggtagacgcagagggcagagggtagcccttggtactgtgggtccctcaaagaggagagtggggtgcagaaatgcctcagcatggctcatgcacacagcattctcccgtgg

SEQ ID NO: 13234 - DNA, 120 bp, Artificial Sequence
  ENSG00000011083_29 (sequence is synthesized)
ggcagggttccctcatgcaacaggcctccctgtggccagcctctctgcctgtctctcgctgcgtccccccaaccccttgtgttctattggttcattgttaataaatatcaaatgaggtca

SEQ ID NO: 13235 - DNA, 120 bp, Artificial Sequence
  ENSG00000011083_30 (sequence is synthesized)
agggcacatctgctaggggtcttctctatgcaagaatgacagtatctgccacgtacatccggagcacggacaagatgctgtcctgccttcaaggagcacacagttctgcagaaacttgct

SEQ ID NO: 13236 - DNA, 120 bp, Artificial Sequence
  ENSG00000011083_31 (sequence is synthesized)
taggtgacttcaaaccagagatctgtggtgaggaagtgacggtggtggggtgatgacatgggagaattccagcaaaatccacctgggagaaccagcagctccactccacggacagagtgg

SEQ ID NO: 13237 - DNA, 120 bp, Artificial Sequence
  ENSG00000011083_32 (sequence is synthesized)
atctctgcggcacagcaacgcagcgaccccagcctggtccctcagctgtaagacacacacggggtgcttctcagggcatggtgtttcctgcttgggcaacccacccaccctgccgcttta

SEQ ID NO: 13238 - DNA, 120 bp, Artificial Sequence
  ENSG00000011083_33 (sequence is synthesized)
ggggtacagtgagcttttaggtggcctcagccactgtctcctaggcgaccttgggcagaactcattgaaagtggtttatagtaacttggggctgggaggaaggagtttaccctgtcttgt

SEQ ID NO: 13239 - DNA, 120 bp, Artificial Sequence
  ENSG00000011083_34 (sequence is synthesized)
ccttctcatcacccaagcccttccttcctccctctcatccccaggaaggatacccacatggttccctctctaaggctggccaccccacgccctgcacggtgggcagagggagctgcctct

SEQ ID NO: 13240 - DNA, 120 bp, Artificial Sequence
  ENSG00000011105_0 (sequence is synthesized)
gtttccgctggcggcggcggcggcggcggtgccggagcgcgagcagagcggagacccccaggtcctgcgggcgcggaatatcctggaaccttcttttgtttgtcagcagccaaggtgttt

SEQ ID NO: 13241 - DNA, 120 bp, Artificial Sequence
  ENSG00000011105_1 (sequence is synthesized)
ccaggaagttcagagagaacagaatttaagaagtgcaacatggccaggggctgcctctgctgcttgaagtacatgatgttcctcttcaatttgatattctggctctgtggctgtgggctg

SEQ ID NO: 13242 - DNA, 120 bp, Artificial Sequence
  ENSG00000011105_2 (sequence is synthesized)
ctgggagtgggcatctggctctccgtgtcccaaggcaactttgccaccttctcccccagcttcccttcgttgtctgcagccaacctggtcattgccataggcaccattgtcatggtgacg

SEQ ID NO: 13243 - DNA, 120 bp, Artificial Sequence
  ENSG00000011105_3 (sequence is synthesized)
ggcttcctcggctgcctgggggccatcaaggaaaacaagtgcctcctcctcagctttttcatcgtcctgttggtcatcctcctagcagagctgatcttactcatcctcttctttgtctac

SEQ ID NO: 13244 - DNA, 120 bp, Artificial Sequence
  ENSG00000011105_4 (sequence is synthesized)
atggacaaggtgaacgagaacgccaagaaggacctgaaggaaggcctgctgctgtaccacaccgagaacaacgtggggctgaagaacgcctggaacatcatccaggctgagatgcgatgc

SEQ ID NO: 13245 - DNA, 120 bp, Artificial Sequence
  ENSG00000011105_5 (sequence is synthesized)
tgtggtgtcactgactacacagactggtacccagtgctgggggagaacacggttcccgaccgctgctgcatggagaactcccagggctgcgggcgcaacgccaccacgcctttgtggaga

SEQ ID NO: 13246 - DNA, 120 bp, Artificial Sequence
  ENSG00000011105_6 (sequence is synthesized)
acgggctgctatgaaaaggtgaagatgtggttcgatgacaataagcacgtgctgggcacggtggggatgtgcatcctcatcatgcagatcctgggcatggccttctccatgaccctcttc

SEQ ID NO: 13247 - DNA, 120 bp, Artificial Sequence
  ENSG00000011105_7 (sequence is synthesized)
cagcacatccaccggactggtaagaagtacgacgcatgagcgggctggccgggagtgcccaccccgccctgctgccctgtggagggaagaggattgagctttgtgtcacctgcctgcgct

SEQ ID NO: 13248 - DNA, 120 bp, Artificial Sequence
  ENSG00000011105_8 (sequence is synthesized)
ctccagatatgacccctgcacccaccccccacagcctgccctaccccacctaccctgcctcagcctcggacttctcagtgggtggagtgccagggaggaggaggcacacggagacctggg

SEQ ID NO: 13249 - DNA, 120 bp, Artificial Sequence
  ENSG00000011105_9 (sequence is synthesized)
gctcggggcccctggattcctgcatctgcatatgcgtatttgccaaagacgacagggtgggctggggtgcgctccggaggaacccccggcactgatgggcttctgcccctgcccttcctc

SEQ ID NO: 13250 - DNA, 120 bp, Artificial Sequence
  ENSG00000011105_10 (sequence is synthesized)
acactgacactttgtccccacatggggtggggagcagagtgcccgccccgtggagataccgccccagcgggggctgcgacatccatggccaccatggggcacctggcggggcgggggtct

SEQ ID NO: 13251 - DNA, 120 bp, Artificial Sequence
  ENSG00000011105_11 (sequence is synthesized)
gccggcctctgggcaaggcccctggagcatctcgcccaggctttttataccttacaatgtaacttttttattttattttactctatgattattcaggaatattatctctcagataagttt

SEQ ID NO: 13252 - DNA, 120 bp, Artificial Sequence
  ENSG00000011105_12 (sequence is synthesized)
agggttagatttctgatttgtaactttttactgtgttgatttctttaatggtttgactttttttccctgagggtgagggatgggtgggaagagaggacatctgtccagtctcaatcagga

SEQ ID NO: 13253 - DNA, 120 bp, Artificial Sequence
  ENSG00000011105_13 (sequence is synthesized)
cagaccaccgtgcgacacccaggaggctctcggatggggcgcgcctgcgccctcagaacgtgtgggaaggagggggcgtggacaggacacgggaccttgccaggcctggtgtctgaggac

SEQ ID NO: 13254 - DNA, 120 bp, Artificial Sequence
  ENSG00000011105_14 (sequence is synthesized)
aggagcctgggagaggcgggtggagcgtgaagcaggctggaggtgcccctgcacgggaggtggcgtttgctaaccaatcgagctggaaatgccagggcaggggggccccacggtgctgtg

SEQ ID NO: 13255 - DNA, 120 bp, Artificial Sequence
  ENSG00000011105_15 (sequence is synthesized)
gcagagctagaggggtccttagacttttcactgatgagcagttgttggttttttctttctcccttcctcccgctctctgctggcacgcgaggcttccccttccaccccatgtgggtattc

SEQ ID NO: 13256 - DNA, 120 bp, Artificial Sequence
  ENSG00000011105_16 (sequence is synthesized)
ccacaacaggttctgcacaccccagttatttcacagacattcctgctagaaactgtcagacaaatacctctctagttcggatgctgctcactttcccccttgcttctggaaggggaagca

SEQ ID NO: 13257 - DNA, 120 bp, Artificial Sequence
  ENSG00000011105_17 (sequence is synthesized)
gtccttaggttttgctgtgctgggacagtggcaggggacccacaggggtgaggacccacggtcctccccgccagccttgctcagctgtgggttgccctgctgggaaggagggaatcacgt

SEQ ID NO: 13258 - DNA, 120 bp, Artificial Sequence
  ENSG00000011105_18 (sequence is synthesized)
acctgggtcccaagatcttcgcctccttccctggggccacggacatcagcagtgggttgggtggcgattatatcatctgtgatcccaaggagaagaaatacagaaaacccaagagaggtc

SEQ ID NO: 13259 - DNA, 120 bp, Artificial Sequence
  ENSG00000011105_19 (sequence is synthesized)
agactggctcttgttaccggagccacgggaagaaagcagccggagtcacgcacgtgcagagctgggcatgggagagaaacgggctggggagtgaggccaggagtgggattcagctgcagc

SEQ ID NO: 13260 - DNA, 120 bp, Artificial Sequence
  ENSG00000011105_20 (sequence is synthesized)
agggcgccccctccaaactgcagctggtctggcttactgttttgccgttcaaaaaggtcgcgaatccgtgggactgagcacggggacctcacccgctagccagcgtctgctgcacttgat

SEQ ID NO: 13261 - DNA, 120 bp, Artificial Sequence
  ENSG00000011105_21 (sequence is synthesized)
caggtggggccttggtgggcggctgcctttcctatacagtttgtcttgtcaccctggtttcccactggggccaggtctcttctccagcctccacctgcctgtctgatccaagagctgaga

SEQ ID NO: 13262 - DNA, 120 bp, Artificial Sequence
  ENSG00000011105_22 (sequence is synthesized)
cacggccacccagcaccagtcactcctctgttcaccttaagtaacacacaaatcgggaacaggaggacagaaccgttggcattatcaggattcgtgttttgtgggggtgggagtggagag

SEQ ID NO: 13263 - DNA, 120 bp, Artificial Sequence
  ENSG00000011105_23 (sequence is synthesized)
tagggtggtcttgtgagttgtgcagggtgaagaccgcttccctgagacaggggcagtggtgctgatggaatgtgggggaggcccacatttgagcaaagctgccctgcccttgtcccctgg

SEQ ID NO: 13264 - DNA, 120 bp, Artificial Sequence
  ENSG00000011105_24 (sequence is synthesized)
cctggcttcctggtaaggagtttcagccgcctccgcaggaacccccaaagtgcagattccggagcagacacatccgggcggagagactcagcagacaagtgctgcagttgcacggtggga

SEQ ID NO: 13265 - DNA, 120 bp, Artificial Sequence
  ENSG00000011105_25 (sequence is synthesized)
cccggggcctcgtgcgttttttgctgtgggtggggtgggtgggttggtttatgcctatcaatgcaatttttaatttttgttaatatcaacagcaaaagcctagtgcattgggagatgtgc

SEQ ID NO: 13266 - DNA, 120 bp, Artificial Sequence
  ENSG00000011105_26 (sequence is synthesized)
aacctccctgaaaatcttttctgtttctggagtacttcaggggtggcctctggccccagagcctttgccacagtgctcccaccagcccccacctcatccgtctgtttgcagagcctcatc

SEQ ID NO: 13267 - DNA, 120 bp, Artificial Sequence
  ENSG00000011105_27 (sequence is synthesized)
tacaggtccccacgctgccttctttactcactctgcgcttggccgttttgttatttggcttagtctacattgggcggaagtctgtgtgcacagagtgggtgttccttcgagccccttcca

SEQ ID NO: 13268 - DNA, 120 bp, Artificial Sequence
  ENSG00000011105_28 (sequence is synthesized)
ctcagagggccacacccagcgatgccagtgaaggtggcacagcctctcttcagtttctcctgactgtgatctcactggggtagaattcccctgagagaattccctcactcacggctccct

SEQ ID NO: 13269 - DNA, 120 bp, Artificial Sequence
  ENSG00000011105_29 (sequence is synthesized)
ttgccagagtcagttcaatcaggtctgatgtgagcaatttacacacttgtctcagaaagtccctcagggtttgtagaggactgcaggggggcatccgctgcagactcagcctttctctgc

SEQ ID NO: 13270 - DNA, 120 bp, Artificial Sequence
  ENSG00000011105_30 (sequence is synthesized)
agccatcctgcagtgggggtgagcgggcacaggctgagaactgctcttgggtggtggaagcaggtgtcacggtgcaagtctccccctgcacccctcccccagcttgagccgtgtcacccc

SEQ ID NO: 13271 - DNA, 120 bp, Artificial Sequence
  ENSG00000011105_31 (sequence is synthesized)
cctctccctccagcatgggcctgtgtctcaggctctctggaaggtggccctgccccggaccctcttgcaggtgtcctggtttgacttggaactagatggccatctttccaggctttggtg

SEQ ID NO: 13272 - DNA, 120 bp, Artificial Sequence
  ENSG00000011105_32 (sequence is synthesized)
gcccaagagcagtctgggtggatggaagtggctgtcccctcctctccagcccctgcccacccactggtggaggtgctaactagcagggacgtggcataggatgggagctgggcgtgaggt

SEQ ID NO: 13273 - DNA, 120 bp, Artificial Sequence
  ENSG00000011105_33 (sequence is synthesized)
gcttggggtccattctttgtccctcagcttctcagagtccggccagcccttgtgttcccgtgccccacactttcctcctccccactgcagtgagtcaatagtccagggtggggcctggcc

SEQ ID NO: 13274 - DNA, 120 bp, Artificial Sequence
  ENSG00000011105_34 (sequence is synthesized)
tccctgccctgattggggactcaggaggtgaggcctggggggcttcctgccccctccttgcccacctgcctgcccccgggcagcacgggagggagagcagggtgagcacgcttgttggtt

SEQ ID NO: 13275 - DNA, 120 bp, Artificial Sequence
  ENSG00000011105_35 (sequence is synthesized)
tcagatgcactttctgcttgcattgccgtatctgtgcgttccttcatcctggtcctggctttatggaacaccatgtttttagcatgtttttaaataaaaacggataaagtgtcaaaagca

SEQ ID NO: 13276 - DNA, 120 bp, Artificial Sequence
  ENSG00000011105_36 (sequence is synthesized)
ggagacccccaggtcctgcgggcgcggaatatcctggaaccttcttttgtttgtcagcagccaaggtgtttccaggaagttcagagagaacaggtcagtgttggtccgggtccattgtgg

SEQ ID NO: 13277 - DNA, 120 bp, Artificial Sequence
  ENSG00000011105_37 (sequence is synthesized)
ggtagggcctctgaacgtctgtgtgttataacctctgtctgaagtcaaggtctttcttgccctttaactgtgggttgggcaggatagaagaggatgctgacattttctagttgtcgtgcc

SEQ ID NO: 13278 - DNA, 120 bp, Artificial Sequence
  ENSG00000011105_38 (sequence is synthesized)
tagattctttcttggccaccccatttgtgtggaggaagcctagggagaggcctgtaacttcctgcttcctgtctcctcccagcaggcttgggagccagggtggaggggcctcccacaaca

SEQ ID NO: 13279 - DNA, 120 bp, Artificial Sequence
  ENSG00000011105_39 (sequence is synthesized)
ggccagaagagaagatgcaggagtcctggccagtccttagtgtctccattttgctctgcccaccgccctccaccaggacccctacggggccctcttccctgatcctccaggctcctgggg

SEQ ID NO: 13280 - DNA, 120 bp, Artificial Sequence
  ENSG00000011105_40 (sequence is synthesized)
ggggatattagctaactacaagacttaacaaatgaggtgaggctggagtgtgggctcactgtatggccatagcctgactgggcctcagtttacctgctgcgcgtattgtggatgggcccc

SEQ ID NO: 13281 - DNA, 120 bp, Artificial Sequence
  ENSG00000011105_41 (sequence is synthesized)
tggtgacaaagaagatcctgatacagcctgatgacttgaggcttttctctgtgctgggggcctgcaccctttccctcctccggagtcagggcacggcccagaccagatcgccctgtggga

SEQ ID NO: 13282 - DNA, 120 bp, Artificial Sequence
  ENSG00000011105_42 (sequence is synthesized)
gagggaaggaagcacagagaagtgaaagcagtgttggtacacggcggagggtctggaattcatcacagctattcaagcttagcagctgtgcctgccaccgtttccgcagagctctgatat

SEQ ID NO: 13283 - DNA, 120 bp, Artificial Sequence
  ENSG00000011105_43 (sequence is synthesized)
gagagcacgtgtctactcagcactgagagtggtgctcagggctgcctgtggccaggcccaggctgggatattgaagctggagtcaacccccgtgggttcccccagttctgcccaaacctt

SEQ ID NO: 13284 - DNA, 120 bp, Artificial Sequence
  ENSG00000011105_44 (sequence is synthesized)
cgtgcaccagcgccgcaggccatagctggctgggggaaggcttgggctaccctgctgctctgccattgactccctgggaggatctttgacttcagcttctcctcgctctgtggctgtggg

SEQ ID NO: 13285 - DNA, 120 bp, Artificial Sequence
  ENSG00000011105_45 (sequence is synthesized)
ccctccagtccttctccccagacctttcctctggcttgcttgggccgtgggtacctccagccatccccctcctttcgccgcccccttgctcgggtaaaagagaccagcgctttccgttga

SEQ ID NO: 13286 - DNA, 120 bp, Artificial Sequence
  ENSG00000011105_46 (sequence is synthesized)
aggttctggttcacccctcagctgcagagcccttgacatttagcgagtgctcgcggcgcacttgtttaggcacacagcagaacgctaatcccattaaagatagtgtgtcattggggaggg

SEQ ID NO: 13287 - DNA, 120 bp, Artificial Sequence
  ENSG00000011105_47 (sequence is synthesized)
ggtggctccccagcggggccgggaaggcctcgcgcccattggtcgaatgcaaagcagggggcggggccgagggcccggggagggggctccaggcgatttcagagtcgcgagtcggggccg

SEQ ID NO: 13288 - DNA, 120 bp, Artificial Sequence
  ENSG00000011105_48 (sequence is synthesized)
ggatttcgcagggaaagcccagcggttgcagctgcggcggatccctcggcactgtccgccgcgcgccggggcagcccagggccggcggcagctccgcaaagtcgcggaacgagaggaggc

SEQ ID NO: 13289 - DNA, 120 bp, Artificial Sequence
  ENSG00000011105_49 (sequence is synthesized)
ggagcgccggccaagtggtggggctcagcgctggggctgggctgggctgggagaggtgtgcccagggagcctggatcccggtgcccttctccctcgtgtggagcggccagtgcggccaga

SEQ ID NO: 13290 - DNA, 120 bp, Artificial Sequence
  ENSG00000011105_50 (sequence is synthesized)
ggcgagctgacggcctggaaagagaaatcaaattgcagcctccccaaagacgctgagttacgcgggcgagccggttcccggggatcgttcgcgagcgcgcagagagccgcgccgcgccgc

SEQ ID NO: 13291 - DNA, 120 bp, Artificial Sequence
  ENSG00000011105_51 (sequence is synthesized)
gcgcggggttcggccgcgagtgagcccctgtgcagagagggggcgtgcaaggctccgccggcccccccgcagcccgcgcccgacttgggcgccccctccgtcccattctgggagcgatgc

SEQ ID NO: 13292 - DNA, 120 bp, Artificial Sequence
  ENSG00000011105_52 (sequence is synthesized)
ttgggcgccccctccgtcccattctgggagcgatgccccccgctcctcgcaccccccgggaacgccgcgagcatggagaagtcgagtagcgaggattcttcgatccatcggagtccatct

SEQ ID NO: 13293 - DNA, 120 bp, Artificial Sequence
  ENSG00000011105_53 (sequence is synthesized)
ttggacagcaaggactcggactttgccaagccgtccacctccggccgcccgttcggccgcggcttcacggccggcgccttctacggcaccgcgggctcccggggccagagccgcgccgag

SEQ ID NO: 13294 - DNA, 120 bp, Artificial Sequence
  ENSG00000011114_0 (sequence is synthesized)
ctgctccgtctaggagtcaaaatggcggcgaggggaacctggagcagtcccggagcctgagccactgacaggagaggagagggcggcggcggcggcggtgggaggaggatggccgggggt

SEQ ID NO: 13295 - DNA, 120 bp, Artificial Sequence
  ENSG00000011114_1 (sequence is synthesized)
gctggcgccggtgcggacggcggtgctggtggcggcggcggcggaggcgacggcagcggtcccagcggcagcagcagcggcgggaggagcctccgggaaatggatgaaaagaggctgctg

SEQ ID NO: 13296 - DNA, 120 bp, Artificial Sequence
  ENSG00000011114_2 (sequence is synthesized)
gatccagggttgaaggttcataaaggcctctgggattatactctgaagaacccgcagacggaatgcctgagtgactgaagaaaatgggtgctaatgcatctaattatcctcattcatgtt

SEQ ID NO: 13297 - DNA, 120 bp, Artificial Sequence
  ENSG00000011114_3 (sequence is synthesized)
ccccgagggtagggggaaattcacaggcccaacagacttttatagggacctcatcctattctcagcaaggctatggttgcgaatcaaagttgtatagccttgaccatggccatgagaaac

SEQ ID NO: 13298 - DNA, 120 bp, Artificial Sequence
  ENSG00000011114_4 (sequence is synthesized)
cacaagacaaaaaaaagagaacctctggtcttgccaccctcaaaaagaagtttattaagcgtcggaaatctaataggtctgccgatcatgccaagcagatgcgagaactcctctctgggt

SEQ ID NO: 13299 - DNA, 120 bp, Artificial Sequence
  ENSG00000011114_5 (sequence is synthesized)
gggatgttagagatgtcaatgcattagtggaggaatatgagggaacatcagcattaaaggagctttctctacaagccagtttggctagaccagaagcccggacattgcagaaagatatgg

SEQ ID NO: 13300 - DNA, 120 bp, Artificial Sequence
  ENSG00000011114_6 (sequence is synthesized)
ctgatctttatgagtacaagtattgtactgatgtagacttaatatttcaagaaacttgttttcctgttcatcgtgccattttggcagcaaggtgtccattttttaaaacactgctttctt

SEQ ID NO: 13301 - DNA, 120 bp, Artificial Sequence
  ENSG00000011114_7 (sequence is synthesized)
cctcaccagagtatggggcagagataataatggacatcaatacagctggtattgatatgcccatgttttctgctttgttacactacctttatacaggagagtttggaatggaggactcaa

SEQ ID NO: 13302 - DNA, 120 bp, Artificial Sequence
  ENSG00000011114_8 (sequence is synthesized)
ggtttcaaaatgtcgatatccttgttcagcttagtgaagaatttggaacaccaaattcccttgatgtagatatgcgtggactctttgattacatgtgttattatgatgtcgtccttagtt

SEQ ID NO: 13303 - DNA, 120 bp, Artificial Sequence
  ENSG00000011114_9 (sequence is synthesized)
tttcttcagactctgaactggttgaagcttttggtggaaatcagaactgtttagatgaagagctcaaagcccacaaggctgttatttctgcacggtccccattttttcgaaatttattac

SEQ ID NO: 13304 - DNA, 120 bp, Artificial Sequence
  ENSG00000011114_10 (sequence is synthesized)
aaaggaggatacgaactggtgaagaaatcacagaccgaactttgaggactcccacaagaattatattagatgagtccattataccaaaaaaatatgcaacagtgatattacactgtatgt

SEQ ID NO: 13305 - DNA, 120 bp, Artificial Sequence
  ENSG00000011114_11 (sequence is synthesized)
ataccgacgtggtggacctctctgttttgcactgtagcccctctgtggggagtctcagtgaagttcaggctctcgtcgcagggaagccaaacatgaccagggcagaagaagccatggaac

SEQ ID NO: 13306 - DNA, 120 bp, Artificial Sequence
  ENSG00000011114_12 (sequence is synthesized)
tttaccacatagcactgttcttggaatttaacatgcttgcacaaggctgtgaggatatcattgctgagagcatctcattagataccttaattgccatcctcaagtggagttctcatccat

SEQ ID NO: 13307 - DNA, 120 bp, Artificial Sequence
  ENSG00000011114_13 (sequence is synthesized)
atggctctaaatgggtgcaccgacaagctttacatttcctctgtgaggaattttcccaggtcatgacttcggatgttttttatgaactcagcaaagaccatctgcttactgctatccagt

SEQ ID NO: 13308 - DNA, 120 bp, Artificial Sequence
  ENSG00000011114_14 (sequence is synthesized)
ctgactacctacaggcaagtgaacaagatatccttaaatatctgattaaatggggagagcatcagttgatgaaaagaatagcagatagagagccaaacttactgagtggcactgcccata

SEQ ID NO: 13309 - DNA, 120 bp, Artificial Sequence
  ENSG00000011114_15 (sequence is synthesized)
gtgtgaacaaaagaggtgtaaaaagacgggacctggacatggaagagctcagagagatcctttcttctctcttaccttttgtgcgaattgaacacatcttacctataaacagtgaagtct

SEQ ID NO: 13310 - DNA, 120 bp, Artificial Sequence
  ENSG00000011114_16 (sequence is synthesized)
taagtgatgcaatgaaaagaggcttgattagtactcctccatcagatatgcttcctacaacagaaggtgggaagtcaaatgcctggttacggcaaaaaaatgctggcatctatgttcgtc

SEQ ID NO: 13311 - DNA, 120 bp, Artificial Sequence
  ENSG00000011114_17 (sequence is synthesized)
ctcgactcttctctccctatgtggaagaagcaaagtcagtgctagatgagatgatggtggaacaaacggatcttgtgcgcttgcgaatggttagaatgtccaatgtgccagacacgctct

SEQ ID NO: 13312 - DNA, 120 bp, Artificial Sequence
  ENSG00000011114_18 (sequence is synthesized)
acatggtcaataatgccgtgccacagtgttgtcacatgatcagccaccagcagatcagcagcaaccagtcaagccctccttcagttgtagccaacgaaattccagttcctcgtctcctca

SEQ ID NO: 13313 - DNA, 120 bp, Artificial Sequence
  ENSG00000011114_19 (sequence is synthesized)
ttatgaaagacatggtcagacgactgcaggaactgcggcacacggagcaggtgcagagggcctatgccctgaactgcggggaaggcgccactgtcagctatgaaattcagattcgagtgc

SEQ ID NO: 13314 - DNA, 120 bp, Artificial Sequence
  ENSG00000011114_20 (sequence is synthesized)
taagagagtttggtcttgcagatgctgctgcagagctgttgcagaatcctcacaaattctttcctgatgaacgttttggggatgaaagtccactcttgacaatgagacagcctgggagat

SEQ ID NO: 13315 - DNA, 120 bp, Artificial Sequence
  ENSG00000011114_21 (sequence is synthesized)
gtcgcgtaaacagtacacctcctgcagaaaccatgtttacagatctggactcttttgtggccttccatccacccttgccccctccaccacctccctaccaccccccagctaccccaatcc

SEQ ID NO: 13316 - DNA, 120 bp, Artificial Sequence
  ENSG00000011114_22 (sequence is synthesized)
ataaccaactcaaagcaggctggaagcaaagacctcccagtcagcacccttcacgttcattttcttatccctgtaatcattcgctgttccactccagaacagctcctaaagctggccctc

SEQ ID NO: 13317 - DNA, 120 bp, Artificial Sequence
  ENSG00000011114_23 (sequence is synthesized)
ccccagtctacttgccgagtgtgaaagctgcaccgcctgattgtaccagcactgcaggactgggcagacagacggtggctgctgctgccgccaccaccacctcaacagcaacagcagcag

SEQ ID NO: 13318 - DNA, 120 bp, Artificial Sequence
  ENSG00000011114_24 (sequence is synthesized)
cagcagcagcatctgagaagcaagtgcgaacacaacctgtgctgaatgatctgatgccagacatcgcggtgggtgtgtccacactgtcactcaaggacaggaggcttccagagcttgctg

SEQ ID NO: 13319 - DNA, 120 bp, Artificial Sequence
  ENSG00000011114_25 (sequence is synthesized)
tagacacagaattaagccagtcagtttctgaagcaggaccagggcctccccagcatctgtcgtgtattccacagagacatacacacacttctcggaaaaaacacacactagagcaaaaaa

SEQ ID NO: 13320 - DNA, 120 bp, Artificial Sequence
  ENSG00000011114_26 (sequence is synthesized)
cagacaccagagaaaatccacaggaatatccggatttctatgacttctcaaatgctgcttgcagaccttctactcctgctctcagcagacgcaccccttccccttcgcaaggtggatatt

SEQ ID NO: 13321 - DNA, 120 bp, Artificial Sequence
  ENSG00000011114_27 (sequence is synthesized)
ttggtcccgatctgtacagccacaataaggcatcaccaagtggcttaaagtcagcctacctacctggtcagacgtctcctaaaaaacaggaagaagctaggagagaatatccactttccc

SEQ ID NO: 13322 - DNA, 120 bp, Artificial Sequence
  ENSG00000011114_28 (sequence is synthesized)
ctgacgggcatctacacagacaaaagaatgagccgatacacctggatgtcgttgagcaacctccccagcggtcagactttcctttggcagccccagaaaatgctagtaccggtccagccc

SEQ ID NO: 13323 - DNA, 120 bp, Artificial Sequence
  ENSG00000011114_29 (sequence is synthesized)
atgtcaggggacgaactgcagtagaaactgacttgacttttgggctgactcctaacagaccttcactttctgcatgtagctctgaagctcccgaagagagatccggtagaagactggcag

SEQ ID NO: 13324 - DNA, 120 bp, Artificial Sequence
  ENSG00000011114_30 (sequence is synthesized)
acagtgagtccctgggccatggagctcagagaaatacagatttggaaagggaagattcaataagcagaggaaggaggtcaccaagcaagccggacttcctctacaaaaagtctgccctct

SEQ ID NO: 13325 - DNA, 120 bp, Artificial Sequence
  ENSG00000011114_31 (sequence is synthesized)
gagagcaacctccaagtcgtctgtgcctgagatgtgaaacatcccattttatgatgtaacccaacaacttacagaccagttcatcaatgccagctgataactcggtttcacatgattttg

SEQ ID NO: 13326 - DNA, 120 bp, Artificial Sequence
  ENSG00000011114_32 (sequence is synthesized)
ttctagtttttgtgtatatatgtgtttattagacatggcatgctaagaaggttttgttttttttttttaatgttgcatctgtctaatttgtctttgaacaattatgtcgggaggcatttt

SEQ ID NO: 13327 - DNA, 120 bp, Artificial Sequence
  ENSG00000011114_33 (sequence is synthesized)
taagaacaagcaggctggcactttttatttctctttacaaatgatggaatttttttgcacttgtacatttattttctctgtattgattttatatcagtatgttaaactttattgccacat

SEQ ID NO: 13328 - DNA, 120 bp, Artificial Sequence
  ENSG00000011114_34 (sequence is synthesized)
ttaaaggactgtattttcatacttttttgcattttacctttcatctaccaatccatgtgcattggattgcacactaagatgtattttcttacgaaatagttctgtgtttattttttaatt

SEQ ID NO: 13329 - DNA, 120 bp, Artificial Sequence
  ENSG00000011114_35 (sequence is synthesized)
agtaattgttttagttcagagatcttcccgctcagcctccataaatctaatgtcattttttttttaataagtcctaggagctgggcttcattcctccagcgggagtccagtcagggtcct

SEQ ID NO: 13330 - DNA, 120 bp, Artificial Sequence
  ENSG00000011114_36 (sequence is synthesized)
gaagtttgctggttcaggaaagaacaggaaagagaaaagccttctgtgcccaggctaaagctgttacatttccacagtgtggatgcagtcagaatccctgcacattctggtcataaggat

SEQ ID NO: 13331 - DNA, 120 bp, Artificial Sequence
  ENSG00000011114_37 (sequence is synthesized)
tagagtcaccagatgaggctctaaacagatcgcatcccttggaattagaaagcagtggagaccgggcgcagtgactcacacctgtgatcggcacttcggaaggccgaggcgggcagatca

SEQ ID NO: 13332 - DNA, 73 bp, Artificial Sequence
  ENSG00000011114_38 (sequence is synthesized)
gcgggcagatcactgttctataaaaaatacaaaaaaaaaaaaatctagccaggcgtggtggtgcgtgcctgta

SEQ ID NO: 13333 - DNA, 120 bp, Artificial Sequence
  ENSG00000011114_39 (sequence is synthesized)
gtcccagctacttggggggctgaggtggcaggatcgcttgagcctgggaggttgagactgcagtgagccaagattgcaccactgtgctcccacctgggcaacagtgagaccctgtctcaa

SEQ ID NO: 13334 - DNA, 120 bp, Artificial Sequence
  ENSG00000011114_40 (sequence is synthesized)
aggcagtggaaatagagaagtaacttaaaggtcacactgacagaatttctggttctgagcgtcaactctccagctgtgatggcggaactgactgcttgctgcctttaattgtcttgctct

SEQ ID NO: 13335 - DNA, 120 bp, Artificial Sequence
  ENSG00000011114_41 (sequence is synthesized)
ctatgggaaaaaaacaaaagggcttcagtctcatggatgttatttggtgtttgtaaagatacgttttcttttaaacgattttcaaaatatgtctaaattttggtgttgtgtaatgcataa

SEQ ID NO: 13336 - DNA, 120 bp, Artificial Sequence
  ENSG00000011114_42 (sequence is synthesized)
tgctttctcaccaacagaaaaaaggaaaaaaattgttttcagttaaacactacatgtcctacttgaactccactgggacgctggtttggcatttactaaaccactgagcacatggggtct

SEQ ID NO: 13337 - DNA, 120 bp, Artificial Sequence
  ENSG00000011114_43 (sequence is synthesized)
ttcaggatcctctcccttggaagggcaatgtgtgagctaaggactgttttttttcttactctccaatgtaaatatatgagtatttgagtttttaaatcacttcaacattatttgagcatt

SEQ ID NO: 13338 - DNA, 120 bp, Artificial Sequence
  ENSG00000011114_44 (sequence is synthesized)
tactttgtatttttacaaacacataaacacacagccgtagcacttagaagaaaagaggctttctaagcattccttcctctgcaggatatttgggatcctcttttctatgtatgtatatat

SEQ ID NO: 13339 - DNA, 120 bp, Artificial Sequence
  ENSG00000011114_45 (sequence is synthesized)
ataaaaaactatgaatcactcacactcactcgaaaactatgcagggctagggagcgtttatgagctaccgggtaaatgaattacatgcactttgaagtaaataggttttctattgggtgt

SEQ ID NO: 13340 - DNA, 120 bp, Artificial Sequence
  ENSG00000011114_46 (sequence is synthesized)
caacaacgctgatttctcccaaaactatagtttctcttacggtcttttcctcctttaccctgtggatatacactcaggaataatctgacattttagaaaagccgaacagtagatagtctc

SEQ ID NO: 13341 - DNA, 120 bp, Artificial Sequence
  ENSG00000011114_47 (sequence is synthesized)
caagatgggaaacatgtcgtgtgtctgcacgccccggcaaactgccgccactcgttctgctgcctgactggttagctgctgtgcgggtgcgctcggtgacactggtggtggtgcacgctc

SEQ ID NO: 13342 - DNA, 120 bp, Artificial Sequence
  ENSG00000011114_48 (sequence is synthesized)
ccgagctcccagagttaacactaatctgcaggtcggctgtgcatcgcattcgaggctccttttttaaagagaaaagcataggcctctgttctcatttgtaagaagtttgactcataatag

SEQ ID NO: 13343 - DNA, 120 bp, Artificial Sequence
  ENSG00000011114_49 (sequence is synthesized)
aagacggtgtcttttgaagcccagtctctgtctgtcttcagaaacaaaagtgaatgccgtcatgttccttgatgtgtgtttctgccacatatgtatgttgacatgttcatgtactgcgcc

SEQ ID NO: 13344 - DNA, 120 bp, Artificial Sequence
  ENSG00000011114_50 (sequence is synthesized)
ggtactgcaagtaagactcaacagacctaatttggatggggagaaaaactctcatccctgacccttccccccccgcaaatgttagaccagagctgttgatcccacacattcatttttctg

SEQ ID NO: 13345 - DNA, 120 bp, Artificial Sequence
  ENSG00000011114_51 (sequence is synthesized)
aaaattcatgaactattctctcatatccctgaaatataaaagtaagtggccactattcctaagattatttagtttataaagtttgcttttaatcatacaatagcttacctggctaaaact

SEQ ID NO: 13346 - DNA, 120 bp, Artificial Sequence
  ENSG00000011114_52 (sequence is synthesized)
ttgcgtataaagggaaaacttgctttaatctgtgggattgcggaccgatgcgacttgcagaaggtaaacaggcgtgggttttgtgtgcgttaggttaggtgttagtggacttttaatgta

SEQ ID NO: 13347 - DNA, 120 bp, Artificial Sequence
  ENSG00000011114_53 (sequence is synthesized)
tcttgtgaagtatggttactagggtaggttcaagagctacatgcctctggcttttgaacccatctattaaatcttttttaatgctgtactaagataaatgtgaagtctgagtaaggttgc

SEQ ID NO: 13348 - DNA, 120 bp, Artificial Sequence
  ENSG00000011114_54 (sequence is synthesized)
tctcagaaaaaaaaaaaaagcatatatatatataaaataaaatttaggccatgggaactggcattttacttggtataggaatttaatgagaaccaaatcacaaaaataccagatctcctt

SEQ ID NO: 13349 - DNA, 120 bp, Artificial Sequence
  ENSG00000011114_55 (sequence is synthesized)
ttgagatcgtggacaatcaggcctttggacaatcaccgcttccagtgcccgctgtgcgttgaggttagagacctaccgtttacacgctagagccgagaggacgttcaagtttcttaaaga

SEQ ID NO: 13350 - DNA, 120 bp, Artificial Sequence
  ENSG00000011114_56 (sequence is synthesized)
tgctgttggtcttttttcttatgttattgttttagttttgtgattttgatgaataattgaagttcagagtcacccgtggctcctaaggaaaaaacagcatcatgaaaggcaaaaagtatt

SEQ ID NO: 13351 - DNA, 120 bp, Artificial Sequence
  ENSG00000011114_57 (sequence is synthesized)
tgaaacgtaattgtttcaattttccacgcccgttctcacatgccccctttagctttatttctgggaacatgtcactagacctcagctagcctgacaccgcaataacccgttaggctttga

SEQ ID NO: 13352 - DNA, 120 bp, Artificial Sequence
  ENSG00000011114_58 (sequence is synthesized)
ggcttttcagtgaattcttgacatttaaatcttcttatagaattctttatgaagccttaactaattcttgtttttgcttcctcagaaactttttattgcatctgccatccttcattggat

SEQ ID NO: 13353 - DNA, 120 bp, Artificial Sequence
  ENSG00000011114_59 (sequence is synthesized)
ttttgttttggtttgttgttgccattctagcaatgagcttagtccttgtacatctgcattaaggtgccgatgcagaaggcaaattggaaacacgcgccagcggcagtggggctcaaagcc

SEQ ID NO: 13354 - DNA, 120 bp, Artificial Sequence
  ENSG00000011114_60 (sequence is synthesized)
gacctccatgcatcattctctagagttgaaaggattgacatttctcagtaactacccggcaaaatatatattttcataatgttgaatttgccttttaggaaaacaatgtttcatgaaaca

SEQ ID NO: 13355 - DNA, 120 bp, Artificial Sequence
  ENSG00000011114_61 (sequence is synthesized)
cttgtaagatacttattttgaaattaattataaggcattcatatttttaggactgaattcaaagggaaatgcttctttgactttttttcattgttcggttgactttcagctttctggagt

SEQ ID NO: 13356 - DNA, 120 bp, Artificial Sequence
  ENSG00000011114_62 (sequence is synthesized)
gacaaagcagcagtgatgggtgctattcctggttctgtggtggtttactttgtctactaagtgatttactttcaaacctcattacagataatcttactaaaagacttaacatgcacactg

SEQ ID NO: 13357 - DNA, 120 bp, Artificial Sequence
  ENSG00000011114_63 (sequence is synthesized)
ctaaaaggtgttttactgttttccattaacgctgttgtatgaacaatatttggtgacatgttgtctttttgtcctgtagattgtcatatctgttatgtagttatccttttggcaagtcct

SEQ ID NO: 13358 - DNA, 120 bp, Artificial Sequence
  ENSG00000011114_64 (sequence is synthesized)
ttgatttttttttcctctagaaaatcctcagactgtcaatcttccatattttgaatattataatgctgtggccatttctatagaaagattacttgcaagtgtgtgtcttgaaaataacct

SEQ ID NO: 13359 - DNA, 120 bp, Artificial Sequence
  ENSG00000011114_65 (sequence is synthesized)
cttgtatttgtgtgtttatgtgagttctgtctaagagatcagataagctctggaagcttcatcatctgtacctacatgtaactgtatctgggttacatgggcaggcggtaccaagtcctg

SEQ ID NO: 13360 - DNA, 120 bp, Artificial Sequence
  ENSG00000011114_66 (sequence is synthesized)
ctcttcgatggggtggctgagagataaaggttcctgaactctccttgctgtgtatgcaccacatctgtacttcagagaggtggaaaatcatctacaacactgcgtttcttgtggttgtgc

SEQ ID NO: 13361 - DNA, 120 bp, Artificial Sequence
  ENSG00000011114_67 (sequence is synthesized)
tgttactggtataaagtcaagtgccttcaatgctaaaggctcagaaatttttcttaaactgatttcatgtcctatgcaagtgttttctacaacctgcataaccagtactttgtaaaactt

SEQ ID NO: 13362 - DNA, 120 bp, Artificial Sequence
  ENSG00000011114_68 (sequence is synthesized)
gtttacgcttcaattgtacatagtgatttttaaagaaatatatagtatttttatttaggtacctccaaacttgaattcgtctgtgtgaagcattgtaaaacgatacatttctcttttgag

SEQ ID NO: 13363 - DNA, 120 bp, Artificial Sequence
  ENSG00000011114_69 (sequence is synthesized)
taccattacagttgtacagaggttttcactgcttctatttttctactgttactgataagcatgtaacactgactttatcctacatatagttggcatttcaaataaatggcttgtatagaa

SEQ ID NO: 13364 - DNA, 120 bp, Artificial Sequence
  ENSG00000011114_70 (sequence is synthesized)
gatgcagtaagtgtttttctccatgtattcctttcatgaaaagaaaaatgccaggtgtatgtttttattcattgtaaataatttctgctactaatagagtattgtgaagctgtaattctg

SEQ ID NO: 13365 - DNA, 120 bp, Artificial Sequence
  ENSG00000011114_71 (sequence is synthesized)
tgaggacagagacagatgtctattgtgtacgatgttgtatctcctgtgtcttccacataatacagttaaaatgttcagtgaatgagagttgagtgggtaaataggtcttactcatgcaag

SEQ ID NO: 13366 - DNA, 120 bp, Artificial Sequence
  ENSG00000011114_72 (sequence is synthesized)
tagcagagttaattctgtcatttaagtgtagatcaagtagacccttattcaaaaagggaaaggtagaaattacctttgaagagtcttcaagaacagcagtgaatcagagagtagtggagt

SEQ ID NO: 13367 - DNA, 120 bp, Artificial Sequence
  ENSG00000011114_73 (sequence is synthesized)
ggagggattggttgaatagaaaaagaatggatggacctgaaaattaatagagctcatcttgttactttcataattttttaaacagtgaattttttaaaaattaatataattggctgggcg

SEQ ID NO: 13368 - DNA, 120 bp, Artificial Sequence
  ENSG00000011114_74 (sequence is synthesized)
gagactccatctcaaaaaaaaaaaaattaatagaattgcttgaattcatggatgggaaaaataaatattataaatattagttcttcacacattgacttataaacttaatataatgcttat

SEQ ID NO: 13369 - DNA, 120 bp, Artificial Sequence
  ENSG00000011114_75 (sequence is synthesized)
aaacttaatataatgcttataaacatcataatatgttttttctaactgcacaggaacattataaaacattataaaagtcttctggaaaaaaaacaaaacataataataaacgaactatca

SEQ ID NO: 13370 - DNA, 120 bp, Artificial Sequence
  ENSG00000011114_76 (sequence is synthesized)
caagtcaatgtggtgctagattaactgattagcagaagaagaaatttattgaaagttaaaccatcgtttcactggcacacaaaattaatccttgttagactgaagaattaaatactaaat

SEQ ID NO: 13371 - DNA, 120 bp, Artificial Sequence
  ENSG00000011114_77 (sequence is synthesized)
ggaaacatggaagaactagaagaaaacaatattgttttcaagaagtatttatgggctactctgggcatactgcctatggggtagccctgctccacaaggagcagtaataaaaataaataa

SEQ ID NO: 13372 - DNA, 120 bp, Artificial Sequence
  ENSG00000011114_78 (sequence is synthesized)
aaacaaaacttaaaaaaagaaatatttgtggattctgattagaaaaaaaaattcaccctcactaattacacacacaccagagaaagcaaaatgaaacagttaccattttttcacctgtta

SEQ ID NO: 13373 - DNA, 120 bp, Artificial Sequence
  ENSG00000011114_79 (sequence is synthesized)
taccattttttcacctgttaaggtagtagttatagtaccactacacaacagaatattttgctcccctgaacagttgttataaagactgtatagtggccgggcgtggtggctcacacctat

SEQ ID NO: 13374 - DNA, 88 bp, Artificial Sequence
  ENSG00000011114_80 (sequence is synthesized)
aaattagccaggcatggtggtgcatgccgttaatcccagctgctcgaaggcaagtcaagaatgtgtcactgcactccagccttggtga

SEQ ID NO: 13375 - DNA, 120 bp, Artificial Sequence
  ENSG00000011114_81 (sequence is synthesized)
aggagactacagtcatcaggcctgcctgtgcagcagagctttcaaacagctgcttactgcctcaatcttaaatatgaaaacccatccaaggataactggacatttgaggaaagcttccaa

SEQ ID NO: 13376 - DNA, 120 bp, Artificial Sequence
  ENSG00000011114_82 (sequence is synthesized)
attgagacagagatcagagcaaaaagaacaaagtcctggaggaagcagacaatgaagggagcagaagaaaacttcagtagaatcaaaatatccttatataaaagaactttttatggaatc

SEQ ID NO: 13377 - DNA, 120 bp, Artificial Sequence
  ENSG00000011114_83 (sequence is synthesized)
agtgagacataagcaggatgctattaaagtaaaaacaggagcttttagaaataagatagcagaaatgaaagatataatggaagcattgaaaggtacagttgaggaaatctagaaagtaaa

SEQ ID NO: 13378 - DNA, 120 bp, Artificial Sequence
  ENSG00000011114_84 (sequence is synthesized)
taatataataaagagatgagtggagacaaataaaactagagtattcatccagggtctaacatctaacaaatagtggctttagaaatatataccagagaaaagtgaagagaagacagtatc

SEQ ID NO: 13379 - DNA, 120 bp, Artificial Sequence
  ENSG00000011114_85 (sequence is synthesized)
taaggagtaatataagaaatatttccaaaactaaaggaatttctatataaaaagtttctttttcagaacactggggaaaaagagacaattttaaaatgttgcagggaggagaaaaattag

(The sequence listing continues in the following parts.)
